United States Patent Application Publication US 2008/0066201 A1 - sequence listing, part 2

SEQ ID NO: 6825 - DNA, 323 bp, Glycine max
  Clone ID: LIB3074-012-Q1-E1-D6
ggttggtatttgtttttgttgttggctgtgcgatcactcatcgcacctcttctcatcaacgctgcgaaagacaatggagctgacaccccagcagctgagccaatacaacggcacggacccatcgaagccgatctacgtggcggtgaagggccgcgtctacgacgtcaccaccggaaaatccttttacggccccggcggcccctacgccatgttcgccggcaaagacgccagcagagccctggcgaagatgagcaagatcgacgacgacatctccatctccctcgacggcctctccgacaaggagatccgcgttctcaacgact

SEQ ID NO: 6826 - DNA, 426 bp, Glycine max
  Clone ID: LIB3074-012-Q1-E1-D9
ggagcgaagaagatattagggtttttgagtgcggtgcggcgatcctagcactctcttctgcagctttcgccgacagcttcattcaccatggctgagcaaaccgagaaggcttttttgaaacaaccaaaagtgtttctcagctcgaagaaaactgggaagggaaagagacccggaaagggtgggaaccgcttttggaaatccattgggcttggatttaagactcccagggaagccatcgaaggaacctacattgacaggaagtgccccttcactggcaatgtttccatccgtggccgtatcttggctggaacatgtcacagtgctaagatgaacaggactattattgttaggaggaattatctccattttatcaagaagtaccagaggtacgagaaaaggcactccaacattcctgctcatatatca

SEQ ID NO: 6827 - DNA, 393 bp, Glycine max
  unsure at all n locations
  Clone ID: LIB3074-012-Q1-E1-E10
gggttgtgatgtgaatttgagaagcctggtgtttgcagagtctgaagagctgagattggatcacatatactatctgattctagggttaaattttaattcactctactctcttactctctcgctcacgcctcacacgttttctgtctcttgctcactctactcagttcccttcccaatcgccgctcagccatcaccgtcgccactcacggggagactcgccctcctcgaccgacgttccctccacatccttcaacaaagtttccggcgtctgttcgagcatgtgaatcatangaagaagaggcgaatttggtaatttgttgtgtgttcgaaatgggtgaaatttggtggtcccttttgggggcggcgatcccgtggtggtggcggggcaagcgt

SEQ ID NO: 6828 - DNA, 425 bp, Glycine max
  unsure at all n locations
  Clone ID: LIB3074-012-Q1-E1-E11
ggcattggggcatgcttttaatttcctagatctcccaaacaaattgtagcataagtcccatggccaaagagactagtgttgtttatctatatcccagcaaatcacaagtttggggtgagaattttgatcataaaaaacttgtaataacaacactagctgctaatggaaagaaggaggagagtaatggagcacctaatgacacatatcctgcgtttcccgggtggtatgctgatgtttcctggccaggagaagcacacacatataaaatagaaaagattctattccacgggaaatcagaattccaagagcttcttgtatttgagtcttctagacaaggcaaggttgcaattcttgatgggcatatccagctgacagaaaacgatgaatttgcttaccaagagatgctcactcancttgcactctgt

SEQ ID NO: 6829 - DNA, 373 bp, Glycine max
  Clone ID: LIB3074-012-Q1-E1-E2
gaagcaagcacaacacaaccccgaaatggcttctgcttctgttcccatggctttctcgctgagctctgttatcaacaacaacaagccttcatccgaagccttcttcaggccactacccctacggcaaccaaagaggaccctcttcaccacaaaggcagtgtcaaactccaaggctcaaatcaatgcatctttgaaggagaaggcagttgcaggactcacagcagcttctgtgacagcatctatggtggttccggaagtggctcatgctgctggatatgagttctccccttccctcaagaactttctgctaagcatctttgctggtgggtttgttctagtagccatatttggagccgttattggggttcccaac

SEQ ID NO: 6830 - DNA, 361 bp, Glycine max
  Clone ID: LIB3074-012-Q1-E1-E3
ggtagttccaccgagtagcaacaatgtcgaagcgaggtcgcggaggatcggcagggaacaagttccgcatgtcactgggtctgccggtggcggcgacggtgaactgcgccgacaacaccggcgcgaagaatctctacatcatatcagtgaacgggatcaagggaaggctgaaccggttgccgtcagcttgcgtgggtgacatggttatggccaccgtcaataacggaaagcctgatctccgtaaaaaggtgctccccgctgtcatcgtccgtcagcgcaagccgtggggccgaaaggacggtgtttacatgtacttcgaagataatgctggggtcatagtgaatcccaagggtgaaatgaa

SEQ ID NO: 6831 - DNA, 281 bp, Glycine max
  Clone ID: LIB3074-012-Q1-E1-E4
caacggtatcgttgctacagcacgacataaaggtcaggctgcgataataccacagaatggggaccatatcaagtagcagtgacactagatctgtattcagattatattgcaaaactggcatcattcagcatgacagtatctatcattgcctgcacatctgtcaccagactgtccgcaatatctgctcagtggagattattcgtggtgagtgctaccagatttcaacgggataccgtcatttcttacatctatgaaacctctggaatgaagaacttgatgtt

SEQ ID NO: 6832 - DNA, 345 bp, Glycine max
  Clone ID: LIB3074-012-Q1-E1-E5
gagcgaaacagagagtgatttcagtgagcgatcggtgttcacttgatctcatcataatcgtcagcgtcaattgaagaagatgccgatcagaaacatcgccgtcggaaggcctgaagaggcgactcaccccgacacgttgaaggcggctttggctgagttcatctcaaccttcatcttcgtgttcgccggctcaggctccggcatcgcctacaacaagctcaccgacaacggcgctgccacccctgccggcctcatctccgcccccatcgcccatgcattcgccctcttcgtcgccgtctccgtcggcgccaacatctccggcggccaagtcaaccccgccggtca

SEQ ID NO: 6833 - DNA, 408 bp, Glycine max
  Clone ID: LIB3074-012-Q1-E1-E6
gatagcagcatcatacaaagcattgaattcataaacttaagttcattccttgtgttttgctttcttcctcaagaccaaacatgtcgaacacatgcggcaactgcgactgcgctgacaagactagctgcaccaagggaaacagttatggtgttattgtagagactgagaagagttacatcgagactgttgtcatggatgttccagcagctgagcatgatgggaagtgcaagtgtggcactaactgcacttgcacagactgcacctgtggccattaaggaatatgtatgaaaatgtaattgccatgtgtttggcaatacaaatatccacataatgtaatcttcgtatgaataaatgtgtgtgctgttatcctacttcatgtctgtgtagtcatgcggtctgaatcatttc

SEQ ID NO: 6834 - DNA, 407 bp, Glycine max
  Clone ID: LIB3074-012-Q1-E1-E7
gaaggtgcaagagtttgttgtgagctataagctagtttatcgtgaggagaatatgaagttgtttgttttctttgttgctgcagtagttttggtagcatggccatgccatggcgcaggctaccaaaggttccctctccgaatgaaaactggctatggtgagcgttcttcggaggtaaaatgcgcaagttttaggcttgctgtggaagcacacaacatccgagcctttaaaaccattcctgaagagtgcgttgaaccaacaaaggactacattaatggcgaacaatttagatcagactctaaaacagttaaccaacaagctttcttttatgctagtgaacgcgaagtccatcacaacgacatatttatattcggcatagataacaccgtactctctaatgtcccatact

SEQ ID NO: 6835 - DNA, 391 bp, Glycine max
  Clone ID: LIB3074-012-Q1-E1-E8
gattctgtggaggagcttcttgggttggttctctgagtttttacctcctctgggtctgatccaaaaaggcttaattttctttgttccgaggaaaaaattctgcttttgaatttgttggttttcaagcttggtgtagaaggaaatggcacaacgttctcatgtacccaaatttggcaattgggatagtggagagaatgttccttatacagcatattttgacaaggcgcggaaaggtcgaactggggcaaggataataaatccaaatgaccctgaggaaaatgctgatttaagtctggataatccatcatctgatcacctacctcctaccagacccagagctaattcagaggatcaatccggaaaaggatcattgcctttggaagatgatcct

SEQ ID NO: 6836 - DNA, 315 bp, Glycine max
  Clone ID: LIB3074-012-Q1-E1-E9
aagctttggaggttctgggctcaagaaaagtggaaagaaataagggctctttatcatgattgtatgcattcaatattgagccctgtaattacagttgctaccatgataacttctcttattattgtggcctactttattgctaatgtgtactgaactgaggtatgtcgtgatgtaagctgcaataagttaattgtctgtagctttattgtatccccttcatggggttctgataattacatccttttagtagtgttgtggatttggcatagacttgttcaagtaaataatggcatggcttgcgaaattttatttgcc

SEQ ID NO: 6837 - DNA, 414 bp, Glycine max
  Clone ID: LIB3074-012-Q1-E1-F1
gaaggtgcaagagtttgttgtgagctataagctagtttatcgtgaggagaatatgaagttgtttgttttctttgttgctgcagtagttttggtagcatggccatgccatggcgcaggctaccaaaggttccctctccgaatgaaaactggctatggtgagcgttcttcggaggtaaaatgcgcaagttttaggcttgctgtggaagcacacaacatccgagcctttaaaaccattcctgaagagtgcgttgaaccaacaaaggactacattaatggcgaacaatttagattagactctaaaacagttaaccaacaagctttcttttatgctagtgaacgcgaagtccttcacaacgacatatttatattcggcatagataacaccgtactccctaatatcccatactatgaaaa

SEQ ID NO: 6838 - DNA, 411 bp, Glycine max
  Clone ID: LIB3074-012-Q1-E1-D5
gaaccaagtttgcttgcgtgtatattcattttagcatcaaggttgaatctcagagaaaaacaaacatcgacaagcatgtctggaagaggaaagggaggcaagggtctcggaaagggaggagccaaacgacaccgtaaggttctgagggataacattcagggaatcaccaagcccgcgattcgccgtctggccagacgtggtggcgtcaagcgtatcagtggtcttatctatgaagaaactcgcggtgttctcaagatctttctagagaacgtcattcgcgacgctgtcacctacactgaacacgctcgccgcaagaccgtcactgccatggacgttgtttacgccctcaagaggcaagggaggaccctttacggattcggcggttagacaattggggatttcctgactgcg

SEQ ID NO: 6839 - DNA, 394 bp, Glycine max
  Clone ID: LIB3074-012-Q1-E1-F11
ggcacaagtgagtttgttgatcgagataactagaaacagtgtgatgaaaatgaaggtccttgttttcttcgttgctacaattttggtagcatggcaatgccatgcgtacgatatgttccctctccgaatgaacactggctatggtgcccgtactccggaggtgaaatgcgcaagttggaggcttgctgtggaagcacacaacatctttggctttgagaccattcctgaagagtgcgttgaagcaacaaaggaatacatccatggcgaacaatatagatcagactccaaaacagttaaccaacaagcttacttttatgccagagacctcgaagtccatcccaaggacacatttgtgttcagtatagatggcaccgtactctctaatattcatact

SEQ ID NO: 6840 - DNA, 57 bp, Glycine max; identical to SEQ ID NO: 5474
  Clone ID: LIB3074-012-Q1-E1-F12

SEQ ID NO: 6841 - DNA, 346 bp, Glycine max
  Clone ID: LIB3074-012-Q1-E1-B7
gagcttcaatgagtcagtatcactggcttccgaataatcccacttcaggccccccagcgagcagtccactatgcgaactcatcacgagcgcgaagctggtggcggaggctgcgcagtctgctctgacgagtcacagcgacaaagtggacaaggccaaggtggctgacgctggcggcgatcttctcgacgcggcggggaactatggagaacttgatgacacacctcgcataggtgaatatgttgccaaggctgctgattagccgcagttttaccagcgtgacaatatcagtgctccttacagagctgcagtgtctagaggtgatttgcgtcgtggtgagttacgtgg

SEQ ID NO: 6842 - DNA, 429 bp, Glycine max
  Clone ID: LIB3074-012-Q1-E1-B9
ggtgcaattgtgtgaggaaatatctctcacgagtttgtataaggagagaagcggacatgaagaagcaattagcatcaaggcgcttgctgatgtgggttatggtacatttgagcatttcaggagtgttgtccaagtccaaccacaccacaactacaacttctctgctgtgcgatggctccgtagaggactgcctcaacgttcaccacttggactcacagcttcccaccatctccagcacccacttccgcagaatcctcgctggagaaaaatgttgcagaggtaacactcagactgcaggtacaggtgatcccaataatcccaacttctgttcgaccgcaaccggttatcgtaagtgtggggccgcaactgatcctggtcaacccaaccgatgtgctgatccaaatgccttcccacagggttggcatattt

SEQ ID NO: 6843 - DNA, 57 bp, Glycine max; identical to SEQ ID NO: 2079
  Clone ID: LIB3074-012-Q1-E1-C10

SEQ ID NO: 6844 - DNA, 406 bp, Glycine max
  Clone ID: LIB3074-012-Q1-E1-C2
ggcacaagtgagtttgttgatcgagataactagaaacagtgtgatgaaaatgaaggtccttgttttcttcgttgctacaatttttggtagcatggcaatgccatgcgtacgatatgttccctctccgaatgaacactggctatggtgcccgtactccggaggtgaaatgcgcaagttggaggcttgctgtggaagcacacaacatctttggctttgagaccattcctgaagagtgcgttgaagcaacaaaggaatacatccatggcgaacaatatagatcagactccaaaacagttaaccaacaagcttacttctatgccagagacctcgaagtccatcccaaggacacatttgtgttcagtatagatggcaccgtactctctaatattccatactacaaaaaaca

SEQ ID NO: 6845 - DNA, 410 bp, Glycine max
  Clone ID: LIB3074-012-Q1-E1-C4
gacacacatttactcactcactgtgagagcggcgaagaagaagaagaacaataatgaaggacgccggaaggagccacaaggcgaatgcaaagctgtcgccggagacgcggaaggatcggaaatcggcgacggggctgagtggatcgccgaagaagggaggccacggcgggaagttcacgtggatcggcaacggctacgagaacgtcgagatggagcacggtgctatggacgccaaggacccgaacttcgaggatccagcggagatcgccgccgtgtgatcgcggtggtttccggtgacgagatctgtacatactaataattgctaagagacgcggttttcgaattcaataatatgaagcaagtaagagaagaagcgctttctgtgattgattgttatagatctgatctgt

SEQ ID NO: 6846 - DNA, 361 bp, Glycine max
  Clone ID: LIB3074-012-Q1-E1-C5
ggattctctccctttttctctcgcgaaaaccgtatcggcaatgtctggagaatcagccagcgctattcacaagggtcaagtcgatctcttagacttcattgactggtctggggttgaatgcctcaatcaaagctccacccactctctccccaatgctatcaaacagggttatagagaagacgatggtttgcatctggagagtgatgcagacgagcagcttttgctctatattcctttcactcaagtcgttaaactttattcctttgttatcaaaggtcctgaagaagaaggccccaagacagtgaagctcttttctaacaaggagcacatgggatttagtaatgtcaatgattttccccca

SEQ ID NO: 6847 - DNA, 299 bp, Glycine max
  Clone ID: LIB3074-012-Q1-E1-C6
gataccaggggcatcacacacgccatgtgacagtgagaaagtataagaatcagagagcataatgtcagggatcattcacaagattggggatacccttcatgtgggacggtacatgaacgaggatgagcataacggtgagcaccatgctggagactataaacgggagcaccatggtgaacacagtagtgagtacataggagagcatcatggagaacacaaagctagaaagtaccatgctgagcacaattcagaccactcagatgggttcctacacttagtcaacgacgacatccatggtg

SEQ ID NO: 6848 - DNA, 325 bp, Glycine max
  Clone ID: LIB3074-012-Q1-E1-C7
gatccacacgctcacaataacacactgtcaccgttccgttccgttttcctctgttttattttcttctttctttcaaatccccgcttcgtggaaatcccgaaccaaaaaccatgcttctccgaaccgctgctgcttctgcttcgtccctctccctcttcagccagaacgccgaacctcaccgttcggttcccgctcgtggattggtggttcgcgcagcgaaaggatccacgaaccatcagcgccctgaacggagtgatttttgaatcgttcgaagaggtgaagaaggaatccaatcccgattcccaccggttccgcaaagcttctc

SEQ ID NO: 6849 - DNA, 257 bp, Glycine max
  Clone ID: LIB3074-012-Q1-E1-C8
gacgctgagcgacctttctcctcagtccacataaaccaaatgtcagacaagtgccaccagttcatcacgagagaaacgactacctgagccgaaatcattatataacaagaatttaatactaatacatcatactaacacaatataggtagaactgtcgtatcatatagacatctcttcagcatagcatcggtcatcgagaagatcacgaccacacaccgacacatgaaatccgggatccttcataatatggacaccga

SEQ ID NO: 6850 - DNA, 422 bp, Glycine max
  Clone ID: LIB3074-012-Q1-E1-C9
gcagtctctacctcaaaccactccagaaaaaatggcggtgcctcttctctcgaagaagatcgtgaagaagaggctgaagaagttcaagaggcctcaaagtgacaggaagatttctgtgaagacaaactggcgcagaccaaagggtatcgattcccgtgttaggagaaagttcaagggatgcactttgatgccgaacattggttatgcttcagacaagaagacccgccactatctcccgaatggtttcaagaaatttgttgttcacaatgtgaaggatttggaactgctcatgatgcacaacaggacttactgtgctgagattgcccacaatatatccacaagaaagagaaaagatatagtcgagagagccgcgcagcttgatgttgttgtgacaaataatacggccagattacgtagccagg

SEQ ID NO: 6851 - DNA, 379 bp, Glycine max
  Clone ID: LIB3074-012-Q1-E1-D1
ggtgtgtggcatcagaaaatgaacagtttatcaatggcacttctccacccaaatcttcttcccactttcaattccaacactcttacctttccttccatcaaactcaaaccctcactctcgcacgtgccttctccaacccccacacgcttcagtctctctgtttccgcggcggaaaccaccgcttttgccgcccctcccactccccaacctgagaagcttggagttgtagttaagccaacggagaagccgagacttgtgttgaagttcaaatggatggagaagaacattggaattgcgcttgaccagatggtaccgggccatggcaccattcctctgaacccataatactttttgccccaaaagaatcctgggaaaaact

SEQ ID NO: 6852 - DNA, 430 bp, Glycine max
  Clone ID: LIB3074-012-Q1-E1-D11
gaaaagaaaagagaaatggcaacagaaacaaaagtgcaagaattaggtggcatcaccgatgtgcatggagctgccaacagcgtcgagatcaacaatctcgctcgctttgctgtagaggaacaaaacacaagagagaattcagttctggagtttgtgagggtgattagtgcaaagcagcaagtggttgctggagtgaattactacataacattggaagcaaaagatggtttgattaaaaatgagtatgaagcggaggtttgggtgagggaatggttgaactccaaagagttgctagaattcaagccagtcaatgtttctagcacaccaataggtggcattaccgatgtgaccgcgaatagcctcgagatcgacattctcgctcgttttgctgttgatcaacacaacaaaaaagagaatgcaaatctggagt

SEQ ID NO: 6853 - DNA, 428 bp, Glycine max
  Clone ID: LIB3074-012-Q1-E1-D12
gattcggagctgggtttgttttcggcctttgatcttcgattctctctctttttctctcgcgaaaaccgtatcagcaatgtctggagaatcagccagcgctattcacaagggtcaagtcgatctcttagacttcattgactggtctggggttgaatgcctcaatcaaagctccacccactctctccccaatgctatcaaacagggttatagagaagacgatggtttgcatctggagagtgatgcagacgagcagcttttgctctatattcctttcactcaagtcgttaaactttattcctttgttatcaaaggtcctgaagaagaaggcccaagacagtgaagctcttttctaacaaggagcacatgggatttagtaatgtcaatgattttcccccaagtgatgtggcaaatttgtctgaagaaaaact

SEQ ID NO: 6854 - DNA, 81 bp, Glycine max
  Clone ID: LIB3074-012-Q1-E1-B6
gagcttcaatgggtcggtatcacgggcttcggaataatctcacaacagtcctctcagcgtagcagtccactatgcgatact

SEQ ID NO: 6855 - DNA, 382 bp, Glycine max
  Clone ID: LIB3074-012-Q1-E1-D2
gattgggtgctgatcggaacaaacagggaatagaagagaggagaagatgggtttcataatggaatttgcggagaacttggtattaaagttgatggaagatccgaaggaaagggatcggaggttcagggagcacgtttatagagtgaaggacaggtgcgagaagacgaaggagatgtggagctaccctatgcgaccctatgggttttggacattcgaacgccacaattctcagcttgcttgggatgcacagattagccaagtggccgggaggagggacccttatgatgatctcctccaacatttctctaacccacctaagtgagtgttgctgaacttgccacaagcattatcggtgaaaaagatgaatttgtcgtaatttccc

SEQ ID NO: 6856 - DNA, 418 bp, Glycine max
  Clone ID: LIB3074-012-Q1-E1-D3
gacaaatctttcgctaacactcattaattgcaagaatggcacttcgttgcttggtgatgtccctttctgttctcttcactcttggtcttgcgagagaaagccatgccagagacgaagatttttggcatgctgtttggccaaacactcccattccaagttcattgcgagatcttctaaagcctggccctgcaagtgttgaaatcgatgatcaccctatgcaaattgaagaaacacagtacccgaaaaccttcttctataaagaagaccttcatccaggcaaaacaatgaaagtacaattcagcaagcctccctttcaacaaccatggggtgttggtacatggttaaaggaaatttaagacactactaaagaaagatatagttttgaacgagctatgcatcaagaaagaagccattgagg

SEQ ID NO: 6857 - DNA, 397 bp, Glycine max
  Clone ID: LIB3074-011-Q1-E1-H9
ggcacaagtgagtttgttgatcgagataactagaaacagtgtgatgaaaatgaaggtccttgttttcttcgttgctacaattttggtagcatggcaatgccatgcgcacgatatgttccctctccgaatgaacactggctatggtgcccgtactccggaggtgaaatgcgcaagttggaggcttgctgtggaagcacacaacatctttggctttgagaccattcctgaagagtgcgttgaagcaacaaaggaatacatccatggcgaacaatatagatcagactccaaaacagttaaccaacaagcttacttttatgccagagacctcgaagtccatcccaaggacacatttgtgttcagtatagatggcaccgtactctctaatattccatactac

SEQ ID NO: 6858 - DNA, 396 bp, Glycine max
  Clone ID: LIB3074-012-Q1-E1-A11
ggcacaagtgagtttgttgatcgagataactagaaacagtgtgatgaaaatgaaggtccttgttttcttcgttgctacaattttggtagcatggcaatgccatgcgtacgatatgttccctctccgaatgaacactggctatggtgcccgtactccggaggtgaaatgcgcaagttggaggcttgctgtggaagcacacaacatctttggctttgagaccattcctgaagagtgcgttgaagcaacaaaggaatacatccatggcgaacaatatagatcagactccaaaacagttaaccaacaagcttacttttatgccagagacctcgaagtccatcccaaggacacatttgtgttcagtatagatgggaacgtactctctaatattccatacta

SEQ ID NO: 6859 - DNA, 416 bp, Glycine max
  unsure at all n locations
  Clone ID: LIB3074-012-Q1-E1-A2
gaaggcgangcaagggttttcactttttcagaaaagtcgaacggcgagcgtagtcgcaagagacgcaacagaatagaacgacgaataggcgtgcagggaaaccatttcattttcgagcgcgtcgctttcgaatccaatggccttcaacaacgcactgagatctgccgcgaagctcgtcgcttcatccgaatcttccttctctaactcagtgagcagaggttttcattcaactggcatgaagaggatgggaggtggacatggtcatgatgagccctactatcttcatgcaaagcacatgtacaacttggacaagatgaagcaccaggggttgaaaatgtcccttgctgtgttcactgctttcagcattggtgttgcagttcctgtgtatgctgtcattttccagcaaaagaaaacag

SEQ ID NO: 6860 - DNA, 414 bp, Glycine max
  Clone ID: LIB3074-012-Q1-E1-A3
gaaggtgcaagagtttgttgtgagctataagctagtttatcgtgaggagaatatgaagttgtttgttttctttgttgctgcagtagttttggtagcatggccatgccatggcgcaggctaccaaaggttccctctccgaatgaaaactggctatggtgagcgttcttcggaggtaaaatgcgcaagttttaggcttgctgtggaagcacacaacatccgagcctttaaaaccattcctgaagagtgcgttgaaccaacaaaggactacattaatggcgaacaatttagattagactctaaaacagtttaacaacaagctttcttttatgctagtgaacgccaagttcatcacaacgacatatttatattccgcatagattacaccggtatctctaatatcccatactatgaaaa

SEQ ID NO: 6861 - DNA, 411 bp, Glycine max
  unsure at all n locations
  Clone ID: LIB3074-012-Q1-E1-A4
ggtgcacaagtgagtttgttgatcgagataactagaaacagtgtgatgaaaatgaaggtccttgttttcttcgttgctacaattttggtagcatggcaatgccatgcgtacgatatgttccctctccgaatgaacactggctatggtgcccgtactccggaggtgaaatgcgcaagttggaggcttgctgtggaagcacacaacatctttggctttgagaccattcctgaagagtgcgttgaagcaacaaaggaatacatccatggcgaacaatatagatcagactccanaacagttaaccaacaagcttacttttatgccagagacctcgaagtccatcccaaggacacatttgtgttcagtatagatggcaccgtactctctaatatttcatactacaaaaaacatgga

SEQ ID NO: 6862 - DNA, 386 bp, Glycine max
  Clone ID: LIB3074-012-Q1-E1-A5
gaaggtgcaagagtttgttgtgagctgtaagctagtttatcgtgaggagaatatgaagttgtttgttttctttgttgctgcagtagttttggtagcatggccatgccatggcgcaggctaccaaaggttccctctccgaatgaaaactggctatggtgagcgttcttcggaggtaaaatgcgcaagttttaggcttgctgtggaagcacacaacatccgagcctttaaaaccattcctgaagagtgcgttgaaccaacaaaggactacattaatggcgaacaatttagatcagactctaaaacagttaaccaacaagctttcttttatgctagtgaacgcgaagtccatcacaacgacatatttatattcggcatagataacaccg

SEQ ID NO: 6863 - DNA, 286 bp, Glycine max
  Clone ID: LIB3074-012-Q1-E1-A6
tggtactgctccgtcaacacgatacgacaatgtggttgcgatcctcctagacactggtatggctgctacaggacgacagatggcgttgaacggcctcaattctgctgcggtcgctctcaggggtctaaacttcagtatgcgtgcatcacacgttgtaacttgtcgaatctgtaacccctattcgattcacaggtcgtcgatgtacactaccatcatcgttagcatgctgtggtatcgcagcataatcccgcgtgcaacacccttccttatcgagtgcgattattca

SEQ ID NO: 6864 - DNA, 411 bp, Glycine max
  Clone ID: LIB3074-012-Q1-E1-A7
ggctctcacacctgtgattattcctcttttaacaatccacacccaaattctagggttccgaaatggacgctggcggaaagatcaagaagggcgccggaggtagaaagggcggcggcccaaagaagaagccggtttcaaggtccgtcaaagccggtctccaattccccgtcggaagaattggccgttatttgaagaaaggaaggtacgctcagcgtgtcggtaccggtgctcccgtatacttggctgcagttctcgaatacctagctgccgaggtgcttgagttggctgggaatgccgcacgtgacaacaagaagaacaggattattccaagacacgtgcttttggcagtgaggaacgatgaggagttggggaaattgcttgctggagtgacaattgcacatggtggcgtgc

SEQ ID NO: 6865 - DNA, 395 bp, Glycine max
  Clone ID: LIB3074-012-Q1-E1-A8
ggtgcacaagtgagtttgttgatcgagataactagaaacagtgtgatgaaaatgaaggtccttgttttcttcgttgctacaattttggtaacatggcaatgccatacgtacgatatgttccctctccgaatgaacactggctatggtgcccgtactccggaggtgaaatgcgcaagttggaagcttgctgtggaagcacacaacatctttggctttgagaccattcctgaagagtgcgttgaagcaacaaaggaatacatccatggcgaacaatatagatcagactccaaaacagttaaccaacaagcttacttttatgccagagacctcgaagtccatcccaaggacacatttgtgttcagtatagatggcaccgtactctctaatattccata

SEQ ID NO: 6866 - DNA, 408 bp, Glycine max
  Clone ID: LIB3074-012-Q1-E1-B10
gacagcagtaaagtgagttaaaagaaccgataatagttgttccttcactctccgctctctctgccactgagccaagaagatggcctcacaggtttgcaaatctgcttccagagccgcgaggtcccttctatcctctcgttttcactctcaaggacgtgcgcttggggctgctgcggctgtttcattgagcagcaaagtgcctcttttttacggaaagaacggttctggaaatggatccgcttcttcatcatcatcatcatcatggatttcaggagctcttgctcttcctgccgcagcttacatgttccaagatcaggacgtgcacgcagctgagctggagcgcactttcattgccattaagcctgatggagtgcagagaggcctgatttctgagattatatctcgttt

SEQ ID NO: 6867 - DNA, 391 bp, Glycine max
  Clone ID: LIB3074-012-Q1-E1-B11
ggtcgcatatcaatcaaatcgtgcgagctagagagctgggttctgcgatctccttttccatcatcgtcatcatcttcatctcactggctatgccatgctcgccctttcgagaggcctcgtttctcgtctgcaacgtgtcgccgtcgattcgcagttgtcgctccgatttctgagctccgatgcggcggcgattcggtctcggataattgaaccgaagcccagtgcgatgacccctaattccaagcgaactgggcttattgcggtgaagtgtggaatgagcgcgctatgggataaatggggtgctagaattccaattactgtgctttgggtggatgataacattgtgtctcagattaagaccccagagaaagaaggtttctgtgctctccag

SEQ ID NO: 6868 - DNA, 414 bp, Glycine max
  unsure at all n locations
  Clone ID: LIB3074-012-Q1-E1-B2
gaaagaggctcatacaaaggttgctgtangagataagattgcagtagtgctaagtgctaacacctgcagtgaacaatggcctctgcatcagcatctctgctcaagtcttcacttgttcttgacaagtctgagtgggtgaagggacaaacccttcgccaaccttctgcatcagttgtgagatgcaaccccaccaccccatcaggcctcaccatcagagctggttcctatgctgatgagctcgttaagaccgcgaaaacagtggcttcaccagggaggggtattttggccatggatgagtccaatgctacctgtgggaagcgtttggcttcaattgggctagagaacactgaagctaaccgccgggcataccgtaccctcctcgtgacagttccaggccttggtcagtacatctct

SEQ ID NO: 6869 - DNA, 347 bp, Glycine max
  Clone ID: LIB3074-012-Q1-E1-B3
gactccgcagctgcagagctcaaaaccctagagaggaggaagagagagcgtgcaagttccggccaccaccgaccatgacattcaagcgcaggaatggaggtcgcaacaaacacggccgcggccacgtcaaattcatccggtgctccaactgtggcaaatgctgtcccaaggacaaggccatcaagaggtttctggtgaggaacattgttgaacaggctgcagtcagagatgtgcaggaagcttgtgtctatgaacaatatactcttccgaaactctatgtgaagatgcagtactgtgtttcctgtgctatccactcccatgttgtgaaggttcgatcccgcactgac

SEQ ID NO: 6870 - DNA, 413 bp, Glycine max
  Clone ID: LIB3074-012-Q1-E1-B4
ggacattgtgttgatccgagacagaaaaaggggttagggtttgttcttgtgatcgaagctaagcgaagcaaaatgggtggatcagtgagggacgtgaagtcgaagggcgaggtcgacgaggtggtggcgagtggctctccggttatcctccacttctgggcgtcgtggtgcgaagcttccaagcacatggaccaactcttctctcacctttccactgatttccccaacgcccgcttcttaagggtcgaggccgaagagcaacccgagatttctgaggcttactccgtctccgctgttcctttctttgccttctgcaaggatgggaagacctttgatacattggagggagctgattcgtcaagcttagccaataaggttgttaaagtagcaggctcaattaaccctggagaatc

SEQ ID NO: 6871 - DNA, 398 bp, Glycine max
  unsure at all n locations
  Clone ID: LIB3074-012-Q1-E1-B5
gactacaaatcagttttttacttgaattttcttcatccttctctgttctcctagaacttgattacttgaacattccctatgacagatgaggtggttcttctggatttctggccaagtccatttgggatgagggtcaggattgcacttgctgaaaagggtatcgaatatgagtacaaagaagaggacttgaggaacaagagtcctcttctcttacaaatgaacccggttcacaagaagattccggttctcatccacaatggcaaacccatttccgaatccctcattgctgttcagtacattgaggaggtttggaatgacagaaatcccttgttgccttcagacccttaccagagagctcaagctanattctgggctgattatgttgacattaagataca

SEQ ID NO: 6872 - DNA, 312 bp, Glycine max
  Clone ID: LIB3074-011-Q1-E1-H8
gatctggcagcagaaaaacaagtagttgagaactaagaagaaggaaatggcttcctcaatgatctcctccccagctgttaccaccgtcaaccgtgccggtgccggcatggttgctccattcaccggcctcaaatccatggctggcttccccacgaggaagaccaacaatgacattacctccattgctagcaacggtggaagagtacaatgcatgcaggtgtggccaccaattggcaagaagaagttcgagactctttcctacttgccagacctcgatgatgcccaattggcaaaggaagtcgaataccttct

SEQ ID NO: 6873 - DNA, 390 bp, Glycine max
  Clone ID: LIB3074-011-Q1-E1-F5
gacagaaattaacaaccatatctattcttacaagttacatccattgagaaacatgaaggtctcccccttagcattttcaatcctttttttgtccttcaccatagaactcttcattggcattgcttcagcagcacaagaaccagtgcttgacacctcaggccggaagctgagaacaggtgtcaagtactacattctaccagtcttcagaggcagaggtggaggcctaacagtttcaagcagtggcaacaacacatgccccctctttgtggtgcaagagaagcttgaagtctcaaagggcaccccagttaccttcacaccctacaatgccgaaagtggtgtcattctaacctcaaacgatctcaacatcaagtcctatgtgaaaagcaacac

SEQ ID NO: 6874 - DNA, 53 bp, Glycine max
  Clone ID: LIB3074-011-Q1-E1-F6
gaggcctcaggtcaggcggggctacccgctgagtttaagcatatcaataagcc

SEQ ID NO: 6875 - DNA, 404 bp, Glycine max
  Clone ID: LIB3074-011-Q1-E1-F7
ggcacaagtgagtttgttgatcgagataactagaaacagtgtgatgaaaatgaaggtccttgttttcttcgttgctacaattttggtagcatggcaatgccatgcgtacgatatgttccctctccgaatgaacactggctatggtgcccgtactccggaggtgaaatgcgcaagttggaggcttgctgtggaagcacacaacatctttggctttgagaccattcctgaagagtgcgttgaagcaacaaaggaatacatccatggcgaacaatatagatcagactccaaaacagttaaccaacaagcttacttttatgccagagacctcgaagtcatctcgaagacacaattgtgttcagtataaatggcaccgtactctctaatattccaaactacaaaaacat

SEQ ID NO: 6876 - DNA, 319 bp, Glycine max
  Clone ID: LIB3074-011-Q1-E1-F8
gaagaagaaggagcatggccatgagcatggccatgacagcagcagcagcagtgacagtgattaaactgctgcatcacctatatatttaaaaggtttatgggaccatagtagcgagggctgtgccttaatttctctctctctctctctctctctctctctttctctctctttttcctttttccctatcttgtgatctatttatgagtgagaaaaacaaaagtgagaaattgtgcgtgtatctggttgctaattcgagtgctattactctgtggtttggttggtttgtaaccccgctacttgggttaagtatgattgtata

SEQ ID NO: 6877 - DNA, 390 bp, Glycine max
  Clone ID: LIB3074-011-Q1-E1-G1
gacgaagggggggccttcactctgaaccaaataccatagtcttctctttgtccgtgacaaaacagttcccacaaaacaaagaaaaaagaaaaaagaaaagcactaaaaaaaaatgaagaagggtttctcccttgtgctgctgattcttctgatccagtacaacaacgttgtcaacgcctacaacaacaaaaactgtgtcacagaggattgcctcatcggcaacaaggatttggaatcagagttctactttggatcccatgtggccagaatgctctacgatgtgagccaatctgtgagtggcaaaacaggcaataaaaataacaaagctgttaattgtccaaataagcaaggctaccgaaactgcttgccttcaaaaaacggtggtggcct

SEQ ID NO: 6878 - DNA, 421 bp, Glycine max
  Clone ID: LIB3074-011-Q1-E1-G10
gttaatgataagattgccttacacaaggttttactggttggcactgatacatcttgctacattgggaaaccaattgtaacaaatgctgtagtatatgcaacagtggaagagcagggtctagaccccaaagtaattgtcttcaaatataaaaagaagaaacactatcgcagaaacattgggcacagacagccaaatacacgtatacggataaatagcattatgggctatgagaactacccaaaagttactatggacgacatcaaatcagacgaacccggatcatgaacaccttgtttactgtgcctatactgtagcttcttcctctttaaatatgaaattatttcgccattactagttttgctttaattagaaatgtaatttatggcatattgtaatattgtattgttgtaatctcctgttt

SEQ ID NO: 6879 - DNA, 428 bp, Glycine max
  Clone ID: LIB3074-011-Q1-E1-G12
gagggatagggatagggatggagaaagtgaaggtgcttcggcgactcctcgagacaccaggggttcaccaggggccagcctgtttcgacgctctgggtgcgaagctcatagaatccgctggcttcccctactgcatcaccagtggcttctccatcgccgcttccaggttggctccgcccgacaccggcttcatctcctacggcgaaatgctggagcagggccaactcatcacccaagccgtttccattcccgtcattggcgacgccgacaacggctacggcaatgccatgaacctcaagcgaaccgtcaagggtttcattgccgccggtttcgcaggaatcattctggaagaccagattgcgccgaaagcgtgtgggcacacgcgcgggaagaaagtgataccgagagaagagggcgttatgaagatt

SEQ ID NO: 6880 - DNA, 302 bp, Glycine max
  Clone ID: LIB3074-011-Q1-E1-G3
gtcaataggtaagtagcaatggcttccgaagaatcccagttcacgcccccgcaacgagcagtccactagcgaactcatcacgagcgcgaagctggtggccgatgccgcgcaatcggctctgaagagcgacagcgacaaagtggacaaggccaaggtggctgacgctgccggcgatcttctcgacgcggcggtgaaatatggaaaacttgatgacaaacaatgcatacggcaatatgttgacaaggctgctgattatctgcataattagcactgtgataatagcactgctccttcacagcctg

SEQ ID NO: 6881 - DNA, 317 bp, Glycine max
  Clone ID: LIB3074-011-Q1-E1-G5
gaaggtgcaagagtttgttgtgagctataagctagtttatcgtgaggagaatatgaagttgtttgttttctttgttgctgcagtagttttggtagcatggccatgccatggtgcaggctaccaaaggttccctctctgaatgaaaactggctatggtgagcgttcttcggaggtaaaatgcgcaagttttatgcttgctgtggaagcacacaacatccgagcctttaaaaccattcctgaagagtgcgttgaaccaacaaaggactacattaatggcgaacaatttagatcagactctaaaacagttaaccaacaag

SEQ ID NO: 6882 - DNA, 345 bp, Glycine max
  Clone ID: LIB3074-011-Q1-E1-G6
gacctcacccagttgcagaaagaaaagaccatcaaagtttcacttcagccttatccggtttagggtttcggtttttgacccaacctttgacgtatcgaaaccttaagtttcggatcaggtctgagcaatctggttggtagaacctttggtcttagagagtcaagttttatgtctgaattagacgatcaagttcctactgccttcgatccttttgctgatgcaaatgctgatgactcgggtgctgggtcaaaggagtatgtgcatattcgcgtacagcagcgaaatggaaggaaaagcctgacaaccgttcaaggattgaaaaaagaattcagctattacaagata

SEQ ID NO: 6883 - DNA, 325 bp, Glycine max
  Clone ID: LIB3074-011-Q1-E1-G8
gaaagaaaaaaggagagtgcttagagagagagcaaaacatattattttcattttcatctttttttgagtatcaacaaatggcaaccactgtgatgaccactctcccccaattcagtggtcttagaccccaattctcagctgcccctgtgaagaacttggttgctgtgcaacccatgagtcgcaaggggaagggtgcattgggagctcgatgtgactacattggttcatccactaatctgattatggtggcttctacaaccctgatgctgtttgctggaaggtttggattggctccatcagcaaacaggaaagccactgcagggct

SEQ ID NO: 6884 - DNA, 307 bp, Glycine max
  Clone ID: LIB3074-011-Q1-E1-H1
gttcaaatattctgtgtgctgagagcagtgaaagacctttgttgaaccgcttgatgttagaattgtacaagttggaaagtgatgttcttgttggacacaatatttctggatttgacctggatgttcttctccacagatcccaggcttgcaaagtagcaagcaacatgtggtctaaattatggcgcctcaaccgttctacaatgcctaaacttagaagaagcaacgtttttggttctggagcagaccctggtatcatgtcctgcaatgctggccgacttctttgggaaacatacttgtgttcccgtga

SEQ ID NO: 6885 - DNA, 423 bp, Glycine max
  unsure at all n locations
  Clone ID: LIB3074-011-Q1-E1-H10
ggctccactgtttcccacgctcctctgcaaaacccatttcgagaaactccttcacttgcgctctcacacattcacccactcacaagtacgtgtaccccgacccagttcccgaattcgcagagcacgtgagagacccagaagttcaaatttgaactcttttggaagctttcggaggagggcgtggacgagtttggggacgaccttcattcggtcgtagatgtttgcgcgcagatatttagtgagtttttgcacaaggagtatggaggtcctgggacattgttggtggagccattcacggatatgatggttgctctaaagaagaagaaactaccaggagcagctctggctgcaagagagtcactattatggttacaaaattttgttgataaggattgggaagtttgggactcanaacttaaatga

SEQ ID NO: 6886 - DNA, 404 bp, Glycine max
  Clone ID: LIB3074-011-Q1-E1-H11
gcacaattctctcttatcatctttgttattacctctttccaaagtccaaattttctagttccaccaaaccaaaccaaaccaaaatggcagcagcctcagcctcatccatgatatcaacaccagccttatctccaaccatccaaaagcaccatcatttgaagccatccaacgtgtgcttccaaggtcttagacccctcgcaaggttcaccaaagcctcatcaaccaaagtgagcaccaccaccaaaagggttattccaaagggtggtgttagagctgaactcaactcagcccttgtgataagcctcagcactggcctctccctcttcttgggaaggtttgtgttcttcaacttccaaagggagaacgtggcaaagcaagtgcctgagcagaacggcctcacacac

SEQ ID NO: 6887 - DNA, 94 bp, Glycine max
  Clone ID: LIB3074-011-Q1-E1-H2
gaagaaagctgctagcagagggaagttctacacttttttgtttggattgatcgagtgtactttttcttttcgagattggcttggtgtgcagtgg

SEQ ID NO: 6888 - DNA, 317 bp, Glycine max
  unsure at all n locations
  Clone ID: LIB3074-011-Q1-E1-H7
ggttgagccttagtatgtcgttttgaaccaaacgacagttgcgtcagaactacgctgaagaatatcatcaccatcaaagtgtttcgttggaaggggaatttggcagatcattggaagaaaatggcgggtggtggaaaggtttcgttccaagtcacactcacctccgatccaaaattacccttcaaagtgtttagcgttccagaggctgcgccttttactgccgttctcaaattcgccgccgaagaattcaaagtcncgccccagaccagcgctatcatcaccaatgatggtgttggcataaatccccagcagagcgc

SEQ ID NO: 6889 - DNA, 296 bp, Glycine max
  Clone ID: LIB3074-011-Q1-E1-D4
ggaagaagaagaagaagaagatggcattgggtgttcctgctcttcccctgacatacgtggctcacgttctggcacttgttgccagcatcttggtcgtgctctgggtcctcaattttaggggtggcttggcttgggattccgataacaaggccctcatcttcaatcttcatccagttcttattgtcattggcttactagtccttgggggtgaagctattataagctacaaagcattacccctgaagaaggaagtgaagaaattgatacaccttgttttccatgccatcgcattaata

SEQ ID NO: 6890 - DNA, 274 bp, Glycine max
  Clone ID: LIB3074-011-Q1-E1-D6
gggcagcagaaaaacaagtagttgagaactaagaagaaggaaatggcttcctcaatgatctcctccccagctgttaccaccgtcaaccgtgccggtgccggcatggttgctccattcaccggcctcaaatccatggctggcttccccacgaggaagaccaacaatgacattacctccattgctagcaacggtggaagagtacaatgcatgcaggtgtggccaccaattggcaagaagaagttcgagactctttcctacttgccagacctccatg

SEQ ID NO: 6891 - DNA, 239 bp, Glycine max
  unsure at all n locations
  Clone ID: LIB3074-011-Q1-E1-D8
gtcctcagtgagaggccttccctctctctcaaggaactcttcttcattcatagttgtggccagtggcaagaagatcaagactgatataccttatggaattaatggtggcatggctttgagggatggaactgatgcatctggcaagatcgggaaatggtgtttactacgtttgtanacaaggacagtgcaaaagtcgatggatagaatcatatctacgacacgaaggactggtcttcata

SEQ ID NO: 6892 - DNA, 417 bp, Glycine max
  Clone ID: LIB3074-011-Q1-E1-D9
gaaggtgcaagagtttgttgtgagctataagctagtttatcgtgaggagaatatgaagttgtttgttttctttgttgctgcagtagttttggtagcatggccatgccatggcgcaggctaccaaaggttccctctccgaatgaaaactggctatggtgagcgctcttcggaggtaaaatgcgcaagttttaggcttgctgtggaagcacacaacatccgagcctttaaaaccattcctgaagagtgcgttgaaccaacaaaggactacattaatggcgaacaatttagatcagactctaaaacagttaaccaacaagctttcttttatgctagtgaacgcgaagtccatcacaacgacatatttatattcggcatagataacaccgtactctctaatatcccatactatgaaaaaca

SEQ ID NO: 6893 - DNA, 403 bp, Glycine max
  Clone ID: LIB3074-011-Q1-E1-E1
gaagttgcagtaggctaagctgaatctatagactagagtagagtagtgtaaagggaaatgagtgattaacttctcaaactgagagagagagagaaagagagagagcactgaagtgaagagtgcattgtgatatgaggaagcaacaacgttggcaagttggtatcgtggattgaggtggtcttttgggggaaaccatcaacgacaacgacagcatcaaaaggaagagaaggacccagaaacgggaacggctttcagaaactcacaagcttttcagaaagagcttcaaagtgaaggaaaaaagtgccctttgattcttggtcagcacaacgccaggacagacaagacacagagcaggacacacacacacacacaagcaaactaaaagagccaacgcaacatgttt

SEQ ID NO: 6894 - DNA, 140 bp, Glycine max
  Clone ID: LIB3074-011-Q1-E1-E10
ggggatatggcgaaattggtagacgctacggacttaattggattgagtcttggtatggaaacttaccaagtgagaactttcaaattcagagaaaccctggaattcacaaagggcaatcctgagccaaatcctgttttccg

SEQ ID NO: 6895 - DNA, 397 bp, Glycine max
  Clone ID: LIB3074-011-Q1-E1-E11
gaggcgcggcgggatcagcacaagattgcaaaatgaagttcaacattgcaaatcccaccactgggtgccagaagaagctggaaatcgatgacgacctgaagcttcgagcattttgggacaagaggatctcccaggaggttcttggtgatgctctgggtgaggagtttaaaggatatgttttcaaaatcaccggtgggtgtgacaaacaaggattccctatgaagcagggagtgctgacccctggtcgtgttcgacttttgctccatagaggaactccttgtttccgtggatatggaaggcgcaatggagagcgtagaaggaagtctgttcgtggttgcattgtcagcccagatctctctgttttgaacctggtaattgtgaagaagggtgggagtga

SEQ ID NO: 6896 - DNA, 414 bp, Glycine max
  Clone ID: LIB3074-011-Q1-E1-E12
gagaacccaagagcagagaagaatcagagaatggcaactatgactggtgtgagcctttcatgccccagggttttcttcaacgcatcaggctcaccgcaaaacgcgcatgcttattgtattttgtccagcagattctatgacttgacaggactgcagaatggaattctgaagcgagggagagagattttcctcactggttgctacctccgaactcccactggaggttctggacattcacgtcttttgccaacagagtatcttgtgattctattggatgaagacttccagaaggaaattgttaaagcagcagaaacatttacagctataggttataagcatattgaaacacgtgaagattagcttttgtttcttttttcctttactttgactagtccttgtatgcaatcactgtta

SEQ ID NO: 6897 - DNA, 274 bp, Glycine max
  Clone ID: LIB3074-011-Q1-E1-E2
gaacaggacataaattgacaaattccaagttggggttctcacgatttcgattaaccctttctcccacaaactccgattcttcttgggaacagcggtgtcaggtgttaatctagaagttgatatacgatgggggcaatgatgtctaaggtctggttcatgttaatccctgcaaaagagtataagattgttgttgttgggttggataacgctggaaaaaccactactctttataaattgcatctgggtgatgttgttagaaccaatcctactgttg

SEQ ID NO: 6898 - DNA, 368 bp, Glycine max
  Clone ID: LIB3074-011-Q1-E1-E5
ggcagccaagaaaagaaaatcctcacccattttcttcgtagccaaacactctgaaattctcagttatgtcgtggcaagcgtatgtggatgatcacctactgtgtgaaatcgaaggtaaccacctcactcacgccgctatcatcggccaagacggaagcgtttgggctcagagcaccaacttccctcagttcaaacctgaggaaataactgccatcaataatgactttaatgagcctggatcacttgctccaactggattgtatatcggtggcaacaaatacatggtcatccaaggtgagcctggtgctgtcattcgagggaagaagggtcctggtggtgttactgtgaagaagacggtgcggccttga

SEQ ID NO: 6899 - DNA, 158 bp, Glycine max; identical to SEQ ID NO: 4686
  Clone ID: LIB3074-011-Q1-E1-E6

SEQ ID NO: 6900 - DNA, 367 bp, Glycine max
  Clone ID: LIB3074-011-Q1-E1-D3
gaaggtgcaagagtttgttgtgagctataagctagtttatcgtgaggagaatatgaagttgtttgttttctttgttgctgcagtagttttggtagcatggccatgccatggcgcaggctaccaaaggttccccctccgaatgaaaactggctatggtgagcgttcttcggaggtaaaatgcgcaagttttaggcttgctgtggaagcacacaacatccgagcctttaaaaccattcctgaagagtgcgttgaaccaacaaaggactacattaatggcgaacaatttagatcagactctaaaacagttaaccaacaagctttcttttatgctagtgaacgcgaagtccatcacaacgacatatttata

SEQ ID NO: 6901 - DNA, 444 bp, Glycine max
  Clone ID: LIB3074-011-Q1-E1-E9
gaagacgacagaagggggcacaagtgagtttgttgatcgagataactagaaacagtgtgatgaaaatgaaggtccttgttttcttcgttgctacaattttggtagcatggcaatgccatgcgtacgatatgttccctctccgaatgaacactggctatggtgcccgtactccggaggtgaaatgcgcaagttggaggcttgctgtggaagcacacaacatctttggctttgagaccattcctgaagagtgcgttgaagcaacaaaggaatacatccatggcgaacaatatagatcagactccaaaacagttaaccaacaagcttacttttatgccagagacctcgaagtccatcccaaggacacatttgtgttcagtatagatggcaccgtactctctaatattccatactacaaaaaacatggatatggggtggagaaattta

SEQ ID NO: 6902 - DNA, 375 bp, Glycine max
  unsure at all n locations
  Clone ID: LIB3074-011-Q1-E1-F1
gaagaagaagcattttgtgactgaaaaaaggttttagatcgtaaaaactaatcactacgaaaacaagagatatcgaagatggctctgcccaaagctaaggagatcgtgtcgtccaattccgtcgtcgttttcagcaaaacctattgccctttctgcgtcgatgtgaagaagctcttcggtgacctcggtgccaattacaaggccatcgaactcgacactgaatccgatggaaaagagctccaagcagcattagttgagtggacggaccagcgaaccgtgcctaatgtgtttattggtggaaaccacattggtggctgtgactcaacaactgccctgcacactcaggggaagctggntcccctgctgatatctgct

SEQ ID NO: 6903 - DNA, 362 bp, Glycine max
  unsure at all n locations
  Clone ID: LIB3074-011-Q1-E1-F3
gaaaggcagtagtagtgttactttccaatttgaattgttccattttcatttctttcgcaaaagttgcaactacttcctcagaaaaaaagtttctaagttaaggaaatccagagagacaaaaatggccggtgacggtgcagctacatgcatagacatcctccttgccatcattctccctcctcttggagtctttctcaaatatggctgccaggtggagttctggatttgtttggtgctgaccctttttggttatatacctggaattatctatgctgtctatgctatcaccaagtgatcaccctttaactttgtgtggacaataaacaaatgtcatgggcgtntctggtcttcaactcagatat

SEQ ID NO: 6904 - DNA, 409 bp, Glycine max
  Clone ID: LIB3074-011-Q1-E1-B8
gagtgcacaagtgagtttgttgatcgagataactagaaacagtgtgatgaaaatgaaggtccttgttttcttcgttgctacaattttggtagcatggcaatgccatgcgtacgatatgttccctctccgaatgaacactggctatggtgcccgtactccggaggtgaaatgcgcaagttggaggcttgctgtggaagcacacaacatctttggctttgagaccattcctgaagagtgcgttgaagcaacaaaggaatacatccatggcgaacaatatagatcagactccaaaacagttaaccaacaagcttacttttatgccagagaacgcgaagtccatcccaaggacacatttgtgttcagtatagatgggcacgtactccccaataatccatactacaaaaaacat

SEQ ID NO: 6905 - DNA, 411 bp, Glycine max
  Clone ID: LIB3074-011-Q1-E1-C10
gaaaaagaaaaaaaagattctaaagaaatataactaatattctttagaataatcaaaaagaatattaaattcaaataaattttagatagaaaaaggacttaaaaaggaggatttgaaatgcgagatctaaaaacatatctttccgtggcaccagtagtaagtactctatggttcggggctttggcgggtctcttgatagagatcaatcgtttttttccagatgcattgatattcccttttttttcattctagttattgacacggaaaggggtgaagaagattatagatccaattaagtattaaatatatgtaattaatatgtaattaatctcctcttctttatttcgtcttttatttcttcctttttttacaattgtaatagaataagttagcacaaaattaggaaacaaa

SEQ ID NO: 6906 - DNA, 439 bp, Glycine max
  unsure at all n locations
  Clone ID: LIB3074-011-Q1-E1-C11
aagaagacgacagaagggggttctagtgtgtgattgtttgttgttgtaactcgttcttcttcttttgttgttctgtgtttgtgtttgttttttctctcacctgaaaatgtcttgctgcggtggtaactgtggttgcggaaactcctgcaagtgcggcaacggctgcggaggctgcaagatgtacccagacttgagctacactgagtcaaccaccaccgagaccttggtcatgggagtggcacctgttaaggctcaatttgagggtgctgaaatgggtgtgcccgctgagaacgatggctgcaaatgtggaccaaactgctcctgcaacccctgcacttgcaagtgaggtgttgggagagcaagcttcaagcagagatagcccttaattaggaataatgataaactattaatgtgtagctaanaacttatgtattatgtc

SEQ ID NO: 6907 - DNA, 323 bp, Glycine max
  Clone ID: LIB3074-011-Q1-E1-C2
ggcagcgcttgatttgaggccaggcaagccccactcaaccaccacacctctcctcgttcacgctacccctttctgctcttcttctacctttcaagttttaaaagtataaagatggcagagacattcctatttacctcagagtcggtgaacgagggacaccctgacaagctctgcgaccaaatctccgatgctgtcctcgacgcttgcctcgagcaggacccagacagcaaagttgcctgcgaaacatgcaccaaaaccaacttggtcatggtcttcggagaaatcacgaccaaggccaacgttgactacgagaagatagtgcg

SEQ ID NO: 6908 - DNA, 419 bp, Glycine max
  unsure at all n locations
  Clone ID: LIB3074-011-Q1-E1-C5
gactgcgaaccagtagggactcccattccgactcttagccgccgatctctcagggcttgcatcttctcaggtaagctgtgaagatgtacacatcaaggaagaaaatccacaaggataaggatgctgaaccaactgaatttgaagagtcagttggacaggcattgtttgatctggaaaataccaatcaggagcttaaaagtgatctgaaggatttatacataaactcagccgtgcaagttgatgtttctggaaaccgcaaggctgttgttattcatgtcccttacagattaaggaaaggtttccgtaagattcatgttangcttgtcanggagcttgagaagaagtttagtggcaaggatgtaatcttggttgccacccggaggattttgaggccaccgaanaagggttctgctgctcaa

SEQ ID NO: 6909 - DNA, 151 bp, Glycine max
  Clone ID: LIB3074-011-Q1-E1-C6
gaagaaaggcttatggtggatacctaggcacccagagacgaggaagggcgtagtaagcgacgaaatgcttcggggagttgaaaataagcgtagatccggggattcccgatataggtcaacctttcgaactgctgctgaatccacgggcagg

SEQ ID NO: 6910 - DNA, 416 bp, Glycine max
  Clone ID: LIB3074-011-Q1-E1-C7
ggaacaaaacgatacgctgcgattccttcatttcccgtgtgattcaccaccgatctgataatcgagttgcgttgtgtgtttgggaaatggcgtcgagtgtgttgaagagtctcatgagattttcgtcatcgaggaacacgaccaccagaagtttctgtctcgtgacctctcaaatcagcaaccacactgccaagtggatgcaggatacaagcaagaaatctccgatggagctgattaatgaagttcctccaattaaggttgaaagcaggatagttgcttgtgaaggagataccaattctgcccttggccacccgattgaatttatatgccttgacttgcccgagccagctgtttgcaaatattgtggcctacgttatgttcacgatcatcaccattaggactgccttctacaagta

SEQ ID NO: 6911 - DNA, 377 bp, Glycine max
  Clone ID: LIB3074-011-Q1-E1-C8
ggctccttccattttctatgtatcgtcaacgttagtgctttatttaggtgacaagactactcacagagaaagacactcggagaccttgcaagacttcatcaatggctgtcaaagtttatattgtgtactactccatgtatgggcatgttgagaaactagcagaagatataaagaatggggtttcctctgtggaacgtgttgaagccatattatggcaagtacctgagacgctgcaggatgaggtgctcggtaagatgagtgcaccacccaatagcgatgtaccactcattaccccgaatgaactatccgaggctgatggctttgtattcggcttcacaacaatgtttggaatgatggctgctcagtttaaagctttt

SEQ ID NO: 6912 - DNA, 396 bp, Glycine max
  Clone ID: LIB3074-011-Q1-E1-D1
ggcacaagtgagtgtgccgatcgagataactagaaacagtgtgatgaaaatgaaggtccttgttttcttcgttgctacaattttggtagcatggcaatgccatgcgtacgatatgttccctctccgaatgaacactggctatggtgcccgtactccggaggtgaaatgcgcaagttggaggcttgctgtggaagcacacaacatctttggctttgagaccattcctgaagagtgcgttgaagcaacaaaggaatacatccatggcgaacagtatacattagactccaaaacagttaaccaacaggcttacttttatgccagagacctcgaagtccatcccaaggacacatttgtgttcagtatagatggcaacgtactctctaatattccatacta

SEQ ID NO: 6913 - DNA, 406 bp, Glycine max
  unsure at all n locations
  Clone ID: LIB3074-011-Q1-E1-D11
ggcacaagtgagtttgttgatcgagataactagaaacagtgtgatgaaaatgaaggtccttgttttcttcgttgctacaattttggtagcatggcaatgccatgcgtacgatatgttccctctccgaatgaacactggctatggtgcccgtactccggaggtgaaatgcgcaagttggaggcttgctgtggaagcacacaacatctttggctttgagaccattcctgaagagtgcgttgaagcaacaaaggaatacatccatggcgaacaatatagatcagactccaaaacagttaaccaacaagcttacttttatgccagagacctcgaagtccatcccaaggacacatttgtgttcagtatagatggcaccgtactctctaatattccatactacanaaaacat

SEQ ID NO: 6914 - DNA, 413 bp, Glycine max
  Clone ID: LIB3074-011-Q1-E1-D12
ggttctagtgtgtgattgtttgttgttgtaactcgttcttcttcttttgttgttctgtgtttgtgtttgttttttctctcacctgaaaatgtcttgctgcggtggtaactgtggttgcggaagctcctgcaagtgcggcaacggctgcggaggctgcaagatgtacccagacttgagctacactgagtcaaccaccaccgagaccttggtcatgggagtggcacctgttaaggctcaatttgagggtgctgaaatgggtgtgcccgctgagaacgatggctgcaaatgtggaccaaactgctcctgcaacccctgcacttgcaagtgaggtgttgggagagcaagcttcaagcagagatagcccttaattaggaataatgataaactattaatgtgtagctaaaaacttatgt

SEQ ID NO: 6915 - DNA, 401 bp, Glycine max
  Clone ID: LIB3074-011-Q1-E1-B7
gaatatagatagatatatataatagaacgtaaaaaacaaaagaataataaatagaaaaaggagcatgttgattatatacaaagtaaagggcaacaatcatttttgtttaccatgggtaaggacaccatcgctgacataataacctatataagaaatgctgacatgaataaaaaaggaatggttcaaataccatttactaacataacagaaaacattgtaaaaatacttttacgcgagggttttgttgaaaacgtcagaaaacatagagaaaacgacaaatattttttagttttaactctacggtatagacgaaatacacaatgatcatataaaagttttttaaatttaaaacggctaagtacacccggtctactattatattcaaattatcaacgaatccc

SEQ ID NO: 6916 - DNA, 393 bp, Glycine max
  Clone ID: LIB3074-011-Q1-E1-D2
caagcctccgatacggtgccaagacgacagaagggggcacaagtgagtttgttgatcgagataactagaaacagtgtgatgaaaatgaaggtccttgtcttcctcgttgctacaattttggtagcatggcaatgccatgcgtacgatatgttccctctccgaatgaacactggctatggtgcccgtactccggaggtgaaatgcgcaagttggaggcttgctgtggaagcacacaacatctttggctttgagaccattcctgaagagtgcgttgaagcaacaaaggaatacatccatggcgaacaatatagatcagactccacaacagtttaacaacaagcttacatttatgccagagacctcgaagtccatcccaaagacacatttgtgttc

SEQ ID NO: 6917 - DNA, 365 bp, Glycine max
  Clone ID: LIB3074-011-Q1-E1-A10
ggagttcaccaaaccaacacctttcaaaatgcaaacatccttaacctttgctgcccccaacgttgtgcctttggcacaaacaaagagtttctcccatgttgccatcttccctaccaatttgaaagccccacgctcttcacctcgttactctccgatcagggttgcaatcgtggagcctgacacttcaactgtggactacaactctgcgttctcagtgtttccagcggaagcatgcgaaactgttggaggggaagcctgcatggcagaaatgcaccctgaagtgaagctacagccagaagctaagacaccacgagttgttacagagaacgttgagagagagtatcttgaatacgatgatcctaaaa

SEQ ID NO: 6918 - DNA, 413 bp, Glycine max
  Clone ID: LIB3074-011-Q1-E1-A12
gggccgtcgtgagttgcatctgcgtgtgactgcaagaaatggctcttgttctcaacgtctcattgtgttccatttctaaaccccatctttctctctcaacctccaatcccaacaaagcttcttcaactcttcctcttcctattctgggacttaaaacaaagcaaagtctccaaccatctcagaaactcacattttcattgggtgaatcagtggctggtgccaccctcgttgctctcctctctgcttctttcatctttgttgatcccgcacttgcattcaagggtggagggccatacgggcaggaagtgacaaggggacaagatctcactgggaaggactttagtggcaagactctgatcaaacaagacttcaaaacgtccatactgagacaagccaattttaaaggtgcaaag

SEQ ID NO: 6919 - DNA, 367 bp, Glycine max
  unsure at all n locations
  Clone ID: LIB3074-011-Q1-E1-A2
gggttgaagggagcttaccttacctgaagatggcttcggtgtcctttgccgtgggacttttaccttacgcttcagttcgatttcccgtattgagcaacgccaactcactgaaactcagttcctcagctagcatctctactccaattcttcagcaaaagctctgctctcttctttcccccctccctctaagccctcgccctcgccctctcaccattgtatccgctaagggctacaaaatgaaaacccacaaggcatctacaaagcggtttaaggtgaccggacgaggcanaatagtgcgtaggagagctggcaagcagcatttgctcgtcaagaagaatacaagcgcaaatcccgactctccaaaatg

SEQ ID NO: 6920 - DNA, 321 bp, Glycine max
  Clone ID: LIB3074-011-Q1-E1-A3
gacatcaaacatatacacaaaagagcactgaccaaaccattttattttatttttgaatcaagggtgagggccttccatggcttccgcttgtgcttcctctgcaattacagctgttgccatctctacgccgagttccgggcagaagaatggatcaggaggttgttttcttagtggaaggaaattgagggtgaaaaaggagagagcagcaattggaggacgaccgatgggcactacagtgtgcgcagttgctgagcctgacggacctctatggttcccaagcagcaaccctcctccatggcttgatggcactctacctggaga

SEQ ID NO: 6921 - DNA, 413 bp, Glycine max
  Clone ID: LIB3074-011-Q1-E1-A5
ggaggagagaggagaagagaagctaaagaaagaaaggagatgggagtggagaagcagttgttgaggtctggcaccggtccgaagccaattcccggtcagaacgtaaccgttcactgcactggtttcgggaagaacggtgacctttctcagaaattctggagcacaaaggatcctggccagaacccattcactttcaaaatcggccaaggttctgttatcaaaggatgggatgaaggtgtgcttggcatgcaaattggtgaagttgctcgtctccggtgctctccggattatgcttatggtgctggtggctttcctgcttggggaatacggcccaactctgtcttggaatttgaaatcgaagtcttaagtgcgcaatgaaaaccttggtagtctgtctctgtcctaaagaataa

SEQ ID NO: 6922 - DNA, 65 bp, Glycine max
  Clone ID: LIB3074-011-Q1-E1-A6
ccaaaggaaagaggtctttaagatgaaaacaaaaaatgcaaatgtaggttcctttttttgaacgc

SEQ ID NO: 6923 - DNA, 302 bp, Glycine max
  Clone ID: LIB3074-011-Q1-E1-A7
ggttctagtgtgtgattgtttgttgttgtaactcgttcttcttcttttgttgttctgtgtttgtgtttgttttttctctcacctgaaaatgtcttgctgcggtggtaactgtggttgcggaagctcctgcaagtgcggcaacggctgcggaggctgcaagatgtacccagacttgagctacactgagtcaaccaccaccgagaccttggtcatgggagtggcacctgttaaggctcaatttgagggtgctgaaatgggtgtgcccgctgagaacgatggctgcaaatgtggaccaaactgct

SEQ ID NO: 6924 - DNA, 313 bp, Glycine max
  Clone ID: LIB3074-011-Q1-E1-A8
ggaagcagaaagagaagcattagcaaaagcaagaagaactagtctaagcagaaatggcctcttcagtgatggcatctgtggccctcaaacctgcccctttcactgttgagaagtcctcagttagaggccttccctccctctcaaggaactcctcttcattcagagttgtggccagtggtggcaagaagatcaagactgacaagccttatggaattaatggtggcatggctttgagggaacgagttgatgcatctggcaagaaaggaaacggaaaaggcgtctaacagtttgtagacaaatacggtgctaatgt

SEQ ID NO: 6925 - DNA, 384 bp, Glycine max
  Clone ID: LIB3074-011-Q1-E1-A9
gatagttgcaaagagcagtgaagacactacagaacacaacacaaacacagagaaagagagtgaataaatccagcattgttctgttctctgcaacattctccactctcaaccatggtttcaaagcttttactcatcactgtcttcgtttttgatttgattgcttttggacttgccgtggctgctgagcagagaagaagcaccgctagtgttgtgacggacaatgaaaagaattataattactgtgtctataactctgatatagcaactggctatggtgttggagcatttttgtttctcttggttagtcaagtcctgataatggtggcaagtcgatgcttctgttgcgggaagcctcttaaccctggaggctcaaagggctgtgca

SEQ ID NO: 6926 - DNA, 391 bp, Glycine max
  unsure at all n locations
  Clone ID: LIB3074-011-Q1-E1-B1
gagtattcagattattatacattgcaaaaatggcatcattcaccatgacagcttccatccttggctgcccagccgtcaccaaccggtcggcagcgacgcagaggagatcagtggtagtgaatgcagccagcaaatctgttgaaggggaagaggtcagttatgacaacaatggtagcaatgcaaggaggaacttgatgttcgccacggcggcggctgctgtttgctcttttgctgcanggatggcattggcagatgagcctaaaccaggaacctcagaagccaagaaaaagtatgccccggtttgtgtccacaatcctacagctaggatttgtcgcaattgaggaacttttttgtttcacttttgggatttggaaatgtacaatgaatttgt

SEQ ID NO: 6927 - DNA, 284 bp, Glycine max
  Clone ID: LIB3074-011-Q1-E1-B10
tggagatgcactaataactgactttgctacagatgcaaaaagacaatttccgggaatagtcgatcataaacgatcgtccgattctgctgttcttccactacagttcagtattactgttatcaaacgaaaactggctatgtgaccgagttgcacattggagtgtaccgctgaccaaaaacatctgaaatttatggatacaaaagtaccacagtcagggttagctatcagggaaaactcaatggtaggactgttttcaaatcagggtttggtacagattatccaat

SEQ ID NO: 6928 - DNA, 416 bp, Glycine max
  unsure at all n locations
  Clone ID: LIB3074-011-Q1-E1-B11
gaacaacacgtagtattatttcattgatttctccctcttcgctctctctcagtgaccagagacagatgatgatggagatggcgaagcgaaacgctgtcgttgcggcactcgcggcgttggtgctactcgcggcgagtgtggcggtggatgctcaggagaactcggacgtgaagacgctggtgaagtacaagcacgggaagaagtactgcgacaaaggatgggaatgtaagggctggtcaatttactgttgtaacctcaccattaccgattatttccagacctaccagttcgagaatctgttctccaagcggaactcgccggtggcgcacgcggtcggattttgggactaccactccttcatcngcgccgccgcgctttttgagccggaagggttcggcancaccgggaacaagacg

SEQ ID NO: 6929 - DNA, 412 bp, Glycine max
  unsure at all n locations
  Clone ID: LIB3074-011-Q1-E1-B12
ggaacggaaaagcactggcgcagctaccctgaggcttctcttctcttctcttctctgtcgtgagtcaccatggtgggggttagtgtgctgaacgatgctctgaagagcatgtacaatgctgagaaaaggggaaagcgccaagtcatgattaggccatcctccaaagtcattatcaaattccttttggtgatgcaaaagcacggatacatcggagagtttgagtatgttgatgaccacagggctggtaaaatcgtggttgaattgaacggtagactgaacaagtgtggggttattagtccccgttttgatgtgggcgtcaaggagattgaaggttggactgctaggcttctcncctcaagacagtttgggtatattgtattgactacctctgctggcatcatggattatgaag

SEQ ID NO: 6930 - DNA, 384 bp, Glycine max
  unsure at all n locations
  Clone ID: LIB3074-011-Q1-E1-A1
ggccgcaagcagagatgacaacccgatttaagaagaaccgcaagaagcgcggccacgtcagcgccggccacggccgtattggaaagcaccgcaagcaccccggcggccggggaaatgccggcggcatgcaccaccacaggatcctcttcgacaagtaccacccggggttcttcgggaaggtanggatgaggtactttcataagctccgcaacaaattctactcccccatcgtcaacatcgacaagctatggtctctgataccccaagacgcgaaggacaaagccctaaaatcgaaggacactgcccctctaatcgacgtcactcagcacgggtacttcaaggttctcggaaaaggtgtgctgccccaaaaccagcccattgttg

SEQ ID NO: 6931 - DNA, 303 bp, Glycine max
  Clone ID: LIB3074-011-Q1-E1-B6
gggcagcagaaaaacaagtagttgagaactaagaagaaggaaatggcttcctcaatgatctcctccccagctgttaccaccgtcaaccgtgccggtgccggcatggttgctccattcaccggcctcaaatccatggctggcttccccacgaggaagaccaacaatgacattacctccattgctagcaacggtggaagagtacaatgcatgcaggtgtggccaccaattggcaagaagaagttcgagactctttcctacttgccagacctcgatgatgcccaattggcaaatgaagtcgaatac

SEQ ID NO: 6932 - DNA, 204 bp, Glycine max
  Clone ID: LIB3074-010-Q1-E1-E12
gacgacagacgggcaacagatgtcatcgcgaggatctcaaagaccgatcaaggcacgaaagccgggctctttcatacagtggcttcctattccaaaggtgtacagctgcatggataagctcacacggtaccgtcgctttgggatcacattcggttcctgatgaggtaacaggaaggaagtttgggctgtcataatatcaaatca

SEQ ID NO: 6933 - DNA, 165 bp, Glycine max
  Clone ID: LIB3074-010-Q1-E1-E2
acaagcaacattgctaaccattctctgcacttttcagtgacaaagcatttcattgttggacaatatacaacagcacaatggctgcttcaacaatggctctctcttagtagtcattggctggccaagctatcaagcttgccccctcgagccctgagcttggtgttg

SEQ ID NO: 6934 - DNA, 151 bp, Glycine max
  Clone ID: LIB3074-010-Q1-E1-F12
gtgcggctgcgacatgacgatacagcggcaaaattccaactgaaggggagacctcacgtcaggccgcgctacccgctgcacttaaggatatcaacttacgtaggagtgccggggacggcatagctcttccaaaatcggccggtcgatacga

SEQ ID NO: 6935 - DNA, 387 bp, Glycine max
  unsure at all n locations
  Clone ID: LIB3074-010-Q1-E1-F2
cagangggggcacangtgagtttgttgatcgagataactagaaacagtgtgatgaaaatgaaggtccttgtttgtcttcgttgctacagttttggtagcatggcaatgccatgcgtacgatatgttccgtctccgaatgaacactggctatggtgcccgtagagcggaggtgaaatgcgcaagttggagggttgctgtggaagcactgaacgtgtttgggttgtggcatgggtggtgaagagtgagtgggcggggggaggagataaggcgatggagagcgatatacattagactccaaaacaggtaaccaacaagcttacttttatgccatagacctctgantccatcccaaggaaacatttgtgttgaatataaatggcaccgtac

SEQ ID NO: 6936 - DNA, 150 bp, Glycine max
  unsure at all n locations
  Clone ID: LIB3074-010-Q1-E1-F8
gggtantggcantgagttccccttgcngttgcgcttgcgcttctacgagttggngtgttgggtatgggtatggaagtggtggcgtgctttcaaattcaaaagtaacaacgaggagggcaggagaaatatgcatggcacattcagtttgtt

SEQ ID NO: 6937 - DNA, 181 bp, Glycine max
  Clone ID: LIB3074-010-Q1-E1-F9
gggcctggccattctgtgtcacagatctgctccttccgttctccctcagttgatgagcatgggtcttggagttagcagtggtggtggtctgtattcagtgggttacctttttggcatttgaggggcccctgtcctcatccagcaccttttattgctccagcccatcctgatgtgcaggctg

SEQ ID NO: 6938 - DNA, 365 bp, Glycine max
  Clone ID: LIB3074-010-Q1-E1-G11
ggcacaagtgagtttgttgatcgagataactagaaacagtgtgatgaaaatgaacgtccttgttttcttcgttgctacaattttggtagcatggcaatgccatgcgtacgatatgttccctctccgaatgaacactggctatggtgcccgtactccggatgtgaaatgcgcaagttggaggcttgctgtggaaacacacaacatctttggctttgagaccattcctgaagagtgcctttaaacaacaagcgaatacatccatggcgaagaatattacatagactccaaaacagttaaccaacaaacttaactttatgccagagacctcaaattcaacccaaggacacaattgtgttcagtaaaaa

SEQ ID NO: 6939 - DNA, 227 bp, Glycine max
  Clone ID: LIB3074-010-Q1-E1-G12
acgtcaggatggggcacaagtgcgcttgttgatcgagataactatgatcattgtgatgatgatgaaagtccttgttttcttcgtggctataatttcggcagcatggcactgctatgcgtatgatatgttcactcttagaatgaatactggctatggtgcacgtattcctgtggtgaaattcgcccgttggtggcttgctgtggttgcacacatcatctttggctttg

SEQ ID NO: 6940 - DNA, 383 bp, Glycine max
  unsure at all n locations
  Clone ID: LIB3074-010-Q1-E1-G3
gagccacaacactttccacttacctccgaattagttatcttgagaaacattagtcccattgctatagattatggctagcatgaaggttacatcggtggttgtgatcatgtgcatggccgtggtgggtgcaccgatgatgcgccaagccatgacatgcaatgatgtgaccgtgaagatggcacactgcccatcctagctgatgcagggacgagcacgtgcgacagctttgggccaggcgagtcaacgacattccgtgctctgctgtcaccaccgttgactgacaaactgtgtgcaactgtctcaaggcggatgctgctangtacaacatcaatgaccagtatgctcaggcactccctggtttctgcaaggtcaatgtcccttac

SEQ ID NO: 6941 - DNA, 163 bp, Glycine max
  Clone ID: LIB3074-010-Q1-E1-G5
ggactcgaattgttccacgccacatccaattggcggtgacgaaccgcgaggagttgcacaagcttctatgagatgttaccattgctaactggggtgttgtgcctgtcattcacaaccttcttcttcccaaaagtgctgcgggctcatccaatggtgctgctgc

SEQ ID NO: 6942 - DNA, 374 bp, Glycine max
  Clone ID: LIB3074-010-Q1-E1-G7
ggattcagattacattgcaaaaatggcatcattcaccatgacaggttcgatccttggcagcccagccgtcaccaaccggtcggcagtagcaacgcagaggagatcactcgtagtgaatgctgccaaagctgttgaagcagaaaaggtcagttatgacaatgacagggatggtagcaatgggaggaggaacttggtgttcgccgcgtgcggcgcggtgcggggggcggggggtgcggggatggcagtggcggggcggcctaaaccaggaaccccagaacgcaagaaaaagtatgctccgatttgtggcaccattgcaactgctaggatttgtcgcaattgagggactttggtttttattttacttctgatgattg

SEQ ID NO: 6943 - DNA, 183 bp, Glycine max
  unsure at all n locations
  Clone ID: LIB3074-010-Q1-E1-H1
gatatgttccctctccgaatgaacactggctatggtgcccgtactccggaggtganatgcgcaaattggaggcttgctgtggaagcacgcaacatctttggctttgagaccattcctgaagagtgcgttgaagcaacacaggaatacatccatggcgaacaatatagatcagactccaaaaca

SEQ ID NO: 6944 - DNA, 363 bp, Glycine max
  Clone ID: LIB3074-010-Q1-E1-H11
ggcacaagtgagtttgttgatcgagataactagaaacagtgtgatgaaaatgaaggtccttgttttcttcgttgctacaattttggtagcatggcaatgccatgcgtacgatatgttccctctccgaatgaacactggctatggtgcccgtactccggaggtgaaatgcgcaagttggaggcttgctgtggaagcacacaacatctttggctttgagaccattcctgaagagtgcgttgaagcaacaaaggaatacatccatggcgaacaatatagatcagactccaaaacagttaaccaacaagcttacctttatgccaaagacctcgaaatccatcccaatgacacatttgtgtccaatat

SEQ ID NO: 6945 - DNA, 350 bp, Glycine max
  Clone ID: LIB3074-010-Q1-E1-E11
cgggattatatttgagttcaaacaaatcacagccatggccaactctaacttctctattgttctctctgtctccctagccttctttttggtgctacttaccaaggcacactcgaccgataccgtttccttcaacttcaacaagttcaacccattccaaccaaacattatgctccaataagatgctagtatttcatcctctggggtgttacaactcaccatagttggcagcaatcgtgtgcccacctcaggatcactcggtcatgccctttactccgcttccaatccaaattttggacatcgaaactcgcaatgtatccaacttttctacatcccattaaattcaacatttt

SEQ ID NO: 6946 - DNA, 240 bp, Glycine max
  Clone ID: LIB3074-010-Q1-E1-H12
gaaagtatgatggcattatcacgtgttagggaggacaactaccggtcatatttgcgcgaagacactgagaagaataccaaatggatatatggtgcccctccacattacgacgttgctcacacgctatatgaccatggcagagtcattgtttgggctcacggttcacttgactagcacgtgcagtctctagtgcatttctgggacatggagatgttccacagtgtcggactgcatgatttc

SEQ ID NO: 6947 - DNA, 292 bp, Glycine max
  Clone ID: LIB3074-010-Q1-E1-H4
ggtggcattgtgtttctcttcatggcgttctctgctactctatcctacagctccttcccttgccttcctcgtttcccgcaaactttgagagcaaaaagtgttcatttccctctgattcgtgcagtgcaaggtggtcaagcagtgacacccgagagcgagaagagtgaagggtcatctaatgctcagtcttcaagtggtgctgctcctaaagccaagaaagcggtcgagtcggtgagcgaaaggcggattgtgagggtggacaaggagaaatatctcaagagcgtcaattatc

SEQ ID NO: 6948 - DNA, 348 bp, Glycine max
  Clone ID: LIB3074-010-Q1-E1-H5
aataatgaataaaaaaatcaataagaattaataaaaagaaaaaagtgtaaatcagatagaaatttataaaatctatgatcctagaagagttccctagacaaaatagaagtaaagtcacaaacaagattcaagaataagattgtctgaagaaaggagagagatgagtcttaggattcgctgggtataaaagaggagaagaaggggataaagggtttcttgaacaattcattgaaaaaaattttctatcggatttttgagtcataggagattttatgatttagtacttggaggatttttaagaatagaagggaataactacattgagttcatcgatttgccctagatatc

SEQ ID NO: 6949 - DNA, 198 bp, Glycine max
  Clone ID: LIB3074-010-Q1-E1-H6
ggcacaagtgagtttgttgatcgagataactacgaacagtgcgatgaaaatgagggtccttgttttcgtcgttgctacaattttggtagcatgggaatgccatgcgtacgatatgttccctctccgaatgaacactggctatggtgcccgtactccggaggtgaaatgcgcaagttggaggcttgctgtggaagcaca

SEQ ID NO: 6950 - DNA, 363 bp, Glycine max
  Clone ID: LIB3074-010-Q1-E1-H7
tgggtatcgggtatagtttagtggtaaaagtgccattcgggtccatggacccctaaatacttaagggatcccccgtttgatgcatattccgatcaaaaacttgatttcttacttaaagggaatcctttagaccctcaatgaatgatttgcggtataagatacgttatcgtaatgtgtggacaagaggagacaattcgagagtgagagcgtaggttcgggggtggtgacacataggtgtttgcgggttggctctaggatccgaagttgtgtgtgtaagacgaaaggatctatggagagatatacgtaaagtttctttctaatcgtaactaaatcttccattttttgtatagtagagattgaagc

SEQ ID NO: 6951 - DNA, 463 bp, Glycine max
  unsure at all n locations
  Clone ID: LIB3074-009-Q1-E1-H4
gggtggcgatacgctggaagatttatcaaatgttgtttcagatgcctgtatatgtcttcagaacaacaacatacctttcaatgttcttatctctgactgtggaaagcaagtctatctgttaccacagtgttatgcagagaaacaagctcttggagaagtggatgccgagcttcttgacacccaagtgaatcctgctgtgtgggaaattagtgggcacatggttctaaagaggaagaaggattatgatgaggcatctgaaggcaatgcttggaggcttcttgcagaggtgtccctctctcaagagaggtttcaagaagtcaatgatcntaattttgaagccattggctgtggtgaattggaggatgtcaacgttgaaagtgtcaaagaagttgatgcagtcagcacaagcgaacaccctactgtggtggtagctggttcacaagaatgtgtgattctacactaa

SEQ ID NO: 6952 - DNA, 375 bp, Glycine max
  Clone ID: LIB3074-009-Q1-E1-H6
ggggcacagatgggtctggagttcgtaaatactagagtcactgtcataatggtgacaggccttgatttcatcgtagctattttataggaaacatagcatagcctatgcgtacgatttgttccctcttatttagaacaatgatgaatgtgcacgtacacctttagttttatgatttttttaggagcttactatatgttctttagtgaatcttttagctttcataacttatccttatgtgcgtttagtagtgtccaaagatggtatcaatgggtatccatgaatttcacatacacctgtctataacatttgtctgatcataatactgcagagcatgtcatcaatttaatcgacacatttgtgttcagtatagatggc

SEQ ID NO: 6953 - DNA, 156 bp, Glycine max
  Clone ID: LIB3074-009-Q1-E1-H7
gtggctgtcttgtaggtgacagtccttgatttcatcttagctatactatagctcgaggtggtggaagtatacgtgcgctttgttcccacgccctaagacctctgacgagtgtctacgcatacgttaagtgttatcatttttttaggtctgtactgt

SEQ ID NO: 6954 - DNA, 453 bp, Glycine max
  Clone ID: LIB3074-009-Q1-E1-H8
ggcattggggcatgcttttaatttcctagatctcccaaacaaattgtagcataagtcccatggccaaagagactagtgttgtttatctatatcccagcaaatcacaagtttggggtgagaattttgatcataaaaaacttgtaataacaacactagctgctaatggaaagaaggaggagagtaatggagcacctaatgacacatatcctgcgtttcccgggtggtatgctgatgtttcctggccaggagaagcacacacatataaaatagaaaagattctattccacgggaaatcagaattccaagagcttcttgtatttgagtcttctggacaaggcaaggttgcaattcttgatgggcatatccagctgacagaaaacgatgaatttgcttaccaagagatgctcactcaccttgcactctgttccattccagattcaaagaacgtgctgc

SEQ ID NO: 6955 - DNA, 224 bp, Glycine max
  Clone ID: LIB3074-009-Q1-E1-H9
gggacagggacaacacataataaagatgagttttaaaaaaaaaaatagcggtcgcacaagtggatttgatcgcacctattccttcatgcggtgtcagatgtcttcaatgaagtcaccttccttcaaattaatgactgctccatttcagagtcatgactggtatcaccctgatgctactcatcttacacgtcttgcagcacaacgccctttcaacagctggcgta

SEQ ID NO: 6956 - DNA, 201 bp, Glycine max
  Clone ID: LIB3074-010-Q1-E1-A10
gacagctgcaccattacaaccacactaaaatggcttcatttgaatccttccaaatgctgcttcttgcaacctcatacacctcatgactcacagccttgttatgttactgacactctattttacaagctaccactgtacatcactcgagtgtatattccaccaatgtacaaaccattcgattattgtctaaaaggattcatt

SEQ ID NO: 6957 - DNA, 417 bp, Glycine max
  Clone ID: LIB3074-010-Q1-E1-A11
gatctggcagcagaaaaacaagtagttgagaactaagaagaaggaaatggcttcctcaatgatctcctccccagctgttaccaccgtcaaccgtgccggtgccggcatggttgctccattcaccggcctcaaatccatggctggcttccccacgaggaagaccaacaatgacattacctccattgctagcaacggtggaagagtacaatgcatgcaggtgtggccaccaattggcaagaagaagctcgagactctttcctacttgccagacctcgatgatgcccaattggcaaaggaagtcgaataccttctaaggaaaggatggattccttgcttggaattcgagttggagcacggtttcgtgtaccgtgagcacaacaggtcacctggatactatgatggacgctactggaccat

SEQ ID NO: 6958 - DNA, 424 bp, Glycine max
  Clone ID: LIB3074-010-Q1-E1-A12
ccttcagggttaagcggtgagatttgcgaatctgagaaatggcggattcttctcgggaggagaacgtttacatggcgaaattggcggagcaggccgagcgttacgaggagatggttgagttcatggagaaggttgcaaagactgtggaggttgaggagttgacggtggaggagaggaatctcctctctgtggcttacaagaacgtgattggtgcgaggagggcttcgtggaggatcatatcctccattgagcagaaggatgagagcaagggcaatgacgaccacgtggccattataaaggagtacacgggcaaaattgaggctgaactcagcaagatctgtgatgggattttgaacctccttgagtccaacctcattccttccgctgcatctcccgagagcagagtcttttaccgtaaaatgaa

SEQ ID NO: 6959 - DNA, 199 bp, Glycine max
  Clone ID: LIB3074-010-Q1-E1-B1
ggaggtagtgaggtacgtagctcaaaaaggtgttccccaaaccaaggtagctaaatggcatcatcatttgtgggcactttattacccaacaagttcacacaagacaaacacttatcatctgttcctgcaagtagaggtgctccaacaaggagaagagtacacttagcaacaacaagagcatagagcagtgacgactgtc

SEQ ID NO: 6960 - DNA, 327 bp, Glycine max
  Clone ID: LIB3074-010-Q1-E1-B11
gatagcatattccagtgtttttcatttcatcgtgcattcaatggccaccacagcatctctatccggaaccatggtgagcacctccttcatgaggaggcaacctatcaccaccatcaagccgggacacattctccaccgttgcgtgaagctctttttggtcagattattggtccaagtgttcgtgtcacttgcatggcctcgtcacatggtgaatctcataaccccagactgataactggagtttgaatgcccatctgatgttttcactgtttacaatgcataggatgaacgcattgatcttccctactcgtgcagggccggttcttg

SEQ ID NO: 6961 - DNA, 186 bp, Glycine max
  Clone ID: LIB3074-010-Q1-E1-B12
acaaggtaagggtactgcagcgcgataacaagagaaagggttagtagtcaatcacactacggcctctctagcagatcttgcgatgcatgttcagccacgcgtggatgaatagccttgtcggaagttccctcgctgcaactaacctctcatttacaccctcacggcactgtgtcaaatcgaagaact

SEQ ID NO: 6962 - DNA, 162 bp, Glycine max
  unsure at all n locations
  Clone ID: LIB3074-010-Q1-E1-B3
ggagaggcncccagnngatnnctctttcagggagaaanagagagtgctgtagagagagagcacaacatattattttcattttcatctttttttgagtatcaagaaatggcaaccacggtgatgaccagtctccccgaattcagtggtcttagaccccaattc

SEQ ID NO: 6963 - DNA, 148 bp, Glycine max
  unsure at all n locations
  Clone ID: LIB3074-010-Q1-E1-C2
ggagtgatnanagatgaagaaaatgttggcttgtgcatgctctcaacccccatttctgaaagggacatggtcattccaccaccccttctctccaagcacagttccgcggtgactcagacccactgggccccaccgagtttcctgcctc

SEQ ID NO: 6964 - DNA, 153 bp, Glycine max
  Clone ID: LIB3074-010-Q1-E1-C6
ggtcgccatcccctttcacattttatcttgtgcattgagcatctgatgcggctcgcgccatggtggctaccatcatcaccacatgcgagccgtcactcgttgtcggtcttctgtcagtttcacgtttgctgcgtgttgcgtctgatacccttc

SEQ ID NO: 6965 - DNA, 156 bp, Glycine max
  Clone ID: LIB3074-010-Q1-E1-D1
gataccagcatcagacaaagcagtgaagtcacaggcttacgttcattgggtggggtttgcattcttccacagaacgatacatgtctaagacatgcatgaagtgctactgcgctgacaagactaactgcagtacgggaaataggtatggtgttattg

SEQ ID NO: 6966 - DNA, 208 bp, Glycine max
  Clone ID: LIB3074-010-Q1-E1-D12
ggattcggagctgggtttgttttcggccattgatcttcgagtctctctctttttctctcgcgacgaacgtatcagcaatgtgtggagagtcagccagcggtattcacaagggtcgggtcgatctcttagacttcattgactggtctggggttgaatgcctcaatcacagctccacgcactcgtctcccaacgctatgagacaggggtt

SEQ ID NO: 6967 - DNA, 161 bp, Glycine max
  Clone ID: LIB3074-010-Q1-E1-D2
ggcacaagtgagtttgttgatcgagataactagaaacagtgttgagtgaaaatgaacgtccttgttttcttcgttgctacaattttagtagcatggcaatgccatgcgtacgatatgttccctctccgaatgaagactggctatggtgcccgtagtccgga

SEQ ID NO: 6968 - DNA, 349 bp, Glycine max
  Clone ID: LIB3074-009-Q1-E1-H3
gacgacgcatcctaaataagcatcttaattcatagtctcttggtccttccttccttcttctgctcaataagtgtgtgccactctaattaattaccacccccttctagacatagttcttctccctctgttctctattctctacactgtgataccaagatgaaggtagcatttgcagctgttctacttatatgccttgtcctcagctcctccttgttcgacgtgtcaatggctggttctgctttctgttcctccaagtgctcgaagaggtgttctacagctgggatgaaggacacgtgcatgaagttctgcgggatgtgctgcagcaagtgcaactgtgtgccatctggga

SEQ ID NO: 6969 - DNA, 164 bp, Glycine max
  Clone ID: LIB3074-010-Q1-E1-D4
gaatctctgaaaccacaattcacaaccgaaacagtttgcatctctctcacataatgagaacaatatcaaatgtgctcccttctcttcgtcttcgtcttagtctcaagcagcagcatagcttccaacctctcaacccccagcaactgaggcaagtcctcctgcag

SEQ ID NO: 6970 - DNA, 151 bp, Glycine max
  Clone ID: LIB3074-010-Q1-E1-D5
gaagtgagtttgttgatcgagataactagaaagagtgtgatgaaaatgaaggtccttgttttcttcgttactacaattgtggtagcatggcaatgccatgcgtacgatatgttccctctccgaatgaggactggctatggtgcccgtagtc

SEQ ID NO: 6971 - DNA, 174 bp, Glycine max
  unsure at all n locations
  Clone ID: LIB3074-010-Q1-E1-D6
tgcgagacgacagaagggngggtgcgacgannatatccccgtttccctcgggcctcgtgactattgagccatatagtggcgcattcgcgcgtgcgtccttcggctcttagcttcgcgtgacttgagnaaaagaggaatgtagggtcacggaggggtttcagtcctgctggcatc

SEQ ID NO: 6972 - DNA, 158 bp, Glycine max
  Clone ID: LIB3074-010-Q1-E1-E1
gacaagtgagtttgttgatcgagataactagagacagtgtgatcaacatgaatgtccttgttttcttcgatgctacaattttgttagcatggcaatgccatgcgtactatacgttccctctccgaatgaacactggctagggtgcccgtactccggag

SEQ ID NO: 6973 - DNA, 260 bp, Glycine max
  Clone ID: LIB3074-010-Q1-E1-E10
ggagacggtaccagataagcctaaacacgaaactcgcatattccctcaacactggagtcgctggaaaattcattctgggactcagctgagctgaccaagcatgattcaacatggttgcattgtacctcacgggtgtgtccctctgaattctaggtcacgcaaccatggtatacctagtacctctgcctttcgttgcgcttctctaatgcctcccaaagttgccgtctctaacatccggagcttttggggacatactctgg

SEQ ID NO: 6974 - DNA, 308 bp, Glycine max
  Clone ID: LIB3074-009-Q1-E1-E5
ggagcagaagaacaagtagttgagaactaagaaggagaagcaaatggcttcctcaatgatctcttccccagctgttaccactgtcaaccgtgccggtgccggcatggttgctccattcactggcctcaagtccatggctggcttccccaccaggaagaccaacaatgacattacctccattgctagcaacggtggaagagtgcaatgcatgcaggtgtggccaccagttggcaagaacaagtttgagactcttccctacctgccagaccttgatgatgcacaattggcaacggaactcgaataccttc

SEQ ID NO: 6975 - DNA, 357 bp, Glycine max
  Clone ID: LIB3074-009-Q1-E1-F1
gatccttcgtccagctagcaccacattcacctgaggcttccaaagcaatggcttcccttgcagcatccactgctgctgcttcccttggcatgtcagaaatgcttggaaaccccatcaacttcagtggtgccacaaggccagctccatctgcttctagtcctgcctccttcaagactgtggctcttttctccaaaaagaaggctacaccaacacctccaaaaaaagctgctgctgctgctcctgccaatgatgagcttgccaagtggtatggtcctgacagaaggatcttcttgcctgacggtctcttggaccgatccgaaatcccagagtactttgaccgaaaaattcctggagact

SEQ ID NO: 6976 - DNA, 448 bp, Glycine max
  Clone ID: LIB3074-009-Q1-E1-F2
ggtgcacaagtgagtttgttgatcgagataactagaaacagtgtgatgaaaatgaaggtccttgttttcttcgttgctacaattttggtagcatggcaatgccatgcgtacgatatgttccctctccgaatgaacactggctatggtgcccgtactccggaggtgaaatgcgcaagttggaggcttgctgtggaagcacacaacatctttggctttgagaccattcctgaagagtgcgttgaagcaacaaaggaatacatccatggcgaacaatatagattagactccaaaacagttaaccaacaagcttacttttatgccagagacctcgaagttcaacccaaggacacatttgtgttcagtatagatggcaccgtactctctaatatttcatactacaaaaaacatggatatggggtggagaaatttaactcgaccttgtatgatg

SEQ ID NO: 6977 - DNA, 421 bp, Glycine max
  Clone ID: LIB3074-009-Q1-E1-F3
tggcacaagtgagtttgttgatcgagataactagaaacagtgtgatgaaaatgaacgtccttgttttcttcgttgctacaattttggtagcatggcaatgccatgcgtacgatatgttccctctccgaatgaacactggctatggtgcccgtactccggacgtgaaatgcgcaagttggaggcttgctgtggaagcacacaacatctttggctttgagaccattcctgaagagtgcgttgaagcaacaaatgaatacatccatggcgaatcatatagatcagacccaaaacagttaaccaacaagcttacctttaagccaaaaaccttcaaattcaacccaatggaaaaattggtgtcagtatagatgggaccgttatccccatatatccatactacaaaaaacatggatatggggtggag

SEQ ID NO: 6978 - DNA, 362 bp, Glycine max
  Clone ID: LIB3074-009-Q1-E1-F5
gatagaagaagcagaaagagaagcattagcaaaagcaagaagaactagtctaagcagaaatggcctcttcagtgatggcatctgtggccctcaaacgtgcccctttcactgttgagaagtcctcagttagaggccttccctccctctcaaggaactcctcttcattcagagttgtggccagtggtggcaagaagatcaagactgacaagccttatggaattaatggtggcatggctttgacggaaggagttgatgcatctggcaggaaaggaaagggaaagggcgtttaccagtttgtagacaaatacggtgctaatgtcgatgggtacagtcctatctacgacaccaaggactggtctcca

SEQ ID NO: 6979 - DNA, 454 bp, Glycine max
  Clone ID: LIB3074-009-Q1-E1-F6
ggcagcatccattcttgttctcttctttctttcgatcagggtttcccctcgtctccgggctcgtttcgttctcgaataatcgatctacgataatgactcgcggtagccagagggatcgtgatcgcgaaagggctcaggctagaactggtgctaaaggcaagcagaaagatgatggattgacccctgaacagcgcagggaaagagatgcaaaggcgctgcaggagaaggccgcaaagaaagcggcacagggtgcaggagggaataatgcagctggaagcaaaaaataggcaataattcaatgagtagtttgagtttgccgtttgttgattgtggacatggaatttgtggaaattttatgttgcattattcatggagtatgatgtgtttattaatgtaacttgcgacggaagaacaaataagttgtgcctctttgaaagatgttgtcgctgggggc

SEQ ID NO: 6980 - DNA, 277 bp, Glycine max
  Clone ID: LIB3074-009-Q1-E1-F7
gcgacagaatggggcaacatccattcttgttctcttctttcttacaatcagggtttcccctcctctcagggatcgtttcgttctcgaataatctatctatgggaatggggcacgggtatcacatggatcagtgatcgcgatagggctcaggctagaactggtgctatctgcaatcacaaatatgatggattgattcctgaacagcttatggaacaagatgcacaggttgctcatgatataagtctcatattatgcggaacacggtccatgatgtaac

SEQ ID NO: 6981 - DNA, 302 bp, Glycine max
  Clone ID: LIB3074-009-Q1-E1-G10
aggggatgcaactgaataattaataaaagccatttcctaggagcctaagaaaatgcacagcacagcttgttcgctatctttctactttgcgccttcacctcatacctaccttccgccaccgcccaagacgtgctccacgtggatggcgatccgattcgggacggtttcatatactacgttttgccgggactaagaggaaacggtggcggcatataacgagccgcactccggaaagacacttgccctatcacagtagtgcaatctcccaatccaaaactctaaagggggtagaaatttaagtt

SEQ ID NO: 6982 - DNA, 342 bp, Glycine max
  Clone ID: LIB3074-009-Q1-E1-G2
gtagcgggtatagtttagtggtaaaagtgcgattcgttccatggacccctaaatagttaagggatcccccgtttgattcatattccgatcaaaaactttatttcttacttaaagggaatcctttataccctcaatgaatgatttgcggtataatatacattatcgtaatttgtatacaagaagaatcaattctaaattgacaacttgagttctaaaattatgaaacataagtttttggaattggatctataatccgaatttttttgagtatgacgaaaggatctatggagagatatatagaaagtttctttctaatcgtaactaaatcttccatttttttgt

SEQ ID NO: 6983 - DNA, 452 bp, Glycine max
  Clone ID: LIB3074-009-Q1-E1-G3
gataactgaagaaaactaaggaaggaatgaagagtgagcgtgaaagatgccttgggcgaggctttcagggtctccaaggctcgacgttgctattgacatgggcaatccatttctcaatctcactgttgatggtttccttaagatcggagctgtcgcagccacgcgatcagctgctgaagatacttatcatattatccaaaaggggaatatctcaagtcatgatttcgagaaaacgttgaagaagatgtgcaaagaacgtgtatattggggaactatagctggcgtttattttggaatgaataatggggtaaaaaggatccttgcaacaacaaatgggaaaatgccaataatgggggttcaataactggggccctggtatctgcaaccaacaacaacaagaaagaccaaattgcaatatatgccattactggggcagcaattgctactgctgc

SEQ ID NO: 6984 - DNA, 449 bp, Glycine max
  unsure at all n locations
  Clone ID: LIB3074-009-Q1-E1-G4
gatctggcagcagaaaaacaagtagttgagaactaagaagaaggaaatggcttcctcaatgatctcctccccagctgttaccaccgtcaaccgtgccggtgccggcatggttgctccattcaccggtctcaaatccatggctggcttccccacgaggaagaccaacaatgacattacctccattgctagcaacggtggaagagtacaatgcatgcaggtgtggccaccaattggcaagaagaagttcgagactctttcctacttgccagacctcgatgatgcccaattggcaaaggaagtcgaataccttctaaggaaaggatggattccttgcttggaattcgagttggagcacggtttcgtgtancgtgagcacaacaggtcacctggatactatgatggacgctactggaccatgtggaagctgcctatgtttggctgcactgatg

SEQ ID NO: 6985 - DNA, 343 bp, Glycine max
  Clone ID: LIB3074-009-Q1-E1-H12
gggattgccggaaaacatgaagcttaagcagttgggaggtctcctcggtggtcttcaacagttccctcaacccaaggcagagaattcttttgaggatgtgagcgacaaagtaccggctgactttggatgcggttgtggtacgttaggtgttgcagctgcactgttgagtgcagaacatgttcttggcattgacattgatccagaatctcttgagatatcttccaataatgctgaggaacttgaggttgacatcgattttattcagtctaatgtcatggactttggatggataggtcgaagtgttgatacagttaagaatgaagcctccactttggtactcggg

SEQ ID NO: 6986 - DNA, 284 bp, Glycine max
  Clone ID: LIB3074-009-Q1-E1-E4
caacaacgactttggttgggatgaaaacgggatcttcggggtgggacaattcatcggtgcacctccttgcagcactctaccaccaggtcgtaatcagggccattcccttcaagtccaagtgattcaatcaaacggttcatgcttaatcaagttgggaacaacaacaacaacaaaaatcaagccaatgtttgtgggttttggtttcatttcattaagatgatctgtttatctcttttcttctttttaaaatttaaagtctttgtattttgtaagtaaagatgtaa

SEQ ID NO: 6987 - DNA, 321 bp, Glycine max
  Clone ID: LIB3074-009-Q1-E1-B2
gacaaacatcatcaacacattctgctttacatgcactgccatgcttcaacaatcaagatagcatcataagtgttgcttaagaaagataacatatctctgtggcccattatctagagctacattggattcacagagatgtttatctcttatttcctttctcttttggtgggagaaggataaaagatgttaaaggaaaggacgatgaatcagagaaggcaaggtaataagtcatgagaacaatttgatccttctgttccttgtacggaccctgaaaaggtcctgtcaggtttttgttaatggttaatgggcccttttttggtt

SEQ ID NO: 6988 - DNA, 440 bp, Glycine max
  Clone ID: LIB3074-009-Q1-E1-B6
ggaccgacacagatctgtcttccgaagcacgaactaaatatggctgacttgttggaatggtcaaagcaagataagaaacgagtgcttcatgtcgtcgaccgtgttggtgaccttgatcgcaccatcaaattttacacagaatgtttaggaatgaagcttttgaggcacagagatatcccagaggacaaatatgcgaatgcttttcttggatttggccctgacgaatcccattttgttgttgaattaacatataattatggggttacctcgcatgacattggcgatcgctttggacattttgcaattgcaactcaggacatttataaattggctgagcacatcagggccacaggtggaaacatcacactggaacctggtccagttcaaggtggaactaccgcttatcgcctttgttaacgatcctgatggttacacttttg

SEQ ID NO: 6989 - DNA, 430 bp, Glycine max
  Clone ID: LIB3074-009-Q1-E1-C11
tgcgagcatacatagagcgggataactggctgtgagcgggtgtagtttcacaaaccgtggtcttatcaactatggcggagacacttctatcgataacccagccgtgtaccaggctcaccaaaacgtcaatgagatgcactcaggcccttccgatgactacatgagcctcactcttgaggctcatatatttgaatggctgtttgccatcagggggcctcgtaatactgacttatgcggtggcatgtatcactgaccgcttcaactgccttcagaatatcccatcaaacctccttcgtttatgttgctcacacctactagccgttttgagacgcaatccatgatgtgcttgagcacatcagatcatcatcctgagcattggcatccatcatcgagcattacgactgcattacttgcattgattgcattcatg

SEQ ID NO: 6990 - DNA, 407 bp, Glycine max
  Clone ID: LIB3074-009-Q1-E1-C3
gattgtgattcatttgcacatttggaaagtgttgtttttctttttttcatttgcattgcaaagcaaaaaccttgcaaattgcaatggcttccaacaaggttattaccaccatcttggttctttctctccttgcctactcaacatcattcaccaatgcatgtggcacatgccacccaaaacctactccttctccccctcctccatcagggaagtgccccaaggacacattgaagctaagggtgtgtgctgatgttctaggacttgttaatgttgttgttggttcccctgtctctagcaagtgttgtgcattgcttgaacgtttggctgattcggaggctgcactttgcctttgcactgctattaaaggcaatgttcttgggatcaacttgaatggtcctatcacactc

SEQ ID NO: 6991 - DNA, 122 bp, Glycine max
  Clone ID: LIB3074-009-Q1-E1-C6
tggggggaggaagaataattgtgctgcgagggtaacgtctcgttgtgttgcgtcgtgtcgttcgctgttcctctgtttctcgtttgtgtgttcagaccgaaccctacctccgcatctcaatc

SEQ ID NO: 6992 - DNA, 213 bp, Glycine max
  Clone ID: LIB3074-009-Q1-E1-C8
agctgcgcagagatagaagggggcacaagtgagtttgttgatcgacatatctagatccagtgtgatgaacatgcaggtccttgttttcttcgttgctacaattttggctagcatgcgagtgccatgcgtaccacatgttccctctccgactgaacactggcgtatggtgcccgtcctcctgatgtgaactgcgcacgttggaggcttgctgtc

SEQ ID NO: 6993 - DNA, 297 bp, Glycine max
  Clone ID: LIB3074-009-Q1-E1-C9
gccagaagctagtcaaagatttaagctgattaatgggcattcagctagaagaacacatcaattcagagcatcaagtacaacaaatgaaacacttggacgcaacacctagagaagctaaagtagacaaacacttgacgcaacaattgaaatggaaactcacattggaagtgatctaattgttgcaaaatctcggtcattggcttcacatactgatccccccagatctggagtattacatggtaatccattaaatagacacttggagggaaatcaacattctacatccacatctgatac

SEQ ID NO: 6994 - DNA, 315 bp, Glycine max
  Clone ID: LIB3074-009-Q1-E1-D2
aaaaggccaccggaagggagcacaagtcagtttgctgatgtagactttgctctgcagtatactcaaacttcacgtctctgttcgctcccgctgcatccttcatggtagcatggtgatgcaacacgtccaacaatcatcccgctcagagtcgattcacgcacaatagttggcgtaatcaggaggagtcctctccatattggacgcctcctgcggaattaaacatcatgttttcgcgttatcaacattcttcgatcactcagtgtacaatgctaggtttacatcaatggagaataatctggtatagacactcctaca

SEQ ID NO: 6995 - DNA, 148 bp, Glycine max
  Clone ID: LIB3074-009-Q1-E1-D3
ggtgagttgagaggatcgtgagaggggcagtagccgagattccgtgagttgcaaaaatgaagacgattctttccaccgagaccatgaacatcccggacggcgtgagcatcaaagttcatgccaaggtcatcgaagttgagggcccccg

SEQ ID NO: 6996 - DNA, 364 bp, Glycine max
  Clone ID: LIB3074-009-Q1-E1-D4
ccgggcagcgaagacgacagaaggggacgaagggggggccttcactctgaaccaaataccatagtcttctctttgtccgtgacaaaacagttcccacacaaaaaagaaaaaagaaaaaagaaaagcactaggaaaaaatgaagaagggtttctcccttgtgctgctgattcttctgatccagtacaacaacgttgtcaacgcctacaacaacaaaaactgtgtcacagaggattgcctcatcggcaacaaggatttggaatcagagttctactttggatcccatgtggccagaatgctctacgatgtgagccaatctgtgagtggcaaaacaggcaataaaaataacaaagctgtaaattgtca

SEQ ID NO: 6997 - DNA, 229 bp, Glycine max
  Clone ID: LIB3074-009-Q1-E1-D6
gactcaccacgtgaaccaatatagcccaagccctatataaccaaaccctaacacacacccatttgattcagtttccatggctagcctcagggttggatttttggctgcagtgctctgcatggctgtggtgagtgcacccatggcacatgcagctatcacgtgcgggcaggtgactagcagcctgtccaatctcatcggttacatccagaagggaggaacgtcgttcctc

SEQ ID NO: 6998 - DNA, 376 bp, Glycine max
  Clone ID: LIB3074-009-Q1-E1-D8
gaaaattgcaggtgtagcagcagagagtgcggtaggctcttccgagacccgaagcagccatggggatcgatctcaaggccggaggtaagagcaaaaagaccaaaagaacagcacccaagtccaatgatatctatctcaagctcttggtcaagctttatcgcttccttgttcggagaactggcagcaacttcaatgctgttatacttaagagattgttcatgagcaaggttaacaaacccccattgtctttgtcaaggttgattaagtatacgaacgggaaggaagataagattgcagtggtggtggggtctataaccgatgatattcgtgtttatgaagttccaccattgaaagttacagcactcaggtttacaga

SEQ ID NO: 6999 - DNA, 429 bp, Glycine max
  Clone ID: LIB3074-009-Q1-E1-E1
ggaggtgaaggggaaaaaaaaaagagtagagtggataatggcttcgttatcgctttgcatagccatgagagcacccactccctcagcttctctcagtctcacgagcccaaaaccatcttcactctctttgaaccttacccgcacttgctccagcgctcgctctccgctcctccattgctccttcctctcttctccttcccatctctcttccccttcctccgtttcaggcttgtcacttggattggatttgacatctaatgttgggaccagaagaggaaaaggttctggcctagttgtgatggcacgcaaggctgctctttgtctgactaagagaagcagatcaagaaaatcattggcacgcactcaaggtttccgccaaagaatgagcacaccacgtggaagaactgttttaaggggacgacgcgccaa

SEQ ID NO: 7000 - DNA, 372 bp, Glycine max
  Clone ID: LIB3074-009-Q1-E1-A9
ggagagaaagagtggttgaaagcgtccattgaaggtagagagagagaggttttgggaattggtgctgcttcgtgtctgtttatttcctcgcgaggtttgagaattcagtgaagagaaaacggagtttccgatcctgcgatgtcctatatgatagatctgtgaggaaattgaactgaaaaaaaatggcgacgtcggaggtatcgatcaagggaaattcggtaaacggaaaacgagataacagttctggtgatgctagaaacagtggaggcgacgctcagaatgcttcttcatcatcatcatccgcgagaggtaacgtggtttcctctgcgtgtgccttgtggcctgttcggcgtgacgataaaaagttttttt

SEQ ID NO: 7001 - DNA, 252 bp, Glycine max
  Clone ID: LIB3074-009-Q1-E1-E2
ggtgcttaatggaacgcccttgagcttttctttctttctctgctctcttttcttttaggtttccactctcacacactctccctcttctctttctctgcaggaatctctcttctcttcttcactctctcaactcctgccaaacccccatttccgcagttcttaaatttggagtctgatgtctccgccattgctggttaccgaagatgaagggcattgccatgcctcaatggtaacatccgtatcttcaccatc

SEQ ID NO: 7002 - DNA, 348 bp, Glycine max
  Clone ID: LIB3074-004-Q1-K1-G5
gaccatagaagaagcacaaagagaagcaggggctctaggagcagcaacaactagtctcagctgaaatggcctcttcagtgatggcatctgtggccctcaaacctgcccctttcactgttgagaagtcctcagtgagaggccttccctctctctcaaggaactcttcttcattcaaagttgtggccagtggcaagaagatcaagactgacaaaccttatggaattaatggtggcatggctttgaaggatggaactgatgcatctggcatgaaaggaaagggaaagggtgtttaccagtttgtagacaaatactgtgctaatgtcgatggatacagtcctatctacgaca

SEQ ID NO: 7003 - DNA, 350 bp, Glycine max
  Clone ID: LIB3074-004-Q1-K1-G6
tttaccatagaacaagcacacagagaagcatagacgcttttaacagcagcaactactctcatcttaaatggcctctccagtgatcgcatatgtggccctcaaacctgcccctttcactgttgataagtcctcactatgaggccttccctctctctcaaggaactattcttcattcaaagtttttgccagtgtcaagaagatcaatacttacaaaccttataaaattaactgcggcatggctctaaaaaatcgaactgtatcatctagcttgaaaagaaagggaaaatgtgtttaccattttgtagacatacactattctaatgtctatagttacattcctatctaccaca

SEQ ID NO: 7004 - DNA, 371 bp, Glycine max
  Clone ID: LIB3074-004-Q1-K1-G7
ggcctcattttctagcttccggaccctaacacttctcttcctcttcgatcatcacctctccattaaggagattctcggaacatgcgtttcggttggttgcaccgttgatggaaaggatccaaaggacttgcagcaggagatttccgatggtgatgttgaggtccctctcgattgaggaagaagactttgtttctctctctttttccttctctcttatgtttgtttcgtgttttttaaatataaatctggggaaactattgaacgttttgtttaaggctattttactggtttggataatttagatgatggtttcgagagtattattatgggctgattagtttatttctctgctcacagtatgatatgttttt

SEQ ID NO: 7005 - DNA, 155 bp, Glycine max
  Clone ID: LIB3074-004-Q1-K1-G8
tcatctggcagcagaagaacaagtagttgcgggggaagaatgacaaccaaatggcttcctcaatgatctcttccccaactgttaccactgtcaaccatgccggttccggcatggatgctccattcactgtcctcatgtccatggcttggcttccc

SEQ ID NO: 7006 - DNA, 340 bp, Glycine max
  Clone ID: LIB3074-004-Q1-K1-H10
ggcctacgcagagagaaattaagtttctgaggagaccacttttctctttgattcatcaatggcaaccgcgaggaccgtgaaggatgtttcgcctcacgatttcgtgaaagcttacgcctcccatctcaagcgttccggcaagatggagcttcctgagtggactgatattgtaaaaacagcaaaatttaaggaattggctccatatgatcctgactggtattatgttagggctgcctcaatggcaagaaagatttatttgagaggcggtcttggtgttggggctttccagaggatctatggtggaagcaagagaaatggaatccgtcccccacatttctgc

SEQ ID NO: 7007 - DNA, 116 bp, Glycine max
  Clone ID: LIB3074-004-Q1-K1-H12
gatcccactctgttaacaactcattaacccttgtcatttctcatcttctcaccttattcaatcactgctcattcctatggttccgtatttgacccttccataatgatcataaacgc

SEQ ID NO: 7008 - DNA, 354 bp, Glycine max
  Clone ID: LIB3074-004-Q1-K1-H3
ggagcagaatcttcaggccaagccaggtaagcgcaggcaaagcaacaccccatatggcttcagcttctgttcccatggcgttgtcactgagctctgttaccaacaacaacaagccttcatccgaagccttcttcaggccactacccctacgccaaccaaagaggaccctcttcaccacgaaggcagtgtcaaactccaagcctcaaatcaatgcatctttgaaggagagggcagttgccggactcacagcagcttctgtgacagcatctatggtggttccggaggtggctcatgctgctggatatgagttctccccttccctaaagaactttctactcagcatctttgctggtg

SEQ ID NO: 7009 - DNA, 142 bp, Glycine max
  Clone ID: LIB3074-004-Q1-K1-H4
gggcagacgcagacgccgtgactagacgggggtcttactcgcgcccatctaagggtttctccttttgtttcccaacatggttgccgcttagaaaactaaaaagacccatggaagcatcaacaacaggctcgctcttgtcatg

SEQ ID NO: 7010 - DNA, 313 bp, Glycine max
  Clone ID: LIB3074-004-Q1-K1-H5
accaccttatcgaatggacttccaaggctgcacttctcttgtgtttcaatgttctcttcttcaccgtggttagctccacatatgtgccatgcaacccaccccccaatactccaaaacacccacctgtcccaaatccaccttacccaaagcaagcaagttgccccaaaaacactattaagtttgctgtgtgtgctgatgcgttacgtttgatcaacgtgcaacttgtgaagccaccaaagaccccatgctgcaacctcattgagggtctcgctgatcttgaagctgcagtgtgcctctgcactgctctcaaaac

SEQ ID NO: 7011 - DNA, 273 bp, Glycine max
  unsure at all n locations
  Clone ID: LIB3074-004-Q1-K1-H7
cgacccacgcaaactacggcttctataatactacatatagtttatagctaaacaganaatggtttcantgagagatcgtgttttaacttgatccttcataacccntcatcatcatcatcatcatcacctttaattgaaaaaaatgccgaccaaaaacatcgccttcgaaaggcctaaatattctactcacccctacactttaaaggcggagttggctaaattcatctccaccttgatcttcttgttcgccggttcaagttccggcatcgccta

SEQ ID NO: 7012 - DNA, 300 bp, Glycine max
  Clone ID: LIB3074-004-Q1-K1-H9
agggatagccactagttgcttgcacttccgagtggaggactcttatggattgcacattctctacccatgacccttatatgagagcgaaaatgacaaccaccttcgcgaccgtcgcaagactcggtggcgcattactgtcatccacctcatctcgtctcacctcagggtttgtgaaatccccggtgattgataggaatcccttgaggcaagctgtggcaatgggaaatgggaagattacatgctttgagaagaattggcttggggcagattacagtgtgattgggtttgggttgattgggt

SEQ ID NO: 7013 - DNA, 310 bp, Glycine max
  Clone ID: LIB3074-009-Q1-E1-A1
agaataaggttaaataaattctcgtagcagcgttttgtttcccatcgcccccttttgctctccctctgtgcagacatgttgttcttctcgtacttcaaggatttggtggggagggaagtaatcgtggagctgaagaacgatttggccatcaaaggaacattgcattctgttgatcagtacctcaacatcaagctcgaaaacactagcgtcgtcaatcaagaaaagtaccctcacatgctttctgtaagaaactgcgtcatcagaggttcggtagtgagatatgtgcaattgcctccagaaagggtggaca

SEQ ID NO: 7014 - DNA, 82 bp, Glycine max
  Clone ID: LIB3074-009-Q1-E1-A11
ccgtccttccttcttcggttcagctctctctccttctccctcccgtggcttcccttcggcgctgttccctgcccctcgtctc

SEQ ID NO: 7015 - DNA, 341 bp, Glycine max
  Clone ID: LIB3074-009-Q1-E1-A2
ggtgaagtgtatttggtcactgacctatcttggtagagatttgaagtttaaaccttcaaattaatcaaaccattttaatttgcctttagattctgagtcactgctgctatggcgctacgcgtacttcttgtgttggggatgttgctgatgttgtgccttgttaaggtttcatctgatccaaagatagaagaagaaatactggaagcagaagaagaactgcagtttcccgataacgagccacttatcgtgagagacgcgaacagaaggctaatgcaagatatggattgtggtgggttgtgcaagacgaggtgcagtgcacattcgagggccaacttgtgcac

SEQ ID NO: 7016 - DNA, 304 bp, Glycine max
  Clone ID: LIB3074-009-Q1-E1-A3
cgacgacagaggggggggaatagagatgagaggcacagaagttgtgcttgttcgcacaaccatcaatggcatcagcattatcttctctctcctccacctcttcttcactgttacggcacagtttcaccggaaactcgactgctcctcccaatactcaattccccaacataaatgtacgcttttcggtcttcgctcaatagaaggcaaagtaacttcgacagattattttgaacgaatatgtggcttatgtacggatccaacggcaacttcttgatgtgaatgctggcattttcagaaattacct

SEQ ID NO: 7017 - DNA, 336 bp, Glycine max
  Clone ID: LIB3074-009-Q1-E1-A5
ttctttttctcatggtctagtttgtcatctaggattttcttcatcatgtcccttgtgtgcctgggtctcggtccattggcacaaggggaaatgacatgtggccaggttgtgagcaacctgaccccatgcatctcctatgtggtgtatggtggaaccaatgttcctgagcagtgctgcaatgggataagagatctctatggcatggcgcagaccaaaccagaccgccaagctgtttgcaactgcatcaagaacggtgttatgaacagtggggtcaacgtactctgactttacgctcaagcttgctggctgagcttcgcatgaaatgtggggtcatca

SEQ ID NO: 7018 - DNA, 372 bp, Glycine max
  Clone ID: LIB3074-009-Q1-E1-A6
gacatactagttcagcagcaactccactcaattgtatgcattgatccatggctagatacattaatattgtacttttgggaatagtgttggtagtggtgagattgaaaggtgcagaggcacagcgggcgttctttgtgtttggggattctcttgtggataatgggaacaacaactttttggcaactacagctcgagcagatgctcctccttatggcattgattacccaaccggaagacccactggccggttctctaatggctacaacattcctgacttcattagtcaatcacttggggccgaatccacattgccttacttagatcccgagctcgacggggaaagattgcttgttggtgccaactttgcttctg

SEQ ID NO: 7019 - DNA, 193 bp, Glycine max
  Clone ID: LIB3074-004-Q1-K1-F1
ggcagttcacttccaacatattccatacggggggtgtatattcctacctttgccttcaagattcaaattttcatcaagaccctcaccggcaataccatcacccttgatgtggaaagctataacaccatctacaacgtcaacgccaagatccaggacaaggaatgaatccccccggaccaacaacgtctcattt

SEQ ID NO: 7020 - DNA, 280 bp, Glycine max
  unsure at all n locations
  Clone ID: LIB3074-004-Q1-K1-F10
cgggctctcgatcagggtttcccctcatctcctagctcgtttcgttctcggagaatcgatctgcnataacgactcgcggtaaccagagggatcgtgatcgcgaaagggctcaggctagaaccggtggtaaaggcaagcagaaagataatgggttgacccctgaacagcgcagggaaagagatgcaaaggcgctgcaggataaggcggcaaaaaaagcggcaaaggatgcaggagggaataatgcaggtggaaccaaaaattagacaataattcaatgagt

SEQ ID NO: 7021 - DNA, 423 bp, Glycine max
  Clone ID: LIB3074-004-Q1-K1-F12
cccattcgtccgagggttccgttgagaaaagacgacggatgggggtagccataaaaatccacattttgaggttttgcattgtgcaacttcctcgcgccatggctgctaccatcatcacatgcaagctctcactgcttttaagccttctctcagtttcactattgctgggtgtgagttcatcagatacccttcagaatgtagggacaattcccccaacatgcaagcgcatagagtgtcccagctatgatgtcattcactttggcaacggctacgaaatccgtcgctataattcacccgtttggatttcgaacagccccattctagacatttctctggttgaagccacaagaaccggcttcaggaggctatttgattatattcaaggtaagaataactacaagcagaaaattgagacgacagcgc

SEQ ID NO: 7022 - DNA, 412 bp, Glycine max
  Clone ID: LIB3074-004-Q1-K1-F4
cttcctacggctgcggatacaactcaaaggcattttttgcacgtgctttaccatagagtgcgggggggtcatccgataccggaagcagccttggggatcgacctcaaggccggaggtaaaatgcaaaaaaaccaaaggaccagcgcccaagcccaaggatatctatcttaagctcttgatcaagctttatcgtttcattgcacggagaagtgaccgaaaattcaatgccgttatactcaagagattgctcatgagcatggttaacaggcccacattggctttgccaaggttgattcagtattccaaggagaaggaagataaaatcgctgtgggggtggacatgatacccatggatattctatgttatgaaattccagccttataggtgacagcactcatgtttacagagact

SEQ ID NO: 7023 - DNA, 192 bp, Glycine max
  Clone ID: LIB3074-004-Q1-K1-F6
gacggggaatacaacctcgaaaagagttctttcaaaatgcaagcaggcttaaccttcgatgcccccaacgttgtgccatttgcacccacaaagagtgtctcccatattaccatctttcccaccaaattgaaagccccgcgctcctcacctcgttactcttcgattagggttggaaccggggagcccgacact

SEQ ID NO: 7024 - DNA, 370 bp, Glycine max
  Clone ID: LIB3074-004-Q1-K1-F7
ggtgagacgagggtaaggtcgcgttgtgttgcgtggtgtcgtgcgctgttcctctgtctgtcgtttttgttttcagaccaaaccctagctccgcatcgcaaccatgtcgaccaagcaaggtggaaaagctaagcctttgaagaaacccaagtctgataagaaggattacgacgaggttgacatggctaacattcagaagaaaaaggaagaggagaaggcgctaaaggagttgaaagccaaggcgcaacagaagggaagctttggaggttctgggctcaagaaaagtggaaagaaataagggctctttatcatgattgtatacatccaatattgagccctgtagtttattaccatgataacttctgtctta

SEQ ID NO: 7025 - DNA, 359 bp, Glycine max
  Clone ID: LIB3074-004-Q1-K1-F8
gggcacaagcgagttcgttgatcgacattgcttggagcggggagaagaatgggaacggtcatggtctgctccccaactacatcaatcactcgcacaggtcatgtgctcaaacgacctgttggggcctcatcctctaccgttcttggattgccagcaatggccaaggcggggagagtgaggtgctccatggaggaaaagccttcaagcagctcaaacctagggatgggggcatccttgttagcagctgcagctgccgcaaccatgtcaagcccagcagccatggctttggttgatgagagactcagcactgaaggaactgggcttccctttgggcttagcaacaaccttcttggttggat

SEQ ID NO: 7026 - DNA, 255 bp, Glycine max
  Clone ID: LIB3074-004-Q1-K1-F9
ttccaaaaaccaccgaagggtcctccccattggcaaaccctaactccaagggattgtcttaaaaacaggggcctctatcatatacggaactcactctacttcattcgctctcacgattcatgatcctcaacctaccttcttgatcctgatactctaccctacttagattaacccatccccacaaatcttatagattctggtgctccatagataataatccttcaagcagctcagacctacagattaatgcatgct

SEQ ID NO: 7027 - DNA, 379 bp, Glycine max
  unsure at all n locations
  Clone ID: LIB3074-004-Q1-K1-G1
tcttacttcttctaaagatttcannaaggggcctcattttctatcttccagaccctttcaaatgtctgcctggtccgatcatcacctctccattaaggagattctcggaacatgcgtttcggttggttgcaccgttgatggaaaggatccaaaggacttgcagcaggagatttccgatggtgatgttgaggtccctctcgattgaggaagaagactttgtttctctctctttttccttctctcttatgtttgtttcgtgttttttaaatataaatctggggaaactattgaacgttttgtttaacgctattttactgttttggataatttaaatgatggcttcgagaggttttattatgggcttattagtttatttctc

SEQ ID NO: 7028 - DNA, 431 bp, Glycine max
  Clone ID: LIB3074-004-Q1-K1-G11
aattcccggggcggcccaagccttcctcccggttgcaaaaaacccacaaaaggggcctctcactcactagaatttttaatgtcttggtccttgaaactacaggaggggtcttttctctttttctatttatctcatctcacaccctttaatgtaacctagagagaatcaaaataataccactttcttagtttcaaactcgacttttgagggtcttttctctattaaaaacacacaagagttttagtcttttagctaacagtgttcatatgatgaatgcttcaaagttcattaaatgtgttactgttggagatggagctgttgggaaaacctgcacgctcatttgctacaccagcaacaagttccccactgattacataccaacagtatttgacaatttcagtgccaatgtagcttgtgatggaagcattgtc

SEQ ID NO: 7029 - DNA, 391 bp, Glycine max
  Clone ID: LIB3074-004-Q1-K1-C5
tggtgacacaccaaaccaaagtaagagtgagcaaggtccaacaccatagtgaaatggcttccaaggctgcacttctcttgtgtttcaatgttctcttcttcaccgtggttagctccacatatgtgccatgcaacccaccccccaaaactcccaaacacccaacctgtcccaaagccaccttccccaaagcaagcaagttgccccaaagacactattaagtttggtgtgtgtgctgatgtgttaggtttagatcaacgtgcaacttgggaagccaccaaagaccccatgctgcaacctcattgggggtctcgctgatcttgaagctgcagtgtgcctctgcactgctctcaaagctaatgtgttgggcatcaacctcaatgttccagtgaac

SEQ ID NO: 7030 - DNA, 245 bp, Glycine max
  Clone ID: LIB3074-004-Q1-K1-C7
caaccaccttcgcgaccgtcgcaagactcggtggtgcatcactgtcatccacctcatctcgtctcacctcagggttggtgaaatcgccagtgagtgctaggaatcccttgaggcaagctgtggcaatgggaaatgggagggttacatgcttcgagaggaattggctgcgggcagattacagtgtgattgggtttgggttgattggttggctaacaccctcaagcgtaccggctatcaacggtaaa

SEQ ID NO: 7031 - DNA, 363 bp, Glycine max
  Clone ID: LIB3074-004-Q1-K1-C8
gataagaaagaagatcaaaagaaaaaagagaggcgggtggcagcactgggtggctttaccgacatcaccggagcacagaacagcatcgatatcgaaaatctcgctcgctttgctgttgatgaacacaacaaaaaagagaatgcagttctggagtttgtgagggtgattagtgcaaagaaacaagtggtttctggcaccttgtactatatcactttggaggcaaatgatggtgtgacgaaaaaggtttatgaaactaaggtgttggagaaaccacggttgaacatcaaggaggttcaggaattcaagcccatcactgttgctgttaatcctctttcggtgacggtctagcacatagctaggtta

SEQ ID NO: 7032 - DNA, 280 bp, Glycine max
  unsure at all n locations
  Clone ID: LIB3074-004-Q1-K1-D1
gccggaattcccgccgacccactcatccttccactcttcctaacctcatnattttttccacaaaaaccccacacntaaattccagactctttataactataaacagccttaccaacatcaacttccttctcttcttcatttatacaatttttctaccatcttatttccatgcgtacgacatattccctcttctaatgaacactacctatcttacccattctccgcatattaaatactcaattttaacactttctattcaatcactcaacatctttctctt

SEQ ID NO: 7033 - DNA, 326 bp, Glycine max
  Clone ID: LIB3074-004-Q1-K1-D12
aataaaaaggagggtccttgtttttttcgttgctccaattttggtacaatggtattgccatgcttccaatttgttccctctccgaatgaacactggctttggggcccgtactccggaggtgaaatgcgcaagttggaggctcgctgtggaagcacacaacatctttggctatgagaccattcctgaagagtgcgttgaagcaacaaaggaatacatccatggcgaacaatatagatcagactgcaaaacagttaaccaacaagcttacttttatgccagagacctcgaagtgcatgccaaggacacatttgtgttcagtatagatg

SEQ ID NO: 7034 - DNA, 333 bp, Glycine max
  Clone ID: LIB3074-004-Q1-K1-D7
ctctcaatctcggggagatcgttgatgctaacaaaaagctcacagaaacgcctggccttgtcaactcacgcccatacgaagatggatggatgatcaaagtaaagccaagcgatccatctgaattacattccttgatgggtccaaaggaacacacaaaattttgtgatgaaaaagatgcacgtcattaaagtttgaattgaattggctcctgcagttatgtgtgggactgactgttcttcatatgtttatgatcttattaccttctgaacagttttttaatatgcaacagaactgtttctttccatttttacttcccctgctattgtctcttgt

SEQ ID NO: 7035 - DNA, 330 bp, Glycine max
  Clone ID: LIB3074-004-Q1-K1-D8
ggactcaccactcaactcgctgcttcaaacttaaaagtaaacccaactctatttccttctctcaggtctcagagtggcaaactgtaaagttttgatgcagaatggctgcaaccagggctcgagttagtagcttctctcgcaatgtatcaactgtgacttctcagaatcatggacttaagcatggccctaatgggacaatgttcatttcatctgggattccagatctggacaagattttaggtggcggtttttctctgggtagccctgtcatggttatggaagatcctgaagcacctcatcatatgcttctattgagaaattttatgtctc

SEQ ID NO: 7036 - DNA, 82 bp, Glycine max
  Clone ID: LIB3074-004-Q1-K1-D9
gaaaatcaaagtaagcgatttatccatccatggggtgatttgaccaaaagtgagggctaaccaactaattcctctggatttt

SEQ ID NO: 7037 - DNA, 335 bp, Glycine max
  Clone ID: LIB3074-004-Q1-K1-C12
caaaaaaacaccaaaggggatttcctaagaacctagggttggaatcaccggtttggtttaaccaatttgggccgttaaaataaaaaccaaatcgtgttctcttccattggcaaacatggcaactcaaatgagcaagaagagaaagtttgttgcggacggagtgttctttgccgaactgaacgaggttctgacacgtgaattggcggaggacggttactccggcgtcgaagttagggttacgccgatgcgcaccgagatcatcatcagagccaccagaacccaagccgttctaggtgagaagggaaagagaattaaggaacttacctcagtggtgc

SEQ ID NO: 7038 - DNA, 333 bp, Glycine max
  Clone ID: LIB3074-004-Q1-K1-E10
caaaaaaccaccaaaggggggtccaaggggtgaatggttggtggtggtaggtggtctttattatttggtggtactgggttagggttggttttttctctcacctgaaaatgtctggctgcggtggtaactgtggttgcggaagctcctgcaagtgcggcaacggctgcggaggctgcaagatgtacccagacttgagctacactgagtcaaccaccaccgagaccttgttcatgggagtggcacctggtaatgctcaatttgagggtgctgaaatgggtgtgcccgctgagaacgatcgcttgaaatgtggaccaaactgctcctgccacccct

SEQ ID NO: 7039 - DNA, 377 bp, Glycine max
  Clone ID: LIB3074-004-Q1-K1-E11
ccggggcgacgcacgcgttcgtagcgagaaaaacaaacaaaagggattttttattggaacccgcgaaaagttggctgttccggcgatcataataacctgatggacggacacaatccacaagacccaaagcagagccctgctgacatgactgcctttgtgcaaaatcttcttcagcagatgcaaaataggttccagacaatgtccgactccattgttacaaagattgatgatatgggaagtcgcataaatgagttggaacaaagcatcaatgacctgagagcagagatgggagtggagtcctctccatcacctgcagcccctgctaagctaacggaggagataaccaaagaagagggttcagcttaagtggcattctg

SEQ ID NO: 7040 - DNA, 338 bp, Glycine max
  Clone ID: LIB3074-004-Q1-K1-E12
cataaattgcccgtgcagcagcagagagtgcggggggctcatccgagaccggaagcagcaatggggatcgatctcaaggccggaggtaaaagcaaaaaaaccaaaagaacagcacccaagtccaatgatatctatcttaagctcttggtcaagctttatcgcttccttgttcggagaactggcagcaaattcaatgccgttatactcaagagattgttcatgagcaaggttaacaagcccccattgtctttgtcaaggttgattaagtataccaaggggaaggaagataagattgctgtggtggtgggcaatataaccgatgatattcgtgtttatga

SEQ ID NO: 7041 - DNA, 315 bp, Glycine max
  Clone ID: LIB3074-004-Q1-K1-E3
gcagccaagaaaagaaagggctcacccattttcttcgtagccaaacactctgaaattctcagttatgtcgtggcaagcgtatgtggatgatcacctactgtgtgaaatcgaaggtaaccacctcactcacgccgctatcatcggccaagacggaagcgtttgggctcaaagcaccaacttccctcagttcaaacctgaggaaataactgccatcaataatgactttaatgagcctggatcacttgctccaactggattgtatatcggtggcaccaaatacatggtcatcccaggtgagcctggtgctgtcattcg

SEQ ID NO: 7042 - DNA, 351 bp, Glycine max
  Clone ID: LIB3074-004-Q1-K1-E4
gatctggcagcataagaagaggtatttgaaaactaagaaggagaagcatatggcttcctcaatgatctcttacccagctgttaccactgtcaaccgtgccggtgctgtcatggttgctccattcactggcctcatgtccatggctggcttccccacctggaataccatcaatgactttacctgcattgctagcaacggtggaagagtgcaatgcatgcatgtgtggccaccagttggcaagaataagtttgagactctatcctacctgccagaccttgatgatgcacaattggcacaggaagtagaataccttcttaggaagggatggattccttgcttggaattcgagtt

SEQ ID NO: 7043 - DNA, 330 bp, Glycine max
  Clone ID: LIB3074-003-Q1-K1-H8
ggaccacattccaaaacacaaacacatacatggtagtatcacttttgtctcggaatttgttcttttgagttatggcaagcttaaaggttgcatgtgtggttttgatgtgcatggctgtgatgagtgcaccaatgatggtgcaagccgtgtcatgcaatgatgtttctgtgaacctagcaccgtgcctatcttacctgatgcagggtggagatgttccagaatcgtgctgtagcggagtgaggaacattctgggttctgccagcagcacctttgacaaacaaaccgtgtgcaaatgttttcagcaagcttcatataactattgcattaacg

SEQ ID NO: 7044 - DNA, 312 bp, Glycine max
  unsure at all n locations
  Clone ID: LIB3074-004-Q1-K1-A1
ggcaattgtgtgaggaaatatccctcacgagtgggtataatgagagaagcggacatgaanaancaattagcatcaaggcgtttgctgatgtgggttatggtacatttgagcatttcaggagtgttgtccaagtccaaccacaccacaactacaacttctctgctgtgcgatggctccgtagaggactgcctcaacgttcaccacttggactcacagcttcccaccatctccagcacccacttccgcagaatcctcgctggagaaaaatgctgcagaggtaacactcagactgcaggtacaggtgatcccaat

SEQ ID NO: 7045 - DNA, 311 bp, Glycine max
  Clone ID: LIB3074-004-Q1-K1-A11
ggagtcacccgctgcaaatccaactcgtgcatgtgaagaaagaaaaaaaaaagggttggtctttggttttggtttggttaactccttccacttccacccatggtctccgaatccgaactcattcggccgcttccgcaagttcttccgaagctccaacttaaaaacaacaacaacggccacggtccgccgccagttgaaggccgatttcggaatcgacttatccgaccgcaaggcattcattagggaacaggtcgacttgttcctccagactgagcacatccattcacatcaagaagaagaaaaggaagaaa

SEQ ID NO: 7046 - DNA, 379 bp, Glycine max
  Clone ID: LIB3074-004-Q1-K1-A12
gacaccgtcaccaaaacaaaacacactaagaggggttcctttgtatacttcctagtgctgcttctttcagcccttatcctcatgcctcaagggcttgctacttactacaaaccaattaagaagccaccagtgtacaagcctccaatgttcaagccaccagtgtacaaaccaccggtttataagccaaaaccaccggtttacaagccgaaaccaccggtttacaagccaccatatatgatgccaccatacaagaaaccaccttatggaaagtaccctccagtataggacaacacccatgcctaaagcaagcaatgaggtctattatctacttaataaataaaaggaactgccttgtgttttctagcattgtgatttacaa

SEQ ID NO: 7047 - DNA, 357 bp, Glycine max
  Clone ID: LIB3074-004-Q1-K1-A3
gatctggcaccagaagaacaggtagttgagaactaagaaggagaagcaaatggcttcctcaatgatctcttccccagctgttaccactgtcaaccgtgccggtgccggcatggttgctccattcactggcctcaagtccatggctggcttccccaccaggaagaccaacaatgacattacctccattgctagcaacggtggaagagtgcaatgcatgcaggtgtggccaccagttggcaagaagaagtttgagactctttcctacctgccagaccttgatgatgcacaattggcaaacgaagtaaaataccttcttatgaagggatggattccttgcttggaattcgagtttgagca

SEQ ID NO: 7048 - DNA, 322 bp, Glycine max
  Clone ID: LIB3074-004-Q1-K1-A7
ggcaattgtgtgaggaaatatccctcacgagtttgtataaggagagaagcggacatgaagaagcaattagcatcaaggcgtttgctgatgtgggttatggtacatttgagcatttcaggagtgttgtccaagtccaaccacaccacaactacaacttctctgctgtgcgatggctccgtagaggactgcctcaacgttcaccacttggactcacagcttcccaccatcttcagcacccacttccgcagaatcctcgctggagaaaaatgctgcagaggtaacactcagactgcaagtacaggtgatcccaataatcccaact

SEQ ID NO: 7049 - DNA, 384 bp, Glycine max
  Clone ID: LIB3074-004-Q1-K1-A8
cgcagaaccttggcctgggcccttgccaatgctactcctgaacagcagaggactatgcttggtgaagctttatacccgttagtagataagctggagcatgaagcagcagcaaaggttactggtatgctcttagagatggatcagcctgaggtattacatctgattgagtcaccggatgctctcaaggctaaagttgttgaggccatggatgtgttgaagaaagttacacagcagcaatcaaacagcccagccgatcaactggcttcactctctctgaatgataatgtcgagtcttaagattatgtatgccagtttacaggaatacacatgttcttaaaacagtcacagttgtgtttctggtttttttgtaggattagcaaacac

SEQ ID NO: 7050 - DNA, 288 bp, Glycine max
  Clone ID: LIB3074-004-Q1-K1-B2
cttcaaaagcgagtttcagaccatatgggatcgactttccattaggaccaactgggagatataccaatggccgaacagaaattgacataatcactcaatttctgggatttgagaaatttatcccaccctttgcaaacactagtggttcagacatacttaaaggtgttaactatgcatcaagtggatctggcatacgcaacgaaactggctggcattatggtgctgctatcggctcgggattacagttagcaaatcacagagtcattgtatctgaaattgctaccaaac

SEQ ID NO: 7051 - DNA, 368 bp, Glycine max
  Clone ID: LIB3074-004-Q1-K1-B3
accttaagtcttccgaattcgaagttaattcgggggatggctaaggaaagggctcatatcaacattgtggtggttggtcatgtggaccctgaggaggcaaccaccattaacgagctgaagaagcctgttgtggaaaaagaagctccagggcatgccatattagggcatgcacgtacggcctcggaggggaaccagaaaattatgttaacaaaataatctggaaccctaatgtatcagtgtcatcatcagtgtgtagtttaagctagctttgctatggctacgttctttgagatgagagtcttgatgaacagtaccattctgatgtattgctttcctttgaagttaatgcatgcgtcttatcttctgtc

SEQ ID NO: 7052 - DNA, 377 bp, Glycine max
  Clone ID: LIB3074-004-Q1-K1-B5
ggggcagcagaagaacaagtagttgagaacggagaaggagaagcaaatggcttccccaatgatctcttccccagctgttaccactgtcaaccgtgccggtgccggcatggttgctccattcactgacctcaagtccatggctggcttccccaccagaaagaccaacaatgacattacctccattgctagcaacggtggaagagtgcaatgcatgcaggtgtggccaccagttggcaagaagaagtttgagactctttcctacctgccagaccttgatgatgcacaattggcaaaggaagtagaataccttcttaggaagggatggattccttgcctggaattcgagttggagcacggtttcgtgtaccgtgagcaca

SEQ ID NO: 7053 - DNA, 75 bp, Glycine max
  Clone ID: LIB3074-004-Q1-K1-B7
cttctatcgtatttcattgctccaaataaatacaaggctcccccaccttcatccaagcctgcctattctttctgt

SEQ ID NO: 7054 - DNA, 385 bp, Glycine max
  Clone ID: LIB3074-004-Q1-K1-B8
accgctcaattaccggggcggggcacgccttcggccaagggttccttccggttgcaaaaaaccacctaaaggggccccaagtaattttgtgggcggggttactagaaacaggggggtgaaaattaaaggccctggtttctttcgtgctacaattttggtagcatggcaattccattcgtacgatattttccctcttcgaatgaacactggctattgtgcccgtactccggaggtgaaatgcgcaagttggaggcttgctgtggaagcacacaacatctttggctttgagaccattcctgaagagtgcgttgaagcaacaaaggaatacatccatggcgaacaatatagatcagactccaaaacagttaaccaacaagcttacttt

SEQ ID NO: 7055 - DNA, 113 bp, Glycine max
  Clone ID: LIB3074-004-Q1-K1-B9
ccaaagacactattaagtttggtgtgtgttctgatgtgttaagtttgatcaacgcgcaacttgggaagccacctaagaccccatgctgcaacctcattgaaggtctcgcttat

SEQ ID NO: 7056 - DNA, 314 bp, Glycine max
  Clone ID: LIB3074-003-Q1-K1-H7
ggcacaagtgagtttgttgatcgagataacgagaaacagtgtgatgaaaatgaaggtccttgttttcttcgttgctacaattttggtagcatggcaatgccatgcgtacgatatgttccctctccgaatgaacactggctatggtgcccgtactccggaggtgaaatgcgcaagttggaggcttgctgtggaagcacacaacatctttggctttgagaccattcctgaagagtgcgttggaaccaacaagggattcattcatggcgaacaatatagatcagacttcaaaacagtttacccacaagcttactttt

SEQ ID NO: 7057 - DNA, 334 bp, Glycine max
  Clone ID: LIB3074-003-Q1-K1-F11
gagagccatgcatcttcttctcctatcacaattccatcaaaatccccttctatgtccatgtcatccttctagtctcctccaaaatcaattatacacaacatttccaattcatcgttcataatcccttattgaaatcaatgcttgttctcatataactattgttctccatactaacattaaaatttaaatatctattccttactactttatattactttaatcttcaattaactacacacttcaatatttgaacttcaccacctgcattacttgattaaattctttaattacaatcttttttccccctttataaacatcattttcatttttaaaa

SEQ ID NO: 7058 - DNA, 99 bp, Glycine max
  Clone ID: LIB3074-003-Q1-K1-F3
atttatttcttacactataattcattaaattatataatatatgtttacctattcctatatctctgataaattaaaattttatttataaaatcctttcaa

SEQ ID NO: 7059 - DNA, 246 bp, Glycine max
  Clone ID: LIB3074-003-Q1-K1-F5
agaagcgtggacaattcactcttgtagttggaggtttgttggtcatagcatatgctgttcctatggcacaatactatgcctatgtatccaaaaaataagataatataaatagatctggatgtcaaattctcactgatcaaattcacatgcataatgtgcagttgtaaccatgctcatgttacaatagagtttgagaaagctgaagaagaatacgatgacagtgtttgcttgtagaataatggcaaa

SEQ ID NO: 7060 - DNA, 300 bp, Glycine max
  Clone ID: LIB3074-003-Q1-K1-F6
gatactcaacaatctcaaaaccaaatctcgtcgacaaaatgcttggtattgtaaaggctctaaagtcctcgtgaaagggctgttccaaataccacaagaaggatgcgcgtgtcgacatgataggaatctcacaccattccaaacgcatgtaaaccagaatacaaaccgagaccagtattagtgtcttcatctacgaacacaccaggagacatattacaatattgtagtagaacatgattctcaatactcagacacacactgatcacgctacgatgaataacgttactgttaaggatattg

SEQ ID NO: 7061 - DNA, 420 bp, Glycine max
  Clone ID: LIB3074-003-Q1-K1-F8
gaagataaatctttcaaagaaaaaaggagggtgcttatagagagagcaaaacatattattttcattttcatctttttttgagtatcaacaaatggcaaccactgtgatgaccactctcccccaattcagtggtcttagaccccaattctcagctgcccctgtgaagaacttggttgctgtgcaacccatgagtcgcaaggggaagggtgcattgggagctcgatgtgactacattggttcatccactaatctgattatggtggcttctacaaccctgatgctgtttgctggaaggtttggattggctccatcagcaaacaggaaagccactgcagggctaaagctggaggtgagggactcaagcttgcagactggtgaccctgctggcttcacccttgctgacacctaggcctgtggatc

SEQ ID NO: 7062 - DNA, 386 bp, Glycine max
  Clone ID: LIB3074-003-Q1-K1-F9
gaaggtgcaagagtttgttgtgagctataggctagtttatcgtgaggagaatatgaagttgtttgttttctttgttgctgcagtagttttggtggcatggccatgccatggcgcaggctaccaaaggttccctctccgaatgaaaactggctatggtgagcgttcttcggaggtaaaatgcgcaagttttaggcttgctgtggaagcacacaacatccgagcctttaaaaccattcctgaagagtgcgttgaaccaacaaaggactacattaatggcgaacaatttagatcagactctaaaacagttaaccaacaagctttcttttatgctagtgaacgcgaagtccatcacaacgacatatttatattcggcatagataacaccg

SEQ ID NO: 7063 - DNA, 392 bp, Glycine max
  unsure at all n locations
  Clone ID: LIB3074-003-Q1-K1-G10
ttcacaagtgagtttgttgatcgagataagtanagacagtttgataaaaatgaaggtccttgttttcttcgttgctacaattttgttagcatggcaatgcaatgcatacgatatcttctgtcttaaaacgaacacttttctataatcctttactatacatattattagtcctcatattacaatttactattttttaactatacttatattacatattaacaccttcttactcttttttatacatttgttcttactctttgtataaaatgattcttcctatattgtattatttattcttatatttattttatttatactcaatgtgtttttatttttttattttattttatttttcctcttttttttacttttttttcatattttttttttat

SEQ ID NO: 7064 - DNA, 319 bp, Glycine max
  Clone ID: LIB3074-003-Q1-K1-G11
cgcaggtttggtctagttgagtaacatcagcttgtgagccaggtgggtacaccaaggtagtgggacaggtctctggcttagccaggttgggttggtggctgcaccatgctgcctgcccgctccaagttcagagttgaactatgagaactgagtgaagacacaggtctcctggttcctagacaaggggatactgcgtgaggctgccttcacagagcagcgttcacccctgcctcttcacagtggagggaataccggctgctgcactgtcagcccatataacctttactttttttaaaaaaaaaaaatatttttaagtaat

SEQ ID NO: 7065 - DNA, 361 bp, Glycine max
  Clone ID: LIB3074-003-Q1-K1-G12
aagaataaaaaaataaaggaaagagagaatctatataaatataaaaataatatatataaggtacaaatagtaaatccaggtacccattttatgataaactttccttccattttagtacctctagtaggcctagtatttccagcaattgcaatggcttctttatttctttatgttcaaaaaaacaagattctttagatacatataacaaagtaaaaatctggggtaattcattccccaattataatactaaattcaaaaaaatgctagtaatgagtataatctatcgctcatactatgtactgatatatactatggcataagttccaataacaagcaatttattattgggccgatttcactt

SEQ ID NO: 7066 - DNA, 153 bp, Glycine max
  Clone ID: LIB3074-003-Q1-K1-G7
tagttatatatgaactaaccatgtccatatatattatataaaagaactcatattttatatctaaaattgccccgctactactgtaaatttcgatattgattaaaaaacaaaacctttccgtttcatctctaattgtgaatataatattcaatg

SEQ ID NO: 7067 - DNA, 164 bp, Glycine max
  Clone ID: LIB3074-003-Q1-K1-H1
atatgaactagttatatatgaactaaccatatccatatatattatataaaataactaatattttatatctaaaattgccccgctactactgtaaatttcgatagggattaaaaaacaaagcctttccgtttcatctcgaattgtgaattgaatattcaatgacg

SEQ ID NO: 7068 - DNA, 353 bp, Glycine max
  Clone ID: LIB3074-003-Q1-K1-H10
gacaacaacaataacaatggctgcctcactacaagctgcagctaccttcatgcaacccaccaaggttggcatagcctctcgcaacctcaaatctacacaatgcatttctaaggcttttggcttggaacctgctgcagctaaactcacttgctcccttcagcctgatctcaaagaatttgctcaaaaatgtgtcgacgctaccaaaattgcaggattcgcccttgccacctctgctctcgttgtttctggagcaagtgcagaaagtgttccaaaaaggctaaccttcgacgaaatccagagcaagacatacttggaagtgaagggaactggaactgctaaccagtgcccaacca

SEQ ID NO: 7069 - DNA, 396 bp, Glycine max
  Clone ID: LIB3074-003-Q1-K1-H11
gacttgaaccactcgcatcttgttcctccgctcaacagctataataacatctttctctctccgaacagatcacactatggccacctcaagcgccaaatcagtccatgatttcaccgttaaagatgccaagggaaatgatattaatcttggtgactacaaaggaaaggtccttatcattgtcaatgttgcctcacaatgtggcttgactaattcaaattacactgagctcagtcagttgtatgagaaatacaaacagaaaggtctggaaattctggcatttccatgcaatcagtttggggcacaggagcctggatctaatgaacagatacaagagtttgtttgtactcgcttcaaggctgagtttcccgtttttgacaaggttgatgtgaatggtga

SEQ ID NO: 7070 - DNA, 322 bp, Glycine max
  unsure at all n locations
  Clone ID: LIB3074-003-Q1-K1-H3
ggaacttcccgggtacgacaccacgcgtatcgaccgctcgtncgtcaactcgtacgtactgctgcaatgtgcccacagccgggcatcgtgggtgattgtaaggacctcgaagtctcactaacgctcagtgagccgtgatctctgataaaagcgattcctatattgagggtgcatgaccgtgtggattcgctaacactaactcgtcaatatgcgatccaatgcggcatcttacgatgcatcggtagctgatcctggaacgctatagtatggattcgtacctatacatcagataggggcatctatggattacatcgctctggct

SEQ ID NO: 7071 - DNA, 350 bp, Glycine max
  unsure at all n locations
  Clone ID: LIB3074-003-Q1-K1-H5
gacacatcacaaaccaaacaacttctaacacatacgctactctctctctctctcttattgtatggccgccaattccagtagccgagggatcaccgccttagggaagcgagtcgccaaccggatctggacttccaacgcacctnctctcacttcaaggaggggagcatacagtagcggctcagtgtacgacaagaaccctgatgatgagatccagtctgggcaggtcccagacgatgtgatccatgctgcaacacaatccggcaaatactgggccccacatccacagactggggtatttgggcccccctgaggaagtgaccaaactgcttctgccattcactctgatgcgc

SEQ ID NO: 7072 - DNA, 309 bp, Glycine max
  Clone ID: LIB3074-003-Q1-K1-H6
gactgcgaaaccagcaggggctccaattcctactcttagccgcagatctctcagggcttgcatcttctcagttgtgaagatgtacacatcaaggaagaaaatccacaaggataaggatgctgaaccaactgagtttgaagagtcagttggacaggcattgtttgatctggaaaataccaaccaggagcttaaaagtgatctgaaggatttatacataaactcagctgtgcaagttgatgtttctgggaaccgcaaggctggtgttattcatgtcccttacagattaaggagaggtttccgtaagattca

SEQ ID NO: 7073 - DNA, 205 bp, Glycine max
  Clone ID: LIB3074-003-Q1-K1-D5
ggtagatcgaaagggaatcttcttcgatgggctccaagcggattctgaaggagcttaaggacctccagaaagaccctccaacctcttgcagcgccggtcctgtagcggaagatatgtttcattggcaagcgactataatgggtccccctgattgcccttatgctgggggtgtcttcatagttactattcatcttcctccggatta

SEQ ID NO: 7074 - DNA, 349 bp, Glycine max
  Clone ID: LIB3074-003-Q1-K1-D7
ggattgattccctcattcttcatccatagggatggccaccgtcacttctgcagccgttgctattccctcattcactggcctcaaggcaagcgcaggcaaagtgagtgccgcagttaaagtctcagctccccaagccacaaggttgggcatcaaggcttcgctgaaagacgttggagtcgctgttgtggccactgccgcgagtgcagtgctggctagcaacgccatggccattgaagtgttgctgggtggtgatgacgggtctctgactatcgttcccaacaatttctccgtggccgctggggagaagatcgtgttcaaggacaacgcatgttttccccacaacgttgtg

SEQ ID NO: 7075 - DNA, 389 bp, Glycine max
  Clone ID: LIB3074-003-Q1-K1-D8
gctctcgatcagggtttcccctcgtcgccgagctcgtttcgttctcgaagaatcgatctgcgataacgactcgcggtaaccagagggatcgtgatcgcgaaagggctcaggctagaaccggtggtaaaggcaagcagaaagatgatgggttgacccctgaacagcgcagggaaagagatgcgaaggcgctgcaggagaaggcggcaaagaaagcggcacaggatgcaggagggaataatgcaggtggaaccaaaaaatagacaataattcaatgagtggtttgagttcgacattgttgtttgtagacatggaatttatggaaaatttatgttgcgttattcgtggagtatgatgtgtttattaatgtaatttgtgacagatgaataaat

SEQ ID NO: 7076 - DNA, 372 bp, Glycine max
  Clone ID: LIB3074-003-Q1-K1-D9
taagataaatctttcaaagaaaaaaggagagtgcgtatagagagagcaaaacatattattttcattttcatctttttttgagtatcaacaaatggcaaccactgtgatgaccactctcccccaattcagtggtcttagaccccaattctcagctgcccctgtgaagaacttggttgctgtgcaacccatgagtcgcaaggggatgggtgcattgggagctcgatgtgactacattggttcatccactaatctgattatggtggcttctacaaccctgatgctgtttgctggaaggtttgtattggctccatcagcaaacattttagccactgcaaggcttaagctgtaagttatggacttatgcttgcatac

SEQ ID NO: 7077 - DNA, 396 bp, Glycine max
  unsure at all n locations
  Clone ID: LIB3074-003-Q1-K1-E1
gagaggagagaggagaagagaagctaaagaaagaaaggagatgggagtggagaagcagttgttgaggtctggcaccggtccgaagccaattcccggccagaacgtaaccgttcactgcactggtttcgggaagaacggtgacctttctcagaaattctggagcacaaaggatcctggtcagaacccattcactttcaaaatcggccaaggttctgttatcaaaggatgggatgaaggtgtgcttggcatgcaaattggtgaagttgctcgtcttcggtgctctccggattatgcttatggtgctggtggctttcctgcttggggaatacgngccaactctgtctttggaatttgaaatcgaagtcataagtgcgcaatgaaaacctttggtagtct

SEQ ID NO: 7078 - DNA, 353 bp, Glycine max
  Clone ID: LIB3074-003-Q1-K1-E11
ggagcagaaggctaatccctatttttcgtcctcagtagtgtcatttacgcttctcttctctgcagcaactatgcctaaccctaaggtcttcttcgacatgaccatcggcggtcaatctgctggccgcatcgtgatggagctctacgccgacgtcactccccgcaccgccgagaacttccgcgcgctttgcaccggcgagaagggcgtagggcggagcggcaagcccctccactacaagggctcgtccttccaccgcgtgatcccgagtttcatgtgtcagggtggcgacttcaccgccggaaacggaaccggcggcgagtcgatttatggcgccaagttcgccgactagaact

SEQ ID NO: 7079 - DNA, 373 bp, Glycine max
  Clone ID: LIB3074-003-Q1-K1-E12
gacaacacatcctaaatgagcagcataaattcatagtctttcggtccttccttccttcctctgctctagtgtatgccactctggttaattatcatacccccttctaggcatagttcatctccctctgttctctattctacactgtgaaacccagatgaaggtagcatttgtagctgttctacttatttgccttgtcctaagctcctccttgttcgaggtgtcaatggccggttctgctttctgctcctccaagtgcgcgaagaggtgttctagggctgggatgaaggacaggtgcacgaggttctgcgggatttgctgcagcaagtgtaggtgtgtgccatctgggacttatgggaacaagcacgagtgccct

SEQ ID NO: 7080 - DNA, 395 bp, Glycine max
  Clone ID: LIB3074-003-Q1-K1-E3
tccaaaagtttccgagattttggggacttgggaaaatttgaccctttgggagttctcatataattgtaacgcctccctattaaaaaaatgtccaagatgatgtaattttcaagaacctcaaagaggaaggaataacattgtacgggagacataaccggggaaagctagggtaagcaaagtcaatgatatctagaaatggttccctatttattgagcatttgtaaattttatttataagaaaatccgatttgggtcatcaagttaagaagaaagtttagaattaagtggaagaaaaaaatgaatgggatgaggaaaccctttctttttaattttcttctttatttttgtattattatttttaataaggttaaatattaatttagttctctgttttt

SEQ ID NO: 7081 - DNA, 419 bp, Glycine max
  Clone ID: LIB3074-003-Q1-K1-E4
gaaggtgcaagagtttgttgtgagctataggctggtttatcgtgaggagaatatgaagttgtttgttttctttgttgctgcagtagttttggtggcataggcatgccatggcgcaggctaccaaaggttccctctccgaatgaaaactggctatggtgagcgttcttcgggggtaaaatgcgcaagttttaggcttgctgtggaagcacacaacatccgagcctttaaaaccattcctgaagagtgcgttgaaccaacaaaggactacattaatggcgaacaatttagatcagactctaaaacagttaaccaacaagctttcttttatgctagtgaacgcgaagtccatcacaacgacatatttatattcggcatagataacaccgtactctctaatatcccatactatgaaaaacatg

SEQ ID NO: 7082 - DNA, 418 bp, Glycine max
  Clone ID: LIB3074-003-Q1-K1-E5
gacaccaacaccaaaacaaacccactaagagggcttcctttgtatccttcctagtgctgcttcttgcagcccttatcctcacgcctcaagggcttgctacttactacaaaccaattaagaagccaccagtgtacaagcctccagtgtacaagccaccagtgtacaaaccaccggtttataagccaaaaccaccggtttacaagccgaaaccaccggtttacaagccaccatataagaagccaccatacaagaaaccaccttatggaaagtaccctccagtagaagacaacacccatgcctaaagcaagcaatgaggtctattatctacttaataaataagaggaactgctttgtgttttctagcattgtgatttacaacttcgtagcaatgcataatcttgactcttgcatgcacttc

SEQ ID NO: 7083 - DNA, 425 bp, Glycine max
  Clone ID: LIB3074-003-Q1-K1-E6
ggtgcacaagtgagtttgttgatcgagatggctagaaacagtgtgatgaaaatgaaggtccttgttttcttcgttgctacaattttggtagcatggcaatgccatgcgtacgatatgttccctctccgaatgaacactggctatggtgcccgtactccggaggtgaaatgcgcaagttggaggcttgctgtggaagcacacaacatctttggctttgagaccattcctgaagagtgcgttgaagcaacaaaggaatacatccatggcgaacaatatagatcagactccaaaacagttaaccaacaagcttacttttatgccagagacctcgaagtccatcccaaggacacatttgtgttcagtatagatggcaccgtactctcttatattccatactacaaaaaacatggatatgggggtgagaa

SEQ ID NO: 7084 - DNA, 256 bp, Glycine max
  Clone ID: LIB3074-003-Q1-K1-E7
ggcacaagtgagtttgttgatcgagatagctggaaacattgtgatgaaaatgaacgtccttgttttcttcgttgctacaattttggtagcatggcaatgccatgcgtacgatatgttccctctccgaatgaacactggctatggtgcccgtactccggaggtgaaatgcgcaagttggaggcttgctgtggaagcacacaacatctttggctttgagaccattcctgaagagtgcgttgaagcaacaaaggaatac

SEQ ID NO: 7085 - DNA, 400 bp, Glycine max
  Clone ID: LIB3074-003-Q1-K1-E8
gagtcgccacaaccctctatatgccattacaaagaaccagtttggaatatatttttattccttctttgtttcttcactttcttctatacacataaccatgtcttctcagaccgttgtcctcaaagttggtatgtcatgtcaagggtgtgctggagctgtaaacagggttttggaaaaaatggaaggtgttgagtcatttgacattgatctgaaggagcagaaggtgacagtgaaaggaaatgtgcagccggacgaagttctgcaagccgtttccaaatccggaaagaagacggcattctgggtggatgaagcacaaccacctgaaaacaagccttctgaaactgcaccttgtacctcagctgagaatgattacaaggcttcagaaaagtgacctgttgcc

SEQ ID NO: 7086 - DNA, 396 bp, Glycine max
  Clone ID: LIB3074-003-Q1-K1-E9
gagcgaaacagagagtgatttcagtgagtgatcggggttcacttgatctcatcataatcgtcagcgtcaattgaagaagatgccgatcagaaacatcgccgtcggaaggcctgaagaggcgactcaccccgacacgttgaaggcagctttggctgagttcatctcaaccttcatcttcgtgttcgccggctcaggctccggcatcgcctacaacaagctcaccgacaacggcgctgccacccctgccggcctcatctccgcctccatcgcccatgcattcgccctcttcgtcgccgtctccgtcggcgccaacatctccggcggccacgtcaaccccgccgtcaccttcggtgccttcgtcggcggcaacatcaccttcctccgcggcatcgtcta

SEQ ID NO: 7087 - DNA, 164 bp, Glycine max
  Clone ID: LIB3074-003-Q1-K1-F1
acacaaagttttatccaaacacatagctttatcaataaggcagcattcttcacataaatccttcacaaaacatcatcatcatcatcatcatcaccgataacacaacaacatccctctcacaaacatcaccatcctaaaaccatcacatcctactcacccctaca

SEQ ID NO: 7088 - DNA, 413 bp, Glycine max
  unsure at all n locations
  Clone ID: LIB3074-003-Q1-K1-D2
gatactctgattcattagtgaagaaaaatggcaggcatcatcgccggcatcccaactacatcgatcactcgcgcaggtcttgtgctcaaacgacctgttggagcctcgtcctctaccgttcttggattgccagcaatggctaaggcagggaaagtgaggtgctccatggaggaaaagccttcaagcagctcaaatatagggatgggggcatccttgttagcagctgcagttgccgcaaccatgtcaagcccagccatggctntggtggatgagagactcagcactgaaggaaccgggcttccctttgggcttagcaacaacctncttggttggatccttgttggtgtcttcggtcttatatgggctctctancttgtctacgctttcaccccttgagaggatgaaaagtctgg

SEQ ID NO: 7089 - DNA, 407 bp, Glycine max
  Clone ID: LIB3074-003-Q1-K1-B5
ggcacaagtgagtttgttgatcgagataaggagaaacagtgtgatgaaaatgaaggtccttgttttcttcgttgctacaattttggtagcatggcaatgccatgcgtacgatatgttccctctccgaatgaacactggctatggtgcccgtactccggaggtggaatgcgcaagttggaggcttgctgtggaagcacacaacatctttggctttgagaccattcctgaagagtgcgttgaagcaacaaaggaatacatccatggcgaacaatatagatcagacttcaaaacagttaaccaacaagcttacttttatgccagagacctcgaagtccatcccaaggacacatttgggttcagtataaattgcaccgtactctctaatattccatactaccaaaaacatg

SEQ ID NO: 7090 - DNA, 158 bp, Glycine max; identical to SEQ ID NO: 4686
  Clone ID: LIB3074-003-Q1-K1-B6

SEQ ID NO: 7091 - DNA, 461 bp, Glycine max
  unsure at all n locations
  Clone ID: LIB3074-003-Q1-K1-B7
aattcccggcgtcgactccacgtcgtctcgtcggacctcgtgtggccggcttgtcgaagtaccgactatgaagnngggattattattnntgagttcaggacaggatcaatatctcatggcgcacgctcgcaacctttctctaattgttactctctcgttctcccttagtccttcatttttcggtgcctaccttatccaatggcatcactctgactcgataccctgtttctttcactcttcaacataattcaactccagtccaaccaaacanttatgtctccaaaatagatgcttagtatttcatctctctgggagtgttacaatctcaccaaagttggcagcaacgtgcgtgcccacctcgggatctctctgtcgtgccctttacgctgccccaatccagatttgtgacagcgaaaccggcaaggtagccagctgggctacatcctttaaattcaacattt

SEQ ID NO: 7092 - DNA, 391 bp, Glycine max
  Clone ID: LIB3074-003-Q1-K1-B9
gcttctataagactacactattgttaccgcacaaacaattaataaagatgaatggttacatcaaaatggtggtggtaaaaaagtctttcttgcttcttttccttgtcggggttacaacttcacgcattgaactcagcttcttcaaaaatgatcactcatcaacatattatgatgatcagtattctaaaccatgctgtgatctcttcatatgcacacactcaatgccttctcaatgcacctctgaaaatattatgctgaattcatgccactcacattgtaagaactctatgttcacacgctcacaatcaggacaatgtctatgtcttgacaccaaccacttttgctacaaaccttgcaagttcacatatgactataaaaactcatatctctc

SEQ ID NO: 7093 - DNA, 239 bp, Glycine max
  Clone ID: LIB3074-003-Q1-K1-C1
gaccgacggaagtcgttaggacaaacgaagaagtatcactcatatgctgctctctatcattccattgcgataatcatccatagctacttactaaaatggctaccatccatgctgctatcacaaccacatcgatctatcgcgcaactcttgttcatacacaagccttatctaccgttcttgctttgccagcaatcggtaaggtaggaagagtgagttgctccatggatgaagcaccttac

SEQ ID NO: 7094 - DNA, 392 bp, Glycine max
  Clone ID: LIB3074-003-Q1-K1-C11
cgcttctacaagaccacagtttggtattaatacaactatctaataatgtgtatgattaataaaaaagtgtggatcgcatctaaatttattaaatctattgtcctagagtagttccctacacaaaatataagtaagttcacaaacaatattcaagaataagattctctgatcaaaagagaaaaatatgtctcatgatccccttggtataacgaattaaataagggatcatttgtttcttgaacaattcttttaaaaaaattttctatcggatttttgaatcataagggattttatgatttatgacttggaagatttttaagaattcaatagaataactacattgacttcatccattttccctaaatattaatagactcattaattatttttta

SEQ ID NO: 7095 - DNA, 383 bp, Glycine max
  Clone ID: LIB3074-003-Q1-K1-C12
gatagcgaaacagagagtggtttcagtgagtgatgggtgttcacttgatccttcataagtcgtcatcatcatcatcatcatcaccgttgattgaagaagatgccgatcagaaacatcgccatcggaaggcctgaagaggctactcaccccgacacgttgaaggcggggttggcggagttcatctccaccttgatcttcgtgttcgccggttcaggttccggcatcgcctacaacaagctcaccgacaacggcgccgccactcccgccggcctcatctccgcttccatcgcccatgctttcgccctcttcgtcgccgtctccgtcggcgccaacatctccggcggccacgtcaaccccgccgtcaccttcggcgccttcgtggg

SEQ ID NO: 7096 - DNA, 396 bp, Glycine max
  unsure at all n locations
  Clone ID: LIB3074-003-Q1-K1-C2
gaataatatctagagaagaagctatatagccatggcctctaagtgtgaaagttggatgattttgggtttgttgattgctatttcgttctcaagcatgcatatggacatggcattcgcagcaaggaatctcctgcagacagaattgatacctgagctgcagccagtagtgccacctgtcatacagcctagagagatagacatctctgacttgccgccactgctaccagtaccatcaccaccaattacccttcccatcccctaagcacttggatttggattcataaataatcactcatcttcactctccattttcattcagntccctggtggtattggtgctttcaataagtgatcttttttcacatctgtcttggtcaatttcttctggtacacatg

SEQ ID NO: 7097 - DNA, 354 bp, Glycine max
  Clone ID: LIB3074-003-Q1-K1-C3
gagagggagaaagtcctagtgaggtgtgtatgcaattactatagccacatatatacacacagtagtagttaaagtcttaaagattagaataagatcagtgatggagagaaagttcatttcagtagttgttttgggagtatgtttggtgctgggaatgtcccaatatgttgatgcaaggaacttggagaaaaaatcaaaggaagaggtgaagaagccagaatcgtgcttagatggagggtccattggtggtgttgggggcattggcggcattggcggtgctggtggaggtggtggtggtttaggaggtggctatggaagaagagctggtggtgatagtggtttaagtggtggata

SEQ ID NO: 7098 - DNA, 355 bp, Glycine max
  Clone ID: LIB3074-003-Q1-K1-C4
gacaacatcatcatcaacaacaagcagatcaatctgtggctctctctctcaaccataatagtcatgggtttgaaggaggattttgagcagtatgctgagaaagcaaagactttgccatcgactcaatcaaacgaagacttgcttatcctttatggattgtacaaacaggccaccgttggacctgtcaacaccagccgacctggaatgttcaacatgagggacagagctaaatgggatgcatggaaagctgtcgaagggaaatccaatgacgaatcaatgggtgattacatcattaatgtgaaacagctgctggaagcatctggcttgcctgcttgataacattggcatgccttgc

SEQ ID NO: 7099 - DNA, 456 bp, Glycine max
  Clone ID: LIB3074-003-Q1-K1-C5
cccacgcgtccgaagacgacagaaggggacaccaacaccaaaacaaacccactgagagggcttcctttgtatccttcctagtgctgcttcttgcagcccttatcctcatgcctcaagggcttgctacttactacaaaccaattaagaagccaccagtgtacaagcctccagtgtacaagccaccagtgtacaaaccaccggtttataagccaaaaccaccggtttacaagccgaaaccaccggtttacaagccaccatataagaagccaccatacaagaaaccaccttatggaaagtaccctccagtagaggacaacacccatgcctaaagcaagcaatgaggtctattatctacttaataaataagaggaactgctttgtgttttctagcattgtgatttacaacttcgtagcaatgcatattcctgactcttgcatgcacttcaatccttcgta

SEQ ID NO: 7100 - DNA, 219 bp, Glycine max
  Clone ID: LIB3074-003-Q1-K1-C6
ggttgagccttagtatggcgttttgaaccaaacgacagttgcgtcagaactacgctgaagaatatcatcaccatcaaagtgtttcgttggaaggggaatttggcagatcattggaagaaaatggcgggtggtggaaaggtttcgttccaagtcacgctcacctccgatccaaaattacccttcaaagtgtttagcgttccagaagctgcgccttttact

SEQ ID NO: 7101 - DNA, 374 bp, Glycine max
  Clone ID: LIB3074-003-Q1-K1-C8
gatagcagcatcatgcagagcattgaattcaaaaacttaagttcattccttgtgttttgctttcttcctcaaaaccaaacatgtcgaacacatgcggcaactgcgactgcgctgacaagactagctgcaccaagggaaacagctatggtgttattgtagagactgagaagagttacatcgagactgttgtcatggatgttccagcagctgagcatgatgggaagtgcaagtgtggcactaactgcacttgcacggactgcacctgtggccattaaggaatatgtatgaaaatgtaattgccatgtgtttggcaatacatatatccaaataatgtaatcttcgtatgaataaatgtgtgtgctgttatcctaact

SEQ ID NO: 7102 - DNA, 368 bp, Glycine max
  Clone ID: LIB3074-003-Q1-K1-C9
tacataaacgaacattaaaaaatggcctgcttaaattaaaatactggctcgcatacttcataataaaaactataaacctaaattacttccctacacaaaattacttttaatatcacaaacactattcaaaaataaaattctctaataaaaaaacaacaaacattttataagatcccactttacatactcattcatacaacttattatctcttttattaacacacctaatttcaaaatactttccctcattttacaaccatattactattaaaaccctatcacttcccaacttaatcacctttcaacacattcccctttttccaactctcctaatacccaaaaaacccataccaatctccctttccaac

SEQ ID NO: 7103 - DNA, 383 bp, Glycine max
  Clone ID: LIB3074-003-Q1-K1-D1
gactacacacttacatttctctaacacttgacaggctctgtttcagctttctctcttttctacaatggcttgcaccaccgtcgtgttgacgctagtcgccgcattgttggtaacctccgtcgtggctcagtctccggcgtcctcaccagctctgtctccaaagcgcacccccgtcgccacacctcagaagtctccctcgccggcgatttctccctccgccgtgtcgccgtcgtcctctcctcccgctccggtggtgaacactccgtctccgtcaccaaactcagtcgactctccgccatctcctccgcagtctccgtccgtgtcaccagccggtgttccctccgtcactgcttcagcaatcttcgctccctccactggagcac

SEQ ID NO: 7104 - DNA, 393 bp, Glycine max
  Clone ID: LIB3074-003-Q1-K1-D12
gattgtggtaatctgttaacatatagaacgctgggctgaacatagtcaagaagccagtgctcggatttgttagtgaagcaatggctgaaaccatgttgctcatgtctagtgtctctagcagttattccgtggatttgaagaaagaccttttactgcaattgcacagtcaaagtttaaggcctaagttctctcagctatcattcaacccacttgcatcatcaacttctaccttttcttcacccagtacattcacaactctggccctattcaaatctaagaccaaagccgctcctgctaagactaaggatacaaagccaaagcacaaggttgaagatggtatttttggcacttctggaggatatggctttactaagcagaacgagctctttgagg

SEQ ID NO: 7105 - DNA, 407 bp, Glycine max
  Clone ID: LIB3074-003-Q1-K1-B4
ggcacaagtgagtttgttgagcgagataactagaaacagtgtgatgaaaatgaaggtccttgttttcttcgttgctacaattttggtagcatggcaatgccatgcgtacgatatgttccctctccgaatgaacactggctgtggtgcccgtactccggaggtgaaatgcgcaagttggaggcttgctgtggaagcacacaacatctttggctttgagaccattcctgaagagtgcgttgaagcaacaaaggaatacatccatggcgaacaatatagatcagactccaaaacagttaaccaacaagcttacttttatgccagagacctcgaagtccatcccaaggacacatttgtgttcagtatagatggcaccgtactctctaatttccatactacaaaaacatgga

SEQ ID NO: 7106 - DNA, 118 bp, Glycine max
  Clone ID: LIB3074-003-Q1-K1-A1
cttctgctacaagacgactacagaataccggggcgggtagactacaacaggagtataccactatcataatcctacataactagtctaatcacaaatagtctcttaattcattccatct

SEQ ID NO: 7107 - DNA, 371 bp, Glycine max
  Clone ID: LIB3074-003-Q1-K1-A11
ggattgggcgaagacgaaaagcaaatcagcgaaggagtcctccagttttcgttagagacactgtgtcctgttttctctgaacctaacacagacccgattgctacgaatggcatccaacaggggtcaaggtggaattcaacagttgctggctgctgaacaagaagcgcaaagaattgtcaatgctgcaaaaaaatgaaaaattggctagactgaagcaagccaaagaagaggctgaaaaggaaattgccgagtatagggctaagttggagtacgagtttcaaaagaaagtgtcacagagtagtggagattctggtgctaatgtgaagagacttgagcaagagacagaagaaaagattcatcacctgaaaact

SEQ ID NO: 7108 - DNA, 375 bp, Glycine max
  Clone ID: LIB3074-003-Q1-K1-A12
gaaggtgcaagagtttgttgtgagctataagctagtttatcgtgaggagaatatgaagttgtttgttttctttgttgctgcagtagttttggtagcatggccatgccatggcgcaggctaccaaaggttccctctccgaatgaaaactggctatggtgagcgttcttcggaggtaaaatgcgcaagttttaggcttgctgtggaagcacacaacatccgagcctttaaaaccattcctgaagagtgcgttgaaccaacaaaggactacattaatggcgaacaatttagatcagactctaaaacagttaaccaacaagctttcttttatgctagtgaacgcgaagtccatcacaacgacatatttatattcggcat

SEQ ID NO: 7109 - DNA, 317 bp, Glycine max
  Clone ID: LIB3074-003-Q1-K1-A2
ggcacacgtgagtttgttgatcgagatagcgagaaacagtgtgatgaatatgaaggtccttgttttcttcgttgctacaattttggtagcatggcaatgccatgcgtacgatatgttccctctccgaatgaacactggctatggtgcccgtactacggaggtgaaatgcgcaagttggaggcttgctgtggaagcacacaacatctttggctttgagaccattcctgaagagtgcgttgtagcaacaaaggaatacatccatggcgaacaatatatatcagacttcaaaacagctaaccaacaagcttacttttatg

SEQ ID NO: 7110 - DNA, 274 bp, Glycine max
  Clone ID: LIB3074-003-Q1-K1-A3
taccttcatgcaacaccaccaaggttaggcatagcactctcgcaacctcaaatctacacaatgcatttctaaggcttttggcttggaacctgctgcagctaaactcacttgctcccttcagcctgatctcaaagaatttgctcaaaaatgtgtctacactaccaaaattgcaagattcttccttgccacctctgctctcaatgtttctgaaacaagttcataaagggttccaaaaaggctaaccttctacgaaatccacagcaagacatacttg

SEQ ID NO: 7111 - DNA, 308 bp, Glycine max
  Clone ID: LIB3074-003-Q1-K1-A4
tagcgatgatattagtgttaacgttaagcgtaggaagaaatctgtgtaagtagcctagtcatactctgtatcatttcatttcgataatcatccatagttactgaagaaaatggcaaccatctccgctgctatcacaaccccatcgatcacccgcgcatgtctagtgcaaaaacgttctcttgggttctcatctaccgatcttggtttgccagcaatgggtaatgttcgaagagtgagttgctccatggaggaaaagccttcttctgtgaaggaaaagcacttaagcatgttgcggatgggggcatctt

SEQ ID NO: 7112 - DNA, 196 bp, Glycine max
  Clone ID: LIB3074-003-Q1-K1-A5
ttggttaccacattccaaaacacaaacacgtgcctgatactatcactattggctcggaatttgttcttttgagttatggcaagcttaaatgttgcatgtgtggttttgatatgcatggctgttatgagtgcaccaatgatggtccaagccgtgtcatgctatgatatttatgttaacctagcaccgttcctatctt

SEQ ID NO: 7113 - DNA, 229 bp, Glycine max
  Clone ID: LIB3074-003-Q1-K1-A6
ttgggtcacaagtgagtttgttgatcgagagaacgggaatcagtgtgatgaaaatgaaggtccttgttttcttcgttgctacaattttggtagcatggcaatgccatgcgtacgatatgttccctctccgaatgaacactggctatggtgcccgttctccggaggtgaaatgcgcaagttgtgtgcttgctgaggaagcactcaacatctttggctttgagaccattcc

SEQ ID NO: 7114 - DNA, 226 bp, Glycine max
  Clone ID: LIB3074-003-Q1-K1-A7
gtaatgttactgcgaaagcagcccgggctccaattcctactcttagccgcagatctctcagggcttgcatcttctcagtcgtgaagatgtacacatcaaggaagaaaatccacaatgataaggattctgaaccaactgagttcgaagagtcaagaggacaggcattgattgatctggaaaataccaaccaggatcttaaaagatatctgaatgatttatacataaa

SEQ ID NO: 7115 - DNA, 188 bp, Glycine max
  Clone ID: LIB3074-003-Q1-K1-A8
gtcacttcacaaaccaaacaacttctaacacgtacgctactctctctctctcgcttattgtatggccgccaattccagtagccgagggatcaccgccttagggaagcgagtcgccaaccggatctggacttccaacgcacctactgttacttcaaggaggggagcatacattagcgtctcattgtact

SEQ ID NO: 7116 - DNA, 181 bp, Glycine max
  Clone ID: LIB3074-003-Q1-K1-A9
gaaccaagtttgcttgcgtgtatattcatggtaggatcaaggttgaatctcagagaaaaacaaacatcgacaagcatgtctggaagaggaaagggaggcacgggtctcggaaagggaggagccgtacgacaccgtaaagatctgaggaatggcattcaggactttatcaagcctgctattc

SEQ ID NO: 7117 - DNA, 101 bp, Glycine max
  Clone ID: LIB3074-003-Q1-K1-B1
ttgttctagtgtatgtgattgttgtgactcggtcgtcttcgtcgatatcttcttcttctgttgtttgtgtgtttgctttttctctcacctgaaaatttctt

SEQ ID NO: 7118 - DNA, 382 bp, Glycine max
  Clone ID: LIB3074-003-Q1-K1-B12
ggcatcgaacagagagagagagaatggcagcactgggtgggaatcgtgatgtgacaggaagccagaacagcgttgagatcgatgctctagctcgctttgctgttgaagaacacaacaaaaaacagaatgcccttttggagtttgaaaaggtggtaactgcgaaacagcaagtggtttctggtaccttgtacaccatcactttggaggcaaaagatggtgggcaaaagaaggtttatgaagccaaagtttgggagaagtcatggttgaacttcaaggaggtgcaagagttcaagcttgttggagatgcacctgcatagtctagtgcttaattaggttgctgaagagtgaagaatgagacagcctggttcgaatgggaaaagcc

SEQ ID NO: 7119 - DNA, 424 bp, Glycine max
  unsure at all n locations
  Clone ID: LIB3074-003-Q1-K1-B2
gacgacagaaggggacaacacaacacatacacacagagttagaggagaaatcatcggggcatcagcagcatctgggtttgtgttgccacttaatgttgcagctgccaccacaaactcaagggtggtcatgttcaacacaaagaacaacgcttctaggcttgttgtaagggcttcagatgagcctgcagcggcggcacccgccaccgccacacccccagctgaagctgaagctaaaccaaagccaccacctattggccccaagagaggtgctaaagtgaagattcttaggaaggaatcttactggtacaaaagcactggttcagtggtngctgttgatcaggaccccaacactcgctacccttgtgtggttcgattcaacaaagcaactatgccaatgtatcaacaaacaactatgcttttggat

SEQ ID NO: 7120 - DNA, 239 bp, Glycine max
  Clone ID: LIB3074-003-Q1-K1-A10
gagttttgaaaggtaaggaaagatgcagatattcgtgaaaaccctaaccggtaagacaatcgcccttgaggtggagtcaagcgacaccattgacaatgtcaaagccaagattcaggacaaagaagggattcctccggatcagcacaggttgatcttctcggagaaacatctggaggatggcccgaccctcgccgattactacatccataaagagtctacattgcattttgttttgaggc

SEQ ID NO: 7121 - DNA, 313 bp, Glycine max
  Clone ID: LIB3074-003-Q1-K1-B10
agataccgttacgatacgactacacaacgactagatagggaaacttctacaataggactacaaattaaaaaacactctctctagactatacaagcttacgtacgctatcatactacttaatattacagctatactcataccacagatcatttcaattaccaatcatttacaaaattatgactatgataactctctacaaacatactttaatctcttaatactacatcactctatgcctagttaatgcaacatcaaagatattactatcaattgatatttctaacattttcttagctttaactgcacatgctta

SEQ ID NO: 7122 - DNA, 264 bp, Glycine max
  Clone ID: LIB3074-003-Q1-K1-B11
ggagagaaactagtgactgacttttcgagaaaggaaaaaaaaaagagtttccggcattattccatcatgaacgctcttcccattcttctcttcttcctctttgtttcggcattagtttatgcgaagaaaactggcgatgtgacggagttgcaaattggcgtgaagcataaaccagcatcatgtgaagttctggcacacaaaggtgacagagtcaaagtacactatcggggaaaactcactgatggaactgttttcgattctagc

SEQ ID NO: 7123 - DNA, 78 bp, Glycine max
  Clone ID: LIB3074-003-Q1-K1-C10
gccgctctagattatcctttcttacatacgcctgcattccaggtcaggtctcttttatagtgtggcctaaattcaatt

SEQ ID NO: 7124 - DNA, 250 bp, Glycine max
  Clone ID: LIB3074-003-Q1-K1-C7
ggacacaagcgggctttattacatagatctctaatctagtttggactcaacataattaaatacaataaatggaaagaaatcgtttgagacgctttatttcaggacaacctcaattttatcataagacgaatgcatagcatcacaaagctaaactcttaacaggacctggtccccggcaacattcaccatccaatccgtggttcaatgcgctacaagcaacaggaaattttatactaatcaactttggatt

SEQ ID NO: 7125 - DNA, 125 bp, Glycine max
  Clone ID: LIB3074-003-Q1-K1-D3
tgggatgggggttaaggagcacacgtgtaagagcacacaggacagtgctgcatagcatagtgcatcttcatccatcagcatgacataaaaactggaaaaaaatccgacccgtgtagaaagccaat

SEQ ID NO: 7126 - DNA, 274 bp, Glycine max
  Clone ID: LIB3074-003-Q1-K1-D4
catttgacttacaaaaaaaaaaaaaaaaaaaaaggaaagcggccgctctacaggatccaaccttactaactcctccatcctacgacataattcttctataatatcacctaatttcaatacactagtcgccgttttacaacatcgtcactactaaaacaatgccgtcaccaaacttattaatcttgtagcacatcatccttttttcagctgctgtaatagtaacgaagacgccaccaatcatccttcttaacaactgctcagcatgaataacgaa

SEQ ID NO: 7127 - DNA, 179 bp, Glycine max
  Clone ID: LIB3074-003-Q1-K1-D6
ggcagggatacaatattgttgggatcattggagaccaatggagcgatctcctcggaggccacagatgcgaaagcaggacctttaagcttgctaatcccctgtactacattcagtagttccttcacctctcaacaatctagcttgctcctatctatctatatgtaataagatgcgttcaa

SEQ ID NO: 7128 - DNA, 304 bp, Glycine max
  Clone ID: LIB3074-003-Q1-K1-F10
gaatcatgccactgtatgctatgtgacatatccacatgcgtattcaaaacgtggtcccctactcatccatatcttctgttcaaaactcctttcttttatctcaatttctctaaatgttcccacattatatctttttatatcagttgcattaaactgtgtttctacaactaatgaatttaaaaaacctcaatgttatcagcctgcaacttatactatccaagcgatcatacacttccatacgatcacttaactcttatatagggacacctaaattcaaatcactgtccgtcatattacaacctat

SEQ ID NO: 7129 - DNA, 326 bp, Glycine max
  Clone ID: LIB3074-003-Q1-K1-F7
taccggtttgaattcccgggtcgacccacgctcgccacctcgtacgcagagcacagagggtccgtttacttatgtcgctgatgacaattcttatttgggattattttacacatattattaaattataatggatttacctatgcctaattcgataataaaatttattgataacccttcattgtaccatatttatacaatattcacacttcgagaaaaagcatcactattacaaatggagcactaatctaagaattatcgaacttaagattatataagcttccactgaatgatcctatatcgagtatatcttatacttagcctatcac

SEQ ID NO: 7130 - DNA, 359 bp, Glycine max
  Clone ID: LIB3074-003-Q1-K1-G9
cagacttgtttagttgagtaacatcagcttgtgagccaagattactacaccaagggggtgggacaagtctctggcttagccaggttgggttgctggctgcaccatgctgcctgcccgctccaagttcagagttgaactatgagaactgagtgaacacacaggtctcctgtttcctagacaaggggatactgcgtgaggctgccttcacagagcaccgttcacccctgtctcttcacagtggatggaataccggctgctgcactgtcaacccatataacctttactttttttaaaaaaaacttaattacaatttaccaacaaaaaagcttccattctaaaggatccaagcttacttactc

SEQ ID NO: 7131 - DNA, 221 bp, Glycine max
  Clone ID: LIB3074-003-Q1-K1-H12
gggtaccattaccagaagccagcagaactagtctaagcagaaatggcctcttcagggatggcatctagaggatctcaaacttggtactcttactggcgagaagttctcagttagatgccttcacttaatttcaaggaactgctcttcattcaaagacgtggccactggtagcacgatgatcaagactgacttaccttattggattaatattggcatgtctt

SEQ ID NO: 7132 - DNA, 76 bp, Glycine max
  Clone ID: LIB3074-003-Q1-K1-H4
gacgaatggggggccttcactctgaccaaataccatagtcttctctttggccgtgacaaacaagttccacataaaa

SEQ ID NO: 7133 - DNA, 83 bp, Glycine max
  unsure at all n locations
  Clone ID: LIB3074-004-Q1-K1-A5
cggtggcaaaagaccaacgaaggggaaaacctaaggtaaggcggggctacccgctgagtttaagcatatcaataagcgcaana

SEQ ID NO: 7134 - DNA, 242 bp, Glycine max
  Clone ID: LIB3074-004-Q1-K1-B1
ggaagcccaatctcttgagcagaatcttcaggccaagccaggtaagcacaaccaaagcaacaccccaaatggcttcagcttctgttcccatggcgttgtcactgagctctgttaccaacaacaacaagccttcatccgaagccttcttcaggccactacccctacgccaaccaaagaggacccttttaccacgaaggcagtgtcaaactccaagtctcaaatcaatgcttttttaaaggaaa

SEQ ID NO: 7135 - DNA, 417 bp, Glycine max
  unsure at all n locations
  Clone ID: LIB3074-004-Q1-K1-B10
cccggtccggaattcccgggtcgacccacgccttcgttccggtggtagaaggcctccgaaagggaaggccaaaggggaggaaaaaatggaaatggggggggaattgatccagcaaaccgccaaggttttgccggttgaacttccagctccttccggntggaataaactgtttttccctaagaaactgggaacaccaagaaaaagtgagattgtattcattgctccaactggagaggagatcagtgccaaaaaacaattggagcagtacctaaaggcacatcctggcaatcctgtcatttcagagtttgactggggaactggtgagacccctatgcgatcagcaaggatcagtgagaaggtcaagtcaactccaccagcagatagtgatactccaaagaaacgagctcggtaatcatc

SEQ ID NO: 7136 - DNA, 431 bp, Glycine max
  unsure at all n locations
  Clone ID: LIB3074-004-Q1-K1-B11
cggaattcccggtcggaccaagccttccttccggttgcaaaaaaccaacaaaaggggaagggccaggagttggtgggaagctttaggggggttaatcgtgaggagaatatgaagttgtttgttttctttgttgctgcagtagttntggtagcatggccatgccatggcgcaggctaccaaaggttccctctccgaatgaaaactggctatggtgagcgttcttcggaggtaaaatgcgcaagttttaggcttgctgtggaagcacacaacatccgagcctttaaaaccattcccgaagagtgcgttgaaccaacaaaggactacattaatggcgaacaatttagatcagactctaaaacagttaaccaacaagctttcttttatgctagtgaacgcgaagtccatcacaacgacatatttatattcggcat

SEQ ID NO: 7137 - DNA, 318 bp, Glycine max
  Clone ID: LIB3074-004-Q1-K1-B12
ggcacaagtgagtttgttgatcgagataactagaggcagtgtgatgaaaatgaaggtccttgttttcttcgttgctacaattttggtagcatggcaatgccatgcgtacgatatgttccctctccgaatgaacactggctatggtgcccgtactccggaggtgaaatgcgcaagttggaggcttgctgtggaagcacacaacatctttggctttgagaccattcctgaagagtgcgttgaagcaacaaaggaatacatccatggcgaacaatatagatcagactccaaaacagtttaccaacaagcttacttttatgc

SEQ ID NO: 7138 - DNA, 89 bp, Glycine max
  Clone ID: LIB3074-004-Q1-K1-B6
ccacgcgttcgtaccccagaaaacctccttatggggaaccaaatctttatgcccaggcgggttagtccaaacaaaggctcccccccaat

SEQ ID NO: 7139 - DNA, 387 bp, Glycine max
  Clone ID: LIB3074-004-Q1-K1-C10
cggtccgggaatatcccgggtcggacccaagccttcgtaccggttgcaaaagacacaccaaaggggttaactgggaaaaaaaaaaaggcaaaatgtgggggaaaggcacctttggttcggcggagaacaagttccggatgtcgctgggtctgccggtggcggcgacggtgaactgcgccgacaatacgggggcgaagaacctctacatcatatcggtgaaagggatcaaagggcgtttgaaccgtctcccctcggcttgcgttggcgacatggtgatggccaccgtgaagaatgggaaacccgatctgaggaagaaagttttgccagctgtcattgttcgccagcgcaagccatggcgccaaaaggacggcgtctacatgtatttcg

SEQ ID NO: 7140 - DNA, 83 bp, Glycine max
  Clone ID: LIB3074-004-Q1-K1-C11
tccggttccaaaagaccaccaaaagggtccggttgcaaaaaaccaccaaaagggtccgggggcaaaaaaacaacagaagggtc

SEQ ID NO: 7141 - DNA, 355 bp, Glycine max
  Clone ID: LIB3074-004-Q1-K1-C3
ggcacaagtgagttgggggatcgagataactagaaacagtgtgatgaaaatgaaggtccttgttttcttcgttgctacaattttggtagcatggcaatgccatgcgtacgatatgttccctctccgaatgaacactggctatggtgcccgtactccggaggtggaatgcgcaagttggaggcttgctgtggaagcacacaacatctttggctttgagaccattcctgaagagtgcgttgaagcaacaaaggaatacatccatggcgaacaatatagatcagactccaaaacagttaaccaacaagcttacttttatgccagagacctcgaagtccatcccaaagacacatttgtg

SEQ ID NO: 7142 - DNA, 415 bp, Glycine max
  Clone ID: LIB3074-004-Q1-K1-C9
cggaattcccgggtcgagccaagcgttcggccaagccttcctaccggttgcaaagaacaccaaaaggggaaccaaaatcttcaggccaggggaggtaagcacaaccaaagcaacaccccaaatggcttcagcttctgttcccatggcgttgtcactgagctctgttaccaacaacaacaagccttcatccgaagccttcttcaggccactacccctacgccaaccaaagaggaccctcttcaccacgaaggcagtgtcaaactccaagcctcaaatcaatgcatctttgaaggagaaggcagttgccggactcacagcagcttctgtgacagcatctatggtggttccggaggtggctcatgctgctggatatgagttctccccttccctaaagaactttctactcagcatcttt

SEQ ID NO: 7143 - DNA, 443 bp, Glycine max
  Clone ID: LIB3074-004-Q1-K1-D10
cggaattcccgggtcgacccacgccttcgacgggttggcaaaaacaccacaaagggggactgttgatgggccatcagccaaggactggggaggtggaagagctgcttcatttaacatcattcctagcagcactggagctgccaaggctgttgggaaagtccttcctgctttgaatggaaaattgactggtatggcattccgtgttcccaccgtggatgtctctgttgttgacctcacggtgaggctggagaaggaagcctcatatgatgaaattaaaaatgctatcaaggaggaatcagagggcaagttgaaggggattcttggttacactgaagatgatgtggtctccaccgactttgttggtgataacagatcaagtatttttgatgcaaaggctggaattgcattgaataagaattttgtgaagcttgtctcttggtatg

SEQ ID NO: 7144 - DNA, 400 bp, Glycine max
  Clone ID: LIB3074-004-Q1-K1-D11
tccggaattcccgggtcgacccaagccttccttccggttgcaaaaaaacaacagaaggggacatacattcaacaccagaacaactacttggtgagacaacaacagattcaagttcatagttttttttggtaaaacagaaatggcctaccactcttctcaaaattcccaacctgctctccctatgcacctatgtttcttcttgctcaccttgttcatgttccttagtttctcattttactcaagctacgagccaataatggagagtttcatggaccaagtgaagttggttctaatggtttctccccttctgcttctgctagttgtgcacttcctttgcaactatggtagtggaggggttttgtcttcactgattcctcttccagagagagagtcactgcac

SEQ ID NO: 7145 - DNA, 298 bp, Glycine max
  Clone ID: LIB3074-004-Q1-K1-D2
ctgcgtgaagactaccgacgggtgcggctgcaagaagactacataatggtacgggggggagacgacgacaggagggtgcggctgcttgattacttcataagtgcactgctgctagaatacgactgacaggtacagctgctataagactatccgaatggtacactgtgctatgaagaccacaaatgggtacgtgtagtacacaactacaaaacggggcctcattttctagcttacatacccttacacttctcttcctgttagatcatgacctatccattaaggaaattctccgaacatg

SEQ ID NO: 7146 - DNA, 439 bp, Glycine max
  Clone ID: LIB3074-004-Q1-K1-E8
ggaattaccgggtcgacccacgccttcgttccggttgcaaaaaaccaacaaaagggttcagttttaaaattacattgcaaaaatggcgtgggttcaccatgacagcttccatccttggcagcccagccgtcaccaaccggtcggcagtagcaacgcagaggagatcactcgtagtgaatgctgccaaagctgttgaagcagaaaaggtcagttatgacaatgacatggatggtagcaatggaaggaggaacttgatgttcgccgcggcggcggctgctgtttgctctgttgctgggatggcagtggcagatgagcctaaaccaggaaccccagaagccaagaaaaagtatgctccgatttgtgtcaccatgccaactgccaagatttgtcgcaattgagggactttggtttttattttacttctgatgattggaaatgt

SEQ ID NO: 7147 - DNA, 444 bp, Glycine max
  Clone ID: LIB3074-004-Q1-K1-E9
cggaattcccgggtcgacgcacgcgttcgttcgggttccaaaaaaacaccaaaaggggaagtggagcttccatttcatagccggcgggggggatagatagttagcagacttggctgaccctgagcaggaggaataagaataagatgcctccttatgattgtatgtttctgtttaagccccatataaggaaggaagctgtcatggatttagttgtgggggtgggaaagcatgtgtgcagaagaaatggggttgtcactgatatcaagagtctcggaaaagttcagttgggctatggtgtgaaaaagctagatggcagatattatcagggcctactgatgcaaatgagcatgatggctacacctgaaatcaacaaagagttgcattacctaaacaaggaagaccggttactgcgttggcttttggttaagcagcgtaatacaaaat

SEQ ID NO: 7148 - DNA, 430 bp, Glycine max
  Clone ID: LIB3074-004-Q1-K1-F11
tccggaatttccgggtcggaccaacccttccttccggttgcaaaaaaacaacaaaagggggcgtcgggtgaagggaaaaatcaaatcagggggcttttagtgggcgcaaagagggttttggaaaccacgttgtttggggttagggttccggcgaggctgtaccacgagggggttgtggatcactacgacaacccccggaacgttggatcgtttgacaagaacgacccgagcgtggggaccggtttggtgggggccccggcgtgcggcgatgtgatgaagctccagattaaggtcgacgacaaaaccggaaaaatcgtcgatgctcgattcaaaactttcggctgtggctacgccattgcttcttcctccgtcgctactgagtgggtgaagggaaggcaaatggaggaagttctgactataaaaaatacca

SEQ ID NO: 7149 - DNA, 385 bp, Glycine max
  Clone ID: LIB3074-004-Q1-K1-G10
gagccaagaaaagaaaatcctcacccattttgtgcgtagccaaacactctgagattctcagttatgtcgtggcaagcgtatgtggatgatcacctactgtgtgaaatcgaaggtaaccacctcactcacgccgctatcatcggccaagacggaagcgtttgggctcagagcaccaacttccctcagttcaaacctgaggaaataactgccatcaataatgactttaatgagcctggatcacttgctccaactggattgtatatcggtggcaccaaatacatggtcatccagggtgagcctggtgctgtcattcgagggaagaagggtcctggtggtgttactgtgaagaagaccggtgcggccttgatcattggcatttatgatg

SEQ ID NO: 7150 - DNA, 373 bp, Glycine max
  unsure at all n locations
  Clone ID: LIB3074-004-Q1-K1-G12
caccggtccggaattgggggggacacgcgcttcgttacgctgctaaaaaacaacaaaagggtccttttacaagaagacaacataagggtccgtagtncgataaaacaacagaagggagaataccaaaaagaaaaaaaagattctaaagaaatctaactaatattccttaaaataatcaaaataaatccttaatgcaaattaattttacatagaaaaaagacttaaaaaggatgatttgaactgcgagatctaaaaacatatctttccgtggcaccagtagtaagtactctatggttcgaggctttggcggctctcttaatagagatcaatcgttttttcccaaatgcattgatattccctttttttccattct

SEQ ID NO: 7151 - DNA, 326 bp, Glycine max
  Clone ID: LIB3074-004-Q1-K1-G3
cgtacgcccgctcttccttacggttgcaaaaagacaccaaaggggcggttttttaccgatttcgggtatgtacgtggacaatttggagaaaacgtccctgagctgcaaactttcaatgagtgctggaaatcatgattgggtttccaagtatgccaccctcatgaaaaagagaattgaaatagagaatcggctcgttcaaaagcttggacgcttttgaaacatctaacctgctgtttctctctgaattcttacattgagttggctgtgaaatgtgaataaaataaagtgaatcagagaagattaaaccgtttataaaaaagcatatt

SEQ ID NO: 7152 - DNA, 335 bp, Glycine max
  Clone ID: LIB3074-004-Q1-K1-G4
tcccgggtcgacccacagccttcgtgccggttgcaaaaaaccaacaaaaggggttagccttctctttgtctgagaaaaggggtgcccccaaaaataaaatgaacaaggttctctcctttgtgctgctgattcttccgatccactacaacaacgttgtcaacgccaacaacaaaaactgtgtcacagaggattgcctcatcggcaacaatgatttggaatcagaattctacttcggttcccatgtggccagaatgctctacgatgtgagccaatctgtgtctggccaaacatgcaattcatacaacatagctgttaattgtccacaaagcaatggc

SEQ ID NO: 7153 - DNA, 303 bp, Glycine max
  Clone ID: LIB3074-004-Q1-K1-H1
cggtccggaattcccgggtcgacgcaagccttcgtccacgccttccttccggttgcaaaaaaacaccaaaagggggaaaaccaaagttccaaggaggagaaattaagaagatcattaatggcttctcttgcaaccttagctgctgttcaaccagctgcgctcaatggtctcgctggaagttccctctctggaactaagctctctttcaagccctctcgccacactgtcaaatccaagaacttcaggagtggtgccgtggtagccaagtatggtgacaagagcgtatactttgatttggaggat

SEQ ID NO: 7154 - DNA, 213 bp, Glycine max
  Clone ID: LIB3074-009-Q1-E1-A8
gacccaaccatggcagcaaccattcctttctctctgcttaggaactgcgcgccattgaaactagcaacacctttcgctcgcaaagcctccaactttaatcttcttctcgctcttcaaccacgcaggttggtctctagtacctgtgctgtgaacaatgaagacgctgcagcaaaaacagcaactgttaattttgatagtgaagctccaacaata

SEQ ID NO: 7155 - DNA, 148 bp, Glycine max
  Clone ID: LIB3074-009-Q1-E1-B1
tactaataagtgctagtggtatgattgaaaatgcatgtattttcttgtaatttctaatatacggtgatttattggtattcaacctagttatggctattttgggacgagtaagttattgttatgacttgttttaacttcttgtatttcc

SEQ ID NO: 7156 - DNA, 54 bp, Glycine max
  unsure at all n locations
  Clone ID: LIB3074-009-Q1-E1-C1
gagacctcaggtcangcggggctacccgctgagtttaagcaaaaaaaaaaggag

SEQ ID NO: 7157 - DNA, 54 bp, Glycine max
  Clone ID: LIB3074-009-Q1-E1-C2
gactagatgtgaatgtgattcatattcatagacgacaaacacaccccctccccc

SEQ ID NO: 7158 - DNA, 358 bp, Glycine max
  Clone ID: LIB3074-009-Q1-E1-C5
gaaaagagtgaagagaagcgagagagagagagagttggaagaagaagaagggaagatgaacttgagatggatggaagcggtgctgccgctgggaatcatagcgggaatgctctgcgtcatgggaaacgctcagtattacattcacaaatccgcgcatggcagacctaagcacatcgggaacgatatgtgggacgtggccatggaacgaagggacaagaagcttgtcgagcaagcctctccctccaattaacatcgttgttttgccaatgacattgtgaagaaaataaactgctcaccgggatttacaccgtgttcaagggacccagggttaatcacaagaatcaaattccgtcggttt

SEQ ID NO: 7159 - DNA, 257 bp, Glycine max
  Clone ID: LIB3074-009-Q1-E1-C7
gaagagacagaaggggtttgtagataatttacgcttttcttttatctttcattcaatctgttttgttttcttaccttgggttgaaagaattatcatgaatgatcctttgtgtcgatcggttagaatgcacaaaatataagtaagagtaaacaaccaatatagcggctgctctaaaggatctaagcttacgtatacgtgtatgccacgtcatatctcttctatattgtcacctaaattcacttcaatggtcgtcgttt

SEQ ID NO: 7160 - DNA, 243 bp, Glycine max
  unsure at all n locations
  Clone ID: LIB3074-009-Q1-E1-D1
tacggctgcggaggctgcaagatgtacccagacttgagctacactgagtcaaccaccaccgagaccttggtcatgggagtggcacctgttaaggctcaatttgagggtgctgaaatgggtgtgcccgctgagaacgatggctgcaaatgtggaccaaactgctcctgcaacccctgcacttgcaagtgacgtgttgggagagcanacttcaagcagagatacccttaattaagaatatgataa

SEQ ID NO: 7161 - DNA, 66 bp, Glycine max
  unsure at all n locations
  Clone ID: LIB3074-009-Q1-E1-F4
caacgcgagacctcaagtcangcagggctacccgctgagtttaagcataaaaaaaaaagcggccgc

SEQ ID NO: 7162 - DNA, 367 bp, Glycine max
  Clone ID: LIB3074-009-Q1-E1-G1
gattatatttgagttcaaacaaatcaaagccatggccacctccaacttctctattgttctctccgtctccctagccttctttttggtgctacttaccaaggcacactcgaccgataccgtttctttcaccttcaacaagttcaacccagtccaaccaaacattatgctccaaaaagatgctagtatttcatcctctggggtgttacaactcaccaaagttggcagcaacggcgtgcccactcgggatctctcggtcgtccccttacgctgcccaatccagatttgggacaaccaaaacggcaacgtaaccaactgggctacaacctttaaattcaacaatttcgcaaccaacaaatcaaactcaact

SEQ ID NO: 7163 - DNA, 450 bp, Glycine max
  Clone ID: LIB3074-009-Q1-E1-G5
tctagaaaagatgaaaaaaaaaaaaaaaaaaaaaaaaaaaaaattaaaaaaaaaaaaaaaaaaaaaaaaaaccggccgcccaaaaggatcaaacctaacttacccttgaatgcaacttcaaacccctccaaaagtgtcaccaaaattcaattcacgggccttcttttaaaaacttcttaacgggaaaaaccctgcctttaccaaacttaacccccttgcacaaaatccccctttcgcaacctggcttaataccaaaaaggcccgcaccattcgcccttccaaaaatttgcccaccctaaatggcaaatggaacccgccttgtaacggcccattaaacccggcgggtttggtggttacccccaactttaccgctaaacttgccaacgccctaacgcccgcccctttccctttcttcccttcctttcccccaactttccccggttttccccg

SEQ ID NO: 7164 - DNA, 401 bp, Glycine max
  unsure at all n locations
  Clone ID: LIB3074-009-Q1-E1-G6
ggcacaagtgagtttgttgatcgagataactagaaacagtgtgatgaaaatgaaggtccttgttttcttcgttgctacaattttggtagcatggcaatgccatgcgtacgatatgttccctctccgaatgaacactggctatggtgcccgtactccggaggtgaaatgcgcaagttggaggcttgctgtggaagcacacaacatctttggctttgagaccattcctgaagagtgcgttgaagcaacaaaggaatacatccatggcgaacaatatagattagactccanaacagttaaccaacaagcttacttttaggccaaaaacctcgaattccatcccaaggacacatttgtgttcagtataaatggcaccgtactctctaaaattccatactacaaaa

SEQ ID NO: 7165 - DNA, 397 bp, Glycine max
  Clone ID: LIB3074-009-Q1-E1-G7
ggcacaagtgagtttgttgatcgagataactagacgcagtgtggtgaaaatgaaagtccatgtgttcttcgttgctacagttttgggagcatggcaatgccatgcgtacgacaggtgccctcgccgaatgaacactggctatggtgcccgtactccggaggtgaaatgcgcaggttggaggcatgctgtggaagcacacagcatctttggctttgagaccattcctgaagagtgcgttgacgcaagagatgaatacatccatggtgaacaatatagatcagactccaacacagttaaccaacaagcctacttttatgccaaatacctcgaagtccatcccaaagacacagttgtgttcagtatagatggcaccgtactcactaatattccatactac

SEQ ID NO: 7166 - DNA, 162 bp, Glycine max
  Clone ID: LIB3074-009-Q1-E1-H2
gtctagacttttagatgatatggtactttccaaacttaaaaatgttaaacgcctgtattaatccaacaaaaaatgggcctttgaaactaaagaaaaacaaactaagattggcccaaactgaagaaatacaaaaaaatggcttgagatcaagcctaaccacgc

SEQ ID NO: 7167 - DNA, 392 bp, Glycine max
  Clone ID: LIB3074-010-Q1-E1-A9
gaagacacacaacacaacacaaacacacagagttagaggagaaatcatcatggcatcagcagcatctgggtttgtgttgtcacttaatgttgcagctgccaccacaaactcaagggtggtcatgttcaacacaaagaacaacgcttctaggcttgttgtaagggcttcagatgagcctgcagcggcggcacccgccaccgccacacccccagctgaagctgaagctaaaccaaagccaccacctattggccccaagagaggtgctaaggtgaagattcttaagaaggaatcttactggtacaaaggcactggttcagtggttgctgttgatcaggaccccaacactcgctaccctgttgtggttcgattcaacaaagtcaactatgccaatg

SEQ ID NO: 7168 - DNA, 120 bp, Glycine max
  Clone ID: LIB3074-010-Q1-E1-B9
taacggtactgctcctagaggactacattatggtacagttgcgacattccgacatattggtcctgttgacacactacgacaccacggtattgctgccataacatgacaccctggtacggc

SEQ ID NO: 7169 - DNA, 79 bp, Glycine max
  Clone ID: LIB3074-010-Q1-E1-C4
caacatacgtgatcgaaaggatctcgaagacccaccaacgcacaaaagccgggatctttcagaaaatggattcctattc

SEQ ID NO: 7170 - DNA, 200 bp, Glycine max
  Clone ID: LIB3074-010-Q1-E1-G1
cccacgcgtccggataggtgccatctcagaatgaacagtggctatggtgcccgtactccggaggtgacatgcgcaagttggaggcttgctggtgaagcatgcaccatctttggctttgaaacgattcctgaagagtgccttgaatcaacacacgaatacatccatggagatcaatataggtcatactccacaacagttaa

SEQ ID NO: 7171 - DNA, 152 bp, Glycine max
  Clone ID: LIB3074-010-Q1-E1-G4
ggttgggccaacgtggcagggcaatggccctttctgtagcgcggagcgcacgcaggtggctctcgcgtcttcacgagaatccctcatcagcatcatcacccgtcgaccttttgcccaaatccctctttccttgtggaagttccctgaaactg

SEQ ID NO: 7172 - DNA, 124 bp, Glycine max
  Clone ID: LIB3074-010-Q1-E1-G8
agaatatgaaaaggaaaaaaaaagattcgaaagaaatataactaatattctttagaataatcagaaggagtattaaattcaaataaattttagatagaaaaaagagttaaaaaggaggatttga

SEQ ID NO: 7173 - DNA, 374 bp, Glycine max
  Clone ID: LIB3074-011-Q1-E1-A11
aggaacgccgtcgtcgggatgctgcaacggagtgaagagcctcaatgccgccgccaagaccaccgccgaccgccagacggcgtgcaactgcctcaagtcggccgccagccaaatctccggcttcaacgccaacaacgccgcctcgctccccggcaaatgcggagtctccatcccctacaagatcagcacctccaccaactgcgctaccatcaaggtttgaagagaaagtcatggacgcaggaaaccggaaactactcactagtatatgagtagcattattaatattaagaataagatcgagggtgatgagggctccacttatatgcccctctcctcttgtatgagagatttgcattggatagctttaagttgtg

SEQ ID NO: 7174 - DNA, 304 bp, Glycine max
  Clone ID: LIB3074-011-Q1-E1-A4
ttttttttttttttcaaaaacattagttcgtttttttaactaatttagtattttttattacaataaacaatatctatgtttggaaaattttagaaaaagtattataatattcaatgttttacttgaaatagtaaaaaatgggaattaagatagataaaatatatggctaattaaagataaatatattttcataaaaatgtctttcacatcgaattctataacaatcaaaagctatactaattatatggcagctccaaaaaagcgcacttctatatcaaaaaaaaggattcggaacactttatgg

SEQ ID NO: 7175 - DNA, 249 bp, Glycine max
  Clone ID: LIB3074-011-Q1-E1-B2
acagaactacttcatctgcaattatgttggtcactgcgagtctgggatgaaaattgccatcaacgctgcctgagtttaataatatggttaacttcccatacatattgtattgtaatgcaaattgcaccctttagtgggaagttagctcctttaaataatgttaagaaaaaaagtagctatgtgtgctcttctataaatgtcacttatctataaagaataaatgtcggcagtcgataaaaaaaaaaataa

SEQ ID NO: 7176 - DNA, 176 bp, Glycine max
  Clone ID: LIB3074-011-Q1-E1-B3
gagacctcacgtcaagctgagtcactcgctgtgttgatccatatcaatacgcgtattttattatgaatgagtggcaataacagcggccgcactagtagatctaagcttacctctgtgtgcatgccacatctcacctcatccatcctgaccatggcattcaattaactggccgtcct

SEQ ID NO: 7177 - DNA, 413 bp, Glycine max
  Clone ID: LIB3074-011-Q1-E1-B4
acgcgtccgagacgacagaagggggagagggagagagggagggagagagagagagagaggaaaagtaactccacacaacacatcacagcctaagagaattggattctaagctcgagagagagagagagagagagagagaagaaagaatcatgtggtgctggaaaggagagggaggctagaagaagaagaaaaaaagaagagctagagagagggtaccctcttgttaatttgcactgtttttgtgtctgttgctgcacttttaggagttcttctattctaacaacctctgccaaccaacacaagcctgaaaataaaataaagatgctgcctccttgctggagatcgttcgggaagaaacagtaatgctactgacatgggaaagaaggggagttggttttctgcaatcaagagag

SEQ ID NO: 7178 - DNA, 231 bp, Glycine max
  Clone ID: LIB3074-011-Q1-E1-B9
gagtgaattacattgcattgggttctatcagcgtatttcactcaccatgcagaaatgaatttgtgagttttatgtacgctagtgatacgtttaacatcaattctcagctcgagcatctccaagtcaaatatgttgggactggccatgctgatttgcacagatttgagtgggcagtgaacattcaacgtgatacctatgcatcatatattgggcactaccctttactgggat

SEQ ID NO: 7179 - DNA, 255 bp, Glycine max
  Clone ID: LIB3074-011-Q1-E1-C12
ggggatcaaggggatgacttgaagttggtgcaactcgttcttcttcagttgttgtacaaggcggctcgctgcatgatctccccgtaggtgttcttgcatgccacatcaaactgttcttcatggaaagcgatcaatcattcaatggccgtcattttgcgtattctgtaccgagacgtgatttccgttggttaacttactcaccttatcttgaatacccctttgagcacattacgtgctaattatgaggctcacact

SEQ ID NO: 7180 - DNA, 194 bp, Glycine max
  Clone ID: LIB3074-011-Q1-E1-C3
ggatctggcagcagaagaacaagtagttgagaactaagaaggagaagcaaatggcttcctcaatgatctcttccccagctgttaccactgtcaaccgtgccggtgccggcatggttgctccattcactggcctcaagtccatggctggcttccccaccaggaagaccaacaatgacattacctccattgctagc

SEQ ID NO: 7181 - DNA, 271 bp, Glycine max
  Clone ID: LIB3074-011-Q1-E1-C4
ggagcagaatcttcaggccaagccaggtaagcacaaccaaagcaacaccccaaatggcttcagcttctgttcccatggcgttgtcactgagctctgttaccaacaacaacaagccttcatccgaagccttcttcaggccactacccctacgccaaccaaagaggaccctcttcaccacgaaggcagtgtcaaactccaagcctcaaatcaatgcatctttgaaagagaaagcagttgccggactcacagcagcttctgtgacagcatctat

SEQ ID NO: 7182 - DNA, 279 bp, Glycine max
  Clone ID: LIB3074-011-Q1-E1-D10
aagaaggaagctgaagtcatagaagagaagaaggaagtggaagtgacggaagagaagaaggaaattgaagtaacagaagagaagaaggaagctgaagtcatagaagagaagaaggaagtggaagtgacggaagagaagaaggaaattgaagtaacagaagagaagaaggaagcagaagtgaaagaagagaagaaggaaggggaagtgacggaagagaagaaggaagttgaagtgacggaagagaagaaggaagcggaagtgacaaaaaaaaaacaaaaa

SEQ ID NO: 7183 - DNA, 265 bp, Glycine max
  Clone ID: LIB3074-011-Q1-E1-E3
gatagccactacttgcttccacttctgattcagaaactcttaggcattccacattctcaaccccggaccctaagagcagagcgaaaatgacaaccaccttcgcgaccgtcgcaagactcggtggcgcaatactgtcatccagctcatctcgtctcaactcaaggtttggtgaatccccaattgattgcaaggaaccccttaaggaaactgttggaaatggaactgggaaggatacaagcctttgaaaggaattggtgccggcaaa

SEQ ID NO: 7184 - DNA, 125 bp, Glycine max
  Clone ID: LIB3074-011-Q1-E1-F12
caccttgcggacccagtcaacaacaatgcctgggcctacgccaccaacttcgtccccggcaagtgagcatgaaagaaaaggatgacttgtggacttttgagagtttttagatttgtgtttggtga

SEQ ID NO: 7185 - DNA, 197 bp, Glycine max
  Clone ID: LIB3074-011-Q1-E1-F4
ggggggtgctagaagcagctgtatagatagagacctttgcttacttcacttccttcccttcccttccctctcttattatctctaccattttccatcttctctctaagctaagctaaagagatatggggaattgccaagctgtggatgctgcagtgcttgtgatccaacacccttgtgggaagatagagaggttgtat

SEQ ID NO: 7186 - DNA, 196 bp, Glycine max
  Clone ID: LIB3074-011-Q1-E1-G4
ggagtgtactaaccaaacgtcttttcgttctgatacattttaccttagtttgtgaaattctatccaaagattttgagaatgtctaactgtgggtgtggaagcagctgcaactgtggcatcatctgcagttgcaacaagtactcttttgactacgttgagaagatcacacatgacactcgagatttgggtgttgggc

SEQ ID NO: 7187 - DNA, 443 bp, Glycine max
  unsure at all n locations
  Clone ID: LIB3074-011-Q1-E1-H12
aagacgacagaaggggactcacagaaagagaaagtgagagacagagagatgatggagttgaagaaggtggcattggtgaaggtagttttgttgcttttcctgttagggttcagtgcaaccactgcagatgctactcgcttcgacccacgttccttcattactcaggtgctccccaacaattactatgtaaaaatcaaatccacagccactgcatgttgtgatctttgtctttgcacaaaatcaaaccctccccagtgccaatgtgtagatgggagcgagacaggctgccactcatgttgcaaaaattgcatttgcaataagaaatttcctcggacgtgtttttgtggagatataaccaacttctgctatgacaaatgtaactcaactgaagccaattaaagctcactagctangaatatgaatgagcatgtttccataaataa

SEQ ID NO: 7188 - DNA, 121 bp, Glycine max
  Clone ID: LIB3074-012-Q1-E1-A10
aactcttataacatgagttcaaagagccgactgttaagcggtcgctcaataggatctctccttgcttacgcgtcaatgtcatgtcctcactcgtctacacagtcacctccattcaattcag

SEQ ID NO: 7189 - DNA, 390 bp, Glycine max
  Clone ID: LIB3074-012-Q1-E1-B12
gaaaaagttagaagtaaagaagatcatggcttctctagcaaccttggctgctgttcaaccagctacgatcaatggccttgctggaagttccctctctggaactaagctctctttcaagccctctcgccacagtgtcaaatccaagaacttcaggagtggtgccgtggtagcaaagtatggtgacaagagtgtgtactttgatttggaggatctgggcaacactacagggcagtgggacttgtatggctcagatgcaccttcaccctacaaccctcttcagagcaagttcttcgagacatttgctgctccaattcacaaagagggattgttactcaagtttctgatattgggaagtggttcccaccttgcatacttcagtgcaactgcctc

SEQ ID NO: 7190 - DNA, 321 bp, Glycine max
  Clone ID: LIB3074-012-Q1-E1-C1
cggggttctagtgtgtgattgtttgttgttgtaactcgttcttcttcttttgttgttctgtgtttgtgtttgttttttccctcacctgaaaatgtcttgctgcggtggtaactgtggttgcggaagctcctgcaagtgcggcaacggctgcggaggctgcaagatgtacccagacttgagctacactgagtcaaccaccaccgagaccttggtcatgggagtggcacctgttaaggctcaatttgagggtgctgaaatgggtgtgcccgctgagaacgatggctgcaaatgtggaccacactgctcctgcaacccctgcac

SEQ ID NO: 7191 - DNA, 221 bp, Glycine max
  Clone ID: LIB3074-012-Q1-E1-C3
gaccaattgaacaaatatacccaaagccctatacaccaaaaccctaaaaaacacccatttgattcatttccaatggcaaccctcaaggttgcatttttggctgcattcccctgcatggttttgttaattcaaccaatggaaaatgcacctaccacttccgggaaggtgacaattacccggcccaattgcaccggttacctcaaaaaggaaggaaccccttc

SEQ ID NO: 7192 - DNA, 421 bp, Glycine max
  Clone ID: LIB3074-012-Q1-E1-D8
aattcccgggtcgacccaagcgtccagaagacgacagaagggggtgagtgaggggtagtgatagaaggataaggtgaggtgacgataaaccgtggaaagtggaaacggtggtgtagtctgtgagtgtcattgtgaagttggagacaatgttagcttcttctctctccttcctccattcttgttcatcttcctctttcttattgtcaatttcacttcctaatcccaaaccctctcattccctacctttcgtgctcgaagccaaagacaggacccgtagggaagacaggtccgcgcgccacactcgcatcagaaagaaggtctaagggacacccgagaggccgaggctgtccgtgttccggtcgaacaagcatctctctgtgcaagtgatagatgacaccaagatgcacacgcccgcttcgat

SEQ ID NO: 7193 - DNA, 241 bp, Glycine max
  unsure at all n locations
  Clone ID: LIB3074-012-Q1-E1-E1
gaaaagaaaagagaaatggcaacagaaacaaaagtgcaagaattaggtggcatcaccgatgtgcatggagctgccaacagcgtcgagatcaacaatctcgctcgctttgctgtanaggaacaaaacaaaagagagaattcagttctggagtttgtganggtgattagtgcaaagcagcaagtggttgctggagtgaattactacataacattggaagcaaaagatggtttgattaaaaatg

SEQ ID NO: 7194 - DNA, 407 bp, Glycine max
  Clone ID: LIB3074-012-Q1-E1-F5
ggggttttgcgctgttgttgctgctcatcctccgtaacctccgagctctgcaccgaagaacgaagtcatggggaagacacatggaatgggatctgctcgcaagctcaagtcccaccgcaggaggcaaaggtgggctgacaagtcatacaagaaatcacatcttggaaatgaatggaagaaaccttttgctggttcatcccatgccaagggaattgtccttgaaaagataggtattgaggctaagcagcccaactctgccattcgtaagtgtgccagggttcaacttatcaagaatgggaagaagattgccgcttttgtccctaatgacggttgcttgaactacattgaagagaatgacgaagtcttgattgctggatttggacgaaaaggtcatgctgtgggagata

SEQ ID NO: 7195 - DNA, 162 bp, Glycine max
  Clone ID: LIB3074-012-Q1-E1-H1
cgttcatgctcgacaggtggacaactccttttaacagcctcttttaatggtattgttttgatgacacccctgatgtcatttttgataaccacattgagttttagggcattgatcatggccattatcgatagcatgttagatgtcaactttatatttgtgtcc

SEQ ID NO: 7196 - DNA, 390 bp, Glycine max
  Clone ID: LIB3074-012-Q1-E1-H6
aggcgtcagcaaaaaaaagacagaagagtgtacacatatgaatttgatgatgtagattgctaaactcactgtgacaattctgaacggccatggtcactccattaccattctttcgatacacagttcagccgatacgtacaataagtgcgctctaccgagtttcatggcgcatggcagtcgttgaccgacaagtgaagtgagaatgttgtgcgccagcagtgacaacacagtggaactttaggttttacagcagtcctgacaactacattacagcaagcgcggaatgcatccatggagatcacatacacatcaagcccgataacagtttcacagtcagctatatctttataccaccagacctcgaggtccatcacaaagacaaatgtgttt

SEQ ID NO: 7197 - DNA, 361 bp, Glycine max
  Clone ID: LIB3074-012-Q1-E1-H9
tccagaattcccgggtcgacccacacgtctgataggttgcagaaaacaacacaaagggagacacatatcacatcacatctctttttctcgtcgataccgctgtcatgtctcaaactgttgttctccacaatggtatgtcatgtgaaagatgtgttggagcagtgaagagagttttaggaaaattggatggtgtggaatcatatgacattgatttgaaggaacaaaaagtggtagttaatggaaatgtccatccagacacaattcttgcgaccgtttccaaaactgggaagaaaactaacttctgggaagggtgagcaacaacatcccagactaacacagcaactgcctagaacatttcgct

SEQ ID NO: 7198 - DNA, 257 bp, Glycine max
  Clone ID: LIB3074-017-Q1-E1-B9
gatagcgtttttcattgtgcattattcaatggccaccacagcagctctatccggaaccatggtgagcacctccttcatgaggaagcaacctatgacgaccaagagcctaaagacattccccaacgctctttttggtctgaaaggtggacgaggtggtcgtgcaacttgcatggcctcgtacaatgtgaagctcataaccccagaaggagaagtggagtttgaatgcccagatgatgttttcattgttgacaacgctg

SEQ ID NO: 7199 - DNA, 368 bp, Glycine max
  unsure at all n locations
  Clone ID: LIB3074-017-Q1-E1-C2
ggccgctctctgagaaaaacagatagtgtgggagagagaagagcggaagagaaaatgacgaccaggttcaagaagaacaggaagaagagaggtcacgtcagcgccggacacggccgtatcggaaagcaccgcaagcatcccggaggtcgcggtaacgccggtggcatgcatcaccaccgtatcctcttcgacaagtaccatcctggtttcttcgggaaggtangcatgcgctacttccacaaacttcgcaacaaattctacaatccgattatcaacatcgacaagctgtggtccctcctcncccaggaggccaaagacaatgccaccgccgacaatgcacccttgctcgatgtcacccagttcggtta

SEQ ID NO: 7200 - DNA, 391 bp, Glycine max
  Clone ID: LIB3074-017-Q1-E1-D7
gattatatttgagttcaaacaaatcaaagccatggccacctccaacttctctattgttctctccgtctccctagccttctttttggtgctacttaccaaggcacactcgaccgataccgtttctttcaccttcaacaagttcaacccagtccaaccaaacattatgctccaaaaagatgctagtatttcatcctctggggtgttacaactcaccaaagttggcagcaacggcgtgcccacctcgggatctctcggtcgtgccctttacgctgccccaatccagatttgggacagcgaaaccggcaaggtagccagctgggctacatcctttaaattcaacattttcgcacccaacaaatcaaactcagctgacgggcttgccttcttcttg

SEQ ID NO: 7201 - DNA, 152 bp, Glycine max
  Clone ID: LIB3074-017-Q1-E1-F6
cggagacgctttcccgaatacaccccctggcaccgggcgccctttacgataaatgcggacttaaccatgcaggccacgtcataacccttctccaatgtcatctcaatccaattcactgaccgtcgtttccccgcgtcctgacaggtaaaacc

SEQ ID NO: 7202 - DNA, 299 bp, Glycine max
  Clone ID: LIB3074-017-Q1-E1-G1
tggtacggctgcgaggacgcccacagaaggtgtaaggcttacgagaacactacatgcaaggtacagctcgcatcaagacgagtacaacggtattcgaattcaatgggacgtcattttggtacggctgcaataagacaacactagggtaacgctgcttaatcaccatacaacggtaccgccgttagacaactacagataggatcaataggtcgtcaccgatgcccttcccaacaattgcgcaaactcaatggccaatgggatgcaccctgtagcagcccattaagcgacgtcggagttct

SEQ ID NO: 7203 - DNA, 357 bp, Glycine max
  unsure at all n locations
  Clone ID: LIB3074-017-Q1-E1-H4
agatatggaaatctcccatgacatcaagatcaaggatgacaagctaggtgatgtaaaggaagagaagattaaggcagaagcggaactgaagcataaatcagttgagaaagagcatacaaaaagtaaggaagagaagattaaggtagaagcggaactgaagaataaatcagttgagaaagagcatacaaaaagtaaggaagagaagaaacataaagatgaagataaatcaaagaaaaagaagaaagagaaggtggaagaggaagatgaagagagagagaaaaaagaaaaagatttgaaagctaaaggggacgatggtgaagagaaaaaggagaaggacaatanaaatcaaattagaac

SEQ ID NO: 7204 - DNA, 327 bp, Glycine max
  Clone ID: LIB3074-017-Q1-E1-H7
cggggttctagtgtgtgattgtttgttgttgtaactcgttcatctgggtttgttgttctgtgtttgtgtttgttttttcgctcagctgaaaatgtcttgctgcggtggtaactgtggttgtggcagctcctgcagggtgggcaccggctgcagaggctgcaggatatacccagacttgagctacactgagtcagccaccaccgatatcttggccatcggagtaggacctgtgaatgatgaatttccagatgttgaaatggctgtggtagctgagaacgatgggtgcaagtgtagcccatgctgctcctgcaatccctgcacttgcaa

SEQ ID NO: 7205 - DNA, 341 bp, Glycine max
  Clone ID: LIB3074-018-Q1-E1-C9
cccgggtcgacccatgcgtccgaagacgacagaagggggcacttcaattgcaatcaaattagttcattctctttgcgcagttccctacctctcctttcaagatgcagatcttcgtcaagaccctcaccggaaagaccatcacccttgaggtggaaagctctgacaccatcgacaacgtcaaggccaagatccaggacaaggaaggaattcccccggatcagcaacgtctcatcttcgccggaaagcagctcgaggacggccgtaacctcgccgactacaacatccagaaggagtcaagccttcaacttgtccttcgtctccgtgggggcatgcagatcttc

SEQ ID NO: 7206 - DNA, 58 bp, Glycine max
  Clone ID: LIB3074-018-Q1-E1-D8
gagacctcaggtcacgcggggctacccgctgagtttaagcctatcaataagccggacc

SEQ ID NO: 7207 - DNA, 131 bp, Glycine max
  Clone ID: LIB3074-018-Q1-E1-D9
tgatattacttatacaagggtgagattaaaccaacaacttctgatcattttccttcttttgtttttttgctggaaattaacgcacatgtaaaatgtctccactgtgttttttttcaatcagtgggctgaca

SEQ ID NO: 7208 - DNA, 191 bp, Glycine max
  Clone ID: LIB3074-018-Q1-E1-E6
ggagcgagggtttgtgaagatgacgacgattcgcaggttttgctgcaacgatcttcttcgctttgccgccgtcaatctcgaccatctcaccgaaacattcaacatgtccttctacatgacttatcttgcaagatggcctgactatttccacgttgccgaaggccctggaaatcgaatcatgggttacatta

SEQ ID NO: 7209 - DNA, 74 bp, Glycine max
  Clone ID: LIB3074-018-Q1-E1-F12
gtagttaagttgacaatggaaatgtagtatttaaatatagcatatttttttttgtgtgtgatggcaacaccaat

SEQ ID NO: 7210 - DNA, 298 bp, Glycine max
  Clone ID: LIB3074-018-Q1-E1-G12
cccacgcatccgaaaacgacagaagggggctggcattatggtgctgctatcggcttgggattacagttagcaaatcacagagtcatagtatctgaaattgctaccaaacttgggagtcctgacttagctcgacaataccttgaaaaatgcttgtattatgtgaacataggcagcaatgattacatgggcaattacttccttcccccgttctacccaacaagcaccatttataccattgaggagtttacacaagttctgattgaagagttatctctgaatttacaggcgttacatgaca

SEQ ID NO: 7211 - DNA, 200 bp, Glycine max
  Clone ID: LIB3074-018-Q1-E1-G2
ggaatcgtcttttacttctcagcagcttcggctagggttcagaaacgaaaaagggttcggtgttctgttcgcgatgagagccaagtggaagaagaagcgtatgaggaggttgaagaggaagcgccgaaagatgagacagagatccaagtagtgcgttaaacctagtttgtttctgttgcttttacaattgcttatgttgt

SEQ ID NO: 7212 - DNA, 105 bp, Glycine max
  Clone ID: LIB3074-018-Q1-E1-G8
gacaacacagaacaaaaacaaagaaaaaaaaaacccttagccaacacaaccatcatggccacctctgctattcagcaatcagcattcactggtcaaactgctctg

SEQ ID NO: 7213 - DNA, 172 bp, Glycine max
  Clone ID: LIB3074-018-Q1-E1-H10
aaaaggggcacaagttagtttgttgattgagataactagaaacactgtgatgaaaatgaaagtccttgttttcctccttgccacaattttggtagcacggcaatgccatgcgtacgaaatgttccctcccccaattaacactggctatggtgcccgtactcccgaagtgaaa

SEQ ID NO: 7214 - DNA, 261 bp, Glycine max
  Clone ID: LIB3074-019-Q1-E1-E11
gaaggtgcaagagtttgttgtgagctataagctagtttatcgtgaggagaatatgaacttgtttgttttctttgttgctgcagtagttttagtagcatggccatgccatggcgcacgctaccaaaggttccctctcccaatgaaaactggctatggtgagcgttcttcggaagtaaaatgcgcaagttttaagccttctgttggaacaaacaacatccgagcccttaacaaccattcctggaacactgcgttgtgaccaac

SEQ ID NO: 7215 - DNA, 90 bp, Glycine max
  Clone ID: LIB3074-019-Q1-E1-F5
cgagggggtcatagtagtatcactcattctcatctttctctcttctctctccaccacaaacccgtaactccggaccccgttcccctctcg

SEQ ID NO: 7216 - DNA, 298 bp, Glycine max
  Clone ID: LIB3074-019-Q1-E1-G12
gttccgtaattaacataaacacagaatccaagaggtattgcaactggaattccatggcgacgagtgggtcagagacaaagcaagtgatggtgattggaatcgacgacagtgatttcagcacgtacgctctccaatggactctggatcacttgctatcccctgcaaatgttcctaagttcaagatttttcctgtttatgccaagccttctgttgcctctgctgtcggttttgttggccctggagccgctgaagtgttacctgttgttgaagccgatttgagaaaaacagctgccaaaat

SEQ ID NO: 7217 - DNA, 198 bp, Glycine max
  Clone ID: LIB3074-019-Q1-E1-H1
gggtattttaaccaagtaagttggaatgcccttttagtctcggaatccatcgatccaaaaccttaattgaagttgtcttgtccgcgttctcaaacgttgttgcttgctgctgctgcataattgatcgaaagcatgacaacatcattgtccagcatccttttcaagggaattgcagctcgttctttcaccgcccctcta

SEQ ID NO: 7218 - DNA, 225 bp, Glycine max
  Clone ID: LIB3074-019-Q1-E1-H10
gggcggtgcaattttcatcaccagaaattgtaagaacatggtagaacgttgtacgagtccgattgtgttgctctgtctcttctcaatttctgcacttactctagctttttcgccatgccccctcactgggttaccgctggtgagaaatatcagtgagactccccaagataactaccgtagggctgctctctctcacatgactgttgcatggtcattgtcgcaccg

SEQ ID NO: 7219 - DNA, 74 bp, Glycine max
  Clone ID: LIB3074-020-Q1-E1-A11
ggtgtgagtaagatcataagcaaaagcaacggtgaactgaagatgccggttctcaccctttctactaacgttag

SEQ ID NO: 7220 - DNA, 236 bp, Glycine max
  Clone ID: LIB3074-020-Q1-E1-A8
gtatcttggatttgtgcctaatttagtgtcatttttacaatattttggcttgtagatccgatcttagtttacattaacataacgtgatcttaatgcaaaccatgtcaaccaaacaaacgtagaaaagcggaccctctaaaggatccaaactcacatacgcatacatacgacgacatagatcttccaaacagtcacccaaattcagatcactagacggcgcttaacaacttcaaaac

SEQ ID NO: 7221 - DNA, 218 bp, Glycine max
  Clone ID: LIB3074-020-Q1-E1-F7
ggagaccttgtgtggagcatgtggggagaagtatgcatctgatgagttctggatttgttgcgacatatgtgagaagtggtttcatggcaagtgtgtgacgatcagtcatggccgggctgagtacatcaaacactacaggtgcccctcatgcagcaattggacaccaaggacttgatatcatacggatatggggttaattatcacagccctgtatatcg

SEQ ID NO: 7222 - DNA, 103 bp, Glycine max
  Clone ID: LIB3074-020-Q1-E1-G5
ggtcaccatcacaggccatagtgcatagcgtttttcactgtgcattattcactggccatcacagcagctctatccggaaccatggtggagcacctccttcatg

SEQ ID NO: 7223 - DNA, 122 bp, Glycine max
  Clone ID: LIB3074-020-Q1-E1-H12
tccgcacacgcgtccgtacagcagtcaatacagcagagagaggggtacacaagtgaatttgttgatctacatacatatgaccagtatcatgcaattcatagacattatcttcttcgatgaaa

SEQ ID NO: 7224 - DNA, 437 bp, Glycine max
  Clone ID: LIB3074-020-Q1-E1-H2
gacgacagaagggggagacgagggtaaggtcgcgttgtgttgcgtcgtgtcgtgcgctgttcctctgtctgtcgtttttgttttcagaccaaaccctagctccgcatcgcaaccatgtcgaccaagcaaggtggaaaagctaagcctttgaagaaacccaattctgataagaaggattacgacgaggttgacatggctaacattcagaagaaaaaggaagaggagaaggcgctaaaggagttgaaagccaaggcgcaacagaagggaagctttggaggttctgggctcaagaaaagtggaaagaaataagggctctttatcatgattgtatacatccaatattgagccctgtaatttattaccatgataacttctgtcttattgtggccttctttattgctctaatgttagtactgaactgaggtatttcgtgatgt

SEQ ID NO: 7225 - DNA, 119 bp, Glycine max
  Clone ID: LIB3074-020-Q1-E1-H4
gctcacactgtgagaaggaatctgtgaatgtttcccttggaaacctgctaacttacccatttgttagagatggcttggtgaacaaaacattgtcactgaaaggacgatactatgacttt

SEQ ID NO: 7226 - DNA, 71 bp, Glycine max
  Clone ID: LIB3074-020-Q1-E1-H5
cggacaaaaatggatgcagtgtgctttgatgatgctttgatgaatatgcagtgtgcttttttaagccagac

SEQ ID NO: 7227 - DNA, 124 bp, Glycine max
  Clone ID: LIB3074-020-Q1-E1-H7
ggcacaagtgagtttgttgatcgagataactaaaaacagtgtgatgaaaatgaaggtccttgttttcttcgttgctacaattttgggaacatggcaatgccatgcgttcgatatgttccctctc

SEQ ID NO: 7228 - DNA, 158 bp, Glycine max
  Clone ID: LIB3074-021-Q1-E1-A1
gctcacactgtgagaacgaatctgtgaatgtttcccttggcaacctgctaacttacccatttgttagacatcgcttggtgaacagaacattgtcactgaaacgaggataccatgactttgttaaaggatcttttgagctctggggccttcagtttggg

SEQ ID NO: 7229 - DNA, 307 bp, Glycine max
  Clone ID: LIB3074-021-Q1-E1-H7
ggttctagtgtgtgattgtttgttgttgtaactcgttcttcttcttttgttgttctgtgtttgtgtttgttttttctctcacctgaaaatgtcttgctgcggtggtaactgtggttgcggaagctcctgcaagtgcggcaacggctgctgatgctgcaagatgtacccagacttgagctacactgagtcaaccaccatcgagaccttggtcatgggagtggcacctgttaatgctcaatttgatggtgctgaaatgggtgtgcccgctgagaaacatggctgcaaatgttggccaaactgctcctgc

SEQ ID NO: 7230 - DNA, 54 bp, Glycine max
  Clone ID: LIB3074-022-Q1-E1-B3
tacagctgcaatatgacttcagtacggtacagttcagagaatacgataaaatgt

SEQ ID NO: 7231 - DNA, 407 bp, Glycine max
  Clone ID: LIB3074-022-Q1-E1-B5
ccgggtcgacccacgacgtccgaagacgacagaaggggaagtaaagtaaattaagaagatcattaatggcttctcttgcaaccttagctgctgttcaaccagctgcgctcaatggccttgctggaagttccctctctggaactaagctctctttcaagccctctcgccacactgtcaaatccaagaacttcaggagtggtgccgtggtagcaaagtatggtgacaagagtgtgtactttgatttggaggatctgggcaacactacggggcagtgggacttgtatggctcagatgcaccttcaccctacaaccctcttcagagcaagttcttcgagacatttgctgctccattcacaaagaggggattgttactcaagtttctgatattgggaggtggttccaccttg

SEQ ID NO: 7232 - DNA, 309 bp, Glycine max
  Clone ID: LIB3074-022-Q1-E1-D7
gacacctcaagtcaagctgggctacactctgcatttaacctaaagtttcaaacctaagaagttggaagtcatggcaccaacaatgatggcagcatacaataagttctgagtacacttaatgcatctcctttccttggacatagcattcggtgcaaatgccattgctcttaaggatgttgtctccataaaaactgggatttacaccatgagcagtgatttgtcatatgcaccatacacaatgtggtatttgggacacttctcagctcacaatccttcatacttgaaatgagaaatccctgaggattatgg

SEQ ID NO: 7233 - DNA, 231 bp, Glycine max
  Clone ID: LIB3074-022-Q1-E1-E3
tagtaatatcttggatcagatgcacaaaagagaaaactacaaggtactgatgaggttgattatgaggatggtcctgaagaggaaacacatgatggtgagctgtcagaggaaattgaacgtgatgaggatggcagtgatgttgatgccaatgagaattataacaatgtgacagatgctaataattctgaaggacttgaaaaaccctccaagtccaggactattgattaaaaa

SEQ ID NO: 7234 - DNA, 187 bp, Glycine max
  Clone ID: LIB3074-022-Q1-E1-F4
gatcacatcacatcgcagagagagagagatccatcgatcaattaacttccaatggccgatcagctcaccgacgaacagatctctgagttcaaggaagcctttagcctcttcgacaaggacggcgatggttgtattaccatcaaggaacttgcgactgtgatgcggtcgcttgggcacaacccaactg

SEQ ID NO: 7235 - DNA, 98 bp, Glycine max
  Clone ID: LIB3074-022-Q1-E1-F8
gacggtgcaacctagcagcctcaaaatccaatggcttcacagaagaaactttcgattccactgagggagataaaagtgcaggcgctcgtcctcaatat

SEQ ID NO: 7236 - DNA, 272 bp, Glycine max
  Clone ID: LIB3074-022-Q1-E1-G10
gagtgcacaagtgagtttgttgatcgagataactagaaacagtgtgatgaaaatgaaggtccttgttttcttcgttgctacaattttggtagcatggcaatgccatgcgtacgatatgttccctctccgaatgaacactggctatggtgcccgtactccggaggtgaaatgcgcaagttggaggcttgctgtggaagcacacaacatctttggctttgagaccattcctgaagactgcgttgaagcaacaaaggaatacatccatgggcaac

SEQ ID NO: 7237 - DNA, 203 bp, Glycine max
  Clone ID: LIB3074-022-Q1-E1-G4
ggttctagtgtgtgattgtttgttgttgtaactcgttcttcttcttttgttgttctgtgtttgtgtttgttttttctctcacctgaaaatgtcttgctgcggtggtaactgtggttgcggaagctcctgcaagtgcggcaaccgctgcggaggctgcaacatgtacccagacttgagctacactgagtcaaccaccaccgaga

SEQ ID NO: 7238 - DNA, 253 bp, Glycine max
  Clone ID: LIB3074-022-Q1-E1-G6
gagctccattctgcacaattctctcttatcatctttgttattacctctttccaaagtccaaattttctagttccaccaaaccaaaccaaaccaaaatggcagcagcctcagcctcatccatgatatcaacatcagccttatctccaaccatcccagaagcaccatcatttgaagccatccaacgtgtgcgttcaaagtcttacacccctcccaaagttcaccaacacctcatcaacccagttagcaccaccac

SEQ ID NO: 7239 - DNA, 83 bp, Glycine max
  Clone ID: LIB3074-022-Q1-E1-H3
tcggtactgctgcgatcagactacatacgggagcacacatcaaccttaaggttacggggcacgatgggaatgacgtttttttc

SEQ ID NO: 7240 - DNA, 376 bp, Glycine max
  Clone ID: LIB3074-022-Q1-E1-H5
gggttccagcagattatcattcattttagtacttgtgcttgtaaccttttcacccatgatcattgactcaagggttgcagaggcacgtaccctgccaaaatcagccttattgccttccaaagttgatatacctactgttgttcctcttccactggtggcaccactgccaaatttgcctgttactctccctccagtgcctgaactacctgcagtacctaaagtaccaattcctgaagtaatagttaataacgccaaaataatcccttgagtacctatgatctatccagtcactactacttattttgtcacttgctaaattaacttgttgttgccatccccacgtggttctggttctgttggggtttaatttctgtca

SEQ ID NO: 7241 - DNA, 66 bp, Glycine max
  Clone ID: LIB3074-023-Q1-E1-A11
ggtgtgagtaagatcataagcaaaagcaacggtgaactgaagatgccggttctcaccctttctact

SEQ ID NO: 7242 - DNA, 54 bp, Glycine max
  unsure at all n locations
  Clone ID: LIB3074-023-Q1-E1-C10
tgccaattctagcagattccaaacaaannaaaaaagaaaaaaagcgggcgctct

SEQ ID NO: 7243 - DNA, 266 bp, Glycine max
  unsure at all n locations
  Clone ID: LIB3074-023-Q1-E1-C12
cgggagccaaagaaaagaaaatcctcaattttctgagcagccaaacactctctctctgtctctcgaaaattctcagtttgcagagaaaatctgaatcatgtcgtggcaagcgtatgtcgacgatcaccttctgtgtgacatccgaaggtaacacctcactcacgctgctatcatcnngcaagacggcagcgtttgggctcagagtaccgacttccctcagttcaaacctgaggagataactgccatcatgaatgactttaatgacc

SEQ ID NO: 7244 - DNA, 137 bp, Glycine max
  Clone ID: LIB3074-023-Q1-E1-D11
cgggacaactcagcacaataagctatccatagcagccaaaggattgaaaagtaacgcggccgccctcgagggtccatgcttacgtacgcgctgcatgagacttcatcaatcttcgatgatgtcgcctacactcaatt

SEQ ID NO: 7245 - DNA, 175 bp, Glycine max
  Clone ID: LIB3074-023-Q1-E1-E10
atcatcagattccgcaaagacgtcctttcttgtccaaacacagacccactgacaccatcatcatcataatcaccaatgtcctcatcgagaccacaattgtccttgtcctctcctccaccattccccatccccaattttctcgatctcatctcccaccaccataaaaaaaaagaaa

SEQ ID NO: 7246 - DNA, 250 bp, Glycine max
  unsure at all n locations
  Clone ID: LIB3074-023-Q1-E1-E11
gaatagaaatagaactgtcttttcatatagatatcccttcaacacaacataggtcatcgaagggatctcgaagacccacaacgcacgaaagccgggatctttcagaaaatggattcctattcgaagggtgcataaccgcatggataagctcacactaacccgtcaatttggggtccaattcggttccttangaggtatcgggaagggaatttggaatggtataatatcgattcatacagatacagaagaa

SEQ ID NO: 7247 - DNA, 356 bp, Glycine max
  Clone ID: LIB3074-023-Q1-E1-E12
ggcccgaactccttcgacgactgtcttccccaatcgcctgcgtctctctctgaattgacaagcttaaagacaaagtcttaaatggctggtccaaggattgcccatgctaccttgaaaggtccgagtgtggttaaggagataataattggaataacacttggcttagctgctggtagcgtgtggaagatgcaccactggaatgaacagaggaaaaccaggaccttctacgatttactggaaaagggtgagatcagtgttgttgcagaggaacagtgaaaatgttcttgttttgttgcctatgctctccatttataggcttttttttcccatgctatattcaattggctcttcaactg

SEQ ID NO: 7248 - DNA, 178 bp, Glycine max
  Clone ID: LIB3074-023-Q1-E1-F11
gagacctcaggtcaggcggggctacccgctgagtttaagcatatcaataagcggaggaaaagaaaagggggaaaaaaaaaaaaagcagcggccccacaagatgaatcatgcttaagtactcctggatacgacatcacacctctacaatgtcgtcaactatcatcacatcagtggtcgt

SEQ ID NO: 7249 - DNA, 343 bp, Glycine max
  Clone ID: LIB3074-023-Q1-E1-F12
gatctggcagcagaagaacaagtagttgagaactaagaaggagaagcaaatggcttcctcaatgatctcttccccagctgttaccactgtcaaccgtgccggtgccggcatggttgctccattcactggcctcaagtccatggctggcttccccaccaggaagaccaacaatgacattacctccattgctagcaacggtggaagagtgcaatgcatgcaggtgtggccaccagttggcaagaagaagtttgagactctttcctacctgccagaccttgatgatgcacaattggcaaaggaagtagaataccttcttaggaagggatggattccttgcttggaa

SEQ ID NO: 7250 - DNA, 313 bp, Glycine max
  unsure at all n locations
  Clone ID: LIB3074-023-Q1-E1-G12
gaagacgacagaaggggacaccaacaccaaaacaaacccactaagatggcttcctttgtatccttcctagtgctgcttcttgcagcccttaacctcatgcctcaagggcttgctacttactacaaaccaattaagaagccaccagtgtacaagcctccagtgtacaagccaacagtgtacanancaccggtttatangcannaacancggtttacaagccgaaaccaacggtttacaggccaccatataagaagcaacatacaaganacaccttatggaaagtacctccagtagaggacaacacccatgccta

SEQ ID NO: 7251 - DNA, 347 bp, Glycine max
  Clone ID: LIB3074-024-Q1-E1-A8
agacgacagaagggggagggttattggacacattcttcagcgactgcgtttttggatcggaacctcttctgcggcgtagcaatgggacactccaacgtttggaactctcacccaaaaaactacggtcctggttctcgcacttgccgtgtgtgtgggaatccacatggactgatcaggaagtatggccttatgtgctgcaggcagtgcttccgtagcaatgccaaggaaattggcttcatcaagtatcgctaaaagagcagttgtcaactacggagcaatattgtgttctggcactaagatgttttgaggatgttatgtttgaagaaacttgagactttccttttttc

SEQ ID NO: 7252 - DNA, 105 bp, Glycine max
  Clone ID: LIB3074-024-Q1-E1-B10
tagacggtcgcaccatacgatccaatctaagctacgccataacgctacgacatagccctccaaaatcatcacacagatccacttcacagaacgtcgttatagaaa

SEQ ID NO: 7253 - DNA, 228 bp, Glycine max
  unsure at all n locations
  Clone ID: LIB3074-024-Q1-E1-B3
cgtattaagcaacaaaatccttcggggagttgaaaataaccgtaaatccggggattcccgatataggtcaacctttcaaactgctgctgaatccacgggcaggcaaaaaacaacctgttgaactgaaccaccttattacccaaaggaaaggaagccaccncaaaaaaacaaaaacaaaaaagaaggccggccgccctaaaggatcaaaccttacttacccttgcatgc

SEQ ID NO: 7254 - DNA, 248 bp, Glycine max
  unsure at all n locations
  Clone ID: LIB3074-024-Q1-E1-C12
gggggccgaacttgtanggcaattgagatggaaaaataataaaaagaaagagaaaaacacaggagaggagaagagagtagaagatacgaagatttgaggcatttatataatcgaaattggaagcgaggaaggaaaatcgaaatcgaaaatggcagtaatggagaggttgaagatgttcgtcgttcaagagccagttgtcgccgcttcctgtctcatcgctggcttcggtctttttcttcctgcttttg

SEQ ID NO: 7255 - DNA, 352 bp, Glycine max
  Clone ID: LIB3074-024-Q1-E1-C5
ggactgaaaaaaggttttagatcgtaaaaactaatcactacaaaaacaagaaatatcgaagatggctctgcccaaagctaaggaaatcgtgtcgtcaaattccgtcgtcgttttcaccaaaacctattgccctttctgcgtcaatgtgaaaaacctcttcggtgacctcggtgccaattacaaggccatcgaactcgacactgaatccgatggaaaagagctccaagcagcattagttgagtggacggaccagcgaaccgtgcctaatgtgtttattggtggaaaccacattggtggctgtgactcaacaactgccctgcacactcaggggaagctggttcctctgctgata

SEQ ID NO: 7256 - DNA, 54 bp, Glycine max
  Clone ID: LIB3074-024-Q1-E1-E7
ggaacaacactcctcacagcatatactgatcataaatcacatagctagttgttt

SEQ ID NO: 7257 - DNA, 80 bp, Glycine max
  Clone ID: LIB3074-024-Q1-E1-G10
tatggctgcgaaaatactacaaaacggtactgctgctacaatactacataagggtattgctgccacaatacaacacaatg

SEQ ID NO: 7258 - DNA, 135 bp, Glycine max
  Clone ID: LIB3074-025-Q1-E1-A12
caacggtaccgctcctagaacacgacatacaggtacagctgctatcagacgacacaacgcgtatgctgccagaatacgacatcatggtacagccaccagacgactacaccagggtacagctgcgattatacgaca

SEQ ID NO: 7259 - DNA, 239 bp, Glycine max
  Clone ID: LIB3074-025-Q1-E1-A8
tacggctgaacaagataagccacccatagcagccagagaaatgaagagtaccttgttcgccctctttctactttgtgccctcacctcttacctaccttcagccaccgctggtgatgtggtcgacactgatggtaatcctgttgaaaatggaggcacatactttgtgttgccaactacaatattaaacggcggtggtatacaatatgccacattttggaatgagacgtgccctgtcactg

SEQ ID NO: 7260 - DNA, 114 bp, Glycine max
  Clone ID: LIB3074-025-Q1-E1-B12
acgttggagcatgaggcgacgacaaagaagaagaatccgatgattactcaaagtactcaatcattcatcatcagctacctttactacatctaacatccttcctctgtctaatgt

SEQ ID NO: 7261 - DNA, 149 bp, Glycine max
  Clone ID: LIB3074-025-Q1-E1-C10
gcgatacgacgacacaacggggagggaaatgatggagagaagccgaagaccaagacgaccgaacccaaagggctgaccgattagatcaatgacaaaggacaaggctctcagcagcatcattgggatcaggacacaactgtccctgttga

SEQ ID NO: 7262 - DNA, 182 bp, Glycine max
  Clone ID: LIB3074-025-Q1-E1-C5
gtttttaatctttatctttggtagtacaacttgattgtctaagtaactgctagttcttttctggattgtaatgcgattactataataatagttttaagaactcagtcattttgtttccgttgactgaccttgagtgccaaatgatcaaatcttacgtatgctttcatgcgacatcacaacac

SEQ ID NO: 7263 - DNA, 292 bp, Glycine max
  Clone ID: LIB3074-025-Q1-E1-C7
gattgcatcgttgttgttcccttcttttttctttctccgccccttttttgttgttccttcttctcgttcgtcgctttgtgatctctctctgcaaccatgtccgtcgagaaagagagagagacccaggtttacttggccaagcttgccgagcaggccgagagatgcgaagaaatggttgagtgtatgacgaaagtggcaaaacttgatcttgatctgactggagacaggaggaaccttctcgcagtgggatacgggcatgtgattggtgcacgaagggcctcttggggcagaa

SEQ ID NO: 7264 - DNA, 316 bp, Glycine max
  unsure at all n locations
  Clone ID: LIB3074-025-Q1-E1-C8
agaatatgaaaaagaaaaaaaagattctaaagaaatataactaatattctttagaataatcaaaaagaatattaaattcaaataaattttagatagaaaaaagacttaaaaaggaggatttgaaatacgagatctaaagacatatctttccgtggcaccagtagtaagtactctatggttcggggctttggcgggtctcttgatagagatcaatcgtttttttccagatgcattgatattcccttgtttttcattcgagttattgacacggaaaggggtgganaagattatagatgcaagtaagtagtaaatatat

SEQ ID NO: 7265 - DNA, 329 bp, Glycine max
  Clone ID: LIB3074-025-Q1-E1-E1
gagagtggtggggtgtgcagaagagcgtcgcagttgtaaccctaatcagatgaagcgcagcttcaagcgagtgacagccaccagccatgggtcgtatacacagccgcggtaagggtatatcctcttctgctttgccctacaaaaggacacctcctagctggctcaagatctcttcgcaagatgtcgaagaaaatatatgtaagtttgcgaagaaaggtttgaccccgtctcagatcggtgtcattctcagagattctcacggtattgctcaggtcaatagcgtcactggcagcaaaatccttcgcatcctcaaagctcacggacttgcg

SEQ ID NO: 7266 - DNA, 289 bp, Glycine max
  Clone ID: LIB3074-025-Q1-E1-E8
ggatgtcagcggttcgagtccgcttatctccaactcgtgaacttagtcgatacaaagctatatgatagcacttccatttttccgattcggcagtttgatctatgctatgatttatcattcatggacgttgataagatccttccatctagcagcaccttaggatggcatagccttaaagttaagggcgaggttcagacgaagaaaggcttatggtggatacctagggcaccagagacgaggaagggcgtagtaagcgacgaaatgcttcggggagttgaaaataagcgta

SEQ ID NO: 7267 - DNA, 276 bp, Glycine max
  unsure at all n locations
  Clone ID: LIB3074-025-Q1-E1-F5
taatttgggaattattgctcccatcgccattggtttcattgtcggcgctaacattttgttgggtggggccttctctggagcggccatgaaccccgctgtgacatttgggcctgctgtcgtgagctggacctggaccaaccactggatctactgggccgggcctctcatcggtggtggaatcgctggccttgtttacgaggttgtctttatcagccacacccacgagcagcttcccaccactgactactagagggggggaaacaangnaaagaaaaa

SEQ ID NO: 7268 - DNA, 336 bp, Glycine max
  Clone ID: LIB3074-025-Q1-E1-F6
ggaagagaattgtgatgggcggacgacagggtcacggcataacctacaatggtgttaccattcatcaaccaaagcgctggcacactatcaccggcaacggtctgtgcacagtcatgtggttttgggtattctacacggcatagcatgatggtcctgttgtaatggcctggagacatctttgggaggtcaccatgatgatcaatgcaaagggcacttccattccttaggcatgagctccaagaaacatgaaaaacaccatttgaagtgtctgttgccgtggatgttttgttcaaatgtttaacttgatcaattcaataaatttggctgttaaataag

SEQ ID NO: 7269 - DNA, 277 bp, Glycine max
  Clone ID: LIB3074-025-Q1-E1-F7
aacggtccagaattcacgggtccacccacgcgtccgaccacgcgtcgcgtgcgagaatacgacatgatcggggcacaagtgagtctgttcatcaagatatctgtcatcagtgtgatcacgatgaacgtccatgtcatcatcgccgcgataattcaggtaacagggtcctactctacgggtgaaaagtcgcatcgctgaactcacactagcccgtctgtttgtgatccagatctgttccgtacgaggtagcggcatggtattttggcatgtaatatca

SEQ ID NO: 7270 - DNA, 435 bp, Glycine max
  unsure at all n locations
  Clone ID: LIB3074-025-Q1-E1-G1
ctggtacgcctgcagngtaccgtccaaaattcnagggtccacccacgcgtccgcaagaagacgacagaaggggaataaaagtagaactgtcttttcatatagaaatccctcaacaaaacaaaaggccaccaaaaggttcccaaaaaccaacaatcgcaacaaaacccggaattctttcaaaaaatggatcccaatccaaagggtgcataaccgcatggataagcccaaactaacccttcaatttgggatccaattcggttccttaggaggtaccggaaaggaattttggaatgtaataataccaatccagacagattcagacaaaagggttcccaattgattcaaacgctctacctacgaaataggaataaagacagaggaaaaaacccaggattcaaaataggactttttggccaaaaaaccgattcgattttt

SEQ ID NO: 7271 - DNA, 165 bp, Glycine max
  Clone ID: LIB3074-025-Q1-E1-H3
gatagaagaagcagaaagagaagcattagcaaaagcaagaagaactagtctaagcagaaatggcctcttcagtgatggcatctgtggccctcaaacctgcccctttcactgttgagaagtcctcaattaaaagccttccctccctctcaagggaatcctcctcaa

SEQ ID NO: 7272 - DNA, 255 bp, Glycine max
  unsure at all n locations
  Clone ID: LIB3074-025-Q1-E1-H6
gatgcttatgaaataaactgcangcgtaacaaaagttgcgtagccatactctgattcattagtgaagaaaaatggcaaccatcatcgccggcatcccaactacatcgatcactcgcgcangtcttgtgctcaaacgacctgttggagcctcgtcctctaccgttcttggattgccagcaatggctaaggcaaggaaagtgaggtgctccatggaggaaaagccttcaggcagctcaaatatagggatgggggcat

SEQ ID NO: 7273 - DNA, 98 bp, Glycine max
  Clone ID: LIB3074-026-Q1-E1-A5
taatgtgaaaagaaagatagagagacaagaaaaaaaaaaaaaaagaaaagaaaaaagcggccgcgcgagatgatggaggcttacgtacgcgggcatgc

SEQ ID NO: 7274 - DNA, 301 bp, Glycine max
  Clone ID: LIB3074-026-Q1-E1-B6
ataaatgaggaggtgaaagagagagagaaagcggatcaatgatatagaggtctgatgtgtaaaggtctatgggttatctcatacgaggtagtctaggggagcaggcaatctagatcagttcatatctatttatatgtgaattagatttataacgtagacaaagtaggagctctgagtcagggagaactgagaatagtgattcacgacgaaacagatcggtattcgaggaggacggggattattaggttgaagatatgagaaaggcgccattgtcgaattcagacctaaccattaatcgaga

SEQ ID NO: 7275 - DNA, 228 bp, Glycine max
  Clone ID: LIB3074-026-Q1-E1-C7
ggaaggagagtgaagagagaagaagatggcgtcgagcggagcggtgccgtgttggaggacagcggggaggacatacaggagaggcgcaaacatatgcgcgaatctggtcaggagttgcctcagggaacccgacgaggctgaagccgtctctcgtgagaaggtcgattttgcgctctccaaatgggtcgacgccaagcctgagggacctggtattcgttcagagacccc

SEQ ID NO: 7276 - DNA, 342 bp, Glycine max
  Clone ID: LIB3074-026-Q1-E1-C8
ggcactttcattctctaaaaaaatctaagtccctttggtcttcatcttctgttctgatccaggtatggcttctaaacgcatcttgaaggagcttaaggatttgcagaaggatcctcctacctcatggagtgcaggccctatggctgaggacatgtttcactggcaagccacaatcatgggacctgctgatagcccatatgcaggtggtgttttcctagtttcaggtcattttcctcctgactatcccttcaagccaccaaaggttgcttttcggactaaggtgttccacccaaacatcaacagcaatggcagtatatgtcttgacattctcaaggagcaatg

SEQ ID NO: 7277 - DNA, 89 bp, Glycine max
  Clone ID: LIB3074-026-Q1-E1-E1
cgcgtccgcccacgcgtcgggacagatgtcagtacactgcagaaaggattgcgggcagaattaggaagggaccaggaccatgcattctg

SEQ ID NO: 7278 - DNA, 302 bp, Glycine max
  unsure at all n locations
  Clone ID: LIB3074-026-Q1-E1-E5
ggaacctttgcattcgattcattcaggattgagcaggtgcgttgtggaagcagagaccgaaatagttcgagatggggcgtagagaagcgaggctgctcgtgagtcaactggtangaaagggtcggaggaagcagcttgcaaccaaggctgcggccgaagtctgcgggaggaggtggtggtgtgaagagggcctcatcgttatcgcccggaaactgttgctcttcgtgaaattggggagcaccgggggagccggcatctcctagtcaggaagcttcctttccagaggttggttcgggaaattg

SEQ ID NO: 7279 - DNA, 359 bp, Glycine max
  unsure at all n locations
  Clone ID: LIB3074-026-Q1-E1-F10
ggttctagtgtgtgattgtttgttgttgtaactcgttcttcttcttttgttgttctgtgtttgtgtttgttttttctctcacctgaaaatgtcttgctgcggtggtaactgtggttgcggaagctcctgcaagtgcggcaacggctgcggaggctgcaagatgtacccagacttgagctacactgagtcaaccaccaccgagaccttggtcatgggagtggcacctgttaaggctcaatttgagggtgctgaaatgggtgtgcccgctgagaacgatggctgcaaatgtgggccaaactgctcctgcaacccctgcacttgcaagtgangtgttgggagagcaagcttcaagcagagat

SEQ ID NO: 7280 - DNA, 68 bp, Glycine max
  Clone ID: LIB3074-026-Q1-E1-F5
gaagaggtcagtacagcagagaaggggagaccagaggggacagattaacgattctagacagaatttgc

SEQ ID NO: 7281 - DNA, 168 bp, Glycine max
  Clone ID: LIB3074-026-Q1-E1-F7
tacggctgccaaaagaccgcggaagggaatggtgtgttttccggtttggttgttggctcagagtttgcgaataacttcatgcatggtgttgctgcattaacccttgacccaacgttcctagcactactgaaaatactgtcatgggtgtatacgatatccacctccaat

SEQ ID NO: 7282 - DNA, 280 bp, Glycine max
  unsure at all n locations
  Clone ID: LIB3074-026-Q1-E1-G7
ggttttgccgtggaagagagaagccctagggtttgggagaagctgatcggagaagatggtgcagcgtctcacctaccgcaggcgccagagctatgccaccgaaatccaaccagcacagagtcgtcaggactcccggtggcaagcgtggttatcagagcacgacggagagggccagcggacccaagtgccctgtcgctggaaagaggattcaanggattccacatttaagggcaacagaatataagagatcaaggttacccaaaaaccgaaggactgtgaa

SEQ ID NO: 7283 - DNA, 69 bp, Glycine max
  Clone ID: LIB3074-026-Q1-E1-G8
gaacgcgaagtccatcacggcgacagatttatattcggcatatatagcaccgtactctctaatatcccg

SEQ ID NO: 7284 - DNA, 69 bp, Glycine max
  Clone ID: LIB3074-026-Q1-E1-H3
tagaggatcgaggcttacgtgcgcgtgcatgcgacatcatagctcgtctatagtggggcctaaattcaa

SEQ ID NO: 7285 - DNA, 321 bp, Glycine max
  Clone ID: LIB3074-028-Q1-K1-C4
ggaattccgtatctgtccggaggtaagcaagcggagatctgatggcgctagagtgggttgtgctagggtacgtcgcggccgcagaggccataatggttattctcctcaccatcccgggcctggaagctctccgaaagggtctgatcgcggtgacccggaaccttctgaagccgttcctctcggtggtgcctttctgcctgttccttttcatggacatatattggaagtacgaaaccaggcctagctgtgagggagattcctgcaccccttccgagcaccctcgccaccagaaatctatcatgaagagccaacgcaacgccc

SEQ ID NO: 7286 - DNA, 407 bp, Glycine max
  Clone ID: LIB3074-028-Q1-K1-D1
ggaaacaagggcgcataatttactaaagccacgaaagagaaaacaacatagtgaagtctcttacatgacttgttgatcgagataactagaaacagtgtgatgaaaatgaaggtccttgttttcttcgttgctacaattttggtagcatggcaatgccatgcgtacgatatgttccctctccgaatgaacactgactatggtgcccgtactccggaggtgaaatgcgcaagttggaggcttgctgtggaagcacacaacatctttggctttgagaccattcctgaagagtgcgttgaagcaacaaaggaatacatccatggcgaacaatatagatcagactccaaaacagttaaccaacaagcttacttttatgccagaaacctcgaagtccatcccaaggacacatt

SEQ ID NO: 7287 - DNA, 298 bp, Glycine max
  Clone ID: LIB3074-028-Q1-K1-E4
gaattgaaattgaagaaacggtgtttctagggttcgctttcgcagttgagatttgagaattgactttgagaattggaaaaatggccggtttaccagcgaggatccgtctccaacccaccgacgtcaaagccgccgccttgtggggcgtcactgccgtcaccggcgctctctacctcgttcagccatggggatggttgaagaagacattcttggagaagccagatcctgagcaaaaatgagttggcatctgagagagtgatttgaattttttgatcatgcaaaggatgggtcaaagaat

SEQ ID NO: 7288 - DNA, 53 bp, Glycine max
  Clone ID: LIB3074-028-Q1-K1-F4
gaaaagaaattaatattaatttatgaataaaactaataaaaaacgaaccatat

SEQ ID NO: 7289 - DNA, 333 bp, Glycine max
  Clone ID: LIB3074-028-Q1-K1-F7
agacgtcagaagacggcggggggggcctcttatatacatagctccaataaacagtgatactgcagatattcgatcactgatatgcttgtcacttctgcccttgcttgtcgtttccaagattgtgtgccagataatggacggactattggacttgtactatatttatatgctaagagctccatggctctcttcgcaacattttcatgacaatggccctgtcctaagtagtcactcgtaggacatgattgaaatcgttgatgctctgtgaaactaatgggcagattgatggtctagactttctccgactttccgctggctgctgatgcttaatag

SEQ ID NO: 7290 - DNA, 53 bp, Glycine max
  Clone ID: LIB3074-028-Q1-K1-F8
gacggatgctataagaccacacaacggaaccgctgagataagacaacaaaagg

SEQ ID NO: 7291 - DNA, 61 bp, Glycine max
  Clone ID: LIB3074-028-Q1-K1-H10
ttacgtttgctaaaaaacaacagaaggttatgtttgcaaaaaaacgacagaaggtgctttt

SEQ ID NO: 7292 - DNA, 367 bp, Glycine max
  unsure at all n locations
  Clone ID: LIB3074-028-Q1-K1-H3
ggaaagtaaagtcgctggtaggatcatcatctctttgagttgccattgaagaagaagctcagatcggaaaaattcacctctccaatcccaatcccatcgttgcaaatgatccgattcattctgttgcagaacaggcagggcaagacccgtcttgccaaatactacgttcctctcgaggactccgagaagcacaaggtcgaatacgaggttcatcggctcgtcgtaaacagagaccctaaatacacaaatttcgtcgagtttcgtacgcacaagataatatacaggcgatatgctgggttattnttctcactctgtgttgatatcactgataatgagtaggcgcatttagagtgcattcatttcggtt

SEQ ID NO: 7293 - DNA, 364 bp, Glycine max
  Clone ID: LIB3074-028-Q1-K1-H5
tggaaagtacagtcaaaccgcacgatcatcaatccattcgagtaacccattgaagaagaggctcagatcggaaaaattaacgtatccaatcccaatcccatcgttgcacatgatacaattcattctgtagcagaacaagcgaggcaagacccgtcttgccaaatactacgtgcctctggaggactcacagaacctcaacggcctataccaggggcatttgctcgacttgtacagagaccttaaatacacgggtttcgtagtgtatcgttcgcacaagataatatacatgcgatatgcagggttatttttctcactctgaggtgacatcactgataatgagttggcggctttagagtgcatacat

SEQ ID NO: 7294 - DNA, 59 bp, Glycine max
  Clone ID: LIB3074-029-Q1-K1-B9
aaaacctacagctgcgagaaaacaacaaaagggtactgcttctataagactacagaaag

SEQ ID NO: 7295 - DNA, 372 bp, Glycine max
  Clone ID: LIB3074-029-Q1-K1-C1
agaagacgacagaaggggataccaaaaacaaaacacaagccaagtgaaagtgagaaaggataaaaatcaaagagcataatgtcagggatcattcacaagattggggagacccttcatgtgggagggcacaagaaggaggaggagcataagggtgagcaccatgctggagaatacaaaggggagcaccatggtgaacacagtagtgagtacaaaggagagcatcatggtgaacacaaagctggagagtaccatggtgagcacaagccagagcacaaagaggggttcctagacaaagtcaaagacaagatccatggtgagggcggcgccgcccgaggcgagaagaagaagaaggagaagaagaagaaagagcat

SEQ ID NO: 7296 - DNA, 72 bp, Glycine max
  Clone ID: LIB3074-029-Q1-K1-E3
ccaggcgtccacagactggtgaggctgctttaagacgccagaccggtaccgctgccagagggcgacagacgg

SEQ ID NO: 7297 - DNA, 306 bp, Glycine max
  Clone ID: LIB3074-029-Q1-K1-E9
ggtcaccaacacaaacaatagtgcatagcgtttttcattgtgcattattcaatggccaccacagcagctctatccggaaccatggtgagcacctccttcatgaggaagcaacctatgacgaccaagagcctaaagacattccccaacgctctttttggtctgaaaggtggacgaagtggtcgtgtaacttgcatggcctcgtacaaggtgaagctcataaccccagaaggagaagtggagtttgaatgcccagatgatgttttcattgttgacaaggctgaggaagaaggcattgaacttccctac

SEQ ID NO: 7298 - DNA, 158 bp, Glycine max
  Clone ID: LIB3074-029-Q1-K1-F1
ggtcaccaacacaaacaatagtgcatagcgtttttcattgggcattattcaatggccaccacagcagctctatccggaaccatggtgagcacctccttcatgaggaagcaacctatgacgaccaagagcctaaagacattccccaacgctctttttgg

SEQ ID NO: 7299 - DNA, 167 bp, Glycine max
  Clone ID: LIB3074-029-Q1-K1-F12
tcaaacgaagaaaggcttatggtggatacctaggcacccaaagacgaggaagggcgtagtaagcgacgaaatgcttcggggagttgaaaataagcgtacatccggggattcccgatataagtcaacctttagaactggtgctgaatccacgggcagacaattttaat

SEQ ID NO: 7300 - DNA, 213 bp, Glycine max
  Clone ID: LIB3074-029-Q1-K1-H1
gacaccaacaccaaaacaaacccactaagatggcttcctttgtatccttcctagtgctgcttcttgcagcccttatcctcatgcctcaagggcctgctacttactacaaaccaattaagaagccaccagtgtacaagcctccagtgtacaagccaccagtgtacaaaccacccggttataagccaaaaccaccggtttacaaagccgaaccac

SEQ ID NO: 7301 - DNA, 172 bp, Glycine max
  Clone ID: LIB3074-030-Q1-K1-A8
ctcttaggcaacatccaggaggcccttttgacaggtttcgtagccgtacccttccgtcgacttcaatacccttaccaacatatggtgggctttctctgtctactcattcacaccgatggcatactaatgaaaaaagttaactcaaaaagatagaaaacagcggccgtttaat

SEQ ID NO: 7302 - DNA, 355 bp, Glycine max
  Clone ID: LIB3074-030-Q1-K1-C2
ctaactccaacacacaccacactttctcccccttctgtcgtcagaagacgacagaagggagaaaaaggaatcggagatggaacagttagctatggaatggatgatggtgacgacatttacatgcgctcttggactggaaccattattggcccccataatactgtacatgaaggaagaatttatcaattgaagttgttttgtgataaagactacccagaaaagcccccaagtgttcggtttcattcacgaatcaatatgacttgtgttaatcatgaaactggagtggttgaatcaaagaaatttggtcttcttgcaaattggcaacgggggtttaccatggaagatatactgaccc

SEQ ID NO: 7303 - DNA, 119 bp, Glycine max
  Clone ID: LIB3074-030-Q1-K1-D2
ttttagaggttccaggctaccttccccttccttccaacgccttactttttttttggggccccttaatttcaatccactggccggcgtttaacaccgtctggactggaaaaaccctgccg

SEQ ID NO: 7304 - DNA, 265 bp, Glycine max
  Clone ID: LIB3074-030-Q1-K1-F8
ggaggaatcagaatcgggagggggagaagaagagcaaaatcgccgagaaaatgagcggaacggggaagaaaggaagcgatgaagcattcaaggagggaaggaacatcgattgggatggaatggcgaagcttctggtctacgaagaggctcgcagggagttctccaaactccgctgcgcttgcgacgagggaaactcccaacgacaaaccaagtttagccaggaacatgagcccaaagaatgggatgaataagagaaagggaaata

SEQ ID NO: 7305 - DNA, 140 bp, Glycine max
  Clone ID: LIB3074-030-Q1-K2-A4
ttttttttctttttgacaacagccaaaattggcttgtgtcgtctttcgaatacgtacccttctgtcgtcttcactaccataccccccatctgtatggctctctctctcttctttttcacaccaattcacaaataaggctg

SEQ ID NO: 7306 - DNA, 325 bp, Glycine max
  Clone ID: LIB3074-030-Q1-K2-B3
ggttctctcaccgctccttcataggggaaccctgggtgactttatccttaacaatccatcacctcaccaaatcttaccacccaaccacctcttctttcattcattgaggacgaacctatttctcaattaaacaatatgctcctataaaatggaacaccacctcatgtagaaagggctgctgatacttatcctgatgctgtgctttctccaccatgccaaactaaattaaatttatcacaaactaactctctgccgctctaaagaatacaatcttacttactacttcattaaactgaatcacacttttataccaaaacccaaattc

SEQ ID NO: 7307 - DNA, 240 bp, Glycine max
  Clone ID: LIB3074-030-Q1-K2-C8
ttttaaaggatccaaccttacttccccgtgcttgcaacgtattagcttttttttagggcaacctaaattaaattaactggccgccgtttaaaaacgccgggactggaaaaaccctgccgttaccaaactaaatcgccttgaagaaaatccccctttcgcaagttgccgtattaccaaaaaggcccgaaccattggcccttccaaacagttgcccaccctgattggcaattggaacccccc

SEQ ID NO: 7308 - DNA, 280 bp, Glycine max
  unsure at all n locations
  Clone ID: LIB3074-030-Q1-K2-F1
gaactagttatatatgaactaaccatatccatatagattatataggataactaatatgttatatctaaaattgccccgctactactgtaaatttcgatagggattaaaaaacaaagcctttccgtttcatctcgaattgtgaattgaatattcaatgactaaaaaaatggaataaaaaaacgaagaattcaaagaatgattccaaattgaaggtaggataagaacaaaggttctacatattcacaaaaaaaactatgtatgtaggtagagacccggtant

SEQ ID NO: 7309 - DNA, 317 bp, Glycine max
  unsure at all n locations
  Clone ID: LIB3074-030-Q1-K2-F2
ttttcaagtagtttggaaccgggaaagaaagggcacttattgagctaattatcaatcttcccactctaaacactttaaataaatgaacacttgctactagccagnntatataatcagaggccttaatttgactaatgttataacaagaaaacactccataaccttagattcattccttgccacggtcttcnaagcaaaatttagcccatttgagaccaaagttttaaacaatagcattagatacttttattcccaataaaactttatcattcacaactcagaaaactttttataatccttttttaccaagggatgct

SEQ ID NO: 7310 - DNA, 65 bp, Glycine max
  Clone ID: LIB3074-031-Q1-K1-B10
aagaatactgatctttagaccaatcaaactatttatataaatggatattttattggcggccgctt

SEQ ID NO: 7311 - DNA, 80 bp, Glycine max
  Clone ID: LIB3074-031-Q1-K1-C1
tgcggctgctggaacaccaccgaagggtacggctgaacaaagacgacataagggtactgctgccaaaagacgacaaaaag

SEQ ID NO: 7312 - DNA, 189 bp, Glycine max
  Clone ID: LIB3074-031-Q1-K1-C11
gcaaaccccaaacctacgcattttttcttttccccaaccaacagctccactctttatgttcatgtaaattcttttggctaaagtttcagctttcaaaattgaaaaaaaaatgatcaaacaggttcatcctgtaatgctcttcttggactttggattgaccctcttagtcttagagactgaaactgtttc

SEQ ID NO: 7313 - DNA, 325 bp, Glycine max
  unsure at all n locations
  Clone ID: LIB3074-031-Q1-K1-C2
gatttgtgaaactaacaacaacacaaggccatcatcatggcagctgcttccccaatggcaagccaactcaagtccaccttcactaggactcttgtagctcccaagggcctctctgcctcttcaccacttcacctcgtgccttctagaaggcaatttagcttcactgttaaggccatccaatcagagaagccaacctatcaagtgattcagccaatcaacggtgacccattcattggaagcctggaaaccccaattacatccagccctntgatcgcatggtacttgtccaacctgcccgcatacagaaccgcagtgagcccactac

SEQ ID NO: 7314 - DNA, 197 bp, Glycine max
  Clone ID: LIB3074-031-Q1-K1-C4
gacagctattcctcttaagcttgctactgagtttccacactgcataccttaggtcttccgaattcgaagttaatttgcaagatggctaatgaaaaggctcagatcaacattgtggtggttggtcatgtggaccctgaggaggcaaccaccattaacgagctgataagcctgtgtggagaagagctcagggatgcata

SEQ ID NO: 7315 - DNA, 215 bp, Glycine max
  Clone ID: LIB3074-031-Q1-K1-C5
ggttcccacctcacattccaaaccgacgtcaatggcagcctcatcctgcttctccaccctcttctccttcctcctaccatccaaagccacaccctcctcccaagatgactcgctttccactccagaagctacgtgccaagcattaggaccaggaccaccactcgtcgggggagctgtccgccgtggagaacccagtccacgcgcatgcgagcacg

SEQ ID NO: 7316 - DNA, 269 bp, Glycine max
  Clone ID: LIB3074-031-Q1-K1-D7
gaaggtgcaagagtttgttgtgagctataagctagtttatcgtgaggagaatatgaagttgtttgttttctttgttgctgcagtagttttggtagcatggccatgtcatggcgcatgctaccaaaggttccctctccgaatgaaaactggctatggtgagtgttcttcggaggtaaaatgcgcaagttttaagcttgctttggaagcacacaacatccgagcctttaaaaccattcctgaagagtgcgttgaaccaacaaaagactaca

SEQ ID NO: 7317 - DNA, 252 bp, Glycine max
  Clone ID: LIB3074-031-Q1-K1-E6
gtcgggtgcgaaaggacaacagaaggggacctcaaccataacaagcgtaaacggttgattaagaaagcaattgtcattgaaatgctaacaccaacaatgcgttctagcatatcatcattcattctagtacatgtgcctgttacctattgatacatgaacattgaattaagggacgctgacgcacgttacctttcataatcaaactcattgacttgccacgttgatataactactgctggccccattccactg

SEQ ID NO: 7318 - DNA, 351 bp, Glycine max
  Clone ID: LIB3074-031-Q1-K1-E7
gacctcaagcataacttgcatagactattgattaagaaagctattgtcattgatttgctagctccaacaatgggttctagcagattatcattcattttagtacttgtgcttgtaaccttttcatccatgatcattgactcaagggttgcagaggcacgtaccctgccaaaatcagccttattgcctttcaaagttgatatacctactgttgttcctcttccactggtggcaccactgccaaatttgcctggtactcttccttcagtggctgaactacctgcagtacctaaagtaccaattcctgaaggaatagttaaatacgccaaaataatcccttgagtacctatgatc

SEQ ID NO: 7319 - DNA, 271 bp, Glycine max
  Clone ID: LIB3074-031-Q1-K1-E9
ggggatagacatcattcatacactcaacgaacgctcagctcagtccggtgccgccggcattcctctttcacggactcatggaaaacgacgacgtcgacatgcacgctgccgacaccaacgaggaattggatgacatgaagaagcgcttggaggagatggaagatgaagctgctgctttgggagaaatgcaaggcaaggtcgagaaggaaaagggatccgtgcaagatcctgcaaatgcttctgcgagtcaggccaataaagaggaaataga

SEQ ID NO: 7320 - DNA, 122 bp, Glycine max
  Clone ID: LIB3074-031-Q1-K1-F11
cgagtatgacgacagaaggggaggtggagatgcaagcaaaccattaaccacaacacatggcgctatggtccttactctgacttggctctcccatcaaacttactttcaagtccttcaaatat

SEQ ID NO: 7321 - DNA, 165 bp, Glycine max
  Clone ID: LIB3074-031-Q1-K1-H5
gagacctgaggtcatgcggggctacccgctgagtttaagcatatcaataagcgcgcaataaaaaaaaaaaattataatataaaagcgggcgctctagatgatccaaacttacgtacccgtgcatgcaacgtaatatcttttctatagtgtaacctaaattaaatt

SEQ ID NO: 7322 - DNA, 326 bp, Glycine max
  Clone ID: LIB3074-031-Q1-K2-A11
gactcatctcttacaacgaaaccctcttcatcttgttctacctgtgacgagcatcatggcctcaagagcagtgttattgttggctatgtgtgtgcttccggcgatggttgtggccattcgcccagcaaagaaccctttttgcgtgaagggtcgtgtctactgtgacccttgccgtgctggttttgagacctcagctaccacctacattgctggtgctgagattatgttgcaatgcaagagcagggttagcaacgaggttgtgtacacgaagaaggggtacaccgacttaaccggagcatacacaatgtacgtggatgaggatcacg

SEQ ID NO: 7323 - DNA, 158 bp, Glycine max
  Clone ID: LIB3074-031-Q1-K2-A9
ggttcccacctcacattggaaaccgacgagcatggcggcctgatgctacttgtacaaatatctctccttgctgctgcttgcaaagccagacgctcgtaccattatcactcgctctccactcgagaagctacgtgccaagcatcaggaccagcaccacc

SEQ ID NO: 7324 - DNA, 74 bp, Glycine max
  Clone ID: LIB3074-031-Q1-K2-B10
ttttgtttcggctgctagagacgactagtggcggctgtataatacgactgaaggttctgctgctaaatacacag

SEQ ID NO: 7325 - DNA, 79 bp, Glycine max
  Clone ID: LIB3074-031-Q1-K2-B12
cggtttcggattccgggccgacccacgcgtcctcccatcgtccgtactgcgagattactacataagggcgattacttca

SEQ ID NO: 7326 - DNA, 113 bp, Glycine max
  Clone ID: LIB3074-031-Q1-K2-C1
tggttcggctgttataagacggggggagggttcagctgcgggaacaccacctacgggtacggatgaacaaagacaacatatgtgtactgatgacaaaaaacgacagaaaggtt

SEQ ID NO: 7327 - DNA, 255 bp, Glycine max
  Clone ID: LIB3074-031-Q1-K2-C2
atttgtgaaactaacaacaacacaggccatcatcatggcagctgcttccccaatggcaagccaactcaagtcacttcactaggactcttgtagctccaaggcctctctgctcttcaccacttacctctgccttctagaagcaatttacttcatgttaggccatcaatagagaaccacctatcaagtgattcaccaatcacggtgaccattcatgaagcctgaaacccattacatcagcccttgatcgcatgtact

SEQ ID NO: 7328 - DNA, 192 bp, Glycine max
  Clone ID: LIB3074-031-Q1-K2-C4
gacagctattcctcttaagcttgctactgagtttccacactgcataccttaggtcttccgaattcgaagttaatttgcaagatggctaaggaaaaggctcacatcaacattgtggtggttggtcatgtggaccctgaggaggcaaccaccattaacgagctgaagaagcctgttgtggagaaagaaagctca

SEQ ID NO: 7329 - DNA, 229 bp, Glycine max
  Clone ID: LIB3074-031-Q1-K2-C5
gggggggttgccacctcacatcccaaaccgacggctatggcaggatcatactacgtttccaccctcttatgcttacttcttgctccagaggcacaccctcctctcatcatgactcgctttccacttcagatgcttcctgcctagcattcacgacctggaccaccactcgtgaattgagctgtcctccgtggctaacccatgccacgcgcttgcaagcactctttttttt

SEQ ID NO: 7330 - DNA, 136 bp, Glycine max
  Clone ID: LIB3074-031-Q1-K2-C9
tcagacgacacaagggaaagaatatctttgagactctttcctacctgccaggggttggtgatacacaattggggaaggaagtcaaataccttcttactaaggcaaaacctccttgcttggaattcgagttggagca

SEQ ID NO: 7331 - DNA, 114 bp, Glycine max
  Clone ID: LIB3074-031-Q1-K2-D7
gaaggtgcaagagtttgttgtgagctataagctagtttatcgtgaggagaatatgaagttgtttgttttctttgttgctgcagtagttttggtagcatggccatgtcatggcgc

SEQ ID NO: 7332 - DNA, 174 bp, Glycine max
  Clone ID: LIB3074-031-Q1-K2-D9
tgatgagacaagacaacgggttgtgtttggtcaaccaaccaattttccaaagcgcgtggctctatgatacatagtctgactctcctctcatattaatattactaaaaaattgttattatctgcaacaccagacagtgctactcccacctatgattacgatcaacacctacacta

SEQ ID NO: 7333 - DNA, 244 bp, Glycine max
  Clone ID: LIB3074-031-Q1-K2-E7
gacctcaagcataacttgcatagactattgattaagaaagctattgtcattgatttgctagctccaacaatgggttctagcagattatcattcattttagtacttgtgcttgtaaccttttcatccatgatcattgactcaagggttgcagaggcacgttccctgccaaaatcagtcttattgcctttcaaagttgatatacctactggtgttcctcttacactggtgggaccactgccaaatt

SEQ ID NO: 7334 - DNA, 196 bp, Glycine max
  Clone ID: LIB3074-031-Q1-K2-E9
ggggatagacatcattcatacactcaacgaacgctcagctcagtccggtgccgccggcattcctctttcacggactcatggaaaacgactacgtcgacatgcacgctgtcgacaccaacgaggaattggatgacatgaagaagcgcttgaaggagatggatgatgatgctgcttgcttgggagagatgcaggccaa

SEQ ID NO: 7335 - DNA, 185 bp, Glycine max
  Clone ID: LIB3074-031-Q1-K2-F11
ccagaagacgacagacggggaggtggtataagcaagcaaaccattaaccacaacacatggcgctatgttcctcactctcacttgtctctcccatcaaactcacttccaagtccttcttatcttcaacaccagtcagttggcttggcatcttgataaagaataacaccttaacaagattctttctg

SEQ ID NO: 7336 - DNA, 315 bp, Glycine max
  Clone ID: LIB3074-031-Q1-K2-F3
ccacgcgtccgacgacagaagggggattacatggggaaaagaaaagagattctgagacgtgggagtatatcgaagcagagaagaagaaagaaagaaagatggtgaaagtggcgacgtacttcgcgatgacgctaggagccttcgtgttctggcagtccatggacaagctccatgtctggatcgctctccgtcaagacgaaaagaaagagaggttggagaaggaagccgatatcagaagggttagagaagaattattgcagcagcaggccagtcagaaagattctctttcttgaatttgaattatgttggaatttt

SEQ ID NO: 7337 - DNA, 57 bp, Glycine max
  Clone ID: LIB3074-031-Q1-K2-H5
gagacgctcaggtcatgcggggctacccgctgagtttaagcatatcaataagcgcat

SEQ ID NO: 7338 - DNA, 258 bp, Glycine max
  Clone ID: LIB3074-033-Q1-K1-A10
gcaccaagtgaaccaatagagtcgaagccctattcgacccaaccctaacacacacccatttgattcagtgtgcatggcttgcctgaacgatgcattcttggctgcacatctctccatggatgtcgtgagtgcacccatggcacatgcagctatgacctgcgggcaagagacgagtaacctggacaattgcatcggttacctacagaatggacgaacgccatcttcggcatgctgcaactgagtgaatagcctcaatgc

SEQ ID NO: 7339 - DNA, 214 bp, Glycine max
  Clone ID: LIB3074-033-Q1-K1-B1
gataccaaaaacaaaacaagccaagtgaaagagagaagaaaagtcaaagacaatgtcagggatcattcacaagattgaggagacccttcatgtgggaggccacaagaaggaggaggagcacaagggtgagcagcgccatggtggagaatacaaaggggagcatcatggtgaacacagtactgaatacaaaagagagcattatgttggtgagcac

SEQ ID NO: 7340 - DNA, 249 bp, Glycine max
  Clone ID: LIB3074-033-Q1-K1-B2
gatagcgaaacagagagtggtttcagtgagtgatcggtgttcacttgatccttcataagtcgtcatcatcatcatcatcatcaccgttgattgaagaagatgccgatcagaaacatcgccatcggaaggcctgaagaggctactcaccccgacacgttgaaggcggggttggctgagttcatctccaccttgatcttcgtgttcgccggttcaggttccggcatcgcctacaacaagctcaccgacaac

SEQ ID NO: 7341 - DNA, 210 bp, Glycine max
  Clone ID: LIB3074-033-Q1-K1-C9
gacgagtgaaagtacaagttgcagggatggccttaaccttctcctccacactctctatatcctcttcattcacccttgttgatgccaaggcttcaagtccaagacaattcccacaatgtgtctccccttcacctgttcactctccttggaagaccactgctttctgtcgcaagattggcagcaatgttatggcaatggctaccaccagag

SEQ ID NO: 7342 - DNA, 155 bp, Glycine max
  Clone ID: LIB3074-033-Q1-K1-D11
cctctcttttggttgggaagttgatggggactgattgattgttttctctagtttacggtgtagacattgataatcccgagaaatgtatcttaattattcagagttataaataataattatttatttttagcgccgttctagaagatcatgtttta

SEQ ID NO: 7343 - DNA, 335 bp, Glycine max
  Clone ID: LIB3074-033-Q1-K1-D4
agaagacgacagaagggcatgtaccctgagcttatcttaccaacaatcttcctttacctcttcttgatcggagtttggtactacagatggaggccaaggcacccacctcacatggacactcgcctcttccatgcagattctgcgcatcctgatgaactggatgaagagtttgacacattcccaaccaccaggccttcagacatcgtgaggatgcgatacgaccgacttagaagcattgctgggaggatacagactgtggttggtgatttggccactcaaggggagaggctgcagtctttgcttcactggagagatccaagagccactgccctctt

SEQ ID NO: 7344 - DNA, 194 bp, Glycine max
  Clone ID: LIB3074-033-Q1-K1-E5
ggtgtgtcggtcttgtcttgttggtaaagaaagagaagagagcggtcgctctcgaggatccaagcctacttacgcttgcatgccacttcatacctcttctgtagggtcccctacaacccacttactggccgtctttatacaacgacgagactggtaaaaccctgtcactatctaacataatcacttcgaactac

SEQ ID NO: 7345 - DNA, 203 bp, Glycine max
  Clone ID: LIB3074-033-Q1-K1-F10
ggttcttgtgtgagagagctcgttgttggaactcgcccttgttcttttggcggtctgcggtagggtttgttcattctctgacctgaaaatcgtttgttgcttgcggaactgaggacgcagaagctccttgccgtgcttgatcggctcgggaggctagagcatgtacccagacttgagctacactgagtcaaccaccaccgaga

SEQ ID NO: 7346 - DNA, 198 bp, Glycine max
  Clone ID: LIB3074-033-Q1-K1-F11
tacgtgagattgttgagcagagtcggactgctgactaatcatcgtagataagatagggcttctgtgacaatcaaaaggttgtcaaaaggatatatgattgaataaccagcagacttcaaaaagaaccattatgattttctagtccttgacactgtgcttgctcaaactctatgagttaatgttccaccttattttcta

SEQ ID NO: 7347 - DNA, 148 bp, Glycine max
  Clone ID: LIB3074-033-Q1-K1-F2
tgcggctgactggagacgtcataagggggaatacgcatcatactcatcaccgatgattgaagaagatgccgagcggccgctttagaagatccaagcttacataggctgcttacgacgacatatcgtatgtatagtgggatctaaatat

SEQ ID NO: 7348 - DNA, 168 bp, Glycine max
  Clone ID: LIB3074-033-Q1-K1-F3
gaccaagtgaaccaatatagcccaagccctatacaaccaaaccctaacacacacccatttgattcagtttccatggctagcctcaaggttgcatttttggctgcagtgctctgcatggttgtggtgagtgcacccatggcacatgcagctattacgtgcgggcaggtg

SEQ ID NO: 7349 - DNA, 133 bp, Glycine max
  Clone ID: LIB3074-033-Q1-K1-F5
aggggaaaaccctatcaacacaagcgccgagcgtgagccattgactaagatggtgcaacgtcttacctaccggaagaggcacagatatgccaccaaattcaaccaacacaagtgtcgaaaaacccctggtggg

SEQ ID NO: 7350 - DNA, 54 bp, Glycine max
  unsure at all n locations
  Clone ID: LIB3074-033-Q1-K1-G3
tgatcaatttataagattgaatcgtcgccnaaaaaaaatttaaaanttttaaaa

SEQ ID NO: 7351 - DNA, 244 bp, Glycine max
  Clone ID: LIB3074-033-Q1-K1-G4
caaaagcccggggggagggggattagtacaggcgtagaacaaaaggaccattggtaagtgccataatacctgaagagtaacaacttattggacggaagcgttcccaacctataaacagtttaagcccctggacattttctctttcaaccttaaatacaggttagagcccgtggtcaaatcatttttttgttttttttcaggttgggcctgacctaaagcgatcttttttaatttcaaaaggccg

SEQ ID NO: 7352 - DNA, 124 bp, Glycine max
  Clone ID: LIB3074-033-Q1-K1-H11
cgtagtaagcgacgaaatgcttcggggagtggaagggttgcgtatatccggggattcccgatatacgtcaacctttcgaactgctgctgaatccacgggccggcctaataaaaaaaatatatac

SEQ ID NO: 7353 - DNA, 183 bp, Glycine max
  Clone ID: LIB3074-033-Q1-K1-H3
aattcaagcaaataatggtatcgagtatagatgaaagagggggatatggcgaaattggtagacgctacggacttaattggattgagtcttggtatggaaacttaccaagtgagaactttcaaattcagagaaaccctggaattcacaaagggcaatcctgagccaaatcctgtttttcgaaaa

SEQ ID NO: 7354 - DNA, 368 bp, Glycine max
  Clone ID: LIB3074-034-Q1-K1-C11
cttggagcacttggctttcaagggtagctttcctttccaaattgagagcttgggtggaagcttcgatgcttacactactcgcgaacattccgccttccttgtccagactttcaacaacaatgttgcccagactgttgatatcttgtccgaagctgttcagaaccccaaccttagcgccattgatgaagctcgtgaggctatcttgaagcagcaacagaaggctgccaacaatggtgagcagattgtctttgatcacttgcacgccactgctttttcaaggtgaaagtcttggtcgttccattgctggtacccccgagtcttgtcaagccatcttttgcgatgacctcttcaactttatttagaacaac

SEQ ID NO: 7355 - DNA, 137 bp, Glycine max
  Clone ID: LIB3074-035-Q1-K1-D11
ggctttgcacaaaccctaacaccaaaaccagaagcgaaatcgcaatcgcaatccagcgaatatgaaggtcgtagctgcatacttgctcgcagtgttgggagggaattcttccccttctgccgatgacatcaaacaca

SEQ ID NO: 7356 - DNA, 210 bp, Glycine max
  unsure at all n locations
  Clone ID: LIB3074-035-Q1-K1-D4
cgggncgacccacgcgtacgaccacgcgtactttcctataaaactacatatttttttaattgatagctccttcaattaggctgttggtcttctatatctactatgtccaattcaacgttatctttcttttagaggagtaacaagacccacaccctttttgtgagttttagtcgctctatctttcacctccataagaattattgcttttct

SEQ ID NO: 7357 - DNA, 144 bp, Glycine max
  Clone ID: LIB3074-035-Q1-K1-D6
ggcacatatcagtttgctgatcaacataactacaaacggggtgatttaaaaaaaggatcaatgtttcttctttgctacaattctggtagcaaaccaattccactcataccacttgttccaatttcccaatgaacactctatatt

SEQ ID NO: 7358 - DNA, 129 bp, Glycine max
  Clone ID: LIB3074-035-Q1-K1-E1
gacggttgcgagaacacaatacaaaggtaaaaggcgcacgatctagaggatccaggcttacgatcccgtatatgcgacgtcataactcttctatagtgacacctaaatataattcactggtctgttgta

SEQ ID NO: 7359 - DNA, 197 bp, Glycine max
  Clone ID: LIB3074-035-Q1-K1-F11
ccacgcgttctaacagctgctagaagtctactatatggtactgctacaatattacgacgcagggtttctgttgaaagatgacaacatattgtgaatcacataccttatttaacactcatatccatatcctctttccttcaaaggaaaccatttctccttctatcttgtattccaactcttctatatttatctcactt

SEQ ID NO: 7360 - DNA, 206 bp, Glycine max
  Clone ID: LIB3074-035-Q1-K1-F9
cggggcgacccacgcgtacgtccacgcgtactgtagaagacgacagattggtgcacaagtgagtttgtagatcgatatagcttgaaacagtgtgatgaaaatgaatgtccttgttttcttcgttactacaattatggtagcatggcaatgccatgcgtactatatgttctctctcctaatgaacactgtctatcgtgcccgtactt

SEQ ID NO: 7361 - DNA, 306 bp, Glycine max
  Clone ID: LIB3074-036-Q1-K1-A8
gatagctggctgtgagcaattgtggtttcacagaacgtgatcttatcaactatggcggagaaacacaacatcaagaacccagccgtgaagcggattctccaggaggtcaaggagatgcaatcaaacccttccgatgactacatgagcctccctcttgaggaaaatatatttgaatggcaatttgcgatcagggggcctcgtgatactgaatttgaaggtggtatttatcacggacggattcagctgcctttagaatatcccttcaaacctccttcgttatgttgctcacacctagtggccgtttga

SEQ ID NO: 7362 - DNA, 52 bp, Glycine max
  Clone ID: LIB3074-036-Q1-K1-B1
tctgccacgcgttcggccacgcgttcggccacgcgttcgcccacgcgttcgg

SEQ ID NO: 7363 - DNA, 104 bp, Glycine max
  unsure at all n locations
  Clone ID: LIB3074-036-Q1-K1-D2
gaattcccggggtcggacccacgcccgtccgtaccggctnnggcgagaagaacganncagaaggggacactcaacctaccaaaacaannnacccactaagaatg

SEQ ID NO: 7364 - DNA, 371 bp, Glycine max
  Clone ID: LIB3074-036-Q1-K1-F1
cccacgcgttcggccacgccttcgtaccggttggaaaaaccacctaaggggacccccttttggtttgggtggggctgggttaattaaacccgtggttggttctaaaaccctcttctttaaaggcggccccaaacctttgcatttcaaatccccgttggttttgcaaaaacccttggccaataactcgacttcgcaaataaagttctcctttcgtcgatcgcgtggaaatgtgatcaaagattctgatccaagcgttcatccgcgtttattgtcctctggtgttgtgggtgctttacattctcatgaaatatggcttaccatatccaaagacctcctctaaaaaaaacccgttaagaaaaatgaaaagaaac

SEQ ID NO: 7365 - DNA, 53 bp, Glycine max
  Clone ID: LIB3074-036-Q1-K1-H4
actcatcattgtctcaaaaaccttctctctcaacaaaacctacaacacctgat

SEQ ID NO: 7366 - DNA, 202 bp, Glycine max
  unsure at all n locations
  Clone ID: LIB3074-037-Q1-K1-B6
gaanacccgggccgacccacgcgtacggacgggagaaaaagacaacagggggattccacatcaaccactcttgactatgccctggtcagggaaattcttacacacacgcattcaatttaaaatcatcttatacccaaaaagttgcattcttgattgcacctctcttgatcagttgctctaattcacccatcccacattcact

SEQ ID NO: 7367 - DNA, 53 bp, Glycine max
  Clone ID: LIB3074-037-Q1-K1-B8
ataaaacgacgacaacagagggatactgttgcaataagacgacataaggctgg

SEQ ID NO: 7368 - DNA, 80 bp, Glycine max
  Clone ID: LIB3074-037-Q1-K1-C10
tactgttgcttcaagacaacagaagggttcggctcgcagaggacgactgaagggtacggctgctacaaaacaacagaacg

SEQ ID NO: 7369 - DNA, 285 bp, Glycine max
  Clone ID: LIB3074-037-Q1-K1-C11
tatgaactgtgcgagagtgtggtgagaactataatctatcttatctttaggagaatatgaacttggttgttatctttcttgctgtagtacattctgtcacatggtcattccatgatgcaaactaccatatggttacctctcctaatgaaaactatgtatcgtgagcattcttcctaggtaaaaacaccacattttaggctttctaaccatgcacacaaaatgcgagcctttaaaaccatacttcattaatgccttgcaccatcaaacgacttctttaacggctaa

SEQ ID NO: 7370 - DNA, 259 bp, Glycine max
  Clone ID: LIB3074-037-Q1-K1-D3
gaatcggaaaaagtggcgggtccgtgggaattatgtacgggaaggatagagtaccatcacaatgctggaagcatgattccttaccacaagaacctaaccaggctgggctataaggcacttattttcagtggcgaccatgatatgtgcgtgccatttaccggaagtgaggcttggacaccatctttgaaatataagattgtggatgaatggaggccatggaactcaaataaccaacttgctgggtacttgcaagcgtacg

SEQ ID NO: 7371 - DNA, 110 bp, Glycine max
  Clone ID: LIB3074-037-Q1-K1-D6
cggtacagctgtacgaagacgacaaaacggtacgggtgtgcgaagacgacaaaacgatacggctgttagaatacgacaaaacggcacgggtgtgagaatacgacaaaacg

SEQ ID NO: 7372 - DNA, 53 bp, Glycine max
  Clone ID: LIB3074-037-Q1-K1-D9
tactgttgctttaagacgacagaagggtacggctcgcaggggactactgaagg

SEQ ID NO: 7373 - DNA, 63 bp, Glycine max
  Clone ID: LIB3074-037-Q1-K1-E1
gagacctcaggtcaggcggggctacccgctgagtttaaaccaaaaaaaaaaaaaaaaataatt

SEQ ID NO: 7374 - DNA, 96 bp, Glycine max
  Clone ID: LIB3074-037-Q1-K1-E3
cgcgtgcgaatacgagcgggcactctagagaaaccaagcttactttcgcctccatgcaacgtcataactggtctgtcttgtaacctaacttcaatt

SEQ ID NO: 7375 - DNA, 287 bp, Glycine max
  unsure at all n locations
  Clone ID: LIB3074-037-Q1-K1-F3
gatacatgagataagccaattgtgataagccattcactcaggtgaaaagaaaaaaaaaacatatagtaacaaaaccatggtgattcacagactcgaattgtgcataaacatggttcaactcgccatagagttcgtcgtgagcgtcgcggaaacagtggtcatagttcagcagagaaccgtggagcctctcggaatgttgaatcgcgcacgtacacctcttcctttctatggctacctccgntgaatgttgaagagcatcgcttgataattactttctagctttcttt

SEQ ID NO: 7376 - DNA, 224 bp, Glycine max
  Clone ID: LIB3074-037-Q1-K1-F4
gatacatgagataagccaattgtgataagccattcactcacgtgaaaagaaaaaaaaaacatatagtaacaaaaccatggtgattcacagactcgaattgtgcataaacatggttcaactcgccataaattttgtcgtgagcgtcgaggaaacagtggtcatagttgagcagagaaccgtggagcctctcggaatgttgaattgggcaagtacacctcttcctt

SEQ ID NO: 7377 - DNA, 223 bp, Glycine max
  Clone ID: LIB3074-037-Q1-K1-F7
gatacatgagataagccacgtgtgataagccattcactcacgtgaaaagaaaaaaaaaacatatcgttacaaaaccatggggggtcacagactcgaattgtgcataaacatggttcaactcgccataaagttcgttgtgagcgttgcggaaacataggtcatagttcagcacaaaacacaggagcctctccgaatgttgaatagagcaagttcaccccttact

SEQ ID NO: 7378 - DNA, 61 bp, Glycine max
  Clone ID: LIB3074-037-Q1-K1-H3
aggagggggattgagaaagagaacgagaaaacgacatggagaaagcaatgctggaggctgg

SEQ ID NO: 7379 - DNA, 246 bp, Glycine max
  Clone ID: LIB3074-038-Q1-K1-A5
gtggaaaacttaaataattacatccttatgcaaaataaaaaaacattgtacatttgaaaatcgctcagaatataggatccaacattacttaatcttgcatcctacattatatcacttttataatgtatcctaaattcaataaactgaccaacaaattacaacctcccgacttagaaaacccaagcttacccaaacttaattgccatgcaatacatcttctttactgcaacttaaataaaattaaat

SEQ ID NO: 7380 - DNA, 136 bp, Glycine max
  Clone ID: LIB3074-038-Q1-K1-D1
ctgcttttacaatacgacaacagaatgctactgctgggagagggcgacataatgctactgctacaagaagacaacagaatgctgctgcttcaagaagactacagaatgcttctgctgcaagaagacaacagaatgc

SEQ ID NO: 7381 - DNA, 87 bp, Glycine max
  Clone ID: LIB3074-038-Q1-K1-E1
gatatatataaagtatcacagtgagaatggtcgatacctaaaattcctaatcggaaaaaagaactttaactttggtatgaaaaagcg

SEQ ID NO: 7382 - DNA, 342 bp, Glycine max
  Clone ID: LIB3074-038-Q1-K1-E3
gccagaccttgatgatgcacaattggcaaaggaagtagaataccttcttaggaagggatggattccttgcttggaattcgagttggagcacggtttcgtgtaccgtgagcacaacaggtcaccaggatactacgatggacgctactggaccatgtggaagctgcctatgtttggttgcactgatgcttctcaggtgttgaaggagcttcaagaggctaagactgcataccccaacggcttcattcgtatcattggattcgacaacgttcgccaagtgcagtgcatcagcttcatcgcctacaagcccccaggcttctaagtgtgaaaaatttgcaaagcatt

SEQ ID NO: 7383 - DNA, 250 bp, Glycine max
  Clone ID: LIB3074-038-Q1-K1-F2
gaagaccaataacacaaaaaccacttaattagtccttctcacatccaaaatcttgtgccagcaaatcaaacatggcatccatgactatgcttcagaccatgattcctaagaatgcaccgaacctccctcctcgtgttggtgcttcttccaacaacactactaagatctcatttggtggctcaggtagggtactgtggaccgggattcagaggaacaggaataataggtcttcttcgattgtagttgctgc

SEQ ID NO: 7384 - DNA, 371 bp, Glycine max
  unsure at all n locations
  Clone ID: LIB3074-038-Q1-K1-G7
aaagaccacaaattttgacctctccgagtcgcataaaaagaaaagagcgatgcntagttttacttcagccttatccactttaagctttcccttctctaccctatctttcacgtatcgaaaccttaaatttaccatcacgtctgagcaatctccttgttaaaaccttttctcttagtgagccaatttttatgtctcaattataccatcaaattcctactgccttccatccttttgctgatgcaaatgctcatgactcgtttgctgcttcaaaggagtatgtgcatattcctgtacagcagcgaaatcgtattaaaagcctgacaacctttcaggtattgaaaaatgaattcatctataacaagatactttaa

SEQ ID NO: 7385 - DNA, 395 bp, Glycine max
  Clone ID: LIB3074-038-Q1-K1-H3
gaaacaaattccactcaatgtgcaacttcatgaaaaaaatgggtcatcttggcttcttccttctggggtgtctctccatgatctcatatgctaatggttatgtcagcaatgggggttggaccaatgcccatgctacattctatggtggaagtgatgcttctgggacaatgggtggggcttgtggttatggaaacttgtatagtcaaggatatgggactaacacagcagcacttagcactgccttgttcaacaatggcttgagttgtggctcatgctaccaaatcaaatgtgcaaatgacccacaatggtgcctccgtggcaccattgtagtcactgccactaatttctgcccccctggtggatggtgtgacccttccaatcaccattttgatctt

SEQ ID NO: 7386 - DNA, 395 bp, Glycine max
  Clone ID: LIB3074-039-Q1-K1-A2
gataccaaaagcaaaacaggccaagtgaaagagagaagaaaagtcaaagacaatgtcagggatcattcacaaaattgaggagacccttcatgtgggaggccacaagaaggaggaggagcacaagggtgagcagcaccatggtggagaatacaaaggggagcatcatggtgaacacagtaccgaatacaaaggagagcatcatgttggtgagcacaagccggagcaccatggaggagaagagcacaaagagggattcctagacaagatcaaggacaagatccacggcgaggagggtggcaccgctgagggcgagaagaagaagaagaagaagaaggagaagaagaagcatgaacatggccatgacagcagcagcagcagtgacagtgattagatta

SEQ ID NO: 7387 - DNA, 378 bp, Glycine max
  Clone ID: LIB3074-039-Q1-K1-A6
aactccatcatgttcaaaacctaactgatagagtggatggaagcaagctgcatcatggtgatgactggcatcacaacgagtcgatcaaacactggacttgtacaatagatggtaagattacaacatgtctggagagtattgaatccgttgatgaaccgaacaaaacaatcacctacaagctcttcggaggagatattggtcataagtataaagtctttaagctcatttttcaagctattgacaccgatcatgggggtgttattatcaaatggaccgttgaatatgagaagattgatgagaatgttcatcctccgtatggctacatcgaatacctgcacagtggcacgaaacagattgatggcaatcttcttaatccat

SEQ ID NO: 7388 - DNA, 249 bp, Glycine max
  Clone ID: LIB3074-039-Q1-K1-B11
ttcatggacgttgataacatccttccatggagcaggagccttaggatggcatagccttaaagttaagggcgaggttcaaacgaagaaaggcttatggtggatacctaggcacccagagacgaggaagggcgtagtaagcgacgaaatgcttcggggagttgaaaataagcgtacatccggggattcccgatataggtcaacctttcgaactgctgctgaatccacgggctgtcttaataaaaaaaatat

SEQ ID NO: 7389 - DNA, 158 bp, Glycine max
  Clone ID: LIB3074-039-Q1-K1-B8
gatcacaacacaagttgaaaacacaaaaaaagtggacgctctaaagaacacaagctgccgttctagaggatacaagcttacgtacgcttgcatgcgacatcatagctctttttataggtcacctaaatacaattactggccggcgatttacaacgtct

SEQ ID NO: 7390 - DNA, 318 bp, Glycine max
  Clone ID: LIB3074-039-Q1-K1-D5
gataccagcactgagtctgatcaatgcgcagtgtgtcatcttcttaaactcaaatgaacactgcaaaaaaaaaaagcggacgatctaaaggatccaagctttctacagcatccaagctaacttacacgtgcattatactgtcaacttattttatagcagtacctaaatttaatcaactggccgactgttaacaacgtggcgactcccaaaacaatggccttacacaacataatccttttgccagacatcctaatatcgacaagtggcgtaataaccaacatgcccaaaacgatcgcactttcaaacactaatgcaacc

SEQ ID NO: 7391 - DNA, 326 bp, Glycine max
  Clone ID: LIB3074-039-Q1-K1-E4
gaaggttgtttttaaagaataaatggaggaagcaaagggagtgttgaagggcgttttccttgcaaagttcaaggaccacctcactccagagcggattgaggagctcatcaaggactatgccaatcttgtcaatctcatcccacccatgaagtcattccattggggcaaggatgtaagtgctgaaaacatgcatcaaggcttcactcatgtgtttgaatcaacctttgagagtacagaaggcattgcagagtatacagctcatcctgcccatgttgaatatgcaactttgttcctttcctacctggacaaagtcattttgatttgac

SEQ ID NO: 7392 - DNA, 396 bp, Glycine max
  Clone ID: LIB3074-039-Q1-K1-F6
gggggcttgtagaagactacagaaggggacaaataacaatggggctttgtacagttcagcctatcactctctcgaagcttcctaacgcctcctcttttcttcctaaacctaaaccctctcttcctcagtcttacactccctccgccgcacacttatctcggtcagtttgcttaaggaatctgtcgccaaaggcaacatcttctgaagaagaaaggtccagtgggggaagtcaatttttcaatgagaagcgcgatggtgtaataatcctggaggatgttaaagaggataataataagaatgagttcgattaaacggtgattgaagatacaaagcaagacttgtttgatgatgatggacggcgtctataatttgatttgcttgataaactcaactttt

SEQ ID NO: 7393 - DNA, 381 bp, Glycine max
  Clone ID: LIB3074-039-Q1-K1-H9
gactgacgatggttcacccgaagagttcctctctaacgtggactatttactaggaaaacaggccttcttcggcgaaacacaagccgagggtggttttcatccaaatgcggtggccacggctaacatcttagagacggcaacacctgtgattgatgggaagccgtactattttctgtctgtgttgacaaggactgctgatggagatgaaggtggcaagcaccacataattagagcaactgtaaaagatggaaaactgttcatttgcaatgctcaagctggagacaagaggtggttcaagggagcaagaagatttgtggagagtgcaacaagttctttcagtgttgcttaaaaatcttcaataatagctggttatatatatct

SEQ ID NO: 7394 - DNA, 119 bp, Glycine max
  Clone ID: LIB3074-040-Q1-K1-A11
tccaaaccaaaaaaaataaattaaaaaaaaatgcttccgctctataagatccaaacttacctacaccttcatactacgtcatatttcttttatattttcacctaaattcaatttacttt

SEQ ID NO: 7395 - DNA, 427 bp, Glycine max
  Clone ID: LIB3074-040-Q1-K1-A8
tattgggaaggttcatgactttcttgtgagctagaagctacgttatcgttaagagaatatcaccgctcctccctttctttgttgctgcagaatttattggtagcatggccatgccatggcgcatgctaccaaaggttccctctccaaatgaaaactgcctattgttagcgttcttcggaggtaaaatgcgcaacttttatgcttgctgtggaaccacacatcattctatcctttaaaaccattcctgaatagtgctttgaaccaacaaatgactacattaatgtccaacaatttacatcacactctaaaacagttaaccaacaagctttcttttatgctcgtgaacgcgaagttcatctcaactacatatttttattttttcattatataacacctttctttcttatattccattctattaaaaaca

SEQ ID NO: 7396 - DNA, 203 bp, Glycine max
  Clone ID: LIB3074-040-Q1-K1-B11
aaacaaaaaaaaaacaataaaaaaaaaaaaaaaattcttcctctctaaatgatccaatcttacctactcgttcatgcaaccgcataactcttttataatgtaacctaaatttaattcactggccaacattttacaacttcgttaactttaaaaccctgtcattacccaacttaattatctttaacacatcccccttttttcaa

SEQ ID NO: 7397 - DNA, 309 bp, Glycine max
  Clone ID: LIB3074-040-Q1-K1-D1
gaaagaaaaaaggagagtgcttagagagagagcaaaacatattattttcattttcatctttttttgagtatcaacaaatggcaaccactgtgatgaccactctcccccaattcagtggtcttagaccccaattctcagctgcccctgtgaagaacttggttgctgtgcaacccatgagtcgcaaggtgaagggtgcattgggagctcgatgtggctacattggttcatccactaatctgattatggtggcttctacaaccctgatgcttgtttgctggaaagtttggattggctccatcagcaaacaag

SEQ ID NO: 7398 - DNA, 88 bp, Glycine max
  Clone ID: LIB3074-040-Q1-K1-E4
taagtctatcaccgctctttacatccattcttacatacgcgtgcattcggcgtcatttggtcttttttaatgtcacctaaactcaatt

SEQ ID NO: 7399 - DNA, 306 bp, Glycine max
  Clone ID: LIB3074-041-Q1-K1-A1
aggaaaggttgagttgaaagaacaggaaggagacaaaggaaaggaaaagttgaaagtgcaggagctggagaaagcaaagggagaggaaacatacctttctggacataaagagaacaccaagtcttttggtgtagaagttaaagcccagatgcaaaaagaagatgctaatcccattaaagatgatggtgaaggactacagagttgacagaactggagggaccaagggaaggaagagttgaaagaacaggaaggagagaaagggaaggaatagttgggagaactggatgaaaaacagaataaaatttt

SEQ ID NO: 7400 - DNA, 124 bp, Glycine max
  Clone ID: LIB3074-041-Q1-K1-C7
ccggaattccgagggtacgacccacgcgtacgcacacgtgcaaaagtaccaaagacgtgggaggggctatttgctctatcacacatagggggttttatggtggatgcctaaaaacacagcacca

SEQ ID NO: 7401 - DNA, 309 bp, Glycine max
  Clone ID: LIB3074-041-Q1-K1-H4
gatagcaagtagcaaggagactagttctgtattcagattacattgcaaaaatggcatcattcaccatgacagcttctatctttggctgcccagctgtcaccaaacggtcggcagtggctgcgcagaggagattactcgtagtgagtgctgccaaagctgaaggggaaaaggtcagttatgacaacaatgatagcaatggaaggaggaacttgatgttcgctgtggctgctgctgctgttttccctgttgctgggatggcagtggcagatgagcctaaaccaggaacctcagaagccaagaaaaagtatg

SEQ ID NO: 7402 - DNA, 346 bp, Glycine max
  Clone ID: LIB3074-020-Q1-E1-F7.F1
ctgcaaatactttgagatttctcagagagcagacctcttccggagatgatagatataactaccaaaaaaatccagagaggacagagagacattccagacattcctcagagacataaacctctaaatcctaattctcaaactacaacgactgatgttcccttgcccttcttgtcaccaccaatctcaaagtgcttggacctcttaatagccttttcccacacatgcttgcagaccctggcattgcaacctcacgacaatcttcttggtggttttacccttcttctccaacacccccttagtttttccaccataaccccattgtttgccatcataacggccttttcct

SEQ ID NO: 7403 - DNA, 413 bp, Glycine max
  Clone ID: LIB3074-020-Q1-E1-F7.F2
gggcaaaatagttttaatttctcaataacaaggggttgcaaaataataaaatataactagcagaaaaaatccagaggagaaacaaaacattccaacattgcttgaaacataaagctctaaatcctaattctcaaactagaagagtgatgttcccttgcccttcttgtcaccaccaatctcaaagtgcttgcacctcttaatagcgtgttgggagacatgcttgcaaccctggcattgcaacctcaaaacaatcttcttggtggttttagccttcttgtggaagacgggcttagtttgtccaccataaccggattgtttgcgatcataacggcgttttccttgggcagcaatgctatccttacccttcttgtattgggtaaccttgtgcagcgtgtgcttcctgcactccttac

SEQ ID NO: 7404 - DNA, 406 bp, Glycine max
  Clone ID: LIB3074-020-Q1-E1-F7.R2
aattcggacgcgtgggccggcttgcgaaaaaacgacagaaggggattttcgcggcgcacagcaaaactctgcttcttcggattccgatcgcacgcgccgtcaccatggtgaacgttccgaaaacaaagaagacatactgcaagagtaaggagtgcaggaagcacacgctgcacaaggttacccaatacaagaagggtaaggatagcattgctgcccaaggaaaacgccgttatgatcgcaaacaatccggttatggtggacaaactaagcccgtcttccacaagaaggctaaaaccaccaagaagattgttctgaggttgcaatgccagggttgcaagcatgtctcccaacacgctattaagaggtgcaagcactttgagattgggggtgacaaagaaggcaaggg

SEQ ID NO: 7405 - DNA, 92 bp, Glycine max
  Clone ID: LIB3074-040-Q1-K1-B2.F3
ttcgttgtggctgcgacctctgtggaactcatcgtccttcaaattcacaagaaaaaaagaggctttgcactttacagagagagtttgcggtc

SEQ ID NO: 7406 - DNA, 483 bp, Glycine max
  Clone ID: LIB3074-040-Q1-K1-B2.R3
gtcgctcgctacctcaaggccggtcgctatgcccagcgcgttggttccggttcccctgtttacctatctgcggttctcgaataccttgccgctgaggttttggagcttgccggcaacgctgcgagggacaacaagaagacgaggatcgttcctaggcacattcaacttgcggtgaggaacgatgaggagttgagcaagctgatggggtctgtgaccattgccaatggtggtgttctgcctaacattcaccagaatttgttgcccaagaaggccgctggcaagggaaagctcgagattggatctgccagtcaggagttttagattcttagggtttcatcttgttagtatttagagtgcaaaattgaaagaaaatggaactagctttggtatgtagttggccgcgtagtacagtgagactaggattgacattgaatgatgtatagtcattttatatgtgagaataactagttgttttggtttact

SEQ ID NO: 7407 - DNA, 693 bp, Glycine max
  unsure at all n locations
  Clone ID: LIB3087-004-Q1-K1-G10.F5
ccgctgatgnagctgctctctgctccgcttgtngacccnagaaccatatgtgtaacaaacttgctagtagacacgttcgggttggccttgctgaccccactgatgttccacgctgtgacatatgtgaaaacgcacctggtactgaatgctttcttttactgtgagatagatggtagttcgctgtgtctgcaatgtgatatgattgtgcatgttggtggtaaaagaactcatggaagatatcttctattgaggcaaagagttcagtttccatgtgataaacctgcccaaatggaagaactagggctgcaacctatggatcaaaatgaatcaaggagggatgaaagtcagtcactcaagctaaaaataagagatagtcagcagaatcacagtgtctcacctgttccaagacaagaaaataatattgatggtcatggaaaaatggataaaaagttaattgatcttaatacgaggccactgcggttaaatggagcagcaccaaacaaccaggaacgaggtatggatattttaagaggcaataatcataaatctgcgagtgtgccaccagtagaatccttcaaacaagagtctgagaagtaataaagctacaacantatagggtgtggtcagaggctacagaaatattatgtttacgcaaatttctcttacactgctgaccttgtttatgtgaatctt

SEQ ID NO: 7408 - DNA, 689 bp, Glycine max
  unsure at all n locations
  Clone ID: LIB3087-005-Q1-K1-E9.F5
ataaacattggnaaaggccagcaaagtgtacaatgccattgagcctgtggtgctcaatgtgcttaagcgcaagattcctctggtgattgagttcagcttctaattccgtgaaattttccttgaaaaccacatgcctatacatgatgccagttttccttagtatctctggcagttctttggaattggttttagcttccacaacaatccacagcaatggttgaggaaccagctttatagtatttgccaaccttctcaaaaacactgcttggtggggntagttttgtgcttgttggagttacaatgattaggagtcttctaggcttcaactggggctgtgcttttacatgcaacttttttgttgttgttttcttttcattttcaaggattctaggcttcacgggcatggaatctggggttggagctatccaacttctattgacatttgttgtgaggtgtaacatttcactgggttgtggtgcaaattctgttctatttgagacactaactgtggtggaaaagagagaagatttacctgttggagccaagcctgtgaaaacccncatcacaaaacatagagaaaaatggagcatggccttcttncatagaaggactttcttctttgatctttctagtgagcccatcttctttgaaccacctgaagcacaatcttcagggtgggaattgaatga

SEQ ID NO: 7409 - DNA, 426 bp, Glycine max
  Clone ID: LIB3087-013-Q1-K1-C9
ataatacaagaacccaatccaagctattcattaatcattattaacacacacaacacgcagattttttctaaactctaatccccaattttgattcctattcctactagattctatttagcatatcatatcctttctatctaaatttctttctttgtttatctttttttatttatatttcatttattatattatatcttttatttttattatattgtttcttttattataaatttatatttttatatctcatttcatttatcaatttaattattttttttctcataatatattattatatttatttaataatattattttatttttttatttttatattcttatcattcttttattattatttttttaatcttatattaatttttttattcctaattcttatatatatcttttttaatctttttatct

SEQ ID NO: 7410 - DNA, 485 bp, Glycine max
  unsure at all n locations
  Clone ID: LIB3087-013-Q1-K1-D10
cttgcaatctcatatgaaaaccctatttattattctcagttctnntatatatatatgattgtttttattttaaattattttattatatatatattaaaataaatttatattattattatcatttattatatataattttatttttatatttaatatattataaatattttattaaatatatttttttaattttttatatttataatatattttttattttatattattattatttataattatatttattatatataaatattttaaaaattattattataaaattatattatttattattatattatttaatatctattttaataaattttttattaattaattttaaataaaattttatatataaaataaataattaatttatataaatattattttaatattataatacttattaattttaattttatatattattatattaataattatatataattattttattattatatctaatatat

SEQ ID NO: 7411 - DNA, 323 bp, Glycine max
  Clone ID: LIB3087-013-Q1-K1-D7
cccactcatccgatttatattaaatataattttatgaacaaaagctataaaattggttgggtttttataataatattgaatgtaatttaaaaaataaaattatattaatttatatttattataattaaattttatatattttatattttaatattttattttatatttttaattttattttatttattaaattatttatattatatattataaatatatataaatatataaatttttttttaatttaatttaatattattatatttaattaaatcttaattaataatataaaataatataaaattataattaataatatttaa

SEQ ID NO: 7412 - DNA, 460 bp, Glycine max
  Clone ID: LIB3087-013-Q1-K1-F5
ctctctgctcctagggtttctccttcgatttagtgaaatggcttccaaacctcctagtgcgggtctaataaattaacagggcataaatatactatatctaattatataatatttataatttataaatataatatataatctatattataaatttattatataatataaattataatattaatatatattatatttattataattaatatatattatatttaatattatttaatattttatataattaattataatatttaatattaaataatattaaattatcatcatattatcatatatcataatattatatattaatatattataaatatattttattatacatatatcacattattttattattatattttattatctatattatattatattatcattaaaattactataatatcaatattaatatataataatatattttttattatattaataa

SEQ ID NO: 7413 - DNA, 453 bp, Glycine max
  unsure at all n locations
  Clone ID: LIB3087-013-Q1-K1-F6
ccggnncggaaaacccggcccgacccacacatcctaagatattaacaattattntaaaatttaaatanatctcatacaaaaaaatataataggatgattaattataaaaattttttttccctaaccaaatactataatttaattaatttttatatattataatatttattttatataattatatatctattatttaattataataaattttatttataatataataaataaatatttaaataatttttattaatcataaatatatttattaattataattatttaattatataaatattatatataattaatttattttatttattaaaatatttattttctatattatattatatattatattataataatattttatatatatattataaaatattaaaatatttattatttttatataatatttatatttaaaattatatatttttaaaa

SEQ ID NO: 7414 - DNA, 472 bp, Glycine max
  unsure at all n locations
  Clone ID: LIB3087-013-Q1-K1-F9
ttttcataagtaacattattatttatttttattaaataatatgataatatattttagtntgttattatatataatatgattattaataaatattatcaaatatattataatattatataattttataaatattttaatatataatattatatatataatattattttatataaaattaatttaatatataatatatattattaaatatataatatattataatattatatatattatattatatattatattatatatattttaatttataatattatatatatatatataatatattttacaatatataataatatattatatattaattatatataatatttatacttaattatatattataataatataattatatattaatattaatattattattatatttaaattatcattataattaataataataatataattattataataatattattttattattaatatt

SEQ ID NO: 7415 - DNA, 354 bp, Glycine max
  Clone ID: LIB3087-013-Q1-K1-G12
cccacgcgtccggttttttttttagaaatatatttatttcttattcatttaatttgttggactggtgctattatgcatatggaatttggaagaatttgattcagtaatgagttttgcaagtctcgtttggtgttattagactgatctactgaatagccagctagtttgtgtatttggaattttacatgataatcttggtttacttactgtcaactcaatcggtatcttttcttatttaggattaacatctttaacttaatcaattgaacataatttacccattggtatctatagttttattatatttgttagatctatttgtgtttgatttgttttttaacctaattaattttg

SEQ ID NO: 7416 - DNA, 424 bp, Glycine max
  Clone ID: LIB3087-013-Q1-K1-G4
cccacgctttcgaagaaaccaaaagatattcaagaacaagtcaatttttcaattttgaatggaaaactaaaccttatcgattcattttttcatccttgaacatgtttagtatttgattttgtttttactttttcttattctcttattttatttatttcttttcatttttcttttttattttttatcatttttatttctctttttttcttttttttttcttattttatttttttttttttttattttattttttttttctttttattttatttatataattttattatttaatttattttttcttatttttttttctttatatctttatctattttttttatttttttttattttttttttttttttttttttttatttttattttttttttatattattttttttttattcttttttttatctt

SEQ ID NO: 7417 - DNA, 52 bp, Glycine max
  Clone ID: LIB3087-013-Q1-K1-G5
cggaaaacccgagccgacccactcaaccaacctcaccaatccctactcccat

SEQ ID NO: 7418 - DNA, 205 bp, Glycine max
  Clone ID: LIB3087-013-Q1-K1-G7
cccacgcgtcttattacataactctttttttctctctgagatctcatctccttagagagtggtcatttatcctttaacactttttcattcataaaaacattatactctaatatatataataactcattaaaattttaataattcactttattataattaaatataatattatatatattattatattatattaataatatattaa

SEQ ID NO: 7419 - DNA, 452 bp, Glycine max
  Clone ID: LIB3087-013-Q1-K1-H7
aaaagaggttgtgcctcccattcttaccaagttaggcaaggttaaaaatccatggcctaatgttgatgctcacagtggagtgctactgaactattatggtctaactgaggaaaactattatactgttctctttggtgtatcaaggagcttttggagttggccctctatttatatggtacatggctctttgattgctactcgaaaggtctaaatgtgttactattgataagctcgtgctttttttctatatatcattctttaatttaatgtatttaattctgtttatattttctaatattcctacttctgtattttttttgttttatttatttattaatatttttatttatattttatgatttataatatctacttttctttttttttattttatatttttatttattatataatatcttgtttttttttatttaatatttttttttattttt

SEQ ID NO: 7420 - DNA, 410 bp, Glycine max
  Clone ID: LIB3087-013-Q1-K1-C8
cccacgcgtccgatcatacccttcaatattaaaccgtacctacttccaatattcctggtggtctttatccttctctaccaagccatatcaactatttctactataaatattaatgttctgataaacaaaattagatattttttttacattctttctatcttttattttttatttatttttccattttattttatattttctatctattttttattttttatttttttatcaaattttatctatttattttattttatatttactattttatttatcattacattttttaatttattatattctattttattctattttattatatttttatattttattattttattttatattatcttatctattattttctattttattctcttattatctacttctattattatttt

SEQ ID NO: 7421 - DNA, 223 bp, Glycine max
  Clone ID: LIB3087-012-Q1-K1-H5
cccacgcgtccgcaagcatatctcatttgaatacattccttgtagtttatactgaaagatgggtttgaagatggcgttactgatcctaggcctttccctcatgctccttttggtctcctctgaggtggcatccacgaatacaaaagaggaagcaaatggagtggatgatgccaaatatcccggtggaagctatggagggggttacccaggtcatggcggtggc

SEQ ID NO: 7422 - DNA, 276 bp, Glycine max
  Clone ID: LIB3087-012-Q1-K1-H7
gcgtactggtcgtgcaggaaagacgggtgaggctaccacattcttgactcttcacgactctgatgggttatatgacctcaagcagatgcttattcaaagtatcagccctgttgcacctgaactggcaaggctcgaaacttcaaaattcaagccaggaactattccagacagaccacctagacgaaatgacactggctttgcgcattagacagattctttttttgagctatccacttctttagaatgcatcaactattcaacttttcaagtcatatc

SEQ ID NO: 7423 - DNA, 451 bp, Glycine max
  unsure at all n locations
  Clone ID: LIB3087-013-Q1-K1-A12
gttcgaacagtacggagacaggaggtatttataatncgccctcttcctctaatgatgtcggcatcttatcaaaactcaccgttcttattaataataattgatatactttcttatatcttcaattctcatttaatttttctatataattttatattatttttcattatttatttattttatatatcatttttaatcttatttatatattcttatctatttctattttttcttttattctcattctattctttcttctttcatttattttattatataatatcttatattacctaacttattctttttattatctttttccttattttataaaatttattttatatttatttttttattctatcttattattatatttttatatccttttctattcttctttattccttcttatatttttattaattctcatctttatctctttttattatat

SEQ ID NO: 7424 - DNA, 517 bp, Glycine max
  Clone ID: LIB3087-013-Q1-K1-A9
ctcacgcgttcgtccactcgtccgaagagtatttcaccaaaaagaaaaatggcaaggaaacggtatttttttatcaattttaactctattctctttttaatttataagttgattttattaatttttttttatattaagatattttactttttttttttttattttatcattttttattattattgatttttttatattttattttaatttattttttaaatttttttttttattattattttattatatatttttttttattttttttctaatattttttttttatattttaattatttttatttaatatctttatattagttatataaattttttattttttttatatttataaatttttaaatttatattatatattattttaatttatttcatatttacttattaatataattattttttttattattttatttcatttttaaaattattattttattatttctttttttatatatttaaatttattatttttttatatttattttattttttt

SEQ ID NO: 7425 - DNA, 442 bp, Glycine max
  Clone ID: LIB3087-013-Q1-K1-B11
cgcagccccaacccccacccattgttccttctcgcgagcacaatctcgaactcaccatctgcaagatgatgtccaaccgcgcgtggaccacgcgcctccaaaactccatccgctccctcgtccctgaatttgacccttcccttgtctacaacgtcctccacggcgccgtctcgccggagcacgcgcttcagttctatcgcttggttgagcgcgcctgcctttttatccacttccttgaatccacttcttatgatcgtttaaattctttggtctgtaattttagcttttatctcatttctttgtattcttttttacgattcgttcgtattttttatatctattttattctattattatttttctaattttttttttctgtaattttatatatatttttttattatttttttaattttttttttattttttatttctttatttt

SEQ ID NO: 7426 - DNA, 438 bp, Glycine max
  Clone ID: LIB3087-013-Q1-K1-B12
cccacgcttccgctctaatctctctttattattcaacaaaagttaatataattccggacggctttataccttctcaaaccgcttaacataacaccaaactttgtcatctccataaaccaataaatgagtaaaaaatgcattacatatgtcttaacattctaccaattgtttaaactttctatccataatactctgtttaaatgtgtatcatatgtttgtactattccttttatctttatcttatttttatattttatcttttcattttttcttcaatttatttttttatttttttcatatatttaatttattatttttctcaattttatatatatatctcttttcttttatttttttattttctttttattattattttttttattatattatttatttttttttttttcttttattttattatttttttatttttta

SEQ ID NO: 7427 - DNA, 419 bp, Glycine max
  Clone ID: LIB3087-013-Q1-K1-B7
cccacgcgtccgcccactcttccgatctctctctttcgatctgtgtactaaccctaacccgcttctaaccatgtcttccttactctctcataacctatctttaataaaacttacttctttctctttcttcttaatcatatcatattatattttttctactctattttatacatttctttattcctatcctaatctattctctcttttcatcttttattttatctattttatattatttattcctttcttctttatattttataataatattatatcctatttataaatattctataaattttctacatctaatatctctatttatattttatatattttcttattatattctaatcattttatttccttttctcatttatttctatctttatttttactcttatcttcttttcattatt

SEQ ID NO: 7428 - DNA, 85 bp, Glycine max
  Clone ID: LIB3087-013-Q1-K1-B8
cccacgcgtccgctcaaactacatctgcataaatcacatagaaagctatcatctgggagtgtagatagtgccatgactatggaaa

SEQ ID NO: 7429 - DNA, 319 bp, Glycine max
  unsure at all n locations
  Clone ID: LIB3087-013-Q1-K1-B9
cccacgcgtccgcaaggatggattaatgtatttgctaatgttcttacagaatntaaagaggtttgactcataccttatttgttcatctataacacattgatctatgcattttatattttattttttatttcttttttttattatttcttattttatataataatttttattctttttatctttcttattttattattcctattttttatatcttttataatttattttcttataatttatttcttttctttcttattatttattttttttttattattttctatattatttttaatctatttattttatatattttttc

SEQ ID NO: 7430 - DNA, 438 bp, Glycine max
  unsure at all n locations
  Clone ID: LIB3087-013-Q1-K1-C10
ccacaactctcatcctcatgcttcttacattttttcgtntcttgtttctattattggttggttttttattataatattttggctctaaaaataatatatataatttttatatttttattaataaatattatatataaattatattatattattttaattatatttttttatatattatatattttttatataatatataatatatttattttttaattttatatttttttaaaattatatattatttttataatttatattattataaaattaattattatattattatattttatataatattataatttttttataattaattataatctttttaatttataatatatatttatttatattttcataataatattattataattttattatatatatatatataattattattttctttatatataatattattat

SEQ ID NO: 7431 - DNA, 304 bp, Glycine max
  Clone ID: LIB3087-013-Q1-K1-C11
ccctaataagccatactactaccattctttttcaccaccatcaccttcttcaccaaggaggccatattacaaccactctccgcccccacctttaccttctccaccttactagaagccatactactatcactcaccacccctttcacaccaccttcacctattctattctattaccactcaccacctctaccaccactatacaatataccatactactctccttcaccatctttctatgattccatactagtacctaatcatctccattaccaattcactccctctacacttttcatctatttta

SEQ ID NO: 7432 - DNA, 421 bp, Glycine max
  Clone ID: LIB3087-013-Q1-K1-C12
cccacgcgtccgcaaacccacattaatcatggtcacaacaaccattggttattgttgtcggatcatgtctaacttctacatgtttcatgtaatttctctgtgtttttatttaaattatttatattttttatttttatatatttttattttattaatttattttttctatattaatattatttttattttttattttatcttttttttttatattatatatattttttttttattattatattttatattttctatatattaattattattttttatttttttttttttatttttatttaatttattttttctttttcttattttttttatcttctattttattatattatattatatttattatattcttatttatcttttttttttattttatttttatttttatttttttttttttttt

SEQ ID NO: 7433 - DNA, 332 bp, Glycine max
  Clone ID: LIB3087-012-Q1-K1-H4
gatgcaccaattgcaactgataaaactttgagggagagtagttgattttgtcagctgacatggaaatttcttctttgactataatgccccactgaattttgtaagaagatcattgaattgtcgtggtctaatagtgtataccctgatgggttactagcagcatttgttcttggagtctaacacatcaaattgactattctggatataccagaactccagcgtttacagtttgattgtcctaaaacctgattccaaaaattaatactttcaggaattatgtaacttttgatgcttattccttcgtaaatgaaagagattgaattttgaatttc

SEQ ID NO: 7434 - DNA, 140 bp, Glycine max
  Clone ID: LIB3087-013-Q1-K1-C6
cgcctccaaacccaaggggcttcggagggtctcttcatctgaggcggtgctatattccgggtcgtattcccccaccatgaagagccttttcaagcccaagccctgcactcctttcgatatcgtcaaacaaacgcgagatc

SEQ ID NO: 7435 - DNA, 481 bp, Glycine max
  unsure at all n locations
  Clone ID: LIB3087-012-Q1-K1-G11
cccacgcgtccgggtgtttaatcttaaatggggttagctagctaggttaaagccaagggcccatgggctcatgcttatgatttgcaagtgttgctttcaagggaaaaaagagagctttttcttcggttggcccttttagcagattgatgttctgagaggttttgcaatttgaaaccaaggtttgtcattatgtcatgctttattggtggggaggggatgtagtcatgttatgtatgtagatacaatattacattcatacattgaattttagtcacaagatattatccacattttcagtgcttgaattcagaatcagagggtaaaagttgagttgagagtacttgtagttaattgctcagtaagctttccctgaacacttaaacatgtatcttctcttcgatgaaatttgattttgtttttgtagtgcactggtcttgttgatgtgattntctggatcatagagattaattagtttggacat

SEQ ID NO: 7436 - DNA, 362 bp, Glycine max
  Clone ID: LIB3087-012-Q1-K1-G12
ttccacgcgtccggttaataccatatttacttatattttctcatttctttgagaaagttactagttcgtagatattatcaaaaatgttgggaattttcaaggagaagttggttaaatcacccaaagagctgaacagtccatcttcgttgaattcatgcactaagcctaatctaagtcacgaaatccttcatgatttcatgtcctgcaattcctacaatgctttctcaatgtgctttgggaatgaagctttgctagcctattccccttcaaacaagccctccattcatcaaaggttgtttagtggttttgataacatatactgtgtctttctgggtggccttcacaaccttaacatgctcaac

SEQ ID NO: 7437 - DNA, 468 bp, Glycine max
  unsure at all n locations
  Clone ID: LIB3087-012-Q1-K1-G2
ctgcaggccaatgtgcagaggctcaaaacctacaaggctaagttggttgtgttcccaagaagggcacacaaggtcaaggctggtgattctagccttgaagagctggcaaatgccactcaagtccagggtccattcttgcccattgtgagggagaagccaactgttgaccttgttaaggtaacagatgaaatgaaggccttcaaagcatactataagcttcgtcttgaacgcaccaacaaacgccaccatggtgcccgcctaaagaaggctgctgaagcagagaaggaggacaagaaataaggtccttgagaagacagtttgtaatccatattatagttgtgagaaatttttgtttgatggtctgcgcccttagctttatggagatcatgagttttaaagcaccacccttacaatntttgtttgaactcaagtctngtaatntaattagcactctggtctgttttgatt

SEQ ID NO: 7438 - DNA, 355 bp, Glycine max
  Clone ID: LIB3087-012-Q1-K1-G3
cccacgcgtccgcccacgcgtccgggattttctggttttgttgttggtgggtttcagcgttccgctgcaacttcaaattctcagtgaaaccaattcagttcagtccaaatcccaaatccgaagtgagatttgcgatggagaggcttcagcgaatgttcgcaggtgcaggtggagctctagggcaccctcccccagattccccaactctcgattcctccgagcaggtctacatctcctcactcgctctcctcaagatgctgaagcacggaagggctggggttcccatggaagtgatgggtttgatgcttggagaattcgtggacgagtacaccgttcgtgtggttgatgtcttcgc

SEQ ID NO: 7439 - DNA, 453 bp, Glycine max
  unsure at all n locations
  Clone ID: LIB3087-012-Q1-K1-G4
tgatagtgttgtacggataccaatttctgattactaaaatgtgctttgtaggttgagagtagctctggagctgttaatgatgtggcaaatacaattatgcaaaaattttgggactcagcttttaatctagaaccaccggaagattctgatactcataggtaatctggttgtgcagacatttaaacacaagctttgttttgttctgatccttgatcggcctgtatgatgtattgatgttctattgcagtgaaatttctgggctaatgacatcagatggggctgatacatcgaagtctgcatatcaatctgtaggttntggaaattcatttgccttcaaatttaaagatctcagtggccgtgtgcatcgattcaactgtggtactgaacatatagatgagctagtttctacaatcatgcagagacttgatgtgaatgatgtggaacgccctatga

SEQ ID NO: 7440 - DNA, 374 bp, Glycine max
  unsure at all n locations
  Clone ID: LIB3087-012-Q1-K1-G5
ggtgaggtagaacccttccacggtggtgactgcgcgatgggtgcctacaagtatgtttcagagctatggcgcaagaagcagtctgatgtcatgcgcttcttgcagcgggtgaggtgctgggagtataggcagcaaccttccattgttcgcttgacaaggtcgacccgccctgacaaggctcgtcgcttgggcttcaaggctaagcagggctatgtgatataccgtgttcgtgttaggaggggtggccgaaagaggccagttcccaaaggtattggttatgggaagcccacaaaccagggtgttacccaactgaaatttcagcgtagcaggaggtcagttgctgangagcgagcntgacggaagctgggtggact

SEQ ID NO: 7441 - DNA, 264 bp, Glycine max
  Clone ID: LIB3087-012-Q1-K1-G7
cgccgacgaccccaaaattgcgctccagagatacggccagtacctctacgacgccctaattgtctgttcccccaccattgaacgttttggaggatccattgacgcggctgcaattttggattttgttgattcgggtcatgatttgatcgttgctgctgatagcaatgcatctgatttaatcagggaaatagccaccgagtgtggaatggactttgatgaggatcctgctgctgtggttgtggatcattcggcatatgcagtctc

SEQ ID NO: 7442 - DNA, 390 bp, Glycine max
  Clone ID: LIB3087-012-Q1-K1-G8
gacagaccctcctacttctgtgctgcttacctacgacccttctctctctgaccccttactgcgtggcctcgtcctaatggctgtacccgactctccatacagccgcatctccctgatcctcttcttcatctacttcactatctccatcactcttcctgaactccacacacttaacttcatctccgacatcgccacctaccatccaccggacaaccttcacgccccatctcacgtcctaatgatatccctctcccagctagtcactcatcatctagatgtactcctgcgcctactactactgctgaaccgaccaaggaatactcaattgtggcctgactcacatggtcggcactcctactgacctaggccattgtgatattcactaacgat

SEQ ID NO: 7443 - DNA, 491 bp, Glycine max
  Clone ID: LIB3087-012-Q1-K1-G9
cccacgcgtccgggtgtttaatcttaaatggggttagctagctaggttaaagccaatggcccatggggtcatgcttatgatttgcaagtgttgctttcaagggaaaaaagagagctttttcttcggttggcccttttagcagattgatgttctgagaggttttgcaatttgaaaccaaggtttgtcattatgtcatgctttattggtggggaggggatgtagtcatgttatgtatgtagatacaatattacattcatacattgaattttagtcacaagatattatccacattttcagtgcttgaattcagaatcagaaggtaaaagttgagttgagagtactgctagttaattgctcagtaagctttccctgaacacttaaacatgtatcttctcttcgatgaaattcgactttgcttttgtagtgcactggtctgtttgatgtgaatttctggatcattgagattaattaatttggacattaaatatttt

SEQ ID NO: 7444 - DNA, 364 bp, Glycine max
  Clone ID: LIB3087-012-Q1-K1-H1
cggacgcgtggggaacagttatctgaatggatcttcgtgtgcagcaccctgttgatgtttcccttgcctgcttctcttattctcagaatgtgaagttgcaattgcaaagaaggagattatccaccgtttcttttgcactggctgagactgcagcttcaatggcagtagctgtaactgttgttggtgcagcagctactcttcttgtaaagagatccaaaacttctgagtcaacacagattcaattcaaagtatgtgaagattgtggaggttctggtatatgttctgaatgcaaaggtgaaggattcgttcttaggaaacgttctgatgaaagtgctgagaaggcaagagtgcaagctaagaatat

SEQ ID NO: 7445 - DNA, 347 bp, Glycine max
  Clone ID: LIB3087-012-Q1-K1-H10
gcgttcgccacgcgttcgccactcgtccgctgctatcaccttctcaagcttccacttcacaagtaattccggcgtgtaaattatattttgatctgatcctactaagataaacctccattctgtatcagtttttattttttttttatgctatcacgtagataaacgtaccttttacttttctctgtttttattcaccttcgctacccttcattcggtgcagactaagagaacgaagaaagcatgcattgtcggaaaatatggtacccgatatggtgctagtctgcggaagcagattaaaaagatggaagttagtcagcataacaaattcttttgtgaattctgtggaa

SEQ ID NO: 7446 - DNA, 346 bp, Glycine max
  Clone ID: LIB3087-012-Q1-K1-H12
tcgagcacgcgttcgccagcgttcgccacgcgtccgctgctccaccttctcaagcttccacttcacaagtaattcgttggtgtaaattatattttcatctgatcctactaagataaacctccattctgtatcagtttttattttttttttatgctatcacgtaaataaacgtaccttttacttttctctgtttttattcaccttcgctacccttcattcggtgcagactaatagaacgaagaaagcatgcattgtcggaaaatatggtacccgatatggtgctagtctgcggaaacagattaagaagatggaagttagtcatcatagcaaattcttttgtgaattc

SEQ ID NO: 7447 - DNA, 376 bp, Glycine max
  unsure at all n locations
  Clone ID: LIB3087-012-Q1-K1-H2
agaacacaggaaaaacagagagagagaaatcttctcaaaccatcttgcaggtgtgtctttcattggatgttctactgctgggtaattggaaggctaaccaggagctgcttcattcctcaattattcttcaaactttctaagaagttcatattcttcagtgttctctagtgtcatcaccaaaatcagggaatgctgaaagatgtgcttgatagttaagaattccttcactgaggctaatgagtccgtgcctccatctgagctagccttgttcaaccttgatgacattggatgtttagtccactgcccatatctattttgtgctcgagcgactgangtgcccagaaatctcagccattgtacaatttccaaacatgat

SEQ ID NO: 7448 - DNA, 371 bp, Glycine max
  Clone ID: LIB3087-012-Q1-K1-H3
gagcgaaatcgaagcatatagtcggagcatgaattggacaccggcatcacacggcggaagacgaggatgtctccaaagctcccttcacatctcttcccgtggctcatcctactaacattcgcatctttctatttcttctcttctttcctctctctcagcacattctcttcttcatcttcatcttcatcaccaacctcacaatctctctcaatctccaacacctgtaacctcttcagaggccactgggtctcggatcccaaccacacccctctctacgaccaaacttgccccttccaccgaaacgcatggaactgcctccggaatgagcggcagaacatgaccctcatcaactcgtggagatgggtcccacg

SEQ ID NO: 7449 - DNA, 359 bp, Glycine max
  unsure at all n locations
  Clone ID: LIB3087-012-Q1-K1-G1
cccacgcgtccgtcctccatggcttcctcttctctgtttcagtctctccctttctctctccaaaccgctagagccctacgcgcctcccaaacccgccgcccacttcgttgtccgcgcccaatcccccctcactcagaacaacaactcctccttcaagcatcgccgccccgccgacgagaacatccgcgacgaggcccgccgcatcaatgcgccccacgaccaccacctcttctcggccaagtacgtccccttcaacgccgacttcttcttcttcttcttcacggagtcctactcgctcgacgagatcgtctaccgctcccaatccggcggcctcctggacgtncagcacgacatggatg

SEQ ID NO: 7450 - DNA, 165 bp, Glycine max
  Clone ID: LIB3087-012-Q1-K1-E11
cttctaatggtcggcgacaacaactgccacgtctgtctctgagtgaagtgcatcaaggaagtccccaccgtcatacgcggcgccatcattctcgcaaaactctctgttattcctgttaggaaaggctattgtggtaacaagatctgaaagccccacaccgttccc

SEQ ID NO: 7451 - DNA, 284 bp, Glycine max
  Clone ID: LIB3087-012-Q1-K1-E12
cacgcgtccgtccactcgtccaatcttatacttttatttcatcactctcttcaatcctttcttggtctccaaagaattcaatggtgacacttttccaaacatcttttcaatttcatcccaaattacccatgattgatctcgaatcaatacattctaacctgctacccatactaaccagcttaaactctccagaaaacttacacatgacaatgtcaactccttaactatactacagatggtaaaaaatacattcccaaaatcttcaactgaaaactatctcattc

SEQ ID NO: 7452 - DNA, 376 bp, Glycine max
  unsure at all n locations
  Clone ID: LIB3087-012-Q1-K1-E2
gtcatcacgaaggcacgcagccctagttcaaattcacacacccttccatctctctatcgttgtcggtgcagcaaaagacgccacaaaacaaaaccgccaccacccatccttatccttcctgcctccgaatgcgtgatcactgatcgtcaccaacatgtatataacaacggtctcttcgctcctcagagcaaccaggcctaaactcttctttccctctccttctccttctagaaccttcgcttcccgcacttcttccttctccgccgctccttccctcctccgctgctccgttccgcgctggagccaccgnctncattccacctctccgctctctccccgtcctccgatcaccgncgtcgctcccgtcgtcgaacgc

SEQ ID NO: 7453 - DNA, 381 bp, Glycine max
  unsure at all n locations
  Clone ID: LIB3087-012-Q1-K1-E3
cagaaagtgaatggcactgccaagcttggtggaggtgaggatgcagagtgagtccgatggatgatggaatgttccataggattcgatgcatgcgtttgggaatgaaacatgagggccgattacttatctgtgtattagctagagatagggattctattgtttcctctttgtttcctgttggattgcccaatacttcccgataggggaaagagatactccatttgtgctatatttatggtatgtttttatttgtgtggtgtctggaaatggcctatttcattcccaatccgtttcctccagtctctgggggatttgattgatgagaattgcttatggtgngtgtatttccttttncaatgaaatgctacaacatttactgca

SEQ ID NO: 7454 - DNA, 467 bp, Glycine max
  Clone ID: LIB3087-012-Q1-K1-E4
ggaaacgcgattgagaatttgcgaaacggtgttggaatttgtgatctggtgagccatgaatgctagaagagatggtcgcaacaacagagttgctctttttgatggtattgaggagggtggcatcagagcatcgtctctttattcctcaagttcttcccatgaaattgatgaacatgataatgaacaagcattggatggattgcaagatagagtcaatctgcttaaaagattgtcaggtgatataaatgaggaagtggatagtcataaccggatgctggatcgtatgggaaatgatatggattcttcgagaggagtcctctcaggcactatggataaattcaaaatggtatttgagacaaaatccagccgaagaatgttttcacttgtagcatcctttggtgtgctttttcttataatatactatctgactagggtaatgatctttctacgcacttgtcaaccgtact

SEQ ID NO: 7455 - DNA, 263 bp, Glycine max
  Clone ID: LIB3087-012-Q1-K1-E5
cccacgcgtccgcccacgcgtccgcccacgcgtccgcacttatatttatttgtttcttctttaagtgaacaactgaagctgtgacagtttcagatgagtgaagcaacaacaagaaacgaacggcgggttctggtggcggtggacgaaggcgaggaaagcatgtacgctctttcttggagcctcaagaacataattttccaaaattccagcgatacccttatccttctttacgtcaagccccctcatgcccgttattccccctt

SEQ ID NO: 7456 - DNA, 216 bp, Glycine max
  Clone ID: LIB3087-012-Q1-K1-E6
attttctgaacgttctcacgacacgcctactcattgcactcttcgatcgcaactctctttggcttggaaaagggaaaacgaatctcaaacttcacaagtgtttgaagcgccatggcggatcggttgacgcgtattgccatcgtcagcaacgacaggtgcaagcccaaaaagtgccgccaggagtgcaagaagagttgccccgtcgtcagaaccggg

SEQ ID NO: 7457 - DNA, 309 bp, Glycine max
  Clone ID: LIB3087-012-Q1-K1-E7
cggacgcgtgggcgaagctcgatacagcagcaactagaattggaataaaccctatttctctgttcgagggtttttggtcttttttctgctccaaaaccgtagaacagaaagcagaggagagggagaaggagcagaccctgaatttgtttttgcatgatataggcagaacaatgtcttcagatctcagtgattataaaatcatcaaggaaggacaagctgagattcttatgcaccgcaagaatgaagtcttctataacaaaactcaagtcaataacaaggatatatcaatcgcttgtttgagaacattta

SEQ ID NO: 7458 - DNA, 248 bp, Glycine max
  Clone ID: LIB3087-012-Q1-K1-E8
cacaaaacctcttttcatattccacccatggcagacccttactccaatttcttctcaccaggtaggggcttccaccactatccttctgcaaacccttcaccccaccaccatccctatgctcacaacttcctcaaccaaaatggttccaacatccataaccacaacacctttttccactttcaccactttcaaaccactatttggtcttcttcaccttctttccctcccttgagagaagccctttctct

SEQ ID NO: 7459 - DNA, 141 bp, Glycine max
  Clone ID: LIB3087-012-Q1-K1-E9
taccctttcatataccaaaggccgtggtcttataccaggtctgatacatcaatctccaatcctgaaacctaattcaatctactacactaatctccactctcatacacttcaccatcatatctaacataaccatcttatatt

SEQ ID NO: 7460 - DNA, 425 bp, Glycine max
  unsure at all n locations
  Clone ID: LIB3087-012-Q1-K1-F1
ctctctgctcctagggtttctccttcgagtgagggaaatggctcccaaaccgcctagtacgggtctgtttgttggactgaacaagggtcacgtcgtcaccaagaaggaattgcccccacgcccctcagatcgtaaggggaaaacaagcaagagggtgcactttgtgaggaacctcataagagaggttgctggttttgcaccctatgaaaagcgtataactgagttgctgaaggttgggaaggataagagggcactgaaggttgcaaagagaaagcttggaacccacaaacgtgcaaagaagaagcgtgaggaaatgtccagtgttctcaggaagatgagggctggtggtgctggagacaagaagaaataagtcttatttatttactcntttccagattcactagatggacctgtgtattgatgga

SEQ ID NO: 7461 - DNA, 417 bp, Glycine max
  Clone ID: LIB3087-012-Q1-K1-F2
ctctcacctcacaacagaagcagcaatgaagaagaagatgatggcaagcaccgccatctccgtcgtcttcgccgcgctcttcctcttctcctccgtccactccttctacctccccggcgtcgctcctcgcgattttcaaattggtgaccccctctctgtcaaagtgaacaagttatcatccaccaagactcaacttccatatgactactacttcttgaagtattgcaaacccaaaaagatattgaacaacgccgaaaatttgggagaggttcttagaggtgatcgcattgagaattcagtatatacatttcatatgaggaaggaacagtcttgtactggtgtttgtcatgaaattttggatgctgaatctgcaaagagttttaaggaaaaattgatgatgaatatcgagtgaacatg

SEQ ID NO: 7462 - DNA, 326 bp, Glycine max
  Clone ID: LIB3087-012-Q1-K1-F3
gtctatttcttccattctcatttctctctctttctctgtttccacatgccatggttcgttcttccgtgctgtactactactctcaacgccgtcttgcaggctctttcaggggcttcttcttcattcccacaaccttagctctcttcacctctttcttcattctcttctacatttactccacttcaaacatcttcacccatcacaaccaccacccttccacttcacatttcaaaccacaccctcccttttccactaccccttttattgctaccactcctcacttcgtccctgtcttcaaccacaatgcttccgagtccacaaaatct

SEQ ID NO: 7463 - DNA, 466 bp, Glycine max
  Clone ID: LIB3087-012-Q1-K1-F4
cccacgcgtccgcccacgcgtccgaaaaaaaaatcagaaaaaggaaatgagagattgttggacaccgtgcggatcaagcactttgcttgttatttcacgcgccctctctccattttgacctccctttcctcttcgttccccactcactgcaacggcgccggagatccgtcgctctcctcctcctcctcctcctcctcctactactccgacgagatgggcgccaattacatgctctccgagtcctctcacgatcttgacgaccagatcgttcagatcatgcagtgcaagccactctccgagcaacaggttagaggtttatgtgagaaggctaaggagattctaatggatgaaagtcatgttcagcctgttaaaagccctgtgacaatgtgtggcgatattcatgggcaatttcatgatcttgctgaacatgttcgaattgacggaagtgtccagatactaactactt

SEQ ID NO: 7464 - DNA, 258 bp, Glycine max
  Clone ID: LIB3087-012-Q1-K1-F5
cggacgcgtgggctttttttcttctcttttctcgtgttctttatctctctcgctagctcacagaagaagaagaagtaaaaggcctttatttataaataaaagaaaaggagagaacagattataagaaacaaagcatgaatggtgctgcatgtgttgaggcagaatgctgtgagtttgtggaagttgatcccacgggaagatatggaagatacaatgaaattcttggcaaaagagcttttaagacaggctatagagcat

SEQ ID NO: 7465 - DNA, 388 bp, Glycine max
  Clone ID: LIB3087-012-Q1-K1-F6
cccacgcgtccgcgaaaaactcccgtcaatacgaaccaccaaagtcaccaccaaaaggttatcagcatttaatagccaaaaaataaaaacacattttgcttgtcattgttattagtcagaagctagaaattcgtgttgagtgttgagttgaggcagagattcaagagaatggagggtgtgagccccgagcccctgagatcagaattggattccaaatccaaacatgacacagcaaaagaagatgatgacgctttgaaagacagcactgaagccgaagtcaccaaaattcgtctcatgagagcctttgttgaaagccgagatccctcttccaaggaagaaaatgatttgatgatgagaagattcttgcgggctcgtagtttgggatgtg

SEQ ID NO: 7466 - DNA, 324 bp, Glycine max
  Clone ID: LIB3087-012-Q1-K1-F7
cgacaatgcttcttcgtagctcatccacgccgattctcaattctcgcatccctcactcgaatctcgaccccaaggattcgcctcacgaacctgaaatccttcaccggagcccgcggacgcgctcgctcacgctctccgcgtcgttgagttcgctgtcgcctagcagaatgacgcgagcgttgtcggagactgatctttccgcgcgctccaaaacggcgtcgctcggctccgctttgttttacttctacgaagtcgacgatggagacgttgccggtggtggaaggaagcggagttggcagcggctgcggtggatgggacaatggt

SEQ ID NO: 7467 - DNA, 268 bp, Glycine max
  Clone ID: LIB3087-012-Q1-K1-F8
ccagatcacgaaactaaagaagatggagaaagcgatcagcagacaggggattttgcttcatcatctcaacccttcatcgtctacccacgtcaacgaatcatcctccctctatgcttcagcatgtgtggccggggacagcgctgcttatcaaaagacatcgacattcagggatgatggtgtgatcgtggctgcttatcggactgctcattggcaaaggtaacgtggtggtttcaaagatactcttcctgatgatctactggcctctggt

SEQ ID NO: 7468 - DNA, 247 bp, Glycine max
  unsure at all n locations
  Clone ID: LIB3087-012-Q1-K1-F9
nccactcgtccgcactatctaaacataagctgtttccagtctccgacagtataacgatcttcgactgcacncttacattaaaccgtccgcaaaccttccgatcctacaatctcctatccaccaccaaccgcatttccccagcgtctcatctctatcaaacctcactcccattcataccgcgcttttttcgaggaatcctctcttccgttattccatgatatgtccaaccacaacaacaacaacaaca

SEQ ID NO: 7469 - DNA, 305 bp, Glycine max
  Clone ID: LIB3087-012-Q1-K1-C5
cggacgcgtgggcggacgcgtggggtccattaaaccttctgatggcttaaagggtttcatgtgcattgtggatctctagcagatgctgttggttccttttccaagtggatatctgcttttaaggaaaattttagagccttgctgtgagtacacaaaactccatttttccatgattatttcttgctattgggatttcacaacctctatcttcgaatgcctgtgcatctgccttgcgtaaagtctgtgaagatgcttctgtagtaatttatgaaccttcaaatttggaaattttaatgtggatagga

SEQ ID NO: 7470 - DNA, 251 bp, Glycine max
  Clone ID: LIB3087-012-Q1-K1-C6
gtcatcttgtcattcaccgagaaagtcgtactgattcctcttcatctttcgttaaagcgagtactgttcgttcttgatctgttggttacgatgtcgtattcaaggagatctaagtattctccttctccttctccttctccatacaagcgataccgtaggtctgtgtccaggtcttttttaatatcaagatccagaagccggtcaaggggtttatcaagagatgcagaaaatccaagaaacaattttgatgt

SEQ ID NO: 7471 - DNA, 272 bp, Glycine max
  unsure at all n locations
  Clone ID: LIB3087-012-Q1-K1-C7
ggatcttaaataatactatagggatatctaattgtaccaattaaggttgtttttgcttgatttgccttccaatttggttcgtgagctgaccctgcaagccgtgcagagacctctattggagtctttctctttggtctcctcttttttggatgcaatggcttaattgggtcttctcttctcagaatctgggtaccaaaaacagaagagaaaaaaaggggatttttggttttgntgagctcagagaagctgaggctttttgggatcaaactata

SEQ ID NO: 7472 - DNA, 391 bp, Glycine max
  unsure at all n locations
  Clone ID: LIB3087-012-Q1-K1-C8
tcttcttcttcttcttcttcttcattgcacagtgcatccataaacatgaagtaatgaggtaatctgaagtggaaaaaatgggtgggggccggttcaaaccgacgcagaagaggaagaaggttccaaagagggtgtggttaagcttccaaaaatcaatgggtgtcctcgtgggtggaaaccataccttctccaggttttgcactcgctaactccccttccttccccctttcggctttcaaaagatccatctttctctcactttctcttaactcgattagttcaacatggacaccaaggcattcnaaattcagatccttactagctccatcgncaggcgcgtgctccttcgcacaatcctactcgcgtgcgctgtctccgttgtctctctgta

SEQ ID NO: 7473 - DNA, 387 bp, Glycine max
  Clone ID: LIB3087-012-Q1-K1-C9
cacttttatactaccctttccactcacttgccgacttaatatcccaagatggagaaggatacctacgacgcttatcgtctcactctcatgaaagtcaactatattaaagaaggaatgaagaccattgtggaaggaattttactcatacaagatctcattcatacatatatactcattctccaaattagaaacacattctacaaactcccaagcgttcgtctcaaaccagtagataatgaaattgatgtcttgaatatgaagtctactaccaagctttttactaattcaccagcttttgtgccttactggcatattaatcagtatgtaacaatctggtagaatccaaattattcaaccataatgtatccctactgcccttcttatata

SEQ ID NO: 7474 - DNA, 383 bp, Glycine max
  Clone ID: LIB3087-012-Q1-K1-D1
cccactttaattttttccccttctcattgtttgtttccactgatttctccatatccccgtcgtggagaacgctttgacctttcttagatttggtcttccaatccaaagtttttatctttttttcagatttttaagttggagcatggtttttagtcaactgagtctcttccaaatctttaaattgttctaaatcttttctgggttgaaaatttttgcttttttgtgtctgtgtctttttgtgtgtggttgttggtggatatggattctaaggatattaatggttgcctcatggataaacataaacctgtggtgacatcttctttggtttgtgaaaaggttgaagatcatgtcaacggagaagatgatagtgattccaattcttt

SEQ ID NO: 7475 - DNA, 490 bp, Glycine max
  Clone ID: LIB3087-012-Q1-K1-D11
acgcgtccgcccacgcgtccggttgtcattcataattggttactaattgcccatgaatttgtatgttttggggaggagctatataccatctgagaatcatcgatatccgatcgagaaaacgattaccagctaccatgctagtcatagctctaggagttgttgcatcaattctagtggttctctgcctattatgggttggcatagagtacatcgactctcatatcatagggaccacactcaatcttgcaactcttcctgttgctgatggtctttatggctactggtactctggacatgctgtgttcccaaacatttatacatccatggcaaatccaaaccaattccctggagtcctcttagcatggtaaatgacttataactataatctataattcatctgccactattcctttcactaaatattaaatcttcttaagtcctgtacaaattcaaattacctatattaatcaaagatataattattctgttt

SEQ ID NO: 7476 - DNA, 89 bp, Glycine max
  Clone ID: LIB3087-012-Q1-K1-D12
ctgtagaatgctcggtaatcaatctgttccggcatattcaacattgtttgctcgtctgccatatgctcaaaacacttgctatctgtact

SEQ ID NO: 7477 - DNA, 483 bp, Glycine max
  unsure at all n locations
  Clone ID: LIB3087-012-Q1-K1-D2
cggaaccacctactcttgcgtcggtgtgtggcaacatgaccgcgttgaaatcatcgccaacgaccaagggaacagaaccacgccgtcttacgtcggattcactgacaccgagcgtctcatcggtgatgcggccaagaatcaagtcgccatgaaccccatcaacaccgtcttcgatgccaagaggttgattggtcgtagattcagtgattcctctgttcagagtgatatcaaattggggcctttcaaggtcattcctggtgctgctgacaagccaatgatcgtggttaactacaagggtgaagagaagcaatttgccgcagaagaaatctcttncatggtgctcatcaagatgcgtgagattgctgaggcttacctaggctccacagtgaagaatgctgntgtcaccgtccttgcttacttcaatgattctcagcgtcaagctaccaaagacgctggtgtcattgctggtctaaatgtgatgcg

SEQ ID NO: 7478 - DNA, 319 bp, Glycine max
  Clone ID: LIB3087-012-Q1-K1-D3
cggacgcgtgcgccgacgcgtgcgcgtatactttgggataaagtagtgcgcttttttgtgtcacaagtttgagtttttgggtattgagaaagctgtgaattattttctataattcttctttttttgccgtgtttcaatgtggtgtgtgattgatgtgcgtttaactgttgagattcaaaatggagtgagcaatggttgttgcgaaatgggtacgtggaatgattgtggtggttccattgatgatgctgataacgttttgatggatggactcggggaagatgtgaacagggaaggccttataaagacaccactttacgta

SEQ ID NO: 7479 - DNA, 362 bp, Glycine max
  Clone ID: LIB3087-012-Q1-K1-D4
cccacgcgtccgcggacgcgtgggccgactcttagccgccgatctctcagggcttgcatcttctcgggtaagctgtgaagatgtacacatcaaggaagaaaatccacaaggataaggatgctgaaccaactgaatttgaagagtcagttggacaggcattgtttgatctggaaaataccaatcaggagcttaaaagtgatctgaaggatttatacataaactcagccgtgcaagttgatgtttctggaaaccgcaaggctgttgttattcatgtcccttacagattaaggaaaggtttccgtaagattcatgttaggcttgtcagggagcttgagaagaagtttagtggcaaggatgtaatc

SEQ ID NO: 7480 - DNA, 312 bp, Glycine max
  Clone ID: LIB3087-012-Q1-K1-D6
gtatcattctcctgagaatacctatggctctcctatgagtggctcctgcataactgatgatttaagcagcttgaacttcaagcacaagctcagagagttggaaagtgtaatgcttggccctgactctgataatcttgatagttatgagagtgccatcagcaatggaaacaactccgttccacttgagatggacagttggagacaaacaatggtggcaatttctagcaaaaacctaaagcacatgcttattgcatgtgccaaagccatttcagacaatgatttgcttacggcacaatggctgatggatgaatt

SEQ ID NO: 7481 - DNA, 332 bp, Glycine max
  Clone ID: LIB3087-012-Q1-K1-D7
cccacgcgtccggcagtctgcaacaacttcttcttcagttcttcacaccaatcatgtaccggtttgcaacctccctcgcctccaaagctagaattgctaggagcagcactcaacagattggaagtagggtcagttggaacaggaattatgctgccaaagacattaagtttggtgtggaggcccgggctttgatgcttaagggtgttgaagagctcgccgatgccgtcaaagtaaccatgggccctaaggggcgtaatgtggttattgagcaaagttttggagcacccaaagtgacaaaagatggagtaaccgttgctaagagcattgaattc

SEQ ID NO: 7482 - DNA, 239 bp, Glycine max
  Clone ID: LIB3087-012-Q1-K1-D8
ctcttctccgccacttctgaatctattgaatcaacaatcatgtcggacgaagagcaccatttcgagtccaaggccgacgccggagcctccaaaacctaccctcagcaagccggtaccatccgcaagaacggctacatcgtcatcaaaggccgcccctgcaaggttgtggaagtttcgacttccaaaactggaaagcacggtcacgctaagtgtcactttggtggaattgatattttcac

SEQ ID NO: 7483 - DNA, 404 bp, Glycine max
  Clone ID: LIB3087-012-Q1-K1-D9
actttatatgtaatcgcgtaatttgcgacactcatgaacgtcttcttatactatggtgggttagctaatgaatttatccataccctattgaatcgcatccctccaaccgcacctgccatccttcacgactatcacatatttaagatcaaatgtcgcgtttatcccgctattctccctgtccataataacaaaatttatggcactcaacttcttggtatctcctgagtataactagatattttagatgaatttgacgatgtttaatatactataactgatgttgacgtttccttgaaagacaagtctgaaaagttacaagtttgcgcttatgttttgaacaacccaaatgatcctaacttatattcaaagttgaaattttaagaatggaaacaagttcacatgaa

SEQ ID NO: 7484 - DNA, 442 bp, Glycine max
  Clone ID: LIB3087-012-Q1-K1-E1
aagagttttaattattgcctcattagtttctaagtgctgagaaaaatgtctgctatggtagaggtatggggtggggagctgacaaagcttcgagaaaaagttcttgcccgcaagcctttcttattatccaaagccaaagaaggatcagaaaggaaccaagaagaaaaggaaactcaaactgcggtggttaagagagacactactaatggaaccatgtctgaggcaacggtgtgtttgcttatggatcgatttgtgccttggtgatatgagcaatagcacaaccaagatgtcttgtattttcttcaacttttcggggttatgatatgtcttgtatatttactatttccatctatgagttcttagtcagcgaaatatgtaatggaaatgttatcaactattggacagaagtactgatatctaatcaaaacaaaatattggtatg

SEQ ID NO: 7485 - DNA, 403 bp, Glycine max
  unsure at all n locations
  Clone ID: LIB3087-012-Q1-K1-C4
gtggaacatgctagtgtgttgctgccaccgctggagacactttgcactgttgaggaaacctgtgtgagagataaagctgtggagtcactttgtagaattggatctcaaatgagggagagtgatttggttgaatattacatcccattggtgaagagattggcagcaggtgaatggtttaccgcccgagtctctgcatgtggactatttcatattgcataccctagcgcaccagatacatcaaagacagagttgagatcaatatacagtcagttatgtcaggatgatatgcctatggttagaaggtcggctgcatcaaatcttgtgaaatntgctgcaactgttgaatatgctcatttgaaggctgatgtcatgtcaatttttgacgatcttactcaagatgatc

SEQ ID NO: 7486 - DNA, 336 bp, Glycine max
  Clone ID: LIB3087-012-Q1-K1-B11
acgactatttccaactcattcttcatgtcttaactcaaactattaatgtccctagtctattatcttatcatagacatgcttaacaaatataatcaggaaaattaacaacatcgatcacaataatgattactttaccatcaactggattaataatgtcatgactttcactgctttgtactttcaatcctctgtatactatatccctacctagaataaattctcattctaaagtattcattgcaacttcttcacctctaactacatctaccataaacttgccccaaaccctctttgaacgtttcacttagaaaaccatcaaagtcattattctatccc

SEQ ID NO: 7487 - DNA, 315 bp, Glycine max
  Clone ID: LIB3087-012-Q1-K1-B12
aacacacaacaacaaatacagtaataaacgctaatgaatatagaattagagttgctaccagatttcaaatttcaccccactgatgaacaattggtgaatcactacttctctaagaagtacgcgtttcaaccaatcacggttcccatcatcaaacaggtctatttgtacaagttttatccatggcagctttcagaaatttgctactactgctagaaagaatggtacttcttttctcctcaggatcggaaatacccgaacggttcacggcctaaccgtgccgtcttaaacggctattggaaaaccaccggctcctat

SEQ ID NO: 7488 - DNA, 379 bp, Glycine max
  Clone ID: LIB3087-012-Q1-K1-B2
cccacgcgtccggagaatttgttcgatcagagtatgaccatgcatgcttgcgctcttgccgttcacgagcactttatgaagggctgaaggtagctgcaacatctgatctgatgctgggatatctggatttcttccttggtggggatgagaaaagacctgatctgcctcctcgtctttatcaaagatttcccatgtctataatttttgggggagatggaagttacatgagtcctttctctattcacagggataatattcttactagcatcatgagtcagtctgttccaccaactatatggtatcgattagtggctggtcttaatgctcaactacgattggttcgccgtggacatctaaaaataacttttggcctgttatc

SEQ ID NO: 7489 - DNA, 372 bp, Glycine max
  Clone ID: LIB3087-012-Q1-K1-B3
cggaattctagctccgatctcacgaaattgctcgaatcttagggctgaagcaatggatgtcgatgcgtcgatggtgccggagaccgatcacgatcccgccgtacagaaccacgccgccgatgacccggcgccggacgcggcggagggagaacagctaggggagccgccgtcgtccggaggcggatctccggagcagacgcagccggcgcctgcttcggcgccgcagagtccggtggtcggaccgaggctggcgcctagttacacagtggtgaatgcaattttggagaagaaggaggacggaccggtgccgaggtgcggccacacgctaacggcggtggcggcggtcggagaggaggggaccccagggtacat

SEQ ID NO: 7490 - DNA, 384 bp, Glycine max
  Clone ID: LIB3087-012-Q1-K1-B4
ctccaagcctcactccctcgtttcttccggccccttcactcaccttctatctgccaattctcttcgattaagaacacccacctctttggatcctcttcccttcaattcatcacataataacgacactacaaaacattgtttttagctcttttttgttgcagcgaaaccaaaatgtctttcactgcaactaagtttgcaccttctcctctccctctcaattccaccaccctcagatccaatgacaagcctctctctctctccttcgatcactccaagcccaacccttcttactctatacttggatccactcgcaagcttcttcgcttcaatgctctcgctaaacctcatgctcacacacgtgcttctttttacctgttgctgctg

SEQ ID NO: 7491 - DNA, 348 bp, Glycine max
  unsure at all n locations
  Clone ID: LIB3087-012-Q1-K1-B5
cccacgcgtccgcccacgcgtccgcccacgcgtccgcccacgcgtccgcccacgcgtccgttgcagtcgcagaggaaaaccctagctagtagtctcagttcgtttgagagagaaaaaatggcagagggtctcgttctccgcggaaccatgcgcgcccacaccgacgtcgtgacggcgattgccactcccatcgacaactccgacatgatcgtgacggcgtcgcgcgacaaatccatcattctctggcacctcaccaaggaggacaagacctacggtgtcccccgccgncgnctcaccggacattctcacttcgtccaggacgtcgtcctctcatccgacggtcagttc

SEQ ID NO: 7492 - DNA, 459 bp, Glycine max
  unsure at all n locations
  Clone ID: LIB3087-012-Q1-K1-B6
agatgatgagtttgctgatctctatattgtgaaatggacatcccttatgattccacctatgacaggtatgatggtcaacttaatagcaatagcagttggagtaagcagaaccatatacagtgtcataccacagtggagccgtctactaggtggtgttttcttcagtttttgggtcttggctcatctctatccctttgcaaaaggtttgatgggaagaagagggaggacacctaccatagtntttgtgtggtcaggcctcatagcaatcacaatttctctcctctgggtggctatcaacccccctgctggtactgaccaaattgggggttcattccagttcccttgacaggtcattctttnntgtcagatgaatgaatctgtcagctatttttttatttacaattaggttcttttttctcttgattctacatatgggtggttctactaatgaatggactt

SEQ ID NO: 7493 - DNA, 311 bp, Glycine max
  Clone ID: LIB3087-012-Q1-K1-B7
acaatatctgtctctctctgtttggattggcctcttgctgtaagaagccagccacagtactgctgcgctcctgtggaaccatcgatgggctttaacaggttccacatcggttgagctctgtgtcagatatgccaatagtgttatccttattcttgtgatatactagtttggatgatcatattatctcggattgtctagcaagtgtagctcaattggacgttggacgaattattatatatctattaagattatcttcaatttctacgaaaaaaaaatattttatagaattgtgagattatgggtagaagtac

SEQ ID NO: 7494 - DNA, 345 bp, Glycine max
  Clone ID: LIB3087-012-Q1-K1-B8
accacgcgtccgtccacgcgtccgcccacgcgtccggccacgcgtccgcacacgcgttcgtggcaggctcataggaaaaccctagctagtagtctcagttcgtttgatagagaaaacatggcataagatctcgttctccgcggaaccatgcgcgcgcacactgacgtcgtgactgctattgccacttccatcgacaactccgacatgatcgtgacggcgtcgcgcgacaaattcatcattctctggcacctcaccaaggaggacaagacctacggtgtcctccgtcgactgctaccggacattctcacttcgtccaggacgtcgtcctctcattcgacggtcagt

SEQ ID NO: 7495 - DNA, 421 bp, Glycine max
  Clone ID: LIB3087-012-Q1-K1-C1
gcgatgcggatgaggcgccactcgatgtttccatttgcctgcatgcctttggtattgtggggtgtggttcgtttagtggtgtcaagtcttgcgaacgtgagggtgcatgagtggtaatcgggatgtttttgttgcacggctccatgcttgcgcatgcaacgtgtgacatgcatccttttcattgtcaccttagccttcgtggcttaggtgctgacgattggttcctgtgttgcctacctaccaaacggtattcgtgtggctagtcagacccattccatccaggcctctttgttggggacgctggaggatttcaaagtcccacacgtgaaccacgttagtcgtccatcataacggcttcctgtggcacacgtgtggtgattgttctctcggatgcggtgcatgcagtgaaacgtggtggtct

SEQ ID NO: 7496 - DNA, 394 bp, Glycine max
  Clone ID: LIB3087-012-Q1-K1-C10
cgccacgcgttcgaccactcgtccgcccactcgtccgatctctttctattttctattacactctacaaattcttgggctgccatttttaacaacaactggtttttatccatatcctctagacctccaattctcctgtactattatcatcctttgtttcaaacttcaaattttaatctctaacttattccagaacgcttatcacataccaccctcgctatttcacatcatctctttgaagtcacccatgacatttctcacctcacatgcacatatatccttcaagctcctaaagttcatacacctgtaattgttacattctcaactgtcattcatgatcgtgttatcccataaacctttacccaccctaaatgcttttcctttaagttctacacc

SEQ ID NO: 7497 - DNA, 406 bp, Glycine max
  Clone ID: LIB3087-012-Q1-K1-C12
cacgcgttcgaccacgcgtccgcccactcgtccgcccacgcttacttcaaagcatccttcgtttcaatttctctcgggtagcgctttctgcaatcgaacctttcatctacaaagggatccacaagccgaaagaaaaatggggctgacattcacaaagcttttcagtcggcttttcgcgaagaaggaaatgcgaattctgatggttggtcttgatgctgctggtaagaccactatcctgtacaagctcaagctcggatagatcgttaccacaattcctaccatcgggttcaatgttgaaactgtggaatacaagaacattagcttcactgtttgggatgttggtggccaggacaagattcgtcccttgtggaggcactactttcataacacccatggtcttattttt

SEQ ID NO: 7498 - DNA, 384 bp, Glycine max
  Clone ID: LIB3087-012-Q1-K1-C2
cccactttaattttttccccttctcattgtttgtttccactgatttctccatatccccgtcgtggagaacgctttgacctttcttagatttgttcttccaatccaaagtttttatctttttttcagatttttaagttggagcatggtttttagtcaactgagtctcttccaaatctttaaattgttctaaatcttttctgggttgaaaatttttgcttttttgtgtctgtgtctttttgtgtgtggttgttggtggatatggattctaaggatattaatggttgcctcatggataaacataaacctgtggtgacatcttctttggtttgtgaaaaggttgaagatcatgtcaacggagaagatgatagtgattccaattctttg

SEQ ID NO: 7499 - DNA, 428 bp, Glycine max
  Clone ID: LIB3087-012-Q1-K1-C3
cccacgcgtccgggagaattaggtttttagggtttacaccgagcagcgacacctccctcccgcagtggccatggttctcaaaactgaactatgccgattcagtggtgccaagatctaccccggaaagggcatcagatttgttcgtggtgattctcaggttttcctgtttgccaactcaaaatgtaagcggtatttccacaaccgcctgaagccctcaaagctcacctggactgctatgtacagaaagcaacacaaaaaggacattgctcaagaagctgtgaagaagaggagacgcgctgccaaaaagccttactctaggtccattgttggtgccactctggaagttatccagaaaaagagagctgagaagccagaagttcgagatgcagctaggggaagctgctcttcgtgaaaataaggagaggatc

SEQ ID NO: 7500 - DNA, 357 bp, Glycine max
  Clone ID: LIB3087-012-Q1-K1-B1
cggacgcgtgggttgttctgcttgctggacagtgtttttctgtcatggttggagcaacagaaggacacaccttggaagaaatggtttgcatcatttcattccacgaatgaaaaaggaggtcgatgttgatgaggagattggtggaaaaagaaaaattgtttgattaaagcttttgaattgttttgctttttttgttttgttttgtaagttgtaatgggtagatttgaagatagatattaggtttaatgaacttttttgtttctatagtttcattatttgtattttttagttcccatagtttgaaagtggttttttctgtctatataatttacattttaattatcttttagttcctgt

SEQ ID NO: 7501 - DNA, 493 bp, Glycine max
  Clone ID: LIB3087-011-Q1-K1-H11
tgggagcttaactatgtcaaatttaccgtatgtgttttcaaatgtaaatgggttgatagcaacatgggtgtgcgcactgatgatataggatttacgctggtagacctaaagaaacttggttaccacaatgaccctttcatcatggcagaacaagctagacaagtattttacgtgcaagacccttgtgatgaaaggtggtgcgtggttctgcagggcaaaacaattggtgttaatgtagaagatgtgattcatacatggacacctatgttagtcctttgactgcacaaatcactcctaacattgtcggagaagaagaagttgacgacgttcatgctaatcgtaatgatcatgatgaaggagaattaattaacatcatctaatgtaattttctatttatatatttcattttcctagattgattttcacaaaccaatactacatttgtatttaaaacatgcatgtattgaatgaaagctttgataatggaacttat

SEQ ID NO: 7502 - DNA, 326 bp, Glycine max
  Clone ID: LIB3087-011-Q1-K1-H12
cccacgcgtccgtccacgcgtccgctgctaccaccttctcaagcttccacttcacaagtaattcggtggtgtaaattatattttcatctgatcctactaagataaaccttcattctgtatcagtttttattttttttttatgctatcacgtagataaacgtaccttttacttttctctggttttattcaccttcgctacccttcattcggtgcagactaagagaacgaagaaagcaagcattggcggaaaatatggtacccgatatggtgctagtctgcggaagcagattaagaagatggaagttagtcagcatagcaaattcttt

SEQ ID NO: 7503 - DNA, 202 bp, Glycine max
  Clone ID: LIB3087-011-Q1-K1-H8
ttacctccacgcaatctatcctatcaccttttaaatcttacacttcacaaatcattcattcggctcaacaataatgatatgtgattctcactatattaacctacattctttatcaaccactattaccctttcatcctatcacatctatctacacaaccttttacactttctatacccttattcacctacgttacccttcatt

SEQ ID NO: 7504 - DNA, 407 bp, Glycine max
  Clone ID: LIB3087-011-Q1-K1-H9
acattttctgaagagtatgatacctggaataatgtgatataggaaaaagagcttcgaaggaaaccggtgaacaaaggcttagtttaaaagaagctgatcttcctttagtgggaattattactcgattgactcatcagaaaggaatccatctcatcaaacatgccatatggcgcaccctagaacgtggtggacaggttgtactacttggttcagctccagatcctcgtatccaaaatgattttgtgaatttggccaatgaattgcattccgctcatcatgatcgtgctagactttgccttgcatatgatgagcctctttcacacttgatatatgctggtgctgatttcattctagttccttcaatctttgagccatgtggactcactcaactcacagcaatgagatat

SEQ ID NO: 7505 - DNA, 279 bp, Glycine max
  Clone ID: LIB3087-012-Q1-K1-A1
cccacgcgttcgatcagtttgagagctgacagaaaatctggccctacattctaataagcactaatcagttcaataaaaaagttttagacacacttgcatcttttctgctttcaattaatggcttgaggattgaaaagttgaacggggaacccctgatctatatatacctgcacttttgtccaatatgctgtcttccctacgttgagaacgtgcaatttcaaggttaataaaaatggggggtggggaggtgactttaaaggtagggtaatataagtcaag

SEQ ID NO: 7506 - DNA, 241 bp, Glycine max
  Clone ID: LIB3087-012-Q1-K1-A10
ctaatttcctctcttctattccactcaccctatacactattcaatctcccagttgtctttccataaccactctcactgcactacttataatactctttcactcactccattctttctttactaaatcacttctcattttaaacttatttataacctcattttttattttctacatttataaccatccaatcctacttctttaatccctatcaacttcaattctataaacccctctcttttc

SEQ ID NO: 7507 - DNA, 366 bp, Glycine max
  Clone ID: LIB3087-012-Q1-K1-A2
gcattttcagaggaaaatggcggatacggcttcgacttggttcttcttcgcgtttcttctttctctccttgttccttttcagatctccgctgaggaatcctcggagaaggagttcgtactcacattggatcactctaactttcacgacactgtcagcaagcacgatttcatcgtcgtcgagttctacgccccatggtgtggtcactgtaagaagcttgctccggagtatgagaaagctgcttctatcttgagtagtcatgatcctcctatgggtttggctaaagtagatgccaatgaggagaagaacatagaccttgcatcacaatatgatgttaagggattccccacaataaatattctgagaaa

SEQ ID NO: 7508 - DNA, 394 bp, Glycine max
  Clone ID: LIB3087-012-Q1-K1-A3
gaagaacatccaagagaggaaggagaggcgctgggttttagaaagaaaattggcatcatcagatgtgccaaatgaggagcggatcaacctcatcaaagatttagagaggaaggagactgaatatatgcgattgaaaagacacaagatttgtgttaatgattttgaacttttgaccatcattggaaggggggcttttggggagtttagactgtgccgggagaagaaatctggaaatatttatgctatgaaaaagctgaagaaatctgaaatgcttatgagaggccaggtggaacatgttagagctgagaggaatttgctggccgaagttgccagtcattgcattgtgaaactttactactcatttcaggatgctgagtacttggatttaattatg

SEQ ID NO: 7509 - DNA, 316 bp, Glycine max
  Clone ID: LIB3087-012-Q1-K1-A4
ctgacgcatgcgttgctgaacaggcagtctcatatatatagacctaatatgcatatactaatgagggatgggccaaatattcatacgcatcatcactgcttgctactcttagatatctgatattaatcagtctagatcaaggcctatgccttggatgacatatggtcttgaaaatgttctagtgcattacaactctgagttgaaacgctcccgattatacatggctaagctcatggatgcgaaattataacatgctcagatcgctgagactctaaatagctcaggattgacttaagctgcctcagatgactactca

SEQ ID NO: 7510 - DNA, 332 bp, Glycine max
  unsure at all n locations
  Clone ID: LIB3087-012-Q1-K1-A6
cccacgcgtccgaatgtttccaaggctgaacttaaggagaagctagctaggatgtatgatgtgaaagaccctaatactgtatttgtcttcaaattccgaacacattttggaggtggcaaatccactggatttggtttgatttatgacacagtggaaaatgctaaaaagtatgagcccaaatacaggcttatcaggaacggccttgacactaaggtagaaaagtcaaggaagcaaatgaaggagagaaagaatagagctaagaagattcgcggagtaaagaagaccaaagcttncgatgctgccaaagctggaaaaaagaaataagttttgag

SEQ ID NO: 7511 - DNA, 411 bp, Glycine max
  Clone ID: LIB3087-012-Q1-K1-A7
ttcctaactaagcttcactgtttctcattatcatcatcttccttcttaattcaatttcagaacccggcctggtcctttcttcacttcccaattcaatggacacccaaaccccaatacttaagtgcttggcacgggtcccttggaaataccctttttttcttcttcttccactcacccacaaatccacttccccccaaacttctaccctttttaaaaaggcttttcaaaggttgaatctttagcccaaaacaaacagaaccagaaattttttttagcaatgctgtgaccaatgattgagtaacgaagattctgtgatcgttcagcaatgggggtttgcacttcgaagccgcagaagccgaacccttacgcgctttgtgaagccgaagccgaagccgacccttttaaaaaccc

SEQ ID NO: 7512 - DNA, 344 bp, Glycine max
  Clone ID: LIB3087-012-Q1-K1-A8
tgtttgtctgtcacgagactcatacattgtgctgccaattatagtaactctctatttctctttccagctctcaagttctgaagaagaaacatgtgtggaggtgctatcatctcagacttcattggtgtgaagcgtggccgcaacctcgccgcgcaggaactatggtctgagcttgaccctttctctgacttccttggcttcgataccaccaattccaaaaaccaaccacccctgcagaaaattccagacaaaaaagtggtgtcatcatgtgagaagaagaagaaaagcgtggtgggtgcagaaaagaggaagagtgatagtgggcgagctcgtaaaaacgtgta

SEQ ID NO: 7513 - DNA, 470 bp, Glycine max
  unsure at all n locations
  Clone ID: LIB3087-011-Q1-K1-H10
tgggagcttaactatgtcaaatttaccgtatgtgttttcaaatgtaaatgggttgatagcaacattggtgtgcgcactgatgatataggatttacgctggtagacctaaagaaacttggttaccacaatgaccctttcatcatggcagaacaagctagacaagtattttacgtgcaagacccttgtgatgaaaggtggtgcgtggttctgcagggcaaaacaattggtgttaatgtagaagatgtgattcatacatggacacctatgttagtcctttgactgcacaaatcactcctaacattgtcggagaagaagaagttgacgacgttcatgctaatcgtaatgatcatgatgaaggagaattaattaacatcatctaatgtaattttctatttatatatntcattttcctagatggattttcacanaccaatactacatttgtattcaaaacatgcatgtattgaatg

SEQ ID NO: 7514 - DNA, 392 bp, Glycine max
  Clone ID: LIB3087-011-Q1-K1-E12
cccacgcgtccggctatatctcaaagtgaatatcaccgaggagttagtgcatggaacttcgatattgatgatttgaaagcacaagcggcattgatgcaagacgatgatgatattgcagagatgaaggaagaagatgaaaacaaattcttcagctcttacaagggcacaactgattcccagtttattgtggacaaaaagaattcaaataacttgcaacaagatgagttcacatcacaagtaggtagtaatgacataccaaagagtgagaaaagaaatggatcagttgctgaagcaacaccatctactttagagaatgatgtgggaacaagcaaagttaaaactcaatcagtgaaacttggtaaaacccaaagtggacccctgatgccaggctt

SEQ ID NO: 7515 - DNA, 179 bp, Glycine max
  Clone ID: LIB3087-011-Q1-K1-E5
cccacgcgtccgtttatatctcacactgtatgtatcagacgtgccattgtcagttacctcgatataggggattcgcatgctcaagcgtcatcaattcactactaagattctatttcaaacattcgcagctaatatgtactctgatcctttataccatactatgactcaaatgatattaa

SEQ ID NO: 7516 - DNA, 468 bp, Glycine max
  unsure at all n locations
  Clone ID: LIB3087-011-Q1-K1-F11
cccacgcgtccgcagtaagtaaagagaagcagtttccagtctacgtcagtaaaacgatgggcgacttcacggttgcgttaaaccctcccaaaaccttccgctccgacaatctcctatccaccaccaaccgcatttccccagcggcgcgtggctttcaaacctcactcgcgttcaaaccgcgcgtttttcgaggaatccgcgcttcggtgatgccaagagagggccagccacaacaacgacaacaacaagcgtcgtctctcggagacgctctcgtcaacagttcgcgccgaaacgacgtcgtcgaggccatcggaagaaccgcatcggtctccaactgcctctccgaaacgaacctncacgccaccgttcccgggctcgagtccaaaacccgcggcaaagttcgagatatatacgacgcttgggattaccctcgtttggtgaccactgatcggcagaatgcgtttgatc

SEQ ID NO: 7517 - DNA, 259 bp, Glycine max
  unsure at all n locations
  Clone ID: LIB3087-011-Q1-K1-F12
tcccactcgtcctcagacacttaagataacccgttttcattctacgtctctataactatcttcgactgtaccctttctttaaacccttcagaatccttccaataccacaatcttctatccaccaccaacctcatttccccaccatcacctatactatcaaaccttactacccttcatacctctcttttattcatgaatacactcttccatgataccaataaaatcccaaccacaacaacaacaacaacaagcgtcntct

SEQ ID NO: 7518 - DNA, 480 bp, Glycine max
  Clone ID: LIB3087-011-Q1-K1-F5
cccacgcgtccgcacacactaaagataagcagcttttattctacgactgtataactatcttcgacttggcggattctttaaacccttccgagtccttccaatatgacaatcttctattcaccaccaaccgcatttccccagcggcacgagtctttcaaacctcactcgcgttcataccgcgcgttaaccgaggaatccactcttccatgataccaagagagggccagccacaccaacaacaacaacaagcgtcgtctctcagagacgctctcgtcaacagatcattccgaatcgacttcttcgaggccatcgtaagaaccgcatcgctctacaactgcctctccgaaacgaaccttcacgccaccgttacatgcctcaagtccaacactcgtggcaaaattcgagatatatactacactgatgattacctcgtttttatgaccactgatctgcataatacgattgatcagaattcttgct

SEQ ID NO: 7519 - DNA, 454 bp, Glycine max
  Clone ID: LIB3087-011-Q1-K1-F6
cccacgcgtccgcacacactaaagataagcttttttcattctacgacactataactatcttcgggttggcgtttacattaaaccctgcaaaatccttccaatatgacaatctcctatccaccaccaaccgcatatccccatcggcatcagtctatcaaaccttactcgcgataaaaccgcgctttaaccgaggaatccactcttacatgataccaagagatggccagccacaccaacaacaacaacaagcgtcgtctctaatatactctctcgtcaacagatcactccgaaacgacatctactagaccatcctaagaaccgcatcgctctacaactgcctattcgaaacgaacctacacgctaccgttcccgtcctcataatcaaaacccgtggcataattcgagatatatacaacactgataattacctcggtttggtgaccactgatcttca

SEQ ID NO: 7520 - DNA, 235 bp, Glycine max
  Clone ID: LIB3087-011-Q1-K1-F8
tctcccacactaaaactatcttcgacttggctttttctttaaaccctgcccgcaccttccaataccacaatcacctatccaccaccaactccatttccccatcttcaccaatcctatcaaacctcactccccataaaacctctcttttacccatcaatccactcttacattataccaatatatccccaaccacaccaacaacaacaacaagcgtcgtctctcaaacacgctctct

SEQ ID NO: 7521 - DNA, 406 bp, Glycine max
  Clone ID: LIB3087-011-Q1-K1-G10
gatgattcttcttcagactctgaagatgagaaacctgtagcaaaagctgccgtaccttcaaaaaagacacctgctaaaagcagcaatataagtaccccagccaagaaaggcaagccagctagcagctccagttcttctgattcatctgaagatgactcttctgatgaggatgaactggctacaaaaaagcaaatgaacgaagtgaaagtgcaaaagggtaaggaggaaagtagttcagatgattcttcatccgattctgaagatgagaaacctgcagcaaaagttgccgttccttcaaaaaatcaatctgccaaaaatggtactctaagtactctagctaagaaaggcaagccagctgccagttcaagctcttctgaatcttctgatgataactctgatgaggatg

SEQ ID NO: 7522 - DNA, 445 bp, Glycine max
  Clone ID: LIB3087-011-Q1-K1-G11
cccacgcgttcgggtgtttaatcttaaatggggttagctagctaggttaaagccaagggcccatgggctcatgcttatgatttgcaagtgttgctttcaagggaaaaaagagagctttttcttcggttggcccttttagcagattgatgttctgagaagttttgcaatttgaaaccaaggtttgtcattatgtcatgctttattggtggggaagggatgtagtcatgttatgtatgtagatacaatattacattcatacattgaattttagtcacaagatattatccacattttcagtgcttgaattcagaatcagaaggtaaaagttgagttgagagtactgttagttaattgctcagtaagctttccctgaacacttaaacatgtatcttctcttcgatgaaatttgattttggttttgtagtgcactggtctggttgatgtg

SEQ ID NO: 7523 - DNA, 376 bp, Glycine max
  Clone ID: LIB3087-011-Q1-K1-G12
cccacgcgtccggttaataccatatttactgatattggcgcatttctttgagaaagttactaattggtagatagaggcaaaaatgttgggaattttcaaggagaagttggttaaagcacccaaagagctgaacagtccagcttcggtgaattcatgcactaagcctaagctaagtcacgaaatccttcaagatttcatgtcctgcaattcctccaatgctttctcaatgtgctttgggaatgaagctttgctagcctattccccttcaaacaagcccttcattcatcaaaggtttgttagtggtttggataacatatactgtgtcttcctgggtggcctgcacaaccttagcatgctcaacaagcagtatgggcta

SEQ ID NO: 7524 - DNA, 360 bp, Glycine max
  Clone ID: LIB3087-011-Q1-K1-E11
cggacgcgtgggtgaagatcatgcccgtccagaagcagacccgcgccggtcagcgaacccgcttcaaggccttcgtggtggtcggcgacaacaacggccacgtcggtctcggagtgaagtgcagcaaggaagtcgccaccgtcatacgcggcgccatcattctcgcaaagctctctgttattcctgtgaggagaggctattggggtaacaagatcggaaagccccacaccgttccctgcaaggttaccggaaagtgtggctccgtcaccgtccgcatggtccccgtccctcgtgggtccggaatcgtcgccgctagggtccccaagaaggtcttgcagttcgctggaatcgatgacgtct

SEQ ID NO: 7525 - DNA, 438 bp, Glycine max
  unsure at all n locations
  Clone ID: LIB3087-011-Q1-K1-B9
gaagagggcatgatggtcccacgcatcataatcgcctcctaaatcaacggatggaaacgcacgatgagacaaaaccagttcaaccatccagattcgcggttccaaattacatcatttcgcatttaagatataaaaaaaatgaagaaaaagggcgtcatttcctcgccacaccctgtttcgtgaagctcagtgcatcaagatctctctctctgtaatcgaaaatgagcaagggaccgggtctctttaccgatatcggcaaaaaatccaaagatcttttgactaaggactacaacttcgatcagaaactcaccatttcctcatacagcatctncggagtggccctcacttcaacatctgtcaagaaaggaggactcttcactggggatgtggcagcactgtacaagtataagaacactattattgatgttaaactggaca

SEQ ID NO: 7526 - DNA, 479 bp, Glycine max
  unsure at all n locations
  Clone ID: LIB3087-011-Q1-K1-C10
cccacgcgtccgcccacgcgtccgagcgccttcaattctcccttctggactacaaattctggtgctgctatttggaacaacaactcctctttaaccgttggagctagaggtccaattctgctggaggattatcatcttgtggagaagcttgcaaattttgatagggaacgtatcccagaacgtgttgtccatgccaggggcgctagtgcaaagggtttctttgaggtcacccatgacatttctcacctgacatgtgcagatttccttcgagcccctggagttcagacgcctgtaattgttcgtttctcaactgtcattcatgagcgtggtagccctgaaaccttgagggaccctcgaggttttgccgtgaagttttacaccagagagggtaactttgaccttgttggaaacaaccttnccgtcttctttgtacgtgatggcatgaagtttccagatatggttcatgctcttaaacccaa

SEQ ID NO: 7527 - DNA, 355 bp, Glycine max
  Clone ID: LIB3087-011-Q1-K1-C11
tgagttttgaaaatggtgtcgtcgcaggttgtgaatacttacccgttgtccagctacacgttcggcacgaaggagcccaagatggagaaggatacctccgtcgcggatcgtctcgctcgcatgaaagtcaactatatgaaggagggaatgaggaccagtgtggaaggaattttactggtacaagagcacaatcatcctcatatacttcttctccaaattggaaacacattctgcaaactcccaggcggtcgtctcaaaccaggagagaatgaaattgagggcttgaagaggaagttgactagcaagcttggtgctaattcaccagctcttgtgcctgactggcagataagtgagt

SEQ ID NO: 7528 - DNA, 344 bp, Glycine max
  unsure at all n locations
  Clone ID: LIB3087-011-Q1-K1-C12
cccacgcgtccgcccacgcgtccgctctctccctctttcctatcacactttctagatagctagccagccagagtaagatctaaagatatttcttatatatcctatggtccgagagtgcccttgttctgcgccaaccctttcttccacatcttgcgtttcaacctcttcctctcttgagtccccttatcatcaaatacccttcttcttcaacctccaccaaattcaacccccacataacaaatctcctnccatcccatttttcagcaccaaagtttgaaacttttctcaattgggttgtagagagtttgactcatcaatttttatttttttatttttattttctc

SEQ ID NO: 7529 - DNA, 58 bp, Glycine max
  Clone ID: LIB3087-011-Q1-K1-C5
cccacgcgtccgcccacgcgtccgctctctgtctattctctatcacactctatatata

SEQ ID NO: 7530 - DNA, 61 bp, Glycine max
  Clone ID: LIB3087-011-Q1-K1-C6
accacgcgtacgaccacgcgtccgaactctttcaattttctatcatacgactacatatact

SEQ ID NO: 7531 - DNA, 415 bp, Glycine max
  Clone ID: LIB3087-011-Q1-K1-C8
cggtcctaattccagctcgaccgcacgcgtccgcccacgcgtccgcccacgcgttcgatctctgtcaattctctctcatactctatatatactttcgcgactatttttaccaacatctatgtggataccatctactctaatcctccaattctcatgaactacaactatcttatctaccacatgacgactattagatctctaacttttactcatacatttactctataatacacatatctcttccacttcgaattatttccacttccacattacacatactacctcatatcatcacatctcatcatatccttaatcttttaaacaccaagttgaatacaatgcatatcactaattcataatcttttatgcccatataccataatcaaccttatgtgcaatacttataagttccaca

SEQ ID NO: 7532 - DNA, 287 bp, Glycine max
  unsure at all n locations
  Clone ID: LIB3087-011-Q1-K1-C9
cccacgcgtctcgccacgcgtccgaacagcatccgcggcagcgacggtaaccctccaacaacaacagttccgctgcgaaaaatgtctctggtggcgaacgaggatttccagcacattctgcgtgtgctgaacaccaacgtggatgggaagcagaagataatgttcgcaatgacctncatcaaaggtattggaaggagattcgccaacatcgcttgcaagaaggctgatgttgacatgaacaaaagggctggtgagttgactgctgctgagttggatagtgtgatgac

SEQ ID NO: 7533 - DNA, 444 bp, Glycine max
  unsure at all n locations
  Clone ID: LIB3087-011-Q1-K1-D10
cccacgcgtccgcccacgcgtccgcccacgcgtccggcaaagcatccttcgtttcaatttctctctgtcagcgctttctgcaatcgaacctttcatctccaaagggatccacaggccgaaggagaaatggggctgacattcacaaagcttttcagtcggcttttcgcgaagaaggaaatgcgaattctgatggttggtcttgatgctgctggtaagaccactatcctgtacaagctcaagctcggagagatcgttaccacaattcctaccatcgggttcaatgttgagactgtggaatacaagaacattagcttcactgtttgggatgttggtggccaggacaagattcgtcccttgtggaggcactacttncagaacacccagggtcttatttttggtgtagacagcaatgatagggacaagagtgttgaggccagagatgag

SEQ ID NO: 7534 - DNA, 448 bp, Glycine max
  Clone ID: LIB3087-011-Q1-K1-D12
aaaggtacctagactctgaagattctgagttggagaaagtgattgacttttatattagttctgagagtgatgttttcgtaccggcaatatcaggtctattttatgcaaatgtagctggtaagagaatcggctcgggtaaatcccagatactggttccggccaatattccagattcatctgcttctgcctccagtttcttgtcccattatgtctccaagaaaaaccactttgcctattcttgttactgttagttcgaagtgaagacattcttagcatccagtgggtaatgttgtgtaccaattgtactgaatgatgctttccaaaatgtaccctttcgggaatttcagtgttatggcctaaggcctcttgtttgagtgttcaccaaaaaattcaagttactgtgatttgacatgtacacagggctttctgaacggatatttagtttggt

SEQ ID NO: 7535 - DNA, 247 bp, Glycine max
  Clone ID: LIB3087-011-Q1-K1-D5
accactcgttcgactgtgaataatctgaggcgactaatgtcacatacttttatatgatttctcagagggatgtgttcgaacagactatatgcagtctatgatatgccccagtatctcgctaatacaatgcgcgttgttcaatcccaaatactggctccggtcaatattacacactcattagcatctgtcttcattgacttcgcccattatgataccaacactatccacttcaactatactcgttact

SEQ ID NO: 7536 - DNA, 304 bp, Glycine max
  Clone ID: LIB3087-011-Q1-K1-D8
acgcgtcctaacactctttcgactatcattaatcccactctacttataacccatacttttatataatttctcactctcaaatcttataacacactatccgcaatctattaaataacccactataccctaataccaatcttatctatcactcacacaactactcacatctctcataattacaaactaactactatttatcatcatatacctcgatcactatcataccaccactatcccactcaaccatacactttctcctatctcctacacaaattctaccatctcattcaatttacaaactata

SEQ ID NO: 7537 - DNA, 449 bp, Glycine max
  Clone ID: LIB3087-011-Q1-K1-D9
agttaagtggcagtagagagaaaatgagcgtgaaggtgaattgcgtgggtggcgacactcataacgtcttcgtgtacggtagtctgttagctgatgaagttgtccataccctattgaagcgcgtccctccaaccgcacctgccatccttcacgactatcacaggtttaagatcaaaggtcgcgtttatcccgctattctccctgtccagaataacaaagtttatggcagggtgcttcttggtatctccggagtagaactagatattttagatgaatttgaggatgttgaatatactagaactgatgttgaggtttccttgaaggacaagtctgaaaagttacaagtttgcgcttatgtttggagcaacccaaatgatcctaacttatatgcagagtggaattttgaggaatggaaacaagttcacatgaatgatttcgtcaagatgact

SEQ ID NO: 7538 - DNA, 497 bp, Glycine max
  Clone ID: LIB3087-011-Q1-K1-E10
cccacgcgtccgcttcttcttcttcctctttgcatcgcttcttccttcatcacttatcttcatctgcttctgtcacatcatcaagcattctcacatcgcttctcagtttctcgttttcccaatcgcagctaaaaaatcctctgtacccttttacccttttctcaataagaagaaattaggaaacgcaacaatggctcaagcggttgaagaatggtataagcagatgcccgtcatcacgcgctcctatctcaccgctgctgttgtcaccactatcggatgctcccttgatataatttctccgtatcatttgtacttgaaccctatattggtggtgaagcaatatcagttttggcgcctggttactaatttcttgtactttcgtaaaatggacttggatttcctggttcatatgttttttcttgctcgttactgcaagcttcttgaggagaactcggtcagggggaggactgctgatttcttttacatgctcttatttg

SEQ ID NO: 7539 - DNA, 197 bp, Glycine max
  Clone ID: LIB3087-010-Q1-K1-H3
gggacgcgtgggcggacgcgtggctggaacgtggaactgcggaaaccggagtgtctcacttctcagatcagatcaatccgacgtcgttgcagttataatggctccattcagcggcgatgagacggcaccgtttttcggcttccttggagccgcagctgccctcgtcttctcctgtatggaagctgcctatggcacag

SEQ ID NO: 7540 - DNA, 340 bp, Glycine max
  Clone ID: LIB3087-010-Q1-K1-H4
gaagtcccgtgcggtcagcaagcctgataaggaaattgcaaagaatcacctggtgagaaataagtacacactccagcttggcgagaacgagctcgtccttaaggaactggatttattgaaagatgacacaaatgtttataagttgattgggccagtacttgttaagcaagatttggccgaggccaatgcaaatgtccgcaagaggatcgaatacatctcagctgaatggaagcgtcttgatgccactgttcaagatttggaagagaagcaaaatagcaagaaagatgcaatactaaaattgcaacaaaggattcaatcacttcaggctgggaaaggcaag

SEQ ID NO: 7541 - DNA, 354 bp, Glycine max
  Clone ID: LIB3087-010-Q1-K1-H6
ttcccgggtcgcctacgcgttcgggccaggccccgccttcagcccggctggctccttcggccgcaagatgaccatgggcgacctcatcgccaagcagatgcgcgtcacgcgccaggagaatccacactgcgagctcgtctccttcgaccgcgactgcgccaacgcgttccagcactacgtcaacgacactctcgccttcgccgtcaagcgcggggggttcatgtacggcaccgtttcggaggtgggaaaggtcgaggtggacttcatctacgagcctccgcagcagggttcggaggacaatctcgtctttttcagggaccccagagaggagaagtttgttgaagctattgcggt

SEQ ID NO: 7542 - DNA, 357 bp, Glycine max
  Clone ID: LIB3087-010-Q1-K1-H8
aaaccctaggttgagagcgctgatacggtgaatcggagtgcagccatatgggcagcttcagaagtccttgaagtgctgctctagtttgaggcacaatgagattggagaaatgctggttttgctcttcaaccatataccctggacatggaatccagtttgttcgtaatgatgcacagattcttcggtattgtagatctaaatgccacatgacctttaatctgaagagaagtgtttagatgccactgttcaagattgggaagagacgcaaaatagcaagagagatgcaatactaaaattgcaacaaaggattcaatcacttcaggctgggaaaggcaaggcatagttttccctcacata

SEQ ID NO: 7543 - DNA, 343 bp, Glycine max
  Clone ID: LIB3087-010-Q1-K1-H9
cccaggcgtccgcccacgcgtacggttgattgacaactatgacagttacacttataatggattccaggaactatctattattaatggcgtgcctcctgtggtgatccaaaatgatgattggacatgggaagaactttgccattacttatacaaagaaaatgcttttgataatattgtaatatcacctggacccggttctccagcatgcccggaagatataggcatttgtcttcagctgttgcttaagtgctgggatattcctattctgggtgtttgcctaggacaccaggcattaggttatgtgcatggagctcaagttgtccatgcatctgaaccaatccat

SEQ ID NO: 7544 - DNA, 441 bp, Glycine max
  Clone ID: LIB3087-011-Q1-K1-A11
tcttcttcttcttcttcttcttcattgcacagtgcatccataaacatgaagtaatgaggtaatctgaagtggaaaaaatgggtgggggccggttcaaaccgacgcagaagaggaagagggttccaaagagggtgtggttaagcttccaaaaatcaatgggtgtcctcgtgggtggaaaccataccttctccaggttttgcactcgctaactcccctcccttccccctttcggctttcaaaagatccatctttctctcactttctcttaactcgattagttcaacatggacaccaaggcattcaaattccagatccttactagctccatcgccaggcgcgtgctccttcgcacaatcctactcgcgtgcgctggctcggttggctctctggaccggggcctattcctcttcgaattcggaacccttggttccattggcacct

SEQ ID NO: 7545 - DNA, 407 bp, Glycine max
  Clone ID: LIB3087-011-Q1-K1-A12
cggacgcgtgggcttttctcctctcttctattccactcagtcatttcactatttaatctcccattggtcgttcctttaccaccctcacttcactgcttagggttttcttgcactcacgccattctttctttgctgaatcactctgcattttgaactttctgagaagctcagtgtttctgttcgacatggaaaccgacgaatcctctcgcgtgattccctttcagcttcaattcgataaacccctcgcttctcagatcaaaattgcggagtggaatcccgagaaggacttgctcgccatggtgactgacgattctaagatcttgctccatcgtttcaattggcaacgcttgtggaccattactccaagaagatcataacatctttgtgttggcgtcctgatggaaaag

SEQ ID NO: 7546 - DNA, 200 bp, Glycine max
  Clone ID: LIB3087-011-Q1-K1-A5
ccgacgcgtgggctttcctactctcttctattccactcagtcattacactatttaatctcccattacgggttcctttaccaccctgacttgactgcttacggcttacttgcactcacgccattctttcattgctgaatcactctgcattttgaactttctgacaagctcagtgtttatgatccacatggcaaccgacgaa

SEQ ID NO: 7547 - DNA, 415 bp, Glycine max
  Clone ID: LIB3087-011-Q1-K1-A6
ccgacgcgtgggctttcctactctcttctattccattcagtcattatactattaaatctcccatggcgcgttcctttaccaccctcacttgactgattacgactcacatgcactcacgccattctttctttgctgaatcactctgcattatgaactttctgacaagctcagtgtatatgatccacatggaaaccgacgaattctctaagcgtgattccctttcagcttcaattcgataaacccctagcttctcatatcaaaattgcagattggaatcccgagaatgacttgctagccatggcgactgacgattctaacatcttgcatcatcgttccaattggcaacgcttgtggaccattactccaagaagatgcataacatctttgggtcggcgtcctgatggaaaagcaattg

SEQ ID NO: 7548 - DNA, 334 bp, Glycine max
  unsure at all n locations
  Clone ID: LIB3087-011-Q1-K1-A9
nccacgcgtncgctcgttgattcggatctagagtcttttttcactcttcagttctcgttgttgttgttcgctttcctgaaactagggttttcaatttcgattcattcgttaataattaaagatgtttgggagggcaccgaagaagagcgataatacgaggtactacgaaatcctcggcgtctcgaagaacgcttcgcaggatgatctgaagaaggcttacaagaaagccgccatcaagaatcaccctgacaagggcggtgatcccgagaagtttaaagagctggcacaagcatatgaggttctgagtgaccctgagaagcgtgagatatatgat

SEQ ID NO: 7549 - DNA, 433 bp, Glycine max
  Clone ID: LIB3087-011-Q1-K1-B10
attttctcagcaaggacctcgagctatatgcattctttcagctaatggtgtcatatcaagtgtcacagttcgtcagcccgattcttctgggggcacattgacatgagggacggtttgagattctgtcattgtctggctcattcatgcccaatgaaagtggaggaacacgaagcagatcccgtggcatgagtgtatctttggctagccctgatggacgtgttgtacgtggcggagtagctggtctgctggtggctgcaagtcctgtgcaagtagtggtaggaagttttctggcaggaaaccaacatgagcagaagccaagaaaacagatacacgaggttatatcaagtgtgacaccagctgcagttgttccaatctctacacttgatccagtatcaattctatcagcagcgtcttccattcgcaacgataattg

SEQ ID NO: 7550 - DNA, 346 bp, Glycine max
  Clone ID: LIB3087-011-Q1-K1-B12
aaagcagagccaacaacaagaagaacaaaaccaacatcaacaaccacaagaagaagaagcttgcaaaggagaagaatcttcagttgaaagggaagaacacacaagaacaaagagaggaagaaacgcgaatgaagggagaattagagttgccaccagggttcagatttcaccccactgatgaagaattggtgaatcactacttgtgtaagaagtgcgcgggtcaaccaatcgcggttcccatcatcaaagaggtcgatttgtacaagtttgatccatggcagcttccagaaattggctactacggcgagaaagaatggtacttcttttctcctcgggatcggaaata

SEQ ID NO: 7551 - DNA, 359 bp, Glycine max
  unsure at all n locations
  Clone ID: LIB3087-010-Q1-K1-F4
aattcccggtcgccttatccttcggccaccctccgggaacctggaaatgaatctctgatccattttgtgtgttgagtttgattttgtattgttatagattacagatttggtgggcaatggatagggacaacaaatctcctccaccttcttctctttatgtgaaatcatcatcttcatccttcagccacgacgacataagcgccatgccggagaatccacccaagaacagaggccacagacgcgcccattccgagattataaccctaccggacgacctatccttcgacgctgatnctcttccccgacgacgacacgacttgctctccctctacctncaattcgatcagctcgattcctct

SEQ ID NO: 7552 - DNA, 285 bp, Glycine max
  Clone ID: LIB3087-010-Q1-K1-F6
gccacacggagacaaacgactcgctgagcgagctgataacacgctgagcgcgtgcctacgtgacagattcccttctagattcctcctatccactaagcgtgttgatgtctcgcttagcaaatgatactcgctaagcacattgagctcacttagcgagacatcaactttagcacttcttcaaaatagctcctttttgcctgaattgaagagaaattgacattaattccatacacaaggcttctactaagaatagataaaaacagcaaaatttatttacaatcctac

SEQ ID NO: 7553 - DNA, 357 bp, Glycine max
  Clone ID: LIB3087-010-Q1-K1-F7
ccgaattcccggtcgccttacgcgtcgggttttagaatcaatcaaacaaacctcagtaccaagaaccctatgccttgacgaaccctaacgttgatttaaatcgtttgttcgcacttcaatctccaagtcataaatacactcttctctccccattcactcgcattggcttttggtagttgaagtctttcattgttgtcaaattcagatcaggactactcaggcaagtgatagcagctctgggcttcgagggctagaatcctccgaagaattcaagagaagagggaaaccattgagagaaaagcataatcctaacagaaaggaatctacggcactaatggcagacaaagctaagggaat

SEQ ID NO: 7554 - DNA, 430 bp, Glycine max
  Clone ID: LIB3087-010-Q1-K1-F9
cccgattctgcttaaattggcacactaccttttttcgtgggaacccgaaccaatagaacgaaaaaagagtccaattttgtgaaaattattaccattcattcttattcatcaacgtccccccttctgtgcccacttccaaatcttctcctctcgctatgggttgtggctcctcccttccagatagggattcaaggcagttgggtcgacccaattccgagaatggtggagggcaggacgccaagaatctaagggtcaagcttgttctcttaggtgattctggtgttggcaaaagctgtattgttctacgatttgttcgtggtcagtttgatccaacatctaaggtaactgttggagcttcttttttgtcacaaacaatagctctgcaagactctacaacagtcaagtttgaaatatgggatactgctggtca

SEQ ID NO: 7555 - DNA, 409 bp, Glycine max
  Clone ID: LIB3087-010-Q1-K1-G10
cggctcgactcacgcgtccggaggctctgtgtgagtggttagtgttggtttgagaaagaagtgaatcgtaagagggggggttctgttagcatgtggcgttcatcgatccgtcgcgcgttttcggtgagggcgtcgaagcactgcgagaaccacgagttcctctctcggaactcgttcctggggagctgggaggcgccacgggacccgaaggatgcggaggcgaagctggcgcggctgctaagggaatacgcgaagcaagtgaatgaggttcggacggaatacataagagagatggaagcgatgaagattgagaacgagcgcaaagacgatgctcacaaggaagccctcagagtcgccaacgaaaagcgcaagaagctcaaggcttaagccgggcatcttatagcacaag

SEQ ID NO: 7556 - DNA, 254 bp, Glycine max
  Clone ID: LIB3087-010-Q1-K1-G11
ggagggtaaatttggtgcttcatgtttggtgaaacaggatctgagttgtgatcagctggagtccataagtaggttttcaccaaaaaaaagaaaagtccataagtaggcagtgaaaggtatattgggatttccattattttaaactgataaatgacgaggggaagatctgatggattgcaaaagaagcatttagatgcttccgttagtggggtggcaatcttactggatttcctatatgagtacaatggatccat

SEQ ID NO: 7557 - DNA, 356 bp, Glycine max
  Clone ID: LIB3087-010-Q1-K1-G12
gcatcaccaaaccccatttccatgtttcgtattcaattgtgttttactaccaaatggtgcggtgcttccttactctgcagcgcctactcatatcacagatcatggataattcatagtactactatttcgtacaagtattcacgaaccattccattccaatttccattcagcagcaaccaaatcaccatcttcttttgcatcattagttttttagttagattaccctcttccgttacaccttcctttcatccctacgtcaccaccactcactctttttctaccctaaaccattgaatcgatctaaatctctcccaaatcgcagaccccttttgctcaattcagtcaattctctccct

SEQ ID NO: 7558 - DNA, 292 bp, Glycine max
  Clone ID: LIB3087-010-Q1-K1-G3
gccacgcgttcgcacaaacccttgtctttcctcgcgctcctgtccagccaccgtcgtgccctggtcgcactcaaacaccatcgcggtttcagtcgcacatcgttggcgaccgtcgtcctgccgccgccgttgcgcctccgtcaccactggtttgggccttttgcctctctcgtaagcggtttgtcatcaattgagcctaaaccactttttttctgacgagagaatgggatttgcaggacccctatgaaacattgttcgccctctttcagtggcataatcaagagctttaacg

SEQ ID NO: 7559 - DNA, 341 bp, Glycine max
  unsure at all n locations
  Clone ID: LIB3087-010-Q1-K1-G7
cgtcgatctgagctcaaaacaatgtcgaaaccaaggtactctcgtcttccagctcgcatgtcatcgtcgtcttccacgctgattctgactctgttcctggtcttcaccttcctcgttctaattctcctggctctcggcatcctctccattcctagctcctcgcgtggaaatttgcccaaacctaacgatctcgcatccattgctcgcaacacaatccacacttccgacgatgacgacgtgaggggagagcagtgggttgaagtagtgtcgtgggagccgagagcctttgtctatcacaattttctgacgaaggangaatgcgagtatctaattgacatagc

SEQ ID NO: 7560 - DNA, 302 bp, Glycine max
  Clone ID: LIB3087-010-Q1-K1-G8
gtaccatgttccagatcaaataaactcatttcctctgagatgaatttcgggagggcagagaattcttgtgtctttgatgctggttaccagaatttctgttttggggtaggtcatgtaaactatcattaccaatgagtgaggatacatatacaatgcaatatgtgcgagacaggtgaaccaacttctagatataacagagaaaaaggtgcgaattctaggaggaggcataagtagacacataaatgcgaaaatgcagaatatgtcctatggccatgatgtttcatccgatgactaccctggaa

SEQ ID NO: 7561 - DNA, 265 bp, Glycine max
  Clone ID: LIB3087-010-Q1-K1-G9
gcggactctaactcacattctatcttcaatatcaaaaaatactcgcaaaacacgacctgcgcgtatttagtattcgatagcaatttatacatctctctatctatatatatatccggcatctgaaaaatttattgcagctagcgccaccttacacactcctactctcactcctaccacacctatctctctctgtctgtctctgatacagggcctcaaaactctgatcacggctcgtctgattctgtctgaaccacacagagtgacc

SEQ ID NO: 7562 - DNA, 221 bp, Glycine max
  Clone ID: LIB3087-010-Q1-K1-H1
ggtcgatctagagctcaaaacaatgtctaaaccaaggtaccctcaacttccaccacgacagacaacgtcgtcttccacgctgattctgactctgcatctgggatgaccttactattgcactgctgcagggtgtatggatactgagcacacctagcagcactcgaggaacattgaccctacctaacgacataggatccagtgctacaagaacattccggact

SEQ ID NO: 7563 - DNA, 352 bp, Glycine max
  Clone ID: LIB3087-010-Q1-K1-F3
gtggcctcactgaataggagcttctggaacacaatccgaagtggtgagctgtgcaggtggagaagactgaatggcataatagaacactggatttatttttcctgtgccctccttgaatgggaggcctatgatccaattcgtgaacggtggatgcatttaccaaggatggcttctaatgaatgcttcatgtgttcggataaggaatctttagccgtaggaactgaacttcttgtatttggcagggagatgagatcccatgtcatttacagatacagtcttttgactaactcatggacatctggaatgaggatgaatgctccaagatgcttatttggatctgctagcttggggg

SEQ ID NO: 7564 - DNA, 106 bp, Glycine max
  Clone ID: LIB3087-010-Q1-K1-D6
gttgcggctagggttttagcgcagtttcttctagatttaaggaagatggctggggaaaaagttcacatcagtattgtggtcattggccatgtcgactttgggaaat

SEQ ID NO: 7565 - DNA, 79 bp, Glycine max
  Clone ID: LIB3087-010-Q1-K1-D8
caggcatatgcgtcaaactgttgctgtgggagtcatcaagaacgtggagaagagggatcctactggagccaaggtcacc

SEQ ID NO: 7566 - DNA, 345 bp, Glycine max
  Clone ID: LIB3087-010-Q1-K1-D9
gaaggcatggaaggttggtgttctcacttcggtcatcaagcatatgtcccctgatattgccaaaattcgcaagcttgtgaggcagtctaagtgtcttcaagacaaaatgactgcaaaggaaagtgcaacctggcttgccatcatcaaccaaaaggaacccttggctaaagagctttaccctgactatggccctccatttccctctgctggaggtaatggatccttggagatcaatgattgcagcgagtatgatgttgatggggccgaaaaagagctgaactttgatgtggaggaccggaagcctgaccatcttcttccatcaaacctcggtatggagagaatgag

SEQ ID NO: 7567 - DNA, 362 bp, Glycine max
  Clone ID: LIB3087-010-Q1-K1-E1
acgcgtcggggacgcgtgggcggacgcgtggtcatctttctcctttctttcatcaccgttggaagagactgagatgggttcaaaaaccaagacttttacctttgaggaggtggctaagcacaatcacaggaaggattgctggattatagtcaaagggaaggtgtatgatgtcacccaatttttggatgatcatccaggaggtgatgaagttttagtgactgcaccagagaaggatgccaccactgattttgaagatattgggcacagtgattcagcaccagagatgatggaaaaatactttgttggtgaggttgacaccaacacttcttccagcacaggttaccagcagcagcagtgtacgc

SEQ ID NO: 7568 - DNA, 300 bp, Glycine max
  Clone ID: LIB3087-010-Q1-K1-E11
ccagaacactggttctttctcccacttcatctccaccttttccctcgtgatcatcgacggggcgagaggcgcctctcaatctcaatccacagcgtcccacgccaccacgcgaccgggcgtgatggctcctcgcggcaccgctgccgccactgccggcatgcgccgtcgccgactcggcggaggaaccagctccgcctcggtcagcggcggctccggcgccggcggaagcaatatgctgcggttctacaccgacgacgcccccggcctcaagatctcgccgacggtggtgctcgtcatgag

SEQ ID NO: 7569 - DNA, 125 bp, Glycine max
  Clone ID: LIB3087-010-Q1-K1-E6
ggcttttcctttcgggattggttcctatggcttctgaagtaatagagtaccggggctttgtcggtgggcttgcttgggccaccgacagcgatgctctcgagaaagccttctctcattatggtgag

SEQ ID NO: 7570 - DNA, 370 bp, Glycine max
  unsure at all n locations
  Clone ID: LIB3087-010-Q1-K1-E9
ctttatttgatgcgttattcaaaaatgattctacatatgctaggatttaaaataggatgacctttgcaatgggtgttgttgggtttcctatccaatggcgtggccccaacccagaattaagtgcatgttacatttgcattttgcaatgcttattggagattaggttaatggtggacaagtaaatatactcttttacacactaaagcattgaagttgtaaattgtgattgctatgatacagtcctcctttntaacttcggnggacaaacagagatccaaagcgtagcattaccgctgttacttgtaacacaaggaaaggtttttgggggaaatgtattacttttgcttgaatttgttggtcaatgagtttg

SEQ ID NO: 7571 - DNA, 317 bp, Glycine max
  unsure at all n locations
  Clone ID: LIB3087-010-Q1-K1-F10
catctgccatccgaggagagttatacaagncctagtgtagagtgcaaaatgctttcaaacaatggaaaaaggtactctaagacaaatgaagatgctttcttaccatacgatgcactacacccaattacgtcacccactccaatcacaccacctaaaatgaatatatctgaaggcaaccaactttcttcacgattagatctaaatgcatcctctgaaaaaactccagaatctgctttgaagagcccctcatctgtattgaacccttcattctcctaaaaagaactattcgagactactttttagcattcttaaaaacc

SEQ ID NO: 7572 - DNA, 400 bp, Glycine max
  Clone ID: LIB3087-010-Q1-K1-F11
ggtgctaacatatctcattccaatttcgttcctcgccggaaaaagaaaacctcaccgcagcgttcgattcagtttccgatggcgccagcgctgaacctcgccgccggaggaattccgctgagtttctcttcctccgtcgaccgctccgccagctttccacggcggtcctcggtccgcgccgtcgcggatgaggcggtggatacgcagcggccggcggcgagcctttacgaggtgctgcgagtcgagcgagacgcatcgccgacggagatcaagtcggcgtaccggagcctcgcgaagctctaccatcctgatgcggcggtgcagatgtcaccggatactgactgcgacggagacttcattcagctgccgaacgcgtacgagacgctgtcggatcccgtcg

SEQ ID NO: 7573 - DNA, 438 bp, Glycine max
  unsure at all n locations
  Clone ID: LIB3087-010-Q1-K1-F12
cccacgcgtccggtccagtggctctatgtgtactctctccggtgttattataaggtccggattaaaagtgtggcttggtccttattataaggtccggtctaaaattttccctgcattaactattttttcacaaaagtgcccttaattaaagttagttctaaaatgaagtgataataagagaaacataactcgttaatgtttgttagttttgttcacaggtaattttggaaaaaatactaatttaggacaaatttaatgctatcaatcaaattaaccaattttctaatagcacaccatcatttatctcatattacataaatgaatagtcattgtcctcaattccttagttggtttatgcatatattnctttggattttgaacaatatatgtgaaatgtgtgtagtgggaaaaggcttgtcgttgttgaatttgggaatg

SEQ ID NO: 7574 - DNA, 337 bp, Glycine max
  unsure at all n locations
  Clone ID: LIB3087-010-Q1-K1-B9
cgacctcgtccgnccgtgtgatataaacctgcgttgcgctaatcgacaccgttttcactgtctctgagaatggaggcactaagtcgctccgtggaagaaatattcgaggatttccagggccgaagagccggcatcatcaaagcccttaccaccgatgttgaagatttctacagccaatgtgatcctgagaaggagaatttgtgcttatatggatttcctaatgagcaatgggaggtaaatttacccgttgaagaagttcctccagagcttcctgagcctgtcctaggcattaactntgctagggatggcaatgctganaaagactggttatcattag

SEQ ID NO: 7575 - DNA, 246 bp, Glycine max
  Clone ID: LIB3087-010-Q1-K1-C10
cccacgcgtccgcgaagacagcgattgagtgtcactacgctgcgagatttggaaattgggtccctaatctaatttcgaggtccaactcctgtggagtgtgtgtggtgctttcaatctgcatgatcatataggcgaatttgggtttagcgaatcatatttgcagagtaaggatggggaaaaaccaagcctacaaagctatgcagaaagccaggttcggcggagcatccgccggccccgacaaggttg

SEQ ID NO: 7576 - DNA, 374 bp, Glycine max
  Clone ID: LIB3087-010-Q1-K1-C11
gtgcatcttaccctctaccctaaacttggtctctactgcagttccttttctaaatacagatgtatgttcataagtgatgatgaatatatctggattatgattgaaatattgaatgcatgatattcatgcatccttttattctaaaggtttattttagttactccgtttactcttacatgtactgcgccttcaaatattgcagtcactgattgacttgagttgatggcaacattcttttatgttctaatacacacattgcatgagacgagaaaagaatcagatgtctcaggatgtaacataattgtacatctcctcgaaaagacggaatccaagttcttggacatgctgattcaaatcaccgctgagctcacttt

SEQ ID NO: 7577 - DNA, 263 bp, Glycine max
  Clone ID: LIB3087-010-Q1-K1-C12
cccacgcgtacgcactggtgaggcttaagtctatggtgtcgaagatgaataccagctggaggatctggagattgttgcagcaaattacttgttgaaagtgggggtgtctaattttaggaatgcttgggaaagcttaggccctgattttgaccgagtggatgagtatggccttggtcctaaacagagcttggctgaagctgtaaacactgttatcaacctacttggcttgaagccttgtaagggcacataggaggttccaccca

SEQ ID NO: 7578 - DNA, 383 bp, Glycine max
  Clone ID: LIB3087-010-Q1-K1-C9
atgtcgaagcgtggtcgtggtggtttggttgggaacaagttccgcatgtcgctgggtcggccagtggcggcgacggtgaactgcgccgacaacacgggggcgaagaacctctacatcatttcggtgaaagggatcaaaggccgtttgaaccgtcttccctcggcctgcgttggcgacatggtgatggccaccgtgaagaagggaaaacccgatctgaggaagaaggtcttgccagctgtcatcgttcgccagcgcaagccatggcgccgaaaggacggcgtctacatgtacttcgaagataatgctggtgttattgtcaatcccaagggagaaatgaaaggttctgctatcactggtcccattggaaaagagtgtgctgattt

SEQ ID NO: 7579 - DNA, 139 bp, Glycine max
  Clone ID: LIB3087-010-Q1-K1-D1
gggacgcgtgggcaagcccgaagattacttatgcgtatgttgctcatagactgagaggtttgaagccatggatccagcaaagagcgtatggcgaaaccatcccacatccacctagagaccaagctaagtccatggagcc

SEQ ID NO: 7580 - DNA, 285 bp, Glycine max
  Clone ID: LIB3087-010-Q1-K1-D10
gcaggcttcaactggagcaagaattttgtgattcctcttcatcttccacctggtgacggatttaccgaaagaacattaaaaattgaagggacccctgaacaaattgagtctgccaaacaaatggttaatcaagtcatcagtggcgagaatcgtcagagaaatccatctatgtctggtggttattctcagcaaggttaccaagctaggccaccgactagctggggtccccctgctgctccaatgcaacaatctggttatggctatgtgcagccaggagcatactct

SEQ ID NO: 7581 - DNA, 339 bp, Glycine max
  Clone ID: LIB3087-010-Q1-K1-D11
gttggtgggctcccaaattcccaatttagtgatgatcttacgtaaaagaaatgttgttggcaccaagggaaaaatgggtatagatttcatgattctggtgttaacattgtcatggtttcgtctgactactatatgcgtctcagctacaaaacaagcatacccaccaacaccacatccgaaccagaacctaaggtttgaccaaaatggagaattcaagatattgcaggtggcagatatgcactatgcacatggcaagaccacgcattgcttgaatgtgctcccttcccagaatttttcttgctctgaccttaacaccactatctttcttaacagaatgat

SEQ ID NO: 7582 - DNA, 231 bp, Glycine max
  Clone ID: LIB3087-010-Q1-K1-D12
caagaatggatgatactggaagtaattcgtaactgtcgaatccatggatgctgcacttggagaaactcgatctcgaactcaagagccctctatgtttgagttagcacaagaggccggtgttactaccatgcaaccactcgtactgcaatacatgtctggctgattgcataacggctgggcctagatgtgctgtttgaacggcaacgtatgctcaaacgaatgtaaggcatg

SEQ ID NO: 7583 - DNA, 289 bp, Glycine max
  Clone ID: LIB3087-010-Q1-K1-B6
cggtcgatcacgcgtccgccacgcgtccgaccttaattttcttctcattcgcttcaaatttcaggaaatgaattatggctcaaccctcaacaagaataggccttgctggactggctgttatgggccaaaatctagcactcaatattgctgagaaaggctttcccatttctgcttataaccgaaccacttccaaggttgatgagactgtagaacgagcaaaacaggaaggaaatcttccagcttatggctaccatgaccccgaagcttttggtcattccattcaaaagcc

SEQ ID NO: 7584 - DNA, 304 bp, Glycine max
  unsure at all n locations
  Clone ID: LIB3087-010-Q1-K1-D2
ctcttcttcgtctcaaacctcttctgtccttcgattcattccatttcttccagaatggtcaaagacccagttcgcgttctcgtcactggagccgcagggcaaattggatatgctcttgtccctatgattgctaggggagtgatgctgggtcctgaccagcccgtgatcctncacatgcttgacattcctgcagcagcagagtcgctgaatggagttaaaatggaattggtggatgctgcattccctcttcttaaaggtgttgttgctacaaccgatgtggttgaggcatgcacctgggtcaata

SEQ ID NO: 7585 - DNA, 433 bp, Glycine max
  Clone ID: LIB3087-009-Q1-K1-H6
cccacgcgttcgagctagctagctagcaagcaagcacagagatggaggcaaagcgaggccgggccctcatgtgcttggcacgtgtttcactcttcctctgcgctctaaccctatccgctgctcacggaagcaccacggttcaagacatcgcgagaaagttgaaactcggggacaacgagcttctgcgcacggagaagaagttcaaggttttcatggagaattacgggaggagctactccacagaggaggagtatttgcgccgcttggggattttcgcccagaacatggtcagagcggcggagcatcatgcgctggaccccaccgccgtccacggcgtcacgcagttctccgatctcaccgaggacgagtttgagaagctctacactggcgtcaatggcggcttcccgtcatcgaataatgccgcccgcggtat

SEQ ID NO: 7586 - DNA, 372 bp, Glycine max
  unsure at all n locations
  Clone ID: LIB3087-009-Q1-K1-H8
tgcttaaggagcagggattcaggggctttttccgtggctgggtgcctaccttgcttggtgacagtgcccagggtgcttgcaaatttggcttctatgagttctttaagaagtactattctgatattgctggcccagagtatgcaagcaagtacaagaccttgatctaccttgctggttcagcatctgctgaggttattgctgatattgctctttgcccatttgaggctgtgaaggtccgtgtccaaactcagccaggttttgcaaggggtttgtctgatgggctcccaaaatttgtcagatccgaaggaaccttanggctgtacaagggattagtgcctctatggggacgacagattccatacacaatgatga

SEQ ID NO: 7587 - DNA, 254 bp, Glycine max
  Clone ID: LIB3087-010-Q1-K1-A10
gtgagaagcccgtcaccggtgtgggtttctgtaaccctgaggaaattccatggggtgaggttggtgctgattatgttgcagaggcaactggtgtattcactgacaaggacaaggctgctgctcactcgaagggtggtgccaagaaggccgtcatctctgccccaagcaaagatgcacccacgttcgaggttggggtcaacgagaaggagtccaggccagagcttgacattgttgccaatgctagctgcactacc

SEQ ID NO: 7588 - DNA, 343 bp, Glycine max
  Clone ID: LIB3087-010-Q1-K1-A11
ggggctctcttttccgcgaatccaatacctctcccaacccctccctctctctaggatgatatctctctcttccgcattccaccgttcgctctccgcgaagacggaactacgcgggttttccatgactgcgcgaacatcttccgtcactctcccgacaaaatcacgatacgctatcctcttccccctctccgctcattcgcattctccgatgctttcttccgtcccggattttgatacgttcgaaagcggctaagggtattgataggttcgcgatttcggtggagaaagagagggacggagatagatagatagagagagggagaaagagttcggtagggttttt

SEQ ID NO: 7589 - DNA, 316 bp, Glycine max
  Clone ID: LIB3087-010-Q1-K1-A12
cccgcgcgtccgcacacttacactattactcatgcattactctcactcaacaacaatgttggcgccagcgggaaccatcgtattcaacaccgtcggaggagtccaatacggtttcgaccgttttctctgtcgacctcaatcaccaacagcctccgcccaacgccaccgcagaccaccgcctaaccgacggtgtctcgattaacttcaacgcacaattcattaacccccaaaacgacgtcgtcttcgtatccgaaagaaccgggtcgccccgcttctacattacaaaacccgacactaaaccccagcctttaccctt

SEQ ID NO: 7590 - DNA, 252 bp, Glycine max
  Clone ID: LIB3087-010-Q1-K1-A4
ggatccccaacatcactagctagctccttttgtacacactctacaaccccacgtagctacatcacttaattagttttcccatatctataaccaatttcaaattctcacccttaactagctagctatatttcataactgattattaccaactcactacatattatgggctaggattcaccattggacttaaaagtagtggattaataatatatataagatgtctagcaggaggtcacggtcaaggcaaacaag

SEQ ID NO: 7591 - DNA, 352 bp, Glycine max
  Clone ID: LIB3087-010-Q1-K1-A5
gtctatcgactcgcacagctcaactacaccataccacacacaccaacaacatgtctctctctctctctatctctcgctgtcgcttccgacaccgtctccgacgcgaatgccaccgtctgcggccactgctctccagctgatgaaatgaatggagcgcagaacagaatggttcacaatgttgagaaaccttttccaggatgcctgggaagagtgctgaatctctttgattagaccggaggcgtaaatggaaacaagctactcacagacaggcctcatcgcgatgcatcttcactctccagaaggcaatcagatgttgcaaggatcatgagttctaccttgggtgatcagatag

SEQ ID NO: 7592 - DNA, 92 bp, Glycine max
  Clone ID: LIB3087-010-Q1-K1-A7
ccccaaccccaactccaagctaggtcatcgtcaattccgaagtcgaacggcacagacgcaacgaaacccctcaccgaagccccagggatgaa

SEQ ID NO: 7593 - DNA, 447 bp, Glycine max
  unsure at all n locations
  Clone ID: LIB3087-010-Q1-K1-A9
catggatatggaattctcgtgtgattanctctttggggattgctcgtgctttagagtacctacatgaagtttgttcaccatctgtngntcataaaaaatataaagtcggccaacatattgcttgatacagattttaatcctcatctttccgacagtggattggcaagctatattccaaatgcaaaccaggtattgaacaataatgctggatctggatatgaagctcccgaagttggcttgtctggtcattatactcttaagagtgatgtttatagctttggagttgtcatgttggaacttcttagtggacggaaaccatttgatagctcaaggccgaggtctgagcaggctttggttcgatgggcaacacctcaactccacgatatcgatgccctggctaaaatggttgatcctacattggaagggatataccctgtgaagtccctt

SEQ ID NO: 7594 - DNA, 274 bp, Glycine max
  unsure at all n locations
  Clone ID: LIB3087-010-Q1-K1-B1
tactgcgcaagtaaaagagattcaatgtcaaattgctgtagaagatgggatgtacttgctgattttttacaagttttctgagatcagggtccctatggttccaaagctttctagtggnctttataatggcaggctaaagatatggccttctaaggactgggaactagagtctattcatagctcggaagttttggatatgataggggacacataactactgtaactggcttgagagcaaaatctagtgtaactgagtgttgggcaacaacccaag

SEQ ID NO: 7595 - DNA, 371 bp, Glycine max
  Clone ID: LIB3087-010-Q1-K1-B10
cccgcgcgtccggtccagacgagactgcatatttccgcatgttgttagacagggaaaaggttagtaatgctgccgttatgattcagccgtcattgatatcgtatccattaaatgcactgcctgcaccagcattgttagatgtggcttccattgctgcagacaggattttgttgctagattcatattgcagtgtggttatttttcatgggatgacaatagctcaatggcgcaacttgggataccagaaccaacatgaacaccaggcatttgcacaactattactagctccgcatgacgatgcccaaatgataattagagaacggttcccggtgcctagactggtagtgtgtgaccaacatggttcccaagct

SEQ ID NO: 7596 - DNA, 260 bp, Glycine max
  Clone ID: LIB3087-010-Q1-K1-B12
atcacttagagcgtctccaacaaatttcgatatgcaacaatgccggaatcacccggcgggggagacgccggcgctccaccgcagacgacggagactgagaatcgcaaaaccgaccaaaccgccgcggatcctccggtcctctcaaagaacgcgcggaagaagctggcaaagcaccagaggtttgaggcgaagaaggcggagaagaaagccgcggcgaaggagcagaaccgaaaagacgtatagagaaagcgcagggagtg

SEQ ID NO: 7597 - DNA, 112 bp, Glycine max
  Clone ID: LIB3087-010-Q1-K1-B2
gggacgcgtgggcgcgtgagtgtgtagaagagacaaaggtgcagttctgggggttggcggtgaagaacagaacacacacgatggggaagaagaaaggtaccagttatcaaaa

SEQ ID NO: 7598 - DNA, 258 bp, Glycine max
  Clone ID: LIB3087-009-Q1-K1-H5
cactatctatacacaaacaacatggttcgctacattgaaggctatgttcagaaggtgaaccgagggaatgcacctttagttgttgggcagctgctagatgatgaatgcgcagaagattttatcaaaggcttgatcctttctgttcgttcattactgccagtggagccccttgtggaggaatgtgagaagaggaatcgacttcgtatgctcacacagttcttggaacaccttgtaagtgaaggaagccaggatgtacat

SEQ ID NO: 7599 - DNA, 290 bp, Glycine max
  Clone ID: LIB3087-010-Q1-K1-B4
cggacgcgtgggcggacgcgtggttcgtcagctctcaatcccattcggaacgaaatttcaattccaccaaaaaccctaatttcctttctctctaactcttagatcttcacgttttagggctttctccaccttccgcaatgcacaaattgggaagaggtcatcgtgacaaactccagcagttcataacaataactggagccagcgagaaactagccctgcaggctctgaaggcttatgaatggcatcttgaaaggacctttggattcttttacaggccaacccaggttaaa

SEQ ID NO: 7600 - DNA, 385 bp, Glycine max
  Clone ID: LIB3087-009-Q1-K1-F9
attcccggctggacgcactcatacgtaaacacttcccaaaataaacttttgccctagcaaaaaatttcacctttagaggcaaaagagaaaattttaatgtcgagcggttgtctaaaattcacatctgtttctacaactatagtattcatatccaccactaaacatattttattatttaaaaaattattaaatctcaacctaactaactattctactatcataaaatcaaattcttcacatactcttcataaaaatcatctctactcatttatattacctcacatgactccaatgtacagatattcatctgttgccacatatactgtgtctatgccttctcaaaagctagaattcattggtgcaatactacatgagtggcttttaa

SEQ ID NO: 7601 - DNA, 413 bp, Glycine max
  Clone ID: LIB3087-009-Q1-K1-G1
ctatcgtaatcgatcatactaaccaccggctcttatttaaatgtgcgggagcatgaccgctttgaaatcatttccaacgaccatgggaacagaaccacgccgtcttacgtctgattcactgtcaccgagcgtcttatcagtgatgcagcctagaatcaagtctacatgaaccccatcaacaccatcttctatgccaataggatgattggtcgtagattcagtgattcctctgatcatagtgatatcaaattgtagcctttcaaggtcattcctgttgctgctgacaatccaatgatcgtggataactacaatgatgtaaagaagctatttgtcgcagaagaaatctctttcatgctgctcatcaagattcgtgagattgcttaagcttacctatgcttcacaattaagaatgc

SEQ ID NO: 7602 - DNA, 336 bp, Glycine max
  Clone ID: LIB3087-009-Q1-K1-G10
acccactcgtacgcatgacaattattaaccactttcaacccctatatttacggttaataatccagtccttagagaaactacaccatttatgacacttccttccacatctaaactaccaaacgataaccaaaaccctaagaatcatgaatccagcataatacattctgttactagacaacaccttcaagctaatcatcttctacttactcactaacatctaaaaccttcttttcattctgctgaacaactgcttaccactcctgtcaacatacgtactgaccttctcaatgcccaatccagaaacttaggcaaagcttcgaataataaacaattgga

SEQ ID NO: 7603 - DNA, 484 bp, Glycine max
  unsure at all n locations
  Clone ID: LIB3087-009-Q1-K1-G2
aacagataagggcgctctccgtaccatcttcctaatcctccttacatttgcagtgttcccgggtctcctacccactgaagtcgaacccctatttttcctctccctaatggcttctcaagttcttcttcagcaggcactgtttgcccccaagctaagtttcccttcttcttctcgtaacgtggcgttaatttctagggttccttccaccccaatttcatggcgttgcactcccctcattgctaagcctagtttcgtagtgagagctgacaccaacctcgatggcggtggtgaagccaccgaggatgttccttcggataatgctgaaaaagtttcggaaggcgaagcagaacaagtttcggattctgaagctccgaaatcgcctagaaaaccccgagtcaaactcggagacattatggggatattgaatcagagggcaattgaggcatccgagaagcaaagaccaacttcagacattangactggg

SEQ ID NO: 7604 - DNA, 273 bp, Glycine max
  Clone ID: LIB3087-009-Q1-K1-G7
aagaagctcagaggcttcatcgctgagaagagatgcgctcctctaatgctccgtttggcagggcactctgctggaacttacgacgtgagctcgaagaccggtggtcccttcggaaccataaagcacccctccgaactcgctcacggcgctaacaacggtcttgacatcgctgttaggcttttggagccactcaaagcggagtttcctattttgagctacgccgatttctaccagttggctggcgttgttgccgttgaagtcaccggtggacct

SEQ ID NO: 7605 - DNA, 374 bp, Glycine max
  Clone ID: LIB3087-009-Q1-K1-G8
aaaaaaaactcaaacaccttcaagaacttgtctctctctttgatagtatttcttactgcagggttacattctttggatctctacatattccattagtcatggcacctcaagcagtctccttcaagtccttcgccgctgctcttattgtggcgcttttcttctccgactccgctctggacttagtttccgcgcagtccccggtgcccggatccgcgccggcaccatgatgccggagcagctggatccgtgtccagctcggtcgccatgataggagctttcgctgggatttcattgctcgccagtcttaagcactgaagaataatctgatgatggatcgaatttgagtgaagattattgactcgctctggacactc

SEQ ID NO: 7606 - DNA, 382 bp, Glycine max
  Clone ID: LIB3087-009-Q1-K1-G9
ccggctggagccactcgtacgtcagaactgatctatttcccttctccttcttacttctgtcgttctctctgcggcaaatcgaaaaactcaccaaatcgcggggccaaattgcaatttctcgagcgaactttgcgagttctagggttcccccactgccatggaccaggccgaattaacctccgaacaggttctgaggagggacatcccatgcacaaagatcccatattctggcgagaaaatataaacaactttgaagaaaatgatttccagatcctaagggtcctaataacaattttggacacgtccaatgatccaaggactctggctgttgcttgctatgacctttcacagtttatccagtgccattctgctggacggatca

SEQ ID NO: 7607 - DNA, 348 bp, Glycine max
  Clone ID: LIB3087-009-Q1-K1-H1
atacacatacaacatatttcgctacattaaaggctatgatcaactctctagcgcatgcatttcaccttaggatggcattcatctcctatatgatacatttacgcatataatcccatcaaaggctctgatccttattactcgttccttactcccaataaagccccttcagctggaacgtaataagagtaatctactggccctgctcacacacatatacaaacaccttaacactagagacacccagacaccaacatcgtaacaatgcactctgaaaaattatcattgactacagcaccatcccacaacattacttaacctacatcccatactatgaatctacaattatca

SEQ ID NO: 7608 - DNA, 347 bp, Glycine max
  Clone ID: LIB3087-009-Q1-K1-H2
gttgcgtatgatgcagagggggtctaattgggggctataaggtaaatgcaggagctatctgcgtcgtcgtggttgtgggtcccgttcgtgatcttcagatattgtgggagtgtcttgaaagaaagcgctcccaaaaaaattgtgcaccctcgattatttgaattgaagataaataagagaataaggcgttgttttgttgtgttgcgttgcgttgcgttgtgtgggtgtgaagctgggaaaatggggagagcctttgtgtatgtgattcttggaggaggcgtggctgctggctatgctgctcttgaattcgtcaagaaaggagtctctcatggtgaactgtgtattat

SEQ ID NO: 7609 - DNA, 388 bp, Glycine max
  Clone ID: LIB3087-009-Q1-K1-H4
cttgagatctcatatatcatggctacctccatggtgaagcttatgcttttctctgctctcatactcttgtccttgcaagcagttgtgtctgtaacaccactgcattttcaacatccactagaccctttaaccaaacaagagataagtcttgtccaaaccatagtccaaaacaagtacccaagctcaagtaacaggttgagcttccactacattggactcgacgaacctgaaaaggatgccatcctcaaatgggaatccatcaaaccaactgttataactgtccctcgcaaagccttggccattgttataatcaacagccaaacccacgagatcttaattgatctaaaggcaaggcgcattgtctccgacaatattcactccgggaatg

SEQ ID NO: 7610 - DNA, 279 bp, Glycine max
  Clone ID: LIB3087-009-Q1-K1-E12
ttccccttcttcccttcccattttttaacttaaaaaaaaaaccattattccagaaatactgcaaatttttaacaatctctcggccttctaacaaccaccacctcctccattcttatctccatcttacctactatccctactactactctactctatttacacctattatcaaaaaactatccccctaccccaaataaaaaccccaaatcatttcccttatcttttattcttttaccaatttctcataactaaatttttatcctctaaaatctaattttt

SEQ ID NO: 7611 - DNA, 319 bp, Glycine max
  Clone ID: LIB3087-009-Q1-K1-E3
aatcctcaccacgctcccgcaacaccgactcctgggacgagcccttctcgccggcggcggcgaagctccgactcatgtgcagctactgaggccatatcgtcccccgcccccacgacaagtgcctatgttacatctgctgcgactcacgcatcatcgcctacgaaccccccacctcactgccggacctgtccacgcgcctatcataaacattactgaacggaagacccttcacgctccagtaccatgtccccaaccaggacctctattccctcatatgcgtcaccaccgacgaagacctccagaacatgatcgactcgta

SEQ ID NO: 7612 - DNA, 185 bp, Glycine max
  Clone ID: LIB3087-009-Q1-K1-E9
cgacccactcgaactatattttttcattccacattattttccgtgttccaaacaatgaatttaattatgatctttggttttttttacaatcttcaaattctaaatctcataattttaagcttcaatcttcaccattattccagtcttattgttcccatcaatactccccaaaaaacttccaaacc

SEQ ID NO: 7613 - DNA, 432 bp, Glycine max
  Clone ID: LIB3087-009-Q1-K1-F10
aagaatttccattgcatgcttagcagattctcattatattactagttttagtttgttggatcgttttcttctttgtttgggtaatgatgactagctttaaggttgcatgtgtggttgcgatgatgtgcatggttgtggccatgagtgttacacccatggcacatgccgcaatcacgtgcgtgcaggtcgtcggcgacgtgtctccgtgcctcagttatcttctaagcggctgaaaaccatctgacgcctgctgcaactgagtgaagtcactcaacggtgcggcaaagaccaccgccgaccgtcatgcatcgtgcaattgcctgaaaaaccttgccaataatatgggacagagtttgaatgccggcaacgcatcctctcttcctggcaaatgttgcgtcaacatcccttacaagatcaacaccttcaccaact

SEQ ID NO: 7614 - DNA, 385 bp, Glycine max
  unsure at all n locations
  Clone ID: LIB3087-009-Q1-K1-F11
tcccggntggacgcactcgaccgccggcacttatcaatttaaactcttgtccttaacaaaaaacgttctctctagaggcaatagagaaacttccaaattggggcgccaaactacaattcatctatcgaactacacaaatactatggatatccaactgtcatcgaccattaccaattaacctacgaacagatcctaaccatggacactatattcacaacgatcccatattctgtcgacaaaatataaacaactatgaacaatacgattttcagatcctaaacatcctaataacaattcataacacgttcaatgatccaaaaactctggctgatgcttgctataacctttcacagcatatccactgccattctactagaccgatcat

SEQ ID NO: 7615 - DNA, 354 bp, Glycine max
  Clone ID: LIB3087-009-Q1-K1-F12
atagtattaaccacttttaacccctatattaatggttaataatcgagtccaaaggtaaactatcaaggttgtgaagttacataccactacttaattaccaaaatgtaaccaaaattataagaatgtggaatccagcatcctacatcctgtaaatggacaaaatcttaatggaaatcatccttcaatacctgacttagaatgaaaacctttcttttgttctactgcactaatgttcattgctcctgtcaacatacttaatcaagttcataacgcccaatccatgaaattacgcaagtcttacaataacaaacaattggacgttaattctttaacctcaaataatccaaattataa

SEQ ID NO: 7616 - DNA, 379 bp, Glycine max
  Clone ID: LIB3087-009-Q1-K1-F2
atccactccatcctgttttctcaccctagtaactatgtctcctcctttcgcctcttcaacgttgtctctctctccctagttgcatgttttcccatgttcaataataataataattctcactaatctcaaccttgttcagtattcaatttgattaatgacaccaagatccaagcacaaaattaaaacttgggagtgtgtgattattattccaaaatgaccccaccccacacttagtgttatgataacttggaaccttttgcacgcaagaataagctgtacacacgcaagaatagcgctattattatttcttcattttttggtgttgtgggtcaaagaagtagcacctggaaaccctgaatattcagcctgtgatatgggg

SEQ ID NO: 7617 - DNA, 344 bp, Glycine max
  Clone ID: LIB3087-009-Q1-K1-F3
tttgattttgcgagagaacggaacaacaacaacaacgatcaatgattcgaagccttgctctgcacttggctgcacgattccgacacaaccacaacctcgtgcgtctttcttcttcttctttctgccgcttctgccttcactcttcatcatgccactccctctccttcttcctctgagcccgttcacatcacccaaaactgcgttcgaagaatgaaggaactggaaggtagtgaatcatcaacagatggaaaaatgcttcgtttgagtgtggaaactggtggatgttctggattccagtatgtttttaatctagataacagaatcaactcagatgacaaagtttt

SEQ ID NO: 7618 - DNA, 304 bp, Glycine max
  Clone ID: LIB3087-009-Q1-K1-F7
cccacgcgtccgatccaatttctctctggattgagaagactactgaaaaggagatttctggggatgaggatgaggaagagaagaaggatgaggagggtaaagttgaagatgtggatgaagataaggagaaggaggagaagaaaaagaagaccattaaggaggtatctcacgagtggtcattggtgaacaagcagaagcctatttggatgaggaaacctgaagagattacgaaagaagaatatgctgctttctacaagagtcttaccaatgattgggaagagcatttggctggtaagcacttttc

SEQ ID NO: 7619 - DNA, 416 bp, Glycine max
  unsure at all n locations
  Clone ID: LIB3087-009-Q1-K1-C5
agcttggcaaacaaaatcctcatcttatgcgattgattcaagagcatcaagttgactggctgggcctaattaatgaacctgttgaagggggtgagggaaatatactgggacagctggctggtgccatgccgcaagcagtgactgtcacccctgaggagcggcaagcaattgagcgtctcgaagcaatgggttttgatcgtgcaactgtattggaggtgtactttgcttgtaacaaaaatgaagagctggctgccaactaccttttagatcacatgcatgagtttgatgaataattagatctcctttacaatttgtcaaaatatttggtttatggttccttttgaatggtctttngtatgtaatgaagggtatatttgataatgacaagtctcgaatggacaaggaatattttaatc

SEQ ID NO: 7620 - DNA, 335 bp, Glycine max
  Clone ID: LIB3087-009-Q1-K1-C7
tccacgcgtccgaacgcaaccacatcactctttctttcaaatctaaggtttcctccttggtgaaccatcaatgtcggcaatcgcggcttcccaacacagatcctcgaaaacagagtcctacgttgacaataagcgcaaggaggatatccgccatgccaacatcgtggccgcacgctcaatcgccaacgcggttcgcaccagtctgggccctaagggcatggacaagatgatctccaccttcttcgacgaggtcatcatcaccaacgacggcgccaccattcttaacaagatgcaggtccttcagcccgtcgtcaagatgctcgtcgagctcttca

SEQ ID NO: 7621 - DNA, 457 bp, Glycine max
  Clone ID: LIB3087-009-Q1-K1-C8
cccacgcgtccgctaaaggtgaatatgatgagtctggcccatccattgtccacaggaagtggttctaacttctaagtacaaaatatgcttcaatggtgaaatatttttcgcaccagttgtttttatgggtctgtgtcatgtcatgttaacgatattgccatggataagaggtgaggaaagtatcattaaaggagggtctattctttagcttgatgcatcatattttgtgtggggggcagacagttagagagaggcatttcttgcgtttggccatccgtggttcatctatatcttcttagtaggttgtgttgtagcaagggagtgattgtgatgatctctttttcccccattttctttttgtatttttaaagtttacatttgaaggatttttccccttggaaaattgaatcattgatgttaatagtcatatgtttcgagaaatctctatattattgtt

SEQ ID NO: 7622 - DNA, 376 bp, Glycine max
  Clone ID: LIB3087-009-Q1-K1-C9
ctgatcgataaatgcagcatttatctgctttaccttttatcaaaacttataggtgtacattaaaatctttaaggcatgctatggtcctcttaatctaacatatctagcatctcaagggctatacaaatacaccctggtggtactccaaatctttcaatgttgggcatggctaatacaatgcagcgaccaattggacctattggtccaccgaagattattgctgggatgaatctttatattagtcatcatcatcagcatcaacatcaacaaccccaaccccaacaacaacatcaacaacaccaacagcaattgcaacttcaacagcatattcatcaacaatttcaacatcaacaactaccagaaacaactttacaat

SEQ ID NO: 7623 - DNA, 275 bp, Glycine max
  Clone ID: LIB3087-009-Q1-K1-D10
gtatcccaagatgtcctgcctgacttgactgatgcattcgatcgaaatattttgagcctttaaaatgatcagtgggctgaagtgcacaaactctatgaaggtggaattacactacctacaaactttcttagcaagatcgcccctataccagtgatcaatgaaatttttccaactgatggcgaacagttcctcaagtatccaccacctaaagtgatgcatgttgataagtctgcattgattactgatgaataatttgccagaaaaactattgcttg

SEQ ID NO: 7624 - DNA, 285 bp, Glycine max
  Clone ID: LIB3087-009-Q1-K1-D3
cattacccaaaacactttccgccgttttatcaaatacaccggagaacaacatcaactatatctctaaacgcacactcaaatacaactacacttttaacacaaacccaaattctcatataactccccaattttcctcacctcacaatcattattaattccattatactcgtacaaactacaattacacccagccaacacttcctctaaatacctctttacttcatttcactaatcatatttttacacatacaaaatcactatgtaactacatacaataccactttt

SEQ ID NO: 7625 - DNA, 437 bp, Glycine max
  unsure at all n locations
  Clone ID: LIB3087-009-Q1-K1-E1
actcccncgttccggaatttccttttcgaccgcacgcgtacgcccacgcgttcgcccacgcgtccgattttctcattctctgtttcgctttcaccgagtaactgcgctttccccaacttcacctgagaaaaagatacccataattcgcacgcacgcacgcacgcacttgttctgactcagtgcttgtgttggacgcagaagaaccagaaaagaaaaacaagcacgaggagatgattaacttcgaagaaaccgagttgcgactcggactacctggcgggtctgcgagtgatcacaacgagtcaacaacggtcaagggcaatggtggaaagagaggcttatctgaaactgcttctgatgatttgaagcttaatctttcttgcagtgatgactctgcctcagattcaccttcatctgcgtctacagagaagactaccact

SEQ ID NO: 7626 - DNA, 384 bp, Glycine max
  Clone ID: LIB3087-009-Q1-K1-B10
cactcgtatcctgacgcgagaattcatactattagacttatgcctttgcaatttattacgcggctactgattacatttccaactattggtactctttgtcttggtaatgctttcttactaagacaacgcttcattttaacatgctagtgcatacctaaacctgtctgctttgccatcatcaacaatactgatccgacatccaattgcaagatttcaacgtcaatctacagattttaacctttcaagatgaaaagtcaataatgtgaagaccgaattggttaaattgcattcacagcatattgataaaacaccctatcatattgaatctgctatccattgtacaaagtattttaacccttcagaagctatacattatcgcattat

SEQ ID NO: 7627 - DNA, 423 bp, Glycine max
  Clone ID: LIB3087-009-Q1-K1-B12
atacatttcagcctctcaactatcaatttctactccagcctcctggatatatattaaatccaggcagtccttatcaaatttattgacgtcttacttgatagtctttattgaacatctattgcttccactatttctgtgtaaaatgtcagactcctttgactaacccgactttcaattctcatatttgttcaaatttctgctgactttatgatattcttctctattttacgaaaattcttaacccaattttgcttctataccctttccaatatttgctgcactgtactgtattctctttatcctttttgcttaaattgaatatcaattcttcagttcacaaacattaactccatataaaatcttattatcattttactcacacttttccttgaaatatctattcctcaattttttaatcaatac

SEQ ID NO: 7628 - DNA, 239 bp, Glycine max
  Clone ID: LIB3087-009-Q1-K1-B5
accacgcgttcgctacgaggtctctccaccaccatctccattactcctatgcgtccaagagggcaatcttcctctggctctctgcaactaccgcccttgtcctcatcctccaccttttccgcgcctccctctccactcactatttggccattgtcaccaactgggtcgacaccaacagcgccccttcttaatccgaatctcaccggcataccttacaacaacaacgacaactacggaaa

SEQ ID NO: 7629 - DNA, 378 bp, Glycine max
  Clone ID: LIB3087-009-Q1-K1-B8
ttcgcggtgtgagtgagacggagagtgctaagcaatcgtcttctcttctcggagcttgggtgtgcttatcgattctctgtcctctcgtttctctaattccaaggtttgtaaaagatggcagatgccgaggatattcaaccccttgtttgccgacaatggaactggaatggtcaaggcaggatttgctggtgacgatgctcctagggctgtctttcccagtattgttggccgacctcgacatactggtgttatggttgggatgggtcaaaaggatgcctatgttggtgatgaagcccaatccaaaagaggtattcttactctcaagtatcccattgagcatggtatagtcagcaactgggatgacatggaaaagatctg

SEQ ID NO: 7630 - DNA, 416 bp, Glycine max
  Clone ID: LIB3087-009-Q1-K1-C11
caaacatccctcttgatttgaatgttgttttgtgcttatagataaaagttctgccaaatgaggatgttttttcagatcatagtgtgtgtgtgtgtgttaaacaatggctaagttctttgctgctatgatcttggcactcattgccatttccatgcttcaaacagtggttatggctgctaatgagcaaggaggccacttgtatgacaacaagagcaaatatggaagtgggagtgtcaagagataccaatgcccatcacaatgctcgaggagatgtatccagacccaataccacaagccctgcatgtttttctgtcagaagtgctgcaggaaatgcctgtgtgttcccccggggtattatgggaataaagctgtgtgcccttgctacaacaacttggataccaaggaaggaggaccca

SEQ ID NO: 7631 - DNA, 298 bp, Glycine max
  Clone ID: LIB3087-009-Q1-K1-C12
tcccgtctggagccactcgttcggggtttttcttttggtcctgggtctgagttcgcggtgtcccctaacccatgggtcagagaattatctgctcgcggtgtggggtgtgtggctgctgctgtcacaagagaattttgcacatgacattttgatgagaagacaaatagatggaaaaatgtgctatgatcaattggtgcgctcttgattcattatcaggagatgcacatgcagcacgtcatgctattgttaatgaacctgttgccgatattttgggagcgcattattatgggttctttaa

SEQ ID NO: 7632 - DNA, 382 bp, Glycine max
  Clone ID: LIB3087-009-Q1-K1-A8
caccgtgccaacccatacttccaaataagcctaatgaagggagtgtcaaaaggagaaatgagaagaaacgcatgaggcaacgccgtgcctttatattggctgaaaagaagaaaaggaaggctcagctgcaagaggctaatcggaagaaaaatattcagagggtagaacgtaaaatggctgcagttgcaagggaaagagagtgggcagaaagactggctgagttgcagcgacttgaggaagagaagaaaaaatctatggcttgaatttgtgaactttctaaacactgttgctttattttaaaaatgttctatggtttctgttatttgggagactgataggaatattatcacggggtccaagcccaaatcgaaatggaatgagc

SEQ ID NO: 7633 - DNA, 259 bp, Glycine max
  Clone ID: LIB3087-008-Q1-K1-G8
tttttaacttctacctccactttttcgcccacgcgtccggtggttccgttggcggaaaatccagaagagggaaaagaacgttgttctctctgttaacgacaattcgattccattgggtgctgctgtgtgtgctctcagttcccaaatcaaatctcaatagtagtactactattcataaatcattgcattggttcactttctctgggttgcgttctgctcctttgggcctggccatggctatggcagcaacggctgtggt

SEQ ID NO: 7634 - DNA, 409 bp, Glycine max
  Clone ID: LIB3087-008-Q1-K1-H10
ccgggtcgctcacgcgtccgcccacgcgtccgcttgattcttttcgcttctgttctcttggttgcaagatggttggaacatctaagaacttccagaagaggaagaagcagtcaatggcaatgtcatcagattctgaggactcgtacagcagcaacagcgtccatggtcttaagaaaaactgcaaagtccagagcttcacaccatccacaccaccctcaacttcggttaattacagaacggccaagagaagaaagggaataccacaccgtgccccaatggtgggactaatcatagaatattagtgatagtgggtatttttaggctatttgctataatgctcttaggtagtataaaaatactactatactaatgcgagtgtttcgacgtcgtttcatcaaaatccaatact

SEQ ID NO: 7635 - DNA, 389 bp, Glycine max
  Clone ID: LIB3087-008-Q1-K1-H12
gcgtgcgccatggcgtgcgggcgaatcgggtgagccgaggatggtgatcggttctgggcccactctcgatgaagctaaggaagccaccgcagagttgaaggacgctattgatcaagtatatctttgtcctgagacttctcaatattcatctcccggtggtcaagtctctgctttgtctcccactctctatgggccagtgaacagatcttgtgtcattgatgctatttcagatcctacggccccaaagcatgccattcaggcttttcatttgcttagcactagtcgtgaggcccaggctgttgtggcttcacttgcttgtgaccccaatgtatggaatgcagtcatggaaaattctgctgtcagtaagttctttcaatcacaacagtcag

SEQ ID NO: 7636 - DNA, 101 bp, Glycine max
  unsure at all n locations
  Clone ID: LIB3087-008-Q1-K1-H2
acgccagtcacgcgtcggggganatttaacttctagcttgcataaatcatccacgcgtccggtggttccgagggcggaaaatccaaaagagggaaaagaac

SEQ ID NO: 7637 - DNA, 251 bp, Glycine max
  Clone ID: LIB3087-008-Q1-K1-H3
ccgacgcgtccgtggacatgaacaacgatttcaacccaaggatcagcttcctgggaagagtgctatcgaaatcatgctcttgataccgagatgtgagtattgagaggaacagcaccagtgaggtgacagaacagcaacgagcaatgagagatgcaatggcaaaggctttgaattctggcctgtcttcaagggttggggcacctggggcatctttgaagttgccgggaatggtggtggatgtggaaaaggct

SEQ ID NO: 7638 - DNA, 190 bp, Glycine max
  Clone ID: LIB3087-008-Q1-K1-H5
aagggcaaccatgtactagtctctcaccgtgtgagaccacagcatgagaacaaacaggtgcagaaacagcaacagcctatgaatatgttatctccagaagctggttcatccagtgttgagggtgcatacaaggactcatccacatctaaacacgggaggagaactacgacgcatacgattgcaactccga

SEQ ID NO: 7639 - DNA, 302 bp, Glycine max
  unsure at all n locations
  Clone ID: LIB3087-008-Q1-K1-H6
tcgtccgaccgctgacgctttaacttctagcttgcataaattatctgctaaattactttagcactcgctgagttttctgcaactcaacttggtgatgtctttctttgtaaggaagtggtatccagaaaagttttggttgatcagggtcataggcaagtggttgaacttgaccaagcagccattttggaaatttctttggtggtccgggactatatcgattaatgttttggtagatcaaaacaggagaagaccactctatgaagttcaagcanaccaaggctggattcatgaaaaaaatttga

SEQ ID NO: 7640 - DNA, 201 bp, Glycine max
  Clone ID: LIB3087-008-Q1-K1-H7
ctagtgcatttctaatctcattctccttttgtttaaacactctctctcatggcatcagataagaagattaggatcggcatcaacggatttggaaggattggccgtttggtggccagggttgcccttcaaaggaatgatgtggaactatgtgctggcaacgatcctttcatcaccactgattacatgacatacatgttcaag

SEQ ID NO: 7641 - DNA, 359 bp, Glycine max
  Clone ID: LIB3087-008-Q1-K1-H9
aatcaatcagcctatccgtcttgtggttggagagatcggaggggagagcaggcatggcgcatcgagtagaccacgagtatgactatctgttcaagatcgttttgatcggagactcaggtgtaggcaaatccaacatcctctccaggttcactcgaaacgagttctgtttggagtccaaatccactatcggagttgagttcgccaccagaactcttcaggtagagggtaaaactgtgaaagcacagatctgggacacagcaggtcaagagcggtaccgtgccattaccagtgcttattacagaggagctgttggtgctctacttgtatatgacataaccaagaggcaaacctttgacaat

SEQ ID NO: 7642 - DNA, 400 bp, Glycine max
  unsure at all n locations
  Clone ID: LIB3087-009-Q1-K1-A3
gtggtactgttaccatgtggaagccaaccagtgcttctcctcttgtcaagatgctatgtcatcaggggcctgtctcagcactggcatttcattcaaatggcctcttgatggccactgccgggaaagataaaaaaattaagctttgggacttgaggaaatttgaggttcttcaaaccttaccaggtcatgcaaatactctggattttagtcaaaaaggcttgcttgcttgcggtaatggttcattgatacagattctgcgtgatgtttctggtacacaaaattattccaagtatatgactcattccatggtgaaaggttaccagataggaaaattggtatttcggccatatgaagatgttctaggcatanggcattccatgggctggtctagtattcttac

SEQ ID NO: 7643 - DNA, 402 bp, Glycine max
  unsure at all n locations
  Clone ID: LIB3087-009-Q1-K1-A4
ctcttgggagaagaggtcgagtttcacagcagcaatggtgtacgtcaaggctcagaaatcaggggcctacttcaagagatatcaagtcaagttcaagagaagaagagagggaaaaaccgattaccgtgccaggattcggttgattaatcaggacaagaacaaatataacactccgaaataccgatttgttgttcgctttagcaacaaggacattgttgcacaaataatatctgctagcattgctggcgatattgttcttgctgcagcatatgcacatgagctgccacgatatggtcttgaagtagggcttacanattatgctgcagcttattgcactggtctnctgttggcccgaagagtccctcaaacactttganatggatgaggagtttgaaggaaatg

SEQ ID NO: 7644 - DNA, 185 bp, Glycine max
  Clone ID: LIB3087-009-Q1-K1-A5
ctcactctttctatcacctttattttgaactactcaacggctatgcaggcttttattgatgggccatgtcatagacatgtacgtaaagcacatgctgattcatgaatcacactgcatcttacactgggattcatctactatgcatttacactctgcgataatggcctaagaagcttatctctgcc

SEQ ID NO: 7645 - DNA, 320 bp, Glycine max
  Clone ID: LIB3087-009-Q1-K1-A7
cccacgcgtccgctaccattttccatttcttctgtgtctgaaaaatttctctttcttggctgcgtgttttctccttcttgtccgcttcatcgcttgccaattcaagttgcttgacatggctacgcatacgcccaaaaatatcctcattactggagctgctggattcatcgcatctcatgttgcgaaccgtcttatacggaattatccccagtacaaaaatgttgttcttgacaaactcgattattgctcgaatctgaagaatctcattccttcaaaatcatcttccaacttcaagtttgtgaaaggggatattggaagtg

SEQ ID NO: 7646 - DNA, 149 bp, Glycine max
  Clone ID: LIB3087-008-Q1-K1-F2
aagaatgaaaggatcggcagcaacggatacggaaggattggccgtttggtggccagggaagccctacaaaggaatgaagttgaacttgttgctgtcaacgaaccattcatcaccactgattacatgacatacatgggcaaggacgacac

SEQ ID NO: 7647 - DNA, 272 bp, Glycine max
  Clone ID: LIB3087-008-Q1-K1-F3
tggatattatagatgatgaatctgatgtgattagatatatgatttaaaactaagattgaccattaaaagttttactgattcaaatactactctaatataacggagatgatctacatttatgcagtagtattcttcggtttcttttcacatttcatttagtgtaattgcacaaggattaagtaaacaattaatgagtcaaccaggaccactgcacgtgtattaaggaaaatttggtcgaaattcaattttaaaagccactggtccccccgcta

SEQ ID NO: 7648 - DNA, 291 bp, Glycine max
  Clone ID: LIB3087-008-Q1-K1-F5
cccgggccgacccacgcgcgccgcgcgtccgcgagttccctgagcttcatatcatcaaggaatcactgatcaagtatggctgtgagccaaacaagaaaactgcttaaaagtattgagcggtttcatgttttagaaatcaaagattatgcatttttgttgcgggctacatagatcactctttatttcattgttatttcgttgggttttgataagaaccttactagaaaagctagccatgtagttcttgttctcatagctacaagtgattccagtttcagcatagttccatca

SEQ ID NO: 7649 - DNA, 148 bp, Glycine max
  Clone ID: LIB3087-008-Q1-K1-F6
atacccggctcgacacacgtccgctagcgcttattctccttctcattttgaattttaacaagtgttgcgtcttcaaagaaagggggttttataatagaaagacactgacgcttactatgaagagctcatcgactacgaagaggaagaa

SEQ ID NO: 7650 - DNA, 302 bp, Glycine max
  unsure at all n locations
  Clone ID: LIB3087-008-Q1-K1-F7
ctactccaaccggagtgctgctccgcaattatcatgggcaaggtcaagatcggaatcaacggatttggaagaattggccgtttggtagccagagtggctctgcagagagacgatgttgaactcgttgcccgtaacgaccctttcatcaccaccgaatacatgacatacatgtttaaatacgacagtgttcatggacacttgaagcatcacgatgtcaccggtaaggacgagaagacccttctcttcggtgacaagccaagcactatntttggacacagaaaccctgaagagatcccatgggg

SEQ ID NO: 7651 - DNA, 189 bp, Glycine max
  Clone ID: LIB3087-008-Q1-K1-F8
cgtccgccgacgcgtccgcaaaagggaggcaatattaggaagaggataaagaacgaaaccggacgaaatagtctcagatatagcaaaattacaagatgcaagatggagactaaatgtaatagagctacgatggcaataaaatgtcaaggtatcaatatggataacaaaagagatgagagtgtgatgaac

SEQ ID NO: 7652 - DNA, 364 bp, Glycine max
  Clone ID: LIB3087-008-Q1-K1-G1
gtccgggggttgggaattagggttgttcgcgtcatgaagatgatcgaggtggtgttgaacgatggattggggaagaaggtgcgcgtgaagtgcaacgacgatgacaccatcggcgacctgaagaagctggtggcggctcagacgggcacaagagccgacaagatccgcatccagaagtggtacaccatatacaaggatcacatcactctcaaggattacgagatccacgacggcatgggtctcgaactctactacaactaaacacaaggtgtgttttatgcatgatatattactatgatctgggaatgggatgaggcgccaaatgtaattttgacttgcgaaagtccctatgatttgaataatg

SEQ ID NO: 7653 - DNA, 278 bp, Glycine max
  Clone ID: LIB3087-008-Q1-K1-G2
aggcttgtagtttcgttgtcgtggatccattcagatcgcatgccaggcagaatcgagagctggtgttcaaggaggaccgacacgagtacgcgcaggtgctccggatgctgggaaacaggcggggccaggcgatgtgcatcgacgggacgaacaggctctgccacatccgcgggaagatgcacaagaaggtgtggaacgccgtcggagacatcatcctggtagggactcaagggactaccaggacgacaaggctgacgtcatcctcaagtacatgcccg

SEQ ID NO: 7654 - DNA, 396 bp, Glycine max
  Clone ID: LIB3087-008-Q1-K1-G3
cgtccggcgcgcgtccgagcacttcttcttttactctgccgctgcaacaatggcttcagagaagaaactttcgaacccaatgagggagataaaagtgcagaagctcgttctcaatatctctgttggcgagagtggagatcgtctcaccagagccgccaaggtgttggaacaacttagtggccaaaccccagtgttttccaaagcaaggtacactgttcgttcctttgggattagaagaaatgagaagattgcatgctatgtcactgtcagaggtgacaaggcaatgcaacttttggagagtggtttgaaggttaaggaatatgaacttctcagaaggaatttcagtgatactggttgcttcggctttggtattcaagagcatatcgatttgggaat

SEQ ID NO: 7655 - DNA, 257 bp, Glycine max
  unsure at all n locations
  Clone ID: LIB3087-008-Q1-K1-F1
aaacccggccgagcncacgcgagcgggcgcgcgtccgctaaaccctatggcctactaagccaaagccaaaggcaacgcagcgangggcctccaagactatcctgccgccaaccaccacnacnccgaagccancgcccnggcacccaccaaccaaagccacaaagccaaccgatccgacgcatacacctccctcaaaaactacgcagatgcataagcagaagccaaaaagacagaagaactcaagcccgactggtcca

SEQ ID NO: 7656 - DNA, 290 bp, Glycine max
  Clone ID: LIB3087-008-Q1-K1-G4
gcgtccgcgggtacgcccacgcgtccgtgcactcgttcgatcagaaccagatcgtgttctcggctggcattggcaaacatggcaactcaaatgagcaagaagagaaagtttgtggcggatggagtgttcttcgccgaactgaacgaggttctgacacgtgagttggcggaggacggttactccggcgtggaggttagggttacgccgatgcgcaccgagattatcatcagagccaccagaacccaagccggtctcggtgagaagggaaggagaattagggaacttacctc

SEQ ID NO: 7657 - DNA, 309 bp, Glycine max
  Clone ID: LIB3087-008-Q1-K1-G6
tcgcatccaatccaaacaacgatgtgttgcatttgtttttcacgatgctgaacttgaagccgcgcttcttctaatccactcagttatcacacgacgactcattccgtacacttcacactctcgtcaacaatggccgatgtcgccggagccacagtgagtccctccatcggggaaaccaacgatgcgcagaagaatgtgttcgatttgggagcgtttgttggagacctaactttggaagatgatccaagcagcgatgatatatccgtggaaggactagaacaggaactagaaaagtgtaagaacaatgat

SEQ ID NO: 7658 - DNA, 314 bp, Glycine max
  Clone ID: LIB3087-008-Q1-K1-C7
acgcgtgcgcgggtcaaaacagaacaaactccttttactctttcgcttctgaatcttcaacaatggggctcgaggcgacgatgatctgtatcgacaattctgaatggatgcgtaacggagattactctccttctcgatttcaagctcaagcagacgctgtcaatctcatatgcggtgctaaaacgcagtctaatccggaaaatacagtgggagttcacacaatggctgggaaaggcgtacgtgtttgggttaccccaaccagtgatctgggcaagatcttagcctgcatgcatggactagatataggtggtgag

SEQ ID NO: 7659 - DNA, 192 bp, Glycine max
  Clone ID: LIB3087-008-Q1-K1-C8
cggacgcgtgcgacaacgcgagcgcaaaatatgcagaacacaagagattgtgccgcgcagctaatgatgcaagtgctctaggctatcacagtctatatcatagactgtacaagaggcaagacatcagaatctgagacaggctaaaatacctaaagggccacggatcccagaaacgagcttaacataacctgg

SEQ ID NO: 7660 - DNA, 315 bp, Glycine max
  unsure at all n locations
  Clone ID: LIB3087-008-Q1-K1-D1
taatctcatttttcttctgntcaaacactctctctcatggagcagataagaagattaggatcggcatcaacggatttggaaggattggccagatggtggccagggttgcccttcaaaggaatgatgttgaacttgttgctgacaacgatcctttcatcaccactgattacatgacatacatgatcaagtacgacaccgttcatggccagtggaagcattatgatgtgaaagggaaagactctaaaacccttctctttggtgagaagcccgtcaccgtttttggaatcaggaaccctgaggaaattccatggggtg

SEQ ID NO: 7661 - DNA, 387 bp, Glycine max
  Clone ID: LIB3087-008-Q1-K1-D10
cgactccacgcgtcggggcagactagtatccgatcctcatccctctcgaagctttcatcgttcaacagattctcaccatctcagtcatgggcctgctatcttgttttaggtctaccgtcctgagaaaatgttccaaaggaagctctggcatgtcaagattcctgtatacgaacaattttcaacgaaacttgatttcgtctggtggcaatgaatcgtattatgggtattttaacaggagatcatacacttcactttatatgggaactggaactgtgggtgggattacaagtgctagaatcagggtgccaaatgtaggatgtgaaggattcatgtgctcaagtcatctgtcaatcactcaaagaaattcaagattgatccattctacta

SEQ ID NO: 7662 - DNA, 376 bp, Glycine max
  Clone ID: LIB3087-008-Q1-K1-D11
cttggcccttcccaatagccaacttctaggttccgtttctgaagactgagggttgatccaataccttcgccacatcgatctctccaacaatttccttaatggctctctacccaacactatcttcaactcttctcaacttcaagtactttccctctcaaacaatgttatctcaggcaaactacctgagctaattggcaaaatgacaaaccttaaacttctcaacctctctgacaatgccttttccggtttgatcccagaaaacctctctactctaccaaacttaaccgttgtttcactgaagagtaactacttttctggcagtgtcccacccgggttcaactacgtggagattctggatctgtcattcaatttgctc

SEQ ID NO: 7663 - DNA, 372 bp, Glycine max
  Clone ID: LIB3087-008-Q1-K1-D12
cccacgcgtccgcggacgcgtggtcgactatctcattccttatttgaggaaggtaaatgcaaataccacaaagacttatgctacaagaaccatatttttcttgaaagatgatggaactttgacaccattggccattgagttaagtaagccacatcctcagggtgaagaatatggtcctgttagcgaagtctacgtgcctgccagcgaaggagtggaagcttatatttggttactggcaaaggcttatgttgttgtgaatgatgcatgctaccatcaaatcattagccattggctaagcactcatgcaattggttgagccatttgtcatagcaacaaacagggcactgagtgtggttcaccctatttacaaac

SEQ ID NO: 7664 - DNA, 199 bp, Glycine max
  unsure at all n locations
  Clone ID: LIB3087-008-Q1-K1-D3
gacccactcgtccgcgggtgntctacaactagcaacaaagattcatcaagcanancaaccncncnccccaacgccgaatcaaaacagacatgggncngaaggaagattatgagcaggatgctgagaaagcaaagactgagccaccgactcaatcaaacgaagactagcttatcctaaaaagattgcacaagcaagccac

SEQ ID NO: 7665 - DNA, 241 bp, Glycine max
  unsure at all n locations
  Clone ID: LIB3087-008-Q1-K1-D5
ctaattacagatcatccagcttcatcnattgctgggccggttgtgacgttatgcggccctttgtatgcatcggtggtagcaatagagagccagtccaagttggatgacgagcaatggctagcttattggatcatctattcgttcctaacccttgcggaaatggttcttcaacctatcttaaagtggataccaatttggaacgatgtgaaactattgacggtggcatggctgaagtagccac

SEQ ID NO: 7666 - DNA, 316 bp, Glycine max
  unsure at all n locations
  Clone ID: LIB3087-008-Q1-K1-D7
aaacccggcgcggacccacgcgcgcgcgagatccaccactagcacacagcattgatcacccatactaatttcccacagaaaagacgccacctttctttttccgactaaaggttcgccggaaaatgcctctatcctcctcttcctcctccgccgtagactccgccgtctccggcgagatcatgctctttggcgttagagtcgtggtggactccatgcggaagagtgtgagtatgaacaacctctcgcagtacgagcttcctcgcgacgctgccaacgccaaagacgacgccgcaggatacgcctncggcgatgatgc

SEQ ID NO: 7667 - DNA, 373 bp, Glycine max
  Clone ID: LIB3087-008-Q1-K1-D9
cagagaggaaagactttaccgagtccttacgcgttgtttgtgtttgcgtcggaaggaatagaagatgagtgagaatttgatggagaaagtgagcgcactgggagagcgcctgaaaatcggaggcgtggaagtggggagaaagatgagcgaggggatgagctccatgagtttcaagctcatggagttcttccagcctgagcccaatcaggccgacaagcttgtggaggacgctacttccgaggccctggacgagccccaatgggccctcaatctcgatctctgcgacctcgtcaacaccgacaagctcaactgcgtcgaactcgtacgcggaatcaagaagcggatcattctcaagagccctagggttcagtac

SEQ ID NO: 7668 - DNA, 331 bp, Glycine max
  unsure at all n locations
  Clone ID: LIB3087-008-Q1-K1-E1
ccacgcgtccgcccactcgtccgaattgtttaaacctaattctgaggcttcatcgatcgattcttctcctcctaaagatgcagatcttcgtgaaaactttgaccggtaagaccatcacccttgaggtggagtcctccgacaccatcgataacgtgaaagctaagattcaagacaaggaagggatcccacctgaccagcagagacttatctttgcgggtaaacagcttgaggatgggcgaacccttgccgactacaacatccaaaaggaatccactctccacctcgtgcttcgcctcnagggtggcatgcaaaactttgtcaagactttgac

SEQ ID NO: 7669 - DNA, 387 bp, Glycine max
  Clone ID: LIB3087-008-Q1-K1-E10
cgactccacgcgtccgcttcattctcaagggattcttcattgggatctcaaatcagaaaatctgcttttgggggaagatatgtgtgtaaaagtagcagattttggtatctcatgcttagaatctcagtgtggcagtgcaaaaggattcaccggaacataccgttggatggcgcccgaaatgatcaaagaaaagcatcataccaaaaaagtagatgtgtatagttttggcatagttctatgggagcttttgacaggaaagactccatttgacaatatgacaccagaacaggcagcatatgcagtttcgcacaaggaacagtttccgtttgcattattgtttacacgaagatggaaacatgggcatgcataattatctataatgcaaga

SEQ ID NO: 7670 - DNA, 307 bp, Glycine max
  Clone ID: LIB3087-008-Q1-K1-E3
cgtgggataagagcatgttctggtgtgggcgtgctttgctcacaaaaaaggaggccccgtctcatcgatgatttctcttacatgctctatttaggatcatcccttcaaagaaagtctctggcttttcttcatatgtagctctaaaagttactccattaaagtaaaagcacaatactatatatatatatattgtatatatatataatcttcatacgcggttaagccttgcaatgttttttttcaatgaatggtttgcgtttgaattgaaaaacccgcaaagaaagcatcaattctgaatggaggaagg

SEQ ID NO: 7671 - DNA, 266 bp, Glycine max
  unsure at all n locations
  Clone ID: LIB3087-008-Q1-K1-E4
gtgattacatttcannananatgaagtgatataaaaaaannggatnntnngaagtggtccaatggtagaactggaaatccaaagaagggtgtgagaaaaaaaaattgcatcttcttttggtgggtgtctctgaaactatgatcttgtgaaaacccagaaaggaaaccttcggtgcgcgttggtagatagatagagagagataattgttgaagggatattctgagaaccgttgattgagaaatgaacggtggtgatgaagtcgtggc

SEQ ID NO: 7672 - DNA, 284 bp, Glycine max
  unsure at all n locations
  Clone ID: LIB3087-008-Q1-K1-E7
ccgggtcgacacacgtccgcccgcgcgtccgatgagtcggtcgagtatttcttcatgggatcntgcatatgagaggtaggaggttctaattcccactcagatgcttggggagaaaggtcaaatcacatgtttaaatgtctattcattgtccttactttcttggatccctgtttgtgaagaagcatcanggtcttccttactttatctctttcgctgatcgaataaaattaacccatttgaaaccccacaagagtgcaattgacaaatagccacacagaaagata

SEQ ID NO: 7673 - DNA, 340 bp, Glycine max
  Clone ID: LIB3087-008-Q1-K1-C5
acgcgtccgagggatacggtctaactctacctcgttcatatcaaacattgattcttagttgcatggcgcttgtcatatctctttttttaatcaaaaccttccattcaacacttatagttgaataaaatgtctgctgcaacttttgcagctcatattgctggggctggctttgtaggcttgaagtccaactcatcaaatctttgccccagtactggatccataggatggaaaaggaagattgtttcaaatggttctaaaacttactgcatgaagacatggaatcccatcagcaataagaaggttgaaacactgtccaacctgccacccctttcagatgaat

SEQ ID NO: 7674 - DNA, 239 bp, Glycine max
  Clone ID: LIB3087-008-Q1-K1-E8
cccactgcgtccgctgattacatttctaatctcattctctcttggttcaaacactctctctcatggcgtgagggaagattaacaggatcggcatccactgatttgagaagatagacctgcatcttctctaggagggtgtctcatgaactattgtcttgataaaacccagaaacgaaaccttcattgcgccttggtacatagcttgcgagagattattcgtgatggcatattctgagaac

SEQ ID NO: 7675 - DNA, 331 bp, Glycine max
  unsure at all n locations
  Clone ID: LIB3087-008-Q1-K1-A11
cgactctatctctcttagcggngttcttccttgcgctcctcctcgttcgctggttctacctcgcgtagatcggcaatggcggagaccgagacgttagctttccatgctgatatcaaccagctcctcaggctcatcatcaacaccttctactccaacacggaaatcttccttcgcgaactcatcagcaacgcctctgatgctttggacatgattagatttgagagtttgacggacacgagcaagctcgatgctcagccagagttgttcattcatattattcccgacatgactaacaattcgctgaccatggttgacagtggcatcggcatga

SEQ ID NO: 7676 - DNA, 373 bp, Glycine max
  unsure at all n locations
  Clone ID: LIB3087-008-Q1-K1-A12
cgaaaatgtggaagagaacggngtttgaagaagaagcagttcaattgatcagctcagatttcagggacctaagtctagctgctaatagactcgcccatcatgccatcaaacttggtggcattggctttggagcctcttttttcggattgtttgctgccattgctgctatttatctgttgattttggatcgtacaaactggaaaacaaatattctcacagcactactcattccatacattttcttcagcttgccttcattaattttcgacgtcttcaggggagagcttggaaaatggattgctgcagttgctgttgtattacgccttttccttccaagacacttgcctgattggctggaattgcctggtgctct

SEQ ID NO: 7677 - DNA, 94 bp, Glycine max
  unsure at all n locations
  Clone ID: LIB3087-008-Q1-K1-A2
cgggcgcgtgggcggacgcgtggggttatttacagngtcacaaaatatatgggatgggggggaaaaattcataaaatagataatctgtgactcg

SEQ ID NO: 7678 - DNA, 366 bp, Glycine max
  Clone ID: LIB3087-008-Q1-K1-A3
tctcccttttctcgcgcactttgcgagatactcacttgcgagggaatccactattacttcgtaagctaaacaaaacaaaacaaaaattactgtgttttctttgggatcgctctgaatatctcttaagaaaagcaacacaacacgcagatacggtaccctttcgttgggaaatagcaatgggggatggtaactatgatagaactttgagggagttctgtattccggattacatattagtgccgggatctgaggtgagaagtgtttcacatgtacctgcttgccctgtgattgttttcataaacaccaaaagtggtggccagcttggaggggagcttctggtttcctatagtacactttcttaacaga

SEQ ID NO: 7679 - DNA, 364 bp, Glycine max
  Clone ID: LIB3087-008-Q1-K1-A6
gacccactcgtccgccggcgcaggcgcgcacgcgaccgcccactcgttcgatagggtatgatgaccatagatcgaacctttcgaaggtcggtcccttcccacacatatataacatactgactggatgaggtaagaccagagaagttccgttccgacacgtgacgttcattctgtctgatggaactgatggcctattagggttagggtttcggtatgaggatctaaagttgcctctgcgatggatcgcaagaggggaaggcctgaagctgccttcaatttcaatggcggcaccaagaaatcgaagcctgaaacggactcctttccaactgggttaggaagcaaatcgaagccatgcacaaagttt

SEQ ID NO: 7680 - DNA, 322 bp, Glycine max
  unsure at all n locations
  Clone ID: LIB3087-008-Q1-K1-A7
cacgtaagcacgtatgaagcagtcttaggattctgaatccactcctccaaggatcacatccaacgtcaaacaaaacctccgcttcctaaagctatggaagagcttccagaatagaaattctagcactcctaggccttctaccagttaccgcaagaagaaggtcgagaaggaagatgatgttgttgacacagacctctatcgtgatcccaccacctncctctactacacaaaccagcagggtatattagacaatgccggccctgtacttcttgtggatggctataatgtgggtggctattggatgaagctcaagaaacatttc

SEQ ID NO: 7681 - DNA, 293 bp, Glycine max
  Clone ID: LIB3087-008-Q1-K1-A8
cacgcgtccggataaagcacaaagaaaagaagaagaggttcggaccggatgcgatgagcacacaggggcgggagattattgatgaggcggatgcggatgacataatccggcgcttaacggaggtccgactggcccgacccggcaagcaggttcagatctgcgagtctgagatcaagcaactctgcgtcgcttccagagacatcttcattaaccagcccaattggcttgaactcgaagcccccatcaagatccgaggtgacattcatggccaggacagggattagataaggcta

SEQ ID NO: 7682 - DNA, 259 bp, Glycine max
  unsure at all n locations
  Clone ID: LIB3087-008-Q1-K1-B3
taataaccggcgnagtcgtcgtccgcgcatgggcggacgcgtgggcgntttcttttnnnacncaaccctgncaaaggtgcaggcacatttttttgtttgtgtgtgtagcaaagggtggtggtgtggtgcttgttgtggttggtggtggagtgcgcatgataagcggcaaagtaaggttgttgcaatggggaaggttgtgttgttgtttctttgcatggtattggtggtggagcctatggcttgaactgattcaattcaa

SEQ ID NO: 7683 - DNA, 179 bp, Glycine max
  Clone ID: LIB3087-008-Q1-K1-B5
gcgtccggccagaggaaacgttcgtctacagcttcatagggctcgttgggggaggataactcgtaagaaaacaaagctcatcgaatcgaagtccttcattttcattctcttccttgtcactgatcggcatagacagaggtgcagcatcatcaagcagaaggcatctcaagggccatgga

SEQ ID NO: 7684 - DNA, 375 bp, Glycine max
  Clone ID: LIB3087-008-Q1-K1-B8
cggccggagccactcgtccgcccgcgcgtccggttccagagagcacgtctaagaactgtgaacaacagggtaactgcaggccagctagcaaaacagaagacgcagcgatggagaggatgaagagggtgcttctgctgcttctggccttcactgttcttctcatgttgccagaagcttctgctacaaagtttactgttggaaacaaccagttttggaaccccaatattaactacactgagtgggctaaaggcaaacatttctaccttggtgactggctctattttgtgtacaataggaaccaagcgagcgtgttggaagtgaacaagacagattatgaaacatgtaactctgatcatccactcacaaattggacta

SEQ ID NO: 7685 - DNA, 181 bp, Glycine max
  Clone ID: LIB3087-008-Q1-K1-C1
gatggaagaagacttctacatccccggcggcgaggaaatggagtcggcgaagacgaggtcggcgaggagagggagatcggctctggcggcctcaagaagaagctcctcaaggaaggtcaaggctgggaaacccccgaagtcggtgacaaagtccaagtcaatacaccgggaccttggtcga

SEQ ID NO: 7686 - DNA, 388 bp, Glycine max
  Clone ID: LIB3087-008-Q1-K1-C10
cgattcacgcgtccggttcaccgccccaatctctgcagtgctcttcgatctagaaaacatgactaagagaacaaagaaggctggcattgttggaaaatacggtacccgttatggtgccagtctgcgaaagcagattaagaagatggaagttagtcagcacagcaaatttttctgtgaattttgtgggaagtatgctgtgaagaggaaagctgtaggaatatggggatgcaaggactgtggtaaagtgaaagcaggcggtgcttatactttgaataccgcaagtgctgtgacggtacggagcaccatcaggaggttgagggagcaaactgagagttgagctttttgttgatgttatcaattactattagactttgcgtgatatgcctag

SEQ ID NO: 7687 - DNA, 364 bp, Glycine max
  unsure at all n locations
  Clone ID: LIB3087-008-Q1-K1-C3
atccacacagatctacactactctctaaaccctctctctctctctctcgcgggctatcatggctttgcccaatcagcaaaccgcggattaccctagtttcaaactcgtcatcgtcggtgacggcggtacaggaaagacaacgttcgcgaaaaggcatcttaccggtgaattcgagaaaaaatacgaaccgaccattggaatggaggttcacccattggatttcttcacaacctgcggaaagaatcgcttctactgttgggatactgctggacataataagttaggaggcctcaaagatggaaattatatccatggacaaagtgcgattataaggtnggatgttactgcccgactaacatacaaa

SEQ ID NO: 7688 - DNA, 374 bp, Glycine max
  Clone ID: LIB3087-007-Q1-K1-D7
tgaaacacacctactacaattgttaaagtcctttcttgtcatagcaaaaatgaagcgtggtctttgccaccctactggtatgttctcttcttctaagctcctctttcttggagccagtcatcgcctatgaagactcgtcttattgcagcaacaagtgttcggacagatgctcatcggcaggggttaaggataggtgtctgaggtactgtggaatatgctgtgctgagtgcaaatgtgttccttctgggacctatgggaacaagcaccagtgtccttgctacagggacaagctcaacaagaagggcaagcccaaatgcccatgaagtcttgaactcaaagaccaagtcacatagagacttaagagaataagacta

SEQ ID NO: 7689 - DNA, 388 bp, Glycine max
  Clone ID: LIB3087-007-Q1-K1-D9
aggcatttgagatattctgcaataaaactgttggtggtagttccagtgctgaacgtttagctacattctgtgacaatatccttaagaaaggtggaagtgagaagctaagtgatgaagcaattgaagatacccttgagaaggtagtcaagttgcttgcatatatcagtgataaggatctctttgcagaattttacaggaagaagcttgcccgaagattactttttgacaggagtgccaatgatgaccatgaaaagtgtattttgacaaagttaaagcagcagtgtggtggccagttcacatcaaagatggaggggatggtggtagacttgacattggctagggataatcagctgaaatttgaggagtatcttcgtgataactcacatgt

SEQ ID NO: 7690 - DNA, 173 bp, Glycine max
  Clone ID: LIB3087-007-Q1-K1-E3
cggacgcgtgggctgaactatacgtcgatgcagtgttaatgtgtatttagaaaggtctttgtctccttccaatgtggtgatcagatctatcatctgtcctgaagcagtctgaaactcaacctcattaaacaaatcaagaagatcaatgtaatatggctttcccctgaagtgct

SEQ ID NO: 7691 - DNA, 279 bp, Glycine max
  Clone ID: LIB3087-007-Q1-K1-E5
gcagcagcagagcttgtatacgtcgccgcttcagcgtagcaacatgatcattcccgagaagaaccgtaaagagatctgcaaatacctcttccaagagggagtttgctttgcgaagaaggacttcaatctggcgaagcacccggagattgatgtgccgaatctgcaagtgataaagctgatgcagagcttcaaatccagagagtacgtgagggaaacatttgcgtggatgcactattactggttcctcaccaacgatggaattgagttccttaggactta

SEQ ID NO: 7692 - DNA, 180 bp, Glycine max
  Clone ID: LIB3087-007-Q1-K1-E6
ggccatcattgtcaagaacgttatctaatacttgccagcatttgattatagacatagccggctacacatagttggatgaacaatttctaacgaaggaatggaactttaatttcaagcaaagcataaagctaacaaacatggaagttcttcataatcaaggtcttgcaatccgtgaaattt

SEQ ID NO: 7693 - DNA, 397 bp, Glycine max
  Clone ID: LIB3087-007-Q1-K1-E9
gcgacgtgggaggaaggaaagagcatacgtgttgcgttagtgtttagtgttatatctccgcagtggatcaaatcaaacaaacacttccatccatcaccctttctctctgcttagggttttgatcgcatcggatcttcactctcttctccgatctcaaaatgcccgccgtttatggagctcgcttgaccaccttcgaagactccgagaaggagagtgaatacggttacgttcgcaaggtatcaggaccagtcgtcgttgcagatggcatggctggggctgctatgtatgaactcgtgcgtgttggtcatgataatctcaatggtgaaattattcgtctcgaaaggaattctgctaccatccaagtttatgaggaaactgcttgcttgatggtaatgat

SEQ ID NO: 7694 - DNA, 365 bp, Glycine max
  Clone ID: LIB3087-007-Q1-K1-F1
gggagaggatgttgtccaggaaattgaagaagtggatacagatgaacattacaagcctagagtatctatcgggatacgggatgtgactcttaaacaaaaggtctgaaggttctctgctagatcaagatcataattagctgtgatacttagtcataacctgttttcggggacactggtcaagtctttttgtatagggatgaaccttgagaattttgcctggggtgcatctatcaagtgtttgagccttgatgttgtttttgctattgcatttttagttaacacagggattatgcaatctcctttccttacatcctgtcattttatctggttggttttctttctttttcttgaaaaaaattgggggc

SEQ ID NO: 7695 - DNA, 60 bp, Glycine max
  Clone ID: LIB3087-007-Q1-K1-F10
gcggcgcaaaattaacagaaaaccccaaaaaagcctcacttattttattccctctcatgt

SEQ ID NO: 7696 - DNA, 390 bp, Glycine max
  Clone ID: LIB3087-007-Q1-K1-F3
ggtgtgattagtatattgtcggtactatggtatcttaattcatgttgtaacctatgtatgaggacaccatagtcctacctaaattggactctctgtaatcattccggacaacttgtactgctatatatataatacaattctacttttgctgattaaaaaaaaagtgttaagacttaaatatctttttagctcttgtaatttagtgtcatttttgctttagtcttgcaaaattattctttttatttttagtccttgcaaattatgtttggtatttttcttccttatgatgctttagataacattttttttactgatctaagcgctatctaaggtgttttaaggacttaagagtaaacaaaaaaattttgcaggcaaaaaaaagcaaaagag

SEQ ID NO: 7697 - DNA, 92 bp, Glycine max
  Clone ID: LIB3087-007-Q1-K1-F5
cagacagaagaaaatgggaagcagaggtccacctcaatcccatccaaattcccctggccttttcaaaggttacaacttcgctttcacttggg

SEQ ID NO: 7698 - DNA, 167 bp, Glycine max
  Clone ID: LIB3087-007-Q1-K1-F6
ggagtccagagacgtcggcgggggccccgtaaagagttatcttttctgtttaacaggctgcccaccctggaaacggctcagccgaatttagaatccagcgcttgtaagagcaccgaacgtcacttggtgtccggtgcgctccctgcggcccttgaaaatccagagga

SEQ ID NO: 7699 - DNA, 158 bp, Glycine max
  Clone ID: LIB3087-007-Q1-K1-F7
attcatttccggaactctcctttcacctagctcgagtcttttcttgcttcccggagctctgaacgtgaccgacgccattttcacatcaaaacgcttcaactaaaaaaatggcgttcttgtggaacaaaactagtatcgcttcccattttcgatctcac

SEQ ID NO: 7700 - DNA, 348 bp, Glycine max
  Clone ID: LIB3087-007-Q1-K1-F9
aggggatgtatccgggaatcctgtggtgaaaattgcacataactttgataatggtttttgctccgttagtatgtgttctcagcctcaaagcatgcttcctccagtgccaaaccaaaatattcaatttccagtgtttcggacttcttcagcaatgggttattaccatcaaaatccagtttcattgccagctgctcccacaaatgggttgatgcctttcccacacacaaacccctacttatatgctggcccttttggatatagcttaaacgaggatccacgcttctgcttgcagtatggtggcttacagcaaccaacacccctatttaacccagttgcatttccagttta

SEQ ID NO: 7701 - DNA, 432 bp, Glycine max
  unsure at all n locations
  Clone ID: LIB3087-007-Q1-K1-D10
cggacgcgtggggaaacgtgaaccagaaccagaatggatcttcaacaacgaccacggaagcttcactttattggttacctgtcaccggggcatgtgatccctctctgcggcattgcaacactcttcgcctcacgcgggcagcacgtgacggtgatcaccactccctactacgcccaaatcctccgcaagtcaagcccctccctccaactccacgtcgttgactttcccgccaaagatgtgggccttcccgacggcgtcgaaatcaagtccgctgtcaccgacctcgctgacactgcaaagttctaccaagccgccatgctcctccgcagacccatctcccatttcatggaccagcaccccacctgatgcatcgtcgccgacaccatgtatttctggcggatgacgtggncaacaacctccgcatcccacgac

SEQ ID NO: 7702 - DNA, 57 bp, Glycine max
  Clone ID: LIB3087-007-Q1-K1-G3
ctatactattgatttaacaccaagttcagacagaacgcagcgaggtacaccctatac

SEQ ID NO: 7703 - DNA, 149 bp, Glycine max
  unsure at all n locations
  Clone ID: LIB3087-007-Q1-K1-G8
tcttcttcttcttcttccgctgcttggatctgcacttttcggtcttttctttcattgccncacgcttacatcggttggcgggtncaattccaattttggctttgcgcgcctttgtttttttcctcgcactcacataaaagctttttcgc

SEQ ID NO: 7704 - DNA, 321 bp, Glycine max
  Clone ID: LIB3087-007-Q1-K1-G9
ctaactctgtatatataaactgattttctgcactgggtgcatcagaggctggatcatttggggcgggctgtttttgtacccatgaaaagcaagttccctaatgatatgctaagtagctgcaagagatccatgtattggatgcgactgaagaaatcccttcttggatttgttcttgttgcatccttaatatttctgatattttgtttcatatttcctcaaaccactgcattgggcttcttggatttctcttacaagagtgatgattacttggttcacaccaccttcaaaaagtgctgagaaaacccctatgctacatcatga

SEQ ID NO: 7705 - DNA, 182 bp, Glycine max
  unsure at all n locations
  Clone ID: LIB3087-007-Q1-K1-H11
ctacttttcctttnccggntaatctgctccctaatttgctcagtcatcaaaccccggccctgatcctaatcccgagcctttgatccttcaatttaaacccccattcccattgctatcttgtcatttttcccgacaaaaattctctccctctttcgtttcattctcacaatttcaaacatgaa

SEQ ID NO: 7706 - DNA, 198 bp, Glycine max
  unsure at all n locations
  Clone ID: LIB3087-007-Q1-K1-H5
gaacaatttgntcgtcttccttgttcccaactattgtagattgcctcaaaaacaccctgagaggagaaaagttccctcttcgcgaaacttcaaccaaagcattgggaaagctccttctttatagatctcaagtggatccttctgacacactgctttacaaaaatgttctttcattgctaggttcatcacacatgatga

SEQ ID NO: 7707 - DNA, 436 bp, Glycine max
  Clone ID: LIB3087-006-Q1-K1-H12
cccacgcgtccggttaaatcattcggaggttatggtgaccccaggtggttttccgctacgtctgctgtccccaggagacctaaacgacgtgccgttttgaagcagccccctattagtcaatctgtctctgacttttttgatccgcagtctcccgaagaggccaaggtagcaccgctgcttgccaggtccaacttgctaattaccagagatatcgagtgggcaaatcttgtactaggctttgaacaggaaaatcgatatgccattgtagatgcttgctaccctcagtcgcccgtaggttttattcgtgaacagagcaacatcattgccagacagttgcttcgtcttaggcggccatttgttgcatacataactgatgccttggggaacgagctctttagggttcgcagacccttttggtggataacaagctcaattt

SEQ ID NO: 7708 - DNA, 277 bp, Glycine max
  Clone ID: LIB3087-006-Q1-K1-H5
cccacgcgtccgagcaaatagaaatatcaactttgtgactgaaatgttcacttctggcagccttagacagtataggcaaaagcacaagagagttaacattagggcagtgaagcattggtgtagacagatcctgagaaggcttctctatcttcatagccatgacccacctgtgatccatagagatcttaaatggggatatatttttatcaatggaaaccaagggggagttaagattggggatcttggggtggcagcaattctccgcaagttccatgct

SEQ ID NO: 7709 - DNA, 228 bp, Glycine max
  unsure at all n locations
  Clone ID: LIB3087-006-Q1-K1-H6
atctcatccccatggatccctttgatttaatacgcgaagggtttggttgaggctgactggacatgcgctgttactacttttaaagtctgtttatgctgtagttattttgtccatatnttagttaataatgaacttatccaagaaaggacccctaagggatgcaaagctattaagcccaaacaaggcaacaactttgaatccaaatgcagcagagtttgttccttttgc

SEQ ID NO: 7710 - DNA, 299 bp, Glycine max
  Clone ID: LIB3087-006-Q1-K1-H8
ttgccggtggaggacgcgtccgtcttgacatacatggaacccctataaaagatatgccaagaggaatgattaagggaactgggcgcaacatctgggtcgctggtgagactgcaaacactaagagaatggagatcaagaattaggaggactttcaaatcttccaggacagacccctattgggaactcagataatgagccccaaagtggtgacccctttgaagccaagaccatgggtaatagacacattaatcgtttactgatggcattggattgggactaccacatcagtacctgcttcc

SEQ ID NO: 7711 - DNA, 383 bp, Glycine max
  Clone ID: LIB3087-007-Q1-K1-A10
cccacgcgtccggtggcagaagagtatttggaacggctaaagcccagatagatgccagtggtaaggtaaaatcagataactgctatgatggcagtgatagtgaggatgacttggggaccagcaaaagtggcaacatagagaatgagggaagcgaccttttgcataaggatgtaaacaaggatttggtggtaattcaagatgacactgatactcaccaggaatcagtttttaaagacattgatgagattataaaaaagcctggccaaaactacatatgaagttccatttttgttcagatacatggaaaaggcaaaaacaaaatgaagaatacgatgagagtctcaagcttcaggctagtaggcaagcttaaagtactgaaatga

SEQ ID NO: 7712 - DNA, 133 bp, Glycine max
  unsure at all n locations
  Clone ID: LIB3087-007-Q1-K1-A12
cacatagtgtgaggatctctgtacctctcactgtaagatgcacatcttattcaagacctgnagatgctataccatagcccatgaggtggaaagctctgacaccaaaaactacgtcaaggctaagatcacatga

SEQ ID NO: 7713 - DNA, 175 bp, Glycine max
  unsure at all n locations
  Clone ID: LIB3087-007-Q1-K1-A3
tcaccaattacaagttatatcaagttaacaaacaactcaagaaatgggcgtaactttatatagtngcggagtatcacattttttctttctctcttcccaaccaactaacaccatcaacattttctcaaatcaaaattatttttttttcctcttaccccaaaaatttaaaatcttt

SEQ ID NO: 7714 - DNA, 321 bp, Glycine max
  unsure at all n locations
  Clone ID: LIB3087-007-Q1-K1-A4
cccacgcgtccggtggcagaagagtatttgtaacggctaaagcccatatagatgccagcggtaacgtaaatttactgagtggaaaaaaccgttttctgagaaaggattattttcttaccctgaaaagggatcattcatcttgtaagaagagtttgctgtgactatcgatatagatctaangagggtgcaagagagaactgaatntgctgtgatgggcactcgtagatatgcttttggaagagctgatgaagccactcatccagactccatgagggccactttggcttgaaattgttctactttcatctttgtctttgctgg

SEQ ID NO: 7715 - DNA, 369 bp, Glycine max
  Clone ID: LIB3087-007-Q1-K1-A9
gacaaaatgatgtaaaactgtttgagcctatggttggatctctccccaaaggcaaaaagagttaaaaatattttcaagccaaccaaccggacactttgacaaaagccagttgggatgattatggcaaacaagaaaattcacgcagtggtggaaagcttaattctttagtgaggatttctgtcattaagaaaccagtgacctcagatgttaaaagtcctgcagaaccagaacaaaagaaagaagaggaagatagtaaaacaaatactactagtggactactatctttgtgtcaaaactatggaagtgatgatgaggactagtagccataaatattgaatgacttttttgttaactgttgctctcattgga

SEQ ID NO: 7716 - DNA, 190 bp, Glycine max
  unsure at all n locations
  Clone ID: LIB3087-007-Q1-K1-B1
gcgtacgcccacgcgtncgcccacgcgttcgcccacgcgttcgcccacgcgtccgcccacgcgtccgacgggttgctgtatctagttgagaaaagaaacaagtataagtagttgaagagatgtgatcactaacaacactgccaatgggcattgccgcgatcacttgttcagaaacaatacatggcgcatt

SEQ ID NO: 7717 - DNA, 336 bp, Glycine max
  unsure at all n locations
  Clone ID: LIB3087-007-Q1-K1-B10
attccatccacttatgcaccagagaggttggatctcttgaggcagcttgagaaagtggggcgaatgacagccagtgatatgggctcanatgaagaagtggatgaagataaatgataagaagcaatgccgatttatgtatagctagcgaaacaattctgtgatctgatgaaaattggactgctttgttaccctctttctggaaaaattttgttgatgccaaatttctcagataggagttgagcatagagaagttcattccacgtgtctggcacccctggtaagcaccagtggctgcaatccttgtgggcatcaggtggagtacccggtttccgatac

SEQ ID NO: 7718 - DNA, 247 bp, Glycine max
  Clone ID: LIB3087-007-Q1-K1-B6
tccactcgtccaaaacatagaacaaaacataaaacttcatactaattaacatactggagggtacttatcactctgatgacgtggaaaaaaaaaatggaacgaatactgactcaaattcagatcagaaatgctaactgataatcttagttcttctgctttcccagttcactagcatgtaaaaaagcatgatacaacgatttataatacatttcaacctattctttatcaattatttacggaagaatta

SEQ ID NO: 7719 - DNA, 338 bp, Glycine max
  unsure at all n locations
  Clone ID: LIB3087-007-Q1-K1-B7
cccacgcgtncggcaaaaaccttcgttcattgtcaaacccacgaactcaaccaccaaatgggtcattttttcagtggtaccttataaaaaaaaatgggttgtttcgccagcaaaaacgctgacaccaaggccagtagggccgcgcgctggcgatccacgggcatcgttgctttgcgcgattccaaattaaagacgtttccggatgaaattctcgagttagacagatctgttcgcactcttgacttgacgcataatcgaatagttgacattcctgtggaaattagcaagttaattaatgtacagcgcctgatattagcggagaacctcattgagagact

SEQ ID NO: 7720 - DNA, 275 bp, Glycine max
  unsure at all n locations
  Clone ID: LIB3087-007-Q1-K1-C1
cccacgcgtccgcccacgcgtccggcatttaacagaaggcggttgtatctccaagagtcagaatccgttttctacagaaccacgaaacgactatngaggaaagcgttttcgcagcgctaacagacgacatcgtcctctccattctggcgaagctagacgacgatccacgacactgggcgcgcgcggcgtgcgtctccacccgattctccaccctcattcgccacttctgctggaagaccaaatgctcccaaaccttcccctcatctctcatcttc

SEQ ID NO: 7721 - DNA, 371 bp, Glycine max
  unsure at all n locations
  Clone ID: LIB3087-007-Q1-K1-C10
cgaagcgaaaagagagaaattcatcgtcgcagtaatcatgggtaaggttcatggatcacttgcacgtgctggtaaggttagagggcaaaccccgaaggtggccaagcaggataagaagaagaagccacgtggccgcgcccacaagaggatgcagtacaatcgccgattcgtcaccgccgtggtgggattcggcaagaagaggggacccaactcgtctgagaagtgaagccgaagcttgaagaatatgttgctactctatttgatttatctttgntggtttttatttatttttaatttgtatgttttgattgtgttctgtgaacggtttttgttagctttatatcaaacttgaaattttgcatacaatatct

SEQ ID NO: 7722 - DNA, 355 bp, Glycine max
  Clone ID: LIB3087-006-Q1-K1-H11
cccacgcgtccggtttcagatagcacataaaccaagcatatatgtcctagataccgcaggggttctggttccaagtatctcagacatagagacagggttaaaactggctctggcaggtactatatctattaaaattatccatcttaaatacttttttggttattaataaaatttgaaatttgatattatcaattcatggctttttttttaaatttttttttatctaaaagtaattactgaaattacatttggttcatctccatatctttgattcctggggattcagtctaaacctcttctggggattgggaaatatgatttgggaagtgagtctttgctttaatttgaatttttc

SEQ ID NO: 7723 - DNA, 103 bp, Glycine max
  Clone ID: LIB3087-007-Q1-K1-C11
cggacgcgtgggattcgattcctcgtcccaaaccctattcccctatttcgattcctattcggacgagatcccaagtgacacagcagatccctaaaattaaaat

SEQ ID NO: 7724 - DNA, 118 bp, Glycine max
  Clone ID: LIB3087-007-Q1-K1-C12
ctctctacaaaaagtgtgtgtgagagagagaaagattttgaatttttgatatctagagcgcgagcgcgtcacccccccaaacccaactctgtccagagatctctctctctctctctct

SEQ ID NO: 7725 - DNA, 412 bp, Glycine max
  Clone ID: LIB3087-006-Q1-K1-F4
gtgagagaaggagattctgatttgatctcgccttaatctctcagatctgagcttgccggcgtcgggatccaactcaatctgggtcggattcttaggtatcaccgctccactattagtttaagcctctcaataaaaggtttttatttcgcttcaaattcgaggtttgatttgaagttggaatagcttaactgttgtgtaaaacagccagcacacacaagcatgggaagccaagacaacaacgtagcattgtcatcaaattcatttttagcttacaaatctgctaaggtgtttgtcgctggccaccgaggtcttgttggctcggccatagttcgcaagctcactcaacttgggttcactaatctgggcttgcactcccatgccgagcttgatctcactcgacaatctgatgttg

SEQ ID NO: 7726 - DNA, 322 bp, Glycine max
  Clone ID: LIB3087-006-Q1-K1-F6
cgaacaccaaagaagaaacatgagtttattctttccgaaatccaagcagtagggttagggttttttccgatctcaatggcagacgaaccggtgagcaccgtcaccaccggcgccccctacgaatcgctgctcgataagatcaccgagaagcttcacggccactattcttcctcttcttcctcttcggattccgattacgaaaaaaccgttacttcgtccattaaggatagcgtttttcgcctcttctgaagggagagacccgctcactccgctttcggcgcctgaaaacctgctgatgtgttattgcggaggaacaagaaaa

SEQ ID NO: 7727 - DNA, 274 bp, Glycine max
  Clone ID: LIB3087-006-Q1-K1-F8
ctgatttgatctctccttaatttctcacatctgagcttgccgtgttctgagtccaactcaatctgggtcggagtcttatgtatcaccgctccactattagtttaagcctctcaataaaaggtttttatttctcttcaaattctaggtttgatttgaagttgtaatatcttaacttgtttgtaaaacatccatcacacacaatcatgttaagccaagacaacaacgtatcattgtcatcaaattcatttttagcttacaaatcttctaaagtatt

SEQ ID NO: 7728 - DNA, 447 bp, Glycine max
  Clone ID: LIB3087-006-Q1-K1-F9
cacccatctaagattacccaataagtagcatctctcaatttctgattttcgaattcgcagacatttcttcaatcgagtgtgtccagtggtatcatccaagaggaacgtaggggaagataaagagatgacgataaaacctgttgttcgtgtttcggaggggaagctggtggtgaaggagcgaacgattttgaccggaatgccggagaacgtggtggagacatcgacggtggaaggaatgtttctcggagtggatttcgagaaggaagacagtaggcaggtggtttcgttgggaacgttgaaggacgtccggttcatggcgtgcttccggttcaagctgtggtggatggcccagaaaatgggagatcgaggaagggacattccgttggagactcaatttcttgttgtggaaaccaaagatgggtcccacctggagtcagataacgacaa

SEQ ID NO: 7729 - DNA, 400 bp, Glycine max
  Clone ID: LIB3087-006-Q1-K1-G11
atttctctctctctctctctctctaacacggagtgatggctgtgcagctgtgggagaccctgaaggaagccatcgtagcctacactggcttctctccttccaccttcttcacggtgctggcgcttctttttgccgtttactacgtcgtcacgggtctctttggctcctccgacgatcaccatcaccgccaccgccacgtcgaggaggaggaggagatgccgcctctgcgccccccggttcagctcggcgagatcacagcggaggagctcaaggcctacgacggcaccgatcccgagaagcccttgctcatggccatcaaggcccagatctatgatgtctcccagagcaagatgttttatggacctggtggaccttatgccctatttgctggcaaggatgc

SEQ ID NO: 7730 - DNA, 450 bp, Glycine max
  Clone ID: LIB3087-006-Q1-K1-G4
cccggatggaccgcactcgtggcacccgctcgttaaaacaacagaggctgatctaacatgtttgtctcacatgctatgcattcgaactgatgcactggatagacggacacatacttaaagccctctgtcacaaagctctatctctacagcaagagacataaccattgtaaatcaaactgattccaatgagatatcctcaattgatgacatggtagatcaacatctgtatgtcattattttaacccaacaaatggattcacaatgaaacaaacttatgcctctttatcaaacagtattgacaagtcttatcattcattaagaaattgtttaattattgaaatatgccttctctttttcaaatatattactctactgaagttgatagtcactttcatgatttttaaaacccaatccatcattagaaggtttttgaaattcacttttatccaa

SEQ ID NO: 7731 - DNA, 382 bp, Glycine max
  Clone ID: LIB3087-006-Q1-K1-G6
cccacgcgtccgcttctcttgcggctagggttttagcgcagcttcttctagatttaagggagatgggtaaggaaaaggttcacatcagtattgtggttattggccatgttgactctgggaagtccactaccactggccacctgatctacaagcttggaggcattgacaagcgtgttattgagagatttgagaaggaagctgctgagatgaacaagaggtctttcaagtatgcctgggtgcttgataagcttaaggctgagcgtgaaagaggaatcacaattgatattgccttgtggaagtttgaaaccaccaagtactattgcacagtcattgatgcccctgtacacagggatttcatcaagaacatgatcactgggacaat

SEQ ID NO: 7732 - DNA, 261 bp, Glycine max
  Clone ID: LIB3087-006-Q1-K1-G7
cgaacttcctaaccctaaacgctacgtttttaacattttttcctgttttctctttcaaatcggtgcttccaccggcggcgcgtgagcatttccaacggcgcgtgagggatttgttcccgcgtggcttattgtacagcactgactaatgctttgttcgactcgcattggaaagttcgcgccggagagacggtggattctcaccgtacggccgtgatttcgcacctccatggcttccgccgtcctagctaaccggaacgaacc

SEQ ID NO: 7733 - DNA, 447 bp, Glycine max
  Clone ID: LIB3087-006-Q1-K1-G9
cccacgcgtacgaccacgcgtccggccacgcgtccgcaagggaagcaaggacgatgagtgtagtatgagtaatcagattcagagcgtatagtgattctgattctgtcattttccatagattagcaagcaatcgagcgagggagggagagagagagagagagagagagaatggttcgggaagtatcagagagttgcattgatagcttattgacggagatggtggcgtgctattgcaaccgattctacgcaaacaagcctgaactcgccgcacgccggatcgaggccattggatatcatgtcggtcaccagctctctgaaaggtataccatggatcggcctcggttcacggatcatctggaggccatcaagttcatctgcaaggatttctggtctgagctctttaagatgcagattgacaacttgaagacaaaccatatgggtacattt

SEQ ID NO: 7734 - DNA, 364 bp, Glycine max
  Clone ID: LIB3087-006-Q1-K1-H1
cgaacttcctaaccctaaacgctacgtttttaacattttttcctgttttctctttcaaaggggtgcttccaccggcggcgcgtgagcatttccaacggcgcgtgagggatttgttcccgcgtggcttattgtacagcactgactaatgctttgttcgactcgcattggaaagttcgcgccggagagacggtggattctcaccgtacggccgtgatttcgcacctccatggcttccgccgtcctagctaaccggaacgaacctaattggccgaagcatagagtcggtggtgcaggattcatgggaaaagtacctttctctaaccctaaccctaaatctaaatctaatcctaaattagcgaatagc

SEQ ID NO: 7735 - DNA, 253 bp, Glycine max
  Clone ID: LIB3087-006-Q1-K1-F3
ccggaatgaccgcatcgacgcacactttccactagttatatatcattcactatcacggttgccctgaaaccttcaacgaccgcttcatggggcaccgtgaacgtttacaccggataggctaactctgatcttactggaaacaacctttccgctttaattgcacgttacgtgttcaaatacccagatcttgttcatgctcttacacataataaccataaccacatacaatataattgtacgatccctgacttct

SEQ ID NO: 7736 - DNA, 319 bp, Glycine max
  Clone ID: LIB3087-006-Q1-K1-D9
tgagcaagcagaaaatgcgcatgagtattacacatggacggggacttatggaactatttctgcattgagtagtccccatcaggttattcttatcaatggtcagttttctgggcctagacttgacttggtgactaatgagaatgtaattctcaaccttatcaacaagcttgacgagccattttttctcacttggaacggtattgaacaaaagaaggatttatggcaagatggagtttttggaaccaactgtcccatttcttcaaactcaaattacacacacacgttttaggccacggatcacaatggttcatatacatac

SEQ ID NO: 7737 - DNA, 441 bp, Glycine max
  unsure at all n locations
  Clone ID: LIB3087-006-Q1-K1-E10
gcgatcgatctgtgattgtccgagagagagagagatgatgatgcattcacggatcagaagcgtcgccggaaacatcaaatgcgcggcgagactcttctgttcatcttcgacgatcacgccggcggcggcgccgtcgcagctcccgcagactctggcgggtctccgagcccggctggcggaggaatcgccgtcgctgtcggatttcgtcgcgcttaaatcggacagcgcgtactcagtggaggtcgggacgaagaagaagccgcttccgaagccgaagtggatgaaggaggccgttcccggcggcgagaagtacgtgcagatcaagaagaagctccgcgaattgaagctccacacggtttgcgaggaggcgaagtgccctaatttgggggagtgctggtcccgcggcgagacatgcactgccaccgncactatcatgattct

SEQ ID NO: 7738 - DNA, 438 bp, Glycine max
  Clone ID: LIB3087-006-Q1-K1-E11
gtggaagcaagcttacagaagtgcttcgggactcctttgttggaaattcaaaaactgttgtgatctcttgtatatcgccaaatgctgggtcatgtgaacacacacttaataccttgagatatgcagaccgagttaaaagtctatccaagagtggaaatcctagaaaggaccaggccccaaatcctataccaccaccagcaattaaagaggtttcatccacatcttcacttccaggtagtgttggtgcagaggattttaataatggtcaacgtcaagaggtaaaaacaatggacatgagcaggaaagttgtcgaaaaggaaagttctttgtacagctccgctgctgatgttgacaaacaatcaagtttttcttctagttgtcaattcaatgggcgagaggaaaaaagctcagcttctgccccaatggacagggaaaagt

SEQ ID NO: 7739 - DNA, 435 bp, Glycine max
  Clone ID: LIB3087-006-Q1-K1-E12
cccacgcgtccgccaatgacgaaattgctgctgacctcaaagagcatgtgatcaagcctgtgatcccagagaagtaccttgatgagaagaccattttccacttgaacccttcaggccgttttgtcattggtggccctcatggcgatgctggtctcaccggccgcaagatcattatcgatacttatggaggatggggtgctcatggtggtggtgctttctccgggaaggaccctaccaaggttgataggagtggtgcttacattgtgagacaggctgctaagagcattgtggcaagtggacttgccagaaggtgcattgtgcaagtgtcttatgccattggtgtgcctgagcctttgtctgtgtttgttgacacctatggcactgggaagatccatgataaggagattctcaacattgtgaaggaaaactttgatt

SEQ ID NO: 7740 - DNA, 461 bp, Glycine max
  Clone ID: LIB3087-006-Q1-K1-E2
cccacgcgtccgcacctttctcctaaaacatctccagtgggttcttcttcttctattacggcaacgtcgtccaagaccatgaccatggccatggccacgatcctgctcctgttcacggtcttcgcggtttcatcggccctagacatgtcgataatctcgtacgacaacgcccacgccgccacgtcgcgcagcgacgaggagctgatgtccatgtacgagcagtggctagtaaagcacggcaaggtgtacaacgcgctcggagagaaggagaagaggttccagatcttcaaggacaacctgcgattcatcgacgaccacaactcccaagaggaccgaacctacaagctcggactgaaccggttcgcggatctcaccaacgaggagtacagggcccagtacttgggaaccaagatcgatcccaaccggaggctcggcaagaccccgagcaaccgatacgcgcc

SEQ ID NO: 7741 - DNA, 418 bp, Glycine max
  Clone ID: LIB3087-006-Q1-K1-E4
tcgaccgacgcgatccacgcacgcgtacatccacgcatacgatcttgtctgtatgacgatgttatatctgaatacacgtaaaaaggcacaagttcaaattgcttataatgctatacttcgctacttgccactggtttttgtccatcacagatggcttgtatccaaatggatacttcgaggaatgtccagaaccatcagaatctaaaggttcgacagatactacacccaatggcattcacattgtacaatctcaggaatggctgcatacatacaatcattggctaatcaaggtgacatggcactcgatgtgcctcatggtacctatgctgataggcttgccaccgaagcttccattaagcagaagattccaattgcgaacggcatgttctactcattaacattcattgcctcacgcact

SEQ ID NO: 7742 - DNA, 309 bp, Glycine max
  Clone ID: LIB3087-006-Q1-K1-E6
atgtacttttaattgttgtaggctataatggaaactttcacggtttccattgaattaatatgtcagttcattcttactttcgtttaccaattatataattaattttttaaagcattttaatatgataatttcttttttatggtaattatgatattaatattaaataatttaattgggagtaataattaatatttatcaaaaatcgggagtggatattaaatggatattttttttaatataaattattttatatttaagatggattatttaatttagagatataaatccatattatttatataaatttta

SEQ ID NO: 7743 - DNA, 297 bp, Glycine max
  Clone ID: LIB3087-006-Q1-K1-E7
cccacgcgtccggttacttttactacatttactatctctctaaatgatgtctttgatctgttctctttcagttgttcaaacccatgttaacatcagatcctgatttgttgctctatttattttacgctcgagactaatttactttacactattactacatatactattcacttccccttcacttgtttacatcgcaaaccttctctctcaatactacagaagataacattgcataaggcgtataccaagcatggcaacagtgacggcctcttcttatgcggtgtcaggaaagcgcgt

SEQ ID NO: 7744 - DNA, 407 bp, Glycine max
  Clone ID: LIB3087-006-Q1-K1-E9
cccacgcgtccgctctcactcaatggcttggcactcgttcctcttattagcgacggccaggctcgccgttgtgtgctccgccgtgagcggttgctcgccatcggatagggcggcgctgctggccttccggaaggcgctgagcgagccctaccttggcctcttcaactcatggacggactccaactgctgtctcgactggtacggcatcagctgcgacagccaccaccggccgagtcaccgacatctacctccgcggggagtccgaagaccccatcttcgagaaagccggtcgctccggctacatgaccggaaaactctcagaggcgatctgcggcagttacaccctcaccaccctcgacgtcgctgattggaaagacattgccggggagatccccacctgcgtcacc

SEQ ID NO: 7745 - DNA, 428 bp, Glycine max
  Clone ID: LIB3087-006-Q1-K1-F10
attcaccatatgcaggacacttcaactagaatacatagatctctttctgatccactggcgcattgctactaagcctggaaaagttgtgtaccccattgaagtatcagagatagtggaatttgacatgaagggtgtgtggggatccatggaggagtgccagagacttggcctcaccaaagccattggagtcagcaacttctccatcaagaagcttgaaaaattgctctcttttgctaccatccctcccgcagtgaatcaagtaattagttaataattaagttaatcacacattagtttaattacgtgactgatccactgatcaaaatcactgatcgaactaaaccttaatcaatccttaacaggtagaagttaaccttgggtggcaacaacagaagcttagagatttctgcaaggaaaagggtattact

SEQ ID NO: 7746 - DNA, 448 bp, Glycine max
  Clone ID: LIB3087-006-Q1-K1-F11
aaaggctcctccaagagtttcaggggaagactcttctggagtgaagttgccgtcaggtgcaaaattcaaccctgatacacatagctcagcaatgcaaaggaaaaaggttaaagacaatgaggcctcaataaaagcaaaagttaaggcctccaagagcaatcatgacgatgactctgacaaatctgaagagcatgacatgaagagtcctgataatacaaagccaactgacaagtccaaaagtaacaatctcaagccatccataggatctactaaaaagctgaaaagaaaaagtattggaggattggctaagtgtacaacaaaggaaggtgaaagtgatgctgaagatctaattggctgcagaattaaagtttggtggcctttggataagaaattttatgaaagcactgttaagtcttatgactcttttaagaagaaacatgtgatatta

SEQ ID NO: 7747 - DNA, 321 bp, Glycine max
  Clone ID: LIB3087-006-Q1-K1-F12
cccacgcgtccgatcccttgttcgttgcactctcacaatggactccctctctctgggctgcaccggagcccttgtcgcgggcggcctatactggttcgtctgtgttgtgggccccgccgagcagaagggcaaacgcgccaccgatctatccggcggctccatctccgccaagaaagtccaagacaactacaagcagtactggtccttcttccgacgcaccaaggagatctagaccgccgacaaagttgccgactttgtcaacaccttcgacaatctagtgaccgacatttacgacttggactcgggccagatgttccactt

SEQ ID NO: 7748 - DNA, 397 bp, Glycine max
  Clone ID: LIB3087-006-Q1-K1-D7
cgataacatcgtctaccgcgactatcgtggtgaagctcaaaaaggaagcgctgagacatgtttccgaaaagtaaagttctggaaagaagatgctgagggagatgctccacctgtttttaatatagacggtgtgaactacttccacgtaaaggttgctggattgctatttgttgctactactagagtcaatgtctccccttctcttgttttggaacttttacaaagaattgcacgtgtcatcaaagattaccttggtgttctcaatgaagattcctttagaaagaacttcgtgctcgtttatgaattactggatgaagtcattgattttggttatgtgcaaacaacatccactgaggatttgaagtcatatgttttcaatgagccaatagtgattgat

SEQ ID NO: 7749 - DNA, 406 bp, Glycine max
  Clone ID: LIB3087-006-Q1-K1-C12
gagcgttgttctccgaagcgaacatgggtgatctgattgagttgagtgagcgggtgcgtgtgtatgtaatgggttatagatctgcatgtttagttttgatccttttcctcatccttggaattggaactggaattgcttcgtctgagactccgaggcccaaaaatgtccaagcttcccttggcgctaagtggtccggtactcctctacttctagaagctggtgagttgttatctaaagaagaccctcgccttttctgggacttcatcgacatttggctcaatgctgctgccgacgatcaatctcattccgcaaaagcttgcgtcatcgaaattctacatcacgctcgtcctcttttgagacaacccttagcgtccttgttcgagttctctcttattctcagatcagc

SEQ ID NO: 7750 - DNA, 323 bp, Glycine max
  Clone ID: LIB3087-006-Q1-K1-C2
caaacccttggcggctgcgagacccggggtgttctctcttctctctctcttcttttatgtgttctgggtccctctcttcttcgctccttttaagggtttctcaactgttcgatttggggcttaaaccctctgcgattcagattcggatttacggcttccctttctctattccggctccaaagaaaaacagatctcgcggttggttcgtcatggccaccgttgctaatcccgcggatcaagcaactgatttgctacagaagctatcgttagaaactcagcccaagcccttggagattcctgagcctaccaaaaaggccactggg

SEQ ID NO: 7751 - DNA, 307 bp, Glycine max
  Clone ID: LIB3087-006-Q1-K1-C3
atcacgcgtcggccgacagactattgacggagccggagagtatgcgcagtatacggtgctagatcatgcggcgagatctttgaagtgcgccgtggctttacatgtggagacaatagcacgctgagctcttgaaactggatacacgatcgtccaagactgagatgacaggagtgtagagtggaagctggatatggagctacatacttcgggactggggtccacggctatgttattgggtgttgcatccattatactgctattggcaaatgagatatgagtctatgggatcagcatctgatgcgggaaa

SEQ ID NO: 7752 - DNA, 132 bp, Glycine max
  Clone ID: LIB3087-006-Q1-K1-C6
tctatatatagatagatatatagatagatatatagatatatctctaataaattctaaaggacttctttaaaattcttttatttaatgtttagttaaccaatattgtattttaattaattctttgaatcttga

SEQ ID NO: 7753 - DNA, 273 bp, Glycine max
  Clone ID: LIB3087-006-Q1-K1-C7
acagtttttctgaattctgggtgttgagtttccttttcttcattttttttccctcccttggatgtgttgttattttcaatccaaaaggccatgcaaaactatttggtcttgtgataactttgtgttggtgtgaggcttgttattgttcatagaagagagtttgttttgttattggtgtaagtgtgtcggtggaaatggaggcaacaagtttggtggaaaggggtagagagagagttggacatgttaacaaggttagttatgtgagaagggtca

SEQ ID NO: 7754 - DNA, 402 bp, Glycine max
  Clone ID: LIB3087-006-Q1-K1-C8
gctcatcctccataacctccgagctctacaccgaagaacgaagccatggggaagacacagggaatgggagctgctcgcaagctcaagtctcaccgcaggaggcaaaggtgggctgataagtcatacaagaaatcccatcttgggaatgaatggaagaaaccttttgccggttcatcccatgccaagggaattgtccttgaaaagataggtattgaagctaagcagcccaactctgctattcgtaagtgtgccagagttcaacttatcaagaatgggaagaaaattgcagcttttgtccctaatgatggttgcttgaactacattgaagagaatgacgaattcttgattgctggatttggacaaaagggtcatgctgtgggagatattcctggtgtcagaatt

SEQ ID NO: 7755 - DNA, 409 bp, Glycine max
  Clone ID: LIB3087-006-Q1-K1-C9
gctccgtctccgatctcgccgtggagaaccagaatctgaaaactgcgaagaggaaggagcgagagaagaaggttaaagcgtcgtcgaagaagagcaagagcgtcgccgccgccgacgagatttccggcgacggcgagaagcttccgtacgttcacgttcgagttcgtcgaggtcaagccactgatagccatagcttagcagaaagggctaggagagagaagataaatgctcggatgaagcttttacaagagctggtcccgggttgcaacaagatatcgggaacggcattggctctggataaaatcatcaaccatgtgcaatctctacagaatgaagtggagatattatcaatgaaactggcagcaggtaacccaagaattgctttcaacctcgacaggttactggctac

SEQ ID NO: 7756 - DNA, 435 bp, Glycine max
  Clone ID: LIB3087-006-Q1-K1-D10
aacaaaagaagccatgaggcttttcagagaaatgatggaaaagggtgatcctccggatgttataacatacaagattgttttccgtggcctctgtaatggtggagggccgatacaagaggctgttgattttacagttgagatgttggagaaaggaatattgccggagttcccatcatttggtttcttggctgaaggtctttgttctttatccatggaggacaccctcattcaactcatcaatatggtgatggagaaaggaagattctcacaatccgaaacatctattattagaagcttcctcaagattcagaaatttaatgatgcactagccaatcttggagctatcttggatcggaaaaagcccaggagattttgagtggttaaaagctttgtgtaagtgcactctggtgatgcttttaagaatgttatgggaaa

SEQ ID NO: 7757 - DNA, 441 bp, Glycine max
  Clone ID: LIB3087-006-Q1-K1-D11
ggcagatcctagttttgatgaggctccttggccttctttatcagttgatgctaaagattttgtaaagaggttgttgaataaggattaccgtaaaagattgactgcagctcaggcactaagtcatccatggctggtgaatcatcatgatgatatgaggatacctttggatatgataatccacaagcttgttaaagcttacatttgctcgtcttccttacgcaaatctgctttacgggctcttgcaaagacattaacagtagctcagctaacatatctcagagatcaatatactctgttagggccaaacaaaagtggattaatttctatgcagaactttaagacggctgttttgaggagctccacagatgcctcaaaggattcacgggtcttagaatatgtcagtatggttagttctatccaatataggaaattagattttga

SEQ ID NO: 7758 - DNA, 427 bp, Glycine max
  Clone ID: LIB3087-006-Q1-K1-D12
ggtgaaccccatggttacctattctaactcacatataggataaatcttttcataagtcttaagttgtcaagaaacattgatcactatttgtcctcctacaagcactcctctaaacttaaaaattatttcaaatattttactactccaataaggacctacgcgactaagatagcactcaacaatttacagtggtcgacttctctatgaacttatggcttactccttacaaggatctcactcaaaaacttaaacttacttaagtcatcttcagcaagcattaaagttaatccaatgagtcctaaaataaccttttggttcgactactaattaagaacatttcatcttaatcctagggttcctctcatcttaaaacaacttctggccaagaaggatttgtaggtatctttcacctagacgtagcatactt

SEQ ID NO: 7759 - DNA, 467 bp, Glycine max
  Clone ID: LIB3087-006-Q1-K1-D3
attcccggactagggtgttggaggctgctgtggtggcaatgccacaccctatgtggggtgaaactccttgtgcttttgagtccttgaagaagaacatcaacagctcatcatcatccaaaattgatgatgtcactgaggctgagataattgcctattgcaggaagaatttgccacactttatggtgcctaaggtggtgaagttcatggatgagctgtcaaagacttcaactgggaagattcagaactttgagttgagggtcatggctaaggttatcgagcagaccaagaataatactaccactgtcaacaagaagtcttgccaagtgagtcaaaatagtattgttggggggtacaataatgagcaagctttggctgcgtctcgtctttgaattaattaagtgttcagatctatatatcaatgatctttgaatctttgcgtatttggataaatgtgtgtacatatacta

SEQ ID NO: 7760 - DNA, 460 bp, Glycine max
  Clone ID: LIB3087-006-Q1-K1-D4
gccagcgacctgatccaaagtttaatggcacatcagttgaagctaaagtgcatggaatacgccagtggaagctcctaaatcatggtgaaacatatgaaatgaattgtcctcgcctttttacttagaattcttccagttcctggtgctgattgggctggtacagttaatatacggtgcctagagacaggtctagtagctgaattatcctacagatcaagttcttttctaggaattggggggaatcatagagtgatcaaagggaagatccttgactcttcatcattgaaagttctatatgaagttgatggtcattgggataggaccgtaaaagtgaaggacacaaataatgggaaaagtagagtgatatatgatgcaaaggaagttatgtcaagtctcgaaactcctatactcaaggacataagaggtgtgtggcaaacagaatcagctcatgtttggggtg

SEQ ID NO: 7761 - DNA, 272 bp, Glycine max
  Clone ID: LIB3087-006-Q1-K1-D5
gcaaccctagctttcagctgtttgcaatcaatggctggtgaatctgatgtaccggaaaagaccctctcttgtgctaattggggcaaacctgcgaagcttcagtgtccaaaatgtatggaattgaagcttcctcgagaaggtgctgccttctgctctcaggattgtttcaagtcttcatggaactctcacaaatcagtgcatctgaaggcaaaactatcctcacctggcacacaaaattcagactcacttggtgatggttggttatattggtt

SEQ ID NO: 7762 - DNA, 198 bp, Glycine max
  Clone ID: LIB3087-006-Q1-K1-C11
cggacgcgtgggcggacgcgtgggcgacttttctttcttttgctttgggtttgtcgcttgcgtctttattccctgcctgattttttggaaagatagggttttgcaccttttgaaggtgaggctgtacataaactgcaattaaatatattgtgctgctgctacattcggaatggaaaagatcataacaacaatagtaaa

SEQ ID NO: 7763 - DNA, 324 bp, Glycine max
  Clone ID: LIB3087-006-Q1-K1-A5
cgagcacataaacttgcgaattttaagactacttggcgaattgattttggctggctcggcggcacggtgggaggattcttcacttgtccttggttttggaacgacgacagccgagctatgtctcattccattttcatccatcaatggctccagtagcagcagcatcttcagattcaatcaagccaagatatgtttgcattgatggtgttgcacgtacaccaatgggaggatttcttggtaccctgtcatctctatctgccatcaagctaggctctatagctattgaagctgctcttaaaagggccaatgatgatccatcccttg

SEQ ID NO: 7764 - DNA, 269 bp, Glycine max
  Clone ID: LIB3087-006-Q1-K1-A6
cccacgcgtacgccggtatcgaccatggaaggattggcgctaccagttgcgcagttgcggtcacaacagttggcgttttcaaggccaaagctgttcggcattgacgaaggcacagcttatggatatgtctctctcatacgacaccgggtaagcgggcttcgttatcgcactagcttatgatcgcaggcacaggcacaagcacaggcacaggcacaacgcgatactgttgccgagcaagtcacagtgacagacctatacgactctgtgag

SEQ ID NO: 7765 - DNA, 384 bp, Glycine max
  Clone ID: LIB3087-006-Q1-K1-A7
cggacgcgtgggcggacgcgtgggcggacgcgtggggaattacagagcattttccaacacgattacacgaccgaatcaaacccctctttctctccgaagctgcttttaatatcgtactggccttcgattgttctcctctttaatacatactgttctctcttcgatttgagggaacagtacaagagtctgagcatcggttaacccaactgcacaggtagtctccaaataatggagcctcatgatgagactggatgccaggctcctgaacgccccattctttgcattaataattgtggcttctttggaagagcagctaccatgaacatgtgttccaagtgttacaaggacatgctgttgaagcaggagcaggacaaatttgcagca

SEQ ID NO: 7766 - DNA, 305 bp, Glycine max
  unsure at all n locations
  Clone ID: LIB3087-006-Q1-K1-A8
cccaaattcattttaatcctaattctgcacttcttgatcattcgatttttctcctcaagatgcagatattcgtaaaaactttgaccggcaagaccatcacccttgaggtggaatcctccgacaccattgacaacgtaaaagctaagattcaagacaaggaagggatcccacctgaccagcagagacttatctttgcgggtaaacaacttgaggatggtcgcacccttgccgattacaacatccaaaaggaatcaacccttcatctcgtgcttcgcctcangggtggcatgcaaatctttgtcaag

SEQ ID NO: 7767 - DNA, 397 bp, Glycine max
  unsure at all n locations
  Clone ID: LIB3087-006-Q1-K1-B1
cttctctcttcaaccctagcttaagggttatgctctaaaaccctggcttctgaagtttattgggagagaaaaatgctcgtatcgtttgaaacacccgcgggttttgccctgtttaaagtgctggatgaaggcaagctatctaaagttgaggacttgtggaagaacttttccagtgcagatactgctagacaggtggtcaagttgaaagcattttctaaatttgagaacacttcagaagctctagaggcagctactgtacttattgatggaaaagctagcaagggtctccgcaagttcctgcgtgttcattgtgaaaatgaaacactangtgtggcagaatcaaagcttgggaatgtgatcaaggagaaattgaaaatcgactgtattcacaacaatg

SEQ ID NO: 7768 - DNA, 362 bp, Glycine max
  unsure at all n locations
  Clone ID: LIB3087-006-Q1-K1-B10
gtttctgagaaaaacgacggcagcgcaaacaagctctcggagcatgcaatgcaaagacaagtgaagaattcaacgacctggttcaagggcgcccagagtcaatgatggatcatgacttggagaccgctgctttgggggcttaccaggacaagcctagaacctttcccaacatgcgcactaaaccttacacccctctgatatttcgtattttacttggtatcaatgttcgtgtcctcttcattcttttgctcctcggcttgggagctatcttttacgtcggagcttctacttctcctatcattgtctntgntatctctgtttgtattctcagctttcttgtggccatatatcttacaaagtgg

SEQ ID NO: 7769 - DNA, 443 bp, Glycine max
  Clone ID: LIB3087-006-Q1-K1-B12
cccacgcgtccgcccacgcgtccgtatattgcgtgtgtgagagatgcagcagcacctgatgcagatgcagcccatgatggcagcctactaccccaacaacgtcaccactgatcacattcagcagtatctggatgagaacaagtccttaattctgaagattgttgaaagccagaattctggcaagctgagcgagtgtgccgagaaccaagcaaggcttcagagaaatctcatgtacttagctgcaatagctgattctcaaccccaaccacccaccatgtctggtcagtaccctccgagtgggatgatgcagcagggagcacagtacatgcaggctcaacaacaggcacagcagatgacaccacaacaactaatggcagcacgctcatctcttttgtacgcacagcagccgtactcagcacttcaacagcagcaagccatgcaca

SEQ ID NO: 7770 - DNA, 364 bp, Glycine max
  Clone ID: LIB3087-006-Q1-K1-B2
ccctaattcacacccacagagaaatgataaaaatgacatcagtggtacgtgatgccaccgaagttcgatccctcgcaggtggtggacgtgttcgtgcgagtcaccggcggctaggtcggcgcggcgagttctctctccccgaagatcggttccttgggactctccccaaagaagatcggataggatattgcgaaggaaaccgcgaaggactggaagggccttcgcgtgacggtgaagctaaccgtgctgaaccggcaggcgaaagtgactgtggtgccatccgtcgacgcgctggtcatcaaggcgctgaaggaacccgaaagggacaggatgaagacgaagtacatctagcacaatgggaaca

SEQ ID NO: 7771 - DNA, 292 bp, Glycine max
  Clone ID: LIB3087-006-Q1-K1-B3
cgaaacgcaactacgtatgaggaaatatcaagtcaaaaatacagtggaagcagaatttatgtgattcaacaagtgcaatgcaacaaacagcataatgaccaacatcataacatagatcaaaccctcttatcttgaaaacaatggccacctctcagggtgctaacagttacagaaatgccagaacctctctcaaaccttacgtcaagtcaaagcctacgcaacaacgccgtaatagcaccggcttcgtcaacggcaaggaacacgctgctgttcccggaagagttagagtggc

SEQ ID NO: 7772 - DNA, 336 bp, Glycine max
  Clone ID: LIB3087-006-Q1-K1-B4
tttcttttttcccgcagtcatgggcaaggtcaagatcggaatcaacggatttggaagaattggccgtgtggtggccagggtggctctgcagagagacgatgttgaactcgttgccgttaacgatcctttcattaccaccgattacatgacatacatgtttaaatacgacagtgttcacgggcactggaagcatcacgatgtcaccgttaaggatgagaagacccttctcttcggtgacaagccagtcactgtttttggacacaggaaccctgaagagatcccatggaagtcgactggagctgacatcattgttgagtccaccggagttttcaccga

SEQ ID NO: 7773 - DNA, 165 bp, Glycine max
  Clone ID: LIB3087-006-Q1-K1-B6
atgtatgccaacttctcggtgataatatgttctagttccatgattcttatatgaatcagggacgtgtgcaatatgccaaggcgctgtgaatggctactgattcatgcttgcaagtatcatttgtaagcgacgtgctaaataccaaatatcactctgaatcatatc

SEQ ID NO: 7774 - DNA, 382 bp, Glycine max
  unsure at all n locations
  Clone ID: LIB3087-006-Q1-K1-B8
cgccactatctccctaatggttttaagaaatttgttgttcacaatgtgaaggacttggagctgctcatgatgcacaacaggacttactgtgctgagattgcccacaatatatccacaagaaagaggaaagatatagttgagagagccgcgcagcttgatgttgttgtgacaaacaaaacagccagattacgcagccaggaggatgaatagtctaaatgactaaaaaagtcacttatctgtagtgattcagtagttcaatatcaaatttgcagtttaattttaaattgaattctgcttcaatgtattttgcttattgagaaccaagtttgattttgttgagtctcttgcacaataaaaaggtngaaccaaaaagggcggccgc

SEQ ID NO: 7775 - DNA, 246 bp, Glycine max
  unsure at all n locations
  Clone ID: LIB3087-006-Q1-K1-C1
accgtccgaatccggtcgaccacgctccggcaccgtcgcgacgctggctgaaatccaatcgaatggtttggtgttgcgcggtcactcctctctcctcccttctgcaattacccaagcgatctctctctctctctctctctctctgnttcatatcatgaaacgctcaaacgacgacgtcgctgnccccgtccccgcctcaaccttcaagccagtgttcctaaccaaagcccaacgcgagcaattggc

SEQ ID NO: 7776 - DNA, 397 bp, Glycine max
  Clone ID: LIB3087-006-Q1-K1-C10
cccacgcgttcgctggtgaaactgcagacactttacttgcactgcaatatgcttgagacgatggtgcattgtgtgttgggataacaaacactgttggtagtgcaatagcaaggaatacacattgtggtgttcatataaatgctggggctgagattggtgtggcaagtaccaaggcatacacaagtcaaatagtagtgatggtcatgttagctcttgcaataagaagcgatacaatttcaaatcaagccagaagagaagctatcatagatggtctttttgatctgccaaataaagtcagagaggtgctgaagcttgatctggaaatgaaggatctagcaaagcagttgattgctgagcagtctcttcttgtctttgggagaagatacaactatgcaac

SEQ ID NO: 7777 - DNA, 394 bp, Glycine max
  unsure at all n locations
  Clone ID: LIB3087-005-Q1-K1-G4
aattaccatatatagtcacattttctttacactttgtgaggtctaaaatgttgtccatttttcacaaggggtttgctcacccacctgaagagcttaaaagccctgcatctaacagtggctccaacaagcctaatattcctgaggaaactctgagagaatttctttctcatcatccccataacactttttctctgagttttggtcactctgctgttctagcttatactcgtgctgatccacctttctttgttcatcaaaggttgntttgtgggatggatgacatatactgtatctttttggggtagcttgaacaatgtgtgctcactcaacaagcagtatggtttggcaaagggcaccaacgaagccatgtttgtgattgaagcttacaagacac

SEQ ID NO: 7778 - DNA, 327 bp, Glycine max
  Clone ID: LIB3087-005-Q1-K1-G5
cccacgcgtccgctcccttcctcttgcagtttgccggttccattctctctatacccactgacctctcattcgttctggtcaatcaatcattcattcattcctattccttcttctttctcttccaattccaaatcacgatccttcgttttccctctctagaaccttcctttttcctctgtccgtgtctgtctgtctgtctctctctcccccatggcttccgatctcgaagcataagccaaagaggccttcgtcgaagaccactttcaactcgccgtggaccttcttactcaaggccattcacctcgaacccaaccaagccgaactcta

SEQ ID NO: 7779 - DNA, 89 bp, Glycine max
  Clone ID: LIB3087-005-Q1-K1-G7
tccatacatccacggaacccttttccaatttacaccgttacgtaattttttaggaacgtggatgctccatcatgcttgatcggctctta

SEQ ID NO: 7780 - DNA, 399 bp, Glycine max
  Clone ID: LIB3087-005-Q1-K1-G9
caactgtaccatattcccacgggccctgcattctcttcgtcaaaacaatcgttaatctctgctacattgcgaactctgatattctctaactagacatcacaaacgcacctcaatttatagcacccatctttctattctcccacaaattcagcttcattatggtacacgttgatataatgagccaagaagccaccatgatctcttcaatgaagtgcacagactcatctgtcacatagaccgctatctcaaacagaaagattcccattgcaaggccacaacttgtcacgtgaccaaccattaacaacgttggaccaaacacgggactttctcaaatgtgttcacagaaaccggtctacctttcatgcactgaaaacttggcattggtgaaaaaaaggaagg

SEQ ID NO: 7781 - DNA, 423 bp, Glycine max
  Clone ID: LIB3087-005-Q1-K1-H11
attctctaatctctcgcttcacaattcacatggctctggaagcttacgcagcagcaaacgctgacaaaatccacacagatggcctcaccaaagctagggattcttgttacaaggctcgtgatgcgttctatgcctgcctggagaaggaatcggacaagaagcccacagagattgcatctgtgggtttgttatacccattagaatgcaaagagtgcaggaatgaatatgtcaaacagtgccgatcttcttgggtaacataaccccttcttcaatttcgattttgtgttggtaaaaatttatgcttttcttaattgggtgtgttaatattgttccaggtgaaacatttcgataggcaatactgccagaacaagagggttcagagacttttggatgacaaagggtcgcggaaaggggtgtaaacta

SEQ ID NO: 7782 - DNA, 439 bp, Glycine max
  Clone ID: LIB3087-005-Q1-K1-H12
cccacgcgtccggttaaatcattcggaggttatggtgaccccaggtggttttccgctacgtctgctgtccccaggagacctaaacgacgtgccgttttgaagcagccccctattagtcaatctgtctctgacttttttgatccgcagtctcccgaagaggccaaggtagcaccgctgcttgccaggtccaacttgctaattaccagagatatcgagtgggcaaatcttgtactaggctttgaacaggaaaatcgatatgccattgtagatgcttgctaccctcagtcgcccgtaggttttattcgtgaacagagcaacatcattgccagacagttgcttcgtcttaggcggccatttgttgcatacataactgatgccttggggaacgagctctttagggttcgcagacccttttggtggataacatgctcaatttatg

SEQ ID NO: 7783 - DNA, 396 bp, Glycine max
  Clone ID: LIB3087-005-Q1-K1-H2
gtgaaagttgtctaacaatttgtgctcctctggaatcatcatgtgctcaccctgctactccaagcaaaaccactgagtacgccgaaaacaaagatgggtctctcaagagcattgatgccatgtcaactccagctaaacttgtttctactccaattaggttgatgagtgccacacctgccttgcggtcacccaaaaggcattatatgagcccagatgaccactctatcagttctttgaacaagttagctcggcgtacacctcgctcaaggtcattggaatttgacactccagtgaagaacaaggatgatatttttgacaccctccaagaaagtactatccaatcgattagagaaaaagaaaggctggccatggagaaaagagacccagctatcacag

SEQ ID NO: 7784 - DNA, 202 bp, Glycine max
  Clone ID: LIB3087-005-Q1-K1-H3
cgcaaacatgtataccgacacaactcacgtgctcgcttatgcctaaaataccttcgatcgcgtaatcggtctctgatacttgaccaaaaccgtatactctcgcggcgtccatgtcacccttctggtcgcaccctactactaagccttacttacaaaaaactattgcccatttttccaaacgctattcctccccgaacctcag

SEQ ID NO: 7785 - DNA, 65 bp, Glycine max
  Clone ID: LIB3087-005-Q1-K1-H4
ggttttctcattaacgcttcttctctcttcactctgttaaggtgcaacctgacagcctggaaatc

SEQ ID NO: 7786 - DNA, 380 bp, Glycine max
  Clone ID: LIB3087-005-Q1-K1-H5
cttagagcttgttgaggggaagcaactccctggtgtccttgcccttgatgatgctcgagtaaacattactagttgctctgtgattcgtgctttatattattattatggttggatttcagccaacagtggattgaggtacattgagagagctcttgttgctcctgtataggctcaatataggttaggtttcgaaataagacggttttgtggcattcttggtgttgcattgatctgtgatctaattgttcttgaacaatgttcattgcaaaaggagttttactttgttagttatgttcctttagttttatcagtgaccaattttcaacttctcatgttaatttccaaagtctattctgatttggtaatggtcctcaatggtt

SEQ ID NO: 7787 - DNA, 68 bp, Glycine max
  Clone ID: LIB3087-006-Q1-K1-A1
ctcatgttttcgaattttaaacgaaacttttatatacttcttaaatttattcgatcgtttggctcgtg

SEQ ID NO: 7788 - DNA, 413 bp, Glycine max
  unsure at all n locations
  Clone ID: LIB3087-006-Q1-K1-A11
ccgctgtcctctgtcgccgccagatctcagacgagactcagtcacactttctctctttcgcttccacaatgcagctcctccgggcggagctcgcggcggcgctgctcctactcgccactctctccgacgcccacaacatcacaaccatcctctcaaagcaccctgagttctccaccttcaaccactacctgaccctgacccacctggccccggaaatcaacggcaaaaccaccatcaccgtctgcgccgtggacaacgccgccatgtcggacctgctcagcaagcacccctacatttacaccatcaagaacatcctctccctgcacgtcctcctcgactacttcggcgccaagaagctncaccagatcaccaacggcacccgcctcgacgncaccatgtaccaggccaccggc

SEQ ID NO: 7789 - DNA, 182 bp, Glycine max
  Clone ID: LIB3087-005-Q1-K1-G3
aacaaattaacaagaaacaaggagcagcttatgtggtggttgagattccaagcaatatggcagataggaatacaaacaagaagcaaaatgagttatccactatctttgagattggaaagcctgtagtaaggcgtgtccaagggcactgtaagctttgagacaacagaattttttgcagaact

SEQ ID NO: 7790 - DNA, 365 bp, Glycine max
  Clone ID: LIB3087-006-Q1-K1-A2
gtcaaatctcatgttattagattgattgaagaccttcacaggtatgcttatttcaaatgatctttatgttttttgtgtgaagtgatgtgtgtatgtatatataggtggaacttggagatgtcaagtatgttagagggatctatacagatcatgtcaaaggccgagaccgggactaccatgtttttagtatgggtacttatcttggactgattggaaagaggatttctactccctcagatgtaatatatgctggccttggaacgcattatgtgccatctggaaagttaggtttattcatggatgccctctatgtcagaatgtaatatcccaatttttcgtaaataaatctaaaaaagttttttagt

SEQ ID NO: 7791 - DNA, 84 bp, Glycine max
  Clone ID: LIB3087-005-Q1-K1-E5
cccactcgtccgtccactcgttctcggactcgtattcaagtactttttctgtagatccaggctactttatatccaccaattgct

SEQ ID NO: 7792 - DNA, 114 bp, Glycine max
  Clone ID: LIB3087-005-Q1-K1-E6
ggaatagttgctgtagaaacacagacagttatgcaaataatacctgctgatgctggtcagcttgattctcacgagagggttgttcctcaagccgggcaagtgtgggtccctgat

SEQ ID NO: 7793 - DNA, 374 bp, Glycine max
  Clone ID: LIB3087-005-Q1-K1-E7
gcatctgctacgttgtgttgagctttgatatctgtctcgccaaaattcatgatttcgtgttgaatgcatcatcagagttaggtttattttttgacatttggtgtaaaatgggggtgccaacttggagaaaaccagtgatctactgggtttgccttttcgtcattatcaatgcgtttgtacaaattagcaatgcattttatcttccgggaagctacatgcatacttactcaaatggagatccgatatatgccaaggttaattcattaacttctattgagaccgagctttcctacagctactacagtctcccttactggaagccccttggtaaaataaagaaaagcgcttagaatcttggaaagcttcttaaggga

SEQ ID NO: 7794 - DNA, 127 bp, Glycine max
  Clone ID: LIB3087-005-Q1-K1-E8
aggatgcgtcacatgatggtctagcacttacggcacgagtcactgcgatctgggccaaggaagcgtgctgctggtcacaggcgaaaagtgaacgcattaccgaatgatgacccattcacggcacaca

SEQ ID NO: 7795 - DNA, 443 bp, Glycine max
  Clone ID: LIB3087-005-Q1-K1-E9
gggcacggagtggaggacgcgtgactctgtctagaggaacttcacgtatttgtaagcttgttccagaagcatcgcttggtccgttttcttgtcccacggcatcagcttctggagacaccgtgttttctggcttagcttctgacgacgttggcgagccaggttgctctgcgggatcaccggaggtcattacgactccacgcgctgccacttctgctccggcgagtagaggggagggaggcggaggtgtatctcattaagggtatttttgactttcagaaagaaatgacaggtgcaagatacactataggtagtgtaggattcaaaacctcaagtttgaaggatccaaatccacccactataaaggttacttctcacccacccaattacattaattttataactaactaccaaaagattcattatgctcataataattattttta

SEQ ID NO: 7796 - DNA, 442 bp, Glycine max
  Clone ID: LIB3087-005-Q1-K1-F11
cccacgcgtccgattcagtgaaacactagctagggtattgggagctctcgttgtttcggagttagggaccttacgcagccatggccactgctacgaatgccgccgccgccccaccacgccagctctcccagaaggaagctgacatccagatgatgttggccgccgacgtccacctcggcaccaagaactgcgacttccaaatggaacgttacatcttcaagcgccgcaacgacgggatttacattattaaccttgggaagacgtgggagaagcttcagctagcagctagggttatagttgcaattgagaacccccaggatatcattgttcaatctgcaaggccttatgggcaaagagcggttctgaagtttgctcagtacactggtgctcatgctattgctggaaagcacactcctggtaccttcaccaatcagcttcaaac

SEQ ID NO: 7797 - DNA, 318 bp, Glycine max
  Clone ID: LIB3087-005-Q1-K1-F12
ccattatctacttcatagcaggggtccctggagcacatgttctgtggtatcgcccattatatcgtgcttttaggaatgaaagtgctttgaaatttggatggtttttcatgttttatctgcttcacataggattctgcatcttagctgcagttgctcctcctatagttttcaaaggcaaatccctgacgggcattctggctgccatagatgtgctgggcgaccatgctttgattgggatcttctacttcattggatttggattgttctgcgttgaaactttgatcagcatttgggttattcagcaagtatacatgtact

SEQ ID NO: 7798 - DNA, 396 bp, Glycine max
  Clone ID: LIB3087-005-Q1-K1-F2
caagtgtgaaaggctttcggaatatagacttgtttgtccagcacaacgatgggaaaaagagcataggtcctgaaagccagaaaaccttgtgttcatgcttaaaagaagagatgctttatccgttgcgggtgacgatagtgaaccggtgtctcagacacagaacttgtggttgctaatcctgtggagctgagtggaaaggggagaccccgtgtattctatgatgttacgttgactttaaaagcctagggagtatgcattttctcttgtgaagttgatatacattgtacacaagaacgtcattgtgaagtgtatagatttttgctggaagaatgccgtgactttccattgaccagaagccaatcaataactgaaattggtgactaagttcgaagaaca

SEQ ID NO: 7799 - DNA, 92 bp, Glycine max
  Clone ID: LIB3087-005-Q1-K1-F3
acgcacgcgtgcgaaccctagtggtagcaattcttgcatgagaatgttgctttcaggcccggctaactgttgaaaaacaatgcttgcaaagg

SEQ ID NO: 7800 - DNA, 157 bp, Glycine max
  Clone ID: LIB3087-005-Q1-K1-F4
cccacgcgtccgtctatcttcacatatctttacctttctcaaacagcatatgctagctcgggaaccggtgacttccatagggaaactgttatttttgtgcacgctctcatcgatcatcattatttacatagctcatccggctttcataccaaatgca

SEQ ID NO: 7801 - DNA, 441 bp, Glycine max
  Clone ID: LIB3087-005-Q1-K1-F5
cccacgcgtccggctggccaagccttgcaagggaatattgctttttggcccccctggcagaggaaaaacaatgcttgcaaaggctgtggcaactgaagctggagcaaattttattaacatttcaatgtccagcattacatccaagtggtttggtgaaagagaaaaatatgtcaaagcagtcttttctctggccagcaaaattgcttcaagtgttatttttgttgatgaggttgatagtatgttaggaagacgtgaaaatcctggtgaacatgaagctatgcgtaaaatgaagaatgaattcatggttaattgggatggtttgagaacaaaggataaagagcgtatccctgtgcttgctgctacaaatagaccttttgatcttgatgaggctgtattttagagactttcacgaaaaatgatggttaatttggcagatgcttc

SEQ ID NO: 7802 - DNA, 461 bp, Glycine max
  Clone ID: LIB3087-005-Q1-K1-F6
tggttttctgctgcacagaaaatcgctctcttctctgttcaaatctcaatttcaaaaaggagaatttcaattcccaccttggttctttcttctcacgctcaggcccatcttattcactcactcaccacctagggttttcttttccacttcgaagctatgctcgatctttctctcactccgcgttttcccgatcgaacgacgccgttttggtgagttttagcttcgtttcgtttcccgacgcggactcattgcttgctttcgtttcccacgcgattgttggaggagtcgtgttgcgtttgttgaccgaggaagtgcaattagggtttccacaattcggttttggatttggctttgtgatggggatttaagttcttaggagcggtgttggtggtgttgctggtgtttttggagtggggaatttgcgaaatgaaaagggatggtttactctcaatttatttttg

SEQ ID NO: 7803 - DNA, 384 bp, Glycine max
  Clone ID: LIB3087-005-Q1-K1-F7
tccgatttttaaggaggttgtgtgaattgctggtgagtgatttaaatggctcctactagggtggacaatgccaaaagggctgatcccaaagctcatgccttgaagacagctaaagctgtcaaatcaagtggtcaagttgttaggaagaaagctaatatgatcaggacatctgttacatttcacaggccaaggaccttgaagaatgtaatgaaccctatgtactctcgcattagtgctccaaccacaaacaagtttgaccatgatcatatacttaaatttcctctaacttcttgagtctgctatgaataaaattgaggattacaacacgcttggttttattgttgacctttcgtgcatacaagtaaaaagattaaggatgctgtg

SEQ ID NO: 7804 - DNA, 98 bp, Glycine max
  Clone ID: LIB3087-005-Q1-K1-F8
cggacgcgtgggcagacgcgtgtgcctctatatagctagccaaccacactaggagctagggatacttcctatagatcccagggacccagagtcccctt

SEQ ID NO: 7805 - DNA, 278 bp, Glycine max
  unsure at all n locations
  Clone ID: LIB3087-005-Q1-K1-F9
cacactaacactcatcactcggaggatgtttgtgttgggtgtttcttcctcctccttcggcggcgncgncgnctncgncgctgcaaccaccaccacctncactcaccaccttctctgtggaacccttcactctgcttctttcctctcaactacccatccctttcccacaacttcgttgcggtcatcttcactgcacttcangtgtgttcccatcagagccatggctgagattgatactatatcagtgtcaaaaatctgcttcttcttctgctccaggc

SEQ ID NO: 7806 - DNA, 381 bp, Glycine max
  Clone ID: LIB3087-005-Q1-K1-G10
ctcacgcgttcggcaaaaactggcatggcagtggatgaacccgtggtacccacaatatgcgtaaacaggataaactcaattataacactacttgctgtatcttcaggttcaacccaactaagtgtggtgtgaggaatatgtgaaaagtaacatatatgtgaaagagagaggaagagatgtctacgacgctagatcatcctatacgacagaaaaggctaacatatgtcgcagtggtgcatcttaagaaacatggcatgcgctttgaaattgcttgatacgctaacaccgtcctctcttggcattctggcgtggaaaaagatcggcatgaagcgctgcatgtccacactgcttataccaatgtttgcaaaggggatcttggca

SEQ ID NO: 7807 - DNA, 425 bp, Glycine max
  Clone ID: LIB3087-005-Q1-K1-G11
cccacgcgtccgctctcttcaaactagggttttacagaatataagctctctctatctttggttttcgtcattcaaatccaatccaatatcaaatatgagtcgtcatcccgaggttaagtgggctcagagacttgacaaggtctatatcacggtgcaattggctgattcaaaaaatgccaaggtggatcttacaccagatggtatttttaccttctctggtagtgctggtgctgaagaccatcagtatgagctaaaactggagctctttgacaaggttaatgtagaggagagcaaaattaatgtaagagtgcgaagcatattctgggtagtgcagaaagcagaagatggatggtggaaaaagttactgcgtggagaaggcaagccttcacattatgtgaaagtagattgggaataatgggtggatg

SEQ ID NO: 7808 - DNA, 419 bp, Glycine max
  Clone ID: LIB3087-005-Q1-K1-G12
cccacgcgtccggtttgtagaccctgttatagaaaggctggatactaagcattgcattagatacaggctatcaaggccgggtactaagtatcaggatgggaaacacttcagagacctctcaaaactaaacagaaatccaggaaaagttctttatttaagtggccatgctttggaaagttgcctacaacctgagaactgtctccctattaaggcttggcagcagcaagatatagatgacacagctcttttggattttataccatttcttgagtttgttgcccgtagtagtccacctgatataagaccagtgctagcctcttaccaaggatgtgatattccaagtgagttcatcagggcgtccaaagagcatcaaaggagaatgcaagaacaaaagaatcgtggtcgcttttggaaatgag

SEQ ID NO: 7809 - DNA, 260 bp, Glycine max
  Clone ID: LIB3087-005-Q1-K1-E4
gttaaatccttctgctccgcgtcttcttgttcctctcgcccagaatccgagatcaaccgcgactaaggcaaggggtttttgtcggctgcttcagatttctgaaatggcgcctgtttcacctttagccaagtacaacctcgtattcctgggtgaccaatccgtgggcaaaaccagcttcatcactcgcttaatgtatgataaattcgataacacctatcaggctccaatgggtattgattttctatcaaaaactatgtatc

SEQ ID NO: 7810 - DNA, 371 bp, Glycine max
  unsure at all n locations
  Clone ID: LIB3087-005-Q1-K1-C6
cccacgcgtccgcaaagatggagatccctgtgatagattttagtaagctcaatggggacaagaggggtgacacaatggccctattgcacgaagcttgtgaaaaatggggctgctttatggttgagaaccatgaaattgacacacaactgatggggaaggtgaagcagttgatcaatgcatactatgaggaaaacctgaaggaaagcttctaccagtctgagatagccaagaggttggagaaacagcagaacacctctgatatagattgggaaagtaccttcttcatttggcatcngcccacctttaacatcaatgaaatatcaaacatctctcaagaagcttggcaaacaatggatgagtacattgcacag

SEQ ID NO: 7811 - DNA, 441 bp, Glycine max
  unsure at all n locations
  Clone ID: LIB3087-005-Q1-K1-C7
aacgttcgcacactccgtcttcaaaccaagatccgtgttcttcacccacgtgtgtctcccgcttcagatcgtaaacgtctcgctgttccaagatgggtgtggctgagaacattcccgatatggaggagggtaccttggagattggaatggaatacagaactgtatctggagttgctggaccattggtcattcttgacaaagttgagggacccaaatttcaagagattgttaatattcgtttaggagatggaactactcggcgtggacaagttctagaggttgatggcgaaaaggctgttgttcaggtatttgaaggcacatctgggatcgacaataagtttacaactgtgcaatttactggagaggtgttaaaaactcctgtctcactggacatgcttggacgcatnattaatggttctggaaaacccaattgaatatggg

SEQ ID NO: 7812 - DNA, 454 bp, Glycine max
  Clone ID: LIB3087-005-Q1-K1-C8
gcaactctcgtactacgtactaattcatcctttctgcagtaatgtacaacttataaccgaccttaagagttagagaccacctatagtttagtttctggagatataaaggttgtatggttggatggttaaaaaaaaatgatgggtttaatttttctgctaatataaatataaaaattctagatctcttcttgacagtaggaggcactgacttaacaaactgtttttttttttttttaataacaggttatcacaacggagcactttttccctgtgtttttcaatccttatcttcacctcaagatctagccataagccatgcatgtcaaagtagatatgttcaatcacagtatcacaccattaaagtagcccaggcaagcaagacggatggaggggggaagcaaaatgtatattttttattagtcattgaatcacaacttataaatttattaacttt

SEQ ID NO: 7813 - DNA, 383 bp, Glycine max
  Clone ID: LIB3087-005-Q1-K1-C9
tgcctcttcctctcagattcaggttccaactcttctctctctcgccgtctaggtttttcgctcaaaatttcgaaaccccgattttctctcaattcgaatctgcgattcatcgtaacctaaattattagatagttatattatctctctgcgtttctttcagcaattttctattttctcctctcatggcttcagattccaaaaaggatttccctgctgatgacaaagctggaacagaagagagtaaaacatccaaagatgagacttcatctaaagattctccagcagaacaaagagcgacagctacttttggacctagacctggacctgctgggcatccaggcaacccttttgatctctcagcaatgtctggtctgctcaatgat

SEQ ID NO: 7814 - DNA, 320 bp, Glycine max
  Clone ID: LIB3087-005-Q1-K1-D1
cggacgcgtgggcggacgcgtgggcggactcgtgggctcatctgtatgcctatgcttgggtatcattttcttacttttctctcacgctctgccacaaaactccgtctccgcaataacggaataaaaaaacaagtttaattactattatggcgccgagggatcataagacaagcaacgctaaggctaacggtaacggtaacagcggggtgaaggaggtgcatttttcgtggagtgagaaagaggcccgtggggaaatacgcccggggggatcagagatccccgcaaagaagagccgcgtctggctcggaaccttcgacacg

SEQ ID NO: 7815 - DNA, 364 bp, Glycine max
  Clone ID: LIB3087-005-Q1-K1-D10
ctcacactacttactctctttctgtctctaaagggtatgctttgatctgttgcaacttcggagagatgtccattctataacgcagaggcatctgttacatgccaagactagatgcaccaaaagtatctgatgctacgctagagaaaggccaaaatcgagtcatagatgctgtactcacacttagtcgagaaagatcaaagcctaagggatatcttgagcgtgcatagggaggtgctaaagctacttctactgatcgtgaaaggcctatgggacctaatcgatagatccattaatggccggcatctgcacattcacacattaagggaggcactaggcgatgttgcacatactttgcaactgaaaa

SEQ ID NO: 7816 - DNA, 420 bp, Glycine max
  Clone ID: LIB3087-005-Q1-K1-D11
cccacgcgtccgcccacgcgtccgcccacgcgtccgggcacccacacacacagttcgtcggaatgggaagggtgattcgcgctcagcgtaagggtgctgggtcggtgttcaagtctcacactcaccaccgcaagggtccggcgaggttccgcagcctcgacttcggcgagcgcaacggctacctcaagggcgtcgtcaccgacatcatccacgaccccggtcgcggcgcccctctcgccaaggtggcattccgccaccccttccgctacaagaagcaaacggagctcttcgtcgccgccgagggcctctacaccgggcagttcgtctactgcggcaagaaggccaccctcgtggtcggcaacgtgttgcccatccgatccatccccgaaggtgccgtcatctgcaacgtcgagcaccacg

SEQ ID NO: 7817 - DNA, 244 bp, Glycine max
  Clone ID: LIB3087-005-Q1-K1-D12
atctcgcttacacactcgcgtccgcctaggtgttgtctcactcagacacacgattgctgggattgggtaaggtgataatcgctcagcgttagtctgttctgtcatcaggcatatgttagacttacaagccgtgggagcctgtgaagattcgatgtctgaactatctggatctgcacgtgttctgcatggtcttgctgtcgagtgtaatatatactctctgatgtaatgctgctctagccaaagt

SEQ ID NO: 7818 - DNA, 208 bp, Glycine max
  Clone ID: LIB3087-005-Q1-K1-D3
caccaccaccgtggaaggtggagcgtgaggctgtttccggtaacctctcccggcggcgctgagtggtgatcaaggaaatgggtcagacgctgagttgcgtgcaacagcacgaggaccatggtgtgctcttccctgcacttgcaagttgagaatttgaggttgttgtaggccatggtggaggaagaccccactgtgttggaacacacca

SEQ ID NO: 7819 - DNA, 340 bp, Glycine max
  Clone ID: LIB3087-005-Q1-K1-D4
ggagccgacattgtgcaaaaggcactgatagctcctgcagcattgattgctcaaaatgctggaatagaaggtgaagttgttgtggagaaaataaagagtggtgaatgggaggtcggttacaatgctatggtagacaggtatgagaatttagtggaggctggagttatctaccctgccaaggtaacaaggtgtgcattgcagaatgctgctttagttgctggaatggtgttgaccacacaggccattgtggtggaaaaacctatacccaaggcacctgtagctggtgccccacaaggccttgaccgttaatatataggttattagggctacggcaaagaac

SEQ ID NO: 7820 - DNA, 104 bp, Glycine max
  Clone ID: LIB3087-005-Q1-K1-D5
tccactcatgcggtaaaagatttgttgctgcaaaactaggcgagcctaagggagcaatggctgtaggttcaacgcaagctattaaagataccatggctgcactg

SEQ ID NO: 7821 - DNA, 363 bp, Glycine max
  Clone ID: LIB3087-005-Q1-K1-D6
ctctgtctggtgtggacgatctggtcatcgtctctcagacaagcactactcgtgtgttctgtctgacgataacccgcgcagtcgcaggtttcaattcaccatgaccgtgattatgccggttcccattgatcagctagaggtcgaggaggttctcgtgccagacgcggatttgcctgcgcacaatcaccatcccatggaagttgtagcttaacctgaaaatgccaataccgtggagagtcaacccgttgaagatccttcatcatctagacttacatggagaattgacaattgttcatggctgaatacaaagaagctctatgcataaatatttgatgatggtgcctactaaatgcgtgtgcttat

SEQ ID NO: 7822 - DNA, 334 bp, Glycine max
  Clone ID: LIB3087-005-Q1-K1-D8
cccacgcgtccgcgtagccgtcgcactctgtgttttctgcgccgtctccgatctccgacgatggcgacccaaatgagcaagaagagaaagttcgtagctgatggagtggtcttcgctgaactgaacgaggttctgacaagagagttggcccaggaccgttactccggcgtggaagttaggggtacgccgatgcgcaccgaaatcataattagagccaccagaacccaagctggtcttggtgagaagggaaggagaattagggaacctacctttgtgggtcaaaagaaggtcaaagttgccgaaaaccggggtggaccttattcttgaaaaggca

SEQ ID NO: 7823 - DNA, 308 bp, Glycine max
  Clone ID: LIB3087-005-Q1-K1-D9
cttgggagtgagtcactcttcttgcataacccagatctgcagacaatatgcgaagaactggcttgttacatttgttatgccttgtcattgctttagtaagtgtgcaagcagaagatgcgtataagtattacacatggacggtgacttatggaactatttctccattgggtagtccccagcaggttattcttatcaatggtcagtttcctgggcctagacttgacttggtgactaatgagaatgtaattctcaaccttatcaacaagctggacgagccatttttactcacttggaacggtattaaacaa

SEQ ID NO: 7824 - DNA, 114 bp, Glycine max
  Clone ID: LIB3087-005-Q1-K1-E1
cccacgcgtccgcccacgcgtccgagcctctctgttccaaaaccctaatccttcgtcttgcaaggaggtggctgattctgcgcctcgcaaggaactcaaggtcaccttccccat

SEQ ID NO: 7825 - DNA, 419 bp, Glycine max
  Clone ID: LIB3087-005-Q1-K1-E10
gtctttgagagcaatgcaatcgctcgttacgttgctcgactaaagggtgacaacgctttgttctgatcttctgccattgataatgcccacattgaccagtggattgatttttcatccttggagatcgatgctaatctcatgaaattgctcctaccaagacttggatttgccccataccttcctccagttgaggagggtgcaaattctgcgttgaagagagcatttgaggccttgaacactcatcttgcctccaatacttaccttgttggccattctgttacccttgctgacatcataacaacatgcaacttgtatttaggattcagccagctcttaattaagagcttcacctctgagttccctcacgttgaacgatacttttggaccttggtcaaccagcctaacttcagaaagattct

SEQ ID NO: 7826 - DNA, 418 bp, Glycine max
  Clone ID: LIB3087-005-Q1-K1-E11
ctccatccaccctctcctagcaaaggctaaaaactgatgtggtcagtgatggtggtttgtatatcttttgtttagatctgagattggacccaaaggtactctcacaactagaaaccataggactaatctcctgaaaaagtaaagtattgattaaggaacaatttctttacctacaggtgctgctctatgcacatcgtcagggatcaaacccctattatatagtcaaagaacccaagctctttgtcacttgtgccacaccttatagttgtttgtattttatttttttttgttttatgagtaatgctttcaatgctacaatcttcaagcattgaattgaaaatattcacttatccccccatctccttcctttcatttcagttttaaaaagtctataaagcaaaaagttcgagtcatttac

SEQ ID NO: 7827 - DNA, 342 bp, Glycine max
  Clone ID: LIB3087-005-Q1-K1-E12
cccacgcgtccggacaaaaatgcagtgtaccattgctcatgctctagaaaagaccaagtgccctgagtctgacatttactggaaaaaatttgaagagaaatatcatttctcatgccaatttactgctgatctttttgcaatgaaccacacagactttatcatcaccagcaccttccaagagattgctggaagcaaggacactgttggacagtatgagagtcacattgccttcacccttccaggactttaccgtgttgttcacggtattgatccatttgatccaaagttcaacattgtctcttccggtgcaaacattggcatatactttccatacactgaaac

SEQ ID NO: 7828 - DNA, 376 bp, Glycine max
  Clone ID: LIB3087-005-Q1-K1-E2
cccacgcgtccgcttcaatttctctatgattatgattatgatgggttcaaacccaaaacgtcttgcgcacctttctcttctgctcctggtcctcttgtcttcctcaaccgaatccctgagatttgaaatccaatcctggcacaccaaatgcatctcctaggatatcaatagcaattccatgaccggtggcaagtaccaaatcgttagcccctacgagggtcaacctgtgccagatgcccacagattcaccgtcagggtgacttcagcttatgggaacaactatcactacagagatcgcgtgtagacggggcaatttgcgtatgctgcactggaagctggagattacatgacttgcttctgagctgtggatcacaac

SEQ ID NO: 7829 - DNA, 109 bp, Glycine max
  Clone ID: LIB3087-005-Q1-K1-A2
ctcatccatatccaccagcccatcacaaatctctcttcattgccacaaataattcacccgcagtatgcttatctctacccggatcaaggccaccagtattctcaaggtc

SEQ ID NO: 7830 - DNA, 394 bp, Glycine max
  Clone ID: LIB3087-005-Q1-K1-B1
cggacgcgtgggttctcaccttcggcccctacgccgtctactattctgccacgcccttatctgagtgtgatacactcggaacctctatcaaagccgctgttgtttatcttgcaacggcattagtgaagcttatttgtctagctacttttctcaaggtttcggagagtgatagctttgatccgtatcaggagtttttgaaggcattaataggctttatagatgttgctgggctttattttgccttgacccagttgactcacaggaacatctctcagaatcataaatttcaagctgagggacttggctgggcgtttgctgattctgtactgcatcgattggctcctctttgggttggggccagaggattagaatttacttgggattacattcttta

SEQ ID NO: 7831 - DNA, 346 bp, Glycine max
  Clone ID: LIB3087-005-Q1-K1-B10
atctgttccaccccaccaacaaagtatggttacttgttagcagatattatcaagcttatggaggtgaggttgatgaaagagtaggcatccagataagagtttttgacactggaactggtccatttcaacatgtgttggatcagatcttagctcgctctttgaaggagaatcttttgcctgatgttaaccgaaagggggatattgtcaattcattggcaaagccgaagtcaaaagctgtgctgatgacttccttgagctctgggtattctgacatggtgagagacatgtttatggaacatactactgtgacaggagaagttgttggcatttaccagccaagccatga

SEQ ID NO: 7832 - DNA, 286 bp, Glycine max
  Clone ID: LIB3087-005-Q1-K1-B11
gagaaatggcaacaagcgaagaagtggttgctgcgtcgccggaagcagccgcgcctgaggcagggttgaagcacaaactggagagaaaatggacgttttggtgcgacaaccaatccaaacccaagcaaggcgctgcttggggaacctctcttcgcaaggtctacaccttcgacaccgttgaaaagttctggtgtttgtatgatcaggtattcaagcccagcaagttgcaaatcaatgccgattttcacttgttcaagactgggattgaccctaaatgggaagatcc

SEQ ID NO: 7833 - DNA, 312 bp, Glycine max
  Clone ID: LIB3087-005-Q1-K1-B4
cccacgcgtccgcccacgcgtccggccgttcataccaaaagcgtgtcatgcttcttgtgagacaatactacggatgagcaacttttaggtcagggattggcactgaatgacagccttcagcgagtactctgtcgacatgatgacattgtgaaaggaactgctgattctggtgccagagaagcagaaacttcagttctaccacttgtaaatgtaaaccacgaagatgatgaatcataggatgattttgctcaactagcccataggtcatcacgtggtactcaggcacagaatcaaaaactagcctatgacaag

SEQ ID NO: 7834 - DNA, 386 bp, Glycine max
  Clone ID: LIB3087-005-Q1-K1-B5
cggacgcgtgggcggacgcgtgggtcccgatctacccctccccttcctcttctccttatgcatcatcttcttccacctcgctgaatccaaaccctccctcaccgccacgccaaccaccctcccagcctccggcgccaccgtcaatctccgctggtccggcatcccttccccctccgacctcgacttcctcgccatctattccccttcgaccttcccgcacgacaacttcatcggatacctcttcctctcgcagtccgtcacgttgcgcaccggcttcggcaacctcttccttccccttcgtcgacctcggtccaactactcgttccgcatcttcagcttgacccgcgccgagatcaaccccaagcgccaggaccacgatcacaacc

SEQ ID NO: 7835 - DNA, 354 bp, Glycine max
  Clone ID: LIB3087-005-Q1-K1-B6
ctctctctttctctctcggctactctgcactcatcaatggcgacgcaatcggtagacgagtgaaactgctaagaaagtcatacgacaggttgagttttattaccgcgatagcaaccttcttaccgatggtttcatgcggtatgaaattacctatagcctatatggcatgattagcttggcgctgatttgctcggataatcgaatgcgaaagcaccttaatttgggcgatgtatagatcgaataaatggtccaagataccgtgaatgcttatggttaaactttgagaaattcaactacactcaaggtctcctaagattggaaaaaagttgtcatgaaaactgaactttcaaagtt

SEQ ID NO: 7836 - DNA, 442 bp, Glycine max
  unsure at all n locations
  Clone ID: LIB3087-005-Q1-K1-B7
cccacgcgtccgctttccacacacacaacacaaatacctgtctttctctctcgtcttcggattcttcggacatacaaaaactcacactctctctctctcttcaaatcaaaacccctcacaaaattcacaacaacatacccacaaatcccaaatcctgtcttctcatataaaagaacccttctttcgaatccttcccgctctctctctctcttactctttttccctatccgattcaattcgcgcgcaagtccaaaccctaatccctctctccgagctctgggatttttgggttgataaaaaaaattagggtttgatggctgaccaaggattggaagggagccaaccagtggatctacagaagcatccttctgggatcgtgcctacccttcaaaatataggggccacagtcaatntggacttgaagttggaccttaaaacaatt

SEQ ID NO: 7837 - DNA, 353 bp, Glycine max
  Clone ID: LIB3087-005-Q1-K1-C1
ctctctctctgttttctctctctcgtcttacttgaaactccacaacccaattttcttttgctatgacccaattccaaatccaaatcaccaattctaattccattcttcaggagttgaattgaattcgtgatgaagagggaccacaaagatagctgcggcggcggcggcgccgccggagggactgtgaagggtgagtgttcctcaatgcatgcaaacgggaaggcgaagatgtgggaggaagagcaacagcagcagcagcagcaacaacagcatcaacaacaacaggggatggacgaagtgctggccgcctttggggtccaaggttcgtgctttcgacatggctgacgtggcac

SEQ ID NO: 7838 - DNA, 359 bp, Glycine max
  Clone ID: LIB3087-005-Q1-K1-C10
atatctagattctcttcatctgcctttactaggataattaatattgatttcattttatttttttacttaggctgaaaacaattcaaaaatcaaaatgaaatattttgaatttacaggattctttttgaagaaactaactagggacacataaagtaagtcttttacagtcagaaataggtttttaactttttactacttgactgtcaattgaatcagttaaatggtgtgaaagacaaacttatgttggttagttacagtgtcagaagcctgggagtgctttctggttgtagctttggctttatatgtttttcaaggaattacttacttatcactctgataaaaaaagaaaaaagaaaaag

SEQ ID NO: 7839 - DNA, 412 bp, Glycine max
  Clone ID: LIB3087-005-Q1-K1-C11
aataactaataattataaatattactattattactagagagtgcgcgctcgcctgtgatgcgttgcgttgcctcagattcaggcaactcatggtggatgtttctccctcactagagttgacaaaggtagatgaagttgataatgctagagaagggtgtggtgtggcacttagcttagctatttatgattgcaatttttccaaaaatggaagtttggattcgttgatgttgaccggatctgagtaccccatttcactatcaccaccttttagctatagttcatgccttgcatcgcctgaatttgcttccccttttgtcttataaggttcattaggaatggaaaatgcctccctttcacattcttagatcctattcaatcaaaaaagcaggtgctaatttagttgaagtatgac

SEQ ID NO: 7840 - DNA, 453 bp, Glycine max
  Clone ID: LIB3087-005-Q1-K1-A12
cgagcgacccgtacgtatacgcatgggcagacccgttgctgccagatgaactggctaatacgcctgatgagagggtggactgagaagctgcaggctgttgtagaccttgcattgggtactacatcctctgcaccagatccttttcacgaaggcttaacctgtgttgacgcaagtaactaattcagcttgtcagatactcttgtacagctgataaataccgttcacacattctgcaaacatttcactttcaggaaagatcttctctgattacaaggttgggcacatttaatgatcttgaaggtactcagagaaattctggctacaatgttctggaagagcctgttagcatcactggcctcgaaacatgttcacttagttacaaagttcactggccactgtctatagtgttatcacgtaaagcccttacaaagtaccaattactttttcgatttc

SEQ ID NO: 7841 - DNA, 447 bp, Glycine max
  Clone ID: LIB3087-005-Q1-K1-C12
ggagacaatcatgtgaaggacgaggcatgatggaagtgttgtgggaggaaagaggcagagctgcgatcaccagagtggaagcgcgaaacggtcctccccggctttccattttttctcttctgatgaaattatagttcatcccagttgctgattgagattgaatttaaattcgaaaaagcgttcttgagccactgtacttttacagatctgcggctactggctagcctatcgtatttttgcgtagatctagtgtccgtgaagcggttaccatttcaccactcaccactattcatctctgtcttctatattgatctgaaatttgagatggaaagcgaaaagaaatcgccagcaatatctgatgtgggagcatgggccatgaacgttgtcagctccgtcggaattattatgggccacaaacagcttatgttcaacaaatgctatgctttc

SEQ ID NO: 7842 - DNA, 181 bp, Glycine max
  Clone ID: LIB3087-005-Q1-K1-C3
gctccgtaccagtttcactgcataaattttagagaaaactctgcaaacatgttggtttagcatgacctccttacaggtgatgagcttctctcggactccttccgttacaatgaaattgagaatggaatgctgtgggaagttgatggtaagtgggttgtgaagggagcagttgatgttgaca

SEQ ID NO: 7843 - DNA, 196 bp, Glycine max
  Clone ID: LIB3087-004-Q1-K1-G5
aggggctaaagctccaaacctccaaagaacaaagatccaaacttgagtggagatgtcaggcagagggcggtgacggggaggatggggatggggacgaggaggtggattcaatacattagcctctcaagttccatttgatctatttcctgacgctgatactgtgcctgatgttaaccttgatgatattcatgatgat

SEQ ID NO: 7844 - DNA, 267 bp, Glycine max
  Clone ID: LIB3087-004-Q1-K1-G6
cacaaatcttagccgccattgattattcctcttccatttctcttactttctcaggctttgtcgattacccatttggttatttcgccctaatggctcttgctccatccaaagtttccaccttttctgagttttctgccaaacccagtgttgggggtgctcagaaaaacccaacttgctctgtttctgttaactttttgaatgagaaacttggaagcagaaaccttagggtctgtgccataacggggcctctcactgtggtgatttttg

SEQ ID NO: 7845 - DNA, 436 bp, Glycine max
  Clone ID: LIB3087-004-Q1-K1-G7
ctctaaggtcctaaacaatcctctttcaaaaacataccgagaaaagtgtggaaatgacgacaccatcattggtagagcctctagttcttcaactgcatgagatctcagctgtcaaatttggcaacttcaagctcaaatctggcatcttctcaccaatctacataagacctggcgtctcatcatatgttacccttctctcctgcaacagatctcttaaacccttatttcttcaaactctttcacttcctttgacctcatatgcggcgtcccttacactggcttacccattgctacatgtgtctctcttgctcagaacattaccatggtcatgcaccgcaaagaaatcaaagattatggcactgctaaagctattgaaggcgattttaagcctggccaaagttgcttaatcattgaagatttggttaccacaggcacg

SEQ ID NO: 7846 - DNA, 175 bp, Glycine max
  unsure at all n locations
  Clone ID: LIB3087-004-Q1-K1-G8
gctgcttccttttctggtggtggtgttngatgctntgnatctgtgcctgccttgggtcctggcaaaacttgtcgaaaatttcggtcagctggtgaaaaattcttgcacctggacataaatatgacaaatcagagggtatcacttcttctgaagaagaggcttacaacccctaaat

SEQ ID NO: 7847 - DNA, 434 bp, Glycine max
  Clone ID: LIB3087-004-Q1-K1-H1
aaagaacctttccacggctgcaaactttgccaggaggctacttgagaccaatcctactgttgaaaaccaagctaagacagcaaggcaagtgcttgcagctgcagaaaagaatatgacggatgccttacaattgaactatgatttccgaaacccatttgtaatttgtggagcaacctatgtgcccatttatcgtggacagaaggatgtcgcttgcccctattgtacttcccgtttcgtgccaagccaggcgggccagctatgtgctgtgtgtgagctttcggtggtaagggcggatgcttctgggttgctctgctctcctttccagattcggtgatttcactggatcaagaacgggtaatgaattttggttcaagtcaagtttcaattttcaacaaccgataagagtcctattgatcaattaatatattttcttt

SEQ ID NO: 7848 - DNA, 384 bp, Glycine max
  unsure at all n locations
  Clone ID: LIB3087-004-Q1-K1-H10
gcagatattccaatgctacaaatgcagctgatcgtcctacatcttcagaattgcagccagagaagcccaatatggattctctatatatgccttgngaccatgttaatatgacacccacatttagaggtagaggcctatctataaggggtgagggtcctttaaggaatgtgaggagccgttctgcacttgatttggaatccaacctggctaggacccatttatcaaatactcatncacacaactcatactctactggtctaccaattgaccattctaacatggtcgatctttcaactcaaacttttggcactttgaccagggattggagcccatgagtatatgtcctnctcatggaaggtgtcatcatcagatgcaaatgctttt

SEQ ID NO: 7849 - DNA, 412 bp, Glycine max
  Clone ID: LIB3087-004-Q1-K1-H11
caattcccaattcgacggacgcgtcacgcgtgtctggacataactctagactatatgtttttctctgttaacacagagttcattttcaagtctctgtctctagaagatggggacaacacttctttcttcacacgattgtctccaatgccacgtctttcacagtgaaaacttcgctattgccgcatcacgtgtggcatagccaagaaactataatccttacactaatagctttgcctcctcatccaaaccaaatcgctgtcggaagccgagtcctgtcaccaatcgaaaccgccggcgatctcctgcgaatgccacctttccagcgaatataggcatgggacacgtttacatcctgaagcgaagcgagaaatttagcctgcacaataataccaacccaagactctctgagaac

SEQ ID NO: 7850 - DNA, 280 bp, Glycine max
  Clone ID: LIB3087-004-Q1-K1-H12
ccagttcaaaggttaggtaggttaacactcttcttcatcgtcgtcgcaatgggacgtgtgatccgtgcgcagcgtaagggagcaggctcggtcttcaagtccgacacgcaccaccgcaagggccctgcacgctttcggagcctggactttggggagcgcaacggctacctcaagggcgtggtcaccgacgtcattcatgaccctgggcgcagcgcgccggtcgccaaggtcggcttccggcaccctttcagatacaagaagcagaacgagctcttgattg

SEQ ID NO: 7851 - DNA, 263 bp, Glycine max
  Clone ID: LIB3087-004-Q1-K1-H2
cggacgcgtgggcggacgcgtgggcggacgcgtgggctttgaggggcttgagcatccctgtgggtaaaaactttgccatgacatggaaaatggggtgataggttgagtggtctcatatctgatttatcattttgaaactttggtatggtcttttttctttgctacaattcttgtagggcgtgtgagggaaaagagatgtgctagaattatgctcgtccttttccaaattaacaaggccaaggcacaaatggcgtatggggttg

SEQ ID NO: 7852 - DNA, 292 bp, Glycine max
  Clone ID: LIB3087-004-Q1-K1-H3
gcagtgttagggtttctgtagcctccaaccagaaagagagggaaatggctcccaaacatcgtagtacgggtttgtttgttggattgaacaagggtcacgttgtcaccaagaaggagttgcctccacgcccttcagatcgtaaggggaaaacaagcaagcgagtgcactttgtgaggaacctcattcgagaggttgccggctttgcaccttatgaaaagcgaataactgagttgctcaaggttggaaaagattagagggcactgaaagttgccaagagaaagcttggaaccca

SEQ ID NO: 7853 - DNA, 250 bp, Glycine max
  Clone ID: LIB3087-004-Q1-K1-H4
cggacgcgtgggtttaaacctaattctcatttcttcatcgttcgattcttctcctcctaaagatgcagatcttcgtgaaaactttgaccggtaagaccatcacccttgaggtggagtcctccgacaccatcgataacgtgaaagctaagattcaagacaaggaagggatcccacctgaccagcagagacttatctttgcgggtaaacagcttgaggatggtcgaacccttgccgactacaacatccaaaa

SEQ ID NO: 7854 - DNA, 398 bp, Glycine max
  Clone ID: LIB3087-004-Q1-K1-H5
cccacgcgttcgtgcaattaaggtgaaagcatctattataatttggttcacttcatcagggagggctgcaagattgatcgcaaagtattggccaacaatgccagtactatctggtgtgatcccccgactcaagacaaatcaactcaagtggagctttagtggagcttttgaagcaagacaatcacttatcctgagaagtctcttttctatgcttgcagattcacgacatcctggttagtcaacaagtgccaccaatgaatctattcttaagggtgcccttgatcattgaaaatccttgggaggtattaaatcacatgaccaggtaattggttgccagaaacctggtgatgcattaggcgttaagaatattgggcttgaaaatttaactatttaagagc

SEQ ID NO: 7855 - DNA, 208 bp, Glycine max
  Clone ID: LIB3087-004-Q1-K1-H6
ctgaagcctgaaaacttgctggttaccaaggatttcatcaaaatcgctgatttgggactagcccgagaaatcaggtcacaaccaccctacactgagtatgtctccacacgatggtatcgtgctcctgaagtgctgcttcagtcttatatgtatacctctaaagttgatatgtgggcaatgggtgctataatggctgagcttttctctc

SEQ ID NO: 7856 - DNA, 415 bp, Glycine max
  Clone ID: LIB3087-004-Q1-K1-H7
caagcattgtaagaatcttggttcattgtgggatgatttggggaaagcaatggaaggagaagatgaaatagaggttggagaagtcgattgcggcatggacaaagcagtatgttccaaagttgatattcactcctatcctacctttaaggttttctatgatggtgaagaagtagccagataccaaggtacaagagatgttgaatcaatgaaaacctttggtttggaagaagcttgaaaggcaacagcaaaagcacttgaaagttaccaagaattattaccacttttgaagggccgtcattatctggattacaactaactctttactggaggtggggcacattccagataagttatcacctttggagtcaagcttagacattcattcttctctggtctgatcaacatttggttggtt

SEQ ID NO: 7857 - DNA, 429 bp, Glycine max
  Clone ID: LIB3087-004-Q1-K1-H9
cccacgcgttcgggacattagtcttgactatgcactttttaggtctccttcggtggtagtgcaagatggttcacttggttaccgtaacctctttgatgcttcggttgatgctgtttatgctgcattggagaaagcacgaggagggtcattgaacatagttgtgtctgaaagtggatggccttcttctggtggaactgcaacttcacttgataatgcaagaacttacaacacaaacttggttcggaatgtgaagcaaggaacctctaaaaagcctggtgcacccctttgaacttatgtgtttgccatgtttgatgaaaaataaaagcagccagagtttgaaaaattttgggggctcttttctactataactaagcagtccaaatactcgattaatttcaattaatttttagcagaaacataatttggtgt

SEQ ID NO: 7858 - DNA, 381 bp, Glycine max
  Clone ID: LIB3087-004-Q1-K1-G4
ctgaaagcgaagaaagaaacagagttagagaattgaatgtgaatggggaatcagaagcagaagtggacgcaggacgaagaagacgctctcatagccggggttgaaaagcacggccccggaaaggggaagaacattctcaaggatccccaattcgccccttttctcacttaccgttccaacatcgacctcaaagataaatggcgcaatttgagcgttagcaacggtgctcaaggctccaaagaaaaatctagggttcccaagcctaaagccttctctgcttctgctgctactaccggcaccaccggcacttcttagaacgcttcttctgcttctcaaagcgcattggctgatgctggtgttgccccttacgcttttaaaaat

SEQ ID NO: 7859 - DNA, 212 bp, Glycine max
  Clone ID: LIB3087-005-Q1-K1-A1
caagattctgttcggctacttgctgttgatggttgtgcagctctggggaaattgttggggcctcaagattgcgtggcacatattcttcctgtcatagtcaatttttctcatgataagtcgtagcgtgttcgttacgtggttgctaattaactatatgaactatgtgaatctgttggtcctgaccccagccagatcagaattggtccctgcat

SEQ ID NO: 7860 - DNA, 271 bp, Glycine max
  Clone ID: LIB3087-005-Q1-K1-A11
caacgatggcgactcagatcctctctcgcatcttccccaaaaccctaaccctagcccccgtcctgttccgatccctcagcagcgccccctctcgctcttccctgccctcgctctccttcctactccgtatctccgtcgcagccaaccactccctccgtcgagtcctcctgcgaaactccccctcactcacgtgccctatccacacgcaccaccacctgctacctcaacgaccacaaccctaactggtccaaccgttcgacgaaagaaacca

SEQ ID NO: 7861 - DNA, 350 bp, Glycine max
  unsure at all n locations
  Clone ID: LIB3087-004-Q1-K1-E6
ctttgtgtcgcctggtcttggcatctccgcagcaccacccaccctggaccaggtcttcaagagagagaaagagaaggaagaacacacacacacacacacacacgttaaactaacattttttattagtaagaagacatggctcaacccagttccaacggggatctgaataataaccagcagggtcaggttcagcaacagcagcagcagtgggcggcggcgcanccgcatcagtatcagcagcaatggatggccatgcagtacccgggcacaggcatggccatgaagcagcagccgatgatgatgtacccgcagcattacatgccctacgctcacccccattatgcggcggc

SEQ ID NO: 7862 - DNA, 271 bp, Glycine max
  Clone ID: LIB3087-004-Q1-K1-E7
tccacgcgtccgtccacgcgtcctagaaaaaaaaaatggaggcactggtgtgcagaaaactgggtgatccaacggtatctttggaagacaacgatgatagcccaatagttctgtcaaagaatcatccaattacccaactcgattcttccactgccagaagaatgagaatcaaagccacaagcttgaaccttcgcaactacttgcagatactgggcaagttccaagagaaaccctttttggcctttaatcccgggtccgaatattctggctt

SEQ ID NO: 7863 - DNA, 337 bp, Glycine max
  Clone ID: LIB3087-004-Q1-K1-E8
aagaaattgaaaaggagataaagcatatttttttcttttaaaagatcatagatgggtcaagtgatacatgttgcggtggtggcagcatccttgggatgtgtttcaacccttttgatggtttttatatggcgtttgtgtcaccacaagaaagagcacagaaactttgtccaacccaatagtttggccagaatggagaacctccaagcaggaatagcaagacttcatcaacaaccaacaatctatcaccaatttgctgatcacaaaaacaaaaacaaaggcaacttttatgtgtttcataatggagtctctagaaaaggacatttggttaattgggatg

SEQ ID NO: 7864 - DNA, 418 bp, Glycine max
  Clone ID: LIB3087-004-Q1-K1-E9
ctcgttttctcacacactcgcactttctctctctaaaaaccaccatttccgaggtcgagttttctggctctatttatatggtgtgtaatccgtgtttcgttgttgcgtgcgcgtgcgatttggaatctggtggtgcgaggggcatttgaatgtgagagaggattttttgatttttttttggattcgcggtaggtagatcggcgatggcggaggtttccggcgacagcggcggcgccgcgctgtcggtgtcgggatcgttcaaggaggggagaggctcggcaaggcggcgcggcggctgaagaggagtgaggccgccgagcatggacgccgacgagttcatgaatttgttgcacggttcggatccggtgaaggtggagctcaatcgtcctgagaatgaagttcgagacaaggacaggga

SEQ ID NO: 7865 - DNA, 269 bp, Glycine max
  Clone ID: LIB3087-004-Q1-K1-F1
cggaggttctcagggtggtgaacaggctcttgaggccgagtatgaggaagtcaagaaatgagacatttaagcttggttttgtagcatttgtttcttattaatcatcacataattggaagaatacaaggttacttattttgtatctaatgttgaaagccattttttctggaaggctctttaatttgtagcacttttggagtctgaagtccgaacacggctgtttgaataacttcgaattttttgcataaaatttgttcactacgtttggc

SEQ ID NO: 7866 - DNA, 416 bp, Glycine max
  unsure at all n locations
  Clone ID: LIB3087-004-Q1-K1-F10
tgtgttaaccactaaaatctctgaagcagagggcattgtctactgtcacaggcatgggtgaagaaaagaaagacgaaggaaacaaagaagaagccaaagaggaaaagaaggaagaagagaagaaagaggagccaccaccggaaatagtgctcaaagttgatatgcattgtgaggcctgtgcaaggaaagttgcaaaagcattgaaaggattccaaggagtggaagaggtgagtgcggatagcaggacaagcaaagtggtagtgaaaggaaaggcagcagaccccataaaggtgtgtgagaggctacaaaagaaaagtggtaagaaagtggagctgatttcacccttgccaaaacctncagaggagaaagaagaaccacccaaagaagaaccaccaaaagaggagaaaaaatatgag

SEQ ID NO: 7867 - DNA, 262 bp, Glycine max
  Clone ID: LIB3087-004-Q1-K1-F12
caagcattgcatccctcttgatttgtagtttgaattgggctttagattaaagggatgacggatcaatatgggttttaagaacattgagcgtgacacgcaacaatggctaagttcttcactgctatgatcttggcactctttgacatatgcatacttgaaacataggtaatggctgctcatgaacaaagaggccacttcgatgacaacatgagcctatatggaactgtaagtgtcaagacttaccaatgcccatgacaatgct

SEQ ID NO: 7868 - DNA, 398 bp, Glycine max
  Clone ID: LIB3087-004-Q1-K1-F3
cccacgcgtccgattcctcccggtacctgtattgtatcagaaggaacgtgatatcatgatgctgtaaagagagagagatatgagataattcacaattcctcctttatcttgtttcatagcagtgaagaaaaaaacagagaaagcatgggcgtggacttctacaagattcttcaggtagatagaagcgccaaagatgaggatctcaagaaagcatatcgaaggctagccatgaagtggcaccctgataagaaccctaacaacaagagagaggctaaagctaaattcaagcaaatttttgaagctaatgatgtttggagggatccacagaagcaaggagtgtatgaccagtattggtaggaggggctgaatggggtgccgttggccccaggtggttttcc

SEQ ID NO: 7869 - DNA, 283 bp, Glycine max
  Clone ID: LIB3087-004-Q1-K1-F4
ggaaagctgcttcttctttgcaaaggcggcgaggcaccaacgctctctagctccggtctcgttgtattttgaggtagataacacaatgtcgctgaggcgtttcttaggctattctgatggtgaggtcatgaggtctgatgcaaaaccttgttccaggctaatgaggcacacagctgcaatctttagtgttggtggagcattatgattttgggtcctttggcgaatgcactatggtcctcgaattacaaatcctatgagtcttcggtgggcaacatgtggagct

SEQ ID NO: 7870 - DNA, 144 bp, Glycine max
  unsure at all n locations
  Clone ID: LIB3087-004-Q1-K1-F6
ctcaaccccaacaaagcaagagaagtanggtttttgtgcttggcanaagaaagagaagagaagatggtgtcaggttcggngatctgcgcgaagcgcgtggtggtggacgcccggcaccacatgctgggtcggctcgcctcgatt

SEQ ID NO: 7871 - DNA, 223 bp, Glycine max
  Clone ID: LIB3087-004-Q1-K1-F7
ggctgcggaaaacgttgttgagttcacagacttacccgtcaagaggccaagagaggaagaagaaggaaccaatggcgtctccaacgacgccggttcagcgctccccaatgacccttaataccctggcatctctgcgggtattcccgggtggttctccgaaatcaggccaatgtggcccggggaggcacattccttgaagaattgaaaaaattttgttcaaggg

SEQ ID NO: 7872 - DNA, 218 bp, Glycine max
  Clone ID: LIB3087-004-Q1-K1-F9
gctttgcaaccttcctcttctccaaagcttttattgctaggagcagcacttaacagattgggagtatggtcaattggaacaggaattattcttcctaagacatttaatttggtgttgaagccccggctttgatgcttaaaggtgttgaaaaacttgcccattccctcaaaattaccattggcccttaagggccttatgtggttattggaccaaagttt

SEQ ID NO: 7873 - DNA, 435 bp, Glycine max
  Clone ID: LIB3087-004-Q1-K1-G1
cccacgcgtccgcaattctttgcacatctaattggtatgtcaaagaatctatcgttaggggatatgaaatttatttttaacatgtatgtgtataatgatatgtgtacgtgttgtctatctttagctccgagtatcctttttcttgatagggtttttcggtgacaagatagataaaattcttttaattttttattaaattatttattatatatttttataatgctataatttgatctaggttttctagataaatatatgggtattgaatatatgatgttgaatgatgtgaaatcagacggattcccactgatattatttgtatatgattacacaaccagcttctactgacaacatcatggtcatgctctttggtttggagattcttaatgttttaagtttcatctgctgtgtaaatatgttttaaaataggttttt

SEQ ID NO: 7874 - DNA, 422 bp, Glycine max
  Clone ID: LIB3087-004-Q1-K1-G10
ggaatccttcttaatagtactgttttagaattgctaagatgaagtcaagttttgaggaattgaagaagaagaagaagaagaagggagaaggagagcattggaagacatagagataaagaattgaagataatgcgaaccctttgcgacgtatgcgagagcgccgctgccattgtcttctgcgccgctgatgaggctgctctctgctccgcttgtgaccacaagatccatatgtgtaacaaacttgctagtagacacgttcgggttggccttgctgaccccactgatgttccacgctgtgacatatgtgaaaacgcacctggtactgaatgctttcttttactgtgagatagatggtagttcgctgtgtctgcaatgtgatatgattgtgcatgttggttggtaaaagactcatggaagatatc

SEQ ID NO: 7875 - DNA, 229 bp, Glycine max
  Clone ID: LIB3087-004-Q1-K1-G11
cccacgcgtccggtacaagattggaggtattggaactgtgccagtgggacgtgttgagaccggtgtcttgaagcctggaatggtggtgacttttgcaccaactggactgacaactgaagtcaagtctgtggagatgcaccatgaatctcttacagaggcacattctggtgacaatgtgggattcaatgttaagaatgttgctgttaaggatttgaagcgtggttatgtt

SEQ ID NO: 7876 - DNA, 329 bp, Glycine max
  Clone ID: LIB3087-004-Q1-K1-G12
ctcggggccattgacttgagcatattcagtgcgtcctaaagcaaaaagatactgatggctaaagtcatgtttggtttggtctgcagcttcctcgtattatgctggttcacaatcaacactagcgccttctcaccttctggatggaccaatgcccatgccactttttatggacgtagcgatgcctcggggaccatgggaggagcttgtgggtatgggaatctgtattcgacagggtacggaactgatacagcggcattaagtactggcatatttaacgatggagcttcatgtggggagtgttacaaaatcatatgcgattatcaaacaga

SEQ ID NO: 7877 - DNA, 303 bp, Glycine max
  Clone ID: LIB3087-004-Q1-K1-E5
cggacgcgtgggttgggattcatttgggccaagaatcttggacccaatacgtctacatacggagacatgatttttcttgatcttccctcaattcacatttattatgtgacgctggattccgatctggacctgcagggagccatgagtgcaactgcgtcattctgcgttactgcttccgctgaccaagtactcttgctctttcgatccctggttcgagccgctcgccaagtcccccgatgccatatcagggaggaccacaaacgaaccaccatcggatactttcgacacaacgccactcttttc

SEQ ID NO: 7878 - DNA, 275 bp, Glycine max
  Clone ID: LIB3087-004-Q1-K1-G2
gagaaaaactcagagtcaagacaagcaacgtgatgcatagggcgaagacggtaacgatgaggaaggggacgatgatgacgatggagatggtggatttggggagggtgaagaggagttgtcatctgaagatggaggtggatatggcaacaattccaacaacaagagcaactcaaagaaggcacccgaaggtggcgcaggtggagcagaagagaatggggaagagggataagacgaagatggtgatgatcaagatgatgatgaggatgacgacgatg

SEQ ID NO: 7879 - DNA, 254 bp, Glycine max
  Clone ID: LIB3087-004-Q1-K1-C4
ctttggcaaaaccgcacctacgatcgcttatagcttcatctcccaaaacagttttgtcaaggaccaaacttccctttccctgaggacttccctgaataccccacaaagtttcagttcataagctaccttgaaagctatgcaaagcacttcaacatttccccacagttcaatgaaacagtgcagtctgcaaagtatgatgagacctttggcctctggagggtcaaaaccatcacgaagatcaagaagttaggaga

SEQ ID NO: 7880 - DNA, 381 bp, Glycine max
  unsure at all n locations
  Clone ID: LIB3087-004-Q1-K1-C7
ggtccgtgaatnntcccgggtcgactccacgccgtnnccgaaaatttattaaattgtgagggagactttgcgcatgtttatgccttntcatcggtttcagtgaaaaaggggatgcctactgcgcccattgtctcctttcaacgacgccaaataaatacctcaaaacgataccttgacagagttgggtattgatatttgcattaaagttcataatctggtgaattactgctaggggcaaggctctgccgtcatttgaggggtgccctgtgaaagttcctgggatgatgcgacgtggttctggtttaggttctgctgcttctaaccgttctcggaagtcccttccttttcctcaattgttggagaataaaattgctgttcagg

SEQ ID NO: 7881 - DNA, 333 bp, Glycine max
  Clone ID: LIB3087-004-Q1-K1-C9
cccacgcgtccgctgatctgctgaaacacgccacactcttcttaccatgggccttctcgagcacttgtgggatgacaccgtcgccggtcctcgcccggagaacgggcttggcaagcttcgaaagcaccacaccttcgcttttcgatctggcttcggcaaggaatcagacagcggaagcgtgaaatcgtaccgtgaagatttgccggaagatgccgtgagagtgacgcgaagtatcatgatcgtgaaaccacctggtggttaccagaatccgagccgatccggttcgggtttccccggcgggtctaattcttcggtggcttccttttcgggagc

SEQ ID NO: 7882 - DNA, 444 bp, Glycine max
  unsure at all n locations
  Clone ID: LIB3087-004-Q1-K1-D1
ggcagccatagangnngngngcaacccattttggaaatctggaggagctctaattcagcgggtcatgatcttaacttttgggtcactagctaactcaactccgtacctaggaggggtccttctggtgattgttctagcctggttatcagcagccaagtcgcttgatacacagtttactgccttgcgtcgagaagaagaacttgagaaagagatggagagagcagcaactgttaagataccagtggtggccaaggatgaggatggaaatggttctcttaaaagagttccactgttaaatccaacagctggggactcctcaagtacattgcattgaactcaacttgcaagatttcaagcttaaactacattgaattgcaaggcatgaggatgtagccaaaactcatgagatctgttagcttaaactatttgttgtcggtcattatc

SEQ ID NO: 7883 - DNA, 232 bp, Glycine max
  Clone ID: LIB3087-004-Q1-K1-D10
cagctgaactgagtttttggcatggtattatgacatgatcattttgagaagatattcaggtggtagaatgctacctaccctatgatgccctatgatgccctctatgatgccctaccctttatagtatcattcttctgtagcaggtcaagaattttaattaattaaatacactaagggagaaaaaaaaaaaataaataatattatttataataaaaataattatatattttat

SEQ ID NO: 7884 - DNA, 249 bp, Glycine max
  Clone ID: LIB3087-004-Q1-K1-D11
ttcaactctgcttcccctggcaaccttcttcttagttctctccgcttcttatgtccagattgctggggcgaaagcacaaccgttgactagtctcaagcttaactctccgatccttcaggagtctattgctaaagagaccatggaaaatcctgaggcaggatgggaggctgctttaaatcctaattcttccaattttccagtggaccatttaaaggcctttttgggagcaaacccaccgcttaaaaggga

SEQ ID NO: 7885 - DNA, 372 bp, Glycine max
  Clone ID: LIB3087-004-Q1-K1-D12
tcacttttctactttgagtcttcttgatccttctttttcttcttgaactcaaacatggcagatgaggtggttctgctagatttctggccaagtccatttgggatgagggtcaagattgcacttgctgaaaagggtatcaaatatgaatacaaagaagaggacttgaggaacaagagtcctcttcttcttcaaatgaacccggttcacaagaagattccggttctcatccacaatggcaaacccatttgtgaatccctcattgctgttcagtacattgaggaggtttggaatgacagaaatcccttgttgccttctgacccttaccagagagctcaagctaaattctgggctgattatgttgataagaagata

SEQ ID NO: 7886 - DNA, 404 bp, Glycine max
  Clone ID: LIB3087-004-Q1-K1-D2
ctgttctcttctgtcattgcttctcctccacacacgcacagagacacacacttttgcagtcacattgagaatggggcgtgttcgcacgaagacggtgaagaaatcctcgcggcaagtgatagagaggtactactcccgcatgacgctggacttccacacgaacaagaaggttctggaagaggtggccatcattccctccaagaggctccgcaacaagatcgcggggttctccacccatctcatgaagcggatccagaagggtcccgtgcgtggaatctccctgaagctgcaggaggaggaacgcgagcgtcgcatggacttcgttcccgatgtcttcggcatcaggaccgaccagatcgaggtcgacaagggagacgcttgacatgctcggcggccttgggatg

SEQ ID NO: 7887 - DNA, 385 bp, Glycine max
  Clone ID: LIB3087-004-Q1-K1-D4
gtggttatcatcttcttcttcctctttcttagatctcttctttctctacgccgcacgccgaaaccatggccggaaaaggagagggtcctgctatcggaatcgatctcggaaccacctactcttgcgtcggtgtgtggcaacatgaccgcgttgaaatcatcgccaacgaccaagggaacagaaccacgccgtcttacgtcggattcactgacaccgagcgtctcatcggtgatgcggccaagaatcaagtcgccatgaaccccatcaacaccgtcttcgatgccaagaggttgattggtcgtagattcagtgattcctctggtcagagtgatatcaaaatgtggcctttcaaggtcattcctggtgctgctgacaagccaatgat

SEQ ID NO: 7888 - DNA, 379 bp, Glycine max
  Clone ID: LIB3087-004-Q1-K1-D5
attggttggtagttgtctcaaaaatctcttgccctttggccataatcaaaaaccaagacgctgttcatcaagctgctcaattatcaagccaactttgcttggttccactgcagaatttcagtttattcttatctcggtagattggattgaagtagattccttataagtgggcataagttcaagtgtagagaatgagtcagcctaagattaagcgccgagttggtaagtatgaggtggggaggaccattggtgaaggtacatttgcaaaggtgaaatttgcaaggaactctgatacgtgagaccctgtggctcttaaaattcttgataaggagaaagtgctatagcacaagatggctgagcagatcatgagataagtagc

SEQ ID NO: 7889 - DNA, 136 bp, Glycine max
  Clone ID: LIB3087-004-Q1-K1-D7
cccacgcgtccgatttatttctcgagcctcacctgggcaattttttaatgttcccgtggggattgcatttttgcatgtacagagacttgcataacatttaatattaagctgttatcgcatgtattctcatttggtc

SEQ ID NO: 7890 - DNA, 267 bp, Glycine max
  Clone ID: LIB3087-004-Q1-K1-D8
cccacgcgtccgctgtatctcaagaacttggatgatactatcagtgatgaaaaacttaaggaaatgtttgctgaatatggtacaataacttcatgcaaggttatgcgagaccccactggaatcggtagaggatcaggatttgttgcattttcaactcctgaggaagcatctcgtgctctcggtgagatgaatggtaaaatgattgctggaaaacctctgtacgttgcccttgcacagagaaaagaagacagaagagcaaggttacag

SEQ ID NO: 7891 - DNA, 58 bp, Glycine max
  unsure at all n locations
  Clone ID: LIB3087-004-Q1-K1-E1
cccacgcgnccggcgggaacagagggagcaagccgnaacccacagacgaacaagcccc

SEQ ID NO: 7892 - DNA, 428 bp, Glycine max
  unsure at all n locations
  Clone ID: LIB3087-004-Q1-K1-E11
gcggatgaattcgatgatgaaggtgatatgggggagatgtatcaaaatactgaaaatatggctgataaatatttccctgaggatggtgatttcggctatgatgactatgatgattattactaaaatgttgctagatgatgtttctgattttttttagcaattcatactcaacatggctggcagcgtggaaccgaagattgtcagagacccagaaatctttggaagctaagttgcaatctgataagctagtatcactacacgagcttttttaatgattccacatgctttaaagaaagcttgngaattattgtanccgaaaatttttaggtaggtattaccagcatcactctgcttaacacanaatanggggttagattatgtgtttcatttaaaatatactnatctctaaacaattttttaaatatgac

SEQ ID NO: 7893 - DNA, 240 bp, Glycine max
  Clone ID: LIB3087-004-Q1-K1-E12
gaaaaagaaccctcaaccaaacaacaactacaacaaaaaaaaagccctataaaagaatttggagaaacaatttctcactcctgaaaatctcatcctcttcttctttacatttgttttggaataaacattttgctgatactgaattttattttctcttgctttcgtttcttttcgacctttttttttttctgcttcgatgttttcaaggagaaagggattggagtaattaaagagagtgca

SEQ ID NO: 7894 - DNA, 407 bp, Glycine max
  Clone ID: LIB3087-004-Q1-K1-E2
cggacgcgtgggttcaacagttacttggatcttgaaatggctgagttcactctgcatgaagttctgggtacctcacttagtcaggtcatgacaaaaagtaatggaaagagtatccgaatcgtcaatgatgttgcagagcagattgtgatggaaactttatatggtgatagtcttaggctccagcaggtattggctgactttttacttatctccatcaatttcactccaaatggaggtcaggttgttgtagcaggcactctaaccaaagaacagttaggcagatcctgccatctcgttaagttagagctcatcataacacatggtgggagtaggggaccagaagcattactgaaccaaatgtttggaaacaactggctagaatccgacgaggggattagcctactgat

SEQ ID NO: 7895 - DNA, 336 bp, Glycine max
  Clone ID: LIB3087-004-Q1-K1-E3
ccttctcttaaaaccgcagtgtctgagacgagcgagccactatgacccgccgcgacttcgatctccggcaatctaactaaaacggcggcgtatagcgggatctgcgagcatggagggtgagaacgcgagcaaggtgatcgaattggtgaacgagatagccagcatctccgagtacaggcctccggtgaagaagcagtactgcaacttggcgcggaagctgaagcttctgatcccgatgttcgaggagattagggacatgaacaaagacgcgctttccgaggacactttcaacgccgtcctcgccttcaaggaagctctccaatccgttagggaact

SEQ ID NO: 7896 - DNA, 398 bp, Glycine max
  Clone ID: LIB3087-004-Q1-K1-E4
gagaaaccctaggtaagaagaaaagatgccggctggtcatggtttgagatcccgcaccagagattccttctctcgtcctttcaggaagaagggaaccatcgccctcaccacatacctgagaacctaccacgtcggcgactatgttgacgtcaaggttaacggtgccgttcacaagggaatgccccacaaattctaccatggccgcaccggacgcgtctggaatgtcaccaaacgtgctgttggcgtcgaagtcaacaagcaggttggcaacagaattataaggaagaggattcatgtgcgggtagagcatgttatgccttcaaagtgcactgaggagttccggctcatgaagattaagaatgatcagcttaaggccgaagcctaggtcaagggtgaga

SEQ ID NO: 7897 - DNA, 362 bp, Glycine max
  Clone ID: LIB3087-004-Q1-K1-C3
cccacgcgtccgcccacgcgtccgcccacgcgtccgttttaggcagacattactggcaaatggtgtcaatttttctgggttacagatggcttggcctccgagtattttatggtgagtttaaatggtgctttgactatattatgcatttgcttttgtgctaacatatgttgcaggtgaaaggctggatcagtcatatagggctaaaaatctttactcagaatcatagattttgcttctcctagtttactttctgaaatatgtgcccaaagaaatttgcttgactgtactttaatttcttgacttttatatgattggtttaggataattacttgttctcctccatctccgcagttggggcacaa

SEQ ID NO: 7898 - DNA, 299 bp, Glycine max
  Clone ID: LIB3087-004-Q1-K1-A4
gggatccgcaaagtcaaagtcggaacctccttcgcaatagacgttctggaagcctcgttcgctccctcgaacggtgcgtttcgaaaagacctaagtgcccccgtcatgaaacccatgctaaagttcctcaacagaacaaaatcctttttcttcttagacgtctaccctttcttctcttggtccgctgaccccttgaatataaacctcgattacgctttgtttcagtccaagaatttaacggtaacggatccgggtacgggtctggtttacaccaaccatcttgatcaaatgggggatgc

SEQ ID NO: 7899 - DNA, 320 bp, Glycine max
  Clone ID: LIB3087-004-Q1-K1-A6
gctaagtaaatcataagtcacaacatatagtttcaaatggggatagcagaagcatgctccagattccttggggactttttacaagcattgaaatgctccccacaaagctcagtgtctcaccttgatcacaagccccagaatgtgctcaaacttaatgacaagatggttggtgcccttgtcagtgtttttggcatggaaaccaacggaagaatcaagaaggaaaatgctaggcaagtggtggagaagctaggtttgatgtatgataagtcctcatcatcatcagggtttgagctaactaagggtggcttgctggatgatga

SEQ ID NO: 7900 - DNA, 329 bp, Glycine max
  Clone ID: LIB3087-004-Q1-K1-A7
ccgttcttttctctctgaaattctcatattcatcacttctgagctctggacgagatccctgtctctcccattccagatctcgccatcagattcaccctttcattttaagcaaagtcataacttgaagaaagttcatggctgctccaccggcaagggctcgtgccgattacgattatctcataaagcttctcttgatcggtgacagccgtgttggaaaaaattgcctccttctgggtttctccgatggggctttcaacactaggttcatcacaactataggcattgattttaagataagaaccattgagcttgatggaaaaccgatcaag

SEQ ID NO: 7901 - DNA, 103 bp, Glycine max
  Clone ID: LIB3087-004-Q1-K1-A8
gcgtaacgacgtcgtttgcgtcttgtgcgaatgaggcaaagaaagagagacagggatgtggtggtggttgtggtggtgttggttggtacaaactaatgcaatt

SEQ ID NO: 7902 - DNA, 352 bp, Glycine max
  Clone ID: LIB3087-004-Q1-K1-B1
tccacttcttcaacacaaaaatccgaaatttgtgctccaacacaaaaaaatgaaacctacaatcaccattctcttgttgtctctactacttctcataacttcaccctccttggcaacccgacccgcatccaaccctgatcaagtcaagcacaacaaaaacaacaaccaaggtggtggtgctggtgctggtgctggcgggttctttggccctggaggagggttcagcatacccggttttggaaacgggtttggaaatggcatcataagaagaggatacggatccgggtatggaagtccgaatggaggctcctctaaaagtggtatcattagaccaaccggtgtgtgcaaagac

SEQ ID NO: 7903 - DNA, 268 bp, Glycine max
  Clone ID: LIB3087-004-Q1-K1-B10
aaagagttctctctttcttcaactgatctattccattctccttcaggttttgttcagttgtcgctttcctacactggtgcttcacctgatgttatggcaatttctgcaatgccaaacaaggtggccacagatggtaccgtgcatgactcagatacgtccgagtcactggcccgggatttagacaaaatcgagttcccagatccaaagattgtgaatgaagaccacttgatggtttcagaatacttcggcattcggtgtgaggagactc

SEQ ID NO: 7904 - DNA, 393 bp, Glycine max
  Clone ID: LIB3087-004-Q1-K1-B11
tgttaagcaagaagtagatcgtaatgaagacatgattcgaagcgcactccgagctattgcatccttgaatcgcataagtggaggagattgcagtgtcaagttcaagaatcttatgaacgaaatatcaaaatcacaaactctctgggataaatattattcaatccgcaatgaatgattcacatacagtcttaatttttctctctatcatagttctggaatgagtgttcaaatattacttgccgagacatctccgctagttgatgcaaggggtctggaaaactagttaatttcattataacataggagatttagattcaagcaatcggaatactagtggtgatttcttgtataggatgaaagattttgccttttctgtagctacattatctcatt

SEQ ID NO: 7905 - DNA, 286 bp, Glycine max
  Clone ID: LIB3087-004-Q1-K1-B12
gcgaaagcgaaataccactacttttaacgtcatgatacttattccgcgaatcggtagcggggcactgcccctctttttggacccaaagtccgcttccgccggtcgatccgggcggaagacattgtcaggtggcgagcttggctggagcggcacatctgattaaagattacgcaagtgtcctacgatgagctcaacgagaactgaaatctcgtgtggaacaaaagggtaaaagctcgttcgattctgatttccagtacgaatacgaacgcgtatagcgtggtctatc

SEQ ID NO: 7906 - DNA, 361 bp, Glycine max
  unsure at all n locations
  Clone ID: LIB3087-004-Q1-K1-B2
atttctaggtgctataaaacctgttatcagatcttggttgccccacttccatttcttgctgtgttgttgttcccctcctcataaggaccattgtataatacaaattcttcattcttcattgaatgacagctatttaggttgactacacggttgtgttgttgttctctcctctttattggaagccaataggagagagagagttagtattattaagctactgtgtgaggcttatttccatggttcattcgtgtggctgtctacctaatttgttctgatctaactntggcctaggaggcccaccattggtttttggtgggcttccattgacccaataaaaaacccatctttaaaaggggttttg

SEQ ID NO: 7907 - DNA, 423 bp, Glycine max
  unsure at all n locations
  Clone ID: LIB3087-004-Q1-K1-B3
tgagaagccattatttcagttcagattcattttctcaacatttgttggtacttttactacatttactatctctctaaatgatgtctntgatctcttctctttcagttgttcaaacccatgttaacatcagatcctgatttgttgctctatttattttacgctcgagactaatttactttacactattactacatatactattcactttcccttcacttgtttacatcgcaaaccttctctctcaatactacagaagataacattgcagaaggcgtaaaccaagcatggcaacagtgacgggctcttcttatgcggtgtcaggaagcgcgtgttacaagcaccgtggcgcgtctagaagagaggccaaagtgaaattcttggctcaggtaaggctcaattatgatgggtttgagatccctgaac

SEQ ID NO: 7908 - DNA, 347 bp, Glycine max
  unsure at all n locations
  Clone ID: LIB3087-004-Q1-K1-B4
cccacgcgtccgaatttaccagctatacttgttccttttgaaggttagaagtgctacaatgcanacaatggcagctactcaggaagatgtgaagcttttgggtattgtgggaagcccatttgtgtgcagggtccagattgcccttaagttgaagggagttgaatacaaatttttggaagaaaatttgtgcaacaagagtgatttgcttctcaaatacaaccctgttcacaagaaggttccagtgtatgttcacaatgagcaggccataccagagtctcttgtgattgatgaatacattgatgagacatggaagaacaaccccaatcttaccttctgatccttaccaa

SEQ ID NO: 7909 - DNA, 442 bp, Glycine max
  Clone ID: LIB3087-004-Q1-K1-B6
ctcactcacaaacgcacactgaattcaaaatcatcgaaagagagaggcatggccgagcaaggcttcatcatgatcaagccagatggcgttcaaagaggccttattggcgagattattagcagatttgagaggaagggtttttacttgaaaggggtgaaactcggtactggggaccggccttttgctgagaagcactatgctgatttgtctgcaaagcctttctttagtgggttggtggattacattggctctggccctggtggtgccatgatctgggagggtaagaatgttggtacaactgggcgaaagattatcggagccacaaacccagcttaatctgagcctggaactattcgtggtgactttgctattgacattggaaggaatggtatccatggaagtgattcagttgagaatgctaacaagggaattgcattggggt

SEQ ID NO: 7910 - DNA, 172 bp, Glycine max
  Clone ID: LIB3087-004-Q1-K1-B7
ttttcttcattttctctcttcctttcacctagtcacgcactcgcctcgactcgtgcggagtccgatccccccgagtcacactcagccagcaccaccggccgatccgaccatgtctcgagcctctatcgccgccttcggcgagatcatgctgatcgggggcagagtcgtagtc

SEQ ID NO: 7911 - DNA, 255 bp, Glycine max
  Clone ID: LIB3087-004-Q1-K1-A3
cgaactactccgaagccgctcacgttatccttactacaacactccctaaaccctaaccaagcatgggttcttccaccttcaccgcaatggccgcttgccagccttgcttcttcggcggcaacttcttctttcccaaccaacggcggaacaaagccgggcctttggtcagacgcaacccggcccgccggggcttcggcctgggccaaggaatgcgccttaaccaaaaacggaccgcaaattaggaacctcccaacc

SEQ ID NO: 7912 - DNA, 346 bp, Glycine max
  unsure at all n locations
  Clone ID: LIB3087-004-Q1-K1-C10
ccaattcccaaaccaaaccctctctcttccggcgttctgggggtggcgtcgccggcgatggccccctccggttccctctccacccttcaattcaaccctctcgtcttcgcttcactgattccctctttcaaaatgcttccgatcgcttgctagggttttccctctcccaaatctcctcctcggaaagcaccctgtaccttttattcctccgactaatcaacttctttgctatggctattcgtgtaaccttttccttttcgggctatgtcgcccaaagcctcgccttctccgncggcgtgcgcgtcggcaattcgcgttgcgtccaagaatgcttgatccgtacgcg

SEQ ID NO: 7913 - DNA, 272 bp, Glycine max
  Clone ID: LIB3087-004-Q1-K1-C11
acgcgttcggagaagacaagtgtgatttgcagtcggattgccggtgtctgtttcgtcgaaggcgtcctcggttctggtgcgcgttctaagccgctactcacttcgctagcgatccttctttgttaatttgattcctgattcgagcatttaactggtggttgggccaatctcactgggttgatccccagtccgaaactgacaactatgagcagcactctttaaaaccatatttcaagtatataaaagttttgaattaagtaagcttaaagaag

SEQ ID NO: 7914 - DNA, 143 bp, Glycine max
  Clone ID: LIB3087-004-Q1-K1-C12
gctgacacgtgcttgttctgattcaggcgttccggcaagggctacggcgccggtggccggggctgtggctggaccgctgattgcaaaaagaaatgcatcgcttattgctaaaccataatatggttacacttgctatcactact

SEQ ID NO: 7915 - DNA, 416 bp, Glycine max
  unsure at all n locations
  Clone ID: LIB3087-003-Q1-K1-G8
gtaaaaaatgtaaagtaactaaactacaattacgaaattgcctaaacatcctaggtttcatttttaactttcaaataatattttttccactcgatgcaaagcgccttcaatctctgtggttctaatggtctagcatcattgaaatattgcatgatataataaaacataagttaataatataatatcaatcataacaaaatgaaatntgtttgaattaaacaattactgttttccaattattcttgaaacttcctaagaatatagttgacatccagtgcattacataatacccacactcagtgcttncttttggctattacactaaatacattatgaaatttagatattcaatgttaagtacaaattagtctacacagtactaaaatataactagaagcatttgttaaatgacttac

SEQ ID NO: 7916 - DNA, 383 bp, Glycine max
  Clone ID: LIB3087-003-Q1-K1-G9
cgctttcacttctaacatctgcagaaggtactcaataagattcatacactctcaaatcagacccttggatcctaaattctagcaccctttatcctctaatgggattttgataaatcaacagttttttttttttttgtccctggatttggaaaacagctagtttccatggaaggtttggtgagttctgggatcaacacggttcgtgtttttggcattacaaaacaccaatctcgttttcttccttcatcaactctgcatctgaggaataacagtgtgtgtggatttggaattggggttgagaagaagaagaagaaacagtgtttcgttgtggctgcttctgttggtggctccaaagtggtccattttgagaattcccttccttt

SEQ ID NO: 7917 - DNA, 378 bp, Glycine max
  Clone ID: LIB3087-003-Q1-K1-H11
catgattgttcttcaaggccaagagaaaatcttcctttcagaaaccaaggaaggtggagagattaacaaacagtatacaaacatcaccttcacaccaacacaggcagatcgctttgtcttggcatttcgaaactggctaaggcggcatggcaatggccaaccagaatggtttggcaacagcagcgaccaaccattgccatcaactgttttatcaaaacgtcagatgttggatagatttgaacagcacactctcaagtgttcatcatgtaaagcagcatatgagggattccaaacatggcagaaagtcctaattggtacaacagttgtgttttgtgcaacatcagggatcccatcagatgtccagttgcgtgtactttt

SEQ ID NO: 7918 - DNA, 279 bp, Glycine max
  Clone ID: LIB3087-003-Q1-K1-H12
aatatccgggctcgcgcacgcgtccggatgagcggaaatcgacgccataagaaactattgctgtcacacacccatgtcagcataggcgacttggtcacaatctccagacgtcagcttcacacgcaacacaaagcctatcccaacatgatggcgtatcgaaactggctaaacgcagactgaaaatggccaaaccgaacgggttgacaccaacaccgacaaaccatcgatatctactagaccatcagaacgtcatattgaagctagatttgaacatcacac

SEQ ID NO: 7919 - DNA, 243 bp, Glycine max
  Clone ID: LIB3087-003-Q1-K1-H2
cccacgcgttcgcccacgcgtgcgaaaccctattcgatatcacaatcggaggagcatactgaaacagagaccattcatggacggtgattcctcttggagtgctcgtctctcttccgctttcaagcgctaccaatccgctcttcaatctcgatcagacatgttcatgggttttgatgaaaatgatggggacgatgatataagggaagagattctctggccattaaagtctgaggattttgatat

SEQ ID NO: 7920 - DNA, 460 bp, Glycine max
  Clone ID: LIB3087-003-Q1-K1-H3
cccacgcgtccgctgcagcagtgtcagtggcatcaagcagtttgactagttcaaacaccagtacagattctaatcgtgtcatgtcatcatcttcaacatcagcttctcttcacttatctaatcaagcacctaaagacacagtgccatcaatacctaacccacctggcttgaagttaaccttagagtcacttaagtcagagattccaccagctgctgcacttaaatcagatatgcaaccagctgctgtgtctaattcaaagactgttttaaatgcttctgcagaagtagtcactcggccaaatgaacctttaaatggtgcatctgaattgaagcttggaccctcaagaaatttcagtcctactattgaacaaccttccaacaatacaacaagttttggtctcaatgttgtctcagtttctcaagcagcacagccttctgatgctcctttgcagctttcaac

SEQ ID NO: 7921 - DNA, 441 bp, Glycine max
  Clone ID: LIB3087-003-Q1-K1-H6
cccacgcgtccgctcctctctcttccccttctccaatccatggtctccatctccgtcacaaagaagcgagattcttggcggtggcttctaccctctactttgatggaatcccattcatattgcaagtgcgtactcatagaggaacaaccacttataaacacccaattttgaggacttcacacaatgctcctcaatgtagcttgcgagcaatctccaagaagcatgaaaatgtggcgtggttatctgttagtcctaaattgcatgttcagaataaattccccagagatgtagttgtaagatctgaacttactgctgctgggtctgctggagatggctatttcctacctgagctgaaagtggaatctaaagtcaggggagtttggttttaatgtgtcactgccttttgtgccatatttctttttatgatgatgctggttgggc

SEQ ID NO: 7922 - DNA, 390 bp, Glycine max
  unsure at all n locations
  Clone ID: LIB3087-003-Q1-K1-H7
nccacgcgtgcgnccaatcacgcccgttccgctcttctgtctcgaaacgacgtcgtcttggatgaccgcagatctgctgctttctcccattcccttcttcccttcagaggttacacttttaccaatatgcccctccttttaaatccaattattggtagcttgattgctctaatcagaaattgtagatcggttgtggactgggggcttgagctctcatgctatgaaatatggtttcatgctatgtcttgtcttgtgttggtattaactatttctatcggcaaaggttagatgctagtttctctttctggagtttaattagctgttagtttgctaggtgattagtttttgttattgagaggattctgacccatgacctgttcccttaaatta

SEQ ID NO: 7923 - DNA, 418 bp, Glycine max
  Clone ID: LIB3087-003-Q1-K1-H9
atgggttccctagaagccatgactaaagggagcgatgcaaggtacttgggtgatacagcggagctgaaaattgctcagggggttgttggagctgttaaagataagggctctgtcttgaatttcataccatacaccttgcaagcagtcaggcaagggtttcaggatatcggtgccaactctctacagtctgctcatgaccttctaagatccagggtgttaagactggaggtccggagtggagcagcacaagttgaaggtggaattcatgggctggtttcttatgaaaagaaatacttttgaagtatgaaaccatccaaaaatcataagcggtgctataatcccttgctgcagttcagcataaaagaaagggacacactgttattgggttaatggcaacttgttgctactgtgtctagcg

SEQ ID NO: 7924 - DNA, 382 bp, Glycine max
  unsure at all n locations
  Clone ID: LIB3087-004-Q1-K1-A1
gcgtaatcaggatgattttgatgaattngtttatgttgacgaactatacagttcattaccgttagataaggtggagactctagaagatcttgttacaattccccctggtctttctaaggtggcacctagtcttagcttgaagaatactttgacagtatcagcatcacaatcagcatctgcatcgcaaacatctgatacttctgtccaggagcaagctgatgacacaacgtcccangatagcaattctgacattgttgccaaaactccaccttgtaaaagtgggggaattagttctgctacctcaactcctgttgaccatgctactcctgtttctgtgaatgtttctggtcataacttgtctagtgcacctgttgcagtccta

SEQ ID NO: 7925 - DNA, 226 bp, Glycine max
  Clone ID: LIB3087-004-Q1-K1-A12
tccaattgcaattctagtgaactccattcatttattgtcttttattttgacttgtgcacattcatcatattcacaaattccattcaaaccacatatgaattaattgatttgggtgatgagcgcgtgaaaaagaagaagaagatgatggcacggaagaataaaagggttgcgcccgaagaagcccttagggccattgggttgggttacgaactcaccaacgatctga

SEQ ID NO: 7926 - DNA, 459 bp, Glycine max
  Clone ID: LIB3087-004-Q1-K1-A2
gaagtatttcaagaaggtgaagcctctctacgagaaactctcccagaagcagcaacagcagcagcatagaacgggaggagaggctggcgtactgttaacggcggaggctggtgcaacaacgacaactacaacgacgacgacgacgacgacgtcggttttgtctctgttaaccaagacggagagatctaccaaacaaaccgagggtactaataagagagggagaaaagacagtagtgtgactgcactttctcactctttctcggggaatctcagatacccgagaagaagaagaagctgcgtttcgagttgtccttcttccatgagatcatcggccaaccattctggggtgctttctcaaagagctgctgccgccgctgctggtatgtattgcggagacacttctacaatggaagagttgcagaatgcaatccaaggagctatcgcgcattgcaagaactc

SEQ ID NO: 7927 - DNA, 440 bp, Glycine max
  unsure at all n locations
  Clone ID: LIB3087-003-Q1-K1-G7
cttctcttgcggctagggttttagcgcagcttcttctagatttaaggaagatgggtaaggaaaaggttcacatcagtattgtggttattggccatgttgactctgggaagtccactaccactggccacctgatctacaagcttggaggcattgacaagcgtgttattgagagatttgagaaggaagctgctgagatgaacaagaggtctttcaagtatgcctgggtgcttgataagcttaaggctgagcgtgaaagaggaatcacaattgatattgccttgtggaagtttgaaaccaccaagtactattgcacagtcattgatgcccctggacacagggatttcatcaagaacatgatcactgggacatcccaagctgactgtgctgntcttatcattgattccactactggtggttttgaagctggaatttaaaggatg

SEQ ID NO: 7928 - DNA, 307 bp, Glycine max
  Clone ID: LIB3087-003-Q1-K1-F2
cccacgcgtgcgtttacacgttcgtacactcgttctagttcctggagtttccagcggtggtgactgtaacagccttagtcaagacctatttccttggcggagcaatggacagaggatcgacgattgactggaagttcataaagcacacaggcatacgaatatacttcgaagataaggcggtgccgacactcgtcggtaagttgaatggtccaacttcacagagagttaagtcacaccgttcagttatacagggatatcattcaatgtgcgaacgaaaagctcattacagggtcctagattctgtcaa

SEQ ID NO: 7929 - DNA, 185 bp, Glycine max
  Clone ID: LIB3087-003-Q1-K1-F3
caattcccattcgacccacgcgtacgcccacacttacacctactcatgagacttacccagtttattctaacatcataccattaataggcaacggtgcactatccacaacagaaggactgataacaattatccttttaattactcacatgtgttatcgacttatccataacaaaacatgcatttta

SEQ ID NO: 7930 - DNA, 358 bp, Glycine max
  unsure at all n locations
  Clone ID: LIB3087-003-Q1-K1-F4
cggacgcgtgggcggacgcgtgggcgacccacgcgtncgcggacgcgtggggtgtatgaggagagagaaaggaagagagaggaatgaagagcacagcactacacagcttcgaaataggaaggggagaaattttgtatgcgttggatttcgtagatctgaataaatgacaaatgtatcattcaaagaatgttcctagtgcaagtttaattggtggtaattcattaagtcatggtcagcacatagattgtggtggcagcacaatggatcctggcaatggaggaaatggtcttagcaacaactctaatcttaccttaaaacaacctttactgtggacacatgaattgcatgaacgctttgt

SEQ ID NO: 7931 - DNA, 209 bp, Glycine max
  Clone ID: LIB3087-003-Q1-K1-F6
gcttttagctttttgatccttttttcccttaggtgaagtcataaaaaagttttgacttagggtatctggtggtgtagaacatggtcacaaatgacgagtgagagaccaagaaagtgtgctgaagttcttttgggtgcttttttttttaattggagcttacggaaatgcaccttgaaaaatagcgtttggatattacttaatttcaagtc

SEQ ID NO: 7932 - DNA, 458 bp, Glycine max
  Clone ID: LIB3087-003-Q1-K1-F7
cccacgcgtccgaaagagtctcacgcagcctcctcaaacatcagaccgagaagaggagtcggacacataacgtagcagaaagaaagagaaaaaagagggtctcactcgcgctccggagttattgagttttctataacaaaacaggctgtagaggtagggattctgttagctgccactgccagattacttgcttctgagttttatgactctgttgggttttcattatgagtggtgcacctaagagatctcatgaagagtctgttcattcatcttcaaagcacccgaatgaagatttgggtacatattccaagttggtttcatcgtcagtttcaaatgagtaccatatgcctcatgatataactcaggactcccgggtggcaaaagtgcctcgaactgaatttcatgatgcagatagaagatctcctcttaatcctgtgtatcggatgtcgtcaccgttg

SEQ ID NO: 7933 - DNA, 189 bp, Glycine max
  unsure at all n locations
  Clone ID: LIB3087-003-Q1-K1-F8
acacttccgacgatgccgacgtgaggggagagcagtgggttgaagtagtgtcgtgggagccgagagcctntgtctatcacaattttctgacgaaggaggaatgcgagtatctaattgacatagcaaagccaaatatgcataagtcatcagttgttgatagcgaaaccggaaagaagtaagacagcagag

SEQ ID NO: 7934 - DNA, 345 bp, Glycine max
  unsure at all n locations
  Clone ID: LIB3087-003-Q1-K1-G10
ggaacaaacaacattagaggggttgtggtgcttctgtgtcctgcaatttccttttgacctggggttggattcatcaaatcatcaaaaatgactgtaggggcaggaatatctggtgcaaatgggaacttgatggtgttggggaacaaagtgctgagccatgtccatgacaaggttcttgttacccctgcatgtggtggtgctttgctcaatggggcattcattggggttcaatcccatcacaagggtagccgcacagtcttcccaattggcaagcttcangggttgcgatttatgtgtgttttccggttcaagatgtggtggatgacgcanagaatgggcacttgt

SEQ ID NO: 7935 - DNA, 321 bp, Glycine max
  unsure at all n locations
  Clone ID: LIB3087-003-Q1-K1-G11
nccacgcgttcgcaggtaatggctgctaatgaacaaggaggccacttgtatgacaacaagggtatatatatccttacctattcttcactctcttgtctctctttcttgtggggtgtgaagaataaaaaatggggtcttggggttttgatttctaagggttgaactagtgctgatttatgctgctttactgtgtttttcttcttcagagcaaatatggaagtggaagtgtcaagagttaccgtaagtaaagttcttgtcttcatcttctcattttatggtacatctagcaatgtagaacattatgatatttctccaaaatgg

SEQ ID NO: 7936 - DNA, 173 bp, Glycine max
  unsure at all n locations
  Clone ID: LIB3087-003-Q1-K1-G12
aattctctcgggtcgatcccacgccgtcttcgcccacgccgnntccgaaaaaactcgacacccatagatgctacgtcctaagctaagaatcaatacacggggccgagtctcacgcttcatagaacacaatgcgccatgtgcaaaggaaactttgcttcttggtgccctttttg

SEQ ID NO: 7937 - DNA, 457 bp, Glycine max
  Clone ID: LIB3087-003-Q1-K1-G2
cccacgcgtccgcatgagcacactttgtatggcggaaaatatgaaggaggtggaagttgaggatggatatgtcttgaaagaagagatccatctcacggtgctaaaaacctctctgttcttcgcgggcgatggcttcagcgtctacgattgcaaaggtcaactcgtgttcagagttgactcttatggacccgacactcgcgacatagacgaactcgttctcatggatcctaacggacgttgcctcctcaccgttcgtcgaaagcggccgagtttgcatcaacggtgggaaggtttcaaaggggagagaatggacggtgataaacccatcttcagcgtgaggagagcgtcgatcataggacggtcgcgtgcgagtttgacggtggagatgtacgataaccccggtgaggaagtccagatcgaggggtgcttctcgcagcgttgctgcacgggtttcaat

SEQ ID NO: 7938 - DNA, 464 bp, Glycine max
  Clone ID: LIB3087-003-Q1-K1-G3
ctctgcctgtaagagtgaaaaaaccttctcttttccttctctcaagtctcaagagatttcatcatggctccaaagaaggacaaggctccaccaccttcctccaagcccgccaaatctggcggtggcaagcagaagaagaagaagtggagcaagggaaagcaaaaggagaaggtgaataacatggtgctgtttgatcagggcacctatgataagctcctttctgaagctcccaaattcaagctcatcactccttccattctttctgatcgtttgaggattaatggatcacttgcaaggaaggctataagagaattgatggctaggggttcaatcaggatggtgtctgcccatgcaagccagcaaatttacaccagggcaacaaacacctaggtgtggaactgatcttagcttacggagtattggtaggaatagtaatgaagtattggtcttttgcactttgggaa

SEQ ID NO: 7939 - DNA, 357 bp, Glycine max
  Clone ID: LIB3087-003-Q1-K1-G5
tttatttcgaacattgaaatgaaactaaagtagatgtggttatgaaatatgagtgtgatggcgagacacatgagttgttgtgagttaatttaaagtgaggttttgcgcactatccttgttaccgggacaggacgagagtgttacataaagcgttagcctcactcatcactgcgactacaatggagcctgccacatactacatttgcaccgatgaacttcacaagcataacacgcgccacgacgcctggatctccatccactgcaagatctacgacgtctcctcctggatccactgtcactccagcggaccgcttccactactcaccctcgccggcaccgactccaccgacgccttcc

SEQ ID NO: 7940 - DNA, 386 bp, Glycine max
  unsure at all n locations
  Clone ID: LIB3087-003-Q1-K1-G6
attaacttgatcagatgagtgtgaatgattttatttgtgtgtgaaaatgaaatgcaaaagataatgcaagtttcgtgtgtttacatattcctttttatgaatctcaagttcattattggtgtattgggttgtattgactgtgtgcttcggccatcagctgattgattatattattgaattttatttcttctacataatgtgttgccttctctgggttgggatttattcttagtttttgacatcttacatttctgccttagttgtttaatcttggtntattcttctttgttatgaaatcgttattttgtaaactctangaacaactagactacttgagacttgagagaattgtaattgatgtactaaattattttgtttaattcttt

SEQ ID NO: 7941 - DNA, 301 bp, Glycine max
  Clone ID: LIB3087-003-Q1-K1-F11
aaatgatacagggtcatctcaaacgagtggcagtcattaccaaagggtgcttgttgttggattggtacagatcacacattctctacacatcttatgaccgctactgggaatttcaattcaaaaaatattctatgacaaggtggatttggtgttgtctacaaaggatgccttgcaaataaaatgttggtggcagtaaagaggctgaaagatcccaattacactggagaagttcagtttcaaacagaaattgagatgaatggcttggctgtgcattggaacctcttgcgtctttatggatttt

SEQ ID NO: 7942 - DNA, 426 bp, Glycine max
  Clone ID: LIB3087-003-Q1-K1-D4
aggaaagtaagagtttagagtttgaactctgtttatccaatgcacaaagcgtagatctcggtgttgtgatggaatacaggaaaatcaaagacgaggatgaagttagggatgcgggcgttgaggacgttggaaaatcatttttgctgtcagtcccagataacgatttgacttccgagggagaaaccaaaattgacagccacagggagaaagtaaagtggaagcgcaagtcagttgttacacttgcattgactgttcttactagttcgcaaggcattctaatcgtttggtccaagagagctggcaagtatgagtatagtgtcactactgctaactttatggtggagactttaaaatgtgctatatcccttgtggccttgggaagaatatggaaaaaagacggtgtcaatgatgacaacaggtttgcta

SEQ ID NO: 7943 - DNA, 281 bp, Glycine max
  Clone ID: LIB3087-003-Q1-K1-D6
caaaaatccaaacaacaatggacctccgtgaatcgataagcaaccaaaccgacgtcgctgggagcatcacaaagctcctggtgtcgaaaaacgctcgggacagtaacctcgtgtactcgcccgtggtcgtgcacgttgttctgagcatcatcggttctggcttcaagggccccacactcgatcagcttctcttcttcctccgatccaagttcaccgaccattttaacttcttcgtctcttagctcgtcgccgtcgtgctcttcgacgccgcttccggcggc

SEQ ID NO: 7944 - DNA, 222 bp, Glycine max
  Clone ID: LIB3087-003-Q1-K1-D7
ggacaacatcagtaaacctctacacaaatgtgggtaccaaatgcgtgggtttgcgactgtgtgcaatggtcatacagggagacgtctaagtgcaatgattctccttggccctacatattaccaaagactgaagcatatggttgacgactagatccattcttgtggaaagggtactgtgcagatccttactaggcaacctgctcaaggacgctcaacgaatgg

SEQ ID NO: 7945 - DNA, 458 bp, Glycine max
  Clone ID: LIB3087-003-Q1-K1-D8
gaaggaaggtggttccgagaataatgagacaaagcaagcttctgctgacgtgttgtttagttattcaaaatttgcgatggcatgcattggatgtaaggttcgtccgtgtgatttgaggtttcatttgatgaaggagatttcgggtatgccctcttctttaaatagggaatcagaatagaatgcagcatctcctgatgcaatgggtgagtcatccagcacaggaacagcaagatttgacagaacagacagttttcgcgcactatagttgagagtggactgtgaccatgtattttttggttgggtctgtggcatagtaggtgtttgtgtcttgggtaaagcacttttgtcctgcataaatatcatattatgatgttatacatgtaggcagaattatgtttccaattaccatctatgcaatggctcacagattggtatttatgataccacagtcagtcagt

SEQ ID NO: 7946 - DNA, 373 bp, Glycine max
  Clone ID: LIB3087-003-Q1-K1-E10
ctctctctcttctctcctctctcctctctcctctctcctcgcctttctctttctctctcggtcaaatttctgtctctctcatctttctctctccggaagggcaaaccctaaagaccgtttgcacccaccagtaagttttctctctcctatctcttctctctctctctctctctgcgctttctccttctctctctctctcccttcctcttttcccttctcttcctctctttccttaaaaatttgaaattgatggggtccttcttctaccgctgagcctcaatataaatcatttgtgctgggaatttggttttcttcgccataacgagcgaaaactaatcccaaattttggaaccctaaaatgggaattggggat

SEQ ID NO: 7947 - DNA, 206 bp, Glycine max
  Clone ID: LIB3087-003-Q1-K1-E11
cgccgaattggaacaccacacacacagtgctgtcgtgtaattcccaaaataaataacgaagaagaagcctaattttcattgcaattgtgttggtagggagtgtaaggcagattgcgtagaatcggaagatggaagaagaagagcacgaggtgtacggaggagagatccctgacgagggagagatggaaagagacattgacatgttc

SEQ ID NO: 7948 - DNA, 426 bp, Glycine max
  Clone ID: LIB3087-003-Q1-K1-E12
cggtctaaaatcatttcttatattaggaggttccttgatgaccttgatttcttggaggttgaaacaccaatgatgaacatgattgctggtggagctgcagcccgtccatttgtaacacatcacaatgatcttaacatgaggttattcatgaggattgctccagaactttatcttaaggagttggttgttggtggactggatcgtgtgtatgaaattggtaaacaatttatgaatgagggcatatatttgacccataatcctgagtttactacctgtgagttctatatggcttataaggactacaacgacttaatggatataacagagcaaatgttgagtggtatggttaaggaacttaccaaaaggagctataaaatcaagtatcatgctgatgggattgacaaggaacctattgaaattgacttt

SEQ ID NO: 7949 - DNA, 79 bp, Glycine max
  Clone ID: LIB3087-003-Q1-K1-E2
aattctccgggctcgaccccactgcgtcacgtcctttctcctagctttaagctacccttacctcatatcttttctcatg

SEQ ID NO: 7950 - DNA, 334 bp, Glycine max
  Clone ID: LIB3087-003-Q1-K1-E3
gaatatgtattagtatttgggataatgtatttgtgttgtgattagtattttgattgtgtgtgatctctttcactaaacatgtaatggttgggtttgtaacaatgaactattgagtattgactctttttttgatagataattttggaaagcagttgactttttcttgaaatgtaaacatttttcttcttgatgattttttatatattggaaatatgtctattctttcagcttccacctgagcattttgccctcatgttttctgattatttgatagtttatggagaaaaatacttatctttccctccaaatcatattctataattctctagaatac

SEQ ID NO: 7951 - DNA, 374 bp, Glycine max
  Clone ID: LIB3087-003-Q1-K1-E4
cttactaagtcttatagtgattgctaccacaaccatgaattgtaggaggttggtttatggagttgtgtggttcaatctgtatgtggcatgcacattcattcaagtttcaagtctggacgcctctaacttcagcaagtgttggttcccagcaatttacaactttggtgactcaaattcagacacaggagctgtttttgcagcattcacaggggtgaagccttccaatggcataagcttctttggaagcctctcaggaagggcctcttatggtcgtctcatcatagattttatgactgaagagtttaagctgccatacctgaatgcatatttggactcggttggatcgaattacaggcatggtgcagactttgcag

SEQ ID NO: 7952 - DNA, 345 bp, Glycine max
  unsure at all n locations
  Clone ID: LIB3087-003-Q1-K1-E5
cccacgcgtccgcagcaatggcggtatataaagtgaagctgattggaccggacggtgaagggaatgaatttgaagcccctgatgacacttacattctggattcggctgaaaatgctggagtggagctaccttactcatgcagagctggtgcctgctctacttgtgctggccaagttgtttcaggctctgtggatcaggcagatcaatcctttcttgatgaccatcaaattgaaaagggttaccttctgacatgtgtctcatacnccaaatcagattgtgtgattcacactcacaaggggggaagatctcgtctaggtgggggttgtgtgtcttttggttagttct

SEQ ID NO: 7953 - DNA, 277 bp, Glycine max
  Clone ID: LIB3087-003-Q1-K1-E7
cgacccagtcgtacgcaataattacacttactatctcaaatgcattttgttcaaacactctcatttcatctgaccggaacgttttcatctaaatataggcagtttgaaatattacacttaactatccactattgccttttagaggaatgactattaacttaaagctgtcaactattcctttataaccactcattacattacatacatattcaatatctacaccaaatatgtgcattctaaccattttcatctgaaacttaaagactttaaaaccctt

SEQ ID NO: 7954 - DNA, 336 bp, Glycine max
  Clone ID: LIB3087-003-Q1-K1-E8
acgcgttcgtgaaggcttgcattgacgcttcataaactgtattagttctgggggttgatgttcaacttggcggtataatgaaagagcatcttatgtagataaactttaccactatctgctctatgcacttcttgtgctctctgcagttctgaattattcaaataacatgttcacactaacacatgatatactataaaagaaattgacacacactcctgaagcttatgaaacttggaactccttcggacaccttttacactgcagagtctgtaaggacaatctcttctgaagtttcaagtgacctcatactttaagtgaaaggaactcgatacctac

SEQ ID NO: 7955 - DNA, 292 bp, Glycine max
  Clone ID: LIB3087-003-Q1-K1-E9
aaaagggtttatctgagaaacctagacagtagacacggcagatgttgtccttggtcttggccacagccccggtttttccaaaacccagttacctgtctttggggcattagggtaacttcaagggtggttttccaaatttggcaacctttacttgaaatttggaaggaataaatgggtcctaaattttccattggcagggtaaccggcttattattattggtcaccacccaaagggattcccaaacccaattggggtctttggtttaaccccaaccccatggtttcctttttt

SEQ ID NO: 7956 - DNA, 177 bp, Glycine max
  Clone ID: LIB3087-003-Q1-K1-F1
gaatgacattgaacttgatgctgtcaacgatcctttcatcaccactgattacatgacatacatgttcaagtacgacaccgttcatgggcagtggaagcattttgatgtgaagctgaaagactctaagacccttctctttcgtgagaagcccgtcaccgtttttggattcatgaaccc

SEQ ID NO: 7957 - DNA, 438 bp, Glycine max
  Clone ID: LIB3087-003-Q1-K1-D12
gcgaaactcttgtattgactcacagtagatagagtgttggtacgaaaaatgtcgaagctgatcttggtgttcctttcgctcattcctcttctctgcacctccttctccccagagagaccctcagatcgacgcgtcctcgttttgctcgatgacttcgccatcaaatcctctcattctctcttcttcaactccctcaaatctcgcggcttcgatctccaattccacctcgcagacgaccccaaaattgcgctccagagatacggccagtacctctacgacgccctaattctcttttcccccaccattgaacgttttggaggatccattgacgcggctgcaattttggattttgttgattcgggtcatgatttgatcgttgctgctgatagcaatgcatctgatttaatcaaggaaatcgccaccgagtgtggagtggac

SEQ ID NO: 7958 - DNA, 404 bp, Glycine max
  Clone ID: LIB3087-003-Q1-K1-F10
ctctagagaattatcatacccttcaagatgaaaccgtacctacgtccaatattcctattggtccttatccttctcgaccaatccatttcggcgagtgccgctataaatattaatggtctgagaaacaaaattagagaagttctaaacaagcacccgagcatcaatcttccggcagataaactgaagaaggtgaagagaccactgaaggcactggattatctgcttggcgaatgtaaggacaggccgcctcaagaatttcaagaattttgcccgaaatttaagaacgattatcaacaaaattgcccgaatgccgcgtatgaagcagtttgcccgttactgaagcaagcgattcaaatatgttgccagaaacacgcataactcttgcagccacggtgggcgtttgg

SEQ ID NO: 7959 - DNA, 459 bp, Glycine max
  unsure at all n locations
  Clone ID: LIB3087-003-Q1-K1-B6
cgctctgtttctgtctctgtgtttgcggctgaggattccgaacgagcgaccttggtcgggtctcgcaaagtttaagtcatcatgggtaaggaaaagactcacatcaacattgtcgtcattggacatgtcgactctgggaagtcaactaccactggtcatttgatctacaagcttggaggtattgacaagcgtgtgattgagaggttcgagaaggaggctgctgagatgaacaagaagtcattcaagtatgcctgggtgcttgacaagctcaaggctgagcgcgaaagaggaattaccattgatattgctttgtggaagtttgaaaccaccaagtactactgcacagtcatcgatgcccccggacatcgtgactttatcaagaacatgattactggtacctnccaggctgattgtgctgtccttatcattgactccaccactggtggttttgaagctggt

SEQ ID NO: 7960 - DNA, 373 bp, Glycine max
  Clone ID: LIB3087-003-Q1-K1-C1
atcaggtcaagtcaggtcaggtcaggtcaaggaattagcgtgtaaccgacttctccttcgatcctctccggagttgtgtggaaagaaattaaattaaataaaatcatagttcagctcaagtgaagattgattgattgattgatcgaattagaattaaggtttgtggtgaagaaatgcagatagaggtatgttcatgggtgttacaatgattatgcgctcccattcttcattttcttcttcttcttcccctttgtgcaacaacgattaaatgtgttccgtcgaatgccgattccgatcggccgtcgattcatattccgtcgcttgtgaggcctttctctgaccctcagccttcccctctttgatacactctctt

SEQ ID NO: 7961 - DNA, 387 bp, Glycine max
  Clone ID: LIB3087-003-Q1-K1-C10
ctcgaagctggtgctgcttccttgcttcagactgaagatgagaaggtgcatggtttatatgttatgaagcttgtgagatcattttgtagaacctcccatgagagtaatgatgatgcttttgaacatgttggttcaatacttgttaacatctcaaaacagcggaaagggagggagcttctacttgaccctaaacggggtctcttaaagcagataatcagacagtttgattccaacagttcattgagaaagaaaggggtctctggaactattcgcaattgttgttttgaagctgagaatcagctacaaaatttgcttttggtatcagagtttctctggcctgcattacttcttcctgtagctagcaacaagatctacaaggagcaagac

SEQ ID NO: 7962 - DNA, 387 bp, Glycine max
  Clone ID: LIB3087-003-Q1-K1-C12
aatcaacaaaagccttatcgccattgttaacaactgacgagcagaaaatgctgcaagatggtagtgataaaattcgtataagaaggatcagtaaaagcttagactttgacagtgtgatggcagataatgacagacttactaagagtagcagttattcttattcatcaacaagtagaagcaaggaattatcttttaatagaattttgtctaagcttcctgttattgattttggtattgacaaaaagagagcattggatgtgattgacagattagacgtggtcagataatttgcaactattcttgagtgcctttgaaatgaaagggtagtagcaagacatggacagacgaatgggacttttttgtgtaaatatacaagcatacaaatgc

SEQ ID NO: 7963 - DNA, 460 bp, Glycine max
  Clone ID: LIB3087-003-Q1-K1-C2
gaaacaatgtagtttgataagggagagtttgactgattttccgcagccacctaacagaacatatcacaatgccttgtatggtcctattcaggacctgttcgttgcagctaaggaagggaaacttttggttgaagacaactctccaattacttcttctgaaacttatgctgatattgatcatagagatgataaggaatggaagtttactactgaaaaggacatgtcgttgagaaagtgcagaacagtttctgcttctgtgttacttagaaagttgcgatggagcacccttggcctacaatttgattggtccaagcggaattatgatgtatctctcccacataacaaaatccctgaagcattatgtgagctctccaaacaattggcaaaacctgctttgcctggtggtgttgagttcagacctgatgctgcaatagtgaattacttcggcctatgggacaca

SEQ ID NO: 7964 - DNA, 345 bp, Glycine max
  Clone ID: LIB3087-003-Q1-K1-C4
cttcgtctttcctttgtctctcttctttcccctctctttcgagggtttttctttttcttgtttccgtttttttatttttcctttattttgtttttttctttctcttgtttttcagttttgcttccatttcctttgaatccccatttattcttcttcttctgcaaccctaaccctagaattgaagatgcagcctcagaggttaaggcagcaagccatgatgcaaccatctctctaccaccaccctgctctacttactcctcctcagatagagcctatcttgagtggaaatctgccacctggctttgattcgagttcatgccgcagtgtttatgtaggcaacattca

SEQ ID NO: 7965 - DNA, 418 bp, Glycine max
  unsure at all n locations
  Clone ID: LIB3087-003-Q1-K1-C5
ggccgaggagctctatgagaagaccggtgaactccccgaccctaacttcactgagaacggcgagttccagatcgtgcttaccatcatcagagatgggttgaagaccgatcccaccaggtaccgcaagatgaaggagcgtctcgttggggtttctgaggaaaccaccaactggtgttaagaggctatatcagatgcaggcgaatgggactctactcttacctgctattaatgtcaatgactctgttaccaagagcaagtttgacaacttgtacgggtgccgtcactttctccctgatggtctgatgagggctactgatgtgatgattgctggaaaggtggctgttgtggctggatatggtgatgttggcaagggttgtgctgctgcattgaagcangctggtgctcgtgtcatcgtgac

SEQ ID NO: 7966 - DNA, 355 bp, Glycine max
  Clone ID: LIB3087-003-Q1-K1-C8
gtgttactacgttagtctatgaacagtcacccccggtagacttaaaatttccaagaccctcaaatcaaactcttctattctctcatcaatcaatcaatccagttccctctcggataggaatgggaatatatctcagcacttcaaatactgaaaagttttctgaagatggtgaaaatgactgtcttagatatggtttatcatccatgcaagggtggcgtgcaacaatggaagatgctcatgcttcatatactgatctggatgagtccacttcattttttggtgtctatgattgccattgatgtaaagttgtttccaaattttttttccaaatttctttatttaccttttgttcaaa

SEQ ID NO: 7967 - DNA, 429 bp, Glycine max
  Clone ID: LIB3087-003-Q1-K1-C9
ggacaatatcagtaaagctctacacaaatgtgggtaccaaatgcgtggttttgagactatgtacaatggtcatacagggagacgtctaagtgcaatgattttccttggccctacatattaccaaagactgaagcatatggttgacgacaagatccattctcgtggaaggggtcctgtgcagatcctcactaggcaacctgctgagggacgctcacgagatggaggtctccgatttggagagatggaacgagattgcatgatagctcatggagctgctcacttcttaaaggaaaggttgtttgatcaaagtgatgcatacagggtccatgtatgtgagcgttgtgggttgatagctattgcaaatctcaagaagaattcttttgagtgcaggggatgcaagaacaaaactgacattgttcaagtttacat

SEQ ID NO: 7968 - DNA, 434 bp, Glycine max
  Clone ID: LIB3087-003-Q1-K1-D11
cccacgcgtccgctggctgccatttgcactcccgcggattacaacacgcgccctcttgacgacaattgacagcaacttcatcgacgcgcttcctgtggtgaagtactgttcagagaacaacaagcgtctcattcatttctctacgtgtgaagtctatgggaaaacgattggaagcttcctccccaaagatagtcctcttcgtcaggatcctgcatactacgtacttaaggaggatgagtctccttgtatttttggttcaattgaaaagcagagatggtcctatgcctgtgctaagcagttgattgagaagcttgtttatgctgaaggtgctgaaaatggcttggaattcacaattgtgaagccctttaattggattggaccacgaatggatttcattcccggcattgatggcccaagtgagggtgttccttggg

SEQ ID NO: 7969 - DNA, 322 bp, Glycine max
  Clone ID: LIB3087-003-Q1-K1-B5
cggacgcgtggggggaaaaaaaaagagagaatggggaacgaggaagaagaagaagaagtggtggctgaagttgaagcagtggaagccgtgtatggaaccgattgcgtccttctccgttcattccctccccatttccacatctctctcaaacccagaaccgctgatgtttcatcccaacagtttgtggaagctgttctggagatacaagcaagctcacagtatccaaaagaaccaccttctgttgatcttgtggattgcaagggtctggatgaacaaagaaagaagtatctattaaattgcatacagagtaaagcctatgagc

SEQ ID NO: 7970 - DNA, 385 bp, Glycine max
  Clone ID: LIB3087-003-Q1-K1-A2
gagagatcctgcacgttcagggaggccaatgcggtaaccaaatcggttccaagttctgggaggtgatatgcgacgagcacggcatcgatcctaccggaaagtacaacgacgaaggcaacagcggcatccaactcgagaggatcaatgtctattacaatgaggcctctggcggaaggtacgttccgagagccgtgcttatggatctcgaacctggaaccatggacagcatcagatctggcccctacggcaagatcttccgccctgacaacttcgtcttcggccagtccggcgccggtaacaattgggccaaaggtcattacaccgaaggcgccgagctgatcgactccgttctcgatgtcgttcgcaaagaagctgaaaactgcga

SEQ ID NO: 7971 - DNA, 352 bp, Glycine max
  Clone ID: LIB3087-003-Q1-K1-A3
cccacgcgtccgaaaacatcgtgtgcgcactctctcttctcctaggtttcactcccatcaacaggggcgatggtgcagaggctcacttatcgcaagcgccatagctatgctaccaaatccaaccagcaccgggttgttaagacccctggtgggaagttggtgtaccagaccactaagaagagagcaagtggacctaagtgccctgtcactggcaagaggatccaagggattccacacttaagacctgctgaatacaagaggtctagattgcctaggaaccgcaggaccgtaaaccgagcctatggaggtgttttatccgggggagctggtatagaaaggattattcgcgctt

SEQ ID NO: 7972 - DNA, 459 bp, Glycine max
  Clone ID: LIB3087-003-Q1-K1-A4
tttggagggaagggactataagatttgggaggcatcataatataattgtttgtatcttaagtgtatgttcctttggaaaatcaccaccaccttgtatatgtttcttaggaggcaagtataaagacagaagagtagatgatggtatggcaagtcacaattgaagtgagttgaaatgtgccactgttgctgaacgtatatatgctgcattgaagcaaatattatagagaaggttgcagagggttcatttcagccaaatgctggctcttctgaaattaggaagccttcatattatatatacattattatgtttacaaagtatacaatatttagatagtatggcaagattgtataaaattgccattgatagcacataattcttcaacaggttcctggatctagatggcaatgtattggggaaaatttggattgggaggttttggacaaaaaggaaagggagtg

SEQ ID NO: 7973 - DNA, 323 bp, Glycine max
  Clone ID: LIB3087-003-Q1-K1-A5
acgcacgcgtacgcccacgcttccattcacaaccccctttttttttatacatgaccacaaccctttgggatcggtatttacacgacagcgtcctatactcattactcttactctttcacagaattactatctccgaatctttatgttgaaccatctcaagaaagacaaccaacccatgatcttggaaacatcaaacacacctagcgtagtcaaaatatttcattataatttctcaatgaaagatcatcaacaacaacattcactatctataccccacaataagatcatttcaatgaggaaattatcacccccacccatataac

SEQ ID NO: 7974 - DNA, 453 bp, Glycine max
  Clone ID: LIB3087-003-Q1-K1-A6
cccacgcgtccgctgttctgaaaccactcccgcctcgtcgtcaccatgccgcaaggggatgacatagagcgtcacagaagagactatggctaccgtctcgatcacttcgagcggaagcgcaagaaagaggcgcgtcaagttcacaaacgctctgcaattgcccagaaggctctgggtattaagggcaaaatgattgccaagaaaaattatgctgaaaaggcacagatgaagaagactttggctatgcatgaagaatcaacttctaggcgcaagactgatgataatgttcaggatggagctgttcctgcttatctccttgatcgtgataacacgaccagagcaaaggttcttagcaacaccattaagcaaaagaggaaggagaaggcgggaaaatgggatgttcctctacctaaggtacgtccggtggctgaagatgaaatgttcaaagtggtc

SEQ ID NO: 7975 - DNA, 433 bp, Glycine max
  Clone ID: LIB3087-003-Q1-K1-A7
gcatttctgtgtgtgaccacattgcttccctctatcgtcttctccctccttcttcaatggtcttagggtttccggtgtccatgcgtagcagctcgcactaatgcgcttttgaaacccgtgttcatctgtatccaacgatttactagaaggaggtcgcaatttctccatcttcacatttcgctagcacgtgaaatcaaaagttatcgacactttcgcgcgacacgaaatattgggaaccaagcaaaatatctatggctgacgaaccattatatccaatagcggtgcttatagatgagttgaaaaatgatgacatccagctgcggttaaactcaattcgtaggctatcaacaattgcacgtgctctttgggaagagcgaacccgtcgagaataattccatttttaagtgaaaataatgatgatgatgacgaagta

SEQ ID NO: 7976 - DNA, 459 bp, Glycine max
  Clone ID: LIB3087-003-Q1-K1-A8
gctgaatcctcgctttatcttcccttcccttcatctccgcttcaaaataatatccgcctgtgtatctctgttcgaaacaagtccaacaccagcaacacactgcttcaatctcaatcgggcacattgagaaatggttttgagtaatgggaaaactgaggcaccattgccaagtagtaatgggggaggtgctgagattgataacaatgagaagaagcccttcaagatcttcgtagggtatgaccctcgcgaagatcttgcctatgaggtatgtcgccactccatcttgaaaaggtcttcaatccctgttgagatcataccaattaagcagtcagatctgaggaaaagtggtttgtattggcgtgagaggggccagtttgagagcactgagttctccttttcaagattcttgaccccttgccttgccaattaccaaggttgggcaatgtttgtggactgtga

SEQ ID NO: 7977 - DNA, 286 bp, Glycine max
  Clone ID: LIB3087-003-Q1-K1-A9
agcaaacaaacaaaccccccacccaacgcattcttcaatcttccccttcgcgtcttttgggtggtttggtttaagacatttcacaaacaccttctcttccctccattttccatttccattcttctctccactataaattctccttctctttctttctcgtaatcttcgccttccttcaacttcaccctctctccttcttacctccttgaccatgatgagtttcgccatggattcagtttccgtgttaaaccctaaactcttccactcccatttctctttcccattc

SEQ ID NO: 7978 - DNA, 364 bp, Glycine max
  Clone ID: LIB3087-003-Q1-K1-B1
cgactcggttgctatcagcgagtgagagtgagtgagtggttctcttgcagcaacaagggggagtgacaccaaacagactggaaatgggtcgtggggtcagtgctggtggtggacagagttccttggattatctctttggcagtggggtacctgccagcagtgcaaatggtgctcgcactcaaaatgcaagtgctccttcaccaccggttgataagcaaagtccagcaccagcagcagcagcagcacctgcacctgcagcagcagcagcaccagcacctgcaccagcaccagcaccagcaccagctgataagcaaattccagctggaattcctggaagtctcaaaaacaattaccatcgcgctga

SEQ ID NO: 7979 - DNA, 325 bp, Glycine max
  Clone ID: LIB3087-003-Q1-K1-B10
cttgaatatgtgtgcgaggaatatggaggcagagtctagcttgcaaaggcttattacgagtgggttgacaaactctattgtcaagaattttaatggaagtggaatcatcgctagcatgcaccagtgcaacgactttttcttccttggaaccaagcaaattcccatgggaagagttggggatgacatttggttccaagaccccaatggggacccaatgggagtgttctggttacaaagggtgcacatgattcactgtgcctacaacagtttgtggattgggcagattattcagcccgattgggacatgttccaatcggatcatgtg

SEQ ID NO: 7980 - DNA, 434 bp, Glycine max
  Clone ID: LIB3087-003-Q1-K1-B11
cccacgcgtccgcagcaatggcggtatataaagtgaagctgattggaccggacggtgaagagaatgaatttgaagcccctgatgacacttacattctggattcggctgaaaatgctggagtggagctaccttactcatgcagagctggtgcctgctctacttgtgctggccaagttgtttcaggctctgtggatcaggcagatcaatcctttcttgatgaccatcaaattgaaaagggttaccttctgacatgtgtctcatacccgaaatcagattgtgtgattcacacccacaaggaggaagatctcgtctaggtggggttgtgtgtcttttgttagtttctctaagcttgaatattgtcacggtagctagacatattgtgaaactttgttggtgttggtacaacttttttgaaccgttctaaatttatgtga

SEQ ID NO: 7981 - DNA, 369 bp, Glycine max
  unsure at all n locations
  Clone ID: LIB3087-003-Q1-K1-B12
gctgcggcacaagcagcagccgcagctgctgctgctgcttccacagcttctgttcaagtccgcatggtgttagatgatggaacatcaaatatactgatgaggtctgttggcacacgcagtgaaccagtcattggtttgcatggaggggcactgcttggtgttgcctatcgaacatctaggagagtcagtcctattgctgctacagctatttcaacaatccagtcgatgcccttatcaggctatggaagcagtggtgtttcttcttttactacttatgatgatggattttcttcacaaagacctnctactgaggcagcaccttaaaactttcagttatacagttgggagacaattcagcctggggggggg

SEQ ID NO: 7982 - DNA, 403 bp, Glycine max
  Clone ID: LIB3087-003-Q1-K1-B2
cactcttttattattattattattattattattattattattattattattattattttgggtttgactactttcatgatgccagtttcaaccatgtgaagttgttgtgcgtgctgtgtttgttgttgtgtactgttttggacctttataaccaaccatgaatctcagcaacggcaagggatccacttttagttctcctctgaaagccggagattctgtctctgaccagtttccggcgggtctccgtgtgctcgtggtggatgatgactccactcgcctcatgatccttgagaggatgctccgtgcttgtgtctattaagtgactcaatgccagctagctgaggttgcattgtctctctagagagagaacaataacgggtttgatatcgttttaagcgatgtg

SEQ ID NO: 7983 - DNA, 444 bp, Glycine max
  Clone ID: LIB3087-003-Q1-K1-B3
cccacgcgtccggccaatgacaactgaacaacgccaggatttgaagctaaggtgtggaggttcatggaaactggtgctgaggtatttgatggctggagaggcatgttgcaggagggagaaatctcaggctatagcaggtcctggtcacagcattgctgtgacatcaaaagggattgtttattcatttggttccaacagttctggacaacttggacatggcaccactgaggaggaatggcgacctcgaccgataagaactttgcaaggcattcgaattatacaagctgccgctggggctgggaggacaatgttggtaagtgattctggtcaggttatgcatttgggaagctgagtatgggttcaggttcttaaactggtgcagcttcacagatagtggagtctttggaaaacatatttgttgtccaagcttgcattggtactttt

SEQ ID NO: 7984 - DNA, 393 bp, Glycine max
  Clone ID: LIB3087-003-Q1-K1-B4
gaaaaccctagttcgcttgcagtcacacaagaggccaatcctattcatagctcgagatgggtgaagaagtgaaggtagttgttccagaatcagtgttgaagaagcgcaagagggaggaggaatgggcgttggccaagaagcaagaactcgatgctgccaagaagaagagagccgagagccgcaaactcatctacaacagagctaagcagtacgctaaggagtacgatcaccaggagaaggaattgattcggttgaaacgcgaggccaagctgaaaggtggtttctatgtggatccagaggctaagctgttgtttattattcgcattcgtggtattaatgccatggaccccaaatcaaggaagatcctgcaattggtgcgattgagacagattt

SEQ ID NO: 7985 - DNA, 419 bp, Glycine max
  Clone ID: LIB3087-003-Q1-K1-A11
gactcgttcttcttcgtcgttatcttcttcttttgttgtttgtgtgtttgttttttctctgacctgaaaatgtcttgctgcggtggtaactgtggttgcggaagcgcctgcaagtgcggcaacggctgcggaggctgcaagatgtacccagacttgagctacaccgagtcaaccaccaccgagaccttggtcatgggagtggcaccagttaaggctcaattcgagagtgctgaaatgggtgttcccgctgagaacgatggctgcaaatgtggagctaactgcacctgcaacccctgcacttgcaagtgaagtgttggagagctaaagcttcaaacagagatggcccttagaaataatgatgaaaactatatgtagtttcaaaacttcaaaaatatgtagtatgtattatgttgcactct

SEQ ID NO: 7986 - DNA, 415 bp, Glycine max
  Clone ID: LIB3087-002-Q1-K1-G5
gaagcggcgcaaaatgacaacaacgacgaggaaaaaccacaggattccgacgatatcccatcttctggctctgaagaaaaacccgaatttgtgtatgtggaacttctggaaattcgtaaggatgtccaatgtccaatttgccttggtattattaagaagacaagaaccgttatggaatgcttgcaccgtttttgcagggaatgcattgacaaatcaatgcgactagggaacaatgaatgccctgcttgtcgcacacattgcgccagtcgtcgttccttgagagacgatccaaattatgatgccctaatttctgctttatatccagatattgagaagtacgaagaagaggagcttgaatttcgtgaagaggagaagaaccgcaataagcagattcaagcttcaatagcaaaagtag

SEQ ID NO: 7987 - DNA, 252 bp, Glycine max
  Clone ID: LIB3087-002-Q1-K1-G6
gtagaacccttccacggtggtgactgcgcgatgggtgcctacaagtatgtttcagagctatggcgcaagaagcagtctgatgtcatgcgcttcttgcagcgggtgaggtgctgggagtataggcagcaaccttccattgttcgcttgacaaggtcgacccgccctgacaaggctcgtcgcttgggcttcaaggctaagcagggctatgtgatataccgtgttcgtgttaggaggggtggccgaaagagggcc

SEQ ID NO: 7988 - DNA, 417 bp, Glycine max
  Clone ID: LIB3087-002-Q1-K1-G7
tgtttttctttttctctctctaaagttcaaagtttttgttgttttccccccgtgtctttctctctcttgtggtggacttgaggaatgctggggtcagaggtttctgagacatgttctagcagacttttggtgaattgggtcactgtggtttctgtcatgggtggtagagaatctgagtcctcagagatctaagcctctctgtctggtgttttgttcatcacagacccttttgctgtggcatagttgtgaaagtgaaaaagtgagagaagatgatgaagatgaagaatattagtagtagcaacaataataataggacaaatggtctttcttccatcatgaatggaggaggctcaggtggttgtagatctgagcctggttccaaggaatgggagatgaggccaggtggaatgctggttc

SEQ ID NO: 7989 - DNA, 403 bp, Glycine max
  Clone ID: LIB3087-002-Q1-K1-G8
cccacgcgtccggcttcttcgagtttcacagccaagtcgtaaaagggtttcaagggatggaaaacatgcagagcttctggcaattgggtgatgaactccgtgggcactcaaaagcatcggaggatcacaagtggttaatggttgcctcgaaactggccgaacagacaagattgaagggggagcgtgtgaacaaccttgatctttcaaagggacccattgaaacaaggtcaagggataaatttgggttccaggaagagaacaaatttgattctcttaacttgagcatgttgaacctggactctaaatttactgagaatgtgagcaaaagctcacttcgaaatggtgtttatggtatgaatgcaatgtatcagaaaaacattgcaaacttggtgagtaatgtgat

SEQ ID NO: 7990 - DNA, 420 bp, Glycine max
  Clone ID: LIB3087-002-Q1-K1-G9
cggacgcgtggggttcttctcttctctctatcgtcttcttcctctgttccattagggtttccttttctccctcggagcttccaattgaaatccaattcctcaatacctccacactttctcgttcggaaagctcgcgaattcgaaagacatcgacggctccacgtgatacgttttcttcctctctggttatcaatgttggctactagtgcagttgcatctttgcccgtattaccaccagtgagaagaggtggccaccacattgaacagaatgttgtttccacattgagctttccaagacgattactgacaactaataattcaatacctctgagtggtacacagtttccatttggcagaagagctcattctactcacacagcaactataatatgtgctgcagctttgaatgcaagatgtggt

SEQ ID NO: 7991 - DNA, 418 bp, Glycine max
  Clone ID: LIB3087-002-Q1-K1-H10
gtcaaaacgcaaagatgcaagttccattgatcgacatcgacagaatcaacgatctccaagtgggtctgaactctctgcagaacccatccttcccaatcccttctcagatcacaacctccctcgcttacaatttctgcaaatggggcgcagtcattctcgcccttgtcgccaccttcggcagcatcatcaacagagtcactatcttcatcatccgcttccgcgccaaagccccttctctcccatccctaaccctaaacgacgacaatttttacacctcctcctcctctgacgacgacgacgacgacgataacgacgacgacctaacctactcctcttccgagcccgaagacgagccctccgcgtcttccagtttcatccgtttggacgactatttccgactcagaggaaccgataataa

SEQ ID NO: 7992 - DNA, 421 bp, Glycine max
  Clone ID: LIB3087-002-Q1-K1-H11
gagaaaacaagaagtagtgagaagaagggagagaatggaggaaaaggcaaaagctgagcagaagaagataggtatgaccgagacttggttgaagaagcaccgtcttctttacaatggagccactagacaccctcttattattagcattcgcgatggcaccatcaacactgcttccttcaaaacatggctcgcacaggattacttgttcgttcgggcgtttgtcccatttgtggctagtgtgctgataaaagcgtggaaggaatcagattgcagtggtgacatggaagtcatattggggggcatggcttctctggaggatgagatttcatggttcaagacagaagccaacaagttgctggaaagtttaatgagtccagacgcggaatatactgtggctattacagcattttgggctattgaa

SEQ ID NO: 7993 - DNA, 414 bp, Glycine max
  Clone ID: LIB3087-002-Q1-K1-H12
cggacgcgtgggctgacgcgtgggcggacgcgtgggcgaagagagcgtcgtcgtcttcgctatgtcgcgacagagatccagaagagccgaactacctcccgctcaggagaatattgaaaaattggagaaagttgtaaacgatggaaattattatggagctcatcaaatgtacaaatccgttagtgccagatatgtttctgctcagaggtactctgaagcattagatatcctacattcaggagcgtgcattcagttgtctcatgggcaggttacctgtggagcagagttagctttattgttcgtggagacattaaggaaagggaaaattccttacgatgaggaaattcttgaacgtctcaagaaaatctacaaatcatttcctcgggtttcattggcacataacctatgggatgt

SEQ ID NO: 7994 - DNA, 436 bp, Glycine max
  Clone ID: LIB3087-002-Q1-K1-H2
gcctcgacccacgccttccaaaccttccactttatttccatttctaaatttgttaacccttggtcctctcgggtttcaaacatcaaccatggcttcaataatacccttgttgacattcaccttgctctttctttctttcactttgtcatgtactattgacacctatactattctatacataccacattcatatgatgtgcttattgaacaaccttgatctttcaaagttacccatttaaacaaggtcaatgtataaatttttgttccaggaatagaacatatttgattctcttaacttgagcatgttgaaccttgtactctaaatttactgtgaattttagcaaaatcttacttttaaatggtttttatgttattaattctttgtatttttttttcatatcatatttttttattttttttatcattttcttttttt

SEQ ID NO: 7995 - DNA, 418 bp, Glycine max
  Clone ID: LIB3087-002-Q1-K1-H5
cggacgcgtgggcggacgcgtgggttttccgtcaaccaaaatgctacaaacgaaaccagagattcgtaattgcacattctcttttgttgtctccagctcatagaatattataaactcagattcattcagaatttcagattcacctttttcttttcttctctaccttctttttcctctgacagctttttgcagaaagttgtgatttttccttgaaagatggcatctttgagcatgatccagatcagaactgggaattgtgcatctgggtttggtttgaattgtgctgggaaggttaaggttggtcccagcagagttgggtttaaggtgtttgcttcagagactcaggctacagagcctgatcttagtgtaactgttaatgggttgcgcatgcctaacccctttgttattgggtcaggtc

SEQ ID NO: 7996 - DNA, 226 bp, Glycine max
  Clone ID: LIB3087-002-Q1-K1-H6
cacacgcctcggcagactcgtgacctcacgcttaacccaaatgctgcgaacgaaagcccatattcctactcgcacattctactctggcgtctccatctcatacaatattatatactcacattcattcaaaatttcaaattcacctttatcatttctaactcaccttccttttcctcttacagcttcctgcagaaagttgactttcttgcccgatagatgccatttt

SEQ ID NO: 7997 - DNA, 419 bp, Glycine max
  Clone ID: LIB3087-002-Q1-K1-H7
cccacgcgtccgcccacgcgtccgcccacgcgtccgaggaaattgagaatggaatgctgtgggaagttgaggggaagtgggttgttaaaggagcagttgatgtagacattggtgcaaacccttctgctgagggtggaggagaagatgagggagttgatgatgcagctgttaaggttgttgacattgttgacacattcagacttcaggagcaacccgcattcgataagaagcagtttgttaccttcatgaagaggtttatcaagaatttgactcccaagctcgatgcagagcaacaggagttgtttaagaagcacatcgagggagcaactaaatacctgctctctaagattaaagatttccaattttttgttggtgagagcatgggtgatgatgcttgcttggtctttgcctactacaag

SEQ ID NO: 7998 - DNA, 390 bp, Glycine max
  unsure at all n locations
  Clone ID: LIB3087-002-Q1-K1-H8
cccacgcgtccgcccacgcgtccgattaagggagccgattaaaaagttggggttctttcatcacttcattccaaaccctagcgaactatccatcgctcccgctcccaaagttcacattggcgcccgacgcagctgagttcgtaacaacgttgttaatgacttcattcccaaccccagtgaactatcaaccgctcccaaagttcacattggcgcccggggcaggctcagtttgtcaccgcgttaccaccgttgcgtagggctcgggaagctcggcatttggccattctcgctctgtacacatggatgattcattagacatcactccttcacaagctgagtcaaattctcagtctacaaaanaaagggttagaggtcccacatgcttgaaga

SEQ ID NO: 7999 - DNA, 429 bp, Glycine max
  Clone ID: LIB3087-002-Q1-K1-H9
ggttacactgaagatgatgtggtctccaccgactttgtgggcgatagcagatcaaggatttttgatgcaaaggctggaattgcattgaataagaactttgtgaagcttgtttcttggtacgacaacgagtggggatacagctcacgtgtcattgacctgcttgtattcgttgccaagaagtctttttaaggtggtgtactgcaaagttgcttgtctacacattatgtgcttgtctagttgcgatttagtgtcttgctcgtgcaaaaaatgagaggtctgaataaatcggtttctggaaccagtggatttaccttgttaggagcattagctctattttggactttgcctcttgtggaggaggatggagtttttggatttttatatatttgctaatgtacttgtcgttattgattgttatagtagatattt

SEQ ID NO: 8000 - DNA, 363 bp, Glycine max
  Clone ID: LIB3087-003-Q1-K1-A1
cccacgcgtccgtttcaattttgaacccccttttttgtaatccataaccatagctggtaggatccttggttgagtcgagggatttgattatggataagtatgaggctgtcaaggatttgggagctgggaattttggggtggctaggctcatgaggaacaaggagaccaaggagcttgttgccatgaaatacatcgagcgtggccaaaagattgatgagaatgtggcaagagagattatcaaccacagatcccttcggcaccccaatataattcgcttcaaggaggtggttttgacccccacccatttagccatagtgatggagtatgccgctggaggagagctctttgagaggatatgcaatg

SEQ ID NO: 8001 - DNA, 427 bp, Glycine max
  Clone ID: LIB3087-002-Q1-K1-G4
caagccaagtgaaagtgagaaaaattaaaaatcaaagagcataatgtcagggatcattcacaagattggggacacccttcatgtgggagggcacaagaaggaggaggagcataagggtgagcaccatgctggagaatacaaaggggagcaccatggtgaacacagtagtgagtacaaaggagagcatcatggtgaacacaaagctggagagtaccatggtgagcacaagccagagcacaaagaggggttcctagacaaagtcaaggacaagatccatggtgagggcggcgccgtcgagggcgagaagaagaagaaggagaagaagaagaaggagcatggccatgagcatggccatgacagcagcagcagcagtgacagtgattaaactgctgcatcacctatatatttaaaaggtttatgggaccat

SEQ ID NO: 8002 - DNA, 407 bp, Glycine max
  Clone ID: LIB3087-002-Q1-K1-F10
cgctcacgctctccttcccgcagaagaagatactctccatccaccgcttctcatcatcgccactccagaacttcccacaggcgccgccgaaggcacagaacctcttgctccccctctctgtcacgcagccccactccgaagcccaagaaagatcaaaagaaaaggttaatggcattcttctctattggctttgctgaaggaagttcaacttgctaaatatgatgaacaatggctgcctccattatctcctcttgctctagaaacttgttagagagcaagcgtcaccacgaggaagagttgaaactattggaagaagagactgcaagaagactggaagaagcaattcgaaaaaatgttgaggaaaagcttaacacagaggaagtcaagttagaaatagaaaggcgcgt

SEQ ID NO: 8003 - DNA, 409 bp, Glycine max
  Clone ID: LIB3087-002-Q1-K1-F11
tcaattccaagggtttccattttccatttcaatgtcttcccattcgcacaaaggcacctccttctacggcgatgccgccccttatcgatccaggtttgtttgttttttactctctctttccctttctcttgttcaattcaatttcttgcgtgaattgcagagaggggcttagcactcgacccgttgcatcctccgatgaaatccaattgcacatcgatcccggcatcgacttcgacgacgaaatcaccggtcttcgtggccaagttaaaaaattgaaaaatgttgctgaagagataggttcagaagtcaagtttcaaagagattttctggaacaagtggtacgtaatttcttggatcacctatatttcgcatagtttttgttatttttatttatttattcgtttatttt

SEQ ID NO: 8004 - DNA, 416 bp, Glycine max
  Clone ID: LIB3087-002-Q1-K1-F12
cagccatggatatgtcgctcgacgacataatcaagaacaacaaaaagtctggatccggaagttcacgtggccggacccgaccctccggatccggacctactcgccggctccccaaccgtgccgccaaccgcgccgcaccttatgcccccgctaaggcgccggaggcaacgtggcagcacgatttatatgcagatcagcatgtggctgcggcggggtaccctgctcaaggtggtcgtgcggcttccatagaaactgggaccaagctttacatttcaaacttggattatggtgtttccaatgatgatattaaggaattgtttgctgaagtgggtgacttgaaacggcatgcggttcattatgacaggaatggcagatcaaagggtacagcagaagtagtattttcacgacgagctgat

SEQ ID NO: 8005 - DNA, 412 bp, Glycine max
  Clone ID: LIB3087-002-Q1-K1-F3
gttcattcacactccctctctggctttcattctttggcattgcgaaaaaacgaagactcagaaaaccgcaacaaactcacactcactcacaagaagtagtaacaacatcaacaactctctcatcatcatggcagttgaggctcctccgcacaacatgaatctcttcccctcgcagttactaacctccagagaaatgatgaaaccgaatctcggcttctacaccgcgcagcaaacggaaggcggcggtggcgccgccgccgccatgcctattcttccgtcatcaacagcgttacctttttaccaccaatccgacagcggtctcacctgccacgccaccaccgctgccgctccgccgagaaaacgctccagagactccatcactaccaccgaatcaaacacgcttcttctccct

SEQ ID NO: 8006 - DNA, 429 bp, Glycine max
  Clone ID: LIB3087-002-Q1-K1-F4
gcttccttaagctccttagtgctgctccttgcagctctaattctatcccctcaagttcttgcaaactatgagaatcccccagtgtacaagcctcccactgagaaaccaccagtttataagcccccagttgagaagcctgctgtttacaaacctccagttgaaaaccccccaatttataagcctccagtagagaagccaccagtgtacaagcccccagttgagaaacccccagtttataagcccccagttgagaaaccaccagtgtacaagcccccagttgaaaaaccaccagtgtacaagcccccagttgaaaaacccccagtgtacaagcccccagttgaaaaaccaccagtgtacaagcccccagttgagaagcccccagtttacaagcccccagttgagaagccaccagtttacaagcccccagtt

SEQ ID NO: 8007 - DNA, 414 bp, Glycine max
  Clone ID: LIB3087-002-Q1-K1-F5
cgacaataaaattcccagtcctagatcttttcggcgtaaggttgcgtagaagaatcagattaccataccaaggttatgggtggaggtatgaaggctttttctaagcaaccttacgccgaaaagatctaggtatggtaatctgattcttctacagtctggtgtgcacagtaagtgctttgtaactttagttgttggctggtactaatctcctggagctagaataatttcattgtgttacaccgaagataacgggtttgtactattgttgagtagggtttatttatttctttatttatcttactgtaaaacttagcatattattattgccttgtggcttattagatgtgtggttttagagggttgtaggaatgtctttagtaattcgacatcagtcaaaagccagcttgcacttct

SEQ ID NO: 8008 - DNA, 417 bp, Glycine max
  Clone ID: LIB3087-002-Q1-K1-F6
cccacgcgtccgaaaaaaactccaagttatataaaatattaaataaaaactacaagcttagacatcgctcctctctctctaaaaatctccggcggttcttcagttgaaccttggagatctcctctctctctctcccattttcctttccatttcggatctgataggaatagacttcgtcagtgttgaaatcacgagaaattgatggctgctccaccggcaggagctcgtgcggataacgattatctcataaaactcctctggattggcgatagtggtgttggaaggagttgccttcttctacgattctctgatggttctttcacaactagtttcatcacaaccataggcatggattttaagataggaaccattgagcaggatggaaaacggatcaagctccaaatttgggatactgca

SEQ ID NO: 8009 - DNA, 420 bp, Glycine max
  Clone ID: LIB3087-002-Q1-K1-F7
aaatcttaaaaatattcagtgaagatcaacctcaatggcatctcttggcgtgcgaccagttcttccccctccattaacttccatctccgacccacctcctcttttcgatggcaccaccaggttgtacatcagttattcttgcccctatgcacaacgtgtgtggatcgctaggaactacaaggggctacaagataagatcaatttggtccctattaaccttcaagacaggccagcttggtataaggagaaagtctaccctgaaaataaggtgccatccttggagcacaatggcaaggtgttgggagaaagtcttgatttgatcaaatatgtagatgcaaactttgaagggacacctttgtttcccagtgatcctgccaagaaagagttcggtgagcaattgatatcccatgttgatacatt

SEQ ID NO: 8010 - DNA, 193 bp, Glycine max
  Clone ID: LIB3087-002-Q1-K1-G1
ctagagggggatatggtgtgaggaaggcgtatgcttggatggatttgcctggcgcagacctaatgggtataatatcgcttacttctgatcccagatacgtttaatggcatataacgtgaataaagacttagggcctatgaaatctactgttcactcctataatgtctatatctggatatatgcagaactggct

SEQ ID NO: 8011 - DNA, 416 bp, Glycine max
  Clone ID: LIB3087-002-Q1-K1-G10
cccacgcgtccgcccacgcgtccgcccacgcgtccggcttgtgctgccttcgtttgcgtttttatcacagaggaattaacatatatatagcaagcatggcagtcacactctacgaccttagctcttcctctgggttgaagaaacttgatgagtaccttctcccacgcagttacatcaccgggtaccaagctacaaaggatgatcttactgtttatgcagctttgccaactgctccatcagatgaatatggaaatgtttccaggtggtacaagcacattgatgctttgttgagaatctctggtgttactggcgagggatctggtgttattgttgagggatctctagttgcagagcctgttgcaactccccctgctgcagacacaaaggctgctgttgctgaagatgacgatgatgat

SEQ ID NO: 8012 - DNA, 424 bp, Glycine max
  Clone ID: LIB3087-002-Q1-K1-G3
tgtctgtattccatgttcacctcttcctttgagcccaaggttatctaggaaactctgtgatatcagaagtccacaatccaacttgagtgatcatgttggggaccatcccgttaatgattattcaatagacagacaaatggatacaattcacaggaacttgtctgacccattgaatagtgattcaaagaatgatgagaagaacatgaagcacgatgacatttctagtgtacttaatccttctgtcttgtttaagcaaccaactcatctaattacaccatctgagatcaccaaagctggttcctcctctgagactaatataattgataggaaaaatgagggagaagcaaagatccaggatgttgttgatgtaggtaatgctgaagtggaagtgaaagtggtgggtgagacaagatctaatcaagtg

SEQ ID NO: 8013 - DNA, 421 bp, Glycine max
  Clone ID: LIB3087-002-Q1-K1-F1
caacccctcccatctcagctactccacagcctcccccaaacactaaccctagccctaaccctaaccccagccctgcccctggcccgggcccaattcaagccccgagccccaaaccccccactcccactcccactaccactcccacgccttcccagcccttcaaccgcgctttgtcgccgccatcgcaaccgcagttcccgcactactcctccccttctccgccttcctacgctcccggcgccgtcccgccgccgcggggcggcatggcgatcggtgtgcccgcgcaccaccagagcccctcccctccgtcttcgtcctacttcggtcaacattttggggggttgggtcgaaccggagtcaacgtcgctgaatctacctccaattcaagcacctctcaagtgaggacgccggtgcaaggaac

SEQ ID NO: 8014 - DNA, 418 bp, Glycine max
  Clone ID: LIB3087-002-Q1-K1-D5
ggaaaaaagtggcatgtgggctgcagcaacaaaaccattcgtccaattccaattcggcagacacactactacttctctccttccgattcttctgatggcaaaccaagcttcactctccttctcttcggggtctccagttcacgcgcctctgaagcgcgtgggcacgcacaacggaagcttccactgcgacgaggcccttggctgcttcatgattcgcctcacgaacaaattcaacagcgccgaaatcgttcgctcccgagaccctcaggtgttggaggatcttgatgctgttcttgatgttgggggagtgtatgaccctgctcgagatcggtatgatcatcatcaaaaaggatttgaagaagtttttgggcatggtttctccactaaattgagtagtgctggtcttggttataagcat

SEQ ID NO: 8015 - DNA, 266 bp, Glycine max
  Clone ID: LIB3087-002-Q1-K1-D6
ggaaagcgttactcgctctccccgcaactcactgagtcaactcgccggcattgtcggggaactccaccaatcgggggagcaaagctagatcctaggcgcgttactgagtcgtgactcgttcttaactcgtgaatggcttctgcggaagctgattcccgtctgaagcaggtgctcgttcccgcgctcgagaaaatcatcaagaacgcgtcgtggcgaaagcactcgaagctctcgcacgagtgcaagttcgttgtctaaattctaac

SEQ ID NO: 8016 - DNA, 414 bp, Glycine max
  Clone ID: LIB3087-002-Q1-K1-D7
aaccaatttaggttctcttaaaacaaaggcccctcaaaccactttccccacactcttttagtgtgtcgtattttttcctctctttctccacaattaggtcttggaccgacccttttgtgtaagtgcaatggccatggctaagcttgtatgtgttctgcttctggcattccttggcatttccatgatcacaactcaagttatggcaacagattctgcctatcacttggatggaaggagttatggacctgggagtctaaagacctcacagtgcccttctgaatgcacaagaagatgtagccagacacagtaccacaagccgtgcatgtttttctgccaagaatgctgcaaagtgtgcctttgtgttcctcctggctactatggcaacaagtctgtgtgcccctgctacaacaactg

SEQ ID NO: 8017 - DNA, 429 bp, Glycine max
  unsure at all n locations
  Clone ID: LIB3087-002-Q1-K1-D9
aacgatcatagcagcttctttgtgaaggtgtacatggaagggattccaatcggaaggaagctcaatatactagctcatggaggctactatgagttagtcaggactcttgaacacatgtttgacactaccattctttggggaacagaaatgaatggagtgcaaccagagagatgccatgtgctaacttatgaagatgaagaaggggatttggtcatggttggagatgtcccttgggagatgttcttatcgacggtgaagaggttgaagatcacaagggtagacacattcgggtgttaagtgaagaacatgacactgcctcttccttcaccggtgattntagattttgtcctctagagtgagactctaatgaggtcgctgatcagaaaatttagaaaaatcttagtgaagtatatgcacagataggtgatg

SEQ ID NO: 8018 - DNA, 411 bp, Glycine max
  Clone ID: LIB3087-002-Q1-K1-E1
cctacaccgagtaccggacgtgcctcgtcgatggccaatgccagcccccaaaatcactctcaaagacttcaaatcccttctcgctcgtcgctccaaggcactctcgcgccttcaaaaccctaactctacccatctccacaacggttcccaacccgaaccacctcccaccgttaccgttaatcacggcgaaggcccctccatcaccgtcgcccgagaagacggagatcgcaacgaaacgccgctcgtcgccgttagttccgacaagaaaccgctcgctggatctgattcggagaaacctcagctcgattccaagattgatgaggcttcggagaaaaaaacatctgacggtgtcgccgctccggaggaagaacagactgagccggtcgctgagaatgaggatctgcttaacga

SEQ ID NO: 8019 - DNA, 429 bp, Glycine max
  Clone ID: LIB3087-002-Q1-K1-E11
cggacgcgtgggttgcgatcgaagagagatgggggacggaagtgggaaccggtggagcagggcggagtgggtgcagcagtacgatctcttaggcaaaatcggagaaggcacttacggcctcgtcttcctggcccgaaccaaaggcactccctccaaatccatcgccatcaaaaagttcaagcaatccaaggacggcgacggcgtctcccccaccgccatccgcgaaatcatgctgctcagggagattacgcacgagaacgtcgtcaagctcgtcaatgtccacatcaaccacgccgacatgtcgctctacctcgcctttgattacgccgagcacgatctctatgcatcacagggataaactcaaccattccattaaccaatacactgttaagtctttgctctggcagttgctcaatggactaagctatc

SEQ ID NO: 8020 - DNA, 337 bp, Glycine max
  Clone ID: LIB3087-002-Q1-K1-E12
gaaaaaagactgagagcaattgcatcaacaacaaattgaaaggatgtcgatcttcgagtacaacggaagcgccgtggtggctatggtcggcaagaactgcttcgccattgccagcgaccgaaggctcggcgttcagctccaaaccatagccacggatttccaacgcatttccaagattcacgacaagctcttcatcgctctctctggcctcgccaccgatgctcaaacattgtatcagcgtcttggtttccggcacaaactgtatcagcttcgtgaagagagggatatgaaaccagagacctttgccagcttagtctctgctctgctttatgagaaa

SEQ ID NO: 8021 - DNA, 401 bp, Glycine max
  unsure at all n locations
  Clone ID: LIB3087-002-Q1-K1-E2
gcttgttcttggagagtgggaagatcgcatgcagagagggcttttccgctatgacgttacagcctgtgaaaccaaggtgattcctggggagtatggtttcattgctcagctgaatgagggtcgccacctcaagaagagaccaactgagtttcgtgttgataaggtcctccagccctttgatgaaaacaagtttaacttcactaaagttgggcaagaagaggtcctgtttcagcttgaggctagcaatgatggggaggctcaattctttccaaatgcacctattgatgttgagaattctcctagttttgttgccatcaatgtgagtcctattgaatatgggcatgtgctgctgattccacggatttttaagtgtttacctcanaggattgaccatgcaagct

SEQ ID NO: 8022 - DNA, 429 bp, Glycine max
  unsure at all n locations
  Clone ID: LIB3087-002-Q1-K1-E3
cccacgcgtccgcggacgcgtgggttataacacaacacaacccatggccaccacctgcgcattcctcctccttcccctcctcctgctgctccacctcgccatcgccgctcacggcatcggcatcaactacggcacgctcggcgacaaccttccaccgcccgcggcggtggcgaacttcctgaagacgaagacgaccatcgaccgcgtgaagatctacgacgtgaacccggacatcctgcgggccttcgccggcagcggcatctccgtgacggtgaccgcccccaacggcgacatcgccgccttaaccaaaatcgactcggcgaggcagtgggtggcgacgcacatcaaaccctntcaccctcagaccaaaattaattacatcctcgtcggcagcgaggttctccactggggcgacaccaacatgatccg

SEQ ID NO: 8023 - DNA, 407 bp, Glycine max
  Clone ID: LIB3087-002-Q1-K1-E6
cggacgcgtgggcacggaactggctttgcaggttgatcactggtccaatacccatgagatctttggttaagtgctcttcagtagcgtttgaagtacttgaacgtagttgttgcttctgcattatttctggttctccactctcccactcttcaatccgcggcatcaccatgtgctccaaacccttggtgctactcaatgaaaacccacctgcaataatattgttggtgcttgcttgggaattcaccatgtggttgaagttctcaacagcctggtttccttgcttgaacaatttctgaatttcaaccacgttattgttgtagcggttgttgttgttgctggacgtgcttgacatgttcgggtccaacaggccaaagttggagttgtcgaaggccaaattattattacca

SEQ ID NO: 8024 - DNA, 193 bp, Glycine max
  Clone ID: LIB3087-002-Q1-K1-E7
cccacgcgtccgaagggaatgatggattttgatttttagaatcaaaattttgattagtatatgcccgaggtaaggatgtaaggaatggaaaatatagttggacattttctcgaacagattacgttcaagctttagattttgattgttttgatttttcagtggaaatagacaaacacaggatgtactggttctt

SEQ ID NO: 8025 - DNA, 205 bp, Glycine max
  Clone ID: LIB3087-002-Q1-K1-E8
cccacgcgtccggcttaaccgcgggttttctgactctgcttctgtgaattgccttcttggacttgacgacgaggttgccgggaataatctcgaacccggttcgaaggacggtggggatggtggtggtggtggtggggttggtggcggtggtgcttctctgggtggatcttttggtatcgggttgtgtttgtcgcttgttgttcac

SEQ ID NO: 8026 - DNA, 431 bp, Glycine max
  Clone ID: LIB3087-002-Q1-K1-E9
cggacgcgtgggtttacatgcagaaacgcatgtgcttcgtgtctaattcatcctcagacaaggttttgggacagagatctgaattttattaagtagaaaagaaagtatctatctatctatctatctatctatctagaaaggttttgagaagaaaaaaaaaatcaaagatggcgaatcgatggtggactgggaatgtgggaatgataagagagcaagagttgatggagaacagcaacaacaacaacgctactactacaccgacgaatagcagcaacagcaacactaatgcgaacacaaacacgaccgaggaagaggtgagcagggacaacggagaggacctgcagaaccaaaacctcggaagccacgaaggctcggagccaggaagcagcggtcggaggccacgtggcatgccacctgggtccaagaacaag

SEQ ID NO: 8027 - DNA, 414 bp, Glycine max
  unsure at all n locations
  Clone ID: LIB3087-002-Q1-K1-D4
ggaaagcgtcactcgctctccccgcaactcactgagtcaactcgccgtcattgtcttcgaactccaccaatcgggggagcaaagctagatcctaggcgcgttactgagtcgtgactcgtccttaactcgggaatggcttcttcggaagctgattcccgtctgaagcaggtgctcgttcccgcgctcgagaaaatcatcaagaacgcgtcgtggcgaaagcacgcgaagctctcgcacgagtgcaagtccgtggtcgaaatcctaacctcgccgccgaagcctcaatcgcctgcctccgacgaagccgctgagccggaggcctcggtccccggcccaatccatgatggaggtcccgtggagtactcccttgccgagtcggagtcgatcctncgcccgctcattgccgccgcgtcc

SEQ ID NO: 8028 - DNA, 404 bp, Glycine max
  Clone ID: LIB3087-002-Q1-K1-C11
cccacgcgtccgcccacgcgtccgcccacgcgtccgcccacgcgtccgggaggaaaatggccaagatggaagcttaatgattacttgcatgccttctcgctatgaaatcacccaactcactgttactggggaatggtccaccccaaagattaacgagggaatgcagctgtgtttggatgcttgtgcaaagcttgcgaagattatgaggtcatgtttaaaagaagctgtttcggattcccaggaatagaatggcagttctaaattaacatagttcgcattatgtgctgttaatttcttcttatattgagataattttgtgttgaaggtagggagagttgctttgcatgccctgaaaattttgtgctcatgatcttgtcaaagacaaagttaattattcttatagc

SEQ ID NO: 8029 - DNA, 420 bp, Glycine max
  Clone ID: LIB3087-002-Q1-K1-C12
cttcccgatccctaaggtaagtgagtaatcggtggttgagaatggtggagaaggcgaagggtaggaaggaggaggtggttaccagagagtacaccattaacctccacaagcgcctccatggctgcacatttaagaagaaagctcctaaagctattaaggagataaggaaatttgcccaaaaggccatggggaccaatgatgtgagggtggatgtgaagttgaacaagtctgtctggagccagggaatcaggagtgttccaaggaggattagggtaagaattgctcgcaagaggaatgacgatgaacatgccaaggaagagctatactctcttgtcaccgttgttgagattcctaacgatgagctcaaagggttaggcaccaaggttattgatgatgaggattgatttgtatttggttgaa

SEQ ID NO: 8030 - DNA, 393 bp, Glycine max
  Clone ID: LIB3087-002-Q1-K1-C3
aacagttgcagcagctgcatctccctattgtggtggttttgaaagcaaaggtgtcttcagattcatattatcacctaaagaggccattaggccaatatcataaagcataacaacaacaccaacatgtccccttttgattctccccaaacaacagcagatagcagcctcagcatgagcacaagcaccagtccaagtggtggtgatgcgttgttgaagtggggacacagaaagagatcaaggctttccagggctgccattgaagattcatcgtcttctgttcacaccaacaacagaagaatcacccacactgttcctccaaacttgtccatgccgacgccgccactcgtttcttctactgcctccagtggcagaggtagaaagcataatagccct

SEQ ID NO: 8031 - DNA, 427 bp, Glycine max
  Clone ID: LIB3087-002-Q1-K1-C4
actggttctgaggatggcacagtacgcatatggcactccacaacttataggcttgagaacacattaaactatggtcttgaaagagtctgggctattggatacttgaagagttctcgtcgggttgtgattggctatgatgaaggaacaattatggtcaaacttggtcgagaagttcctgtggctagcatggacaacagcgggaaaattatttggtctaagcataatgaaattcagactgtcaatataaaaagtgtaggagcagatgtagaggttgctgacggagaaaggttacctttagctgttaaggagttgggtacctgcgatctctaccctcaaaatttaaagcacaatccaaatgggaggtttgttgttgtgtgtggagatggtgagtacattatatacactgcattggcatggagaaataggt

SEQ ID NO: 8032 - DNA, 420 bp, Glycine max
  Clone ID: LIB3087-002-Q1-K1-C5
cccacgcgtccgcccacgcgtccgacgaaacgaaaacactttctctccgattcttagcatccaatcagaggttccatttctcttccttctttcgcaccgaagttccaatcggtaaattgcttctctctttcgtcaatcttcattccttctctctgaacaataactgtaataacgctcatgctgcgtgagctagggttagggtttttcctcgtcgttgttccgttactcctttcgcggttttttggttttgacttcgatcctcttcgcgatcgagacgctaattcttggttcttcttcctgattgcttttgttcttgtgctcacgatcgcgtttcgtcgcagctcattactgcactatatgcttccaactaagagaccttgcgaaggactggttgcagaagaagagatcgaccacaacatc

SEQ ID NO: 8033 - DNA, 420 bp, Glycine max
  Clone ID: LIB3087-002-Q1-K1-C6
cccacgcgtccgcggacgcgtggggcaaaacgaaaacgaaatgactgaaaacccaggaaaaactctgaagaaaagttcgttgctttctgcttcactgcgaagatgaacggtggtccatctggtttcacaaatgctcccgtcacaagggccttcatcatcgcttcggcgcttttcacaatctcctctgggatccaaggccgtgtcggcactctggggttgtcgtatcaggatatctttggaaagatacgcctttggaagttgatcatgtccatatattccttctcgtcaacaccagagttgatgtttggactgtatctgctatattacttcagggtctttgagcgacagataggttccaataaatactcagtctttatcgtgttctccatattaacttcactactgcttgaggtccttgct

SEQ ID NO: 8034 - DNA, 415 bp, Glycine max
  Clone ID: LIB3087-002-Q1-K1-C7
attaccatatatagtcacattttctttacactttgtgaggtctaaaatgttgtccgtttttcacaaggggtttgctcacccacctgaagagcttaaaagccctgcatctaacagtggctccaacaagcctaagattcctgaggaaactctaagagaatttctttctcatcatccccataacactttttctctgagttttggtcactctgctgttctagcttatactcgtcctgatccaccttcctttgttcatcaaaggttgttttgtgggattgatgacatatactgtatctttttggggagcttgaacaatttgtgctcactcaacaagcagtatggtttggcaaagggcaccaacgaagccatgtttgtgattgaagcttacaagacactccgtgaccgtggtccataccct

SEQ ID NO: 8035 - DNA, 433 bp, Glycine max
  unsure at all n locations
  Clone ID: LIB3087-002-Q1-K1-C9
gaagctttgagagagagagagggaggagggagagtgttgacgctccatcaagatgggtatttctagggattccatgcacaagaggcgtgccactggtggcaagaagaaggcatggagaaagaagagaaagtatgagcttgggcgtcaggccgcaaacaccaagttatcaagcaacaaaactatccggaggattcgtgttcgaggtggcaatgttaaatggagggcattgaggttggataccggcaattactcatggggtagtgaagcagttactcgcaagactcgtattctagatgttgtttacaatgcctcaaacaatgagcttgtgcgaactcagaccctggtcaagaatgctattgntcaggttgatgctgctcctttcaagcagtggtaccttcagcactatggtgttgaaaattggtagaaaaaagaa

SEQ ID NO: 8036 - DNA, 356 bp, Glycine max
  Clone ID: LIB3087-002-Q1-K1-D1
cccacgcgtccgctcacgcgtacgcggacgcgtgtgtagccaccacaataactagtataaataacgactattcacagcagcaagctgtcaatctaattacgaagtcggtacctgacgccattagtgcatcaactgctgatgcatccagttatgacttagggtcgagtgcacacgcatattaaaatcatctatccagagcttcgtctgaggatgcacatgattataaagccatgcaattggatatggctggacacgatctagttaggccaattcgcccattttaaaacgatcattctagggcttaagttgacagggtgtataactctgctctaaagcgtaaatagcagctttacaaa

SEQ ID NO: 8037 - DNA, 431 bp, Glycine max
  Clone ID: LIB3087-002-Q1-K1-D11
cttaaacattaaaccttagcaaaactcaacaatgctagacatcaaaggctacctcgtactcttcttcctatggttcatatcaaccattctgatacgttccatcttcaagaaaccacagcgtctaagactcccaccgggtcctccaatttcaatacccttgctgggacacgcgccatatctccgttcactgctccaccaagcattgtacaagctatcactgcgctatggacccttgatccacgtcatgatcggttcgaagcacgtggtggtggcgtcgtcggcggagacggccaagcagatcctcaaaacctcggaggaggcattctgcaaccgtcccttaatgatagcgagcgagagcctaacctacggcgcggcggactacttcttcatcccctacggcacatactggcggttcctgaagaagctctgca

SEQ ID NO: 8038 - DNA, 419 bp, Glycine max
  Clone ID: LIB3087-002-Q1-K1-D12
gaacaattactttagtgtgttctcttgtcacataaaagtcatctaagaagaattacaagatcatcatcacaataacatgatgagttcaggaattagagcatggagtgtggcagcaagtgttggaattgtggaggccttgaaagaccaaggtatatgcaggtggaatcatgccttaagatcagctcaacaccatctcaaaaaccatgttggctcattctctcaggctaacaagctttcttcttctgctatgatctgcacaacactaaaacatgacaaggcaaatcaatcagaagagtctttgagaactgtcatgtacttaagctgctggggtcccaactagatatcataagcccaacaacaaaatattcttttatcttttcaattctaggaatcaagcaagcttaattagtctcaaatga

SEQ ID NO: 8039 - DNA, 415 bp, Glycine max
  unsure at all n locations
  Clone ID: LIB3087-002-Q1-K1-D3
aaacgaatgcgcgaaaaggtgctgtcggaaaagaattatcaaattatacaacgcgattaggaggaattaaagaaatacaaagcttagcgacgtgggtttcttccataattaagcatgattagtggaacagagaatgttattttggcggtaatagattagaggctgaatgatgatggatgaatgagtgttagtttcagcaatttgactatcttccgtaagcaaagagcagtagctgaaacaaacaacgaacgaacactgtaagcatgaacaagcgccaagaagatgtgcgcaacatagctactaccctcgactccagattcaatcagaccctcagaaatgttcaagggttactcaaaggtcgtagtatacctggtaaaatattattgagccgtanggtagaccctccggataactc

SEQ ID NO: 8040 - DNA, 421 bp, Glycine max
  Clone ID: LIB3087-002-Q1-K1-C10
gaagaaaaagcggcgtacgaactctctgtcagactctcacgcactgaggcataactctatcatctttcattacttactcttctctctctcaaacatccaaagctccaaaccaaaacctgttttgttcccagtctctgaagacacacaagtgttagtgttacagacacaccatccatacaaacagatgttggaagccaagtgtctcaaaaaagcagtggttccttccactttgattcaagacccttctcctggaagccttcagtgcacacgccttgctctccgtgttagcgaggaccaaagttcttgttttgtttacattgcctccggtccccacatttataggctccacattgctctgggagaatcttcaatcagcgaatgaaaagatagcctattgatacctgaacacactgagattatt

SEQ ID NO: 8041 - DNA, 414 bp, Glycine max
  Clone ID: LIB3087-002-Q1-K1-A7
cccaattgtatggccgggcccatatacattatacagagtgagcccgattgcataaacgaagaccgtgcgtgcgtgtttggttaaagttaaacccttccattgcagttgttcgtctttgaaggttgttgccggaaatgaattctatggcggtgagacttgtgaagcatctccaactctctgcaccgacctcatcttcattcggtggtgtgccgagaagtggagcgtcatggtattcgacctctctatctggaggtgaatatcagccttcacaagataatgttgcacctaagaatgaagcattggatggtgaacttgatgattttcttggcgaaaaggccgagctacagttgcaaggtgtggatcccaagaagggttggggatttcgtggcctgcacaaggcaattattttgtgga

SEQ ID NO: 8042 - DNA, 419 bp, Glycine max
  Clone ID: LIB3087-002-Q1-K1-A8
cgcgtcgctccgcaccagtttcaccgcacgaatatcttgttgtttggagcgatccgagaaaaactctgtaaacatgttggtttaccaggacctccttacaggtgatgagcttctctctgactccttccgttacaaggaaattgagaatggaatgctgtgggaagttgaggggaagtgggttgttaaaggagcagttgatgtagacattggtgcaaacccttctgctgagggtggaggagaagatgagggagttgatgatgcagctgttaaggttgttgacattgttgacacattcagacttcaggagcaacccgcattcgataagaagcagtttgttaccttcatgaagaggtttatcaagaatttgactcccaagctcgatgcagagcatcaggagttgtttaagatgcacatcgagg

SEQ ID NO: 8043 - DNA, 363 bp, Glycine max
  Clone ID: LIB3087-002-Q1-K1-B1
tcggtgcctggactccacggcgtgcgctaagatttctgtttacactcaggactacatactttatttcctctccgtattctcacattttcacaacatggacgaggatttcgacatggcggcggcggagcccatgggcgaggacttcgacttcgccggcagcggcagcaaccccgtcctgaaggtcggcgaggagaaggagattgggaatgagggtttgaagaagaagctcctgaaagaaggtgaaggatgcgacacccttgaagctggtgacgaagtccatggtcactatactgagacgtatcttgatggcacgaatttcgactgtagcacagattggggagctcctggcatcatcgcgcttgt

SEQ ID NO: 8044 - DNA, 335 bp, Glycine max
  Clone ID: LIB3087-002-Q1-K1-B10
cctccttctaccattttcctttcactttccatcactttctctcgtttccccttcgcaattttcccctcggaagagacatcgaagaaaatcacgtcacggcaatggaggaaaagcacgcagcagccaatgaatctgcacacgccgaatccaacggcgtctctcacggcgccgaccacggttggcagaaggtgacctacgctaagaagcagaagaagaagaccgttaacgccgtcaacagcgccgattcccgtgcgaattccaacaagctcgttccgaacggcacgcttgtccggcaacgatggcgttttccggtcgctcgagctgcagtcggagga

SEQ ID NO: 8045 - DNA, 398 bp, Glycine max
  Clone ID: LIB3087-002-Q1-K1-B11
ggaaattttgagggaagggagcagaataagtcttttacattttgacgactcatgttctgcttggtctgtattgcaaatataaaattacctaaaaaattatgttaatttatctgctgtattgtctttaatgattagtataaattgatataggttgtatattttggtcccttttacattttctgatctttgtatttccttgtgtagtttacaatgcaagaaggatctgtggagggtattgcatggcgggcaagctcgctcacctttgagaatgaaatatatccactcaatgagtcgtgggttgtgtctggactgggtcatgattataaaactgatactcagcccattaagacagcttcggtgctacactacgatgggaaaatgaaaccttggcttgatct

SEQ ID NO: 8046 - DNA, 414 bp, Glycine max
  Clone ID: LIB3087-002-Q1-K1-B12
ctgactcatgggaaataattaacaagctgtgagtcaagattctgtcatatcattctgctaatcatgtgatgtgatttcatatatgcattactttaaattatcattgttaggtttacgtgtacaattccaaatcaccagctagaaagcgtggtgctgtctaacttgttggccatgttcaccgaatgggagggactaagaagatggggctaaaaatcagaaactgcatacccatttgttttagcgctttgtctatattagacatcttatagtacgtggtattgcggtaatgaatattctatattcagattagtgcatgctgattggatggaggattggctgatgtacagaatttacattttttggtggaacataattcacattttgattcttatattaaatcatccaaaatatatt

SEQ ID NO: 8047 - DNA, 416 bp, Glycine max
  Clone ID: LIB3087-002-Q1-K1-B2
ggcacctttcgttcactaccgattccatctcactcacacacttctccccaaaaccgagaaccctagctctctttcgcgctcgttctctcgctcgctgcaaccatgaattgctccatctccggcgaagttccggatgatcccgtcgtgtcccggaactccggtctcctcttcgagaagcgtttgattgagcgacacatctcggattatgggaagtgtccaattactggagaaccacttactatggatgacattgtaccaatcaagacaggcaagatagtgaaacccatacctgttcaggcagctagcatccctggcatgcttggaatgttccaaaatgaatgggatggattgatgctatctaattttgcattggagcaacaattgcacacagcaagacaggagctgagtcatgctct

SEQ ID NO: 8048 - DNA, 407 bp, Glycine max
  Clone ID: LIB3087-002-Q1-K1-B3
tgcggaactcgctggctcgaacccacgcgtccgcaggaagcccaccaagattcactctcgctcacgtgcccgccgaatgaaggaagccaagaggaaaggacgtcactctggatatggtaagcgtaagggtacaagggaggcaaggcttcccactaaaatcctttggatgaagagaatgcgtgtgcttagacgcttgcttcgcaaatacagggaatctaagaagattgacaagcacatgtatcatgacatgtacatgaaggtcaagggtaacgttttcaagaacaaaagagttttaatggagagcattcataagtccaaagccgagaaggcaagagagaagaccttgtccgatcaatttgaggccaaacgtgccaagaacaaagccagcagagaaagaaaaattgctc

SEQ ID NO: 8049 - DNA, 404 bp, Glycine max
  Clone ID: LIB3087-002-Q1-K1-B4
gtactcacattgtatcactctcactctcatgacactttcatatcagccacgatttcaggtacatcgggttctacgctccatggtgtggccactgtaagaagcttgctcccgagtatgagaaagctgcttctatcttgagtagtcatgatcctccggttgttttggctaaaattgatgccaatgaggagaagaacaaagaccttgcatctcaatatgatgttaggggatacccaacaattaagattctgagaaatgggggaaagaatgttcaggaatacaaaggtccccgtgaagcagatggcatcgttgactatttgaagaaacaaagtggtcctgcttcaactgaaattaaatctgctgatgaagctactgctttcattggtgaaaatatagttgctattgtt

SEQ ID NO: 8050 - DNA, 402 bp, Glycine max
  Clone ID: LIB3087-002-Q1-K1-B5
gtgaagaagcctaacagcagcaaagagcgttagagctgatcgcttgagataaggtcaatttgcagttgcacgcttcccaattcgcacacccatatcacatcacatctttctccacacgcaacgcaacctttttataatcaatcatcctcactcgcatttgaagacgcagcaatctttcccgtgaaaagggaccatggaggcaaattcaggtgccagcgaccgaatttcgagaatcgccggccacctccgcccccagagagaggatgatgtttgtttgaagcgtagcgattgccgtgcaaaaggtggggtctccggattcaaggtggccatattgggtgccgcaggaggcatagggcaacctctggcgatgttgatgaagatgaatccactcgtttcacttct

SEQ ID NO: 8051 - DNA, 419 bp, Glycine max
  Clone ID: LIB3087-002-Q1-K1-B6
ctcgcttgtgctgccttcgtttgcgtttttatcacagaggaattaacatatatatagcaagcatggcagtcacactctacgaccttagctcttcctctgggttgaagaaacttgatgagtaccttctcccacgcagttacatcaccgggtaccaagctacaaaggatgatcttactgtttatgcagctttgccaactgctccatcagatgaatatggaaatgtttccaggtggtacaagcacattgatgctttgttgagaatctctggtgttactggcgagggatctggtgttattgttgagggatctctagttgcagagcctgttgcaactccccctgctgcagacacaaaggctgctgttgctgaggatgacgatgatgatgatgtggatttgttcggtgaagagacagaggaagag

SEQ ID NO: 8052 - DNA, 399 bp, Glycine max
  Clone ID: LIB3087-002-Q1-K1-B7
tctttctctctctagaattctcagatttgcggggcgagatgatgcagcagccaggacccggcatggcacctcccaccatgggccagcagccgccgcaacagtaccagcagcctccgccgcagcagcagcaaccctacgtcatgatgccgccgcaggcccaggccccgcaggccatgtgggccccctccgcccagcctccgcctcagcagcagcccgccagcgccgacgaggtccgaaccctctggatcggggatctgcagtactggatggacgagaactatctctatacctgctttgctcacaccggcgaggttacatcggttaaagtaattcgaaacaagcaaactagtcaatctgaaggttatgggtttattgagtttaatagtcgtgctggagctg

SEQ ID NO: 8053 - DNA, 402 bp, Glycine max
  Clone ID: LIB3087-002-Q1-K1-B8
aacttgtgtttggagactccgaggttgagtttgaaggtgcattctttgaagggtgtgtttgttatgggttctagttgtggttgtggtgtaactcttgttcttgttttctgcttatggggtgtgttgatctccctctcttctgctgctaggctcagtgcttcaaggcagaatcttgaggttactaagcatttgaatcgcctgtacaagcctactgttaagaccattcagagtccagatggggatacaataaactgtgtacctgtttcgaagcagcctgcatttgaccatcctttcctcaaagatcacaagattcagaccagacctactttccaccctgattggctttttgaagagaacaagttatctgaaaagcctaaagcaaaagcccatacccccatcact

SEQ ID NO: 8054 - DNA, 403 bp, Glycine max
  unsure at all n locations
  Clone ID: LIB3087-002-Q1-K1-B9
gctccgtcaactcttccaagaccagattcaccgcctcggtttcgccgatggccggttattcctccggcgccgccgaagaaggcgaaaaccatcgcgtggaggccgttgccgatgaatccaccgactacatctccgatctcccgaacgagtgcctggcttcggtgtttcagtttctcagctccgccgatcggagccgctgttcgctcgtttgccggcggtggctccagatcgaaggacagagccgncacaggctttctctgaacgccgaactggatctgtttccggcgattccgtcgctgttctctcggttcgattcggtgacgaagctcgcgctgaagtgcgaccgcagatccgtgagcatacgcgacgacgcgctcgtgctgatctcgcagcggtgccctaa

SEQ ID NO: 8055 - DNA, 117 bp, Glycine max
  Clone ID: LIB3087-002-Q1-K1-C1
gtgactcttctgcttagtagcatttccccacacgttttcctcgtcgaacggcgatcagagctcggggccgatcgatttggcgtcgtatctatttcatagtgacacctgactctgaat

SEQ ID NO: 8056 - DNA, 421 bp, Glycine max
  Clone ID: LIB3087-002-Q1-K1-A6
gtgctctgctctcatctcattcatattcatttcaatggcaactcaaggtcaagtcattacctgcaaagctgcggtggcctgggaacccaacaagcccttaaccgtccaagacgttcaggttgctccgcctcaggccggcgaggtccgtgtccaaatcctcttcaccgctctctgccacaccgatgcttacacttggggcggcaaggatcccgaaggtctcttcccctgtattctcggccacgaagctgcagggattgaggagagtgttggagaaggtgttactaatgttcagcctggggatcatgtcattccctgttaccaggctgagtgtggggagtgcaagacttgcaaatcggcgaagacaaacctctgtggcaaggttcgttccgccactggagttggggtcatgctcaatgatgga

SEQ ID NO: 8057 - DNA, 424 bp, Glycine max
  Clone ID: LIB3087-001-Q1-K1-H12
cgttatccttctttttttctccttgaactcgaatattcactatggcagatgaggtggttctgctagatttctggccaagtccatttgggatgagggtcaggattgcacttgctgaaaagggtatcaaatatgagtccaaagaagaggacttgcagaacaagagccctttgctcctcaaaatgaacccggttcacaagaaaatcccggttctcatccacaatggcaaacccatttgtgaatctctcgttgctgttcagtacattgaggaggtctggaatgacagaaatcccttgttgccttctgacccttaccagagagctcaggctagattctgggctgactttgttgacaataagatatttgatcttggaagaaagatttggacatcaaagggagaagaaaaagaagctgccaaaaaggagtt

SEQ ID NO: 8058 - DNA, 439 bp, Glycine max
  unsure at all n locations
  Clone ID: LIB3087-001-Q1-K1-H2
attgggatatcagtgctaacttgagtgtgggggatagtgtctttaatcgggctaatgatcaaagaaagttggacgaaaattcaactattgacagttgtatgcatcttgtccaagagtttccaaaagctgggaaccgcctagactcaacgaccaccatagaaagtccttgtgttgcttcagatggatcagctgataccacacagactagaacaggcatcgacaatgttcagataaatgggctcaatgattccaatagatgtgatgaatccttgaatcagccaggaataccagaaagatgccatcctgttggtgactgttctttgacatcttccagcttagatgtgggacgtaaaataaacttaagatctgtaggttctagtattacccnctccatggacaataaggatacttcagaagtacctcgtggaattgactacat

SEQ ID NO: 8059 - DNA, 406 bp, Glycine max
  Clone ID: LIB3087-001-Q1-K1-H3
aatgactatacattcattatattgatgtgtaaatagaggaaaaactcgatggaaaaatggtggtttaattctatgttgtttaataggaagttagaatacaggtgtgaattaagtaaatcaatggatcgtctaggtcctattgcaaataccagtctaagggaagaccctaaaattctaaccgatatagaactgataattcacagggatttggattatttagaaatggaaggttttttttctagcgatctgaatactgtttctaagaatgatgatgatcattacatgtatgagactcaatctagtcttaacaatactattactagtctcattgatagttgcattgagagcttcaatttaagtgaatttcgacaataccatgatttttatttttatagttacatttttt

SEQ ID NO: 8060 - DNA, 412 bp, Glycine max
  unsure at all n locations
  Clone ID: LIB3087-001-Q1-K1-H4
cttgatttaccaaatttctgtgtactagatatgtatagtgttattgatactgataactctaaagtttgaattgatttttgcaaatctctgttcacttctcttcaagcaaaaatccattggcataaatgtcaattataacacgcagaggcatccgttacatgccaagactagatgcagcaaaagtatctgctgctttgctagaaaaaggccaaaatcgtgtcatagatgcttcacttacacttattcgagaaagagcaaagcttaagggagaacttgtgcgtgctttgggaggtgctaaagcaacttcaactcttcttggagttcctttgggacataattcatcgttccttcaagggcctgcatttgcacctnctcgcattagggaggccatttggtgtggtagcaccaactc

SEQ ID NO: 8061 - DNA, 367 bp, Glycine max
  Clone ID: LIB3087-001-Q1-K1-H5
agactttgtaattgaggtgctgcaatggcttcaagtcaggaagaggtgactcttttgggagtaattggaagcccatttgcttgcagggtgaagattgcccttaagttgaagggagttgaatacaaatatgtggaagaaaatttggccaacaagagtgatttgcttctcaaatccaacccagttcacaagaaagttccagtttttattcacaatgagaagcccatagcagagtctcttgtgattgttgagtacattgatgagacatggaagaacaaccccatcttgccttctgatccttaccaaagagccttggctcgtttctggtccaaattcattgatgacaagattgtgggtgctgcatggaatg

SEQ ID NO: 8062 - DNA, 379 bp, Glycine max
  Clone ID: LIB3087-001-Q1-K1-H6
ttcgacccatacttcttcaaatcgccatctcatcctttctcaccaaccaattacaaagactatggcgagcgcgggcaagtttccaagtccgactcccccatcgataatagaagtgaagaagccgccgccggcgaccataatctctggaccctctggaccctctggaacctctggagccttatacaactatgctgggaatgggaatagcaagacccaaactaagaatggaaaccttcttggcaaccgtcttggcaatgaaaagtgacaacaatcagaacaagaaaaagactttcaagtgaaaactcactcacttacttgcttcttggacagacagtttcatttcaatagctttggtgaatagtacatacatgatgatgct

SEQ ID NO: 8063 - DNA, 389 bp, Glycine max
  Clone ID: LIB3087-001-Q1-K1-H7
cggacgcgtgggtctcagtgcaaacaggtacggaaccccacttgcgacggaagcgcgtgtgcattcaacttcacttatggcacttcctcagtggcagctagcctggtccaagacacagtgaccctagccactgatcctgtcccagcctacgcctttgggtgcattcaaaaggtcacagggagctcagtgccaccacaagggctattgggcctgggccgaagcccattatcactcttggcccaaacccaaaagctctaccaatctacattttcttatggcttacccagctttcaaacacttaaactcagtgggtcactgagacttgggcctgtggccaaccccaggagatcaagtttacccccttctaaaaatcctagaagatcatcact

SEQ ID NO: 8064 - DNA, 419 bp, Glycine max
  unsure at all n locations
  Clone ID: LIB3087-001-Q1-K1-H9
cccacgcgtccggttaaatctgctttccattcctgttgcggggaagggatcagatccagtgagaaaaaaactccaaaaaacaggtttttttttgtgatctcttattcattcccagagctaaggaagagcatgctatgcaactaccttttgtaagcactgtctcatcccagaaaaaaaggacgaatctttgttgaatactaagtatctcagtttccttcgggttatattggaaagaagtaaaatttggagagtgaggaatttccagaatgttcaggttatctccccggaggagccaaagatccaaaggcttcaaggtgaagcatgctctacagttatgtgttctgcttggagtttgtatctggctgatttaccaactcanacactctaatgagaagaaatcgtcctatgtagaaagcaca

SEQ ID NO: 8065 - DNA, 352 bp, Glycine max
  Clone ID: LIB3087-002-Q1-K1-A11
ctccaagggcaggcaaacctttgtgaaggcgctcgaaccctttgttaattggctggaggaggctgaagaggaggagtaagtctggtggaggttcagggctagggctgaagaaattatcttgtcttgcagcccttgtaccattagctaagatattggcttgtagtctcataagttcagctctgcctagtactaattatctatttaattcgtgtttgcgtttgactccttcatcttgctctcgggacatatcacggtgcttgtgttttccgcacgcgacattgatatgttatacgagtgcattattgtattctgagtgattatttcaataatgagtgtactcctttccctgttg

SEQ ID NO: 8066 - DNA, 357 bp, Glycine max
  Clone ID: LIB3087-002-Q1-K1-A12
gaagctgttgagcttttttgcgagtccatttggcaaaagggttgaatgggcattgaaactgaagggtgtggagtatgagtacatagaacaagatatcttcaacaagactagtctccttctacagttgaacccggttcacaagaaggttccggttcttgttcatgcccacaaacccatcgctgagtcattcgtcatcgttgaatacgttgatgaaacatggaagcagtatccactgctgcctcaagacccttatcaaagagcacttgctcgactttgggctaatttcgctgagcaaaagtttttagatgcagcatggattggtatgcatagcagcctagatgagcagcaaaacgctgt

SEQ ID NO: 8067 - DNA, 438 bp, Glycine max
  Clone ID: LIB3087-002-Q1-K1-A3
gcctgcaggtactcggtgcctcgatcccaggcgtgcgctttgtagttcgtagaatagccgatgtgcttgtcttagtgtgtcagtcattcctgtgcctcaagtcaagctttgtagtgagcagatataatggctgttgaaaggtccggaattgccaaagatgttacggaattgattggtaaaaccccattagtatatctaaataaacttgcggatggttgtgttgcccgggttgctgctaaactggagttgatggagccatgctctagtgtgaaggacaggattgggtatagtatgattgctgatgcacaagagaagggacttatcacacctggaaagagtgtcctcattgagccaacaagtggtaatactggcattggattagccttcatggcagcagccaggggttacaagctcataattacaatgcctgcttctatg

SEQ ID NO: 8068 - DNA, 421 bp, Glycine max
  Clone ID: LIB3087-002-Q1-K1-A4
cggacgcgtgggcggacgcgtggggtggagttcatggagaaggtctccgcctccgccgagagcgaggagctgaccgtggaggagcgtaacctcctctccgtcgcctacaagaacgtgatcggcgctcgccgcgcctgctggcgcatcatctcctcaatcgagcagaaggaggagagccgcggcaacgaggaccacgtcgccgtcatccgcgactaccgctccaagatcgaggccgagctctccaacatctgcgacggaatcctcaaactcctcgacacgcgcctcgtacactccgccggctccggcgactccaaggtcttctacctcaagatgaacggagactaccacaggtacctcgccgagttcaagaccggcgctgaccgcaaggaggccgccgagagcacgctctccgcctacaaag

SEQ ID NO: 8069 - DNA, 412 bp, Glycine max
  Clone ID: LIB3087-002-Q1-K1-A5
cggacgcgtgggatgagttattgatcatttttgtatatacattttcgatttttctctcggttgttcctttggctctcgtcaaaagcaacaactgcattcaaagggagggctaaaaaacaatgttgccatcattaacacacatggtttcgctctccattttgaatctcctccacactcaaaaatcatagtacatagatagatagctcctttattatacacaaacaatcacacaccgtatcccttgttttgagtttccgaggtcagaacatggcctgcgccgaaaacagacaaccgaaggttcctgttttcctctgtttcttctcatttacgtttgttgccagcgttttgctgaattgcaaccgggtttcggggcagacatccgcttgttttgcctgcgatgttgcgaaagacc

SEQ ID NO: 8070 - DNA, 398 bp, Glycine max
  Clone ID: LIB3087-001-Q1-K1-H11
cttcctcccttggagaaaaagaagagccaccgctgcgacgccgttcgtgcatttttgaggtgccgctgtcatgtttgggcgtggtggaccaaggaggagtgataactccaaatattatgatattctcgggatttccaaaaatgccagtgaagatgaaatcaagaaggcctatagaaaggcggctatgaagaaccatccagataagggaggagatcctgaaaagtttaaggagttaggtcaagcatatgaagttttaagtgatcctgagaagaaagaactgtatgaccagtatggtgaagatgcccttaaagaagggatggggggaggaggctcgtttcataatccatttgatatatttgaatcattttttggaggagcaagctttggtggtggtggta

SEQ ID NO: 8071 - DNA, 425 bp, Glycine max
  Clone ID: LIB3087-001-Q1-K1-F8
aactctttattttattttctttctttctttctccgatcgcatagctcgctcgcaaccaccatgccttcccgaagaagaactctcttgaaggtcatcattctcggtgacagtggggtggggaagacatctttgatgaaccagtatccttcggtttctgtctacaaactccgtgttctttacttttttttttttaatttgcgtttcaatttgttttctattgtttagtactgcatgaaaactatgtattttcccctaacatacgcaatttagatatgtgaataagaagtttagtaatcagtacaaggcaaccattggagcggattttttaaccaaagaagtgcaattcgaagataggcttttcaccttacagatttgggatacagctggccaagaaagattccaaagccttggagttgctttctatc

SEQ ID NO: 8072 - DNA, 417 bp, Glycine max
  unsure at all n locations
  Clone ID: LIB3087-001-Q1-K1-F9
atcacttttctactttgagtcttcttgatccttctttttctccttgaactcaaacatggcagatgaggtggttctgctagatttctggccaagtccatttgggatgagggtcaggattgcacttgctgaaaagggtatcaaatatgagtacaaagaagaggacttgaggaacaagagtcctcttctcctccaaatgaacccggttcacaagaagattccggttctcatccacaatggcaaacccatttgtgaatccctcattgctgttcagtacattgaagaggtttggaatgacagaaatcccttgttgccttctgacccttaccagagagctcangctagattctgggctgattatgttgataagaagatatatgatcttggaagggagatttggacatcaaaaggagaagaaaa

SEQ ID NO: 8073 - DNA, 356 bp, Glycine max
  Clone ID: LIB3087-001-Q1-K1-G1
tgcatttggagcttcacgtttgagggaagcatgcattaatttcttagagctgtgcaaacaaaagaatgaagacaagctatggatagatgagatagcagccatgcaggcggctgctcagcctgaactgccatacttgaggacatctggaatcatacttgctggagaagatgatacaagcagtaaattaaatggcatagttgatgcctcaatttctgagtcaacaccaagtcatgcaagtttggacataggccatgattatagcttgccaacatcgggtcaaacaccatcaacagatggaagagctcaaataccaatgtcctggccaaaccatcttccacagtacatgcacaactttc

SEQ ID NO: 8074 - DNA, 338 bp, Glycine max
  Clone ID: LIB3087-001-Q1-K1-G10
aacactagaatctggtgtgagatatttgtccatttagctttgattttcatcatggagttatgttcaaacaaatctattgatttttttttcatttacatgatatccagagtttagtattatatccaatactcagatgtccaatgattaattataccttcagctacaagaaagtacaaagccttttgtaccatatatatgtaattctaacttgcctgtttgcaaggattgggttcacagatacattcaaagaaggggtttatattggaacatgaaaaaaaaaaattaaactattaaagactaatactgacaaataataataaaaatatatatgaatatta

SEQ ID NO: 8075 - DNA, 423 bp, Glycine max
  Clone ID: LIB3087-001-Q1-K1-G11
gtcaggtaaaccgaacaattacaaaacaaaaaatataaagacagagccagagacagaaaaatgttacgataacgtgttgtgcttgttgtgggtttggaattggattgattcaaacgagttaacgccatgctcagatcactgccgaagctctcactcctcttttcctcagccaggaatctccattatctttcaagtgctcagcgtttcatatctcaagggagaatagcagcttcaagagtcaagattggagtggtaagcactattcctattcgatccaagttgacttcaacaatttcatcagcaattgcatcagaaatggctgcagaagatcaagttcaaagggttaacctactaacatcaactgatgataattatggtggtgttattgtggaacttgatcagcatatggattctgcaacattt

SEQ ID NO: 8076 - DNA, 416 bp, Glycine max
  Clone ID: LIB3087-001-Q1-K1-G2
cggacgcgtgggcgggagtgttgtgatttctaaatctgagattctgaatctgaagctacgatgagaagttgaagttgaagaagcaaaatggtgaagcattcgcaagcgtggttgttgtgatttctaaatctgagattctgaatctgaagctacgatgagaagttgaagttgaagaagcaaaatggtgaagcattcgcaagcgtggttggcaatgcggagcaagacttgtgcgctaacactcctggcactcttgtccctctccaccctcaccctcctcttcctccgaaccacttccgattcctgcacccaacctcaggttcggaatttggatgcgcttcagcctcggactgattccaagttaccgaaccctctggaattcatgaagtcgaagctcgttctcatggtctcgcacgaac

SEQ ID NO: 8077 - DNA, 392 bp, Glycine max
  Clone ID: LIB3087-001-Q1-K1-G3
cgagattgaatcgtaagcagcggctaccctaatcctctcctcttcctctctactaatttcagctatggccgacgaagctgtggttgttccagatcccacccagatcgatgtcaagctctttaaccgctggagcttcgacgatattgagattactgacatttctctggctgattatatcggagtggcgacatccaagcacgccacgtatgtgcctcacaccgccggcaggtactcggtgaagcggttcaggaaggcgcaatgccccattgttgagaggctgaccaactctctcatgatgcacggtagaaacaatggcaagaaactcttggctgttaagatcatcaaacatgctatggagattattcatttggtgactgaccagaaccccattc

SEQ ID NO: 8078 - DNA, 433 bp, Glycine max
  unsure at all n locations
  Clone ID: LIB3087-001-Q1-K1-G4
ctgaacaaagacacagccatggtttgtttaactttccattgattgagcgaaagctttgttttttctgcgatcattttccattgggtggaagaaagtctcaacctttagtcgaaagagcaaggatctgagtgagtgagcgatcatgtgtggtggtgcgattatctccgacttcattccagcgggtcccgccggcggggcgcagcgcgtgaccgccgacatcctgtggccgaatttgaggaagcggttctcgaagtcgctgctggacgatgatttcgaggcagggttcagagaattcgaggatgactcggaaatcgaggatgtcgatgatgaggacgatgaanaggaggaggagttgaagaagaagaagccctttgggttctctcgctccaacaacaaggctgcttctaagcctntctctcgtggagcaacaact

SEQ ID NO: 8079 - DNA, 388 bp, Glycine max
  unsure at all n locations
  Clone ID: LIB3087-001-Q1-K1-G5
cggacgcgtgggttctctctcacactcactttctctctctataactctttctcacccgctagggtttccttttcatcgcatcttgagtttgcaacctcgtcttgtgatttccatggagggtgctgggatggaagagaataatattattaatgatgatgataataataacaagtctgaggcgcatttgacttctgccgctgcttttgtggagggtggaattcaggacgcttgtgatgatgcttgcagtatatgccttgaagctttctgtgatagtgatccttccacggtgacgagctgcaagcatgagtttcatcttcagtgcattctcggatggtgtcaaagaagcttccagtgccncatgtgttggcagcctatcagtctcaaagat

SEQ ID NO: 8080 - DNA, 425 bp, Glycine max
  unsure at all n locations
  Clone ID: LIB3087-001-Q1-K1-G6
agaaaatctccacccaatacatgcctgcagccacctccaccgccgccaccaccaattacaagtgtaggaagaaattctccatccaacacatgcctgccgccgccaccaccaccgccgccaccgccaattccaactccgcctttggcaagattagctaacacccaaaaggcccctaccattgttgaactatttcactccttaaagaataaggatgggaagatagactcaaaaggatcagtgaatcatcagagaccagtagttattagtgcacacagtagcattgttggagaaattcagaaccgttcagctcatcttctagcaataagggcagacattgaaacaaaaggagaattcattaatgaccttattaaaaaagtagtagatgcagccttcacggatatngaagaggtcctaaaagtttgtga

SEQ ID NO: 8081 - DNA, 377 bp, Glycine max
  Clone ID: LIB3087-001-Q1-K1-G7
gacgacgggaaagggtgaaaaatggaattgaatatggagatgtggtggtagggaaggaagagaaaaataagaaggagaagaagagaaggaagaaggaattggaatggtgggaatcaatggaagaggaaaagcttgatggggttatgaagaggaagagaaggacggtgagggaatggtggaaggaggagcgttttgaggagaatgcgaagacgacggcaaagaagaagaagaaaaagaggaagggtgggagtgtgaagagtgatgatgagaagtgtggtgatgattggtggatgagtgatgatgcaatggataagaggaagggcaagagtaggagtaggaacaaccgtgggaacatggattggtggatggatgggttg

SEQ ID NO: 8082 - DNA, 429 bp, Glycine max
  unsure at all n locations
  Clone ID: LIB3087-001-Q1-K1-G8
aatttccatgcggtactatgttttctttgcaagtactagcacaaacagctagctactatttttgaacttgtcataattagtctctaattctaattagccatacattgaacacaccagcacaccttaaacgtaagtggtatttgttccacacaggtacactatgccttcactctcagaagcctaccgagcccaccccgtgcacgttcaacacaagcaccctgacttaaactccctacaagaactccccgagtcttacacttggacacaccatagccatgatgatcatactcctgcagcttccaacgagagtgtccccgttattgatctcaacgacccaaatgcttcaaagttgatacaccatgcatgcataacttgnggagcgtaccaagtggtgaaccatgccatacccatgagccctcctccaagaca

SEQ ID NO: 8083 - DNA, 418 bp, Glycine max
  Clone ID: LIB3087-001-Q1-K1-G9
gagtgaagcagcagagggaggagcggcattaaaaatgcagatcttcgtgaaaaccctaacggggaagaccataaccctcgaggtcgaaagcagcgacaccattgacaatgtcaaggctaagattcaagacaaggaaggcatccctccggatcagcagcgtttgattttcgccggaaagcaacttgaagatggaaggaccttggccgattacaacatccagaaggaatcaacccttcaccttgtcctcaggcttcgtggtggcatcatcgagccttccctcatggctttggctcgcaaatacaaccaggacaagatgatttgccgcaaatgctatgctcgtctgcaccctagggctgtgaactgccgtaagaagaagtgcggtcatagtaaccagttgaggcctaagaagaagatcaag

SEQ ID NO: 8084 - DNA, 414 bp, Glycine max
  Clone ID: LIB3087-001-Q1-K1-H1
tgacagtctatttgcgaatctggttagtgttgtaaagtacccctctattacgtgcttcagttggttatatgtgtgttaaactgaaagtgcttttgattgaatgcgtctcattttttgttgcggcaccctttaacagaattcaaatttttttttccctctccatcccttttgttgatttggagaaaagcttctccaaaagtgagaatgcatttccctttctgttttaataaatatctgaggctgagaagtctgacttccttttttattctctttatacatttcagttatctgtggtaacaacataaagaatatatattaacaataataataatttaagtcatattccgcataacagggtcctatctgtttctgcataacccttaaaggtttcccagtattatatattgctttagt

SEQ ID NO: 8085 - DNA, 414 bp, Glycine max
  Clone ID: LIB3087-001-Q1-K1-H10
cccacgcgtccgggcaaatgcctggaaaagagataaggccaccagactcctctccgcaaagctactgttcctactcttctcctccactctcatagtctccttcttcttcgcattccttacctgacgcccctcaaaccccgccaccaccctcaccgccttcaacacccgcctctccttcaatgcaatctcccccttcgactgcaccgcctcccctcaggcccaccccgtcgtcgccaacaccgtcgagggcgtccgctaccccttcctcttctcgctctccgattttggaaccttacccgaccagccccacacgaacatcgtgaggatgctcaagggcaaaccctttcggaaacccgacatctccgttacggttcatgaggttctcgagaaggccaggactgatggtaaggatgg

SEQ ID NO: 8086 - DNA, 400 bp, Glycine max
  Clone ID: LIB3087-001-Q1-K1-F7
cccacgcgtccggtggggaccttgaacatgctggggcttgcaaagagagtgggcgcgaggttcttgttgacgagtaccagtgaggtttatggagatcctctgcagcaccctcagaaggagacttactggggcaacgtcaacccaattggttagcattccttctcttattatgttctccggtcaccaccggcctttctgggccatgtttagaattagaattgtcagagacacgccttgcacttgctgcagcacactccgtgtgagacatatttttcaaaactcaataagaaacgtggaacggaagtagaggaccacgtagtaagaattccagggtctggccaacgaggaacccgtgatatgctggtccacaaaatgaagggtagagatatttttttggtgg

SEQ ID NO: 8087 - DNA, 430 bp, Glycine max
  Clone ID: LIB3087-001-Q1-K1-E4
cctacattcaattacaccacgcttctaaattctgagaatgaatatcgtaagatcgaagcaataaccttttttcctctgccgccactggtttcgatcccacacccacaaccctccatccttcgaatgctcttgcgttttccttaaactgcctcattccgaagccatacacacataacggtttttctaggtgctagcaatgtcgactcctgctaggaagaggctcatgagagatttcaagaggctgcaacaagaccctcctgcaggaatcagtggcgcccctcaggataacaacatcatgctgtggaatgctgtcatatttggtcctgatgatactccatgggatggaggcacgtttaagttgattcttcaatttactgaggattatccaaacaagccaccaactgtacgatttgtctctcgaatgtttcac

SEQ ID NO: 8088 - DNA, 402 bp, Glycine max
  Clone ID: LIB3087-001-Q1-K1-E5
cccacgcgtccggccacacgtccgctcacgcgtccggatacgagaagattgccaggagagtactaaacaaacggagatataaacatatgtgtctagaatcgaatgaactaccattcccttccaaaagagaaaatgagattaagcatgaaaagtgctttactatcaacactcccaccctcttcatcagttctcttattctcctgctactctaaattcaaactcaaatccccactcggaattcccattcgcgctctcacctcctcttctctcccaaccactcgcgaccacgatgatttattcgaccctgtttcccttcccgctccccaacaccttcacaaagccaccaacgccatccagagaatcgcccttcggttgcgcaacttaaggttagctttcaacaac

SEQ ID NO: 8089 - DNA, 431 bp, Glycine max
  Clone ID: LIB3087-001-Q1-K1-E6
ctttgcttccccttagtcaaacaaagtaacacaccatccatcctctctctcttctcttcttctgttctctagtttcctgctcttgtttcttagaatccgtacggtctaatcaacacaacaaaatggatgcaattagttgcctggatgagagcaccaccaccgagtcactctccataagtcaggcgaagccttcttcgacgattatgtcgtccgagaaggcttctccttccccgccgccgccgaacaggctgtgccgcgtcggtagcggtgctagcgcagtcgtggattccgacggcggctgcgggggtggcagcaccgaggtggagtcgcggaagctcccctcgtccaagtataagggcgtcgtgccccagcccaactgccgctggggctcgcagatttacgaagagcaccagcgcgtgtggctgggaacg

SEQ ID NO: 8090 - DNA, 384 bp, Glycine max
  unsure at all n locations
  Clone ID: LIB3087-001-Q1-K1-E7
ctctctctctctctgtttcgctttcaccgaagaataacttgactttcccgaactccacctgagaaaaagatacccttaattcgcaggcgcgtcttgtgttggacaacaaccacaagatgattaacttcgaagaaaccgagttgcgactcggcctccctggcaacgactcagcactcaagggaagtgctgccaagagaggcttctctgaaactgcttctgttgatttgaagcttaatctttcttcttgcattaacgactctgcctcggattcaccctcatctgtgtctacagagaagcccaaagagaacaagactaccactgctgaacctnctncagctaatgatccagcaaaaccacctgcaaaggcacaagtggtgggttggc

SEQ ID NO: 8091 - DNA, 428 bp, Glycine max
  Clone ID: LIB3087-001-Q1-K1-E8
cggacgcgtgggcggacgcgtgggctggaacgccctctcctctctcgaggagcttgtgctgcgggataatcaattcaagaacattcctgacgtcagcgtatttaagaagcttctggttttcgatgttgctttcaacgagattagttcgctacacggcttgtccagggtctccgataccctcaaggaactctacgtgtccaaaaacgaagttgccatgattgaggagatcgagcacttccatcagctgcagcttcttgaactcggctccaataaattacgggtgatggagaatttgcagagcctcgagaatttgcaggagctgtggcttggacggaatcgaattaaagttgtgaatctgtgtggtctcaagtgcattaaacagattagcttgcaaagcaatcgtctcacatcgatgatgggatttgatg

SEQ ID NO: 8092 - DNA, 396 bp, Glycine max
  Clone ID: LIB3087-001-Q1-K1-E9
ggactattctattggtaggcatcctgagttccgttacaaaacagagtttcagagtcacgaaccagagtttgactatcttaagagtttggaaattgaagagaaaatcaacaaaatcagatggtgccaaatagctaatggtgccctcttccttctttctacaaatgataaaacaatcaaattttggaaggttcaagaaaagaaggtcaagaaaatttctgagatgaatgttgacccttcaaaatcaatggggaatggatctattgctagttcaagcaattcaagtagttctaggccatatcttgcaaatggaggatctccagatagatacaattatataagcaatgacttttcatttccaccaggaggcataccatcactaagattacccatggtagt

SEQ ID NO: 8093 - DNA, 382 bp, Glycine max
  Clone ID: LIB3087-001-Q1-K1-F1
cccacgcgtccgatgatgcctggttgaatggggaattcattactactgttcaacaacgtggcgctgcaattatcaaagctagaaagctttcaagtgcactatcagctgctagtgctgcttgtgaccatattagagactgggttcttggaactcctcagggcacttgggtatcaatgggagtatattctgatggttcctacaatgttccagctggacttatatattcattccccgtcacttgtgccaatggggaatgggcaatagttcaaggactttccattgatgagttctcaaggaagaagttggacttgactgcagaagagctttctgaggagaaggcattggcttactcatgcctaaattagacaccattgctttttgg

SEQ ID NO: 8094 - DNA, 423 bp, Glycine max
  Clone ID: LIB3087-001-Q1-K1-F10
gttccaacatctatctcacttcttagttctttgtggctctttccatgatggcctctgctacatctccaagagttctcttcttgagtctctttgtaactctttccatgattttacatttgagttcagccaggaagttgtctgagtcagacccccaattgcagttccaataccacagaggccctctcctcacaggcaaaatctccgtaaacctaatttggtacggtaagttcaaaccttctcagaaagccattgttgctgatttcatcacctctctctcctcttccaaacccctcaccgcccaaccatccgttgccacgtggtggaaagccaccgacaaatactacaaaaactcgttccccaaacttgcactctccctagggtcccaaatcgttgatgaaaactactctctaggaaaatcactca

SEQ ID NO: 8095 - DNA, 423 bp, Glycine max
  Clone ID: LIB3087-001-Q1-K1-F11
cttgctttgttatcgaacatttctttttgatttcaaaaattttccggaaaaaatttgaatctatttttatatgcgaatcaatcctactacttctggtcctgaggtttctgcgcttgaaaaaaaaaatctgggacgtatcgcccaaataattggtccggtactagatgtagcttttcccccaggtaagatgcctaatatttacaacgctctgatagttaagggtcgagatactgttggtcaacaaattaatgtgacttgtgaagtacagcaattattaggaaataatcgaattagagctgtagctatgagtgcgacagaaggtctaatgagaggaatggaagtgattgacacaggagctgccctaagtgttccagtaggtggagcaactctaggacgaattttcaacgtgcttggagagcccat

SEQ ID NO: 8096 - DNA, 423 bp, Glycine max
  unsure at all n locations
  Clone ID: LIB3087-001-Q1-K1-F12
aagatcaacaatggcggaaaacccttccgaaacggtgtcgtccagttcccaacctgctcctcctcctcctccttcttcttcttcttcttctcagaaatcgccccaagattcgccgcaggtccctgcattgtcgaattttatgccctttccgagtggatattattatcaaatgattcctggtatgtaccctgcgctagttccagggttgactttgccgcaacatgaggagcatgggaaccgcggagctggcatatatgctgttcccgttaacccgtatgacagacaagttactggacttccatacaacacactgattccgctgacttaccgcacacccaccagcaggccaagttctgaagctactgttgccagtgaaaatcanggacaagcaggacagcaacctcaacagcagcagcctgcacc

SEQ ID NO: 8097 - DNA, 435 bp, Glycine max
  Clone ID: LIB3087-001-Q1-K1-F2
gtgaatccaaggtcagcctaaaaggtagctataggccaggttcatatccatcacttggaaactgatttgacagatatgcagtccaatttgaattgggagaccaatctccccccttacgtcccagcggctaccgtcaaaggcctgcaccaccatggaggtcggcctcaggtgtaacgcgttgaaaggcagtttgtccaatgtgcttttgggcatgacattcagcgacgatccgttgtcgataagaatcttggccacgatgtggtccaaacacttgatggacacatgtaaggccctattatgcccctggccctcgatgggtatctcctcatcggcgaaggtaaggtaattgttggcagtaatattgttgatgatgccctcgaagctctccacagagatgtcttgggccacatgggcttcattcaagattttaccaat

SEQ ID NO: 8098 - DNA, 395 bp, Glycine max
  Clone ID: LIB3087-001-Q1-K1-F3
gttttctctctctctctctctctctctctctctccttctccccctgtttttgcttgctgcgtaatacgaaataaatttaaaaaaaaaaacgttcgctggttaatggttttaattttattgttctcagattaacctttctctttgtgaatcctattcaaacgtcgattgtgaatctgagtgtttttttactttgattcgattcgatatgaagcgagcgaggaaatccaacagggtttcgtgggctactggagagaacctgtgtcaggtaaaattgttcttgtctgacgattacccctcaatagttggtcagaaatcacaagatcatcttcaagcaaagacatcatcaatgttacattctaatattaacgaacctaatgatttgccccccgggtttg

SEQ ID NO: 8099 - DNA, 407 bp, Glycine max
  Clone ID: LIB3087-001-Q1-K1-F4
cccacgcgtccgcccacgcgtccgcccacgcgtccgttgatacatcaactggatcattgaaaatattaaatggcaatgagcattttgtgtctaatttatccttgctgttgcgttggtcaccatattcatcagaagcagatcttctgaaacaagtcagttttctatattttccctttcatccatgataatttgctggctttgttagaatatacttaatggttggcatatttattctttcccccccattgtagacaatacagcctagtatcatgaatagatagatagtttagtttgagacttattttctgacctttttcctgtccccttaaattaggctttttctcaagactgtaatgttttggctttgaatgccaaaatataattgtatatttgttatgttgtgatac

SEQ ID NO: 8100 - DNA, 418 bp, Glycine max
  Clone ID: LIB3087-001-Q1-K1-E3
attcggtgatcactgatcagtggtttggtgttgttgatagagaaaatgcattccagccctttgcttcttgaggaacccattaggatggcatccatccttgagccatccaagcctactttttttccggctatgacgaaaattgttggcacacttggtccaaagtcacgatcagttgatataatttcccattgccttgatgcaggaatgtctgtggcaaggtttgacttttcatggggtgatccagaataccatcaagagacattggaaaatttgagagttgctatcaaaagtaccaagaaactctgtgcggttatgctagatacctggggtccagaattacagattgagaattagactgatcacccaatcacccttgaagcagacacattagttgtcttaacttcagatccaaattaag

SEQ ID NO: 8101 - DNA, 83 bp, Glycine max
  Clone ID: LIB3087-001-Q1-K1-D1
tccctctagggcactcatttcgacatttccattacctctctcactattcaagaaggctaagctatatcaaagtcttacataac

SEQ ID NO: 8102 - DNA, 415 bp, Glycine max
  Clone ID: LIB3087-001-Q1-K1-D10
cagtggtgccttatcgctgtggttatcatcttcttcttcctctttcttagatctctgctttctctacgccgcacgccgaaaccatggccggaaaaggagagggtcctgctatcggaatcgatctcggaaccacctactcttgcgtcggtgtgtggcaacatgaccgcgttgaaatcatcgccaacgaccaagggaacagaaccacgccgtcttacgtcggattcactgacaccgagcgtctcatcggtgatgcggccaagaatcaagtcgccatgaaccccatcaacaccgtcttcgatgccaagaggttgattggtcgtagattcagtgattcctctgttcagagtgatatcaaattgtggcctttcaaggtcattcctggtgctgctgacaagccaatgatcgtggttaacta

SEQ ID NO: 8103 - DNA, 420 bp, Glycine max
  unsure at all n locations
  Clone ID: LIB3087-001-Q1-K1-D11
ctaagactgaaaaaaacccaatggatttgaattcctctccttccaacaacacaattgccgtgaatggaacaatccccgtcgcttccacgttcgcaaccgccaccgcgccgtcggataaccctccgccggcggacagctccggcgaccggaaacccatcgccctgtggccggggatgtaccattctccggtgaccaccgccctatgggaagctcgcagcaatattttcgagaggcttctggaccctcccagggacgctcctccgcagagtgaattgctcacgagaaccccctcgcagagcaggaccagcatcttgtacaacttctcctctgatttcgtgctcagagaacagtatagggatccctgggatgaggttcgaattgggaagttgctcgaagatctngatgccctcgctggaacta

SEQ ID NO: 8104 - DNA, 94 bp, Glycine max
  Clone ID: LIB3087-001-Q1-K1-D12
aaaaaacatcagatcacacatgatactgaaactccctatacattatatgataagctagtgctcatataaatgtcgactcatataacattaatcc

SEQ ID NO: 8105 - DNA, 439 bp, Glycine max
  Clone ID: LIB3087-001-Q1-K1-D2
cccacgcgtccgcccacgcgtccgcaacaacaacaaatagttgaggagttaggaaagtgagtgagtgaggggtgcaccgttgttgtgttgggtggaaatgggtatgctgtagtgcattcccttgtgtacagttggttccataaaaggcaaaaaagtaaaaggttaaaataaaaatagagggagatatatagaataaatattaggaaagagagagagataagtctagagtctagtctagagcggtggacaatgtggttttgtttgttctttttatatttcatctaatctgtttatgatttattatttattctttttgttttatgtattatacttcaaaattttttttctcttctcttttaaattttatcttgtttttattttttttttttgtttttttaatctttatcctttttttttattttcttgttttttttttttt

SEQ ID NO: 8106 - DNA, 385 bp, Glycine max
  Clone ID: LIB3087-001-Q1-K1-D3
cggacgcgtgggtcctaaaacaaatcgtgtaaaggcaaagtacagacaaagttagttagaaattgaaagggaaagggaaacgaaaatgagtagtagggtttggtgtgtggtgatggtatcagcgttggcgttgatgttacaatggcacgaagcattcagctcctacgctggctccgcaagtgcgatcatcgacccttccaaggtcaaacaagtttcgtggaaaccgagagctttcgtttacgagggttttctgacggaattggaatgcgatcacttgatttccatcgccaaatcggagctcaagagatccgcggtggccgataatttgtccggcgagagcaagttgagcgaagtcagaacgagctccggcatgttcattcccaag

SEQ ID NO: 8107 - DNA, 430 bp, Glycine max
  unsure at all n locations
  Clone ID: LIB3087-001-Q1-K1-D4
cccacgcgtccgcggacgcgtgggcggcattgcgcttcacaaattctcagtctacgacttgggtgttggatttcattaagttgtgataaacatgggaaaagactcaaagccaaaggagtccggaggcaagggaaaggggaaacaggctgcaagtggaagtgatgagaatgcttctaagggaaaaggaaaaggtgggaaaggtggagatgggcttggtacttgcacctatgtcaaagctaggcatatcctatgtgagaaacaaggtaagatcaatgaagcctacaagaagctgcaggatggttggcttggcaatggagacaaggtcccaccagctgagtttgcaaaggtagcacaagagtattcagaatgtccatcangaaagaagggtggagaccttggatggttttcccgaggaaagatggctgggcca

SEQ ID NO: 8108 - DNA, 280 bp, Glycine max
  Clone ID: LIB3087-001-Q1-K1-D5
ctacgaccatttcaggaagaaagaagtgcaatggacatcggaacctatggctatcctacaccagcagtgaaaaagattgagtcttactatgatgtgccagagggagtggatattcggggaagatatgatgcagagtttgcaaaaatcctcacaaaagatcctttgaaattcgtggctgactggcaacgtgagttcaggaaccatatcaggtatgcattaaagtgcagaggagaagcaaggaagaagtccattgaaggggctcttccaaagttggatcctg

SEQ ID NO: 8109 - DNA, 414 bp, Glycine max
  Clone ID: LIB3087-001-Q1-K1-D6
aacttatccaaacggattttacgtgagatggagcgacccgcttacccatggtacctgtgagacaagaaagggggcagtagaggcaaaactgcaagcaaaacggacccccacttgaacaatttggtaatttccgctgccacaccaccaccaaagaaggaaataaaatttgatacgcgtctctatgaggcccatatttcattcctattaccgaccttacagcacatcaatacatcttcaaatccacctctcatctctctctcgcatcacaatttcatcaaaaccttttaagtcttcatagttttccttctttctttctttgtgaaaaaacaaaaagtccaaaccatggctcagaaaaccgagaaagaagaaaccgacttcaaggttcccgaaacgattacggcttgcgttaacaac

SEQ ID NO: 8110 - DNA, 403 bp, Glycine max
  Clone ID: LIB3087-001-Q1-K1-D7
aagagaagcaaaccaaacaaacaacactcaggttaatttgatgtcaatttaatatcgtgattaaattaacaaaccataaataagtgagaagaaaattgaaacatgatgctttatatatacatggcacaacaattcaaagacagttctaattttaggcatcattgcatcaatcgcagaaacaaaatagttacaaaattgacacaaactaattttggaaagatacatattggctgcctatggataatagttgcacatgatatgtatccatcttgtggactaattttttgtgtggtttggtcgggttacccgaatcttgtggtataatcttggtttcgttttttattaataaaactattttgggtttcccaaaaaaaattgcagaccccaaaatgaggtggtattt

SEQ ID NO: 8111 - DNA, 408 bp, Glycine max
  Clone ID: LIB3087-001-Q1-K1-D8
aaaggcttaaacctgaaggttttcaaggtcataaggagtggttgactgaggttaattacctcggacaactgtaccaccctaatctggttaaattaatcgggtactgcttggagggagagaaccggctattggtgtatgagtttatgcctaaagggagcttagagaaccatctatttagaagaggaccgcaaccactctcttggtcggtgaggatgaaagtggctattggtgctgccagaggactctcctttcttcataatgccaaatcacaagtcatataccgtgattttaaagcttctaacatcctgctggatgctgagtttaattcgaaactctctgactttggtttagctaaagcgggtcctactggtgatagaactcatgtgtctactcaagtcatgggtactc

SEQ ID NO: 8112 - DNA, 399 bp, Glycine max
  Clone ID: LIB3087-001-Q1-K1-D9
agaaaatggcgggtggtggaaaggtttcgttcaaagtcacactcacctccgatccaaagttacccttcaaagtgtttagcgttccagaggcggcaccttttactgccgttctcaaattcgccgccgaagaattcaaagtcccgccccagaccagcgctatcatcaccaacgatggtgttggcataaatccccagcagagcgcatgcaatgtcttccttaagcatggttcagaactgcgcctgattccgcgtgatagggtcggtgccttttagatgttacgggtgtctgacttgatattgaccttttttgcaaaatacatgaactgttgtagcttcctaagtagagtaatcaataaataccatggttactgatttcatataaaatacatatgttagtaag

SEQ ID NO: 8113 - DNA, 369 bp, Glycine max
  Clone ID: LIB3087-001-Q1-K1-E1
cggacgcgtggggaagagcaaaatcgctgtgaaaatgagcggaacggtgaagaaagttagcgatgtagcattcaaggtgggaaggaacatcgattgggatggaatggcgaagcttctggtctccgatgaggctcgcagggagttctccaatctccgtcgcgctttcgacgaggttaactcccaactccaaaccaagtttagccaggaacctgagcccattgattgggattactatagaaagggaattggcactcgtttggtggatatgtacaaggagcattatgagagcattgagatccccaagtttgttgatacagtaactcctcaatataagcctaaatttgatgcccttttgattgagcttaaaga

SEQ ID NO: 8114 - DNA, 423 bp, Glycine max
  Clone ID: LIB3087-001-Q1-K1-E10
cggacgcgtgggcggacgcgtgggcggacgcgtgggcggacgcgtgggcggacgcgtgggcgattctcgccatgccgaaagccaaatccgacgccaaagccgccgatagccggttgaagcgcaagggcgctggtgctggaaggaagcaatcgaagaaagctgctaaggatcctaacaagccaaagagacctccaagcgctttcttcgttttcatgtccgagttcagagagcagtttaagaaggagcatcctaacaacaaatccgtcgctgttgtcggtaaagctggtggtgacaaatggaaatcgctgtctgatgcttttgcgttcatttaatgtttcaggaaaaggcccccttcgttgccacggccgaaaagaagaaacaagagtatgagaaaactattttggcttacaataagaaattgga

SEQ ID NO: 8115 - DNA, 379 bp, Glycine max
  Clone ID: LIB3087-001-Q1-K1-E11
cccacgcgtccgcttctaaaccctatggccgacgaagccaaagccaaaggcaacgcagccttctcctccggggactatcctgccgccatccaccacttctccgatgccatcgccctggctccctccaaccatgtcctctattccaaccgatccgccgcatacgcctccctcaaaaactacgcagatgcattagcggatgccaaaaagacagttgaactcaagcccgactggtccaagggttacagccgtctcggtgccgcgcatcttggcctttcccaatacgatgatgctattttggcttacaaaaggggtctcgaaatcgaccctcacaacgagccccttaagtctggtttggcagatgcgcagaaggccttggccg

SEQ ID NO: 8116 - DNA, 423 bp, Glycine max
  unsure at all n locations
  Clone ID: LIB3087-001-Q1-K1-E12
cagattattacagttctccttcaaagcatgaaggatgttcccaatgttgctgagaaggcctgtggtgctctgtattttcttgcccagggttatgaggatgttggaccaacatctccgctaactcccttgtttcaggaaattgttcaatcccttctaactgttacccacagagaggatgctacagaatctcgattgagaactgcggcatatgaaacattgaatgaagtagtaaggtgttcaacagatgaaacagctactttggtggtacaactagtttctgtcatcatgatggagctgcacaaatgtcttgaagcacataatctttcatcggatgagagagaaaagcggagtgaattgataggccttctttgtgggtgcatgcaagtaattattcagaaactagggtctntggattctaccaaa

SEQ ID NO: 8117 - DNA, 438 bp, Glycine max
  unsure at all n locations
  Clone ID: LIB3087-001-Q1-K1-E2
cacaaacccgtccctcacactctccaaaccctagcggcactacacactagttctatcgctatctccccaagatgtcgagcgccgatcccgagcacagagaagaggaggaggcacccgccgttggcgacgacgaggacaccggagctcacgtcgctccaatcgtcaagctcgaggaggttgctgtcaccaccggcgaggaggacgaagatgcaatcctggatctcaaatcgaagctttaccggttcgacaaggacgggaaccagtggaaggagcgtggcgccggcactgtgaagttcctgaagcataaggcttccggcaaggttaggcttctcatgaggcaatccaagacgctcaagatctgcgctaatcatctcattttgcctacgatgagtgtgcaagagcacgctgggaacgagaaatcctgcgtntggcatgcta

SEQ ID NO: 8118 - DNA, 420 bp, Glycine max
  Clone ID: LIB3087-001-Q1-K1-C9
gttacataggttgcataggaaaggacaaatttggagaggagatgaagaagaaatgtacacttgatggtgtaaaggttaactattatgaaatcgacaatacacctactggaacttgtgctgtttgtgtggttggcggtgaaaggtcccttgttgccaacttatcagctgcaaattgctataagtctgagcatttgacgagaccggaaaattgggcattagttgaaaaggccaagtatttctacatttctggctttttcctcactgtatctcctgattccatacaattagttgctgaacatgcagctgcaaataacaagttcttcatgatgaacctttctgccccatttatctgtgagttcttcaaggatgcactgaataaagttctgccatatatggactacgtttttggtaatgagactg

SEQ ID NO: 8119 - DNA, 400 bp, Glycine max
  Clone ID: LIB3087-001-Q1-K1-B4
caaaattctaagcacaatttctctgagttgttttgtgagataatagcacatagcataacaagggaaggagtattaacaaccgcaaacctgaagagaaaaagagcagcagaagaagaaacaccaacgatgggtgtggattactacaagatcttgcaggttgataggagcgccaaagacgatgacttgaagaaggcttataggaaacttgctatgaaatggcaccctgataagaaccccaacaacaagaaagaagctgaagctaagtttaagcaaatttccgaagcatatgaggtacttagtgatcctcaaaagaaagctatctatgatcaatatggggaagagggtctgaagggtcaagttccttcttctgaagccggttgtgctggaactggaactactt

SEQ ID NO: 8120 - DNA, 188 bp, Glycine max
  Clone ID: LIB3087-001-Q1-K1-B5
gaagagagagaagctaataggcccagacgtaacaaatgctcgagcaatggctagcggattctaggatcaaggtttatgagctgatgcagaatactaaggctgatctgttgaatcacgtgaaggacacgcatgcctagcttgacttgcttggtgtcgataacgtatgcgctggagcctataaatagctt

SEQ ID NO: 8121 - DNA, 431 bp, Glycine max
  unsure at all n locations
  Clone ID: LIB3087-001-Q1-K1-B6
cggaagcgtgggtccaaatgtttcatttcttgttgcattagatgctggaagtgacatgctttgggttccctgtgactgcattgaatgtgcttccctgtcggccggtaattacaatgtgttgatgctcccttttatatgggggcatctctgatgcaggacagggatctgaatcagtatagaccatcattatccaacaccagcaggcatctaccttgtggtcataagttgtgtgatgtccattccttttgcaaaggctctaaggatccttgcccttatgaagttcagtatgcctcagctaatacctcaagttctggatatgtttttgaagacaaactacatttgacatccgatggcaaacatgcagtacaaaattctgtgcaagcctntatcattttaagttgtggaagggaacaaactggtgactttttaca

SEQ ID NO: 8122 - DNA, 353 bp, Glycine max
  Clone ID: LIB3087-001-Q1-K1-B7
cccacgcgtccgctactttgggtgagaatcaacccattcttggccaaaagtgatgtggtgttggaaatttgtggattgaattgtgactaaaggtaacaaaaaatggaagggcatgccatggtttgacgttttacactgataagatctgcaacatgcataagtttttggtcaaagacacatgacacatccctggatctgttggtgagaactgccactgcaaaaaaaaatgttatttgtgggtggtgtttgtagatacaacatatgttttgagaggtttcattatttttttttatacatgtgcattatctaaattagtctgaaatcacaagtgagatgttatttataacttcttc

SEQ ID NO: 8123 - DNA, 403 bp, Glycine max
  Clone ID: LIB3087-001-Q1-K1-B8
cccacgcgtccgcccacgcgtccgcacagggctgtggatgcagtcatgggtcctcgtaccattcaacatgaaacagttgttacagaggctgctgctgctgcccctgcacccactgcaaatacttttggtggcgatgcatgcagcattcatacaaaggcattccaggattgcctgaacggctatgggaatgacattagcaagtgccagttttacatggatatgcttgcagaatgcagaaagaactctggagccacgttgagcatgtaactgctacatttgcctgttttggagtttgcatcagtgccctgtctcctatggtttgaactgttaatgtggctaggtattgcatttgaataaaataccatttgcccgagatgcatacaaactaatataaagtcatttt

SEQ ID NO: 8124 - DNA, 426 bp, Glycine max
  Clone ID: LIB3087-001-Q1-K1-B9
cccacgcgtccgtgcaacgttctactcgcggaagcgccaaatcccaacgataccccaaaccccactcacccttcttctcccatatcctaatccccaaattccctcattcaactttcccctcaccaccttcttccacttcctgcaagctcagctagggtttcctcttctcttaaccgctccatgtcgaagaggaagttcggattcgaaggtttcggcataaaccgccaatccacctacagcttcgagcgaccccaggcccctcagcgactctacatccctccctccgcgcgtcacggccacgaccactacgaagacaccgacatcgacaacatcgactacgacgacaacaacagcaacaacaacaacaacaaggacgacgacgacgattacgggagcaataataacaacggtggcggcaacgacgaa

SEQ ID NO: 8125 - DNA, 307 bp, Glycine max
  Clone ID: LIB3087-001-Q1-K1-C1
gatctcattcattctttcctattctttccattcaatcacgccctctcttcccttgccttggcgcaatgaattccaactgcaatttcgatttcgatctcgtcatcggatccaaccgtcccaaatcccttaacgaccagaaaaaccccaaaccaactccctattcttcctattccaccagcaccaccgcttcctattcctcctcccaacccaataatctacctgcatggacccaccaactctccaccactcagaccaccgacttgctcggtagccctccttccatggtcggagacaatctttgcaagag

SEQ ID NO: 8126 - DNA, 428 bp, Glycine max
  Clone ID: LIB3087-001-Q1-K1-C10
cccacgcgtccgatgatctagtgcatggatggggattggactttgctctcagaagatgtgtagagccagcacatgaaaaaattggtgtaattgattcacaatggattgttcatcaagtaattccttctcttgggaaccagggagagtctgacaaaggaaaaatgccatgggattcggtccgagccagatgcaaaagtgaatgggcccagtttcaacttcgcgtaaccaatgctgataagtcttatcttgaaggacataaacgtaatgggaaggattgatatgtggatccatctacctattgtatatgttttacgtacacactcggtggtagtatttgttttgcattgtttcctcccctcaggtgccatgcgaatttttgagccatatttttgaggaattaatctatagccatgtaaatcaatcacttt

SEQ ID NO: 8127 - DNA, 372 bp, Glycine max
  Clone ID: LIB3087-001-Q1-K1-C11
caacaaccctggtctcaattttctccccctctctctctttctctcttgtggtaacatacacacacacacacacacatatctagctattttggtcccattttcactataactctactaaattaacatggacaaccttcaaaaatgccaagcaaactacacagcactcacacctttaacgtttttgatgagggctgctgcatgctatgcaaacagaacctcagtgatacatgaaggaacccgtttcacttgggcacagacttatgagcgttgtcgccgtctcgccttctccctccgtgcccttaacattgctaggaatgatgttgtatcagtgctggcccctaacatcccagcaatgtatgagatgcatttcgc

SEQ ID NO: 8128 - DNA, 396 bp, Glycine max
  Clone ID: LIB3087-001-Q1-K1-C12
acttcaacgacatcatccactccatcatcgacatggacgccgatgttatcaccattgagaactctcgctccgacgagaagcttctgtcagtcttccgcgaaggtgtgaagtatggtgctggaattggccctggtgtctatgacatccactccccaagaataccaccaactgaagaaattgctgacagaatcaacaagatgctggcagtgctcgagaagaacatcttgtgggtgaaccctgactgtgggctcaagacccgtaagtacactgaggtgaagccagccctcacaaacatggttgccgcagcaaaactcatccgcaacgaacttgccaagtgaatggtataagaaagtacaatcttccaagtcattaggttctgctttatattataataca

SEQ ID NO: 8129 - DNA, 405 bp, Glycine max
  unsure at all n locations
  Clone ID: LIB3087-001-Q1-K1-C2
aaagacgttacggcatagcatggggaattgaataagcgccagtgtccccatgaatatcgttcctcaattcgggtcgctccgaacacccattcgggtcggaaacccttccgggttgagcttccttcggaagaggaataacggctttgtttgcttcgccgtcgatgacgagctcagacagaagcagcaggacttgagtactaccgcaactgggctgggctccgcccttgaagaaaggcccggaaacacagatctttttgagagtacaactgaagaaacgcagggaaattttaggcaagatggtgaaccaggtcctatctacaattttctttatcctgataaagagcttcttcccgatgataaaggaatgagcatnattgatcatcttgaagagctgcgacagagaat

SEQ ID NO: 8130 - DNA, 305 bp, Glycine max
  Clone ID: LIB3087-001-Q1-K1-C3
cccacgcgtccgctcaatcaccccctcgcactcgctcttcccttcctctggtggcgacaatgtcgactcctgctaggaagaggctgatgagagacttcagaaggctgcaccaggaccggctgcaaggatcaatggtgccccccaagataaccacataatgctggggaatgctgtcatatttggtcctgatgatactccatgggatggaggcacgttcaagttgacacttcaatttactgaggactatccaaattaaccaccgactgtacgatttgtgtctcgcatgtttcattcaaatatttatg

SEQ ID NO: 8131 - DNA, 407 bp, Glycine max
  unsure at all n locations
  Clone ID: LIB3087-001-Q1-K1-C4
gagtgatacaatacagagtgcgttgttgctccttcgccacaactccctgccaacatgggtatctccagagattctatgcacaagaggcgtgccactggtggcaagaagaaggcatggaggaagaagagaaagtatgagcttggtcgccagcctgctaacactaagctgtcaagcaacaagacagtcaggaggatccgggttagaggtggaaatgtgaagtggagggcactgagattggatactggaaattactcctggggaagtgaagctgtaactcgcaagactcgtatactagatgtggtntacaatgcctcaaacaacgagcttgtgcgtactcagactcttgtaaaaagtgctattgttcaagttgatgctgctccattcaaacagtggtaccttcagcacta

SEQ ID NO: 8132 - DNA, 368 bp, Glycine max
  unsure at all n locations
  Clone ID: LIB3087-001-Q1-K1-C5
catttatcaactcactcatcaatctcgtttgttctcactaactattacttcatcatgtcgtcgagcacagttggtcaagtcatcaaatgcaaagctgcggtttcatgggaggcagggaagccacttgtgattgaagaagtagaggtggcaccaccacaagctggtgaagtgcgtttgaagatcctctacacctctctttgccacactgatgtttacttctgggaagccaagggccaaactccattgtttcctcgtatatttggtcatgaagctggagggattgtggagagcgtangtgagggtgtgactcatctcaaaccaggggaccatgcccttccagggtttaccggggagtgtggagaatgccc

SEQ ID NO: 8133 - DNA, 376 bp, Glycine max
  Clone ID: LIB3087-001-Q1-K1-C6
cccacgcgtccgcttcctactccaaccgcacttctgctccgcaattatcatgggcaaggtcaagatcggaatcaacggatttggaagaattggccgtttggtagccagagtggctctgcagagagacgatgttgaactcgttgccgttaacgaccctttcatcaccaccgattacatgacatacatgtttaaatacgacagtgttcatggacactggaagcatcacgatgtcaccgttaaggacgagaagacccttctcttcggtgacaagccagtcactatttttggacacagaaaccctgaagagatcccatgggggtcaactggagctgacatcattgttgagtccaccggagttttcaccgataaggacaag

SEQ ID NO: 8134 - DNA, 411 bp, Glycine max
  Clone ID: LIB3087-001-Q1-K1-C8
cccaccgtccgcccacgcatccgcccacgcgtccgtccacgcgtccggccacgcgtccgaccacgcgtccgcccacgcgttcggtcatgcactgcctccctcaaaagcctcacttgttcttccgaaactgtcctaatctgaggaatatataggataattccaaattccaaatcaataatacacagtcataataattaagagaaagaagagacgaaagtaattcaaagaaggaaagaacaaagactagaatataattttggtacttgtgactttttctgttcttgatttgttctcataagttttaaaatcttcattttacactcttgttattaaagtatttcagttagattaaaataatccatttattagtttgttttacactattaatattaattctgattgatgtaaaaa

SEQ ID NO: 8135 - DNA, 329 bp, Glycine max
  Clone ID: LIB3087-001-Q1-K1-B3
gcacaacgaaccactctgaagccgctcacgttatccacaacactctcaaccctccttaaaccctaaccaatccaaccatggcttcttcttccaccttcactgcaatgtccgcctgcaagctctcctcctccgccgccatctcctccttcccctcccgccgccgctccaacgccgtcgttctgtcgaggcgcagccgcgccgccagggtctccgccatggccaaggagttgcacttcaacaaagacggcaccgcaattaagaagctccagagcggtgtgaacaagctcgcggatctggttggggtcacgcttggtcccaaaggaagaaat

SEQ ID NO: 8136 - DNA, 424 bp, Glycine max
  Clone ID: LIB3087-001-Q1-K1-A10
cctctccccaacggataaagagagagaagggtcccttcattctctcacacagaaaaatggcagcgtcagtttcgtgctcatggctaacccttccctcccaaatgaggagcctctccctcacatcctcttcttcatccctttgcatctccaattccgcttctctcagtttctccagaaacctctcacgccctttcttctcaaaaggtaactccttgtcgctaagcacagtactgaggcgcgcgtctgtggtttgcgaggctgcgccgaagaagaaggtggattcggcggtaaagagagcgcgccaagccgagaagcaccgcgtttacaacaaagctcgcaaatcggagattaaaacacgtaccaagaaggttttggaagctctagaagtacttaagaagaaatcagatgcgcaggccgaagaaat

SEQ ID NO: 8137 - DNA, 345 bp, Glycine max
  Clone ID: LIB3087-001-Q1-K1-A11
ctccacggctcgacgccacgcgtccgataattaattatattgatgttgacaaggacaggggcaaccctcacgcactcactcattgtccttactcacccctctctctattagcattagcatcaaaaacactctcttggttatccaatccaaacaccacccttcttctcataccctgctcagttagcagcagctactctcattcctctaccggagcaaaactataaacaaaaaaaacaagtccatcgtatgggtctcttagcatcctcatgcttcattctcattgctctcctactccttactcccaaaggtgttatgggttccacctttaacatgctttaacaaatg

SEQ ID NO: 8138 - DNA, 430 bp, Glycine max
  Clone ID: LIB3087-001-Q1-K1-A12
acgaaaacgaacactcatagccgcgaatcgatctgcatgatgctcatgtttcgctctatcgcgtctaaatccaaaaccagcaacactgctcttcttcttcatcgtgctatcgctacatcccaatcccttcacagcaacattaccaacctacaccctcccaatgctaataattcttatcattcattttctcgccgtcatgctttgtcattctctaagccacgcgccaattctagggctccgacttctcagagcttctgcaccgcgtcctccgacagggactcaatcgagtacgacgtcgtcatcgtcggcgcaggtcccgccggcttatcggcggcgatacggctcaagcaaatgtgccgcgaacgaaacgccgatttgtccgtctgtgtcctcgagaaaggtgcctaagtcggtgctcacattctttctg

SEQ ID NO: 8139 - DNA, 395 bp, Glycine max
  Clone ID: LIB3087-001-Q1-K1-A2
cccacgcgtccggctgtgtatcccgttgcattaataggtagttcaagacaccataaatgttggtacagatactgcagcagctcttaaggctcagacggaacaaatgagcagagttgtcaatgagctggattcaatccatttctctataaagaaagcctctaaattggtcaaggaaatcggtaggcaggttgctactgacaagtgtattatggcacttcttttccttattgtcattggagtaattgcaatcattattgtaaagcttgtgcacccagaaaacaaggacattcgcgacattccaggactagctcctccagttcagaaccgaagactgctctggagtcacagttgaagaattataatgaacatggtgatgactgtgatgagcttatgac

SEQ ID NO: 8140 - DNA, 391 bp, Glycine max
  unsure at all n locations
  Clone ID: LIB3087-001-Q1-K1-A4
ggatttggaaaggtttataaaggacgcttagctgatggatctcttgtagcagtaaaaagacttaaagaggaacgcacgcatggtggggagctgcagtttcaaaccgaagtggaaatgatcagcatggctgtacatcgtaatttgcttcggcttcgtggtttttgtatgacacctactgaacggttgcttgtgtatccttacatggctaacggaagtgtagcatcatgtttacgagaacgtcaagaatcccaaccgccacttggctggccagaacggaagcgtattgcattgggatctgcaagggggcttgcttatttgcatgatcattgtgaccctaagattattcaccgtgatgtcanagcagctaatatattggtggacgaggaatttg

SEQ ID NO: 8141 - DNA, 328 bp, Glycine max
  Clone ID: LIB3087-001-Q1-K1-A5
cggacgcgtgggcctcaatctccaccttcacaccttccaccatgacggatcgtgaccgtgatcgagaccgagaccgaactcgcgacagagaaagagaacgaagaagagataaggacgaccgtgatcgcgaccgtgaccgagcacgcagcaagagatctcgttcgcgttcgcctgaccgtggccgctcccgccacctgcgctctccctctcccagcgaacgctcccaccgccggcggcaccaccggacgccgtcccctgacccgccgcggaagcgccaccggagagactcgacggaggaagagcacaaggagacgaagaaagcggtatc

SEQ ID NO: 8142 - DNA, 387 bp, Glycine max
  Clone ID: LIB3087-001-Q1-K1-A6
ctacattgctggaggtgttgtaactcctggtgacaaaggtcatgctagatcagctatgaagttcattatgtccattctcttaagcaccagtgcagtacttgttcttctcacaatctatgtcttagtcagaactcacatggccagcaaggtgctcatggaaaatgaaacttgggagatgactttgtatcagaagcttgatttctccattgatgacattgttatgaatttgacatcagccaatgtgattggcactggaagctcaggagttgtgtacaaagtcacaattccaaatggtgaaacactggctgttaagaagatgtggtcatcagaagagtctggagcattcaattctgagattcaaacattggggtcaattaggcacaagaa

SEQ ID NO: 8143 - DNA, 365 bp, Glycine max
  Clone ID: LIB3087-001-Q1-K1-A7
gctattccttcactaataaaccagccacaaagaacaccctctctcacattctccttcctcctctttctcgctatctgcaccccattggatgctgctcacaccgacttcgcaggttcagcctgcctcaaagtttcccctagccacttcgccggctcggtcaccgaagtcatcgctgccatacgtcaactcgcttcgatcctctcacgcttcggctctcccttggccaacttccgcctcagcaccgccatcgccgactgcctggacttgctcgacctctcctccgacgtcctctcctgggccctctcggcctctcagaaccccaaagggaagcataaccgtacggggaacctgagttcggatttgag

SEQ ID NO: 8144 - DNA, 427 bp, Glycine max
  Clone ID: LIB3087-001-Q1-K1-A8
attgagaaacaggcccatgaagcaaatcaggtgacagctgtgacaacaaagactacaaatgttcacggtgaagaacttatagtaaccaccactagtccttatgagcaagctgcttttggttctaagactgactggcgtgtcagagcaatatcagccacaaatttataccttcgcgtgaaccatatatatgtgaactctgaggatataaaggaaacgggatacacctatattatgccaaagaacattttgaaaaagtttatatgcgtagcagatcttcgaacgcaaatttctgggtacatgtatggcataagtcctccagataatcctcaggttaaagaaattcgctgcattgtgatgccaccccaatgggggacacatcaacaagttcatctgccatcagctcttccagagcatgatttcttggatg

SEQ ID NO: 8145 - DNA, 366 bp, Glycine max
  Clone ID: LIB3087-001-Q1-K1-B1
caaagggaaagagaggaaaactgagaatgctggaggggagtattcaacacccactgcacacggcttcataactaaaccgccatcgctatcttcgactttctgcgccccaaagatgagaaaacgcaccgtttacgcatggcttgtagcacttctttgcttcctagttctcatgatcgtcaccccatccatcccccagtcccaagaataccatgatttcgccgaccaccgcaccttcctcggtattcctaatgcacttaacgtcatatccaatttcccttttctggttattggcctcgttggacttgtgctctgttatcatggaaattactttaagctcagttgcagttggatcttcattctatcatc

SEQ ID NO: 8146 - DNA, 420 bp, Glycine max
  unsure at all n locations
  Clone ID: LIB3087-001-Q1-K1-B10
attctctcactctcttactctttcactctacttctctctcctattgcggctagggtttaggtttttctttcaccgtctccgttccttcaatcttcttattctctttcatctctgatggagacgttgcgggtttagttctaaggggtggttctggccttgggtttttggaacgtacggtgtcgttttggggttgggaaaacaaattctgagagatggcaaccacgaacccttttgatttgttgggtgacgacgctgaggacccttctcagctcatcgccgccgagcaactcaaggcggcggctgcggcctcggcggccaccgcggctcccaagaaggcgccggctcagcagaacaagccggctcagctccctaccaagccgncttctccggctcaggctgtgagggatgccagaaacgagc

SEQ ID NO: 8147 - DNA, 424 bp, Glycine max
  unsure at all n locations
  Clone ID: LIB3087-001-Q1-K1-B11
ataaccctagaggttgaaagctccgacaccatcgataacgtcaaggccaagatccaggacaaggagggtatccccccggaccagcaacgtctcatcttcgccggaaagcagctcgaggacggccgcaccctcgccgactacaacatccagaaggaatcaacccttcacctcgtcctccgtctccgtggtggcatgcagatcttcgttaagaccctcaccggcaagactattaccctagaagtcgaaagctccgacaccatcgacaacgtcaaggctaagattcaggacaaggagggaatccccccagaccagcagaggctgatcttcgccgggaagcagctcgaggacggacgcacccttgctgactacaacatccagaaggagtcaactctncactnggtgttgcgtcttcgtggtggtatgc

SEQ ID NO: 8148 - DNA, 446 bp, Glycine max
  unsure at all n locations
  Clone ID: LIB3087-001-Q1-K1-B12
cgggtcggaccagccgtccgagaatttcaattggcccagggaggcctctcaaagggggtattatgttaaggatgccagtgggaatgactntgatggctggtgctggccgggttcgtcatcatatccggatactatgaacccggaaattaggtcctggtgggctgataagttctcttaccagagttatgagggttccacgccttctcttgacatatggaatgacatgtatgaaccttctgtcttcaatggtcatgacgtgacaatgcctagagatgttacacactatggaggtgtggaacatagggagttgcacaatgcctatggatattacttccacatggcgaccgctaatgggctactgaagcctggagaagtgaatgacaggccatttgttttatcaagagcattatttgctggaagtcaaaggtatggagcagattggactg

SEQ ID NO: 8149 - DNA, 385 bp, Glycine max
  unsure at all n locations
  Clone ID: LIB3087-001-Q1-K1-A1
caaaaaccctaggtagagagctcttcctccctttctcacagcaatggccgccgcagcacgccctctcgtcaccgtgcaggccctcgacggtgacatggcaaccgatgcctccgccaccgttcccatccctgacgtcatgaaggcctctatccgccccgacatcgtcaatttcgtacactcgaacatctccaagaacagccgccagccatacgccgtcagtcgtcgcgctggtcaccagacctncgccgaatcctggggtaccggccgagccgtctcccgtatcccccgtgttcccggcggcggaacccaccgcgccggccaaggagcctttggaaacatgtgccgcggcngacgcatgttcgccccgaccaagatctggcgccgc

SEQ ID NO: 8150 - DNA, 334 bp, Glycine max
  Clone ID: LIB3087-001-Q1-K1-A3
gtccggaattcgacgggacgagtcagactcgatacacgctgtcaagagccttcctcccctgtgcctgtgcctacaagaacatggaaaggaaagggctctttaccagaagctgtagaacttgtgtctgatattgagaaattgaagggtagcaatgattcttttgtggaaactggtccaagttcatttgctggtgctagtcatccctcagaacctgttgatactgatcttatgagaacagtttttgtaccaataggtcaaactaaatctgaagctggatgcttaatgaagagcgtgtccttgaacggtactttcttagaagatctttcaattcgtg

SEQ ID NO: 8151 - DNA, 469 bp, Glycine max
  unsure at all n locations
  Clone ID: LIB3087-001-Q1-K1-A9
cgcctgcaggtaccggtccggattcccggggttcatttctacacatccctagctctgtcgttccgtcgttgacgatggcgtttcgggtgcgaagccctgacctccgctctctctttcttctctctctcttgtccatcgcttccgccaatgtcttcttcgaagagcgtttcgatgacgggtggcaaaatcgatgggtttactctgatcggatagcagcagctaccgtcattcctgtacggaaccacaactatgagcaaatggaaacaggtccctcgtatgggtctcttagcatcctcatgctgcattctcattgctctcctactcctcactcccaaaggtgttatgggtgccaccttcacattctttaacaaatgcgactacacagtgtggcctgggattctcgcanatgccggtagcccaccactcgacagcaccggttttgagctccccaaggacacttctcgcgcct

SEQ ID NO: 8152 - DNA, 394 bp, Glycine max
  Clone ID: LIB3087-001-Q1-K1-B2
tccgggtccggatttccgggttcgaccaaggcgtccgccacgcgtacggtgattggttcaactacttgaagcggaagaaagcactagacttggtagcgaaggtcctgattctgtcaagagtcacccatggtttaatcgtattgaatgggaagggattagacaccacaccttatccgttccgcatgatattatttctcgtataacacagtacttggaagttcattctgaggattgtagtactggttatctgggctctacattgcacgaggtaaaagaacttaatgtgcctgaatggcttgaggactggtagaagaatgacctttacattttggcttcttttcgaagctaggctttgcaccattatttacctctgcttattcggacaaattgcaat

SEQ ID NO: 8153 - DNA, 344 bp, Glycine max
  Clone ID: LIB3087-001-Q1-K1-C7
aagcaagacagatgatttatcctcctgataggagatcatcaaaacttggagctttacttccctctttgacagaggttgtggccaaagaacacaagaggcttcttgctcgaaaatcaattattgagaaaaggaaagaagaacaagaacgacagcttcttgaaatggaacgggaggaggagtcgaagaggctaagactgctgaaaataactgaagaagcggaacaaagaaggcttgccactgagtttgagcagaggaaaaatcagaggatcctcagggagatagaggagagagaaaatgaagaagcacaagcattactccaggaagctgaaaagcgtattaaaaag

SEQ ID NO: 8154 - DNA, 319 bp, Glycine max
  Clone ID: LIB3087-001-Q1-K1-F5
ctgcagtactcgtccgtgattcccgggtcgactccacgcgtccgctagatcctagcggccgaccttagatcattcataatttctacagcaacagggtccgggaacatttagagaagaatggaaaaaagacttttgccattatggagacaaagatagcttgatatcatagtatatagtttgtactttgacctaccaaagcttcaactagctactatgggaatacatttagacagactctattctttactaagtgaacacacattttcagctcctgtatcttttacgtatgatgatatatgttatagtacattgactttcc

SEQ ID NO: 8155 - DNA, 481 bp, Glycine max
  Clone ID: LIB3087-001-Q1-K1-H8
ctgcatgtaccgttccggaattgacggatccactccagcgcgtccgcatggaagcaagaccattggaggaaggtcttgctgaggccattgatgatggcaagattggaccaagggatgaccccaaggttcgttccaagatcttgtctgaagagttcggttgggacaaggatcttgccaagaaaatctggtgctttggccctgagacccttggacccaacatggtggttgatatgtgcaagggagtccagtatttgaatgaaatcaaggattctgtggttgctggattccagtgggcatcaaaagaaggtgctttggctgaagaaaacatgagagccatctgctttgaagtatgtgatgttgtgctgcacgctgatgctatccacagaggaggtggtcaaatcattcctactgccaggagagtcttctatgcttcccagattactgccaaacccaggcttcttgagcctgtctacctggttga

SEQ ID NO: 8156 - DNA, 202 bp, Glycine max
  Clone ID: LIB3087-002-Q1-K1-A2
attcccgggtcgacgcatgcgtatcaaccaaacactcttcttcatattcttcttcttcttgttcttgttctatctgcgacgggcatcatggcctctagagcagtgctattgttggctatctgtgtgcttcctgccatggttgtggccatacgctcagcaaagatccgtctttgcgtgaagggtcgagactactgtgaccctt

SEQ ID NO: 8157 - DNA, 461 bp, Glycine max
  Clone ID: LIB3087-002-Q1-K1-C8
accggtccggaattgccgggtcgtacccacgcgtgacgcacacgcgtgggggaatattaaactgacggaatcttagtacttcaaagtgtggtcataatagattctctgcctagtggatctggtattgatacacggaagccactagtgctgcaacttcacaagacggaagatgggacacaggagtatgctgagtttcttcacataccaagaacgagattcaccgactttgctgctgcgaggaaggaaatatcggatgaaacagatcgtataactgggaagacaaagcagatttctaatattccaattcacctcagcatttattctccaaatgttgtgaacttaaccctcatagatcttcctgggttaacaaaggttgcagtagagggacaacaggagagtattgttcaagatattgaaaatatggtccgttcttatgttgagaagccaaactgcattatctt

SEQ ID NO: 8158 - DNA, 343 bp, Glycine max
  Clone ID: LIB3087-002-Q1-K1-D10
cggacgcttgggtcgaccacgcgtatgtgaggaactctactctgacggtcacacaagcagcgtatggatgactagtcgtcacttgaacttacgaatgtggaagagtgcattgtgctttggcttagctggcgtagagcttggactatgcatagcttatgctgctgtgtccgtggacatgacattgtaacacaacaaggaggatgagagttgatgcgaacaatgtgacttggaggttcattaactgaaccaaggtctctgatccacatagtgtagtgataaggatgtctcatttgcagggtatgacgatgctcttgatgagcttatcctgtaatccctggctcag

SEQ ID NO: 8159 - DNA, 421 bp, Glycine max
  Clone ID: LIB3087-002-Q1-K1-D2
cgcgctgccggtaccggtccggaataccaggcttgacgcacacgtgcggtggaatatagagctgagtaaatcgttagtacttcgagtcatggtgatagtaggaacacagcacagcagcatgctgtaaatctaattacgaagtcagtacctgttgccattagtgcatcagctgctgatgcatccagttctgacttagggtcgagtgcaaatgcatctgaaaatcatctatccagagctttgtctgaagatacacttgattatgaagccatgattttggatatggctggacaaaatctagtgaggccaatgggcccatcttcaaatgatctttcaagggctttggttgacaggttttctactgttgatttaaagcttaaattgcaactttacaaggttaggtttcatgcttcttactaggaac

SEQ ID NO: 8160 - DNA, 431 bp, Glycine max
  Clone ID: LIB3087-002-Q1-K1-D8
taccggtccggaattcccgcggcgggccacgcgtccgggaaagcgtcactctctctacccgctactcaattaatccacttcggggaattatgggttaactagatacatagcttaaccacatgtatatcttacatacttaaccatgattagtctaacacataatgttataatggctgtaatagattataggctgaatgatgatggatgaatgagtgttagcttcagcaatttgactatcttccgtaagcaaagagcagtacctgaaacatacaacgaacgaacactgtaagcatgaacaagccctaagaagatgtgcgcaacatagctactaccctcgactccagattcaatcataccctcagaaatgttcaagggctactcaaaggtcctagtatacctgttaaaatataattgagccttatggttgaccc

SEQ ID NO: 8161 - DNA, 374 bp, Glycine max
  Clone ID: LIB3087-002-Q1-K1-E10
cccacgcgtccggcttcgcctcacaacagcagctgcagcagcaatggctcccaaacgaggtggaaaggctccggctcttgccgctaagaagaagcctgagaaggtcacgaatccgttgttcgagaagcgtccgaagcagttcggaatcggaggggcgttgcctccgaagagagacttgactaggttcgtgaagtggccaaagaatgttcaaattcagaggaagaagaggattctgaagcaaaggttgaaggttcccccagctttgaaccagtttaccaaaactcttgacaaaaacctatcaacaagtctgttcaagttgcttctgaagtacaggcccgaggacaaagctgaaaagaatgagaggctcttgaaaa

SEQ ID NO: 8162 - DNA, 459 bp, Glycine max
  unsure at all n locations
  Clone ID: LIB3087-002-Q1-K1-E4
accggtccggaattcccggtccgacccacccgtccgccaacccgtccgggggcactgactcacacccacattagtcgggggcagcttcaaagtacctccacattgtctcctactcttactgttctcttctcttctcatcatttttattttttccaatcaaaccaaacaaaacataagcaccgctcttttctctccgaaatccccatctcccttcacttctgagctctggacgagatcccagatctcaccatctttcacgcactcttccatcagattcaccctttcgtttaacgcaaactcataacttgaaggttaatggctgctccaccggcaagggctcgtgccgattacgattatctcataaagcttctcttgatcggtgacagcggtgttgggaaaagttgcctncttctgcgtttctccgatggttctttcaccactagtttcatcacaactata

SEQ ID NO: 8163 - DNA, 414 bp, Glycine max
  Clone ID: LIB3087-002-Q1-K1-E5
aagctatagatttaattgatgaagcaggttctcgagtccggcttcaacatgcccagttacctgaagaagcaagagagcttgacaaggaggtcaggcagattgtgaaggagaaagaagaatttgttcgcaatcaagactttgaaaaggctggagagctaagagacagagaaatggatcttaaggcccagatatctgcacttatagaaaaaggcaaggagatgagtaaggcagaaagcgaggcaggagatgaaggtcccatggtgactgaagttgacatacaacatattgtctcctcctggactggtattcctgtggagaaagtctcaactgatgaatctgatcgtctcctcaagatggaagagactttacacaagcgagtcataggtcaggatgaagcagtgaaagccataagca

SEQ ID NO: 8164 - DNA, 427 bp, Glycine max
  Clone ID: LIB3087-002-Q1-K1-F2
tccgcggccccttggggttaaaacggagttctaaatttccggcgagttttcctctctcgaatctgcgacaccgacgaatctcgctcaccggaatttcgcattcagaaaatggctctaggtggaacagctcccccaagaggaagtgcagcggctactgcaagcatgaggagaaggagaacaaccggtggtgcggcctctggaggagcagctggaactatgctccaattttacacagatgatgcccctggactcaagatctccccaaatgctgatcttgtaatgagcattggcttcatagcatttgttgccatccttcatgtgatgggcaagctgtactttgtgcgtagggaggcttagagaatagatcaagatgttaggtccaattttttggattttcaatacacctctgttatgaaatttagatttt

SEQ ID NO: 8165 - DNA, 385 bp, Glycine max
  Clone ID: LIB3087-002-Q1-K1-F8
tttttacagcaacacatccgtgaacattaaaaaaagaaaggaaaaaagacatttgagattagggagacagagataggtttatatcacagtctggggtttggattctggccagccaaagcttcaactaactatcgtttgaatccaaataaacagactaagttccttacaaagtgaatacacattttttgcttctctactggtaaggtatgatggataagttagagaacatcacctctccaaaaccttctgatttgatccttctgaatctgctctcaatgtaccatctatttgaccaaggaaatgaaataatgcttattaaccaatcctcagagcagcttgagcaatctctacttccccctccttgggcaggtttccgttatgatga

SEQ ID NO: 8166 - DNA, 464 bp, Glycine max
  Clone ID: LIB3087-002-Q1-K1-G11
tgcagtaccggtccggaattcccgggcttgagaaataactgagaaaatcgtaatcgatgggcacgacttcatctttctcgtttccgcttcttatcggaacccccatttctcgttcctcaaaaccgcgtctggtcgtggcggcggcggcttcttccgagggcggcgccacttcttcttcagcaaccaaattgctcacttttctcggcaaaggtggctctggcaaaaccactgccgctattctcgcggctcagcattatgcaatggctggtttgaatacatgtttggtaatacatggccaagacacgactgctgactatcttctcaattgtaagattggaacttcccatgtcacatgtggcaagaacctttctgctgttaggttggaaacaaccaaaatgcttcttgaacctttaaaacttctgaagcaagcagatgcccaactcaatatgactcagggcacactt

SEQ ID NO: 8167 - DNA, 327 bp, Glycine max
  Clone ID: LIB3087-002-Q1-K1-G12
tgcggtaccggtccggattcccgggtcgatccacgcgtccgcagactcgtgggcttacccttgggctagaacgtcgtccaagagagcgtataagctgttgatatcgcgttgactgagacgtacagtaattcaatgacttactgattaggataatatggaattactagactgtgctaatatctatagtatatatgatacatcttaattactagtcaattatgcacatgcataatattaaactgctagaagagactaacgttcttcaaagatggtagatagagtgactataatatagtggtattacttataacttactgttgtcttgat

SEQ ID NO: 8168 - DNA, 180 bp, Glycine max
  Clone ID: LIB3087-002-Q1-K1-H3
accagtcccgaattccctcctcgactccacgcggtcgcttccatatatcatcctcttataattacatatccatttataaccattgcaacttctaggtgaataagggcctactccttcttgaatagcatctttaactcattttctaatattttaaatagatccttattgatgagtcaaatt

SEQ ID NO: 8169 - DNA, 447 bp, Glycine max
  unsure at all n locations
  Clone ID: LIB3087-003-Q1-K1-A12
cggaattcccgggtcgacccacgcgttcgtccacgcgtncgtgctagatactcatttgtacaaatttatatcaaggaagcgagcactgaggctgtgacgttcttcagccaaatgtctataaagttttaggttttaatttcacccctctattccaatgcatgaagatttacttcgaattggttattgtttgaatgctatttgtttttgttccagctaaatttgtcttcgtgttttcatgtctttatttgaactgatggcaactagtcctgcatgtgattaaagtttattgaatgaaaactgttattgcggcattattaagtatataaattgagccctcttccacaatattggaattcttttgttaaagtttctatatacaaaatggctctttctagcagattacacacattgggagcatatcaagtgagagtgtatgaacatgaaaag

SEQ ID NO: 8170 - DNA, 272 bp, Glycine max
  Clone ID: LIB3087-003-Q1-K1-B9
gaattcccgggtcgacccatcgcgtccgcccacgcgtccgcccacgcgttcgggccgtcctccttgtaccagacggatccctctggcagcttctcggcgtggaaggcgaacgccacctggaggaactcaaattcgattagggagttcctcgagaagaactataaggacacctcttgccaggagactgtcaagtttgctattctcgcattgcttgaagttttggtaagcggaggctagaacattttaattttcttttaatttcttatgagctt

SEQ ID NO: 8171 - DNA, 400 bp, Glycine max
  Clone ID: LIB3087-003-Q1-K1-C11
tttccgggtcgacccacgcgttcgcccacgcgtccgcttacttaccaggtgatttgaaagagaagaaggaggcgctcggggaggtgctgaatggggaccgtttggttagcgcgccatacaagctggagttccagcgcgacaaggagtcgatttccgtgtgcaataggaagctctccaaacaggacgtatcgcggttcagatccgcggtgaggaaggactactactttcagatgtactacgacgacctttcgatttggggtttcataaggaaggtggacaaggaaaggaaggaccccagtgattataggtactttctggataaacacattcactttgacgtgttctacaacaaggacagggtcttcgagatcaacgtgcgcaccgatcccaaagcgctcgt

SEQ ID NO: 8172 - DNA, 352 bp, Glycine max
  Clone ID: LIB3087-003-Q1-K1-C7
ccggtctcgaattcccgggtcgacccacgcgtacgcccacgcgtacgtccacgcgttcgtccacgcgtacgaccacgcttccgttgatagtaattgtaagtggctgagtgattctaggaattgttactccagtttatggtaaagctgatgccataaggggaaacgagtgaccatcatctatatgattcaaaactgaggaacattaacattcgtgtcattctttaatacaaggttacatggatgtatgaaaacaaattcattaaacgtgtatccaggtttaattttatgttctattttatttactatgtgtattttccttctaaaaaaaaaccataaaataatatatatcaaa

SEQ ID NO: 8173 - DNA, 421 bp, Glycine max
  Clone ID: LIB3087-003-Q1-K1-D9
gcatcgtgagaacactgcgtaaacttggcacgaattacttgcaccctaggcatcccgccgtcccaattaagtcgcaaccatataacgtactccaattcatgtttgtggtttgtcttaggtccacacatatatattccctatacacaccaaatgaattcccttaatttctattatagtggaaaatcgaacaaagttcatacagttctaaaagaaagtgggttggtttccattgcatagcctggaattttagagtaatttgactttgctaagtagctctccaatatatatatatatatatatatatatatatatatatatatatatatatatataatattttagaaaaattttggtaattggactttaattagatgaagacttgcaacgtaagtgtcaggaaagaaacagcgtgcctttcttt

SEQ ID NO: 8174 - DNA, 373 bp, Glycine max
  Clone ID: LIB3087-003-Q1-K1-E1
tccggaattcccgggtcgacccacgcgttcgtccacgcgtttcgccacgcgttcgctctttgcagcttttctctctctcaaactcttgttgcgtgtggatttgaggtagagagagacactcagatacgtttacgttcagagacagacacaatagaaagtgtttagagagagaaaatgaacgcaacaatgtcttctttggatttgttactgatttctctgagcagggccttttgtagttccatcgacggtttctttcagatccaggggtgtttaatttgcttaacgcttgctcttgggtgggcttgtgctgcttatgtcaagtagtcattgatgttaaacagctaggatacacttttattgtcacgtcaatgag

SEQ ID NO: 8175 - DNA, 390 bp, Glycine max
  Clone ID: LIB3087-003-Q1-K1-F12
tagctagggtttaaaagcagcttgctctccgtagacaatgaatcaaagtcttcttcttcgtctttctattcctcactcaagggttagggatgcgtcggaacagccctgcatactacagtcctccgcggcgaggatacggcggtggtggccgaggaggaggaggaggaggaggaggaggagggtccggcaggaaggggttcggtggaagcaggcgcatggacagcaatgggagcctcttggttcgtaacattcccctcgattgcagacccgaggagcttcgcgtccctttcgagcgatttggacctgttcgtgacgtttacatacccaaggattattactctggagaaccttgaggctttgcctttgtgcagtttgtggatccttatgatg

SEQ ID NO: 8176 - DNA, 451 bp, Glycine max
  unsure at all n locations
  Clone ID: LIB3087-003-Q1-K1-G4
ccggaanttcctcgggtcgactccacgtcgtctcgtcccacgtcgtctcagtgcgcctcgtgagggtggggttctcgagtgtaccgggagagaggaggccatacgntgtccggttttgacgnnngcgtcgggaggtggnngattctcgtggcaccaaaccctcttcttctctttgcacccgttcagttgcgcccgaagcagcgtcaggggctctgtcaaatgnntcaatggtggnnatttgtgagggcaaagaagagttaccagggccttcctacggagtaccgtgtgaagaccagcaaccgaatacaccttcatnntaacttgtactgacttcannaccgagcttttggtttcttaaagttggccttcttcccaatgagttttttattctgacanttacatgtggcagaaattggtttctcactttcttcataatgatgggtaaactagc

SEQ ID NO: 8177 - DNA, 231 bp, Glycine max
  Clone ID: LIB3087-003-Q1-K1-H1
gacccacgcgtacgcccactcgtgtcaccgctcttacggatgtttcagtttcaaaatacagtgtacatcatccaggcgggatattttatatcaacactagatctattcatcctacttaccttactaaattcactaccacattcaactttctctacaactcttaaaagcattgccaaaatgataattacaaccatttatcaatcctctacttatctctataacatgctactt

SEQ ID NO: 8178 - DNA, 392 bp, Glycine max
  Clone ID: LIB3087-003-Q1-K1-H4
gaatttccaggtcgacccacgcgtacgcccacgcgtacgcttctctctctttcccttctccaatccatggtctgcatctccgtcacagagaaccttgattcttgggggaggcttctaccctctactctgatggaatcccattcatattgcacctgcgtactcatagatgaacaaccacttattaacacccaattttgaggacttcacacaatgctcctcaatgtagcttgcgagcaatctccaagaagcattaaaatgttgcgtggttatctgttagtcctaaattgcatgttcagaattaatttcccagagatgtatttgtaagatcttaacttactgctgctgggtctgcttgagatggctatttcctaccctatcctaaattggaatct

SEQ ID NO: 8179 - DNA, 377 bp, Glycine max
  Clone ID: LIB3087-003-Q1-K1-H5
ggaggctgttctgccaccaaagccttcttcacaattgacagacatggagctggatgaatgggaggaaactacactccatgatgtcaacatggaggaggagactaggaggaagcagcaacaagctcaggaggcatatgatgaggatgatgacatgcctggtggtgcacagagggtacagtgcgcccagcagtaatgactttgtgtggaagctagattcagaattgatgaaaatgatgatatgatgataatactgttgatgttccataactgtagtgtgtggcttaaagataagtagtgtttgatgaaatgattgtgagaaagtgaacagtgtatcacttgcgtttttattattgtcgaaggggtaacttccgttctga

SEQ ID NO: 8180 - DNA, 372 bp, Glycine max
  Clone ID: LIB3087-004-Q1-K1-A11
cgaaaggcccagccacagagtctccattgcccatcgctctctctattagttcacgcgcggcaattggagattcacgcgccaccatggcctctccatcgagcctccctatatcctcccaatcaagcgcttccgccgccggcgcctcgcagtcccagcctccgatcgcgacgccggcgttccgcgccttcatctcccgcatctcctcgtcgctccgccacgccttcgcgcagcgcccgccgtggacggagctcatcgaccggagctccatgtcccgacccgacaccctcgccgaagcatactctcggatccgtaagaacttcgcctacttccgcgtcaattacctaaccctaatcgtgttggcgctcgcggtct

SEQ ID NO: 8181 - DNA, 402 bp, Glycine max
  Clone ID: LIB3087-004-Q1-K1-B5
cggtccggaattcccgggacgacccaggcagacgccaacacgtccggaagaggaagattgaggatctaactctcgaagaaaaccccgcggagaagctcctggaaccgtccacaaaggagcagctccactctctcgtaacccaggccgtggatatgtttcccgaattcgtcgatagcgagcgccggctcgctgacgaggaccctgcgcacaggaaaatcttcgtccatggccttggctgggacgccactgccgatactctaaccgccgtgttcgggaaatacggcgagatcgaggattgcaaggccgtcaccgacaagggctccgggaaatcaaagggttacgcctttatcctcttcaagcacaggaacgatgctcgcaaggcgctgaaacacccccaaaaga

SEQ ID NO: 8182 - DNA, 363 bp, Glycine max
  Clone ID: LIB3087-004-Q1-K1-C1
cggaattcccggggttagtggtagtgggcgggggaatatggatggggaactacacataatgttatttccgttcccaggtcaggggcacgggataccaatgagtgatatggcgagagcatttaatggaagaggggtgaggacaaccatagtgaccactccactcaacgtagccactattcgtggaacaataggaaaagagacagagacagatatagaaatcctgacggtgaaattccctagtgcagaggctggtttacctgagggatgcgaaaatacagagtcaatccccttccctgacttggtactgactttcttaaaagcaatcaagatgttggaagcccccttggaacacctactccttta

SEQ ID NO: 8183 - DNA, 138 bp, Glycine max
  Clone ID: LIB3087-004-Q1-K1-D9
cggtccggattcccgggtcgacccaagccttccattccttccttttaaaccggacttattggttccttttacaacttaaaccattgccaaaagtccaaccttggtccctttgggcctttttccttttctttttgcttc

SEQ ID NO: 8184 - DNA, 418 bp, Glycine max
  Clone ID: LIB3087-004-Q1-K1-G3
aagcaattggctgaaagtgctggaatgttgttagttcaagctgaggtccttcgtcacatgggagagcaactacttgttaagtacagagaatcggttcaacgtgtaatccgaaagcctgcgctcagaattgatttctcaccatgagtaactttcctacgttcattctgccattctgggataaaacttaggttgactaagtcaggtgatttttgagttattttttaatgaatattaaaattttatctcgccaatttatatgataatagacgttttattgatgtaaattattgagaataaattttaatttttattaaagaatatcattaaaaacactgagttatgtcttaatttttaatatggtttttctgttaaaaaatattttggctctgatccgattgcattgaattactaggatatt

SEQ ID NO: 8185 - DNA, 361 bp, Glycine max
  Clone ID: LIB3087-005-Q1-K1-A10
gtccggaattcccgggtcgacccagacgaccgctcacgcgtccgatccgcacagcacactctcatacatcatacgccgtcgaagtcaccctggctcgctctgtacaaccagaaggatgctctggacctatcaatgggaactacaggaaataaggcatagacttttgatgaagacaaacccagtctgtggcaaggaactaaatgaacttgtatgacacgctctaagagctggcttcttcaagagacacactgggcatacattaaaacctaaagaatgatgctacatgatcatcaagtgaaacactagttcatgacgatgttcaacacactacaattgatgctctattcattgaagatgaccc

SEQ ID NO: 8186 - DNA, 229 bp, Glycine max
  Clone ID: LIB3087-005-Q1-K1-A4
gaattcccggctcgacccactcgtccgcccacgcgtccggaggttgtctatttgaattctccttcatcctttcctttcttgttgaagagtttttgttattgttttaaggaaccagcagttcttcagttttagaaagactcatgttgaattatcatagcatctgtgatggatttatacagcattatcacaatgtttcaatttcactcagattcattcatgggtgaaacta

SEQ ID NO: 8187 - DNA, 104 bp, Glycine max
  Clone ID: LIB3087-005-Q1-K1-A6
gaattcccggaccgacccacgcatacgtcctacgccaatctcttactcattctcttttctctgtccttgccccttacacgaaccctgtacatcttcaaaaggcc

SEQ ID NO: 8188 - DNA, 169 bp, Glycine max
  Clone ID: LIB3087-005-Q1-K1-A9
tttttatttttggtttgtttttaattttggtgtgttttttttttttccaataaaaaataaaacactcattgctacaaaaagcccatctaaaaaaaacccgatttaaaaaaatccacttccaacaaaaattccaccaatttgaacccaaaaaccacttactttaggcacc

SEQ ID NO: 8189 - DNA, 271 bp, Glycine max
  Clone ID: LIB3087-005-Q1-K1-B12
cggtccggaattcccgttcgaccaggcgtccgacactgaaacgaggcttaccagtgttcactgcgttagcgctggctgcattctgcgcctgacaggtcagataatgactgaggttgatcatgtattgcattagacattgacagatcgtgacttactgacctgatctttcatgacttactcctgaccagcattgaaccttgctttaaaggctcacgcataacttacaccaatgtgatatgtagactaccacttgatataacagttctgctgc

SEQ ID NO: 8190 - DNA, 121 bp, Glycine max
  Clone ID: LIB3087-005-Q1-K1-B3
gaattcccgggtcgacccacgcgtgcggtgtgatgccgatgatgggcattgtcggtactgagacattgcatggaggctagaaagctggtgtgtcggtccaggtaacagctgcgaacattga

SEQ ID NO: 8191 - DNA, 145 bp, Glycine max
  Clone ID: LIB3087-005-Q1-K1-B8
aattgccggatgcacccacgcatgcgtccacgcatgcgtccacatcgctcatgccgaatgcggatcaggctctctgcgcgcattacggcgggatgtgcaacggactaggtcaggcattgtcactgaatgacagccttcaacgagt

SEQ ID NO: 8192 - DNA, 418 bp, Glycine max
  unsure at all n locations
  Clone ID: LIB3087-005-Q1-K1-B9
tccggaattcccgggtcgacccacgcgtacgcccacgcgtccggtcagattgacactttcttaaactttcaagagcttgctttcccttttgtcttgctgtatgttgacattgatctctcattcctttatctcttcctcgattttgtgttcaagagaccattgaagacatggcaagagagtcaagaatccacaccaacaggatttatcctcgtctgcgtgtggcttagtcaagggtcatgaattgtatactgtgtaacagaacaagatttgggtggctaaggtagcgccacatgtttgtacctcacatgccagagtataccaacctgatgataagtacaaatcaaaacagagaacaatttttggacctttntgtggaaaatatatttttagcttgcaaaaagatgaccaattcatgtgc

SEQ ID NO: 8193 - DNA, 60 bp, Glycine max
  unsure at all n locations
  Clone ID: LIB3087-005-Q1-K1-C2
tcccggatcgacccacgcatccactctttctatgcctcatncgtatacactctcttgaaa

SEQ ID NO: 8194 - DNA, 345 bp, Glycine max
  Clone ID: LIB3087-005-Q1-K1-C4
aattgccgggtcgacccacgcgttcggcaactctcgtactacgtacttattcattctttctgcagtaatgtacaacttataaccgtgcttaagagttagagaccacctatagtttaatttctggagatataaaggttgtatggttggatggttaaataaaaatgatgggtttaatatgtctgctaatataaatataaaaattctagatctgttcttgacagtaggaggcactgacttaacaaactgttttatttgctttttaataacacggtatcacaacggaacaatttttcagtgtgttgctcaatccttatcttaacctcaagatctaaacataagccatgc

SEQ ID NO: 8195 - DNA, 132 bp, Glycine max
  Clone ID: LIB3087-005-Q1-K1-C5
cggttcggaattcccgattcgacccactcgttcgctgcgatctagatcttgctactgcatattcacatgagctgacacgatatgggctataagggagacttacaaattatgcagcagcttattgcactggtc

SEQ ID NO: 8196 - DNA, 177 bp, Glycine max
  Clone ID: LIB3087-005-Q1-K1-E3
tcccgggtcgacccacgcgtgcgaccacgcgtccgcccacgcgtccggaggatgagggtgtgttttactcgacttgcctcattcgtctgcgattgcgagcctttgacggaggatgatctggaagccatctaagcctctaatttcaatagcaattaacgtgcattcaatgatcacact

SEQ ID NO: 8197 - DNA, 144 bp, Glycine max
  unsure at all n locations
  Clone ID: LIB3087-005-Q1-K1-F1
gaattcccgggtcgacccacgcgtgcgccttctctctctctttcaatttccaaatctcgaaactcaagaagatggagaaagcgatcgacanacggaagattttgcttgatcatctgaacccttcatcatccacccaccccaact

SEQ ID NO: 8198 - DNA, 407 bp, Glycine max
  Clone ID: LIB3087-005-Q1-K1-F10
gaattcccgtttcgacccaggcgtcccgtcacactcactatctactagacactggttttagaatacatatatctatttctgattcagggcgcgattgttactaagcctgggaagttcgtacccatagtacttcatatatagtggaattctacatgaaggtgtctatgctcgatcacatggaggattgtcacaaactcggtcttaccatagctcattgcagtcagtaacttgtccatcaataagcttgaaaaattgctatctttcgttaacatctgttccgcagtgaatcaagttatgatccaatcattaagctaatcacacattaatttaattacgtgactgatccactgttcataatcaatgatctaactaaaccttaattaattcttaacaggtctaagttaacc

SEQ ID NO: 8199 - DNA, 433 bp, Glycine max
  Clone ID: LIB3087-005-Q1-K1-G2
ccggcccggaattcccgggtcgacccacgcgtgcgcccacgcgtccgcccacgcgtccggaggttaagaacaataacataaaccattcttcaccgctcctgtctcccaccatagtaatgggtcagagcctaagttgcagtggcaactatgaccacggtctcttcaccggcgggcagcacggtgaccttgaaattgtcacaactgtgttggactccgacccctctgtcttgcaccaaaccactctctacgatcgccactctcctgttcatattggcgctaccaatgaccagatcgagattctgtctaagctcttagatggatctctcaacccagatgttttaaatcgccacaaacagactccgcttatgctggcagcaatgcatgggaacatcgcgtgtgttgagaagcttcttcaagccggagctaatgtttt

SEQ ID NO: 8200 - DNA, 220 bp, Glycine max
  Clone ID: LIB3087-005-Q1-K1-G6
gaattgaccggatggacgcacgcgtccgtatcaggaacgaacgactaggtaatccattgatggcacattcctcgatcgtggttactgtgagccataactagggtaaagggaaccttacctgtgcaaaaattcacactcattctacttcttctactattggatctcgatctctagctataccttgtcttctcctactctcatagaacaacttctctttctc

SEQ ID NO: 8201 - DNA, 392 bp, Glycine max
  Clone ID: LIB3087-005-Q1-K1-G8
tatacttgtcaaccctttgagagttagaatggctgctgctattgaaatcccggcaatagggtttccaaactccggtgccgaacagaggatgccagtggttggaatgggatctgcccctgacttcacatgcaagaaagacacagtggaggctatcattgatgcactgaaacagggttacagacacttcgacactgctgctgcttatggctgtgaacatgctcttggtgaagctctcaacgaagctatccatcttggcctcagctgccggtaagacctctttgtcactttcaagctttgggtcaccgaaaatcatcctcatcttggccttactgctttgcgcaaatcacttaaaactcttcaactagagtacttggacctggatctcattcact

SEQ ID NO: 8202 - DNA, 133 bp, Glycine max
  Clone ID: LIB3087-005-Q1-K1-H1
aattcccgggtcgacccacgcgttcgtccacgcgtccgtccacgcgtccggaactataaatgacttctcttcaattccaccgattggacccaggaaccgatacatccgccgtcatcgcaaacggcgttaactg

SEQ ID NO: 8203 - DNA, 490 bp, Glycine max
  Clone ID: LIB3087-005-Q1-K1-H7
taccggtctcggaattcccgggtggacccacgcgtccgcccacgcgtccggggaagcagaatcagcgtgatggcgagaaactgggtggttcgatcctgtggcgcttcgtcacgcaatgaagaatagggttctcacactctccttcaaccgaattctttcctcactcacatcaaaatcctcactcttagctcaccacctgcttcgtcactgactgctctcagctctccctccttccctgcttccaccactctcgctccctctcctacggctcatctccttccgacgttgtccttgttaattcctaggaatagttcaacaatatgcttaccaaagtccgagatgactcgttgcacgcggtcttctatttcactgcggcttgctgtggaccttgcaagtttatttcacctatcgttggggagctcagtaagaagtacccgtgatgtacaacatataagattgacattgatcaagaagcacttcaaggcacact

SEQ ID NO: 8204 - DNA, 232 bp, Glycine max
  unsure at all n locations
  Clone ID: LIB3087-005-Q1-K1-H8
gtaccggtctcggaatgcccggntggacccacgcgtccggcctggcgttgggtcgcttgctaggaagataacatagcagaaccatagatatgaacaccaacaccatgccacatgcggacggtcctatcaccttggagaatcatcattggaaccaccatagataccactcactgtcttagatgaaactgctctcaagtccagacgaaggctttacaagaagcttggacacttc

SEQ ID NO: 8205 - DNA, 218 bp, Glycine max
  Clone ID: LIB3087-006-Q1-K1-A12
aaaagactcattttcagagactgatacaggaaaaaaatacacttagcaaaacaaataagagtattggcaccataatgatatgtacaatgagttgtatatttacaaatttaacagtgcctgtggtgtacatttagtaagtaatttttttttctttcagaataatattgagaagtagggacacttctaaaaaaaaaataaaaaacataacaaaaaaaata

SEQ ID NO: 8206 - DNA, 463 bp, Glycine max
  Clone ID: LIB3087-006-Q1-K1-A3
gaattcccgggtcgacccactcgtcgcacgcacgcgtccgctcgtattcggacgcgttgtcggactcgggtcgaattaccaagcatgtggcaactggattactctaccgagtcaaacccctctttctctgcaacgctgctcataatatccaactgacctatcattagctctcctctttaatacatactggactctcttcgatttgagggaacagtacaagagtctgagcatctagtaacccaactgcacaggtagtctccaaataatggagcctcatgatgagactggatgccaggctcctgaacgccccattctttgcattaataattgtggcttctttggaagagcagctaccatgaacatgtgttccaagtgttacaaggacatgctgttgaagcatgagcaggacaaatttgcagcatcatccgttgaaaacattgtgaatggccaattccaatggcaa

SEQ ID NO: 8207 - DNA, 336 bp, Glycine max
  Clone ID: LIB3087-006-Q1-K1-A4
cggatcgaccgacgcgtccgctcaaacgctcgactagatcatccagctaattgtgactgatggagcactggattctgcggctgacgatgcagatgttcaagtaaacttcgaccggcaagaccattgatcgtgaagtggaatactatgacaccatagacagacgtagaagctaagattcaacacaatgaaggatgcctcacctggccagcataaaactagactactatgaaaacaacatgaggatggtcagcccctaatcgattaccgcgtccataaggcatcaaccctacatattgtgctatggctgactggtggtatgcaaatatcatgtgtaga

SEQ ID NO: 8208 - DNA, 213 bp, Glycine max
  Clone ID: LIB3087-006-Q1-K1-A9
gcagcattcgttgggattgttatgattcgcttcttttaatctgctctaatgaaacattgcttctgggttttgatgtttcccattatatttttattctctcgatgacactgtcatataagtgtaccatggctgaattttggtctccttttgaaatttgtcagcataattattttgtagaaaattagttgaaagaatgctttacctttgataaac

SEQ ID NO: 8209 - DNA, 398 bp, Glycine max
  Clone ID: LIB3087-006-Q1-K1-B7
aattcccggatcgacccacgcgtgcgcgaaacgcaactacgtatgaggaaatatcaagtcaaaaatacagtggaagcagaatttatgtgattcaacaagtgcaatgcggcaaacagcataatgaccaacatcataacatagatcaaaccctcttatcttgaaaacaatggccacctctcagggtgctaacagttacagaaatgccagaacctctctcaaacctcacgtcaagtcaaagcctacgcaacaacgccgtaatagcaccggctccgtcaacggcaaggaacacgctgctgttcccggaagagttagagtggctgttagattgcggccacggaatgcagaggaatcagtggcggatgctgactttgctgactgtgttgaactgcaaccagagc

SEQ ID NO: 8210 - DNA, 409 bp, Glycine max
  unsure at all n locations
  Clone ID: LIB3087-006-Q1-K1-B9
aagcaagcaaaaccctagcggcgcctgctttctttgttcgtgttttgcatcaggatggagtctcaggtgaagcacgcacttgttgtcaaagttatgggtcgtactggatccagaggacaagtgacccaggttagagtgaagtttttggatgatcagaaccgtcacatcatgaggaatgtgaaaggacctgtgagagaaggagacattctcaccctactcgagtctgaaagggaagcaagaagattgcgctagatggtctcttttttttggcttgccttcaaattcgaacaaaagcaatatttntcttgatatttatggtagttagtcngtgctaaaggggttatagcaccctatctttatgtttggatctattttcattcgaattattgcttgaattttgatgtttaaa

SEQ ID NO: 8211 - DNA, 289 bp, Glycine max
  Clone ID: LIB3087-006-Q1-K1-C5
taccggtccggaattgccgactcgacccactcatccgtccacacatacactgacaacccttctggctacacaacaaggatactctccacggtgcacgaggctactttgaaggtgcctgcacttcacaattactgaatatatctacctagaacttacaattcaatacacgatgtccaagactcagatgacattacctatagtgtaattttcagatggatcttcttacgtcaatccaggtacccacgcatatattatagtgaatttcctcaattattctgctatttgcaaa

SEQ ID NO: 8212 - DNA, 424 bp, Glycine max
  Clone ID: LIB3087-006-Q1-K1-D2
cggaattcccgggtcgacccacgcgtgcggttttttgaatccaggaagctttcacaaccaaccttttccgatctttctctcaaaccgggtcgcatgggcagaaaaaccctgagcttgaagatggcccaagttgctcaaaacccttctcagcagcagaaagtcataataactaacaagtatggcaataaactagtgggcattttgcatgaatctggaaccaaagagattgttatcctatgccatggtcttcgatccactaaggaagacgatatcataaaaaatcttgctgctgctctagaaaaggcaggagtcagttcttttcgctttgacttcactggaaatggggaaagtgaaggttcatttgagtttggtcactattggagggaggttgatgatctgcatgatgtggttcaacactttcatg

SEQ ID NO: 8213 - DNA, 210 bp, Glycine max
  Clone ID: LIB3087-006-Q1-K1-E5
gtaccgtgtctcgaattcccgagtcgacccacgcagtccgtccacacactcgtggtcgcgtactagtactcgctatagcttactattatttggaatcctggcctaacaactcgctggcttgctacattatgctaatgttatgtaatgacatcctttttcatttttaacggactgcttactactgttcattacataactatcactcattaa

SEQ ID NO: 8214 - DNA, 327 bp, Glycine max
  Clone ID: LIB3087-006-Q1-K1-E8
tagatggaaaaataaaagcatggttgtatgacaatttgggatctcgtgttgattatgaagctcctggtcgttggtgcacaaccatggcttatagtgctgatggtacaaggctcttttcatgtgggacaagcaaagatggggaatcctccattgttgaatggaatgaaagtgaaggagctgttaaaaggacttatcaaggatttcgcaagcgatctttgggtgttgtgcaatttgatactaccaaaaatcgatttttggctgctggtgatgatttctccatcaaattctgggatatggataatgttcagcttttgactactgttgatg

SEQ ID NO: 8215 - DNA, 450 bp, Glycine max
  Clone ID: LIB3087-006-Q1-K1-F1
aattcccgggtcgacccacgcgtgcgctcaaatcaaaatacttaatagcatggcgtttcatttatacaaaacttctaccccaagcagactcagtggagccgtagacagtcaagtaaaatccaatccacgaaatcatttgatctatggacagcatcgttgtggtaaaagccgtaatgccagaggaatcattaccgcacggcatagagggggaggtcataagcgtctataccgtaaaattgattttcgacggaatgaaaaaaacatatatggtagaatcgtaaccatagaatatgaccctaatcgaaatgcatacatttgtcttatacactatggggatggtgagaaaaaatatattttacaccccaaaagggctataattggagataccattgtttctggtacacaagttcctaataaaatgggaaatgccctaactttgaacgatatgcc

SEQ ID NO: 8216 - DNA, 273 bp, Glycine max
  Clone ID: LIB3087-006-Q1-K1-F2
tagatggaaaaataaaagcatggttgtatgacaatttgggatctcgtgttgattatgaagctcctggtcgttggtgcacaaccatggcttatagtgctgatggtacaaggctcttttcatgtgggacaagcaaagatggggaatcctccattgttgaatggaatgaaagtgaaagagctgttaaaaggacttatcaaggatttcgcaagcgatctttgggtgttgtgcaatttgatactaccaaaaatcgatttttggctgctggtgatgatt

SEQ ID NO: 8217 - DNA, 347 bp, Glycine max
  Clone ID: LIB3087-006-Q1-K1-F7
ggttgcgttgctcaatccagcgtcggcgtcgtcgaacagtggggtcgcttccaccgcctcgcccaacccggcttccactttttcaaccctctcgccggcgaatgcctctccggtatcctctccaccaggatctcctccctcgatgtccgcatcgaaaccaaaaccaaggacaatgtgtttgtgcagttgctgtgttcgattcaataccgagtgattaaggaaaacgctgatgatgctttctatgagttgcaaaaccctcaggagcagatccaggcttatgtttttgatgtgactcgtgctattgttccgagaatgaacttggacgagctgtttgagcagaagggtga

SEQ ID NO: 8218 - DNA, 329 bp, Glycine max
  Clone ID: LIB3087-006-Q1-K1-G1
ccggcccggaattcccggatcgaccgacgcgtccgatctctaatctcattctacttctgttcaaacactctctctcatggcatcagataagaagagtaggatcggcatcaacggatttggaaggattggccgattggtggccagagttgcccttcaaaggaatgatgttgaacttgttgctgtcaacgatcctttcatcaccactgattacatgacatacatgttcaagtacgacaccgttcatggccagcggaagcattttgatgtgaaggtgaaggactctaagacccttctctatggtgagaagcccgtcaccgattttggaatca

SEQ ID NO: 8219 - DNA, 235 bp, Glycine max
  Clone ID: LIB3087-006-Q1-K1-G12
gtactcgaccggaattcccgggtcgacccacgcgtacgcgtacccatgtgtcacccacgctgttctaaccactcggttcctcacccttgcattcgggccagcctataaacgtccgggacaaacacatctattatgtgcaaacacattcataataccatctcataaatctaaacaagaacattcaaataaaagattcgtgtatcttaatgtgtgccatgccttatgagataatgta

SEQ ID NO: 8220 - DNA, 373 bp, Glycine max
  Clone ID: LIB3087-006-Q1-K1-G2
cccggaattcccgggtcgacccacgcgtggcgcccacgcgtccggtgaaggccattaggagaaagaccaccggaactggaaggatgaggtgcttgcgtgacgtgcctcgcagattcaagagcggcttcagagagggtaccgaagctgcacccaggaagagaggagctgctgcctctgcctaagctttgaatgaatgacagcaatttttgctgggtcagtgaattataggagttaatgtttctgtgttggtgccaaactctttggaacacattttctttctgtcgttttaatttcatttaatatgtagtggctttgtatttcgaaatgaggattgtaaggaattttggtttttcaaagggaagttttgacatcc

SEQ ID NO: 8221 - DNA, 269 bp, Glycine max
  Clone ID: LIB3087-006-Q1-K1-H3
acccacgcgtgcacccctcctcccactcctccgagcctaaatttatatgaacttttgcactgaaaatctcactgccaccggtcttagaccatatgggccaaggctcaatactatcaacattagctcagtaaagcattcgcctgttacagactccgatatgtcttgcatatcttgctagccatgacccaactgtgatccatatagatcttaaatgtgactataatcatattaacggaaaccaatgggaacatgaaattggagatcttggg

SEQ ID NO: 8222 - DNA, 383 bp, Glycine max
  Clone ID: LIB3087-006-Q1-K1-H7
accggtccggaattcccgggtggacgcacgcgtacgcccacgcgtccgctgaaacttgttcgcacattttcacggatctaactaaattgtctccaggaatcgtcaccacgatgccaagcccttcgaagaagaagaagtcaatcctttttcgaatggcactactgctcctgcatcaaagtcacgtattccaccattagcatctgagtcactgggctttggtcaaaggcatgatgctacagttgatattcctttggatactacaaatgactccaagaaaaaaggtcaagagctagcagcttgggaagcacatttaaaacggagagagaatgaaatcacctgaagagaagaggctgtttctagagctggtgttccttgtgatgata

SEQ ID NO: 8223 - DNA, 89 bp, Glycine max
  Clone ID: LIB3087-006-Q1-K1-H9
taccggtcctgaattcccgagtcgacccactcgttctcccacgcgtccgtccactcatccatttacttttcaaatgaattcccacattc

SEQ ID NO: 8224 - DNA, 432 bp, Glycine max
  Clone ID: LIB3087-007-Q1-K1-B4
cggaattcccggtcgaccgcacgcgtccgcccacgcgtccggtcaacttagatgttgaaatttataaaatagaaaaatgattcctaaaagggtgcattatcaatcgagttattccttgaaattctaatagtcaatgaaattggtctctaaaattaagaaaattgcaaaatgatcccctaaacatcaatcaatttagtccctttagctaatatcatttaacctcgttaaaaatattaaattgacacgttaagtgcttgaggcagctagacaaacatagttgtcataccatagtgatgatgaaaatgactaaaatattgatgaaataataattaattattttcattctttaagtcaatgttcctcctcttctcattagttttacattagtctttcaatcaattcattgaggaaacgtcaccacagtaactcata

SEQ ID NO: 8225 - DNA, 411 bp, Glycine max
  unsure at all n locations
  Clone ID: LIB3087-007-Q1-K1-C3
cggaatcccggtcgaccacgcgtccgtagaactgaagattcagttcgggatttttgcgcttcgttctcaatttgcagcgcgtgagtgagggaacatggacggtgccgaattgtccaacataaagaaatggattgtgatgtatcctgtttacataaactccaaaaaaacgatggccgaaggaagacgcattggcctcgccaaagcctgcgaaaaccctacttgcgctgaaatcggtgattgctgcagctatctgaagcttccttttgcaattgagatagacaaggcgtaccctcgtgatttcatgcanagagggcgcgtgagggtgttgctgaagaaggaggatggaactctctttaattcaaccatctcatccagaaagcaactaatggtaaaggtgcagagatggtacct

SEQ ID NO: 8226 - DNA, 266 bp, Glycine max
  Clone ID: LIB3087-007-Q1-K1-D5
cggaattcccgggtcgaccgcacgcgtccggttgaaactattcctcctgcgccatctccattgctgttttctctctgcttgctattacaagccaattcaagaagttcgttcaactttgatgctcaagtctaacaacatatataaccattgacagatattcaaattcagcataattgtgattaaaattttggtccttccctggaatgaaaatactgctcgtcaataaatttgggagtgatttttgcggttatattcaatgtgctgct

SEQ ID NO: 8227 - DNA, 194 bp, Glycine max
  unsure at all n locations
  Clone ID: LIB3087-007-Q1-K1-E11
gcccggaattcccgggtggaccgacgcgtccggaaacagtcaacagtcgcttcataaggtgaagttgacattctagtagtggaaagggccagagtcgagatgattatatgtgtttgatttgcctctacacactggcaatccttaggtctgacagatggctntttataatgaagaagagaagactgaagactacc

SEQ ID NO: 8228 - DNA, 329 bp, Glycine max
  unsure at all n locations
  Clone ID: LIB3087-007-Q1-K1-F11
accggnccggaanncccggggcgacgcacgcgtccgcaacaacctttcaaaccctccaaccttagtttcaattctaaacttgttcaccctttattggctgctcttccaaacatgggcgatggcttcaataataaccttggtgacatccaccttgctctttctttctttcactttgtcatgtgctattgacaccttcaccatcaccaactacaccgacaatgaggtcatgaccatgtacgaggagtggttggtgaagcaccaaaaggtgtacaatgggttgagagagaaggacaagaagttccaagttttcaaagacaactttgggttca

SEQ ID NO: 8229 - DNA, 258 bp, Glycine max
  unsure at all n locations
  Clone ID: LIB3087-007-Q1-K1-G11
cgcgtccggcactatacactcccatttcagcttccatgtctgaaccacacaaacgtancaatctgaaagcntcaacttcaaccctggtcagcaagaaagagttcttagtaagaattagctggaaaaaagcatattctcactccttctagggtttttgttttgcattgaaattgaaatcccactattcaaaatccccgaccttctctctagaaaaagaaatagtttttttttgtgtgtgtgtgggaagggtttaaattt

SEQ ID NO: 8230 - DNA, 355 bp, Glycine max
  Clone ID: LIB3087-007-Q1-K1-H8
ccgggtcgacccacgcgtgcgcccacgcgtccgcctcatcttgttgtgcgtgtgtgttagagagagttagagaatgggaaagtgccaagccgttgacactgcgactctagtgattcagcaacccaatgggaaagtagaaaggttgtattggcctgtaagtgctagtgaagtgatgaagaccaaccctgatcactatgttgctcttcttatctccaccacattgtgctcatccaaggacaatgaaaatcgctcaaataagagtgacaacaccaacaccaccaaccctgttcgccttacccgcatcaagcttctcaagccaacagatacccttgtgcttggccaagtttatagacta

SEQ ID NO: 8231 - DNA, 77 bp, Glycine max
  Clone ID: LIB3087-007-Q1-K1-H9
cgggtcgaccgacgcgtccggtgcctctttctacttttccctcattgcttctaactcaacaattgagatctcacact

SEQ ID NO: 8232 - DNA, 145 bp, Glycine max
  unsure at all n locations
  Clone ID: LIB3087-008-Q1-K1-A1
gaatacccggccggacccacgcgtccgcaggcacgtgagataaaagaaacccaaaatttcgctcactctctcgaacgcttnccgaaggcatgtgtaaaccaaaccctacgcgcaggatccccaatgcttcaacacccacgaggac

SEQ ID NO: 8233 - DNA, 387 bp, Glycine max
  unsure at all n locations
  Clone ID: LIB3087-008-Q1-K1-A9
cggtccggaanncacgggccgacgcactcacgcgtcggcccacgcgtccgcccacgcgtccttccacgcgtccgcccacgcgtccggccgtatttataagaatggccaaaacaacatctaaagacctaaaacaacacaatctaaccactctatcatagaaaaccctgattctgacaacacactcctcataactcctaaactcaaacacatcattaacaacaattccaatcactctgaattctctctctcattatctcatgttctacttgaaactaaccatctattgaatctgaagatacccaagacttgcctttcaagagtgctcactttaatgtcttgggcttatacaggggtatttaattctgggatgacatagatacttgcctt

SEQ ID NO: 8234 - DNA, 395 bp, Glycine max
  Clone ID: LIB3087-008-Q1-K1-B10
ccggaattcccgggtcgactccacgcgtccgcaaaagagtagtggcctttagggtttgaagaacaagagctcaaatcaaatggaatcgaaaaaagaaagaaagatcatattcatggcgatggcaagcctggctcgacggaagggttacgccgtcgttttgtcgtcgaggtcgtcgttttgtctgacaagctggaggggattcgcgtccggatctgacgaaaacgacgtcgtcgtcatcggcggcggtcccggcggctacgtggccgccatcaaagccgcgcagctcggtctgaaaaccacttgcatcgaaaagcgtggcactctcggcggtacctgcctcaacgtcggatgcatccctttcaaagcacttctgcatctttccacatgtatcatga

SEQ ID NO: 8235 - DNA, 393 bp, Glycine max
  Clone ID: LIB3087-008-Q1-K1-B11
cggaattcccgggtcgactccacgcgtccggtgcgtgggagggtccgaagttgtagatagtgattctggttctgttctggtcttctttctactcacaacaacatcagaatcagaaacaacaatggccaacactaacttggaagatgttccctctctggatctcatgactgagctccttcgtcgtctcaagtgctcttccaaacctgacaagcgtcttattctcattggcccacctggatctggaaaaggcacccagtcaccaatcataaaagatgagtactgcttatgccacttagctactggtgatatgttaagagcagctgtagcagctaagacccctcttggtgtcaaggctaaagaagctatggatatgggagaacttggttctgatga

SEQ ID NO: 8236 - DNA, 394 bp, Glycine max
  Clone ID: LIB3087-008-Q1-K1-B9
accgtaccggaattcccgggtcgactccacgcgtccgcaccgttccagggcagctcgtgatggagatcgtcaagaaaaacaattccttgttggtcaagcagtttggaaggggcacccagagcgtcgaattcagcagagagagcaacaatctctacaacctcaattcgttcaagtactctggtttggcaaacaagaaaactgttactgttcagcctgagggcaaagatcaggctgtgttgttggctacaaccaagacaaagaagcaaaacaagcccgctgcattgctccacatatctgtgatgaagaaggagttcaggaggatggcaaaagctgttgaaaaccaggtggccaaaaattactacaggcctgatctcaagaaggctgcccttgcaag

SEQ ID NO: 8237 - DNA, 403 bp, Glycine max
  unsure at all n locations
  Clone ID: LIB3087-008-Q1-K1-C11
cggaattcccgggtcgactccacgcgtccgcggacgcgtgggcggacgcgtggtcggaaccaccatccaatgagacggcgcgccgtggcgggtgttctccccgaccaaatggagaaagcaaacaccaaaaaccctaattccagactttgctttctcgcttccctctccgtattcttctggttcctcctcctctacttccacttcgccgtcctccgccaccaacccaccaaccctaaccccgtagtccccatcactctccaacctcaacaacctcgtaaaaacctcggcttccccgagaaaatttcccaaccggagaaacccactttccccttcgaccgtgccctccgaaccgncgacaacaagagcgacccatgcggggggcgctacatctacgtccacgacc

SEQ ID NO: 8238 - DNA, 410 bp, Glycine max
  Clone ID: LIB3087-008-Q1-K1-C12
cggaattcccgggtcgactccacgcgtccgcattttcagacacgagaacttcattggagaaaaatggtggccgataattggggatacagtacacgaaggtcttttagttgcataatttgatttgaggatttgaaatcagaaacgtatcatttacttagtgagagatttatttattttatgttaatgaaatcataattcttaaatttggagttgtctgaatttaaaatttgtaatgaattgagaaattgaaatgaaggaaacaactagtagaatggtggtgaaccagtgggcaccggtggtggtaggggagttaacgataattttaaaaaaagttttataataataacaaatttcaatccaaatatattaaaaagttgatatatctatcatattttaagtagataagcaaa

SEQ ID NO: 8239 - DNA, 400 bp, Glycine max
  unsure at all n locations
  Clone ID: LIB3087-008-Q1-K1-C9
cggaattcccgggtcgactccacgcgtccggtccattccctcttggccttcaattagctcagttcctactgttcaagtttcgagaccaacactctcttcaatcagttttctaacaacaaacaaccgttcaagaatagtcttccaaggccggaggacttttccaaggccctatacacctttgatattggacaaaatgatcttgcctttggtcttcaacacacttcacaggaacaagttataaagtcaattcctgaaatcttaaaccagttcttccaagcagtgcagcaactatacaatgtangggcaagagtgttctggattcataacacaggtccaattggatgcttgccctacagttacatttattatgagcccaagaagggtaacatagatgcaaatg

SEQ ID NO: 8240 - DNA, 384 bp, Glycine max
  unsure at all n locations
  Clone ID: LIB3087-008-Q1-K1-E12
cggaattgccgggtcactccacgcgtcggggctttgtctatataaccaccgtttaccctctctatctgttctgttctagagttcatgctaaggaggtagttagttactatgcctatgcctatggctgcttcgacttcaacttcaacttcaacctctctctccgtcgtgggaactggcctcgccttcccgcgccatcctcccgccgtattctcctctgctcgttntcacactcgattgcgcagcaacaaccgtttcttcctatcttcttctcttccaagtgaaagaaggaggcataaggctgtttgtggcggcggattgggattattgcgaatgaacaagtctcgcggcggccacgctttcgtcgttggtgaaccctcgtttttg

SEQ ID NO: 8241 - DNA, 180 bp, Glycine max
  unsure at all n locations
  Clone ID: LIB3087-008-Q1-K1-E5
aaaacccggcgcgacccacgcgtgcggaggctgaccaacaaagcatccttgattacttcaacaaacatgggcctggaatnaagcaggctcagattgcaccttcaactgagccagcagctgcaccagtagcacctgtggtacctagcccctctgctataggactcatagcgacgcgagagg

SEQ ID NO: 8242 - DNA, 407 bp, Glycine max
  Clone ID: LIB3087-008-Q1-K1-E9
cggaattcccgggtcgactccacgcgtccggaatttcttagtcagctctgatatttaacatggcctcatcatctccctgtccctctccctctccaatgttcacagtgcgaaggttgcaacccgagttggtggctcctgccatccccactccccatgaacttaaaccattatccgacatagatgatcaagaaggtcttcgtttccacattcctatgatacaagtttatcgtaaccaaccatcaatggcagagaaagacccagttcaagtgattcggaaagcactggcaaaaacacttgtgttctattacccttttgcgggtaggcttaaggagaggcctgaccacaagttaatggtggattgtactggagagggcgtcttggtcattgaggctgatgcttacgtaaca

SEQ ID NO: 8243 - DNA, 403 bp, Glycine max
  unsure at all n locations
  Clone ID: LIB3087-008-Q1-K1-F10
gggtcgactccacgcgtccgtcgccaaataatccatgagcacatccaaagaaacattccaacggcttatgagatggaggagttctttgcttatgccgagaagcagcaacaaacaatatttatggacaagtacaatttcgacattgtcaatgaagtacctctgcctggacggtacgagtgggtcccagtactccactaggagtgtcatatggtgataatatgggatttcaagagccattagacttgtattttaattttaacaactagaagaagctttgactaaccatttagattgcttgaggctcttgtttaacaagctacaagggaaaggatctgtttagaaatttccaatatccgattagtagtttagtagtgtctttctgatctgtanggtgtaagggggg

SEQ ID NO: 8244 - DNA, 416 bp, Glycine max
  Clone ID: LIB3087-008-Q1-K1-F11
cgttccggaattcccgggtcgactccacgcgtcggcccacgcgtccgacactccccttttaggtttttgtggataagattgagctagaatggttgccaggagaccgggtttgattgctttgtttgatgttgatggaactcttacagctcccaggaaggtggtcacaccggagatgttgacattcatgcaagaactgcggaaggttgtaactgttggagttgttgggggttctgaccttataaagatatcagagcaacttggcagcacagttaccaatgactatgattatgtattttctgagaatggtcttgtggctcacaaggaaggaaagctcattggaactcagagcttgaagtcattccttggtgaaaaaaagctcaaggagtttattaactttacacttcattatattgctg

SEQ ID NO: 8245 - DNA, 399 bp, Glycine max
  unsure at all n locations
  Clone ID: LIB3087-008-Q1-K1-F12
cggaattcccgggtcgactccacgcgtcggcccacgcgtccgcacactacttattctctttctctctctgacggtttgcggtgttctctttcaagttccaagaaatgtcaattataacacgcagaggcatccgttacatgccaagactagatgcagcaaaagtatctgctgctttgctagaaaaaggccaaaatcgtgtcatagatgcttcacttacacttattcgagaaagagcatagcttaagggagaacttgtgcgtgctttgtgaggtgctaaagcaacttcaactcttcttggagttcctttgggacataattcatcgttccctcaagggcctgcatttgcacctncttgcattagggaggccatttggtgtggtagcaccaactcaacaactg

SEQ ID NO: 8246 - DNA, 293 bp, Glycine max
  unsure at all n locations
  Clone ID: LIB3087-008-Q1-K1-F4
gcgagcgtccgacacgtgggtgctattttccaagngctgcgtcttcaaagaaaggagatgggagaatcgaaagacactgaggcttacgaggaagagctcatcgactacgaagaggaagaagaaaaagctcccgattctgctaaacccgttgctgaatctggcaagaagggttatgttggcatccatagttcgggatttcgagacttcctgttgaaaccagagcttcttcgagccattgtggattcaggatttgagcatccttcagaaggtaatcactactagcatattaaaat

SEQ ID NO: 8247 - DNA, 376 bp, Glycine max
  Clone ID: LIB3087-008-Q1-K1-F9
cggaattcccgggtcgactccacgcgtccgcgatcctctgtcctctcgaagctttcatcgttcaacatattctcaccatcggagtcatgggcctgctatcttgttttaggtctaccgtcctgagaaaatgttccaaaggaagctctggcatgtcaagattcctgtatacgaacaattttcaacgaaacttgatttcgtctggtggcaatgaatcgtattatgggtattttaacaggagatcatacacttcactttatatgggaactggaactgtgggtgggattacaagtgctagaatcagggtgccaaatgtatgatgtgaaggattcatgtgctcaagtcatctgtcaatcactcaaagaaattcaagattgat

SEQ ID NO: 8248 - DNA, 417 bp, Glycine max
  unsure at all n locations
  Clone ID: LIB3087-008-Q1-K1-G10
cggaattcccggggaaatagtaaatggtgctacggaagttgaagaaggggcattgaaagaaacaacaccagatggtgaggaggatcaagagaaaggagtgcctgcattttggcttactgccatgaaaaacaatgaagtgttggctgaggagatttcagagcgtgatgaaggtgctcttaagtatctcaaagatatcaagtggagcaggatagaaaacccgaaaggattcaaacttgagtttttctttgacaccaacccttattttatcaattctgtcttgacaaaaacatatcatatgattgatgaggatgaaccaatattggagaaagcaattgggactgaaattcaatggcacccangaaaatgcctgacacagaagattcttaagaaaaagcctaagaagggttcaaagaatgc

SEQ ID NO: 8249 - DNA, 380 bp, Glycine max
  Clone ID: LIB3087-008-Q1-K1-G11
cggaattcccgggtcgactccacgcgtcgggaaggtcttatgtccatttcttctagttctaggctctccagcttgaaaatgggaatatgcctgaacataactgacagaggacttacctatgttggcatgcattgctcaaaattaaaggagctggatctatacaggtctacaggggtagatgatttgggcatttcagcaattgctcggggttgccctggccttgagatgataaatacatcctattgtactagcattactgacagggcactaatcaccttgtcaaaatgttcaaatttgaagaccctggaaattcgaggatgtcttcttgtacatccataggtctggcagctattgcaatgaattgcagacaactaagtcgt

SEQ ID NO: 8250 - DNA, 304 bp, Glycine max
  Clone ID: LIB3087-008-Q1-K1-G5
gaattcccggctcgacccacgcgccgggcgggtgggcgaacaacttctccaatctcttttcttctcgtgcactgtagaaattcagaaggtcatcgtcatcgcgagaaatcttggtcataaaccctaaactagctttagtttctggaacattgataaccaattcaacaattgagaagcgatgcttggcgatggacgcgaaaccccctcaaggtatgaattgttgagcatggtgaagaaacattccaatttaatacggaaaacggtagttgaggagcaagatgcttctgatatcgaaaaggatatg

SEQ ID NO: 8251 - DNA, 431 bp, Glycine max
  unsure at all n locations
  Clone ID: LIB3087-008-Q1-K1-G7
aatacccggccgagccacgcgtccgagggtcgtcgaagacccaccaacgcacgaaagcttggatctttcagaaaatggattcctagtcgaagggtgcataaccgcatggataagctcacactaacccgtcaatttgggatccaattcggttccttaggaggtatcgggaaggaattttggaatgtaataatatcgattcatacagatacagaagaaagggttctctattgattcaaacgctctacctacgagatagggatagagaaagaggaaaaaaccgaggatttcacatagtacttttggtcgaaaaatcgatctgatttttttcgtacttntcgctcaatgatgaaatgggtcagattctacaggaccaaanccttgtgggagttaaggaatgatgggaagaaaagaaataaaaaaaagtaaataaa

SEQ ID NO: 8252 - DNA, 182 bp, Glycine max
  unsure at all n locations
  Clone ID: LIB3087-008-Q1-K1-H1
agcacgcgcacgcacgcatgcacgactatttcaccaacacgagcctatcccccgagacgggtgancccacgaaccaaaaccgcaaccacatactcatcncattcagaaacgcaaccataaccactctaagacatgaacccgcaaatcctgacagacgaaactcagctcctgacagcaacgac

SEQ ID NO: 8253 - DNA, 404 bp, Glycine max
  unsure at all n locations
  Clone ID: LIB3087-008-Q1-K1-H11
cggaattcccgggtcgactccacgcgtccgattcaataccatttaccaaactcatgcatcaattctcatctttcttctcacgaactattaattcatcatgtcgagcacagctggccaagtcatcaaatgcaaagctgcggtttcatgggaggcagggaagccacttgtgattgaagaagtagaggttgcgccaccacaagctggtgaagtgcgtttgaagatcctctacacctctctttgccacactgatgtttacttctgggaagctaagggccaaactccattgtttcctcgtatatttggtcatgaagctggagggattgtggagagcgtangtgagggtgtgactcatctgataccaggggaccattgccctcctgtgtttaccggngaatgtggggact

SEQ ID NO: 8254 - DNA, 221 bp, Glycine max
  Clone ID: LIB3087-009-Q1-K1-A1
tccggaattcccggtcggaccaacgcttccgccaaggcttccgccaacgcttccgaagccttaggaaatttggaattcctgggcctgaatggagcggacggtttgtcctacgaggacgtctttcaagcctttattgccggggcgccactcttagagttttactcaaccaagtccaaaagttttgttccctaccaaggtggtttgcaccgattaaaaagggg

SEQ ID NO: 8255 - DNA, 403 bp, Glycine max
  Clone ID: LIB3087-009-Q1-K1-A10
cggttcggaatgtccgggtcgacccacgcgttcgatctctgtctccactgttgactttctcaaacctctacctcttaacaaatacctaattatggagattatattaaacctgaattgcttcaagcttagctattgttcccttatcccaaaccatcttccaagcaatgttatgtccttagctgcactatcttattctgaacctctaccacccaccatgtctctgcattaccatctacttgtgattatacatcacggagctcaacacattcaacatcaacaacactgctacaacacatgacaccataaccactaattgctgcaccctcatatcttttgcacgcataagcctcatactcaccacttactcagccgcattcaattcacagctcactaacgttgactt

SEQ ID NO: 8256 - DNA, 398 bp, Glycine max
  Clone ID: LIB3087-009-Q1-K1-A11
actcggtttcggaatgttccgggtgcgacccacgcgtatcgcattgatatgggagttataggaccatatgaaattagcacatgcgtcatcaaaactgggcattctggtggtcactcgaagcacaaattactcgctgaaaagagagcacttcaagcacagagttgtgcttgcctcgttgacacagaatataccctctgatagggcttcatatggtagagcttgaagagcgacaaaggggtctgatatatctttgtggaagctatctccaatgtgtcattgagccacaatgtgtcagattatgatatcttggaaactggcaaaaaaggtcatgtgagagagcacaattgagcacactatgaggagaatttatacctgacacaggtgtagagaggggtagc

SEQ ID NO: 8257 - DNA, 312 bp, Glycine max
  Clone ID: LIB3087-009-Q1-K1-A12
cacgcgtccgaacaacgtcaccactgatcacattcagcagtatctggatgagaacatgtccttaattcgggagattgttgaaagccagaattcttgcaagctgagcgagtgtgccgagaaccaagcaaggcttcagagaaatctcatgtacttaactgcaatagctgattctcaaccccaaccacccaccatgtctggtcagtaccctccgagtgggatgatgcagcagggagcacagtacatgcaggctcaacaacaggcacaacagatgacaccacaacaacttatggcagcacgctcatctcttttgta

SEQ ID NO: 8258 - DNA, 358 bp, Glycine max
  Clone ID: LIB3087-009-Q1-K1-A2
ggtccggaattcccgggtcgaccgcacgcgttcgtccacgcgttcgtccacgcgttcgccaatgttcataacgtaacacacaaaagaaaaaacctggtggtctccctttgtttgctcaattgcccctcctattctcagccttttctgtctctcctttctcttgccatgattggaagtaaagatcgtgttgttgactctgaaggtgaaaactccaggagcaagctctcaaggcacaattttgaggccaacaaggagtaccccgatgaaaaaggtggtgaatttctgagagagatcaaaagtgggtggtggtggtggtgatgggggttttcactcacaacccaccaacgttgttgctgct

SEQ ID NO: 8259 - DNA, 308 bp, Glycine max
  Clone ID: LIB3087-009-Q1-K1-A6
gaattcccgggtcgacccactcgtccgttctctctttctatctcctttatcatcaactacccacctcctctgctatctttaatcggtggtctattccataaacgttgtatgtcaagctcatgctaataacagaatcacactccaactcccactcccattcatatactatacatttacactctccgataattgccctcctaactactctattcctgtctactctattatcatgtataatcaccttcacatcatcatctctaataccgttcacctacctctagatactacacactctactctttacacta

SEQ ID NO: 8260 - DNA, 51 bp, Glycine max
  Clone ID: LIB3087-009-Q1-K1-B1
cgtccgcccacgcgtccgatcggccaggaccaaacagcttccgcggcagcg

SEQ ID NO: 8261 - DNA, 343 bp, Glycine max
  Clone ID: LIB3087-009-Q1-K1-B6
gtcaccattagcatcaagttgtttaaacacatactctagtgcttccttgatgtgggtgcaggaatgtaacgcaagaaaggcgaacattttccatcgagaaattctcaacagaggacaaaattgaatttctgccggaattcaacaatcaagcaattaattagcttgcaaattttactacatgcagggaattcagcaatcaagcaattaatggtaaacctcagttagaaccagtggatatcttttcaagaaaaatagaaggcttttggtcaagatgtcagctgtttgctgattggaaggcacaaatggcaagcaaataattccagcatccaatttctcaaataat

SEQ ID NO: 8262 - DNA, 431 bp, Glycine max
  Clone ID: LIB3087-009-Q1-K1-B9
accggtccggaatgcccgggtcgacgcacgcgtccgcattgatatggagttatggaccatagaaattagcacatgctcatcaaaactggcattcggaggtcaccgaagcaaaattactgctgaaagaggcacttcaagcagaggttggcttgcctgttgacaggaatatccctctgataggcttcattggtaggcttgaagagcagaaaggttctgatattcttgtggaagctatcccaatgttcattgaccagaatgttcagattatgattcttggaactggcaaaaaggtcatggagaagcaaatagagcaactagaggaaatttatcctgacaaggttagaagggtagcaaaattcaacggtcccttggctcacaagattattgctggagctgactttatagtgatcccaagtagatttgaaccctgt

SEQ ID NO: 8263 - DNA, 403 bp, Glycine max
  Clone ID: LIB3087-009-Q1-K1-C10
cggtccggacttcccggctggacccacgcgtccggtgtttttcttttggtcctggttctgagaccgcggtgtcccctaacccattggtcagagggttatctgctcgcggtgtgtggtgtgtggctgctgctgtcacaagagaattttgcacatgacattttgatgagaagacaaatagatggaaaaatgtgctatgatcaattggtgcgctcttgattcattatcaggagatgcacatgcagcacgtcatgctattgttaaggaacctgttgccgatattttgggagcgcattattatgggttcttcaatgcaaaagtgaggctttgttaagcatggcatcagatgtggcagtaaagaagttgcaacaccctgtgctatggctttaaatttgtaatctcaaat

SEQ ID NO: 8264 - DNA, 438 bp, Glycine max
  unsure at all n locations
  Clone ID: LIB3087-009-Q1-K1-C2
tcggtccggaattcccgggtcgaccgcacgcgtccgcccacgcgtccgcttcttttcgcctcacaccatgaaaccccttctccgcttcggaatcgccgttggcctcctcctccattccgccctcgcttctcatatcccctaccccaaagcaatttccgatttgaaggatacaattgtgaagggatttggggttcacggcggaagatgatgttacgattacggggttcgatcctcgagacgccgaggtagggcattccgtggagtaccaattcgacctcgaaatcgatcacaaggttattcccttcaagctcctcgaagacgtcaaacactgggattacgtcgatcttcccattttccgggccgaggcccaatccggtttggtccctaaacgggcttcngctgacgggcttcccgttttggctccccttcgtctcgctg

SEQ ID NO: 8265 - DNA, 383 bp, Glycine max
  Clone ID: LIB3087-009-Q1-K1-C4
cggtccggattctttggtcgaccgacgcgtccgcacgtttctgtttcagttattctcttcgttcgcgacgccattttgtttctcagaatcgacgcccgacgcatctcataacttttgacaaaggatggcttcaagattctggacccagggtggaagtgattccgaggaggaggagagtgattatgatgaggaggttgataccacggtgggtgaatctggtagtcaagcagtgacaagcaggtacctgcaggataatgcaagtgacagtgatgactctgatggccaaaagcgcattgtgaggtcagcaaaggataaacgtttcgaggagatggcttccactgtcgaccagatgaagaatgccttgaagatcaatgactgggtga

SEQ ID NO: 8266 - DNA, 171 bp, Glycine max
  Clone ID: LIB3087-009-Q1-K1-C6
ctttttcccgggtcgaccgacgcgtccggccacgcgttcgcccacgcctccgaatcactgagtctagcatctactaatctcaatcggggagcatcattcatgactgcttacactatcaatgtcgataaatgctctaactctccaactgcgcacgctctgtcgctgtgtgag

SEQ ID NO: 8267 - DNA, 462 bp, Glycine max
  unsure at all n locations
  Clone ID: LIB3087-009-Q1-K1-D1
ggtccggaattcccgggtcgaccgacgcgtacgctctgtctctctctcagaattttctcctctctccgattccttttattaattggagttttcgcgctcctttttctttccctgaaaacatttcatcttcgtattgatgtcggaaaagggtcggccacttcccaaatttggtgaatgggatgtcaatgatccagcctcagctgaggggttcacagtgatttttaataaggccagggatgagaaaaagacaggtggcaacccagagtcaccaggaaagactgctactgatcctcatagcaaacctgcagtagagcctggcaaaactcagactaaaaaatggttttgctgcatgcaaaacccttctgccgaatcatagcatagcaatggttgctcctgtgaaaagcctgaacagaagaacaatgnttatgtgtaactagcgtcacagtattttctcaaaagata

SEQ ID NO: 8268 - DNA, 345 bp, Glycine max
  Clone ID: LIB3087-009-Q1-K1-D11
accggatcggaatgcccggctggacccacgcgtccggtagcctgtcattactcaaacattatgggttccaaacactcacatcgattgggaccttggttctttcttacacgctgcacattcgaaaccactgaattgtaacctttaactttctccaaaatggcttgcatataattgacattaatacacaccatttatcaacaaaaaatgaaaattgcattgaccctaataaacaattaatggcctttacaatatgcacttacatagaactcataacactcgcatattcaccaattctactaactgaccaatctgaactgctttttcgtattcatgcataacttcata

SEQ ID NO: 8269 - DNA, 312 bp, Glycine max
  Clone ID: LIB3087-009-Q1-K1-D9
acccacgcgaccgcaagcatccctctacattagcattatggtttgtgcttatagataaaagttgtgactcatgaacatttttactcagatcatagtctgtatcactgtgttaaacaatggctaatttctttgctgctatgatcttcacactcatttccattaccatgcttcaaacaatggttatggcttctaatgagcaatgaggccacttgtatgacaacaataacatatatgatagtgagattttcaacatataccattgcccatcacaatgctcgaagagatttaaccagacccaataccacaatccct

SEQ ID NO: 8270 - DNA, 281 bp, Glycine max
  Clone ID: LIB3087-009-Q1-K1-E11
tcccggctggacccactcgtccgtcagaacttcccaacacccatttttcctaccccagacctactcatcacttatgccattagacttacttttcattaccttagatttcatctcgccattaccattcacattcactcacatgaaccaatcttcatcaatacacctctcattgccgaataactgattaaatatcatcctaccattttaatcaaggtccatacgtccaaagccttctctaactcaacatcaaatccagattatcccataactactgccgaact

SEQ ID NO: 8271 - DNA, 423 bp, Glycine max
  Clone ID: LIB3087-009-Q1-K1-E2
ggtccggaattcccgggtcgaccgacgcgtccgcccacgcgtccgaaaaaaagaaaaaaggagaagcatactcagcgcggcggtggaagatgggggggactgcgatcgaggaagtgcgaaccctctggattggcgatttacagtactgggtggacgagtcctatctctctcagtgcttcgcccacaacggcgaagtggtttccattaaaatcatccgcaacaagctaacgggccagcccgagggctacggcttcgtcgagttcgtctcgcacgcctcggccgaagcctttctccgaacctacaatggagcccaaatgcccggcacggagcagaccttcaggctcaattgggcctcgttcggggactccgggcccgaccactccatcttcgtcggcgatctcgcccccgacgtcaccgattttc

SEQ ID NO: 8272 - DNA, 306 bp, Glycine max
  Clone ID: LIB3087-009-Q1-K1-E5
attcccgggtcgaccgcacgcgttcgagacactcaccgaggagtccttacaccggacttctgggacgaactctcgtggccccttggggtgaaccacggacgcatgggaaccgtctgaagcacatatcgagacggctgatcatactactgacgacagttcaagtggtggcactcaagcctgagtacagtacgtacgcgaagcttaatgcggtagctgttgaaacggcgaagatcctggttaatgaactgaaaagcactcacattacagtgacttgtattgcaccaggacctattgatactgatatga

SEQ ID NO: 8273 - DNA, 416 bp, Glycine max
  Clone ID: LIB3087-009-Q1-K1-E6
cggtccggaattcccgggtcgaccgcactcgttcgctccgcactccgtcttcatcaatcagcatcaccaccgctccaacacaggggaaaatgagggggatccttcacgttcagggagggcaatgcgggaaccagatcggttcgaagttctgggaagtggtgtgcgacgagcacggcatagatccgacggggaagtacgtcggaaactcagatctacaactcgagcgcgtgaacgtgtactacaacgaagcttcctgcgggcggtttgtcccacgcgcagtgctgatggacctggagcccggaaccatggacagcgtgcggactgggccgtacgggcagatattccggcccgacaacttcgtgttcgggcagtccggcgcgggcaacaactgggccaaggtgcactacacggagggc

SEQ ID NO: 8274 - DNA, 377 bp, Glycine max
  Clone ID: LIB3087-009-Q1-K1-F4
gtccggaattcccgggtcgaccgcacgcgtccgttccgcaaagaagaacgtggcctctctgctaaaccccttatcgtctccaaaaatggcttctggtggcataggcgtttccggcagttaccaaacaccccctctcgaactataccagaggccaagcactgcttccacttcctccgttaggttgcaatctttagactccaagtctcacttcaacaacctcctccgagcccaccgccactccactggcccgggcctcaagcctacaccatctttcgtcccctccgccgtctccacccccaactcctccctcctcagcgaagaagccttcaaaggacttgcccgcgaattcgaccaaaacgacgaccaattcacccgcg

SEQ ID NO: 8275 - DNA, 448 bp, Glycine max
  Clone ID: LIB3087-009-Q1-K1-F5
ccggtccggaattcccgggtcgaccgcactcgtccgcccactcgtacgatgaatttcatggatcacgccaggtcaagatcggaatcaacggtaagtgttctccatccttcgatcggtgttctgtcgtttcagatcatcttagttattttttctactattccattttctctgctctttactatctcaattctatctaaatctacatttaacacgatccgtaagaattggcctgttggttgccaaagtcgctcttcaaagagactatgtgtagctcgatgccgttaacgaccctttcattaccaccgattacatgacatacatgtttaaatacgacagtgatcacggacactggaagcatcacgatgtcaccgtttatgactagaagacccttctattcggtgacaaacccgtcactgactatggacacaagaaccctgcagagatccca

SEQ ID NO: 8276 - DNA, 446 bp, Glycine max
  Clone ID: LIB3087-009-Q1-K1-G6
tccggaattcccgggtcgacccactcgtccggtcgctgtgttttgcgaccctagtgagtattctattgagtgtatagtgaaggtgtctggcatgtccaccaattcatggaggaagattcaccatttccctcatggtttctcaccctttcaaaactcatgaaaatttgtgagcggcactctcaattgcgctgctcatcattctattggttcaagttccttgtgggttatcgtttccttggatcttcataaggaaacatatagggaagttctgccacctgattatgaaaaggaagactgttccacccctggtttgggtgttctacaaggatgtctttgcatgaattatgattaccagaaaactcattttgctgcgtggatgatgaaggattatggagcgagagagtcttgggtgaaattggtcagcattccttatgtgcctaatcctg

SEQ ID NO: 8277 - DNA, 244 bp, Glycine max
  Clone ID: LIB3087-009-Q1-K1-H11
acccacgcgtccgatctctctttcttttatggaatttatcaatctagatccacttaacaataaggggcctaagtggcgattattgaacctctggggcttcaattttaagactgtttgccttctgccaaaccatactacaagcagactactcaccggagctgcgctacccttccatatatttcttacacctactcttgcacttcttatgcacatactgcttcttcaaactttcaaataccacact

SEQ ID NO: 8278 - DNA, 376 bp, Glycine max
  Clone ID: LIB3087-009-Q1-K1-H12
attcccgggtggacgcacgcgtacgcgggcgcgtgggcggacgcgtgggcggactcttggggctccgtaccagtttcactgcatgaattttatagaaaactgtgcggacatgttggtttatcaggacctccttacaggtgatgagcttctctcggactccttccgttacaatgaaattgagaatggaatgctgtgggaagttgaggggaagtgggttgttaagggagcagttgatgttgacattggtgcaaacccttctgcttacggtggaaaagatgagggagtcgattacgcagcttgtaatgttgttgacattgttgatacattcaaacgttcagaaccaccccgcttttgataaaaaacagtttgttacctt

SEQ ID NO: 8279 - DNA, 301 bp, Glycine max
  Clone ID: LIB3087-009-Q1-K1-H3
gtccggatattcccgggtcgaccgcacgcgttcgaccacgcgtgctgcacagagccctctattgaggtcacacatctagactgcaatcactactgatgtgccacatcatacatgagcgggtcagaacctatctatacagtcttacctggtgtccagacttatccccaactttaactctatcaattatactacatccagttcatacgtcaatggcagaatgcactcgcctgggttcgctgttgtgtcacccgtatcttcagctactagccatgctccagcagatatccgatgtacatgattt

SEQ ID NO: 8280 - DNA, 177 bp, Glycine max
  Clone ID: LIB3087-010-Q1-K1-A1
gggtcgaacccacgcgtccgctctcactctcttttcaaactcatgttaccattcatcaaacaccttctcaaaagggccaaagtgggaaagctaacaaagctcaagtcagccatcaggagattgccctcattgaccaagctcagccgcaacagcagcagtgtctcttccaacaaaagg

SEQ ID NO: 8281 - DNA, 257 bp, Glycine max
  Clone ID: LIB3087-010-Q1-K1-A2
ccgaattccccggtcgactcacgcgtccgcccacgcgtccgtccacgcgtccctccacgcgtccgcaaattagttcattctgtttgcgcagttccctacctctcctttcaagatgcagatcttcgtcaagaccctcaccggaaagaccatcacccttgaggtggaaagctctgacaccatcgacaacgtcaaggccaagatccaggacaaggaaggaattcccccggatcagcaacgtctcatcttcgccggaaagc

SEQ ID NO: 8282 - DNA, 206 bp, Glycine max
  Clone ID: LIB3087-010-Q1-K1-A3
ccggaattccccgggtaactcacgcgtcgggtgaacgacgcgcacagataacataagcacagaatcgaaagaagacaacttgtttgagagagattgggatggcttcgacgaagaagatcacactgaagagttcggacggcgaggccttcgaggtggaggaggcggtggcggtggagtcccagacgatcaagcacatgatcgaggac

SEQ ID NO: 8283 - DNA, 268 bp, Glycine max
  Clone ID: LIB3087-010-Q1-K1-A6
cggaattcccgggtcgactcacgcggtcggggtcactaacactactgtaaaggcttcatcagtccctatcaggcagcctcacggtctcctctatcgctctcttcctaatcgcatctcaactcgtcgtcgtcggtgattcattctgcctaatcataaccctaatcgcatcttaaatcgaactcaatcagagacaaaacagagtcgatgattctgttacaaaacatagcacggtggacaaacgttaaacaacgctacagatcttcgattc

SEQ ID NO: 8284 - DNA, 138 bp, Glycine max
  Clone ID: LIB3087-010-Q1-K1-A8
acgcgtcgggccacgcgtccgtgcagattgagtttgctaagtacaagagcatctcttctcggtttgtagtattgcttaaggagcacggattcacgggctctttccgtggctggatgcctaccttgctagcttacagtg

SEQ ID NO: 8285 - DNA, 335 bp, Glycine max
  Clone ID: LIB3087-010-Q1-K1-B3
ggaattcccgggttcgacccaggcttcggaaagagattgtttgtgtgtgagttagtatggctggaaaaggcgagggtcctgctatcggaatcgatttgggaacgacgtactcttgcgtcggcgtgtggcaacacgatcgtgttgaaatcatagccaacgatcagggtaacagaactaccccatcctacgtggctttcaccgacacagaacggttgatcggcgatgcggcgaagaaccaggtcgctatgaacccaaccaacaccgtttttgatgctaagcgtttgattggaaggcgtttttccgatgcatcagtacaaggggacatgaaattgggg

SEQ ID NO: 8286 - DNA, 244 bp, Glycine max
  Clone ID: LIB3087-010-Q1-K1-B5
acccacgcgtccgggaggatcgaacacgagcctaattgtgtgtcagagcctctcaggatgcttcggggtattccctatcgctgtctacctaagcgcatatcaacttgccgtacgaagggaatcattctgcatagtcataaccctaatcgcatcacaaatcgagctcaatcagagacagatcaaaggtgatgagcctgctacagaacatagcacggtggacagacgtctaacgacggctcagatc

SEQ ID NO: 8287 - DNA, 332 bp, Glycine max
  Clone ID: LIB3087-010-Q1-K1-B7
accgtccgaattcccaggtcgacccaagccgtcgggaagaatcactcccttatccatgtccacaccacaccatggcctcaaccaacgctctctcttcagcctccattctacgctctcccaaccgccagtctctgacccgaagagcgaaccataatggaagagtaaattaccggaaaccgaataaccgtttctccgtgaaagcctccgccaaagagattgcctttgaccagcattcccgctctgctatgcaggccggcattgacaagctcgccgacgctgttgggctcactcttgggcccagaaggaggaatgttgtgttggatgagtttgga

SEQ ID NO: 8288 - DNA, 366 bp, Glycine max
  Clone ID: LIB3087-010-Q1-K1-B8
cggaattcccgggtcgactcacgcgtccggggacttactggagttatgggctttattcggccccggcgtcgccggcgctcgcttcggcgccggatggtggatctggcttgacgcggtcgtctgcagcttggtcaccgttcccttccttcactaccttcccggaattttcgcatcttttgcggctttgatgttcaattgcgttagaaaagaagacatcgattattctccatatgacgaaggcgagtggagactgaagctgtggctcttcattgcatatgtagcatcctgtgtttctttagctggatcagctggcctactgatccaagattcacttgataaatctgacccttcagtttggactggagt

SEQ ID NO: 8289 - DNA, 329 bp, Glycine max
  unsure at all n locations
  Clone ID: LIB3087-010-Q1-K1-C1
cggaattncccgggtcgactccacgcgtccggaagacgtacgcccacgcgtccgtgcgagttgtgtaattttgtttgttcatgggtgtgttgttcactgttctttcccagacccacctcaaagttgaaagcagccatgggttttttcttgaaatgggtcaactggttggccttttttaatttcctggctgcaacaccaatcttttaagattcctcctccagttcaaatgcaatggccaccaccaagttcctggattaagccaaggatcctcgggttttggatggaatggttggaatcaggaggaagattcatgagaatccagaactggg

SEQ ID NO: 8290 - DNA, 305 bp, Glycine max
  Clone ID: LIB3087-010-Q1-K1-C2
gccacgcgtccgcccacgcgtccgtacgagctgaccccaaacaaagactctcagcagttgaagttcttaatcatccttggatgagagaagatggagcatctgataaacctctagatgttgctgttttatccagaatgaaacaatttagggcaatgaacaagctaaagaaagttgctctgaaggttattgctgaaaacctttctgaagaagaaatcattggtttgaaggaaatgtttaaatccatggacacagattacagtggaacaatcacttttgaagagttgaaagctggtcttgccaaaact

SEQ ID NO: 8291 - DNA, 382 bp, Glycine max
  Clone ID: LIB3087-010-Q1-K1-C3
gtcggtaccgttccggaattcccgggtcgactcagccttcggccacgcgtccgcccacgcgtccgtatcagcagtcgttacagagactccatagcccgaaaatgcctttcaagaggtacgttgagattggaagggttgctcagatcaactatggcaaagagtatgggaggctcgtggttattgtcgatgtcattgaccagaatagggctcttgttgatgctcctgacatggtgaggtcccaagtgaacttcaagaggctatcactcactgacatcaagatcgatattaagaggatccccaagaagaaggatctcattcaagccatggaggctgctgatgttaagaacagatgggagaagagttcttggggcagaaaaactga

SEQ ID NO: 8292 - DNA, 382 bp, Glycine max
  unsure at all n locations
  Clone ID: LIB3087-010-Q1-K1-C4
ccgttccggaattcccgggtcgatcacgcgtccggttctttctctctcaaaggaaagataaggaaagaaaagaaaagaaaaagaagagagtgtaggtaaacagaagcacacactacacagttaccaaaatcaggttcaaacgcacagatctgggagaagagaagaagaagaagaagaagatgggacaggatcagaaccagagatcgctgatctacgcgttcgtgtctcgcggcacggtgattctcgccgagtacactgaattcagtggcaacttcaacacaatcgcgttccagtgcctccagaagctccctgcctncaacaacaagttcacctacaactgtgacggccacaccttcaactacctcgtcgacaacggattcac

SEQ ID NO: 8293 - DNA, 388 bp, Glycine max
  Clone ID: LIB3087-010-Q1-K1-C5
cggaattcccgggtcgacccacgcctccggcccacgcgtccgataacaagctattattagttcgattttgtagtaagtgaggtgccaatatggtgaagatagctcttggtactttggatgactcttttagcgctgcctctcttaaggcttatttcgcagagttccacgcaactctgattttcgtgttcgctggtgttggatcagccatcgcttacaacgagcttacaaaagatgcagccttggatccaacggggctggtggcagtagctgtggcacatgcatttgcactgtttgtaggtgtctccgtcgtcgacaacatctcaggtggccatttgaacccagctgtcacttttggattggccattggaggcaacatcactctcatcac

SEQ ID NO: 8294 - DNA, 372 bp, Glycine max
  unsure at all n locations
  Clone ID: LIB3087-010-Q1-K1-C6
cggaattcccgggtcgacttacgcgtcgggaaatgcattcaaagataccgagattatggatttaaacacaaaagcaattaatacaagactaagcgatttgaagattgaggggatgcaggaactggaagcagtgacaagtgagattgttaggttgattgaaacagcaacagtgcctattttggcagttgatttttatgttccacccattgaccagcaaaaatatctcaagtcccaaatatcatcttgggagaagttctcaaggtagtgtccttgatatattgcccaatacaactaaggagacactactagatcattgggtgtgcagtcaggaattgctgangcacttttggtcttcatatccaattacaacac

SEQ ID NO: 8295 - DNA, 383 bp, Glycine max
  Clone ID: LIB3087-010-Q1-K1-C7
ccgttccggaattcccaggtcgacccacgcgttcggccaacgcgtgggttagatttggtttgcctacaatgtgaaggcacaagcatttaagactgccattgaagccgcttgtatgcttctgaggattgatgatatagtgagtgggatcaagaagaagcaagcccctggagctgctccttcaaaacccaaggttgagaccgaggcagatgctgacagtgagcaaatccttcctgactgagaatctcggttcaacagacattgttttttggtagagttgatgatgtgcaaggttctttatcttccttaaatcttatcactattcttaggagttttgagtcctttattgggatgctgttttttgtgccttctctactgtttgcaag

SEQ ID NO: 8296 - DNA, 286 bp, Glycine max
  Clone ID: LIB3087-010-Q1-K1-C8
accgttccggaattcccgggtcgatcatcgctgaagcgttcagagggcacccggcaacacctaaaccaccaccgcctctcctacctgcgggagccatggccgccaccgactcctccgctgcttcgtcacgccagctttcgcagagggagacggacatccagatgatgctcgccagcgacgttcacctcggcaccaaaaactgcgactttcagatggaacgctacgtcttcaagcgccgcaccgatggtatttacataattaaccttggaaagacatgggagaagct

SEQ ID NO: 8297 - DNA, 388 bp, Glycine max
  Clone ID: LIB3087-010-Q1-K1-D3
cggaattcccgggtcgcccacgcgtccgatcgcaatggccatggctcttccttttcgcagactctcctccaccctcaacagacctctcgccagcgctacttccatttatcatcgcatgtcctcctcgctctccgctcaggagaaagacaaatctcgcgccgattggataaagcagctcaacgatcctctcgagaccatcgatcccgagatcgctgacataatcgaactcgaaaaagcgcgtcaatggaaggggttcgaacttataccttcggagaatttcacgtcgctgtcggtgatgcaagccgttggatcggtgatgacgaataaatacagcgaaggatatcccggtgctagatactatggaggaaatgagtatattgacatggct

SEQ ID NO: 8298 - DNA, 340 bp, Glycine max
  unsure at all n locations
  Clone ID: LIB3087-010-Q1-K1-D4
cggaattcccgggtcgacttacgcgtccgggtgagtgaaaatggcggtacccttgctctccaagaggatcgtgaagaagcgcgtcaagaagtttatacgcccccagagtgatcgcaagatctccgtcaagccaagctggcgcagacccaagggtattgattctcgtgtcaggagaaagttcaaaggatgcactttgatgcccaacattggttatggctcagacangaaaacccgccattatctaccaaatggtttcaagaaatttgtcgtgcacaatgtgaaagacctggaacttctcatgatgcataacaggacatactgtgctgagattgctcacaat

SEQ ID NO: 8299 - DNA, 342 bp, Glycine max
  Clone ID: LIB3087-010-Q1-K1-D5
cggaattccccgggtcgactccacgcgtccgtctgaattagggtttcttttccctttttggcaatgatgaacggaggaggaggacgactaatcgtgctgataactggagtcggaaaaggactcggaagagccctggctcttgaactcgcccatcgtggtcacactataattggctgctaccgatctcaagataacctcaattccctacaatcccaactctatctgtcttcttccaaccatttgttactcaacgccgacgtgagctccaatgagaacgttcaagaaatgtgccgcgatgtcatggacaatagatctgatgctgatatcatactgaacaatgca

SEQ ID NO: 8300 - DNA, 361 bp, Glycine max
  Clone ID: LIB3087-010-Q1-K1-D7
cgcgtcgggccacgcgtccggttttttcctcttgctgctctttgccttctctgacacatgtggtgccttgtagagcgtgttttggcaggaaggtggtatggcgaaggacgttgaggttgctgagcgtggctccttctctgggaaggactaccaggaccctccaccagcaccactcattgatgctgaggagctcacaaagtggtccttttacagggctctcattgctgaattcattgccactttgctcttcctctacattactgtgctcacagtcatagggtacaatcaccagactgacctcaaggaaaatggtgaaatctgtggtggggttggcattcttggcattgcatgggcctttggt

SEQ ID NO: 8301 - DNA, 245 bp, Glycine max
  Clone ID: LIB3087-010-Q1-K1-E10
cccgcgcgtacgtgcctccctctcttttttcttccatagatcactccactctccggaacgcatcatcgtattgcattggatggccctcctaccactcgcaccgccaacgccaaacaaaccctaaatctctctcgtcgtcttctgcttcgtcctccgtcaaccatgagagagatcctgcacgttcagggaggccaatgcggctaccaaatcggatccaagttctgggaggtgatatgcgacgagca

SEQ ID NO: 8302 - DNA, 196 bp, Glycine max
  Clone ID: LIB3087-010-Q1-K1-E2
cggaattcccgggtcgactcacgcgtccggggacgcgtgggttttagttgaactggaaaaacagttacttgacaatgatggctctatgtcgaaagatacaattacggagggagatgagaaacatgaaccatccagtgacaatgcagtcagtaatccacacccttcaaagggagaaaggcatgaaccagaaccagga

SEQ ID NO: 8303 - DNA, 331 bp, Glycine max
  Clone ID: LIB3087-010-Q1-K1-E3
gtcgactcacgcgtccggcctggtggatactggattttgtatggccccccaattaattggaaaacataggaccaaacatggaagcgatccaaggaagatctgaaggcagaacaaacaaaacttgaggagttagctgaaagtctttgttgggaaaagaagtatgaaaagggtgatattgctatttggagaaagaaaataaatgctaaatcctgcaaaagaaagtctcccaatgtttgtggtttagataatgctgatgatgtgtggtaccaaaaaatggaggtctgtaaaacccctttacctgaggtaaccagcaaaaatgaagttgccggag

SEQ ID NO: 8304 - DNA, 287 bp, Glycine max
  Clone ID: LIB3087-010-Q1-K1-E4
cggaattcccgggtcgactccacgcgtcggctactgctctgcttcaaccttgcggaagaagaagacgccgcagccatggggaagtactccagagaacccgacaatcccaccaagtcctgcaaggccagaggcgctgaccttagagtgcatttcaagaacactagggagactgcctttgccatcaggaagttgcccctggttaaagctaaaagatacctgaaggatgttttggcccacaaacaggccttccttttccgacgcttctgtggtggtgttgggaggacagc

SEQ ID NO: 8305 - DNA, 301 bp, Glycine max
  unsure at all n locations
  Clone ID: LIB3087-010-Q1-K1-E5
ccgttccggaattcccgggtcgacttaaggcgtcggcgctgttcctacaatcattccatttgtgcccttccggtcgcaccctcctccgttcctccgtctccgatttccgaccggcattcgacgtcctcgatgccgaccgcgacggcaaaatcagccgcgacgacctccgcgccttctacgccggagtcggcggcggaggagatgacgtgatcggngcaatgatgacagtggctgacacgcaataggacgggttcgtggagtacgaggagttcgagcgcgtggtctcnngcgagagaaagcc

SEQ ID NO: 8306 - DNA, 361 bp, Glycine max
  Clone ID: LIB3087-010-Q1-K1-E7
cgcgtccggtgacacctgatccgcgagcgagttattgtgaagatgacgacgattcgcagggtttgctgcaacgatcttcttcgctttgccgccgtcaatctcgaccatctcaccgaaacattcaacatgtccttctacatgacctatcttgcaagatggcctgactatttccacgttgccgaaggccctggaaatcgaatcatgggttacattatgggtaaagttgaggggcaaggagaatcttggcatggccatgtaactgcggtgaccgttgctccagagtatcgaaggcagcagttagccaaaaaacttatgaatctgctggaagacatcagtgacaatattgataaggctttttttg

SEQ ID NO: 8307 - DNA, 268 bp, Glycine max
  Clone ID: LIB3087-010-Q1-K1-E8
cggaattcccgggtcgacccacgcctccggctactcactctataatgaaatgtacatcgcctccaacttcaaggcattgggggtcacctcctttcgccaacgccacttttccttcttttccccttacacttccaccaccacaagggtatcgttttctagttctagttgcgggaaaaatttgcaaatggaagaagtgaaggttgcttcagacttgttggtgggtgaccctgcttcactggagaagaaaattgatgcaattcgtttgggt

SEQ ID NO: 8308 - DNA, 383 bp, Glycine max
  Clone ID: LIB3087-010-Q1-K1-F1
ccgttccggaattcccgggtcacccacgcgtccgctctgttgttgctgctcatcctcctgaacctccgagctctgcaccgaacagcgaagccttggggaagacacatggaatgggatctgctcgcaagctcaagtcccaccgcaggaggcaaaggtgggctgacaagtcatacaagaaatcacatcttggaaatgaatggaagaaaccttttgctggttcatcccatgccaaggaaattgtccttgaaaagataggtattgaggctaagcagcccaactctgccattcgtaagtgtgccagggttcaacttatcaagaatgggaagaagattgccgcttttggtccctaatgacggttgcttgaactacattgaagagaatga

SEQ ID NO: 8309 - DNA, 382 bp, Glycine max
  Clone ID: LIB3087-010-Q1-K1-F2
ggattcccgggtcgatcacgcgtcggctacgcgtccgatttcaagtggataaggagatggttcgaatgggagacatgtttggttacaaccataaatcacatgttagcaaatgttagaattcagaaacagggtcgtgatagttggtggtggcttgatgacaacactggaatatactcagtaaaatatgggtatagggtcttgcataatttacttatgggaagtcaaccaacagaggcgttttcaatgatttggaaaattgaaggtcccgaagaaagttatatgccttgtgtggagagaagtatcttggattgattgccaactaaggacaatctaaggaataggaacattatggatgcttcacaggatgtgttttgcgcttttt

SEQ ID NO: 8310 - DNA, 358 bp, Glycine max
  Clone ID: LIB3087-010-Q1-K1-F5
ttcccgggtcgacttaggcgtcggcccacgcgtccgcggacgcgtgggtacacataaacacactccaagcgctcgggagcaacctacgctgtcttcgccaccgcgcgatcgccgtcgatggagtctctcttcgactcgatcaacgtgcgcgaccttctttcggcgcacgatctctcggaccctaactcccctctctcggcgccggatctccgtctcctgatccagcgcctggagtcgcactccctgcaaatccgctctcaggtgcagtcctacctcgtctcgcaccgcgaggatttcgcgcgcctcttttccctctgcaacgacgctggttcgcagacgcgcgaggtctccgacgacg

SEQ ID NO: 8311 - DNA, 344 bp, Glycine max
  unsure at all n locations
  Clone ID: LIB3087-010-Q1-K1-F8
attccccggtcgacccacgcgnncggccaattcgtccgcccacgcgtnctgaaagatcttatccaattgaaatttagaaatgactgggataaacttaagaattcaattattgaaattgaataagtaaacaatttaattggattggtcgaatggtatcaaaaaaatggagtactaactcccatttctcattcatcattgaattaaccgatcaacttgctttgttatcgaacattcctatttgatttcaaaaattttccggaaaaaattcgaatctattattatatgccaatcaatcctactacttctggtcctgaaggttctgcgcttggaaaaaaaaatctggg

SEQ ID NO: 8312 - DNA, 368 bp, Glycine max
  Clone ID: LIB3087-010-Q1-K1-G1
cggaattcccgggtcgacctacgcgtccggggaaagcttctcatgctgcaatgtatggtctgagtttggctgagaagagtggtgaggctgttgaagaaagtaataaaggaattgaaaatggttcaaagagagaaacttttgctgatttgattgaagaaaagggtcgtgagagcagtttcagctctgagtttctgtcatctgagaccactcatggcgagcatagtaggagtagcactgaggactcatcttcatctccttctgtggggtggcccgttcaggaaattgctgcatctgattgtgctagtcctcatggaggtgaagatggtgagaagaaccacttggttttggagaataaggagtttgagaaa

SEQ ID NO: 8313 - DNA, 276 bp, Glycine max
  unsure at all n locations
  Clone ID: LIB3087-010-Q1-K1-G2
cgcgtccgtcgacatattctcattttcaattcngtaattgcatgngcttgtctgacaacagcgcntgatttgaggaataaagtggtctactaattgaaaatggtgcaaagagagaaacttttgctgatctgattgaacaaaagggacgtgagagcagtttcagctccgagtatctgccatctgagaccactcatggcgagcatactaggagtagcactgacgactcatcttcatctccatctgtggggtgcccggttcaggaaattgctgcatctg

SEQ ID NO: 8314 - DNA, 330 bp, Glycine max
  unsure at all n locations
  Clone ID: LIB3087-010-Q1-K1-G4
gtaccggtccgattcccgggtgacccacgcgtccgcaaaaaccctaggtagagagctcttcttccctttctcacagcaatggccgcgcggagcacgccctctcgtcaccgtgcaggccctcgacggtgacatggcaaccgatgcctncgncaccgttcccatccctgacgtcatgaaggcctctatccgccccgacatcgtcaatttcgtacactcgaacatctncaagaacagccgccagccatacgccgtcagtcgtcgcgctggtcaccagacctncgncgaatcctggggtaccggccgagccgtctnccgtatcccccgtgttcc

SEQ ID NO: 8315 - DNA, 378 bp, Glycine max
  Clone ID: LIB3087-010-Q1-K1-G5
ccggattcccgggtcgccttacgcgtccgccaagatatcgttgctctatctggtggtcacactattggagctgcacacaaggagcgttctggatttgagggtccctggacctctaatcctcttattttcgacaactcatacttcacggagttgttgagtggcgagaaggaaggtctccttcagctaccttctgacaaggctcttttgtctgaccctgtattccgtcctctcgttgataaatatgcagcggacgaagatgccttctttgctgattacgctgaggctcaccaaaagctttccgagcttgggtttgctgatgcctaagcaacgtttaggggattgttgaaaaggcatggtgcccataatatttctctaaaa

SEQ ID NO: 8316 - DNA, 342 bp, Glycine max
  unsure at all n locations
  Clone ID: LIB3087-010-Q1-K1-G6
ccggaattcccggnnnnnttgnnnnnnngggcgcatattctcatttcaatttgctgttgcatttgcgtttcatttggcgtggggtttctttctggaagcttcgttcgggcatcaatggcgtccttcgatgaagctcctcccggaaactccaagaacggcgagaagatcttcaaaaccaagtgcgctcagtgccacaccgtcgacaaaggtgccggccacaaacaaggacccaatctgaatggtttgtttggaagacaatctggtacaactcctggatattcctattctactgctaacananacatggncgtgatttgggaggaaaagaccctctatgattac

SEQ ID NO: 8317 - DNA, 428 bp, Glycine max
  Clone ID: LIB3087-010-Q1-K1-H12
ccggctcgagccacgcgtccgcctgaacctaacccaatcttcaccttcgatataacaaatcccattcctgcatctcctcgttcagcatcgctgcaaactggactttccatttttgtccttcctccccgagaaaaaaatggcgaacgcagcatctggtatggccgtccatgatgactgcaagctaaagtttttggagctcaaggcgaagaggacgtaccggtttatcggttttaagattgaggagaagcagaagcaagttattgtggagaagctgggtgagcctgcaaatggttatgatgatttcgctgccagtcttcctgccgacgagtgtcgatatgctgtttatgatcttgattttgtcactgaagagaattgccaaatgagcagaattttctgcattgcttggtcccctgatacatctagggtta

SEQ ID NO: 8318 - DNA, 109 bp, Glycine max
  Clone ID: LIB3087-010-Q1-K1-H5
accgttccggaattccccggtcgactcaacccgtccgggacgctaaaggaagcacacgcaattgcaagagcaagaacgaaagccgcagagaagaattgaaggagaaaag

SEQ ID NO: 8319 - DNA, 348 bp, Glycine max
  Clone ID: LIB3087-010-Q1-K1-H7
cggaattcccgggtcgactccacgcgtcgggattttctggcaggaaaaccaggtggctgagatcaagcaattgaggaagaggatgactttcaaagccactcgaatgccaagtttctacaaggaacctcctccaaaagttgaattgaagaagatacctataacgcgcccaaaatctccaaagcttggaaggcacaaaggatctgctgtgaacaattcagaagataaatcttcttctagtccacatggaaagcaacaacagaatgattcaaccaaggcaaaggcaaagggtagtaataaagaagtgattccaaagaaaccaatcagaaaatctcaagcccagctgcagtc

SEQ ID NO: 8320 - DNA, 411 bp, Glycine max
  Clone ID: LIB3087-011-Q1-K1-A10
ggaattcccgggtcgacccacgcgttcggccacacttgcccattctgatgctcatctatttcgctattttactcactatttatcaatattgcgggatttttttctgagactcatggatgcacttaacctatatatattcattcttatatatatccgaacgcctaccgacgacgatcgtatctgatatgaactgagacagcctaaaggaagtactagaacgctacacacggatgctcatattcaagtcttacagcaccatagtcatcatgatatacaatgacttagtcagtcgcgtgtagtaagcttaagtagctttgctgccttacaaagtatctgtgatcactgagagacgccctatatctattccaaccggctataatgacctttatgaaagtatgcattctcacaaac

SEQ ID NO: 8321 - DNA, 426 bp, Glycine max
  Clone ID: LIB3087-011-Q1-K1-A7
ccgttccgtaattccagcgtcgaccgcacgcgtccgccgacgcgtgcgctttcttactctcttctattccattcaatcattacactattaaatctcccgggacgcgttcctttaccactctgacttgactgattacgactcacatgcactcacgccattctttcattgctgaatcactctgcattatgaactttctgacaagctcagtgtatatgatccacatggaaaccgacgaattctctagcttgattccctttcaccttcaattcgataaacccctagcttctcagatcaaaatctcagatagcaatcccgaaaatgactacctaggcatggcgactgacgattctaacatcctgcatcatcaatccaattggcaacgcttcacgaccattacttcaggaagatgcataacatcttttggat

SEQ ID NO: 8322 - DNA, 253 bp, Glycine max
  Clone ID: LIB3087-011-Q1-K1-A8
acgcgtccgccgacgcgttctctttcctactctcttctatttctttcaatcatcacactataaaatctcccacggcgggatttttaaccaccctcagtcgactcataacgactcacatgcactcacgccattcttacaatgcttaatcactcttcattttgaacttactgacaacctcactgtatctcatccacattcaaacctaccaattctctaacataattcccttacaccttcaatctctataaacccc

SEQ ID NO: 8323 - DNA, 353 bp, Glycine max
  Clone ID: LIB3087-011-Q1-K1-B5
ttcccgggtcgacgcacgcgtccgaacgtattgctaaccacaagaagatcacttcctactttcttcttcgctcactatataagccagtcatgggtctcttctctattttcaggggctttacccgcctattcaggcatcatggctagcgctaatggctcaggctattaatgtcgcctgcactattgactgagcatacgcctgatcaggaaacggaatccagtacatgagtaagatcgacccacatgatgacagctctactaacaattggattaagaatgacaggttcctcatggcttcatactttcaatcctttggatactatctcgagacctggcatagagttctattctaag

SEQ ID NO: 8324 - DNA, 365 bp, Glycine max
  Clone ID: LIB3087-011-Q1-K1-B6
ttcccggctcgaccgcacgcgtccgaacctatagctaaccacaataatatcactacctactttctcctccactcactatataatctatcgatgtctctcttttctattttcagctgctcaacccacctatacaaaaatcataactaacgcttatgactcaatctattaatgtcccagcactattgactgaacacacgcctgatcaacaaacagaatcacacaacattaataagatcgacccacatgatcagtgctctactaacaattggattaagaatgacacgtacctcatggattcatactttcaatccttattatactatgtcgagacctagcatatactctcattctaatgtctccatcgc

SEQ ID NO: 8325 - DNA, 278 bp, Glycine max
  Clone ID: LIB3087-011-Q1-K1-B7
ttcccggctcgaccgcacgcgtccgaacgtattgccaaccacaagattatcacttcctcttttcttcttcactcactatataatccatgcatggctatcttctctattttgagcggctcaacccgcctatacaaacatcatgactaacccttatgactcagtctattaaagtccctgctctattgactgatcatacgcctgatcaacaaacggaatcaacaacattaataagatcgacccaaatgatcactgctttactaacaaatggattaagaatg

SEQ ID NO: 8326 - DNA, 422 bp, Glycine max
  Clone ID: LIB3087-011-Q1-K1-C7
ccggtccttaattcccgggtcgacgcacgcgtccgcccacgcgtacgcccacgcgtccgatctctgtcaattctctctcatactctatatatacttcgcgtaggattttaagcaatatctatgtggatactcatatactatggtccgccaattctcatgaactacaactatattatgtagcacatgacgactattagacctctaactgttactagtacagttattctcatgatactcatatctcttcctcttcgcaattatttccacttacacataacatcatatacctcatatgatcacatatcattatagcctttatctcttatacatcaagttgaatacaatgctaatcagtaattcataatcttttatgcccagctaccataaccgaccctatgtgcaattctgataagtgctacatc

SEQ ID NO: 8327 - DNA, 100 bp, Glycine max
  Clone ID: LIB3087-011-Q1-K1-D7
ccggtccttaattcccgggtcgaccgcacgcgtccgaacactcgttcgactgtgattaataacaggtttcttatgacccatacttttatataatttctca

SEQ ID NO: 8328 - DNA, 478 bp, Glycine max
  Clone ID: LIB3087-011-Q1-K1-E6
ccggtccgtaattcccgggtcgaccgacgcgtccgcccacgcgtccgtttatatctcaccctgtatgtatcagacctgcctttatcagttacctcgatctaggtgtttcacatgatcaagcgtcatcaaatcactactcagattctcattcaaacactcgcagctaatatgtactctgatcccttataccatactatgaataaaaagatattatgatactcaacaacgagttaagcgcgtgaccaatagcataagcagatgcccgtcatcacgcactgctatctaaacactgatgttgtcaccactatctgatgctccctcgatataatcaccacatatcatttgcactggaaccctataaaggtgatgaagcactattaaatctgacgcctggttactaatttcatgagctttaataaaatgctcttagatttcctcgtggatatcgtagaccgtgctctatactgcaagctttttt

SEQ ID NO: 8329 - DNA, 434 bp, Glycine max
  Clone ID: LIB3087-011-Q1-K1-E7
tccgtaattccagggtcgaccgcacgcgtccgcccacgcgtccgtttatatctctccctctctgcatctcaccttcctttatcacttacctccatctacgtctttcatattatcaagcatcatcacatcactactcagattctctttcaaccactcgcagctaatatatactctcatcccttttaccattttttcactaaaaatatattatgatactcaacaactactcaatcgcttgaccaatgctataagcacatgcccgtcatcacgcgctcctatctaaccactgctcttgtcaccactatcatattctccctcgatataatctctcacatatcatttatacttgaaccctataaagctcatgaagcactattaaatctatcacctgtttactaatttcttgaactctaataaaatgcacttagatttcc

SEQ ID NO: 8330 - DNA, 438 bp, Glycine max
  Clone ID: LIB3087-011-Q1-K1-E8
ccggtccttaattcccggctcgaccgcacgcgtccgcccacgcgtccgcttatatctcaccctgtctgtatctgacctgcctttatcagttaccttcatgtgggtgtttctcatgatcaagcgtcagcacatcactactcagattctcattcaaacattcgcagctaatatatactctcatcccttttaccatactttgaataaaaatatattatgattctcaacaactactcaatcgcatgaccaatattataagcacatacccgtcatcacgcactcctatctaaacactgctgttgtcactcactatctgatgctccctcgatataatctctccgtatcgatagtactggaaccctataatggtcttgaagcactatcaatattaacacctgtatactaatttcttgaactctagtaaaatccactttgatttcc

SEQ ID NO: 8331 - DNA, 458 bp, Glycine max
  unsure at all n locations
  Clone ID: LIB3087-011-Q1-K1-F10
cggtccggaattcccgggtcgaggcacgcgtccgcccacgcgtccgcccacgcgtccgctcttctccttttatttcatcactctcttcgttcctttcttcgtctccaaagttttcaattttcacacttttcgaaacatcttttcaatggcgtcccaaattacccgtgagtggtctggaatcaatacattcgcacctgctacccagactaagttgcttgaactcttgggaaaacttaaaccagagaatgtgaactccttaactatacttgggatgggaaaagggggtggtggaaaatcttcaactgtgaactccatcattggggatagaagtggttcgattaatcctttccagtcggaagggccaaagacccgtgattgtgtcgcgatcaagggctggttttacattgaacatcattgacactcctggtctcatttgaaggggatacatcantgatatg

SEQ ID NO: 8332 - DNA, 440 bp, Glycine max
  Clone ID: LIB3087-011-Q1-K1-F7
aattcccgggtcgaccgcacgcgtccgcccacgcgtccgcactcactaacgataagctgcttttattctacgactgtataacgatcttcgagttggcggatactttaaaccctggaagagtccttccactatgacaatcttctatccaccaccaaccgcatttccccagcggcacgtgtctttcaaaccttactcgcgttcataccgcgcgttaaccgaggaatccactcttccgtgataccgagagagggccagccacaccagcaacaacaacaagcgtcgtctctcgaagacgctctcgtcaacagatcatgccgaatcgacttcgtctaggccatccgatgaaccgcatcgctctccaactgcctattcgaaacgaacctacacgctaccgttccatgcctctagttcaatactcgtggcatatttctagatatata

SEQ ID NO: 8333 - DNA, 144 bp, Glycine max
  Clone ID: LIB3087-011-Q1-K1-G5
ccggtccttaattcccgggtcgaccgcacgcgtccgcacactcgttcggctgactcctcatatacggagcttgctacatatgctaaagacaatggctaatggggagatgcttataacagggatgtgaggcttccatgcgaaaaa

SEQ ID NO: 8334 - DNA, 275 bp, Glycine max
  Clone ID: LIB3087-011-Q1-K1-G6
tccttaattcccgctcgacgcacgcgtccgaacactcgttctgtgactcctaatacacggaactttctacatatgctaacgccaattgccaatggacgcatgcttataacattcgggtgaggatctcatccgaaaaaagcaacctcctctcagattcagcctgttaacacatcgaaagattactctcatcatcaatatgaaatcactacttttcatcatatcatccaatataaactgcaaactgatgtagaccaaatacgtatatacaaacatta

SEQ ID NO: 8335 - DNA, 506 bp, Glycine max
  unsure at all n locations
  Clone ID: LIB3087-011-Q1-K1-H5
ccggtccgtaattcccgggtcgaccgcacgcgtccgcccacgcgtacgtccacgcgatcgatgctaccaccttctcaagcttccacttcacaagtcatcagtgcgtgtcaatcatattgatcatctgatcctactaagataaacctccattctgtatcagccactatgacccttttatgctatcacgtcaatcaacgtaccttttacttttctctgcccttattcacctacgctacccttcattctgcgcagactaacagaacgaataaagcaggcattgtcggaaaatatggtacccgatatggtgctagtctgctgaagcagattaatatgatggaagctagtcaacatagcaaattctattgcgaatcctgtggaaagtatgctgtgaagaggtntgctgtgggaatatggagatgcatggattgcggataagtaaaagctggcggtacctacactttgaagtaatgccctttctgctatctttcactcataaattttgatat

SEQ ID NO: 8336 - DNA, 462 bp, Glycine max
  Clone ID: LIB3087-011-Q1-K1-H6
cgtccttaattcccgcgtcgacggacgcgtccgaccacgcttacgtccacgcgatcgatgctatcaccttctaaagcttccacttcacatgtcatcagtgcgtgtcactcatattgacatctgggcctactaagataaacctccattctgtatcaaccactatgacccttttatgctatcacatcaatcaacataccttttacttttctctacccttattcacctccgctacccttcattctgcacagactaacagaacgaataaatcaagcatatgcgaaaaatactgtacccgatatggtagctactctgctgacacagattctcactatcgaatctaatcagaataactcatactcttgcgaactctgcggaaagaatcactatgaaaagagaaagctgtagcaatatgtagatgcattgattgctgatatattaaatctggctatacctacactttca

SEQ ID NO: 8337 - DNA, 407 bp, Glycine max
  Clone ID: LIB3087-012-Q1-K1-A12
acgcgtccgattgtctcagcaaggacctctagctatatgctttctttcagctaatggtgtcatatcaagtgtcagactttgtcagccctattcgggtgggggcacattgacatgagggacggtttgagattctgtcattgtctggctcattcatgcccaatgaaagtggatgaacacgaagcatatccggtggcatgagtgtatctttggctagccctgatggacgtgttgtacgtggctgagtatctggtctgttggtggctgcaagtcctgtgcaagtagtgttatgaagttttctggcaggaaaccaacattagcataaaccaataaaacagaaacactatgttatatcaagtgtgacaccaacctcaattgttcaatctctacacttgatccaatatcaattc

SEQ ID NO: 8338 - DNA, 333 bp, Glycine max
  Clone ID: LIB3087-012-Q1-K1-A5
aatttcaagttccgggtcgacccacgcgtacgcccacgcgtccgcccacgcgtccggttggtgcaaagcatccttcgcttcaatttctctctgtgagcgctttctgcaatcgaacctttcatctacaaagggatccacaggccgaaggagaaatggggctgacattcacaaagcttttcagtcggcttttcgcgaagaacgaaatgcgaattctgatggttggtcttgatgctgctggtaagaccactatcctgtacaagctcaagctcggagagatcgttaccacaattgctaccatcgggttcaatgttgagactgtggaatacatgaaca

SEQ ID NO: 8339 - DNA, 490 bp, Glycine max
  Clone ID: LIB3087-012-Q1-K1-B10
ggaattcccggctggaggcacgcgttcgaaagcagagccaacaacttgaagaacaaaattaacatcaacaaccacaagaagaagaagcttggaaagtagaagaatcttcagttgaaagggaagaacacacaagaacaaagagaggaagaaacgcgaatgaagggagaattagagttgccaccagggttcagatttcaccccactgatgaagaattggtgaatcactacttgtgtaggaagtgcgcgggtcaaccaatcgcggttcccatcatcaaagaggtcgatttgtacaagtttgatccatggcagcttccagaaattggctactacggcgagaaagaatggtacttcttttctcctcgggatcggaaatacccgaacggttcacggccgaaccgtgccgtcggaagcggctattggaaagccaccggcgccgataaagcgatcggaaaaccgaaagcgctagggatcaagaaagctctggtttttt

SEQ ID NO: 8340 - DNA, 483 bp, Glycine max
  Clone ID: LIB3087-012-Q1-K1-C11
aattcccggctcgagccacgcgtccgtgagttgtgaaaatggtgtcgtcgcaggctgtgaatacttacccgttgtccagctacacgttggcgacgaaggatcccaagatggagaaggatacctacgtcgcggatcgtctcgctcgcatgaaagtcaactatatgaaggagggaatgaggaccattgcggaaggaatattactggtacaagagcacaatcatcctcatatacttcttctccaaattggaaacacattctgcaaactcccaggcggtcgtctcaaaccaggagagaatgaaattgaaggcttgaagaggaagttgactagcaagcttggtgctaattcaccagctcttgtgcctgactggcagataagtgagtgtgtagcaatctggtggaggccaaattttgaaaccataatgtatccatacttgcctcctcatataacaaaacccaaagagtgcaaaaagcttttccttggtc

SEQ ID NO: 8341 - DNA, 474 bp, Glycine max
  Clone ID: LIB3087-012-Q1-K1-D10
attcccggctccacgccacgcgtccgaaaggtacctagactctgaagattctgagttggataaagtgattgacttttatattagttctgagggggatgttttcgtaccggcaatatcaggtctattttatgcaaatgtagctggtaagagaatcggctcgggtaaatcccagatactggttccggccaatattccagattcatctgcttctgcctccagtttcttgtcccattatgtctccaagaaaaaccactttgcctattcttgttactgttagttcgaagtgaagacattcttagcatccagtgggtaatgttgtgtaccaattgtactgaatgatgctttccaaaatgtaccctttcgggaatttcagtgttatggcctaaggcctcttgtttgagtgttcaccaaaaaattcaagttactgtgatttgacatgtacacaaggctttctgaacggatatttagtttgtt

SEQ ID NO: 8342 - DNA, 177 bp, Glycine max
  Clone ID: LIB3087-012-Q1-K1-D5
tactctcccaactattttacccgtactaaccaaacgctgcactttcggcggcactctacgatataggtttgtatgtatctcggtgtatcctccttaagcctcgtttgcctttaatgagagcggttattaatatcaatatatcaactataaaacttattgctagcagaaactggctac

SEQ ID NO: 8343 - DNA, 219 bp, Glycine max
  Clone ID: LIB3087-012-Q1-K1-E10
ttcccggctcgacccacgcgttcgtccactcgtccggctatatctcaaagtgaatatcaccgaggagttattgcattgaacttccatattgatgattttaaaacacaagcggcatttattcaagactattattatatttcaaaaattaaggaataagatgtaaaccaattctttaactcttacaaggccccacttaatcccaatttatttttgaccaaa

SEQ ID NO: 8344 - DNA, 453 bp, Glycine max
  Clone ID: LIB3087-012-Q1-K1-F11
aattcccgggtcgacgccacgcgttcgcccacgcgtccgcagtaagtaaagagaagcagtttccagtctccgtcagtaaaacgatgggcgatgtacggttgcgttaaacccggccgaaaccttccgctccgacaatctcctatccaccaccaaccgcatttccccagcggcgcgtggctttcaaacctcactcgcgttcaaaccgcgcgtttttcgaggaatccgcgcttcggtgatgccaagagagggccagccacaacaacaacaacaacaagcgtcgtctctcggagacgctctcgtcaacagtccgcgccgaaacgacgtcgtctaggccatcggaagaaccgcatcgctcttcaactgccttttcgaaacgaaccttcacgccaccgttcccggcctcgagttcaaaacccgcggcaaagttcgagatatatacgacgcttgggatta

SEQ ID NO: 8345 - DNA, 426 bp, Glycine max
  Clone ID: LIB3087-012-Q1-K1-G10
accggtccgtaattcccggctcgagccacgcgttcgcccacgcgtcctgtttataccatatttactgatattggcgcatttctttgagaaagttactagttgctagattgaggcaaaaatggtgggaattttcaaggagaagttggttaaagcacccaaagagctgaacagtccagcttcgttgaattcatgcactaagcctaagctaagtcacgaaatccttcaagatttcatgtcctgcaattcctccaatgctttctcaatgtgctttgggaatgaagctttgctagcctattccccttcaaacaagcccttcattcatcaaaagttgtttagtggtttggataacatatactgtgtcttcctgggtggcctgcacaaccttagcatgctcaacaagcattatgggctatcaaaaggaacaaa

SEQ ID NO: 8346 - DNA, 407 bp, Glycine max
  unsure at all n locations
  Clone ID: LIB3087-012-Q1-K1-G6
ggggagtccatcagatgcatcattcgaatgggggagtaaatctatatcagaccaatgatgacatgacatggtccctgttgggggactgagttctctttctggttgtgaaaagaagaaaataaatttcatatatgatatatatccctttaggattattgaatttgtgaaaacttgtgagtttgagtgtagagaatgatagggcctttgctgctgttattgtctaatgcatgataaataaaatgtcgtttttttgtcgatttggtgttcttatggtaatttaagtgacagatatgtagtaccacaattgttcaacgcatgtccaatggtgtggngttttggtaaaaaaaaaaagtcacgttcaaatggcttgaacttttatggatttatcaaacttgattttcattana

SEQ ID NO: 8347 - DNA, 332 bp, Glycine max; identical to SEQ ID NO: 7433
  Clone ID: LIB3087-012-Q1-K1-H8

SEQ ID NO: 8348 - DNA, 201 bp, Glycine max
  unsure at all n locations
  Clone ID: LIB3087-013-Q1-K1-A11
ccggnctggaatacccgggccgacccacgcatccgaaaactcaagctgcttgtatgatagttaattaaataaagatataaaacataatacggttgggttttttaaaaaattataatatcctttataatattaattattttattataatttattaaattattttttataatatttaatataatataataaattatcatataa

SEQ ID NO: 8349 - DNA, 287 bp, Glycine max
  Clone ID: LIB3087-013-Q1-K1-A7
attcccggtcgaccacgcgtccgcctgaacctgctctgaatccaattcttcttcttcttgttctctgtttaaggcaatagaaggtttactactcatactcaaagtagcttagtgttttgtttagcatatcatggagaataataatcagtcgttttggcaattcagtgaccagttgatgttactggcatttatttggcttttctttctttatcgttttgttttgtattctctttttcttatattattttgtttgtttctagtgtatttttattctttattttatgttt

SEQ ID NO: 8350 - DNA, 344 bp, Glycine max
  Clone ID: LIB3087-013-Q1-K1-B6
cgggccgaccgacgcgtccggtccaggcaagccctactcaaccaccacacttacttctcgttcacgctacccctttctgcggttgttttacctttcaagttttaaaggtctaaagatggcagagacatttctatttacctcatagtctgtgaactatgtacaccctgactagcttctcgaccaaatttccgatgctgtcctcgacgcttgcctcgtgcatgtctcatacatgtatgtatcctgtgaatctttcacaattatctactttgtttttgtcttttttgtattttttacatctttcttactatttcttattatattaatgtatttttatcttatttatt

SEQ ID NO: 8351 - DNA, 352 bp, Glycine max
  unsure at all n locations
  Clone ID: LIB3087-013-Q1-K1-C5
cggaanncccgggtcgaccgcacgcgtccgaaaaggtctccaaacacatagaagcacgtgtatttatgtattgtgcaagtcatagtattcaacgttaacaccactgactcacttgtaaaatgcgctttaacaccaaacggagtctccctatcaaaaaaagctacctagagcttgcacctattggtatcttctacaatatcctaaagtgtttttcttcttcttcatcaccatgtctttacttcagacctcatcaacctcaatctctcagaatccacagaaaagatcattgctgagtacatattggttggtggatctggtatggacctcataagcatatccaggactttttctt

SEQ ID NO: 8352 - DNA, 390 bp, Glycine max
  Clone ID: LIB3087-013-Q1-K1-D11
ccggtccggaattcccgggtcgacccacgcaatctcatactcataatattataaataaaatttttttatacaatcatattaattatatcaaattgtcgggttattaaataatattttatctgattaaataaaataaaatatatataataatataaaaataatctattatatatcatattaataatataattaatttatttattttatataaaatatataaataatataaataattaataataaatatctaatttatatataaaatataaattatatatctattaatcataatttaataaataatattatatatattatatatatttaatataatttatatataaaattaatttatatttataatatataaaattataaaattatatatat

SEQ ID NO: 8353 - DNA, 446 bp, Glycine max
  Clone ID: LIB3087-013-Q1-K1-E7
ggaattcccgggtcgacccacacgtccgcccactcatcctaatatgtctttacatactatttccaccaaagaatccttttttatcggtggtattttataaaaaatatattataatattataataaatatatattattttaattaatacataataaataatttaataattttaatatattttttattttatatattttataattaatatatttatatttatatataatataatatttatttttattatttattatttatattattatatatttattatttattatttatataatattttttattattatattattatattatttatatataatatatttaataattaatataattatatatatttttaaattatataatatcttattttattataatatatatttttattattatatttatttttaaatttttttatttatattaat

SEQ ID NO: 8354 - DNA, 137 bp, Glycine max
  unsure at all n locations
  Clone ID: LIB3087-013-Q1-K1-G6
ccggnccggaattcccgggtcgacccacgcagtccgcaactttgttgattttaataacaatttttttttaatacattttattataatatatagggtgggtaatatattaaataatcaatatattataataaaatatt

SEQ ID NO: 8355 - DNA, 178 bp, Glycine max
  Clone ID: LIB3087-013-Q1-K1-H4
aagcaattgaggattcacaaatgattatttttcttactgaccaaatctgaataaagggggggtttttttttatatttagctcacacactcactacactctccttaacttcccttcactactccattcattatttcaactatcatatatactataacacaatttatctacttaattctt

SEQ ID NO: 8356 - DNA, 572 bp, Glycine max
  Clone ID: LIB3087-002-Q1-K1-G5.F1
atttccaatatcacaattgttggtcttcttctgcaggccaatggattatcacttgcctggtctgcgccacgaataggcaatgcatcacatccatggaatttcacatccccaatgggcaattctatttctaccttttggacaaaacaaattcagagttcaagcaattccttctacatgcctagttcgaactagagcctgcagcacaagaagcttttgtgttattgtctctcaaaagaccgtccccttcattgcctggtgttaaagtttgaccattatattcctgaactgaaccatcctctatattactgggggcagaattgctattgcttctattattgtcgctggtctccaggcgttccatcatgcgtgacacagttgcaatccctgcattaacttctcgcctaacttcagatccaaggtcagacatagtgttgttccgagagaaccatctctccttccaccctcttgtgctcttggaaattgactccttgtatcttgttgatacagcattcagtttagatttcagagattctgaaaatgattgtaattctgatggcctgctctgtcttgac

SEQ ID NO: 8357 - DNA, 578 bp, Glycine max
  Clone ID: LIB3087-002-Q1-K1-G5.F2
atttccaatatcacaattgttggtcttcttctgcaggccaatggattatcacttgcctggtctgcgccagccaataggcaatgcatcacatccatggaatttcacatccccaatgggcaattctatttctaccttttggacaaaacaaattcagagttcaagcaattccttctacatgcctagttcgaactagagcctgcagcacaagaagcttttgtgttattgtctctcaaaagaccgtccccttcattgcctggtgttaaagtttgaccattatattcctgaactgaaccatcctctatattactgggggcagaattgctattgcttctattattgtcgctggtctccaggcgttccatcatgcgtgacacagttgcaatccctgcattaacttctcgcctaacttcagatccaaggtcagacatagtgttgttccgagagaaccatctctccttccaccctcttgtgctcttggaaattgactccttgtatcttgttgatacagcattcagtttagatttcagagattctgaaaatgattgtaattctgatggccctgctctgtcttgactact

SEQ ID NO: 8358 - DNA, 603 bp, Glycine max
  unsure at all n locations
  Clone ID: LIB3087-002-Q1-K1-G5.R1
cacgcgtcggtactnnctctcacactcactttctctctctataactctttctcacccgctggtntncctctttcatcgcatcttgagtttgcaacctcgtcttgtgatttccatggagggtgctgggatggaagagaataatattattaatgatgatgataataataacaagtctgaggcgcatttgacttctgccgctgcttttgtggagggtggaattcaggacgcttgtgatgatgcttgcagtatatgccttgaagctttctgtgatagtgatccttccacggtgacgagctgcaacatgagtttcatcttcagtgcattctcgaatggtgtcaaagaagctcccagtgccccatgtgttggcagcctatcagtctcaaagatccaacaagccaagaattacttgaggcagtggaaagagagcgaaactttaggttcaatccatctagaaatgccacaatatttcatcatccaacactgggggattttgagttacaacatttgccagttggagctagtgacgctgatcttgaagagcgtataatccaacacttagcggctgagcagcaatggggagagcacgccacattgctagaagag

SEQ ID NO: 8359 - DNA, 590 bp, Glycine max
  unsure at all n locations
  Clone ID: LIB3087-002-Q1-K1-G5.R2
ccagcgtccgcggacgcgtgggttctctctcacactcactttctctctctataactctttctcacccgctagggtttccttttcatcgcatcttgagtttgcaacctcgtcttgtgatttccatggagggtgctgggatggaagagaataatattattaatgatgatgataataataacaagtctgaggcgcatttgacttctgccgctgcttttgtggagggtggaattcaggacgcttgtgatgatgcttgcagtatatgccttgaagctttctgtgatagtgatccttccacggtgacgagctgcaagcatgagtttcatcttcagtgcattctcgaatggtgtcaaagaagctcccagtgccccatgtgttggcagcctatcagtctcaaagatccaacaagccaagaattacttgaggcagtggaaagagagcgaaactttaggttcaatccatctagaaatgccacaatatttcatcatccaacactgggggattttgagttacaacatttgccagttggagctagtgacgctgatcttgaagagcgtataatccaacacttnagcgctgcagcagcgatggga

SEQ ID NO: 8360 - DNA, 569 bp, Glycine max
  Clone ID: LIB3087-004-Q1-K1-G10.F1
actggcaacaatcatgttataccctcgagtttaagctgtagtaaccttgtttatgcagctcatccatatgaaagcaactattttccctcattaatttggtctgcagccaaacaactaaacttttaagcagacaaaaaacaagattcacataaacaaggtcagcagtgtaagagaaatttgcgtaaacataatatttctgtagcctctgaccacaccctatatgttgtagctttattacttctcagactcttgtttgaaggattctactggtggcacctcgcagatttatgattattgcctcttaaaatatccatacctcgttcctggttgtttggtgctgctccatttaaccgcagtggcctcgtattaagatcaattaactttttatccatttttccatgaccatcaatattattttcttgtcttggaacaggtgagacactgtgattctgctgactatctcttatttttagcttgagtgactgactttcatccctccttgattcattttgatccataggttgcagccctagttcttccatttgggcaggtttatcacattggaactg

SEQ ID NO: 8361 - DNA, 498 bp, Glycine max
  Clone ID: LIB3087-004-Q1-K1-G10.F2
actggcaacaatcatgttataccctcgagtttaagctgtagtaaccttgtttatgcagctcatccatatgaaagcaactattttccctcattaatttggtctgcagccaaacaactaaacttttaagcagacaaaaaacaagattcacataaacaaggtcagcagtgtaagagaaatttgcgtaaacataatatttctgtagcctctgaccacaccctatatgttggagctttattacttctcagactcttgtttgaaggattctactggtggcacactcgcagatttatgattattgcctcttaaaatatccatacctcgttcctggttgtttggtgctgctccatttaaccgcagtggcctcgtattaagatcaattaactttttatccatttttccatgaccatcaatattattttcttgtcttggaacaggtgagacactgtgattctgctgactatctcttatttttagcttgagtgactgactttcatccct

SEQ ID NO: 8362 - DNA, 169 bp, Glycine max
  Clone ID: LIB3087-004-Q1-K1-G10.R1
acacgcggtcgggaatccttcttaatagtactgttttagaattgctaagatgaagtcaagttttgaggaattgaagaagaagaagaagaagaagggagaaggagagcattggaagacatagagataaagaattgaagataatgcgaacgctttgcgacgtatgcgagag

SEQ ID NO: 8363 - DNA, 293 bp, Glycine max
  Clone ID: LIB3087-004-Q1-K1-G10.R2
ccagcgtccgggaatccttcttaatagtactgttttagaattgctaagatgaagtcaagttttgaggaattgaagaagaagaagaagaagaagggagaaggagagcattggaagacatagagataaagaattgaagataatgcgaaccctttgcgacgtatgcgagagcgccgctgccattgtcttctgcgccgctgatgaggctgctctctgctccgcttgtgaccacaagatccatatgtgtaacaaacttgctagtagacacgttcgggttggccttgctgaccccactg

SEQ ID NO: 8364 - DNA, 538 bp, Glycine max
  Clone ID: LIB3087-005-Q1-K1-D1.F1
atgcaaactttccgtgttaatttcattgaaccaaattatggctgcaaaccaaaaacattacaccgcagtacataatcaattaaaacgaaagaaaaacccgataaccatttcgtgatttaagaaacaacaggatgaaaccggtggtggttcctctatgtcgcaaaaaattgagacaatcataccgcctacgtattcacatactttcttttctttcccttcccttccctcgttattttcccttatcggaggctgctactttctctacttatataaaaaaaaactaacgagaaattcataatccgaaacacaaaaaaaaaaaaacaaaaaactaaaggggtgagtcagactttggatcaagcgatctcatgcggaggaggatggttaaggtccagatcgaagattctagaaccgttccccttaacctcgccttcattatggttcagatcgataacagaggaagagtccgagtcgctcgtcgtcgcgtggaactcactcgccgcaacgggattgatgattgtagccaaacgcaaagccacgt

SEQ ID NO: 8365 - DNA, 519 bp, Glycine max
  Clone ID: LIB3087-005-Q1-K1-D1.F2
atgcaaactttccgtgttaatttcattgaaccaaattatggctgcaaaccaaaaacattacaccgcagtacataatcaattaaaacgaaagaaaaacccgataaccatttcgtgatttaagaaacaacaggatgaaaccggtggtggttcctctatgtcgcaaaaaattgagacaatcataccgcctacgtattcacatactttcttttctttcccttcccttccctcgttattttcccttatcggaggctgctactttctctacttatataaaaaaaaactaacgagaaattcataatccgaaacacaaaaaaaaaaaaacaaaaaactaaaggggtgagtcagactttggatcaagcgatctcatgcggaggaggatggttaaggtccaaatcgaagattctagaaccgttccccttaacctcgccttcattatggttcagatcgataacagaggaagagtccgagtcgctcgtcgtcgcgtggaactcactcgccgcaacgggatgatgattgtag

SEQ ID NO: 8366 - DNA, 527 bp, Glycine max
  unsure at all n locations
  Clone ID: LIB3087-005-Q1-K1-D1.R1
tcacgcgtccgggacgnanncgggtgngnngnagccgtgantncnaatctcgtatgcctatgcttgtttatcattttcttacttttctctcacgctctgccacaaaactccgtctccgcaataacggaataaaaaaacaagtttaattactattatggcgccgagggatcataagacaagcaacgctaaggctaacggtaacggtaacagcggggtgaaggaggtgcattttcgtggagtgagaaagaggccgtcggggagatacgccgcggagatcagagatcccggcaagaagagccgcgtctggctcgcaaccttcgacaaggcggaggaggcagcgcgtgcctacgacgcgcagcacgagagtttcgcggccctaaggcaagacaaacttccctctccctttggaaaatgttaagaactcgagccccaccagagcagcaccgtcgagtcctccagccgggaccggacgtcggcgccggattcctcgtctctagacctcaacctcgctcgcgccgccgtcgcat

SEQ ID NO: 8367 - DNA, 605 bp, Glycine max
  unsure at all n locations
  Clone ID: LIB3087-005-Q1-K1-D1.R2
cggacgcgtgggcggacgcgtgggcggacgcgtgggctcatctgtatgcctatgcttgtttatcattttcttacttttctctcacgctctgccacaaaactccgtctccgcaataacggaataaaaaaacaagtttaattactattatggcgccgagggatcataagacaagcaacgctaaggctaacggtaacggtaacagcggggtgaaggaggtgcattttcgtggagtgagaaagaggccgtgggggagatacgccgcggagatcagagatcccggcaagaagagccgcgtctggctcggaaccttcgacacggcggaggaggcagcgcgtgcctacgacgccgcagcacgagagtttcgcggccctaaggccaagacaaacttccctctccctttggaaaatgttaagaactcgagccccagccagagcagcaccgtcgagtcctccagccgcgaccgcgacgtcgccgccgattcctcgcctctagacctcaacctcgcccccgccgccgtcgcatccgctcgattccccttccagcaccagttcccggtttttaccggcgcggtgcctgcggcanatcaggttttgtacttcgacgct

SEQ ID NO: 8368 - DNA, 574 bp, Glycine max
  Clone ID: LIB3087-005-Q1-K1-E9.F1
agaaccaataaaactataaacaattaaacataggataaatttgaaaaagagaaaaaaaaaatgaataaattctatatagtagtaggaaagtaatttctgtactgccaatttctatattgcttcatcactcgttattttatgtctttcccctttgccttggactaaaatctagaaattaatgagttctggcacgaaaattgaaacgccagagcaagattttggagcaatcctctggtggaattccctttaatttagcctcatcctctagaactacttgtttcacgaacttgatcgaattctgagaagtgtcttgaacagaggaagtgcgaccccatctctcagagtcccaaaggatggagctattaaaagcaaaacttgaaatatgaattgggggagtgatagtatcagtttcattgttcatattcttaagatgccaaccaatgacttgtgatgaatcacatacaggtccttcgattttcactttcttcctgtgtgcagctaacaaagctgttggccatgttccaaagacctcaatatctctaagctgatggaagaattggagatcataaacatt

SEQ ID NO: 8369 - DNA, 576 bp, Glycine max
  Clone ID: LIB3087-005-Q1-K1-E9.F2
agaaccaataaaactataaacaattaaacataggataaatttgaaaaagagaaaaaaaaaatgaataaattctatatagtagtaggaaagtaatttctgtactgccaatttctatattgcttcatcactcgttattttatgtctttcccctttgccttggactaaaatctagaaattaatgagttctggcacgaaaattgaaacgccagagcaagattttggagcaatcctctggtggaattccctttaatttagcctcatcctctaaaactacttgtttcacgaacttgatcgaattctgagaagtgtcttgaacagaggaagtgcgaccccatctctcagagtcccaaaggatggagctattaaaagcaaaacttgaaatatgaattgggggagtgatagtatcagtttcattgttcatattcttaagatgccaaccaatgacttgtgatgaatcacatacaggtccttcgattttcactttcttcctgtgtgcagctaacaaagctgttggccatgttccaaagacctcaatatctctaagctgatggaagaattggagatcataaacattgg

SEQ ID NO: 8370 - DNA, 543 bp, Glycine max
  unsure at all n locations
  Clone ID: LIB3087-005-Q1-K1-E9.R1
cacgcgtccggggcacggagtanggacgannctctgtctagaggaacttcacgtatttgtaagcttcttccagaagatcgcttggtccgttttcttgtcccacggcatcagcttctggagacaccgtgttttctggcttagcttctgacgacgttggcgagccaggttgctctgncgggatcaccggagtcgattacgactccacgcgctgccacttctgctccggcgagtagaggggagggaggcggaggtgtatctcattaagggtatttttgactttcagaaagaaatgacaggtgcaagatacactataggtagtgtaggattcaaaacctcaagtttgaaggatccaaatccacccactataaagggtacttctcacccacccaattacattaattttataactaactaccaaaagattcattatgctcataataattattgttataatccataatttttgtccaaaatcacaattattctgacaaggattccaaagtttattggtaattttttttctttagattccgtatattagac

SEQ ID NO: 8371 - DNA, 603 bp, Glycine max
  Clone ID: LIB3087-005-Q1-K1-E9.R2
gggcacggagtggaggacgcgtgactctgtctagaggaacttcacgtatttgtaagcttcttccagaagcatcgcttggtccgttttcttgtcccacggcatcagcttctggagacaccgtgttttctggcttagcttctgacgacgttggcgagccaggttgctctgcgggatcaccggaggtcattacgactccacgcgctgccacttctgctccggcgagtagaggggagggaggcggaggtgtatctcattaagggtatttttgactttcagaaagaaatgacaggtgcaagatacactataggtagtgtaggattcaaaacctcaagtttgaaggatccaaatccacccactataaaggttacttctcacccacccaattacattaattttataactaactaccaaaagattcattatgctcataataattatttttataatccataatttttgtccaaaatcacaattattctgacaagagattccaaagtttattgttaattttttttctttagattccttatattagactagtcaacctcagattaaaaattaaactcctaacaccacgagcatgattcctagtattagttaaat

SEQ ID NO: 8372 - DNA, 601 bp, Glycine max
  unsure at all n locations
  Clone ID: LIB3087-005-Q1-K1-H8.F1
ggcgccttttttttttttttttgtgagttagaaacatggtccttttttttcatgcaagcaagaagggatagttattgccttcttgggggatagtgtataatttcaatcttttgaagagcatggtgtattacaataggggatatccaccaatacctgagaagagcaatcaaatttcctaggcaatcagtaacaagaaaaatgtgcggcaaattgcaatactagataaaactttgatatttttgtcctttctacaaggcaccatatactgagtcttgacccttgaatatgaggtcagggctgaactggggttcgacaataagggcaatggggatgggctgcacagngngcaagaaggcatgctgaatggtacttatgggagcatgaaaggttcataacctgttgctcttgccccaaatcttctaggcacacagcacacacttttctatctttcttaaacttgttgccacgacaaaccatgaactctctaacaacttccgacctattcctccatccttcttctcgtagctgctttggtttacttttccttcttttcttggattctcacttgacctgtatgaggaaagaagtgtcaagcttcttg

SEQ ID NO: 8373 - DNA, 563 bp, Glycine max
  Clone ID: LIB3087-005-Q1-K1-H8.F2
tgtgagttagaaacatggtccttttttttcatgcaagcaagaagggatagttattgccttcttgggggatagtgtataatttcaatcttttgaagagcatggtgtattacaataggggatatccaccaatacctgagaagagcaatcaaatttcctaggcaatcagtaacaagaaaaatgtgcggcaaattgcaatactagataaaactttgatatttttgtcctttctacaaggcaccatatactgagtcttgacccttgaatatgaggtcagggctgaactggggttcgacaataagggcaatggggatgggctgcaagccagggaagaaggcatgctgaatggtacttatgggagcatgaaaggttcataacctgttgctcttgccccaaatcttctaggcacacagcacacacttttctatctttcttaaacttgttgccacgcaacaaccatgaactctctaacaacttccgacctattcctccatccttcttctcgtagctgctttggtttacttttccttcttttcttggattctcacttgacctgtatgaggaaa

SEQ ID NO: 8374 - DNA, 601 bp, Glycine max
  Clone ID: LIB3087-005-Q1-K1-H8.R1
gcctggtgttgggttgcttgcaaggaagagaacagagcagaaccatagatatgaacaccaacaccatgccacatgccgacaatcctatcaccttggagaatcatcattggaaccaccatggataccactcactgtcttagatgaaactgctctcaaggccagacaaaggcttcacaagaagcttggacacttcttttcctcatacaggtcaagtgagaatccaagaaaagaaggaaaagtaaaccaaagcagctacgagaagaaggatggaggaataggtcggaagttgttagagagttcatggttgttgcgtggcaaagttcttaagaaagatagaaaagtgtgtgctgtgtgcctagaagatttggggcaagagcaacaggttatgaacctttcatgctcccataagtaccattcagcatgccttcttccctggcttgcagccatccccattgcccttattgtcgaacccagttcagccctgacctcatattcaagggtcaagactcagtatatggtgccttgtagaaaggacaaaaatatcaaagttttatctagtattgcatttgccgcacatttttcgtgttactgattgcttagg

SEQ ID NO: 8375 - DNA, 603 bp, Glycine max
  Clone ID: LIB3087-005-Q1-K1-H8.R2
ccagcgtccggcctggtgttgggttgcttgcaaggaagagaacagagcagaaccatagatatgaacaccaacaccatgccacatgccgacaatcctatcaccttggagaatcatcattggaaccaccatggataccactcactgtcttagatgaaactgctctcaaggccagacaaaggcttcacaagaagcttggacacttcttttcctcatacaggtcaagtgagaatccaagaaaagaaggaaaagtaaaccaaagcagctaccagaagaaggatggaggaataggtcggaagttgttagagagttcatggttgatgcgtggcaacaagtttaagaaagatagaaaagtgtgtgctgtgtgcctagaagatttggggcaagagcaacaggttatgaacctttcatgctcccataagtaccattcagcatgccttcttccctggcttgcagcccatccccattgcccttattgtcgaaccccaggtcagccctgacctcatattcaagggtcaagactcagtatatggagccttgtagaaaggacaaaatatcaaagttttatctagtattgcaatttgccgcacatttttcttggtactg

SEQ ID NO: 8376 - DNA, 576 bp, Glycine max
  Clone ID: LIB3087-006-Q1-K1-C9.F1
tttttgaacaaagcaacaaacttcaatgatagttcagtaatagttcgttcaatgattttacaatctaaatcaatcaatcacttgaaagattgaatgattactatagttagtatacatagtgatagtaatatattaaataaaaatagcataccaattcttcttccttgctggctgaataaaatccaggtttccaactgactctgacaaaatagagttagggaaaacctgctgaatgttgaggctgctcaaatcatgactaattgctaatactatatttgttatatacactaataggctaattgctactggtaccaccacctttgtagtttccctttagagctccatcttcaactgatttgaatgcagagatactgaatttgccgatgagtcataactcaagagtgagttttctggagtcatgaaattagtgttgtcttcttccctcccccaaaggggttggtggagtgcatcaaacggccatggttgctgatattgttgtctgtttccgttctgtgggatttctggccacatgacaggtgcaactgtcggagggaagttacagtccattggagtcac

SEQ ID NO: 8377 - DNA, 528 bp, Glycine max
  Clone ID: LIB3087-006-Q1-K1-C9.F2
tgaacaaagcaacaaacttcaatgatagttcagtaatagttcgttcaatgattttacaatctaaatcaatcaatcacttgaaagattgaatgattactatagttagtatacatagtgatagtaatatattaaataaaaatagcataccaattcttcttccttgctggctgaataaaatccaggtttccaactgactctgacaaaatagagttagggaaaacctgctgaatgttgaggctgctcaaatcatgactaattgctaatactatatttgttatatacactaataggctaattgctactggtaccaccacctttgtagtttccctttagagctccatcttcaactgatttgaatgcagagatactgaatttgccgatgagtcataactcaagagtgagttttctggagtcatgaaattagtgttgtcttcttccctcccccaaaggggttggtggagtgcatcaaacggccatggttgctgatattgttgtctgtttccgttctgtgggattttctgccacatg

SEQ ID NO: 8378 - DNA, 474 bp, Glycine max
  Clone ID: LIB3087-006-Q1-K1-C9.R1
gggggggggggggtggggggcgggggggggggggggggggggggctggagggggggggggggggggttggggggggggggggggtggggggggggggggggggggggggtggggggggggtgggggggggggggggcggtgggggggggggggggggtgggggggggggggggggggggggggggtggggcggggtgggggggggggggggggggtggggggggggggggggggggggggcgggggtggggggggggggggtgggggggggtgggggggggggggggggtgggggtggggggggtgggggggggggggtgggtgggggggggggggggggtgggggggggtggggcgcggggggggtggatggggggcggggggcggggggtgggggggtgggtggggggggggtgggggggggggggggggggggggggggggggggggggggggcggggggggggggggggg

SEQ ID NO: 8379 - DNA, 588 bp, Glycine max
  Clone ID: LIB3087-006-Q1-K1-C9.R2
ccagcgtccggctccgtctccgatctcgccgtggagaaccagaatctgaaaactgcgaagaggaaggagcgagagaagaaggttaaagcgtcgtcgaagaagagcaagagcgtcgccgccgccgacgagatttccggcgacggcgagaagcttccgtacgttcacgttcgagttcgtcgaggtcaagccactgatagccatagcttagcagaaagggctaggagagagaagataaatgctcggatgaagcttttacaagagctggtcccgggttgcaacaagatatcgggaacggcattggttctggataaaatcatcaaccatgtgcaatctctacagaatgaagtggagatattatcaatgaaactggcagcagttaacccagtaattgatttcaacctcgacagcttactggctactgaaggagtgactccaatggactgtaacttccctccgacagttgcacctgtcatgtggccagaaatcccacagaacggaaacagacaacaatatcagcaaccatggccgtttgatgcactccaccaacccctttgggggagggaagaagacaacactaatttcatgact

SEQ ID NO: 8380 - DNA, 357 bp, Glycine max
  Clone ID: LIB3087-008-Q1-K1-A6.F2
aaataaaattttttgggggaaaaaaaaaaaaaaattaaaaaagcgaaaaaaaaaccccccaatgccggggggcagggaaaaaaccccccggggccccccccgggacccggggaaggggggggaaacggggaaaaaccgggccggggccggaggggaaaccaatgtggcggaagggggggaaaggggggccggggggaaaacagggcaaacccgggccccgggggaaaatggaaaacccggccaaaccacaaaaaaaagcgaaccgaaaaaaaaagggggaagccccggggcccccaaaggggcacaaaacccaaataaacgggggaaaacccaaagccccctttcaaaaagaaaaac

SEQ ID NO: 8381 - DNA, 190 bp, Glycine max
  unsure at all n locations
  Clone ID: LIB3087-008-Q1-K1-A6.R1
tacacgcgtcggtacganncgcgggtgngaaatttacagtgtcacaaaatatatgggattctttttaaaaattcataaaatagataatctgtgactcgaaaaaaaaaaaaaaaaaaaaaaaaaaaaaaaaaaaaaaaaaaaaaaaaaaaaaaaaaaaaaaaaaaaaaaaaagaaaaaaaaatggaaaagt

SEQ ID NO: 8382 - DNA, 399 bp, Glycine max
  unsure at all n locations
  Clone ID: LIB3087-008-Q1-K1-A6.R2
ccagcgtccgcggacgcgtgggcggacgcgtggggtaatttacagtgtcacaaaatatatgggattctttttaaaaattcataaaatagataatctgtngactcgaaaaaaaaaaaaaaaaaaaaaaaaaaaaaaaaaaaaaaaaaaaaaaaaaaaaaaaaaaaaaaaaaaaaaaaaaaaaaaaaaaaaaaaaaaaaaaaagggggcgggccggcttaaaagaaaccaaacttacaattccattgcatgcaacgtcaaattttttttatggggccacctaaaacaattccattggccaaaattttaaaatttcaaaactggaaaacccctggcgttaccgaatttatggcttttgaggaaattccccctttccccatttggttaaaaaccaaaaaggcc

SEQ ID NO: 8383 - DNA, 330 bp, Glycine max
  unsure at all n locations
  Clone ID: LIB3087-010-Q1-K1-D12.R1
cacgcgtccgcaaaaatggatgattctggaagtaaaactaaactgttgaatccatggatgctccacttccagaaactcgctctcgaactcaagtgccctctctgtttgagtttgttcaagaggccggtgttacttccatgcaaccacttgttctgcaattcatgtttggctgattgcataacggctgggcctggatgtgctgtttgtaaggcaacgtatgctcaaacagatgttaggcatgtgccttttgtggaaaacgtggtggcaatatatagaagcttggatgccactttttgtgctagttntgtttcagcatgtttctctggtgat

SEQ ID NO: 8384 - DNA, 564 bp, Glycine max
  Clone ID: LIB3087-011-Q1-K1-C12.F1
gacaatgacattgcagctctataatatccggaaaactcgaatccctcgtgttgtcatacgtaaaattgtatcaaaacaactctgatgaattgttctgctagcattaacataattgatgacaattccatactaaataaaaaattatataataccattcccataacaaatcgttaccgcaactttatccatttatatgtctgcagcaagaaagttaccggacagtgcaaccttctcgcccaatttgaaggcaggcagtcccttgtaagggcaggtactgacctgaaagcatcccctagcccacaattgccacaagctgattgaggattatcaatctgttctgttgtcaatcctaacttcaatactttttcctcctcttcagccctcccacaggtgcaatttttgcaggcttttcttgtgctcccaatttcacaatcaccaggtggaagctggggtttctttaaatcttcttcagtcaaaagactatcttcatcaatcagatctgaatcaaaatcaatttgcattttaggtgaactcctaatcaccttctttagcgcaaaagacgac

SEQ ID NO: 8385 - DNA, 519 bp, Glycine max
  Clone ID: LIB3087-011-Q1-K1-C12.F2
gacaatgacattgcagctctataatatccggaaaactcgaatccctcgtgttgtcatacgtaaaattgtatcaaaacaactctgatgaattgttctgctagcattaacataattgatgacaattccatactaaataaaaaatatataataccattcccataacaaatcgttaccgcaactttatccatttatatgtctgcagcaagaaagttaccggacagtgcaaccttctcgcccaatttgaaggcaggcagtcccttgtaagggcaggtactgcacctgaaagcatcccctagcccacaattgccacaagctgattgaggattatcaatctgttctgttgtcaatcctaacttcaatactttttcctcctcttcagccctcccacaggtgcaatttttgcaggcttttcttgtgctcccaatttcacaatcaccaggtggaagctggggtttctttaaatcttcttcagtcaaaagactatcttcatcaatcagatctgaatcaaaatcaatttgc

SEQ ID NO: 8386 - DNA, 607 bp, Glycine max
  unsure at all n locations
  Clone ID: LIB3087-011-Q1-K1-C12.R1
gcacgcgtcggtacgtnantntnnnctgtgcctcgttgctgaatcagaatggatggtgctgtgttggcatgtacagatggagcagttcttcccgtcagtcaagtgtttgatgcaattagagagcttgggaatggagggcttgagcaatgggatcctcttgttcttacttctgcctcactcttaagcaagttgcctgtggattcttcctctgttgattttgtgattttaatctggctgtcaatcgattgtcctgtggatcaactgattcaagaaattcttagagtgttaaaagtagatggtacaattcttattcgcaagtcatctcagtctgctgtgggttcatttgataagataatatcttctcttgagaacaagttattgttggcagggtttacagaaccacaagttttacaatcagctgggatcaaagctaaaaagccttcatggaaaattggttcgtcttttgcgctaaagaaggtgattaggagttcacctaaaatgcaaatttgattttgattcagatctgattgatgaagatagtcttttgactgaaggagatttaaagaaaccccagcttccacctggtgattggtgaaattgggagcac

SEQ ID NO: 8387 - DNA, 542 bp, Glycine max
  Clone ID: LIB3087-011-Q1-K1-C12.R2
cggacgcgtgggttctattctgtgctgttgctgaatcagaatggatggtgctgtgttggcatgtacagatggagcagttcttcccgtcagtcaagtgtttgatgcaattagagagcttgggaatggagggcttgagcaatgggatcctcttgttcttacttctgcctcactcttaagcaagttgcctgtggattcttcctctgttgattttgtgattttaatctggctgtcaatcgattgtcctgtggatcaactgattcaagaaattcttagagtgttaaaagtagatggtacaattcttattcgcaagtcatctcagtctgctgtgggttcatttgataagataatatcttctcttgagaacaagttattgttggcagggtttacagaaccacaagttttacaatcagctgggatcaaagctaaaaagccttcatggaaaattggttcgtcttttgcgctaaagaaggtgattaggagttcacctaaaatgcaaattgattttgattcagatctgattgatgaagatagtcttttgactg

SEQ ID NO: 8388 - DNA, 162 bp, Glycine max
  Clone ID: LIB3087-004-Q1-K1-G10.F4
gcggcgctctcgcatcgtcgcaagggttcgcattatcttcaattctttatctctatgtcttccaatgctctccttctcccttcttcttcttcttcttcttcaattcctcaaaacttgacttcatcttagcaattctaaaacagtactattaagaaggattcc

SEQ ID NO: 8389 - DNA, 445 bp, Glycine max
  unsure at all n locations
  Clone ID: LIB3087-004-Q1-K1-G10.R3
agtgtcttcacctgttccaagacaagaaaaaatattgatggtncatggaaaaatggataaaaagttaattgatcttaatacgaggccactgcggttaaatggagcagcaccaaacaaccaggaacgaggtatggatattttaagaggcaataatcataaatctgcgagtgtgccaccagtagaatccttcaaacaagagtctgagaagtaataaagctacaacatatagggtgtggtcagaggctacagaaatattatgtttacgcaaatttctcttacactgctgaccttgtttatgtgaatcttgttttttgtctgcttaaaagtttagttgtttggctgcagaccaaattaatgagggaaaatagttgctttcatatggatgagctgcataaacaaggttactacngcttaaactcgagggtataacatgattgttgccagt

SEQ ID NO: 8390 - DNA, 700 bp, Glycine max
  unsure at all n locations
  Clone ID: LIB3087-004-Q1-K1-G10.R4
tgtgtaacaaacttgctagtagacacgttcgggttggccttgctgaccccactgatgttccacgctgtgaatatgtgaaacgcacctggtactgaatgctttcttttactgtgagatagatggtagttcgctgtgtctgcaatgtgatatgattgtgcatgttggtggtaaaagaactcatggaagatatcttctattgaggcaaagagttcagtttccatgtgataaacctgcccaaatggaagaactagggctgcaacctatggatcaaaatgaatcaaggagggatgaaagtcagtcactcaagctaaaaataagagatagtcagcagaatcacagtgtctcacctgttccaagacaagaaaataatattgatggtcatggaaaaatggataaaaagttaattgatcttaatacgaggccactgcggttaaatggagcagcaccaaacaaccaggaacgaggtatggatattttaagaggcaataatcataaatctgcgagtgtgccaccagtagaatccttcaaacaagagtctgagaagtaataaagctacaacatatnnagggtgtggtcagaggctacagaaatattatgtttacgcanatttctcttacactgctgaccttgtttatgtgaatcttgttttttgtctgcttaaaagtttagttgtttggctgcagaccaaattaatgagggg

SEQ ID NO: 8391 - DNA, 422 bp, Glycine max
  unsure at all n locations
  Clone ID: LIB3087-004-Q1-K1-G4.R3
cggcaatctccagcttctctctttatgactaatgacacattaaaggaagctgcgngatactgcagcctacagagttgctgatgcctgaaagtaaatcatatctggctgcagaagcagtaaaggaggcagaaaaatatcattgctggttgaacatagtgattcaatgttacagctagcaaaagaatatatgaacaatgttcccgtggtgaaattatcctcttggcttaagatggtcgaagtaaggtctataaatagattcgttctgatgttggtttctaaatgtaaaattttgttgatccaatgaaatactatttttacatatttttttgtattttatcagattcctttaacatttttattccttaaaagtgcatggaaagtcatgtttatagtaatatcatcggtccaccaaatctttccgg

SEQ ID NO: 8392 - DNA, 669 bp, Glycine max
  unsure at all n locations
  Clone ID: LIB3087-005-Q1-K1-D1.F3
cgctcgtcgtcgcgtgngactcactcgccgcaacgggatgatgattgtagccaaacgcaaagccacgtggaccggccatgccggcgcgtaggacagcgtcgaagtacaaaacctgatttgccgcaggcaccgcgccggtaaaaaccgggaactggtgctggaaggggaatcgagcggatgcgacggcggcgggggcgaggttgaggtctagaggcgaggaatcggcggcgacgtcgcggtcgcggctggaggactcgacggtgctgctctggctggggctcgagttcttaacattttccaaagggagagggaagtttgtcttggccttagggccgcgaaactctgtgcttgcgggcgtcgtaggcacgcgctgcctcctccgccgtgtcgaaggttccgagccagacgcggctcttcttgccgggatctctgatctccgcggcgtatctcccccacggcctctttctcactccacgaaaatgcacctccttcaccccgctgttaccgttaccgttagccttagcgttgcttgtcttatgatccctcggcgccataatagtaattaaacttgtttttttattccgttattgcggagacggagttttgtggcagagcgtgagagaaagtaagaaaagataaacaagctaggcatacagatgagcccacgcg

SEQ ID NO: 8393 - DNA, 410 bp, Glycine max
  unsure at all n locations
  Clone ID: LIB3087-005-Q1-K1-D1.F4
ttacattttccaagggnagagggagtttgtcttggccttagggcccgcgaactctcgtgctgcggcgtcgtaggcacgcgctgcctcctccgccgtgtncgaggttccgagccagacgcggctcttcttgccgggatctctgatctccgcggcgtatctcccccacggcctctttctcactccacgaaaatgcacctccttcaccccgctgttaccgttaccgttagccttagcgttgcttgtcttatgatccctcggcgccataatagtaattaaacttgtttttttattccgttattgcggagacggagttttgtggcagagcgtgagagaaaagtaagaaaatgataaacaagcataggcatacagatgagcccacgcgtccgcccacgcgtccgcccacgcgtccg

SEQ ID NO: 8394 - DNA, 384 bp, Glycine max
  Clone ID: LIB3087-005-Q1-K1-D1.R3
ttaacctcctcctccgcatgagatcgcttgatccaaagtctgactcacccctttagttttttgtttttttttttttgtgtttcggattatgaatttctcgttagtttttttttatataagtagagaaagtagcagcctccgataagggaaaataacgagggaagggaagggaaagaaaagaaagtatgtgaatacgtaggcggtatgattgtctcaattttttgcgacatagaggaaccaccaccggtttcatcctgttgtttcttaaatcacgaaatggttatcgggtttttctttcgttttaattgattatgtactgcggtgtaatgtttttggtttgcagccataatttggttcaatgaaattaacacggaaagtttgcat

SEQ ID NO: 8395 - DNA, 637 bp, Glycine max
  unsure at all n locations
  Clone ID: LIB3087-005-Q1-K1-D1.R4
tcgccgccgnttcctcgcctctagnactcaacctcgcccccgccgccgtcgcatccgctcgattccccttccagcaccagttcccggtttttaccggcgcggtgcctgcggcaaatcaggttttgtacttcgacgctgtcctacgcgccggcatggccggtccacgtggctttgcgtttggctacaatcatcatcccgttgcggcgagtgagttccacgcgacgacgagcgactcggactcttcctctgttatcgatctgaaccataatgaaggcgaggttaaggggaacggttctagaatcttcgatctggaccttaaccatcctcctccgcatgagatcgcttgatccaaagtctgactcacccctttagttttttgtttttttttttttgtgtttcggattatgaatttctcgttagtttttttttatataagtagagaaagtagcagcctccgataagggaaaataacgagggaagggaagggaaagaaaagaaagtatgtgaatacgtaggcggtatgattgtctcaattttttgcgacatagaggaaccaccaccggtttcatccctgttgtttcttaaatcacgaaatgggttatcgggtttttccttttcgttttaattgattatgtac

SEQ ID NO: 8396 - DNA, 454 bp, Glycine max
  Clone ID: LIB3087-005-Q1-K1-E9.F4
aaatatggattataaaaataattattatgagcataatgaatcttttggtagttagttataaaattaatgtaattgggtgggtgagaagtaacctttatagtgggtggatttggatccttcaaacttgaggttttgaatcctacactacctatagtgtatcttgcacctgtcatttctttctgaagtcaaaaatacccttaatgagatacacctccgcctccctcccctctactcgccggagcagaagtggcagcgcgtggagtcgtaatgacctccggtgatcccgcagagcaacctggctcgccaacgtcgtcagaagctaagccagaaaacacggtgtctccagaagctgatgccgtgggacaagaaaacggaccaagcgatgcttctggaagaagcttacaaatacgtgaagttcctctagacagagtcacgcgtcctccactccgtgccc

SEQ ID NO: 8397 - DNA, 460 bp, Glycine max
  Clone ID: LIB3087-005-Q1-K1-E9.R3
tgattcatcacaagtcattggttggcatcttaagaatatgaacaatgaaactgatactatcactcccccaattcatatttcaagttttgcttttaatagctccatcctttgggactctgagagatggggtcgcacttcctctgttcaagacacttctcagaattcgatcaagttcgtgaaacaagtagttctagaggatgaggctaaattaaagggaattccaccagaggattgctccaaaatcttgctctggcgtttcaattttcgtgccagaactcattaatttctagattttagtccaaggcaaaggggaaagacataaaataacgagtgatgaagcaatatagaaattggcagtacagaaattactttcctactactatatagaatttattcattttttttttctctttttcaaatttatcctatgtttaattgtttatagttttattggttctaa

SEQ ID NO: 8398 - DNA, 654 bp, Glycine max
  Clone ID: LIB3087-005-Q1-K1-E9.R4
tatattagactagtcaacctcagattaaaaattaaactcctaacaccacgagcatgattcctagtattagttaaatggcctggtacaacacattctttatagatggatgtgtgccatcccacctgctatttggtgttagataacaactcatggtctcacactagcttttccttatgtttatttttattatattacttttacttcaaggtgcaaccaagtgaagccaccctcctatgaaatgccttcaaacgaaaaagctaagcagtcagtttggcagtaccaatcataataggctcaaatagttgcaacattttccttaacaaaaatgtggtacccttaaagcatctaagtttagtttatattacattaatttcacaatccctccacttcattctgtgcctccaacttgtcattcaattccaccctgaagattgtgcttcaggtggttcaaagaagatgggctcactagaaagatcaaagaagaaagtccttctatggaagaaggccatgctccatttttctctatgttttgtgatggggggttttcacaggcttggctccaacaggtaaatcttctctcttttccaccacagttagtgtctcaaatagaacagaatttgcaccacaacccagtgaaatgttacacctcacaac

SEQ ID NO: 8399 - DNA, 635 bp, Glycine max
  Clone ID: LIB3087-005-Q1-K1-G2.F3
gtttgtgaatattagagatggaaaggtgcaacgccattgcacttggcagctcgtcagagacggtctgaatgtgtacatattctattagacagtggtgctcttgtttgtgcttcaactggtggatatggctgtcctgggagcactcctctacatctagcagctagagggggatctatagattgcattcgtgaattgttggcatggggtgctgatcgtcttcaacgcgatgcatctgggcggataccatatatggttgctctgaaacacaaacatggagcctgtgcatcattgctaaatcctacatctgcagaacctcttgtctggccgtctccattgaagttcatcagtgagcttaatcctgaagccaaagctttattagagcaggcattgatggatgcaaacagagaaagagagaaaaacatattgaaagggagttcttactctctgccatctccatcacattctgatggggtagctgataatatgtctgaggttagtgagtccgaattatgttgcatctgctttgagcaggtgtgcacaattgaagttcagaactgtggccaccagatgtgtgcacaatgcacactagccctgtgttgccacaacaagcccaaccctgccactgcctgtcttac

SEQ ID NO: 8400 - DNA, 313 bp, Glycine max
  Clone ID: LIB3087-006-Q1-K1-C9.F3
tggttgatgattttatccagaaccaatgccgttcccgatatcttgttgcaacccgggaccagctcttgtaaaagcttcatccgagcatttatcttctctctcctagccctttctgctaagctatggctatcagtggcttgacctcgacgaactcgaacgtgaacgtacggaagcttctcgccgtcgccggaaatctcgtcggcggcggcgacgctcttgctcttcttcgacgacgctttaaccttcttctctcgctccttcctcttcgcagttttcagattctggttctccacggcgagatcggagacggagc

SEQ ID NO: 8401 - DNA, 274 bp, Glycine max
  unsure at all n locations
  Clone ID: LIB3087-006-Q1-K1-C9.R3
cgtttgnagcactccaccaacccctttgggggnaggagnaanacacctatttcatgactccanaaaactcactcttgattatgactcatcggcaaattcagtatctctgcattcaaatcagttgaagatggactctaaaggaactacaaagtggtggtaccagtagcaattagcctattagtgtatataacaaatatagtattagcaattagtcatgatttgagcagcctcaacattcagcaggttttccctaactctattttgtcagagtcag

SEQ ID NO: 8402 - DNA, 422 bp, Glycine max
  Clone ID: LIB3092-062-Q1-K1-G5
gggggagtacagaaagaaaaggactatccatacaccgggagagatggcacctgcaaatttgacaaaaccaaagttgcggctactgtatctaattacagtgtggtttcccttgatgaagaacaaattgctgcaaacctagtaaagaatggccctcttgcagttgctatcaatgcagtttttatgcagacatatgttggtggcgtctcatgcccatacatctgtgggaagcatttggatcatggggttcttctagttggttatggtgaaagtgcatatgctcccattcgttttaagaacaaaccttactggatcattaagaattcatggggcgagagctggggagagaatggatattacaagatctgcagaggtcgaaatgtgtgtggagtagattccatggtctcaactgtagctgctatata

SEQ ID NO: 8403 - DNA, 301 bp, Glycine max
  Clone ID: LIB3092-062-Q1-K1-G6
ctcatattccccaaaaagtagatccggctctaatagctccgaataaggtaaatacatgcattgagatacgaaggcttctgatttgacaacaacgaaaacactttttcactctttcatatactaggggatttcacttggaaaagaaaatgtcccatactaatggattcgggtgcacaacgatgggttcaaaagtacgagatcttgtagcacttaccaacgaggccctatcgattagtattatacagaaaaaatccatcatagacactaatataattagatccgatcttatagacaaacttgg

SEQ ID NO: 8404 - DNA, 239 bp, Glycine max
  Clone ID: LIB3092-062-Q1-K1-G7
cccacgcgtccggtttcgatgatgggtggttaatgttacagatcatatgcgagtaatgctgtggcatgctataatgacggagatgaaattaacatccacttcatttcactaagaaacttactaagtgatgataactctagaaataattgccctatactaattgctattaatgcacatttaatgcttacatatgttgatagcgtgtaatgcccatacatcagggggtagcatttagatca

SEQ ID NO: 8405 - DNA, 447 bp, Glycine max
  Clone ID: LIB3092-062-Q1-K1-G8
tcgcccacgcgtccgcaccacaacactattcttcttcgcagcaatggcgcgagtggatctggacgggaaccccatgaaggcacttacgatctgcatgatcggcgctggcggcttcataggctcgcatctctgcgagaagctcatgtccgaaacccctcacaccgtcctcgccctcgacgtctacaacgacaagatcaaacaccttctcgaacccttcgattccccctgggccggccgcatcaccttccaccgcctcaacatcaaacacgactctcgcctcgaaggcctcatcaagatggcagatctcactattaatctggctgccatttgcactcccgcggattacaacacccggcctctcgacaccatttacagcaatttcatcgacgcgctccccgtggtgaaatactgttccgagaacaacaagcgccttatccatttctctac

SEQ ID NO: 8406 - DNA, 380 bp, Glycine max
  unsure at all n locations
  Clone ID: LIB3092-062-Q1-K1-G9
ccacgcttccnatttccattntaaagttttttactttatttgtatccttctctcacattgtcctgcttataacgcctgtatattctctccatctctaaacattctcatcatatcataccataattttcttcagtttcttcaaccttttgccttgaattgttcatatcatcctattaagaatgtcaaactttttatctgtttcaactttcatcaatctttttctcctttttaagctcattcattttctctaattatttctaacactaaaatttcatcttcttattttcataatctctctccaatttttaccactaccttaacatctactattcttcaatgatttctaattcttttcctgtttattgattcttttttttctt

SEQ ID NO: 8407 - DNA, 440 bp, Glycine max
  Clone ID: LIB3092-062-Q1-K1-H10
acggtctgatctcagttgtcagtttatggtggtcaaagtggctttcaatccatgatgaaaagcgatgcaaagaaattggctgaacaggatgaatcagtattgaaaacctcaggaattccttacaccataattaggaccggtgcattacaagatacacctggtgggaagcaaggctttacctttgatgaaggttgtgcagctagtggaagtattagcaaagaagatgctgcctttgtttgtgtagcagcttttgattgtgtcccacaaactggattcatttttgaggtggccaatggggataacaaagtttcagattggaaagaatgtttggccacattgatggagaaagcaagtcaaaaacttcagtgactattgacagggaatgtgtgttcttcctattgaattcttgatgtgcagaatggtctcaaatgggttggttt

SEQ ID NO: 8408 - DNA, 378 bp, Glycine max
  Clone ID: LIB3092-062-Q1-K1-H11
gacttatctcaaccacctctctatgccaatctctctgactgtgcttctataatgactaggagcgcgagatacatcactgactgctacaaataacttattctctccaaattctcatgttcatcattaaccaacaactgcttcatacaagattcacccagtagcaatcatacttatatctctaatgcagacagatactcatattgaactcataatttttaacatgctggattagctacttaacaaaacctcgattgtgaccaacacactgcattcatttatgaagggacctcaaggcattactgcctgtcctaaaggtataatcacatgtgccctgactttcataattatagtaacagacgtcactccctattgcaaaac

SEQ ID NO: 8409 - DNA, 413 bp, Glycine max
  Clone ID: LIB3092-062-Q1-K1-H12
aattcccttctccgacccgagcgacccgtctgatctcacttgtcatcctatggtggtcaaagtagctatcaatccatgattaatagcaatgcgaataaaatggctgagcgggatgaatcactattgaaaacctcatgaattccttacaccataattaggaccgctgcattacaagatacacccggtgggaagcatggctttacctttgatgaaggttgtccagctagtgtaagtattagcaaagaacatgctacctttgcttgtgtaacaacttttgattgtgtcccacaaactgcattcattattgaggtggccaatggggataacaaagtttcagattggaaagaatgtttggccacattgacggagaaagcaagtcaaaaacttcagtgactattgacagggaatgtgtg

SEQ ID NO: 8410 - DNA, 459 bp, Glycine max
  unsure at all n locations
  Clone ID: LIB3092-062-Q1-K1-H2
cccacgcgtccggcgcatttccgctgttgtatgtgtgtgtttgcgatgccaggtggggcaaccgtctgctccggtcaccggtttctctgcgttggtctgcattcgactcgtccccgactcagctacccgactcggtcgcgacccgttccggttcaacttggatccgtgtttgtgtcgaatggtaatggcgatagtaagcggttcagctccaagttgagcctcattcccagagccgttgattcttccaccgcacaatcttccgtcgtttccgacgatggcttctccgtttctaagctttcatttggtgtgattggtctaggtgttggactctcactcttgtcctacggttntggggcatattntaatattctccctggatctgaatggtcagctataatgttaacttatggcttccctcttgcaattattggaatggcactcaagtatgcagaactcaag

SEQ ID NO: 8411 - DNA, 457 bp, Glycine max
  Clone ID: LIB3092-062-Q1-K1-H3
gggacaactccaagttatgttcctgtggtggagatcgacaaatattttattgggacgttgcaactggacgtgtaattaggaaatttcgtggccatgatggtgaggtaaatggtgtcaaattcaatgagtattcatctgttgtagtctctgctggctatgatcaatcgttgcgtgcttgggactgcagatcccacagcacagagccaattcagattattgacacatttgcggatagtgtgatgtctgtttgtttaacaaaaactgaaattattggaggaagtgttgatggaactgttcgaacatttgacattcgtattggcagagaaatatccgataatttagggcaatctgtcaactgtgtatcaatgtcaaatgatggtaactgcattctagccggttgcttagactctacattgcgtcttttggacaggtccacaggtgaactgttacaagaata

SEQ ID NO: 8412 - DNA, 392 bp, Glycine max
  Clone ID: LIB3092-062-Q1-K1-H4
tccagacttcccgtttacacctacaatttattttcctttttttatgatcgacaaatatattatttgaactttaaaggtgtacttctaacaggggaatttctttaccatgatgcatatgtatattttctcaatttcattcactattcatttgttatacactctgcttaatattatcaatctttttgtgcttaatactacatatcctacttaacaaatccaattcaaattattcactcatttcataatcgtttaatctttcatcgttcaacattaactcaatttcttcgatgaatttttcattgatcagctttaacatttgacaatttgattaacattataaattttcacttatttactacaattttttaacattttataaaattcaaattata

SEQ ID NO: 8413 - DNA, 279 bp, Glycine max
  Clone ID: LIB3092-062-Q1-K1-H5
gtgatttggagtttggagcgactgaactaatcattaatttgcactcgctgtttcagcttcatgacccttcttttgcatcatttttatctcttgagaaatggcacaagaaacctttctattcacatctgaatctgtaaacgagggtcaccccgacaagctgtgcgaccagatctctgatgcagtacttgatgcctgccttgaacaagacccttacagcaagggtgcctgtgagacatgcaccaagacccacatggtcatgggcttcggagagatcacaac

SEQ ID NO: 8414 - DNA, 412 bp, Glycine max
  Clone ID: LIB3092-062-Q1-K1-H6
ctaaagtgttgcagtctctcatcccaattgttgatcagtctgttgttgagagtaccatccgtccctgtctggttgagctcagtgaggatccagatgttgatgttaggtttttcgcctcacaagcactacaatctagtgatcaagtcaagatgtctagctagatcagtttgcatgtggtctttagctatttgcttttcttataagatgtccattttcttgtgtaattggcatgacgcccacttgccccatcctttgtatcacatataattgatgcgatcctgctttgctttcattctatgcgtacctatgctaccaggtactttgtagtgatgaaacattgttcaaaaatgagatgggttttgacgaccactcattatatgggttaccaatgtgaagattatgcatgaaattt

SEQ ID NO: 8415 - DNA, 245 bp, Glycine max
  Clone ID: LIB3092-062-Q1-K1-H7
cccacgcgttcgcccacgcgtccggaattggttgaactttttgattgctaaattctctaaaatgcggaattctaatttcggtaggggaaagagattggttgggtgtgagtgagtatggctggaaaaagccaaggtcctgctatcggaatcgatttgggaacgacgtactcttgcgtcggcgtgtggcaacacgatcgtgttgaaatcatagcccacgatcagggtaacagaactaccccatccta

SEQ ID NO: 8416 - DNA, 348 bp, Glycine max
  Clone ID: LIB3092-062-Q1-K1-H8
gttgtgtatgactaggtttctgccagccctggggataatgggtaattatctagattcttcaggtgaagtagaagcagctcacaggtccagaaccccttctgggatttcaaaaactagaccttcatctggtcctcccaacttatctattctggcatatagtgaaacaagggatttctcaaatcttcccacaccgaagtccgagggtgaaatcttggctttcccaaatcttaaagcctttacctttaacaagcttaagaatgccaccaggaactttcgccccgacagccttcttggtgaaggaggatttggttatgtttacaaagggtgggattggtgaacccacactta

SEQ ID NO: 8417 - DNA, 379 bp, Glycine max
  Clone ID: LIB3092-062-Q1-K1-H9
ggaaaatttgggctccgagtttgtttggatgaagaaaaataataatagtactcagggtccacaggctagaagcatgatgcaatttatgtcattgtacatcatactcagaatgacccataagcagctgtataatctaatgataaaagttggccaagcagtacttccacatgtgtttcagacttgtagtgcaacaagcttgccttttgcttgtgtttctaatgccttgaataaacctaagcctcttaatttagacgtgtccttgccttctattcatgatattagatggagcttagcacggttgttatacttatttaacatccagcttgaaagaaatgttgccacgttctttggggtgctccttttagcgtgcttctcattt

SEQ ID NO: 8418 - DNA, 339 bp, Glycine max
  Clone ID: LIB3092-062-Q1-K1-G4
aaatgaatcaaattctttgagtcgaacacaggggccaagatttcgtactttgggttagggacttggcaagcttaacctggagtagtagctgaagctctcaccacagacgttcatgatggatacaggcatagtgactgagctagtgcgtataagaatcaagcagagattggctatgatcttaagaagctcattgatgatcgtgtagcgaaacgtgcagacttatggatcacttgcaaactctggtgtatagatcatgcatacgaagatgtgccaaaagcattgcatagaacattacaggaattgcaacttgactatctcgacctgtatgtgatacactgg

SEQ ID NO: 8419 - DNA, 427 bp, Glycine max
  Clone ID: LIB3092-062-Q1-K1-E8
caaaatcccaacacatggactcgagactcttgcacttgcatatccagactctccctcctatggcgtgcgacactcaccggcctctctaccacccttttaccgactgctgcgcttctttccaccgctcttctgctgctctcccacgcttacgcttctcgccgcttctcgccgctaacaccctcaccgctaataacatctcgccaagaagtggactatacactgatggtgactttatgacaaagaaagaggatttacatgtggtgaaaccgacaacatctgtggatgaagctttagaaattcttgttgaaaacaggataactggttttcccgggattgatgataactggaaactggttggtgatgattcagattatgatttggtaacactggactctatatcaggtcaacggttaaaggattacatgtt

SEQ ID NO: 8420 - DNA, 435 bp, Glycine max
  unsure at all n locations
  Clone ID: LIB3092-062-Q1-K1-E9
ctcttcttctcttgcggctagggttttagcgcagcttcttctagatttaaggaagatggggaaggaaaaggttcacatcagtattgtggtcattggccatgtcgactctgggaaatccactaccactggtcacctgatttacaagcttggaggcattgacaagcgtgttattgagaggtttgagaaggaagctgctgagatgaacaagaggtctttcaagtatgcctgggtgctggacaaacttaaggctgagcgtgaaagaggaatcaccattgatattgctttgtggaagtttgaaacaacaaagtattattgcacagttattgatgcgcctggacatagggatttcattaagaatatgattactgggacatcccaagctgactgtgctgntcttatcattgattcgaccacttgtggttttgaagctggtat

SEQ ID NO: 8421 - DNA, 458 bp, Glycine max
  Clone ID: LIB3092-062-Q1-K1-F1
cttcctgataaattgcgcaattttatttggggaaagttttagtcggaactcgtacttcaaatggtttttttgaaacagcaaattttagcaattgattataatcattttgagtttaggttgtgttactcaaaatttgttggatttgattgcaattcagtttgaattatttaactatgttcccttattactttactcatttacgtattcagactgatgataattaagtaaattacttaaataaaatgaattgtaagttccaacataaatttcatttgcaaattagttcagatagtctttttttgaagaattccaaacacaatagtttgattactaaaaatcaaatctattttgtattttagcggttctgaggacagtgtatgtaatttgccctgaagaatatagcttaagcctcagaagaagtaatttgtctgaaaaatttattggtttttattcttatc

SEQ ID NO: 8422 - DNA, 408 bp, Glycine max
  Clone ID: LIB3092-062-Q1-K1-F10
ctcttcttctcttactccttgggttttagcgcatcttcttctagatttaatgaagagtggtgattaaaaggttgacatgactattactaccattttccatgtctactctcataaatccactaccactgctcacctgatttacaagcttgcatgcattgacaatctttttattgacatttttgagaatgaatcttcttacatgaacaagatgtctatcaagtatgcctctttgctatacaaacttaatgctgaccctcaaatatgaatcaccattcatattgcttcatgcaattttgaaacatcatagtattatttcacaattattgatgctcctgcacatatgtatttcattaataatatgattactgtgacattccaatctgactttgcttttcttatcatttattt

SEQ ID NO: 8423 - DNA, 317 bp, Glycine max
  Clone ID: LIB3092-062-Q1-K1-F12
gctacacgaccacacatacatgagcttttaccacaatccatttaatccctactacaggctggaatcaaagtctggggtcttaccattaattatcaagatactgcaatttcaattggtctttcttataaacttctgattgcatatatacagcaaataattataaatggcacttcatatgttgagtacaaaaatctcttggctgatgccacaacatagtatggtgtgaaatcttcaagtatataacaacataatctataattcaaaattgattctaaacatatatgccctaatatttccaatgatacataatcctttat

SEQ ID NO: 8424 - DNA, 431 bp, Glycine max
  Clone ID: LIB3092-062-Q1-K1-F2
gcgtaccttcctgataaattgcgcaattttatttggggaaagttttagtcggaactcgtacttcaaatgctttttttgaaacagcagattttagcaattgattataatcattttgagtttaggttgtgttactcaaaatttgctggatttgattgcaattcagtttgaattatttaactatgttcccttattactttactcatttacgtattcagactgatgataattaagtaaattacttaaataaaatgaattgtaagttccaacataaatatcatatgcaaattagttcatatagtctttttttgaagaattccatacacaatagtttgattactaaaaatcaaatctattcttgattttagcgattctgtagacattgtatgtaatttgtcctgtataatatatgcttaatccttagaagaaataat

SEQ ID NO: 8425 - DNA, 461 bp, Glycine max
  Clone ID: LIB3092-062-Q1-K1-F4
agctgcttccccaatggcaagccaactcaagtccaccttcactaggactcttgtagctcccagagggcctctctgcctgttgaccacttcacctcgtgccttctagaaggcaatttagcttcactgttaaggccatccaatcagagaagccaacctatcaagtgattcagccaatcaacggtgacccattcattggaagcctggaaaccccagttacatccagccctttgatcgcatggtacttgtccaacctgcccgcatacagaaccgcagtgagcccactactaagagggatcgaggtgggcctggcccacggataccttctggtgggcccattcgtgaaggccgggcctcttaggaacaccgagatcgccgggcaagcgggctctctggcccgccgtgggcttgtggtgatcctcagcctttgcctcacaatctatgggatttcatccttcaacgaa

SEQ ID NO: 8426 - DNA, 448 bp, Glycine max
  Clone ID: LIB3092-062-Q1-K1-F5
cccacgcgtccggctacatggtcagaatacatggttagtgatgccaactacgttctcaaagttgatccaaccattgatcgagctcatgccagtttcatctcatgtggcttttcaactggatttggagctgcttggaaggaagccaaggttgaaagtggatccactgtagctgtttttggtcttggggctgttggattaggggctgtaattggatccaaaatgcagggagcaagtaggataattggaattgacacaaacgagaacaagagagcaaaaggagaagcttttggaataactgactttataaatccgggtgattctaataaatctgcttcagaattggtcaaggaactaagtggtggaatgggtgccgactattcttttgagtgtactggagtttccactttactctctgaatccttggaagccacaaaaattggaacaggta

SEQ ID NO: 8427 - DNA, 421 bp, Glycine max
  Clone ID: LIB3092-062-Q1-K1-F8
gaaattttcagatctcttacttttacaccccttgtcgcgaaccaagaccaaacacagacacacccttccatcaacgttaactccgtcaaaatcaacggcaaaaaggtttctttcgacacccccttgggtgggggtgctcagctgagcacggtggtgccttacaccactctccaaacctcgatctatgcaaacttcgaaagcgcttatttgaaagccgcttcgtctatgagcatgaaaagggtcgatccagtttccccctttgggctctgcttcgaatccaacggcgttggaagctcccaagtggggcccaacgtgccggtcattgatctggtcctgcagagcgagatggtgaagtggagcatacacggaagaaactccatggtgcacgtgaacgacgatgttatgtgcttaagggtttgtg

SEQ ID NO: 8428 - DNA, 429 bp, Glycine max
  Clone ID: LIB3092-062-Q1-K1-F9
cccacgcgtccgtgaatgcatgtgctttgcgctcattggacatgtctaataatagcttgagtgagagagatttcaatgggaatccatcacttgtctggatgtgctagatattcattggaacaattatatctaggcatgaatcaaatcaatgacacactacccgacctctcaatattctcatctttaagagaattatatctttatgggaacaagctaaatggagagatttcacaagatattaaatttccacctcaactggaggtactatatatgcaatcaaattccttaaagggtgtgctcactgattatcatttcgctaatatgtctaagttagacatcttggacttatctgagaactctttattggccttggcatttagccaaaattgggttccaccatttcagttgagccacataggattgcgatct

SEQ ID NO: 8429 - DNA, 351 bp, Glycine max
  unsure at all n locations
  Clone ID: LIB3092-062-Q1-K1-G1
ccaacccgacccataaagagatccgttaccgcggcgtgaggaagcggccgtggtgccgctacgccgncgagatccgcgacgcangcaagaagacacgcgtgtggctaggaacgtttgacacggcggaggaggcggcgcgtgcgtatgacacggcggcgcgtgagttccgcggcacgaaggcgaagaccaatttccccacccacgcggcggcggcgcgtagtcccagccagagcagcacgctggactcctcgtctccgccgccgctggaccttactcttgccgccccactcaccgtcgggggcgcgttggtttttccggtggcgcgtcccgtggtgttctttgacgcttttg

SEQ ID NO: 8430 - DNA, 454 bp, Glycine max
  Clone ID: LIB3092-062-Q1-K1-G11
cccacgcgtccgatttccgttggaaagttggttactttgtttggatcggtctctcacattgtcctgctaataacgccgtatattctctccatctctaaacattcgcatcatatcataccataagtgtgttcagtttcttcaaccgtttgccttgaattgttcatatcatcctgggaagaaggtcaaagtttttatctgtttcaactttcagcaatcggtttctccttttgaagctgattgagtttggtggatgatggctaacactaaaatttcatcttctgagtggcgtaagctctctccgagtgttaccacggccttggcgtcggcttttcttgaatggttgctgattcttttcctgtttattgatgctgttttttcttatgttataacaaagtttgctggttactgcaaattgcaaataccgtgcctgttatgctcaaagcttgatcatgtg

SEQ ID NO: 8431 - DNA, 450 bp, Glycine max
  unsure at all n locations
  Clone ID: LIB3092-062-Q1-K1-G12
gcttgttggaccatatcaaacatcacagctggtaataaacagcagattcaggctgtgatggaggcgtaatctaattgctgctttggtcaatctgcttcaaaatgctgagtttgatatcaagaaagaagctgcttgggctatctcaaatgctacatccggtggttctcatgaacaaatcaagttcctagtaagtcaagggtgtatcaaacccttgtgtgatcttctcatctgtcctgatcctaggattgtgacagtttgtctggaaggccttgaaaacatcttgaaggtgggagaagctgataaaaatataggcaatactggtgatgtgaatctatatgcccaaatgattgatgaagctgaagggctggagaaaattgagaacctncagagtcatgacaacacagagatttatgaaaaggcggtcaagattcttgagacatactggttgga

SEQ ID NO: 8432 - DNA, 427 bp, Glycine max
  Clone ID: LIB3092-062-Q1-K1-G2
ggtctctggagttacaccacaggcacggagctctaggactgctcattacgtagcggcttatttagaggctaagatgagctttgctgcgccatcacttggttctgctggtggtagatctgctagaagagcattcgagtttgggagaacctatgttgtcaggcctaaaggtaaacaccaagcaactatagtctgagtgcatggcctcggggataatggctccagttggtcccagctattagagacccttcctcttccaaatattaaatggatatgtccgactgctcctactcagccaatatctatatttggtggctttccgtccactgcttgggttgatgttggagatatttcagaagatgctcctgatgatctagaaggtttggatgcttctgctgcacatgttgcaaatttgctgtctacagaacct

SEQ ID NO: 8433 - DNA, 416 bp, Glycine max
  Clone ID: LIB3092-062-Q1-K1-G3
agctgcttccccaatggcaagccaactcaagtccaccttcactaggactcttgtagctcccaagggcctctatgcctgtgcaccacttcacctcgtgccttctataaggcaatttagcttcactgttaatgccatccaatcagagaagccaacctatcaagtgattcagccaatcaacggtgacccattcattgtaagcctggaaaccccagttacatccagccctttgatcgcatggtacttgtccaacctgcccgcatacagaaccgcagtgagcccactactaagagggatcgatgtgggcctggcccacggataccttctggtgggcccattcgtgaaggccgggcctcttatgaacaccgagatcgccgggcaagccggctctctggccgccggtggccttgtggtgatcc

SEQ ID NO: 8434 - DNA, 247 bp, Glycine max
  Clone ID: LIB3092-062-Q1-K1-E7
attgattccgaagagaaaagaaaagatgtttgagccacaacagctatgcactctcgcgaaaacgcgggaattcgacctcggatcaagagaaaccctctacccagggctgaacgtcggcgaaaaccaacttcgatggggtttcatcccgaaggtctacggcatcctcttcgggcaaatcggccttaccaaccttgtcttcgtcaccaccggtttctatacctcaatcaatgaccttctcaaaggcaat

SEQ ID NO: 8435 - DNA, 435 bp, Glycine max
  Clone ID: LIB3092-062-Q1-K1-D12
tgaactcaaatatctgaaacagctgattaatctttatcaagcaacaacaactatgtactgcagtacatatcaaaaacagtgttatagcatcaccgaatatgctcatccaacatctttatattcttctactcaattgacatcctcactttattccaccaacaaagaactctaatatcaacaatctctcttaactcatatcctgtcttcaccctactcaagcacaagtttatcttctagtacactctccaaacacctgaacttcaaaatcaaacatcatactaagacaccatacataacattcttaaatttactacggttgaattattctatctctgctacttacatcttgctcctcccgcttttttacctattccaacatatttgcaccttttcaatgaatgaatccgtcctctattgtaatactcttctaacttc

SEQ ID NO: 8436 - DNA, 461 bp, Glycine max
  Clone ID: LIB3092-062-Q1-K1-D2
cccacgcgtccgttccaaagcccttgtttcactttttccaatccgatatggccgccgcgaccggcttgctccgctctgggcgccgccgcgaccttgcctcgtcttctctctccgcctttcgttcagtgacgagtggcacaaagacatcatatgtagggaacaagtgggcaagtttgtctcggccgttcagttcaaagcctgctggtaatgatgtcattggaattgatctgggtactaccaattcatgtgtttctgctatggagggaaagaatcccaaagttatcgagaattctgaaggaactcgaacaacaccatcagtggttgccttcaaccagaaagcggagcttcttgttggtacaccagccaagcgtcaggctgtgacaaacccaacaaacactctttttggaaccaagcgtttgataggtaggccgtttgatgattctcaaactcagaaggagatg

SEQ ID NO: 8437 - DNA, 411 bp, Glycine max
  Clone ID: LIB3092-062-Q1-K1-D3
cacgcgtccattccaaagcccttatttcactttatccaatccgatatgtcacgcctctacacggctttctccaatctgggggccgtcgcaaccttgcctcgtcttctctctccgactttcgttcgttgacaaatggcacaaacacatcatatgtacggaacaagtgatcaaacttgtctcggtcattcatttcaaaacctacttataaagacgtcattgaaattgatctgagtactaccaattcatgtactttctgttatcaaatgaaagaatcccaaatatattgacaattcttaatgagctcaaacaacaccatcagtcgttgccttcaaccagaaatcagatctacttgttattacaccagccaagcgtcacaccttttacaaacccaacaaacactctttttggaac

SEQ ID NO: 8438 - DNA, 439 bp, Glycine max
  Clone ID: LIB3092-062-Q1-K1-D4
agaagggccatcttcccgatcatcttgcttactaaaagcaatgcgataagatcgtcaaaaaatgctttctaccttcagtcggatggcccattaatgcctatgctcttctcaatcaatatggtcaaaacattactcacattgcacatatatgtaagaaacaatgtggcaaaatacctactaccaaattgcaacactgctcatctacatataaaccatagagactatgatgggaacactccattgcatttggcttccataaatgtatttcagcaagttatcagcttgatcacagaggataagaggactgatctgaatctcacgaatgaagaccgtttaacggctggtgatatcagtaagacctttgaacatccaatgttacctggaagagagattttatccatggagttatcaaaaggaactggaatccctgtaaatcaca

SEQ ID NO: 8439 - DNA, 446 bp, Glycine max
  Clone ID: LIB3092-062-Q1-K1-D5
agaagggccatcttcccgttcatcttgcttgcaaaaggggttgtgttgagatggtaaaagaattctttgaacctggatccggatggcccattaatccttatgttctcctcaatcaaaagggtcaaaacattcttcacattgcggcaaagaatggaagagataatgtggtagaatacctactaggaaattgcaacactggtcatctacatataaaccagaaagactatgatgggaacactccattgcatttggcttccaaaaatttatttcagcaagttatcagcttgatcacagaggataagaggactgatctgaatctcacgaatgaagacggtttaacggctggtgatatcagtaagacctttgaacatccaatgttacgtggaagagagattttatccatggagttatcaaaaggagctggagtccctgtaaatcacatgttg

SEQ ID NO: 8440 - DNA, 279 bp, Glycine max
  Clone ID: LIB3092-062-Q1-K1-D6
agaagggccatcttcccgttcatcttgcttgcaaaaggggttgcgaggagatcgtacaagaagcctgtgaacctacatccggatggcccattaatccttatgatctcctcaatcaaaagggtcaaaacattcttcacatttcggcaaagaatgcaagagataatgtggtataatacctactatgaaatttcaacacttgtcatctacatataaaccagaaagactatgatgggaacactccattgcatttgtctcccaaaaatctatttcagcatgtta

SEQ ID NO: 8441 - DNA, 216 bp, Glycine max
  Clone ID: LIB3092-062-Q1-K1-D7
gcaatcatcacacatgtttttatcgagactcgtgatgtacacatatggttacaattaattggcgatattatagatagatacttaatatgtagatttattttgtatatttttttgagtgtcattatgtagagttgaatatttgattttaaactcaaatgtcatagccatgggacatgtttcgctccgtaaatgaaattgcaagttaatgtattttac

SEQ ID NO: 8442 - DNA, 174 bp, Glycine max
  Clone ID: LIB3092-062-Q1-K1-D8
acaatcatcacacaattttttatcgagactcctgatgtacacatatggttacaattaaatgagtaggttatacatagatacttaatacgtagaattattatgcatatctaattgaatatcattatatcaagtttaatatttcatcataaacttaaatatcatacccattggaca

SEQ ID NO: 8443 - DNA, 226 bp, Glycine max
  Clone ID: LIB3092-062-Q1-K1-D9
atacatttactcttctatataaagatcgattcttaaaaaaagttgcctcattatactactctttcattatatctacttatctacttacattcaattttaatctcattcttttacccttttttaacttatatttatccactatcttctataatttcaccatatcattttaacttttctccctttcttaaacttatatcaattcattttaactcttaactttcttcct

SEQ ID NO: 8444 - DNA, 316 bp, Glycine max
  Clone ID: LIB3092-062-Q1-K1-E1
agtcggaactcgtacttcaaatgctttttttgaaacagcggattttagcaattgattataatcattttgagtttaggttgtgttactcaaaatttgttggatttgattgcaattcagtttgaattatttaactatgttcccttattactttactcatttacgtattcagactgatgataattaagtaaattacttaaataaaatgaattgtaagttccaacataaatttcatttgcaaattagttcagatagtctttttttgaagaattccaaacacattagtttgataactaaaattaaatctattttgtatttt

SEQ ID NO: 8445 - DNA, 299 bp, Glycine max
  unsure at all n locations
  Clone ID: LIB3092-062-Q1-K1-E10
gaaattaattatctggggcagctgcgtcatctctaatcttgtgaaactgattggttactnagtagagttcgatcaacgggttttggtgtatgagtttttgaccaaatgaagtttggataatcatttaattaggagagcttcttactttcaaccactttcttggaacttccgtatgaaagttgctcttgatgctgctaatgttcttgcatatctttatatccattaatcataattgatatatctagacttcaaatcttcaaatatcttacttgattcgaattacaatgcataactttctt

SEQ ID NO: 8446 - DNA, 462 bp, Glycine max
  Clone ID: LIB3092-062-Q1-K1-E11
cccacgcgtccgcccacgcgtccgaaggggtcacaaacacttgtgaagtctgcgaacgtaggcttcttgattctttccgcttctgttctcttggttgcaagattgttggaacatctaagaacttccagaagaggaagaaacagtcaatgttaatgtcatcagattctgaggactcatacagcagcaacagcgtccatggccttaagaaaaacttcaaagttcagagcttcacaccatccacaccacccccaacatcggttaattacagaacggccaagagaagaaagggaataccacaccgtgccccaatggttggactaatcatagaatattagatagttggtatttttaggttattggctacaatgcccttaggtataaaaataccatagtatactaaagcaagtgtttcgacgtcgtttcatcaaagtccaatactcgagctttcctagggccggtatt

SEQ ID NO: 8447 - DNA, 323 bp, Glycine max
  Clone ID: LIB3092-062-Q1-K1-E12
cccttcagcgcatctctctctacatttaaatcaaaggtgtgcctaaaagattagtactactattactaccacattccatgtctactcccatataatcactacctatactcaccatatttacaaccttccatacactcacaatctatttattcactattcacagatactagcttcatacattaacaatattatcataacttatacctagcctctagacaaacctaaacctgaccttctacaacaactcatccttacataccccttcatgcaatcttctaacaacaaaatactatcacctacatctatttctaccaccacatatt

SEQ ID NO: 8448 - DNA, 460 bp, Glycine max
  Clone ID: LIB3092-062-Q1-K1-E2
cttcctgataaattgcgcaattttatttggggaaagttttagtcggaactcgtacttcaaatgctttttttgaaacaacagattttagcaattgattataatcattttgagtttaggttgtgttactcaaaatttgttggatttgattgcaattcagtttgaattatttaactatgttcccttattactttactcatttacgtattcagactgatgataattaagtaaattacttaaataaaatgaattgtaagttccaacataaatttcatttgcaaattagttcagatagtctttttttgaagaattccaaacacaatagtttgattactaaaaatcaaatctattttgtattttagcggttctgaggacagtgtatgtaatttgccctgaagaatatagcttaagcctcagaagaagtaatttgtctgaaaaatttattggtttttattcttatcgt

SEQ ID NO: 8449 - DNA, 457 bp, Glycine max
  Clone ID: LIB3092-062-Q1-K1-E3
aatcattccaaaatccaaacccaaacactatacaccaaatttcttgaaccttccccttcaatggaaaatttttagcttcaaaatctctcccaaactaaaccaaatcaaatttccaaaaccatacacacaatttccaaatcctccttcaaaagggagttcaaaacctcttcctaaccaaaaccacactcgaagtttccactttccaaatcctacttcataagggtggctcaaaacatcttccaaacctaacaaaatccacaacttaaaaaaaaaccacacacacacaaaatttctaaatttctccttgagaagggaaaatgcaaaataccctgcagcaacaaaccgaagaaagttcacaacttccaccgaaggtgtccttttccgggcacaagatgggtgatttgagtgatgggcaacaccatggtgggtatttggccgtggttccccggtccagacc

SEQ ID NO: 8450 - DNA, 412 bp, Glycine max
  Clone ID: LIB3092-062-Q1-K1-E4
agaagggccatcttcccgttcatcttgctatcataacgggttgtgttgagatggtaaaagaaggctttgaacctggatgcggatggcccattaatccttatgttctcctcaatcaaaagggtcaaaacattcttcacattgcggcaaagaatggaagagataatgtggtagaatacctactaggaaattgcaacactggtcatctacatataaaccagaaagactatgatgggaacactccattgcatttggcttccaaaaatttatttcagcaagttatcagcttgatcacagaggataagaggactgatctgaatctcacgaatgaagacggtttaacggctggtgatatcagtaagacctttgaacatccaatgttacgtggaaaagagattgtatccatggagttatc

SEQ ID NO: 8451 - DNA, 388 bp, Glycine max
  Clone ID: LIB3092-062-Q1-K1-D11
acgcaacgcatatattgcaaatagggtattagcttatattaatcaacatctacaatagatttcgcagcttataatacagaagcagatatcaacacctaaaatactcatccaacaactttagattcttcttctcaattggcatctacacttgattccatcaacaaagaaatctaataactacattctcgtaaactcaaacccatacttcaccccctcaagcacaattttgtcttctggtacactctcctaacacttagagttctaaatcaatcatcatacgatgacaacatatagaaaattgttcaatttagtacggttgaatgattttggttcttctactgccatctttctcttcccgcttctttacctattccaacatattttcacc

SEQ ID NO: 8452 - DNA, 295 bp, Glycine max
  unsure at all n locations
  Clone ID: LIB3092-062-Q1-K1-E5
agaagggccattttttcgcacancacgccagcaaaacgagacgagagcagacgtttaaacaaggcggtgaacctacatccggatggcccattaatccttatgttctcctcaatcaaaaaggtcaaaacattccttacattgcggcaaaaaatggaaaatataatgctgcaaaatacctaccaagaaattgcaacactggtcatctacatataaaccagatagactattattgtaacactccattgcatttggcttccaaaaatttatttcagctagattatcaacttgatcacat

SEQ ID NO: 8453 - DNA, 407 bp, Glycine max
  Clone ID: LIB3092-062-Q1-K1-B8
caccgtcagttcgtatttgttgatcctgtgaacttataactgacgctttagctctgttaggtacactttccaacatagaggggatgacatttaggattgcattagctgaaaatggtgtttaatatcaatacaactaataaaatctcattaacaagagtccttagcttttacaaatgaacccaattcacaagaaaattccaattctgatccataatagcaaaccaatttgcgaatctgcaattatagtgcagtacattgatgatgtcctaaatgataaagctccaatcttaccctctgacccttatgacagagctcataccagattctgcgtatataacattgacaaaaaggtgtatgacactaggaagaaaatgcatctttctaaattaaattatcattaatcattt

SEQ ID NO: 8454 - DNA, 316 bp, Glycine max
  Clone ID: LIB3092-062-Q1-K1-B9
acttcttcccactcgtcctaccactcctcctcttactcttacaactatccaataatactacatgactggtttaacttcatagtttaccttaaaactacaaaccaacaattcactaaaatcataccaatctatactatccacaacttaattacacttatatccaaaaacttacatcttatataaattcacctatactcaatacaatcaccaatctataacaatctcacaacttctaaaaccctaataaccctcatcaaaatttctattcatattaaactattaatttcatcttcttctcttttcaaacattttaata

SEQ ID NO: 8455 - DNA, 442 bp, Glycine max
  Clone ID: LIB3092-062-Q1-K1-C1
gcgctcctgaattgctgcttctttaagcatcatttatctatataacaatatgcaattatgtgggttttaacttacttgcgaccgtatgcactcttcttcctctcctgtttgatcttttttggtagtgttttagccacttgccctagtcttcaacatttatgatttgatcgtacctgtaaatcatttggtttgcatgtagtcacgtatcttaaacttctcatcacgaaggctttaaactcaattcttggtggtttaagtaagagctttatacctgcagtttaacactcccttaaaaaattggcttgcaatattaatggtaaagctgtgaatgggagtttgttttgcattcagctactttgacattgctgatgatggtgtaaataataatgtaattctgatgactaatttataatatgtcatgttcttccaatgcttaaaaatt

SEQ ID NO: 8456 - DNA, 460 bp, Glycine max
  Clone ID: LIB3092-062-Q1-K1-C11
gtgggcctggcccatggctaccttctggtgggcccattcgtgaaggccgggcctctgaggggcaccgagatcgccgggcaagcaggctctctcgccgctggtgggcttgtggtgatcctcagcctttgcctcacaatctatgggatttcatcttttaacgaaggagacccatccactgccccgtcactgaccttgacgggccgcaagaaggagcccgatcagctccaaactgctgatgggtgggccaagttcaccggaggcttcttcttcggaggcatttcgggtgttatttgggcctacttcctcctctacgtcttggaccttccttactacatcaagtgaagaaagtgcttattatctttgtttactttttgttgttattcattctctatgaatggacaatgggtggaaatggatccttatttgtgcaatagagatggatgtaaatgatgtattgtat

SEQ ID NO: 8457 - DNA, 455 bp, Glycine max
  Clone ID: LIB3092-062-Q1-K1-C2
gctgctgaattgctgcttctttaagcatcatttatctatataacaatatgcaattatgtagtttttaacttacttgggggcgtattcactcttcttcctctcctgtttgatcttttttggtagtgttttagccacttgccctagtcttcaacatttatgatttgatcgtacctgtaaatcatttggtttgcatgtagtcacgtatcttaaacttctcatcacgaaagctttaaactcaattcttggtggtttaagtaagagctttatacctgcagtttaacactcccttaaaaaattggcttgcaatattaatgttaaagctgtgaatgggagtttgttttgcattcagctactttgacattgctgatgatggtgtaaataataatgtaattctgatgactaatttatattatgtcatgttcttccaatgcttaaaattgtttgattaaaatatt

SEQ ID NO: 8458 - DNA, 375 bp, Glycine max
  Clone ID: LIB3092-062-Q1-K1-C3
tatctattaacaatatgcaattattaagtttaactacttgcgccgtatcactctggtcctctccatttgatcttttttgtagtgtttatccacttgccctagtcttcaacatttatgatttgatcgtacctgtaaatcatttggtttgcatgtaatcacgtatcttaaacttctcatcactaaagctttaaactcaattcttggtgatttaagtaagagctttatacctgcaatttaacactcccttaaaaaattgtcttgcaatattaatgttaaagctgtgaatgagaatttgttttgcattcatctactttgacatttcttatgatgatataaataataatgtaattctgatgactaatttatattatatca

SEQ ID NO: 8459 - DNA, 327 bp, Glycine max
  Clone ID: LIB3092-062-Q1-K1-C4
ctgctgaattgctgcttctttaagcatcatttatctatataacaatatgcaattatctgagttttaacttacttgcgagcgtatgcactcttcttcctcttctgtatgatcttttttgataatgttttaaccacttgccctagtcttcaacatttatgatttgatcgtacctgtaaatcatttggtttgcatctaatcacatatcttaaactactcatcacgaaagctttaaactcaattcttaatcctttaagtaacaactttatacctgcaatttaacactccctttaaaaaattggcttgcaatattaaatgcaaagctgttaa

SEQ ID NO: 8460 - DNA, 439 bp, Glycine max
  Clone ID: LIB3092-062-Q1-K1-C5
aaatcctcagttgagatggcaaagaagcttcctcatgaaaaacgattgtgtcttttaaaatggggagaggcatcattggccctctgtggtatctgtaatgaccctcctgaagatgctgttgtttcagtttgtggtcatgttttttgtaaccagtgcatttgtgaatatcttactggtgatgacaatcagtgccctgctccaaactgcaaaactcgactaagcacgccctcagtgttttccaaagtcacactgaatagttctttttctgatcagccttgtgataatttgcctgattactctggttgtgaagtggaggaatctgagttttgttctcaagctcagccatatgattcttcaaaaattaaggctgcacttgaagtgttgcaatcgttgtctaaaccacaatgctttgctttccaaaacaattctgtgcagagca

SEQ ID NO: 8461 - DNA, 441 bp, Glycine max
  Clone ID: LIB3092-062-Q1-K1-C6
cccacgcgtccgtccatttccaccatcaatactattttcttgtcgttgagaagcttcgcgaacgaaagcaaagaaccctagaccgtcacagaaccattccatagccatgtctggtgttggccctctttctcaggattgggaacctgtcgtcctccgcaagaaggctcccaccgtcgccgccaagaaggacgagaaagccgtcaacgccgtccgccgctctggcgccgaaatcgaaaccctaaaaaagtataatgctgggacaaacaaagcagcatctagcggcacttcattgaacactaagaggctggatgatgatactgagagtctagctcatgagaaggtgccaactgaacttaagaaggctataatgcaagctaggatggacaaaaagcttactcagtctcagcttgctcaactgatcaatgagaagcctcaagtgat

SEQ ID NO: 8462 - DNA, 398 bp, Glycine max
  Clone ID: LIB3092-062-Q1-K1-C7
accacgcgaccggacatttccaccatccatactaatttcttaccatgaagaatcttaaaaagcgaggacgcataaccctagaccggcacaaaaccataccatagccatgactagtcttggccctcattctcaggatagggaacctgtaaccctccccatgaaggctaccacagccgtcgacaagaacgacgacaaagccgccaacgccaaccgccgatctagcacccaaatcgaaaccctaaaaaacactaatgctaggacaaacaaagcaccatctagcgacacttcatcgaacactaagaggctggatgatgatactgagagtctagctcatgaaaaagtaccaactgaacttaagaaagctataatgcaaactaggaaggacaaaaagcttactc

SEQ ID NO: 8463 - DNA, 432 bp, Glycine max
  Clone ID: LIB3092-062-Q1-K1-C8
cccacgcgtccgggaaacaggcatagcatgctacactcgcgggccttgcttgcctagtgtttcttccaagcactctccaccttccatttctccatcttttggcttgaggagtctgaaatcaagctctttatttggagaatcgctaagagtggcctccaaatcaacaataaaggtttcaaagacaaagaatacttcactcgtgaccagatgtgaaattggtgacagtctcgaagaattcctcacaaaagcaacaccagataaggggttgatcaggttgttggtgtccatgggagaagcattgagaacaatttccttcaaagtgaagacggcttcatgtggtggaacacaatgtgttaatacttttggggatgagcagcttgcagtggatttgctagctaatcagcttctttttgaggccctaaattactctca

SEQ ID NO: 8464 - DNA, 439 bp, Glycine max
  Clone ID: LIB3092-062-Q1-K1-C9
cccacgcgtccgcatttgtgtatttgagcttaggaatagaagtagagggaactagtgaagagataaagaagacggaggcggtttggagtatgacttcttgcacctcttttgcatcctttctcatttcttcttcttcatttccttcattgtgcttcgcgcaaacccactcaatcacatgtaaacaacgcttcccatttccttctgtaaagggaagaagaaagttctcaactttatcattttcatccaccaaaaggctcgttacaagagccgctgagtacaaattcccagaccctattcccgaatttgcagatgccgagactcaaaaattcaaaagccaccttctcaaaaagctttcaaagaaagatatgtatggagaatcaattgaggaagttgtaggaatttgcactgagattttcagcactttcttacactccgagta

SEQ ID NO: 8465 - DNA, 452 bp, Glycine max
  unsure at all n locations
  Clone ID: LIB3092-062-Q1-K1-D1
cccacgcgtccgttccaaagcccttgtttcactttttccaatccgatatggccgccgcgaccgccttgctccgctctctccgccgccgcgaccttccctcgtcttctctctccgcctttcgttcgttgacgagtggcacaaagacatcatatgtagggaacaagtgggcaagtttgtctcggccgttcagttcaaagcctgctggtaatgatgtcattggaattgatctgggtactaccaattcatgtgtttctgttatggagggaaagaatcccaaagttattgagaattctgaaggagctcgaacaacaccatcagtggttgccttcaaccagaaagcggagcttcttgttggtacaccagccaagcgtcaggctgtgacaaacccaacaaacactctntttggaaccaagcgtttgataggtaagcgttttgatgattctcaaactcag

SEQ ID NO: 8466 - DNA, 434 bp, Glycine max
  Clone ID: LIB3092-062-Q1-K1-D10
ggcgcgtccggaacgcacaacggggaaaaaggggattacggtttatgaagcagcgacaacaatggatttcggaggggataagaaggagtgagagagcatcaccgaaaatgctcatccaacaactttagattcttcttcttaattggcatcggcacttgattccagcaacaaagaaatctaataacgacaaactcgtgaactcaatgccggtctacaccctctcaagcacaagtttgtcttctggttcacgcgccgaacacctggagttcgaaatcaaacatcatacgacgacaacataaagaaaattgttgaatttagtacggatgaaggattttgggtctgctactgccatcttgctcgttccgcttatttacctagttcaacagatttgcaccttttcaaagaaggaatccatcctctatgggaggactctg

SEQ ID NO: 8467 - DNA, 359 bp, Glycine max
  Clone ID: LIB3092-062-Q1-K1-B7
tttttacaccctgctatcttaaatctaacgctgtaacatctcttgggtgcatctctcagcaccgaagcaatcactcatgggaatgcattaacctaaactgaattctcattatcaatacactcaacaaaatctcatcaacaatattcctaagcttctgcagattaacccaattcacatgacaatcccacctattctccataatgccataccaaattctaaatctgcaattctagagcactacattaatgagccctaaactgataaagctccaatcttaccctcttacccttatgatagaactcaagccaaattctccctagattacatttacacaaatgcgtatcacacttggaggaaaa

SEQ ID NO: 8468 - DNA, 289 bp, Glycine max
  Clone ID: LIB3092-061-Q1-K1-F8
gctttttcttcagtacttgctcttggtggaacaaccttgtaacaatggcttcgtcagttggttcctcttttcgcatcagcaatttgaagtcggtttttgttggtgagactaataaactcagagtttcaagtgttcctggtgctcatgttggtttcaatagaaagactgtagaatgtaaggaatcacgaattgggaagcaaccaattcctgtgccatccaatgtcacagtcaaattggaaggacaggatatacaagtgaaaagtcctttgggtgaacttgcattaactta

SEQ ID NO: 8469 - DNA, 457 bp, Glycine max
  Clone ID: LIB3092-061-Q1-K1-G3
ctctcgttcgctatggccactgttctcagaacccccaccttccggccaccgcctccgccgggcgccggaaagtcgccgaaaccatcgcgcttcgccgtcgtgtccttcagacagagcaccacctgcgggagaaaaccctcctcgcttctctcctccctgccgttccctaatgttccctctctacggttcgtcaggttcgttcccttcgctttcgacggcgacaccgaggccccgcaagttcaggagccggaggttcaggttctggacccttcagatggtgctgttggtgtaaacgacagtgcaagtgataatgaggttagtgatgctgatgaaacatttgcttcacctttcttactgttacttcaatcctacaaagaagcattagctaataacgacgaagtcaaaattgctgagttggaatcgtcattaaaatcccgtgaagatgagaaaatagaac

SEQ ID NO: 8470 - DNA, 380 bp, Glycine max
  Clone ID: LIB3092-061-Q1-K1-G4
cccacgcgtccgcaaaggttgctgtaggagataagatattgaagtagtgctaagtgcctagcacctgcagtgaacaatggcctctgcatcagcatctcttctcaagtcttcacttgttcttgacaagtctgagtgggtgaagggacaaacacttcgccaaccttctgctgcatcagttgtgagatgcaaccccaccaccccatcaggcctcacaatcagagctggttcctatgctgatgagctcgttaagaccgcgaaaacagtggcttcaccagggaggggtattttggccatggatgagtccaatgctacctgtgggaagcgtttggcttcaattgggctagagaacactgaagctaaccgccaggcgtaccgtaccc

SEQ ID NO: 8471 - DNA, 369 bp, Glycine max
  Clone ID: LIB3092-061-Q1-K1-G5
cgacccacgggtgggctctcgttcgctatggccactgttctcagaacccccaccttccggccaccgccttcgccgggggcctggaagtctcctaaaccatcgcgcttcgccgtcgtgtccttcagacagagcaccacctgcgggagaaaaccctcctcgcttctctcctccctgccgttccctaatgttccctctctacggttcgtcaagttcgttcccttcgctttcgacggcgacaccgaggccccgcaagttcaagaacccgaagttcaagttcttgacccttcagattgtgctgttggtgtaaacgacaatgcaagtgataatgaagttaatgatgctgatgaaacatttgctttacctttctta

SEQ ID NO: 8472 - DNA, 261 bp, Glycine max
  Clone ID: LIB3092-061-Q1-K1-G6
tcggtgcatgtgtgtttataaaggctttggttttatggttgaaggtgaaaaatgttggcctgggaatgttatgggtgatgagaagaaggtttttcaagtaattttgcatatggttgggaacctactgggacacaaccattggggaaggatccttgtatatcgagtttttgcagaaactggaagtcaaggaaagagtgacaaaaggtggacaacctggagaccaagctcttctagtggtgatgtaaatattagatttgagat

SEQ ID NO: 8473 - DNA, 280 bp, Glycine max
  Clone ID: LIB3092-061-Q1-K1-G8
ctcataacacatagcacaaagcaaagctcatccttgagttaaaaaatggcagcagcttcggccatggctctctcatcccaatccttgcctgccaaggccttgaacctggcccattaagcccaaaaattggaaaggtgagcctgaagaaagaccgtcaccaaccaggtttcttaaggagcccaatggtacggcccagaccgagtcaagtacttggcccaattctttgccaggccccgttctaactaaccgcggagttcccaggcgactacggctgggacac

SEQ ID NO: 8474 - DNA, 160 bp, Glycine max
  Clone ID: LIB3092-061-Q1-K1-H3
ttttaatttgccttctacctcccaagtgaaacccttatttttgtcttcggataacttcacaaaacttccaggtaacttttctttgaatagaaaatatagtgacacaacagtacaaaaactagtttattgcttctccgctgctcaatcaccaccaccatca

SEQ ID NO: 8475 - DNA, 447 bp, Glycine max
  Clone ID: LIB3092-061-Q1-K1-H4
gcgcccacgcgtccgcccacgcgtccggcaggcagtgtcatctctcctttgacgacaagatgagcatcccgattccccatcggcagttattcatagacggagactggaaagtccccgtcctcaagaatcggattcccatcatcaacccttccacccaacacatcatcggggatatcccagcagctactaaggaagacgttgatctcgctgtcgctgccgccaaagctgccctctcccgcaacaagggcgccgattgggcctccgcttccggctccgttcgggctcgctacctccgcgccatcgctgccaagatcaccgagaaaaagcctgaactagcaaaactcgaagctattgactgtggaaaaccgctcgatgaagccgcctgggacatcgacgatgttgctggttgctttgagttctatgctgaccttgctgaaaaattggacg

SEQ ID NO: 8476 - DNA, 386 bp, Glycine max
  Clone ID: LIB3092-061-Q1-K1-H5
tttcaattttccttctctttccaattaaacccttatttttgtcttcagaaatcttcacataactttcacctatctcttcttttaaattcaaaatataaccacacatcattatataaaccaatctattactcttcctctcctcaatcaccaccaccatcatcttcaacaacatctattccctaaccttcttatttcaatacatttcaatttcaaaaacctatttctttcttaccatctacatcttcaatttcaactcatacacttaatataactaacttatttcccataattatttaaaattcttatccttacttctatctctaatattactcttcttacttaccacattaaaacatttaatccttaaattcttaatcttaaaaatt

SEQ ID NO: 8477 - DNA, 456 bp, Glycine max
  Clone ID: LIB3092-061-Q1-K1-H8
gtgctttgacattgatgccaatggtatcttgaatgtctctgccgaagataaaaccactgggcagaaaaataagatcactatcaccaatgacaagggtagattgtcaaaggaagatattgagaagatggttcaagaggctgagaagtacaagtctgaggatgaagagcacaagaagaaggttgaggccaaaaacgctttggaaaactatgcatacaacatgaggaacaccgtgaaggatgacaagattggtgagaaacttgacccggctgacaagaagaagattgaggatgcaattgagcaagcaatccagtggttagacagcaaccagcttgcagaagcagatgagtttgaggacaaaatgaaggaattggaaagcatctgcaatccaatcattgccaagatgtaccaaggtggtgctggtccagacgtgggtggtgctggtgcagcagaggatga

SEQ ID NO: 8478 - DNA, 180 bp, Glycine max
  Clone ID: LIB3092-062-Q1-K1-A11
cacacagttatactctacactctaaacactctatctctctctctctccatctatcatacctggggggaatcaccaaaccgtggattaccctactttcaaactcatcatactcggtgacaccaacacatgtatgaccaacttcttgaaaatacatcctaccactgaattcataaagaaata

SEQ ID NO: 8479 - DNA, 340 bp, Glycine max
  Clone ID: LIB3092-062-Q1-K1-A12
gtttaattgtagatgaggcacagtcagtgacatcaatccagctgaggttggctgatggcggcgcatggtttctcgcttcaatcaccatcatacaatccgagatgttcgagcattcattgatgcatcaagacccgggggtgtaagaagttaccaactgcagtcaatgggttttcctcccaaacaactcgctaatttggaccagactatagaacaagctggtattgccaactcagttgtcatccaaaagttgtaggttgtttaccagattctattttcagtcgacttgaaattactatttttatgcttaaacattgattgatctacttatattttattagtg

SEQ ID NO: 8480 - DNA, 220 bp, Glycine max
  unsure at all n locations
  Clone ID: LIB3092-062-Q1-K1-A4
aatctggctgaaattcatgaaaactgcatttcacgggtaatgtgtccttacagtaccaataatgttgttctaaagcagaacacanactttattggttctgatctgaaccacacactcatccatcacatagtatcatagcctcttcaataattcaattgctcattcctggaacctgtgggtgaatctaaaccgacacatcatgctaccttatcatctttat

SEQ ID NO: 8481 - DNA, 239 bp, Glycine max
  Clone ID: LIB3092-062-Q1-K1-A5
atcaatcaaattcttttagttgaacacaggcgccacgattccttctgtgggattatgcacttggggggctgaacctgatgttgtatctgaagctctcaccacagccattcaggttggatacaggcatattgactgtgctagtgcctataaaaatcaatcacagattgattctgatcttaacaaactctttgatgatggcatattcaaacgataggacttatgaatcaacttccaacatc

SEQ ID NO: 8482 - DNA, 335 bp, Glycine max
  Clone ID: LIB3092-061-Q1-K1-F7
acgcatcgctgtcctcatgaaattagctggaggttttccatctatggctgatcaactgaataaggatgcattccttgagcaagctcgctcttatgaaaaagcttcttccatcccaattggttggtatataaagaatgcacaaacaaggcaactgtcacatcctatgcctgttctactttctatcgaaattgatctatgctcaataactccaccttataaatctctttttaaactaccaattcatatcaaatcttaaaaccaaacttttaacaatgcatgcatcgaatttattgaaagtgcacaacatctcaaggatctttaagcttaaccttttc

SEQ ID NO: 8483 - DNA, 325 bp, Glycine max
  Clone ID: LIB3092-062-Q1-K1-A8
cccacgcgtccgcccacgcgtccgacccacgagcacatcaagttttgtattctgggtgccaggccattatgtatattctgtgttttcgcatgagatctttgatggatattcctaggcttaaattgcagctgcttaatatgcccatggaggcaatcttgaaacataaattgagtcccttgaaagtgtgtttgcctactgtagtagtggaatttcttagacaggcaaaggctgctcaacttttcatggcgtcagagtcatttgtttttgatgatatgcttgagtctgagctttccaaggcttttggcgggattgatagacttgacat

SEQ ID NO: 8484 - DNA, 253 bp, Glycine max
  Clone ID: LIB3092-062-Q1-K1-A9
tcggaagattccacaacagtgggagggagatccaaaaagagagagtggaaaagatggcgcgggggagggcaaaggtgtggtgggcggtggcggtactattatgcgccgaatccgattcatattgggtcgagtaggcggagaaccctatacaaatggggtatagcgtggaaggaaatgaccttcacttgatacaccaatatccgcaaacgttcaactatgctatgcaccttatcaggatccctaagaaatactc

SEQ ID NO: 8485 - DNA, 391 bp, Glycine max
  Clone ID: LIB3092-062-Q1-K1-B12
ggctttggtggccgaggggaacgaggaggctttggtggtagaggtagatcagacagggaaggttttggtggtaggtggggagcagaaggaggacgtggaggccgaggcaggggaaggaacgatcaatctggtggttggaacaacagaagggattctggtgaggatgggccctctgactggaagaagggggcagataatggtggatggaagaatagtaatggatctcaggcttggaaccaggatactggtgacaaggataggcagagctggagccaaggaaatgcagataaggagcatcctagctggaaccaaggaagtggaagaaatcagagctggagtttagcaagtggaactaatgataatggatctcaggcttggaaccaggggaatg

SEQ ID NO: 8486 - DNA, 428 bp, Glycine max
  unsure at all n locations
  Clone ID: LIB3092-062-Q1-K1-B3
cacagcttcagttcgtttttgttgatcctgtgaacttatggctgacggggtggttctgttggatacatgggccagcatgtttgggatgagggttaggattgcattagctgaaaagggtgttgagtatgaatacaaggaagaaaatctcaggaacaagagtnctttgcttttgcaaatgaacccaattcacaagaaaattccagttctgatccataatggcaaaccaatttgtgaatctgcaattatagtgcagtacattgatgaggtctggaatgataaagctccaatcttgccctctgacccttatgagagagctcaagccagattctgggtagattacattgacaaaaaggtgtatgacacttggaggaaaatgtggctttctaaaggagaggagcatgaagcaaggaagaaagagtttatctcta

SEQ ID NO: 8487 - DNA, 345 bp, Glycine max
  Clone ID: LIB3092-062-Q1-K1-B6
gcttcaccttctgctctagaaaattcagtgctgaaacatggcttcggctactctctctgtagccaaaccagcccttcaagcaaatgggaaaagcttctctgaattctctggcctccgaagctcatcaagcttccttcccttttctagaaaatcttcagaagatttccattctgtcattgccttccagacctatgcagttggaagcagtggaggatacaagaagggtgtgacagaagcaaaactgaaggttgccataaacgggtttggaaggattggaaggaacttcttgaggtgctggcacggtcgcaaaagactccctcttgatgtcattgccatcaacgacac

SEQ ID NO: 8488 - DNA, 256 bp, Glycine max
  Clone ID: LIB3092-061-Q1-K1-D1
ctcttcagtgatggcatctgtggccctcaaacctgcccctttcactgttgagaagtcctcggtgagaggccttccctctctctcaaggaactcttcttcattcagagttgtggccagtggcaagaagatcaagactgacaaaccttatggaattaatggtggcatggctttgagggatggaactgatgcatctggcaggaaaggaaagggaaagggtgtttaccagtttgtagacaaatacggtgctaatgtcgat

SEQ ID NO: 8489 - DNA, 459 bp, Glycine max
  Clone ID: LIB3092-061-Q1-K1-D2
cccacgcgtccgggagttctaaatttccggcgagttttcctctctcgaatctgcgacaccggcgaatggcgctcaccggaatttcgcattcagaaaatggctttaggtggaacagctcccccaagaggaagtgcagcggctactgcaagcatgaggagaaggagaacaaccggtggtgcggcctctggaggagcagctggaactatgctccaattttacacagatgatgcccctggactcaagatctccccaaatgttgttcttgtaatgagcattggcttcatagcatttgttgccatccttcatgtgatgggcaagctgtactttgtgcgtatggaggcttagagaatagatcaagatgttaggtccaattttttggattttcaatacacctctgttatgaaatttagatttttttgttgctggaaccaacccttcctttgctttttggtttttggg

SEQ ID NO: 8490 - DNA, 432 bp, Glycine max
  Clone ID: LIB3092-061-Q1-K1-D5
cccacgcgtccggcattattgagcaatcatttctgcctgggccatttgctgtggagatgtgttcggcagtttacaaggggtgggttttcactgatcaagcccttcctgcggatcttatcaagagaggaatggcagtggaggatccatcctctccctatggccttcgccttgtgatagatgactacccttattctgttgatggactagagatatggagtgctatccagacatgggttaaggactacgtctccttgtactatgccacggatgatgcagttaagaaagactcagaactccaagcttggtggaaggaagctgttgagaagggtcacggtgacttgaaagacaagccatggtggcctaagttgaacactcttcaagatctgattcacatttgctgcattattatatggactgcttcagcactccatg

SEQ ID NO: 8491 - DNA, 341 bp, Glycine max
  unsure at all n locations
  Clone ID: LIB3092-061-Q1-K1-D8
ccaaaacatgaagataaagctaatcgttctgggtatcataattgccttgattcttattatggttctttccgtttgtggtggcttcaactgtggtaaatgatgagtctttcccacgtcctggcttcaactgtggtatttgtctcctcacttgataagattgttgctagcagattgccattgcctcaactgtcgacgtagtgcttttgacttacttttgngatntacattcttccgtcttcttcgatgatagatgttatatggcattgcttgtatagtgtgaattgtntagtctatcatcttgtctcccatagcgtaatgctaatctgtcattctctatagtt

SEQ ID NO: 8492 - DNA, 455 bp, Glycine max
  unsure at all n locations
  Clone ID: LIB3092-061-Q1-K1-E2
cccacgcgtccgcccacgcgtccgaagggataatgtgggtgacaaccatggctaacacatctcttcttgccaaaccatattattaccgtaatttccattatcaacatcaaagatgcttcaagatcaacctcccaaaatggacaactagagcttcctctgctgcccctggggtcgacctcaacactctcgaatctgccatttccaagaaagacagtgatgctgttaaagaggcacttaatcagcttagtgaagttggttgggccaagaaatggagttctcagccatatgtttcacgtcgtacgacatcactccgggagctgacaagtctaggaattaaaaacgcagagaatcttgcaattcctagtgtcagaaacgatgcagcttttctttttactggggttggaacaacaggatttctgggtgttctggctgggcaacttnccggggattggggc

SEQ ID NO: 8493 - DNA, 458 bp, Glycine max
  Clone ID: LIB3092-061-Q1-K1-E3
caagaattgaagaccagttgaagttttgtttggatcagcttcaaaaacttgcagaggataagcttcagagttctgtcactttggaaaatacacaaagaaggctgtccaatgttagaagacaatctcagcaggttacggatatggtggtggaaatgcaatctaaaattggcagtaatcgagtgacgcgcatggagttacaagtagaacttgagaaagaaaggtttgccaagaaaagagtggaagagaatctggaggttgctaggagaaagtttacatgccttaaagaacagaatgagggctttttagtaactgaaaagcttcaacaggaacttgaagagtacagggaaattatcaagtgcagtatctgccaagacagggcaaaagaggtggtaattacaaaatgctaccacttgttctgctactcatgtatccagaaagttgctgggagtaggcatcgc

SEQ ID NO: 8494 - DNA, 180 bp, Glycine max
  unsure at all n locations
  Clone ID: LIB3092-061-Q1-K1-E4
gtgtgtgagatatagagagagagagggaggaaactgtagaagctatcaaaaccaccgaggggaaaacgatgtctgagagctttacatnctttcataccctgcaactctaagagtgtttggtgatgttggatatgcttgttctccttattataactgatcgataattcaactattggacag

SEQ ID NO: 8495 - DNA, 446 bp, Glycine max
  Clone ID: LIB3092-061-Q1-K1-E5
agatggtccagattagtaccacaaaaatggagaaatagaataactgaatatcgtatagctgagaataaagatttaaccaaatgcaattcatatgaaaaaagccaattaattctttacaaagaacaacaagtaaacgcattaaaaaaaaaaattagaaaacaatatagatacgatcttttatcctataattttatcaattatgcagataagaaagactcatatatttatggatatagatccctatttcaagtaaaaaaaaaccaagtgatttcttctaattacaacacgtataaaaaagaattattggatatcatagataatctctttatcaagaattatatatcggaagatgcgattctagatatggaaaaaaatatgtatagaaagtattttgattggatgggaatcaatagaggaatactaaatcgttccatatcgaatccaga

SEQ ID NO: 8496 - DNA, 454 bp, Glycine max
  Clone ID: LIB3092-061-Q1-K1-E6
gcacgcacgcgttcgcgaacagtgagagcgacctcttccctttcctctctcttcttctctttgagacactctctctctctctctctgcttatgcgatacaaatatgatatcacttccccataccctacatctctaattttatattcatgtgaaacccgcactttcttcttagagaaggcgattgcagaaaaacacttaccgcttagagcaacaaaagaaaaaactggagagaaagagactataggcgacaacgtatatagagagacaagtaattagtgtctgtgaaatatagatagagagagagaaaaaactgtagaagctatcaaaaccaccgaagtgaaaacgatttctgagagctttacatcctttcataccctgcaactctaatagtgtttgtcgaagttggatatgcttgttctccttaatataactgatcgataattaactattggac

SEQ ID NO: 8497 - DNA, 215 bp, Glycine max
  Clone ID: LIB3092-061-Q1-K1-E7
ttaaattataattttatatttaacctttaaaaaataggattaaagtgtgttttattacaaacacatactacatgcacttttctttcttttctcttcttcttctatccataatttcaattccatttgctctctggaccgagtcaagcggcggcgaatcggcatgactcggcgctgctcccactgcaccaacaacggccacaacttctggacattcc

SEQ ID NO: 8498 - DNA, 447 bp, Glycine max
  Clone ID: LIB3092-061-Q1-K1-F1
cgatagagcgcgttccgctaagcattaaattagaattccagatttaacctcgaagaggcaggagcacgctgtgttgtattacaaacacatactacatgcacttttctttcttttctcttcttcttctatccataatttcaattccatttgctctctggaccgagtcaggcggcggcgaatcggcatgactcggcgctgctcccactgcaccaacaacggccacaactcccggacatgcccgtcgcggggagggggcggcgtcaagctgttcggggtgaggctgacggatggatcaatcataaagaagagcgctagcatggggaaccttaacctctcctcctcctcctcctccgccgccgccgcacatctgcaattccgttcatctccttcttcttccaacctccccgcggcctcatcgcccaatccaagctccccgtgctccgaccc

SEQ ID NO: 8499 - DNA, 280 bp, Glycine max
  Clone ID: LIB3092-061-Q1-K1-F2
gtcctcatgaaaaaaaccgggtgtttttcatctattgcttatcaacgaaattagtattcatttctggggcaaactggctcttattaaaaatcttttttcagcccaaaaaagtgatatataaagaatacacaatctaggaaactgtcacatacaatgactgatctacctgctatcgaaaatgattaatggtcaagaactccatcttataaatctctttttaaacgacgaattcatatcaaatcttataacgaaatttctagcaatgacattcattgaaatt

SEQ ID NO: 8500 - DNA, 288 bp, Glycine max
  Clone ID: LIB3092-061-Q1-K1-F3
tccactaatcattaaattttaattttatatttaaccttcaatatccaagatcacagttttttttattacaaacacatactacattcacttttctttcttttatctttttcttctatccataatttcaattccatttactctcttaacctattcattccatatctaatccacataactcatcactaattccacttcaccaacaaccaccacaacttcctaacattccctactcatttataattcatcttcaaactttttcattattaaacttatcctatatatcaatct

SEQ ID NO: 8501 - DNA, 422 bp, Glycine max
  unsure at all n locations
  Clone ID: LIB3092-061-Q1-K1-F4
cccacgcgtccggccaaatcaatcaaattctttgagttgaacacaggggccaagattccttctcttgggttagggacttggcaagctgaacctggtgttgtagctgaagctctcaccacagccattcaggttggatacaggcatattgactgtgctagtgcgtataagaatcaagcagagattggttctgctcttaagaagctttttgatgatggtgtggtgaagcgtgaggacttatggatcancttcaaactctggtttgttgtcttttagtaattgtgatctctttttgaatattgagaaagattgtatgtgtttggaccagtttggttgctgaatgaaggatcctttgatttgttggctatatttttaggtgttcagatcatgcaccagaagatgtgccaaaagcattggataaaaca

SEQ ID NO: 8502 - DNA, 260 bp, Glycine max
  unsure at all n locations
  Clone ID: LIB3092-061-Q1-K1-C7
aacccacccgtcgcgctcttcaatnatggcatctgttgccctcaaacctgcccttttcactgtttaaaattccttagttaaaggccttccctctctctcaaggaactcttcttcattcaaaattttttccaatgtcaataatatcaatacttacaaaccttattgaattaattgtttcattgcttttaaggattgaacttattcatcttacaagaaaagaaaaggaaaaggtgtttaccaatttgtaaacaaataccgtt

SEQ ID NO: 8503 - DNA, 231 bp, Glycine max
  Clone ID: LIB3092-061-Q1-K1-F5
tcctctaatcattaaattataattttagatttaacctctaaaacacagcgtcaccgtgttttttattacaaacacatactacattcacttttctttcttttctcttcttcttctatccataatttcaattccattatctctcttcacccaatcaagctacggccaatctgcatgactcggctctgctcccactgcaccaacaaccgccacaactcccggacatgcccatca

SEQ ID NO: 8504 - DNA, 449 bp, Glycine max
  Clone ID: LIB3092-061-Q1-K1-F6
catctctgtcctcatgaaattagctgggggatgtccatctatggctgatcaactaaatgtggatgcattcctggagcaagctcgctcttatgaaaaagctgcttccagcccaattgggtggtatataaggaatgcacaaacaaggcaactgtcacatcctctgcctgttctacgtgctagcgaaattgatgaatggtcaagaactccagcttataaatctcttttgaaacgaggaattcagatcaaatcttagaacgaaatgtctagcaatgcatgcatggaatttgttgaaagtgcacagcagctcaaggttcttcaagttagtgcgtggtggcagatggtcaaatgggttcaagcggaagtagcatttattatgcatctatctacgggtgcttgcaacgtgtatgtattcactgggttattatagtcaacctgtaagtagaattttg

SEQ ID NO: 8505 - DNA, 299 bp, Glycine max
  Clone ID: LIB3092-060-Q1-K1-H11
gcttggaaagatagggaagctgctgtcttggctcttggtgctataggtgaaggttgcatcggtggtctttatccggatctgttggaaattgtggcatttcttggccctcttcttgatgataagtttcctctgatacgaagtatttcatgctggacactatcacgatttagcaaatttattattcaaggtattgggcatccgaaaggctatgaacagtttgataatgttcttatgggtcttctacgaaaaattttggatgataataaaccggttcaaaaagcttcttggtcagcttttgc

SEQ ID NO: 8506 - DNA, 384 bp, Glycine max
  unsure at all n locations
  Clone ID: LIB3092-060-Q1-K1-H2
cattggaagaatgtttgtattggagaccaaggcaacattaatgaatgaacaggagaccaagtttgaggatggtgaagcttcaattactgcattacagagctcaaaagaatacttggaaaaacagatggcagaggtggaaaccaatttgagagaactgctacaacaagatcctggtcttgctaggcaaatcatgtctatgaatgtagtgtaaactttccgttagtgaaattaacttaaagtggcagggttttctggtgcatttgagcaaatagaaaattcangacttggtgagatgtgaagaaagatgtgtactgcctgcttcaatgatgattttctatacttctcaaaatgttgaaattggagggatttttggaaggtatttta

SEQ ID NO: 8507 - DNA, 130 bp, Glycine max
  Clone ID: LIB3092-060-Q1-K1-H3
atagtgaaagagcttcttcctctaattcgagtgtacaaggatggcagcgtggagcgtcttctaagctctgaaaacgtggcggcctcccctgaagatccccaaactggagtctcatccaaagacatagtca

SEQ ID NO: 8508 - DNA, 130 bp, Glycine max
  Clone ID: LIB3092-060-Q1-K1-H4
tcggccacgcgttcggttgagggggtcactttcttgaaccaaacacagattattcattggtaatggggccaaaacttggactgaagatgattttatgaaagttgttgaaggggtttgtcccgggggttaa

SEQ ID NO: 8509 - DNA, 381 bp, Glycine max
  Clone ID: LIB3092-060-Q1-K1-H5
gcttggaaagatagggaagctgctgtcttggctcttggtgctataggtgaaggttgcgtcgatggtctttatccgcatctgttggacattgtggcatttcttgtccctcttcttgatgataagtttcctctgatacgaagtatttcatgctggacactatcacgatttaacaaatttattattcaaggtattgggcatccgaaaggctattaacagtttgataatgttcttatgggtcttctacgaacaattttggatgataataaaccggttcaaaaagctgcttgttcagcttttgcaacacttgaaaaagaagcttcttaaaaattcgcaccacccttggaaattattctaaagcacctaatgactgcatttgggaaa

SEQ ID NO: 8510 - DNA, 56 bp, Glycine max
  Clone ID: LIB3092-060-Q1-K1-H6
ataaaattcagtgctgaaacatggcttccgctactctctctgtagccaaaccagcc

SEQ ID NO: 8511 - DNA, 216 bp, Glycine max
  Clone ID: LIB3092-060-Q1-K1-H8
aacgtgaaaggctatcttcttattattattgctatgcggacattgtatcagaaatgcaaattgggggcactttatctcagggaatatcatatactttattttgagggtcacttatacattattgatgtttctcaagctgatgatcctgaacatcctcatgcctttgtttttctgagtgaacactgctttcataaaacttactttttttaaaaagca

SEQ ID NO: 8512 - DNA, 294 bp, Glycine max
  Clone ID: LIB3092-060-Q1-K1-H9
tctatttctctttcatcaccaactttatccttttcattaagttctccatccaaggtgacttttatttttaaacaaacccttcctctacaatacttaattctaaccaatactaataataatatatccatcaccatccttcttctaacctatcattaacctacttattcacctcactctacccatcacattataataaatccatccaaccatttcttaaattctattcctatctcaattcaatttatttcttaaccaatctattaaactcttcattacaaaaaaaccacccttaaa

SEQ ID NO: 8513 - DNA, 466 bp, Glycine max
  Clone ID: LIB3092-061-Q1-K1-A1
ctctcactctctctcacttggggttgaagatgagaatttgtggagcagcaatcagcagcaggtacaccaccacgtccaattcccttttagtgtttgcttcctcttccctctccagtcctgcaaaaaccaagttcctgccctcactttctagattttctgtcaagcgtccgtacttcctttcccaaacttatccgcgcattgctgtgaacaagccctccatgaacctgttgaacagactcgggtttggcagcgcaagagcaacagagaacatggattcatccattcctcagggtccagatgatgacataccagcaccaggccagcagtttgccgagtttggtgctggctgtttttggggtgttgagttggccttccagagggtgcctggggtgaccaagacagaggttggctacacccaggggcttgtgcataatccaacctatgaggatgtgtgtacagggaccac

SEQ ID NO: 8514 - DNA, 452 bp, Glycine max
  Clone ID: LIB3092-061-Q1-K1-A2
gttcaactgaggtgatggctttgaatttgccttctcccgcccaagtgaagcccttatttttgtcttcgaataactccacaaaacttccaggtagcttttctttgaagagaaaagatagtgacacaacagtagagagacgagtttattgctctgccgctgctcaatcaccaccaccagcatggccaggaacagctattcccgagccttctgatttcaagacatgggatgggcaaaaacctatttctgtcttaggatctacgggttcaattggaactcagacactgagtatagtggctgagttcccagaaagatttaaagttgtgagccttgctgctggctctaatattactcttcttgctgaccagattaaaacatttaagcctgaagttgttggtcttagaaatgagtctttaattgatgaactcaaagaggctttggctgatgtggatcac

SEQ ID NO: 8515 - DNA, 461 bp, Glycine max
  Clone ID: LIB3092-061-Q1-K1-A5
aaaaaacaaaaaacatggcaaaggatagaacaattggtgtggctctggatttctgcaaaagcggcaagaatgctctgaaatgggcacttgagaacttagccgataaaggtgacaccatttatgtcattcacattaactccaactctctagacgagtcccgcaacaagctatgggcagaatctggttctcctcttattcctttggtagagttcatagagcctgagattatgaaaaagtatgatgttcaaattgatattgaggttcttgatttgcttgacactgcttcaagacaaaaagagatccacattgttacaaaaatatactggggggatgcaagagagaaacttttggatgctattgaagatttgaagctggattcgctggttatgggaagcaggggcctcagcacaatccacaggattatattgggaagtgtaagcaactttgtgatgacccatgcc

SEQ ID NO: 8516 - DNA, 216 bp, Glycine max
  Clone ID: LIB3092-061-Q1-K1-A6
cccacgcgtccgtagcgattccggaaatcatgtctgtagctgctctttttatttgtgtgaggaattataacattgagtttcagagccttattctttgaagacaaaacataccgacacaacattcatataaacaaatttattgctctgccgctgctcaatcaccaccaccatcatggtcaggaacatctatacccaaacctttttattatcaacaca

SEQ ID NO: 8517 - DNA, 451 bp, Glycine max
  Clone ID: LIB3092-061-Q1-K1-A7
cggacgcgtgggtgggtatagggtggaagagaacaatggttgtctcatgttgggatggcggactaggcccttgattgccacctccgcgtggcaactcgctgcaactcgctgagtcgactcgccgattcctcaaccagctttttttttttgttttaattttattataatttctattcatgcccaccgaaaaaaaaaagggaacttgtggggatgagagggcagtgtgtaaatgtgctatgctgagctgtgagcactgattgcattagactgagacccaccattgtctattttcctgtcccaacttatgtctctctctctccaacccttaatttacctattttgcgtttgcctgaggattttcagattttgattttctcctctttttttgtaaaccttgaattttactttgctttcttttgggttgggatgggtggaatctctggtaattttc

SEQ ID NO: 8518 - DNA, 380 bp, Glycine max
  Clone ID: LIB3092-061-Q1-K1-B2
cccacgcgtccgcaagctcccaatatagcaagcagcaaacatgatttcttccgtgtcctttgcagcgtgtcttcccgccgttaacttctccggcaacgccatggcttcgccgtcgtgccgcgtcaaatcccggccaatagtcgccttcgccaccgccactgccaccgctgaagctcgctcttcctggacggagcaaccgagaccttcctatctgaactcctcttgctcttcgctttacgatatcctcggcatccccgctggcgcctctaaccaagaaatcaaggccgcgtaccggcgactagccagagtctgccaccccgacgtggcggccatcgaccggaaaaattcgtccgctgacgaattcatgaagatccacgccg

SEQ ID NO: 8519 - DNA, 425 bp, Glycine max
  unsure at all n locations
  Clone ID: LIB3092-060-Q1-K1-H10
acgcatncnttttatgtattcactttctttttccaaacacacattattcattanttttgtgggcgtcacttaaactgaagatgattttatttaagttattcaatgtatctggtccttgncttgaaaccattcatctcataaatgaccctcactatcctatttttaaccttggcttagcgtttgttttgtattacaataattcatatgcttattattcccttcaaaagattgcaagttctatctttaaactgaatggcaacacccctactgtcacatgtgcatatccaaataactcaccttaccattctgcttttttacaattttaaactctatacgtcaaaaacattcccgataattttaccacttaacaatttaatgaactaattccccgtcatggacaaataacaaaaattttcattccccct

SEQ ID NO: 8520 - DNA, 233 bp, Glycine max
  Clone ID: LIB3092-061-Q1-K1-B4
ctcaaactcccaatataacattcatcaatcatgatttctttactatccttagcatcatgtcttttctacattaacttctccttcaacaccattacttcatcatcattccctctttaaatatccaccaatattcaccttttacaccatcactttcactcattaaactttctctttctatactaatcaacctatacctatctatcttaactcctcttactctttactttaccata

SEQ ID NO: 8521 - DNA, 438 bp, Glycine max
  Clone ID: LIB3092-061-Q1-K1-C1
gtgaccaatatgacccgatttttgacagcattgaaccatcatcctcttctctgaaaaaaagtgattttgatcagaagaaggaagttacaggtgaatccaacatcagcctaaggcccaaaagttcttacatgtctttggactcggatgagaagaacaagcaggaggaggttggggctgttgcctctaccacttctcaaaatattgatgaatatggtgaaacagcagatgcagaagttggtgctgttgaaaatgagagcctaagtgatgatgtggatgttgcaaaactgacttcaggggaggttgagattaatcaggtcaagtctcctgggaaaagaaaaaagagtaaggattccagatcaatgaaattgttcaaagtttccattgcaaactttgtaaaggaggttttgaaaccatcatggcggcaaggtaatatgagta

SEQ ID NO: 8522 - DNA, 238 bp, Glycine max
  Clone ID: LIB3092-061-Q1-K1-C2
gaccgacgcgtgcggtgagcaatatgaccccattttagacagcattcaaccatcatcctattctctgaaaaaaatgcatttagatcataagaacgaagctacacctgaatccaacatcattctaatgcccaaaaattcttacatgtctttatactctaatgataataacaatctttaacaagtttatcctgatatttctaccacttcttaaaatatatcattaatatcttaatataca

SEQ ID NO: 8523 - DNA, 89 bp, Glycine max
  Clone ID: LIB3092-061-Q1-K1-C3
atttattcacatattgtaacaattggatgtaattattaaatattattttatcaataaaacggcatgaggcaggaatagttcttagagat

SEQ ID NO: 8524 - DNA, 457 bp, Glycine max
  Clone ID: LIB3092-061-Q1-K1-C4
gcctcccgaacacgaaagtcgaaacccgaactcacttcctcaccccatcatcgcagcctcgaaaccctgagtcgccagcgcagccccgaaacctagtccagtttgcagtttcttgtgcggtttatcatgggggatagtcagtattcgttttctctcaccacatttagcccttctggaaagcttgttcagattgagcatgccttgacagctgttggctctggacagacgtctttgggaataaaagctgcaaatggagttgtcattgccaccgagaagaaattgccatctatattggttgatgaaacatcagtccagaaaattcagttattaacaccaaatataggtgtcgtatatagtggcatgggtcccgattttcgagttttggttcgaaaaagcaggatacaagctgagcagtatcatcggttatataaagaacccattcctgtcactcaacttg

SEQ ID NO: 8525 - DNA, 297 bp, Glycine max
  Clone ID: LIB3092-060-Q1-K1-F11
cccactcgtccgaccactcttcccatttcttatcatcttcaatttatatgccactcgggagttattcactataaagtatcaccacccttcatctcaccctcaatctccacactgttcaccaataacttcctaaataacagatccaccacaattgtttctcattacatctgttagtgaaaaaatctattctcaaacaaaattcaacaaatgccactccggctttacttatactattgaatgcaaaaaacatgaattctaaccaatctctcacaaacatgtgtgagaacttctacactt

SEQ ID NO: 8526 - DNA, 404 bp, Glycine max
  Clone ID: LIB3092-060-Q1-K1-F12
cccacgcgtccgctcagaggagggtataggaatgatgcatatggcaagaagctcgaactgggcaaatggagactcgcacacccatactgaatatgcaagaggcaatggaaatggccatcatgctattaatgtggattccaattccaacagtaccaactccaaaatacatcatggtcatattaatggtcatgttcattcttcgcattgtagccataataaccatggcaaaaccagaaatgacaacgttcccttgggcttgggtcttggccttggacggaacagatctgttacagcctcatcatgatatttacatacatgtctggtgtttgaacctaacctgtaatgtaacataggcacacatctgggttggtttacgttaattcaatttattgtggctcttttct

SEQ ID NO: 8527 - DNA, 426 bp, Glycine max
  Clone ID: LIB3092-060-Q1-K1-F4
cggacccgtgggttgatatttctatagtctagttgggcatcaaacttaattaaaatattaagagtctttaattataggaaattttctagcttttttatttggctgcctaataaataggacgtttctgggttgaacatgtaaagagattgagttactcttgagttgataaatgttcttttcttctttattacctccgtcatgatactctgttttgtatgagttcttcattttattttaacaagaaaacatcattttgaattttaagctagctgcactcaaatttattatcaaatctttgttccgacaacttctaccaacctttatgagtaccccctactttagaagcaaaaaaaattcctttccatctgggttttcattttaagaccaggagatgccatctaggtcacggttgctgaggaaaagggg

SEQ ID NO: 8528 - DNA, 158 bp, Glycine max
  Clone ID: LIB3092-060-Q1-K1-F5
gattgaaaagccagtagtaatttatctgaataaaaccatttgctaatgaggacgatggcctggaatctctgataatggctcctcatgtatgtacattcaaactggatcacttccgaacaaaataaatggtagctagcaaacaactctgctttatttac

SEQ ID NO: 8529 - DNA, 364 bp, Glycine max
  Clone ID: LIB3092-060-Q1-K1-F6
gtgaagactgcgaatataggaacccaatcctaattctattgaatttttatttttagcggtggagattcatcatcgatcgcatctattccataaatagcaaatagaaaacaatgggtaaaaagcaatcttttcggagcaaagcagcctacttcgtttctgatctcaccactggtcttctcaaccctatttctgacaacaacaacaacaacaacaaacccccttctctccctccttccggagaagaagaaaaagaagatgtgggtgagtcaaaaggtggtagtgatgatgtgataattgatgggcctgatacttcgtccttcacttgcgttctctattctctggtgtctacttcggattccgggga

SEQ ID NO: 8530 - DNA, 434 bp, Glycine max
  Clone ID: LIB3092-060-Q1-K1-G11
cccacgcgtccgcttgccctcggcctctaacccttctctgctctctctcttccatcgggcggtctgacttcgcctgcgatacccaccaccaccatgcccacaaccttccatctgccgtcaccaaccacaccttccgccaccgttaccccttcctctgtttcacccgcattggaacccttcgctccacctcttctctctttcgcatttttctggtttttttttttttcagattcgagagctcaatcgcaacaactccgtaagattgcgaacgtcgttccgatggtcatcgttgtcgtcgaatccaaagtccaatcgaccacctgcgctgcccttgtgaacgtgtttgcgtggacggtgtgaccaacttcttcaacaccgctcttcatttttctgggtttttagcaaatgctttctctttcattttttcagatctt

SEQ ID NO: 8531 - DNA, 421 bp, Glycine max
  unsure at all n locations
  Clone ID: LIB3092-060-Q1-K1-G12
aaacaatccaattaatcaaaacgcacaacgaagatcgtatgaatacgattttgcacttctggacaaatataatttgtttctttattctaagcggttattctattcttggtaatcaagaacttgttcttattaactctttggttcgagaatttatatataatttaagtgacacaataaaagctttttctattcttctattaactgatttatgtataggattccattcaacccatggttgggaactagtgattggtttcgtctataaagattttggatttgctcaaaatgatcaaattatatctggtcttgtttccacttttccagtcattttagatacaattttaaaatattggatttttcgntatttaaatcgcgtatctccatcacttgtagtgatttatcattcaatgaatgattgact

SEQ ID NO: 8532 - DNA, 421 bp, Glycine max
  Clone ID: LIB3092-060-Q1-K1-G4
ccaacccgtccggcaaccatggcaatggcaacccaagcctctctcttaaccccacccctctgcggtctcaaagccagcgaccgcgcctccgtgccatggaagcaaaactccagcctctccttctccagcccgaagcccctcaagttctccagaacaatcagagcagcagccgccgacgagaccacagaggcaccagcaaaagtagaggctgcaccggtcgggttcaccccaccagaacttgacccaaacaccccttccccgatcttcgggggcagcaccggcgggctcctgcgcaaggcacaggtggaggagttttatgtcattacgtgggactcacccaaagaacagatctttgaaatgcccactggcggcgccgctatcatgagggagggtcctaaccttctcaagttggccaggaagg

SEQ ID NO: 8533 - DNA, 400 bp, Glycine max
  Clone ID: LIB3092-060-Q1-K1-G6
caatccaatttatcaataccacatttttatcgatgaatactatttgcactgtggtactatataatggttctttatcctacgcgttattctattcttgtaatcaacaacttgttcttattaactctttggttctagaatttatatataatttaagtgacacaataaaagctttttctattcttctattaactgatttatgtataggattccattcaacccatggttgagaactagtgattggtttcgtctataaaaattttggatttgctcaaaatgatcaaattatatcttgtcttgtttccacttttccagtcattttatatacaattttaaaatattggatttttacttatttaaatcgcgtatctccatcacttgtagtgatttatcattcaatgaa

SEQ ID NO: 8534 - DNA, 433 bp, Glycine max
  Clone ID: LIB3092-060-Q1-K1-F10
cactgcaattccttcttctcccagaatcggtcactaaatccgcaatcatgaagctcgataggaccggtctcgaatcgtttcccacactgcttgcgcctcaaaacgacgtcgttggagaactctccgccgctccatccttcgaccttccgaattccaacgatttcgatgggtttgtgaaagaagctattcagatggtgaagcccgcgaagggtactacgactcttgcttttatatttaaggagggtgttatggtagctgctgattctcgagctagcatgggaggatatatatcatcgcagtctgtgaagaagattattgaaattaatccgtatatgcttgggacaatggctggaggtgctgctgattgtcagttttggcacaagaatcttgggatcaagtgtcgtttgcacgagttggcaaataaaaggagaat

SEQ ID NO: 8535 - DNA, 308 bp, Glycine max
  Clone ID: LIB3092-060-Q1-K1-D10
atcattcattagcttattcctctaattcttttttacattaatatcaactctcaacgtaggagaatctcttaaaacgtaccaccctccccttaacatcccctaactaatatctcattcaatgacatattcatcaatcacaacccctacatctacactctcatcttacttcccaaatcccaccaaacttacaacaaactccctctcttactatactttcactgtacccccttttacctcaaatcctccttctacttttttatccactcctatctaaacatctttcccttataaaccaactttatttccat

SEQ ID NO: 8536 - DNA, 51 bp, Glycine max
  Clone ID: LIB3092-060-Q1-K1-D11
cccactctttcgaccacacgttccatttcttttcatctttactttatttat

SEQ ID NO: 8537 - DNA, 260 bp, Glycine max
  Clone ID: LIB3092-060-Q1-K1-D12
gttggtttctgcaacctaccatgcaattcctcacctgaatccgttttctattgccacgttgtggaagcgtaacgaagatgaatggcattgggaaactcaaatcgtcgagttctgaattggaccttcacattgaagattacctaccttctggatccagtgttcaacaagaacgggatggcaagctccgactgtgtgatttgctagacatttctcctagtctatctgaagcaacacgtgccattgtaaatgatacattcaca

SEQ ID NO: 8538 - DNA, 66 bp, Glycine max
  Clone ID: LIB3092-060-Q1-K1-D4
agccttccgattttccttgctaaggaaaaaacaaaaaaactgcgaaagagggaggaggttattcgg

SEQ ID NO: 8539 - DNA, 133 bp, Glycine max
  Clone ID: LIB3092-060-Q1-K1-D5
tggaaccaccccgtccgcggacgcgtgggttaatgggcaacctgcttccactgattatgatgaagatgatgaagaaaaggaggacaatcatggggcaagagattcctctcctgaggatgcttgagaatcttaa

SEQ ID NO: 8540 - DNA, 333 bp, Glycine max
  Clone ID: LIB3092-060-Q1-K1-D6
cccttccggtttattttcaaaaaatccggctgttcctgggctggactcctaggcctcaaacaaaggcatgcgcgaccgctcctggtcacaatcttcagcttctaaaactcgcccggaaaagattgttcggaaaaaagttgcagccggttccgcctaatatcttatcatgttaaccacgtcatagtccaattttgcccgttgcctcttcttgagggtcatttgggggttaccggccgggtaacccaaccccggggggtatttgtcgacccaaatttttccatccacttaagggcctggttgttaaatccggtaaggaatcctttttttgaccct

SEQ ID NO: 8541 - DNA, 124 bp, Glycine max
  Clone ID: LIB3092-060-Q1-K1-E10
cccactcttccgaccaccccttccatttcttatcatatttactttattttccccacgtgggggaatcatcatggattatcacttccatcgatcacccacattaatccttaccttaatcaccaac

SEQ ID NO: 8542 - DNA, 389 bp, Glycine max
  Clone ID: LIB3092-060-Q1-K1-E11
cccactcgtccgaccacgcattccatttcttatcatctgaaatttatttcccaatcatggagtattcatcataaattaacactcacttggatctcatcattaatctccacactcttcaccaacaacttccacaaataacagctccaaaacaatttttacacatacgatttgtaggtgaagaaatcttctgtaaaacaagagtcagcaggtgccttggcggatgaactgaatcggttgagtgcagaaaacaagaatttaaccgaaatgctcacagagatgtgtgagaactacaacactttgcgaagcaatttgatggaatacatgatgaagaatcctgataaggagctcagctcatcaaggaaaaggaagtcttcaatcctcaacaacaa

SEQ ID NO: 8543 - DNA, 243 bp, Glycine max
  Clone ID: LIB3092-060-Q1-K1-E12
cccactctttccaacataccatccatttcttaacatctatactttatatatcaccacggggtggttactcatcgaatatcacttgctttgttatactcatatctcccaattctgaacaggaccttctcatcaaatatcacctaccttacaaatccagacgatatacatgacagcttgtcaaagtctccactgtaacatgatgctagacatttccttctactctatcactggcaccacctacca

SEQ ID NO: 8544 - DNA, 430 bp, Glycine max
  unsure at all n locations
  Clone ID: LIB3092-060-Q1-K1-E4
gttggtttctgcaacctaccatgcaattccttttctgaatccgttttctattgccacgggggggaagcgtaacgaagatgaatggcattngtaaactcaaatcgtcgagttctgaattggaccttcacattgaagattacctaccttctggatccagtgttcaacaagaacggcatggcaagctccgactgtgtgatttgctagacatttctcctagtctatctgaggcagcacgtgccattgtagatgatacattcacaaggtgcttcaagtcaaatcctccagaaccttggaactggaatgtttatttgtttcctttgtggtgctgtggagttgtggttcgatatttgattttgttccctattaggattctagtgttggcattaggatggattatatttttttcagccttcattccagtgcactccct

SEQ ID NO: 8545 - DNA, 106 bp, Glycine max
  Clone ID: LIB3092-060-Q1-K1-E5
cacgctaaaccccgtctccaaaaatataaagtcgcatcgcggcgaccgggattgtaggtatcgcggttactttatcggcgtccgataacaccacaagcctttgacg

SEQ ID NO: 8546 - DNA, 448 bp, Glycine max
  Clone ID: LIB3092-058-Q1-K1-H8
agtttattatcgttttcctttctcccgagtgttctcctttcttgcttccttctccggccgtctttatggtgatggcgtcgtcgtctgggaattgcttgcggtggaaacaacgccaaattagggatcccaaagcagcggtgtggttcggttcttcagccgccgtgctccctcgctatggggcgctcgacggcgagggtggggaggatcacggcggcgatggccacggccacggcggtgatgaccacggccacggcgaaggagcaagagactaccactccgatgatgatggcaatggagctgttcgggaaacgcgatggaggagccaaaaacgacgctgttgagggacaggagaggctggacaggtggatgagagagtcggtggtggagatcgtgaagaatttgaaagaagcgcctctgctggtgcaagtttttcccaaatcggcgacga

SEQ ID NO: 8547 - DNA, 201 bp, Glycine max
  Clone ID: LIB3092-058-Q1-K1-H9
aattcccggtccgaccgactcgaacgctatttctaactccgccatttctgccaccacctccaccgtcacgtcatacttttttggcggccgtctcagcaacgccgcaaccttaaacaactgaagattccacacactcctcaacttcagcaaaaacaaagcagcggcgccgtcaccgaataaaaacgaagtgaaagctaaact

SEQ ID NO: 8548 - DNA, 350 bp, Glycine max
  unsure at all n locations
  Clone ID: LIB3092-060-Q1-K1-A10
aatganggaccgacccacgcgtccaaccacactctagttctctcttcatcaccttctttatcctttataataatttcatcaaggaggaggactgttagcgttaaacaaaggcatcctctacaatccttaatgcttatgcatgctaccgattgtgaacccatcactcactttctactaaagaaacaacaacctactgattcaccttaaactccaaatgacattacataagatccatccaagaattccttaaattcctgtacttcatcaattcaatcgatgtctaaatcaattaattgatctcttgatgaaaaatattcctcctataaagatccccacaaattggccctttc

SEQ ID NO: 8549 - DNA, 287 bp, Glycine max
  Clone ID: LIB3092-060-Q1-K1-A11
cccacgcgtccgtttgcctccttctgagagacacacacatagatagatatgataacgttgtaatcgagatggctgccacgtgttgcaacttcactcaagcttcttctagtttcaagaaactgcatgagaacattcagctgcagagctacttcacaaggtgccatcaaagatcagcgtgtagtgttgaaaaagacttccataggagatatggaagaaggttgcaagttgaaagatggcatcaatatcaacatgtgttatgtgcaagaagagggggagtgtccccttct

SEQ ID NO: 8550 - DNA, 324 bp, Glycine max
  unsure at all n locations
  Clone ID: LIB3092-060-Q1-K1-A5
ggccggcccacgcggncgcccacgcgtccgtttgcctccttctgagagatacacacatagatagatatgataaccgggtggtcnanatggctgccacgtgttgcaacttcactcaagcttcttctagtttcaagaaactgcatgagaacattcagctgcagagctacttcacaaggtgccatcaaagatcagcgtgtagtgttgaaaaagacttccataagagatatggaggaaggttgcaagttgaaagatggcatcaatatcaacatgtgttatgtgcaagaagaagggagttgtccccttctgtcaatgaaaaattttgaa

SEQ ID NO: 8551 - DNA, 150 bp, Glycine max
  Clone ID: LIB3092-060-Q1-K1-C10
atagtgaaagagcttcttcctctaattcgagtgtacaaggatggcagcgtggagcgtcttcgaagctctgaaaacgtggcatgcctccctgaaaatccccaaactggagtctcatccaaagacatagtcatcgcatacaacccctacgtc

SEQ ID NO: 8552 - DNA, 288 bp, Glycine max
  Clone ID: LIB3092-060-Q1-K1-C11
cccacgcgtccgcccacgcgtccgaaaagatctacttctagagaagatcaaagaagaaatgggtagattccttgaacgacaagatgttatgatgaaagaatttagtgatcttgactcttggaggtcccatttttctgtgcaactggatcatgtactaagggacaatgcttgtttaaggtctgaggttgaaaaagtccgggaaaatcaagtgtctttggaaaacaaggttgtagttgtgttttctgtgtgtgttattttttcattgcttgctatttttccgctatcttt

SEQ ID NO: 8553 - DNA, 118 bp, Glycine max
  Clone ID: LIB3092-060-Q1-K1-C12
gtcactctttcgaacataccatgcaattgctctacttattccgtttttcattgccacgtggtggaatccctacgaagacgaattgcattgataaacgcatatagtgatgttgtgtatt

SEQ ID NO: 8554 - DNA, 439 bp, Glycine max
  Clone ID: LIB3092-058-Q1-K1-H7
gttttattatcgttttcctttctcccgagtgttctcctttcttgcttccttctccggccgtctttatcgtgatggcgtcgtggctgggaattgcttgcggtggaaacaacgccaaattagggatcccaaagcagcggtgtggttcggttcttcagccgccgtgctccctcgctatggggcgctcgacggcgagggtggggaggatcacggcggcgatggccacggccactgcggtgatgaccacggccactgtgaatgagcaagagactaccactccgatgatgatggcaatggagctgttcgggaaacgcgatggacgagccaaaaacgacgctgttgagggacaggagaagctgtacaggtggatgagagagtccgtggtggagatcgtgaagaatttgaaagaaacgcctctgctggtgcaagtttttccccaatc

SEQ ID NO: 8555 - DNA, 126 bp, Glycine max
  unsure at all n locations
  Clone ID: LIB3092-060-Q1-K1-C4
atatatcacaccccctactgctatctcttctcacttattgataaattnacactgacagcaattttcaccatctccttggaggctccctttctacaatccaaacattcccacacccatacacctatc

SEQ ID NO: 8556 - DNA, 376 bp, Glycine max
  Clone ID: LIB3092-060-Q1-K1-C5
ttgaacgtgtaacccccatggctgttacagcctctagctttggaactacatggtgtcttaggggagcagctcatgcttttgctatctctcattctcatattctccgcagcactgttaaactctctttgcagaggaacttttgctctcatcttctctccgtttctacttctttagcttcaggtgtaagccagacagtacaagctctaaagggagaagttgacttgctactcaaaggagtaggagaaagaagtgtaacgtaagaagtaaaacatattcttgagatggctagacgagcatcattaaagcgagagattctccatacagattttctaacccctccagtgttaaaggaatctatgcaagttttggaaaaact

SEQ ID NO: 8557 - DNA, 111 bp, Glycine max
  unsure at all n locations
  Clone ID: LIB3092-060-Q1-K1-C6
caacctaccatcaattttactaaccttttattcccaagagttttttacaatacaaccctttnaaaccaatgtctatctaattacctcacataaatacctaccttcttatcc

SEQ ID NO: 8558 - DNA, 452 bp, Glycine max
  unsure at all n locations
  Clone ID: LIB3092-058-Q1-K1-F6
cccttttcgacccactcgtgctgccactcatcccntggacctgaagttccattccaccctgtaagatatgacaagcctgagccaccaccagagggtctctaaccgggggccactaaagattctgaccatttgagagatgtgtttggcaaatctatggggcttactgaccaagatatcgttgctctatctgggggtcacactattgtatctgcacacaacgatcattctggatttgaaggtccctggacctctaatcctcttattttcgacaactcatacttcacggaattgttgaatgttgagaaagaaggtctccttcaactaccttctgacaaggctcttttgtctgaccctgtattccgccctctccattataaatatgcatcggaccaatatgccttctttgctgaatacgctaacgctcaccaaaaactttccaaacttgtcttttc

SEQ ID NO: 8559 - DNA, 382 bp, Glycine max
  Clone ID: LIB3092-058-Q1-K1-F7
ctcaacccactcgtacggtaaccaactatcactcgctaatccattcttattcctactaactttaactaccatcttccctaataccggcaaccacttactgacgggcgatccctaactatcactctatactactcacactatcacttccatttctataaacacaccttttatcaccctctaatctaacctatcctcacttctctcccataattaccactaatacaacctcatcaactaccttcaatatcatctccactacctcgacgcttacatctcccacatcatctccacactcttccaaacctaacacccataacgataacttactccacaataattcttttcttttcaacaccttcaaaaaacacaccctaaatttctc

SEQ ID NO: 8560 - DNA, 353 bp, Glycine max
  Clone ID: LIB3092-058-Q1-K1-F8
gcgctagaatgtgaatttcgatgctcagtcatctcttttaccattctcttctctcttgctcttgcaggagagggccatgtccatgcatggctacctgaggaagattattgggaagctgtttggccaaacactcccattcccactgcactgcgagagcttctaaagcctctccctgcaggtgttgaaatcgatgaactccctaagcaaattgatgatacacagtacccaaaaacattcttctataaagaagacctttatccaggcaaaacagtgaaagcacaattcaccaagcgtccatatgcacaaccttagggtgtatacacatggttaacggatattaaagacacctttaa

SEQ ID NO: 8561 - DNA, 289 bp, Glycine max
  unsure at all n locations
  Clone ID: LIB3092-058-Q1-K1-F9
ctttctcctaaaacatctcaatgggttcttcttctattacaacatcgcccgcaaccatgggcatggctgcgatcgtgctcctgttcacggtctttgccgtttcctccgccctagacatgtcgataatctcgtacgacagcgcccacgcggacaaggccgccacgttgcgcaccgaggaggagctgatgtccatgtacgagcagtggctcgtgaagcacgggaaggtgtacaacgcgctcggcgagaaggagaagcgcttncagatcttcaaggacaacctgcgattcat

SEQ ID NO: 8562 - DNA, 431 bp, Glycine max
  Clone ID: LIB3092-058-Q1-K1-G1
cccacgcgtccggccattctcatcctcttctttctctttctaccattgccatggatcccggaagcaccggccgtccggcgccttcaattctcccttctggactacaaattctggtgctcctatttggaacaacaactcctctttaaccgttggagctagaggtccaattctgctggaggattatcatcttgtggagaagcttgcaaattttgatagggaacgtatcccagaacgtgttgtccatgccaggggcgctagtgcaaagggtttctttgaggtcacccatgacatttctcacctgacatgtgcagatttccttcgagcccctggagttcagacgcctgtaattgttcgtttctcaactgtcattcatgagcgtggtagccctgaaaccttgaaggacccctgaggtttgccgtgaagttttacac

SEQ ID NO: 8563 - DNA, 251 bp, Glycine max
  Clone ID: LIB3092-058-Q1-K1-G10
atgcggccacgcgtccgcccacgcgtccgcccactcgtccgctacaacggaagaagaacttacctgcaaacttgggaaggatcaaagagaatggctcaagcaatcgcatcaatgactagcttacgtggttcctctcatgctgagttgcaagttacccttatctccacacccttgaatgttattgagtccaaacagttcgctctcaattacacacgcaacatttacagaccctgcacacaaacaacattttt

SEQ ID NO: 8564 - DNA, 415 bp, Glycine max
  Clone ID: LIB3092-058-Q1-K1-G11
acgattgaaatgggattgcatgttttctttggttgctacaacaatcttttccgattgatgaaggaggtttttgcggggtaagaatctacttgtaaaggatcacactcacacttttgttaacaaagggggtcaaattggagaactagattttcgcttcccaattggggcaccaatacactgtataagggcgtttttgtccacaaatcagcttaatacttatgataaggctagaaatgctgtggctcttgcactcagtccagttgttaaaacttttgttgatccagatggttcactgaagtacataaggaattttgatagtattagcttttcacactggtttttatccaaaggtggcacacccatgattattacaaaaatgtgggatcccattgcctatgtccctgggtttaatgac

SEQ ID NO: 8565 - DNA, 416 bp, Glycine max
  unsure at all n locations
  Clone ID: LIB3092-058-Q1-K1-G12
gccacgcgtccgcggacgcgtgggcgcgcgtttcgcacctcacgaactcggagaagcaggcgcagcggggtcgattcgtcactcgcaactcgggcacgcgcggcgatggcgtcggtccacagcaccgtcgctccccgtaccttcctgccgtcaattcccaagccgagagctcctcttcacgccgcaaagttcgtcgccggcggcgcgcacaactttcggagactgtcgcgcaacctcattctctccggaaacaaacgcgcggtggcggcgaactcggctgcggaggagttcgacgtgatatcggtgcagagcgacgacatcaccgaccagcaggagggcgtggtggtgagccgcgtcgagatggaaggcggagactgcgaattggcgacgcangtgagcggattcggagccaacga

SEQ ID NO: 8566 - DNA, 239 bp, Glycine max
  Clone ID: LIB3092-058-Q1-K1-G2
taattccctacccgaccgcactcatacacccactcttccttccattctcatcctcttttttctctttctaccattgccatgtatcccgtcaatcttctaccgtgcggctccttcaattctcccttcttaactacaaattctcatactcctatttttaacaacaactcctctttaacccttttacctataattccaattcttcttaataattatcatctttttcataatcttccaaattt

SEQ ID NO: 8567 - DNA, 444 bp, Glycine max
  Clone ID: LIB3092-058-Q1-K1-G3
acgattttattatcgttttcctttctcccgagtgttctcctttcttgcttccttgtccggccgtctttatcctaagggcgtcgtctctgggaattgcttgcggtggaaacaacgccaaattagggatcccaaagcagcggtgtggttcggttcttcagccgccgtgctccctcgctatggggcgctcgacggcgagggtggggaggatcacggcggcgatggccacggccacggcggtgatgaccacggccacggcgaaggagcaagagactaccactccgatgatgatggcaatggagctgttcgggaaacgcgatggaagagccaaaaacgacgctgttgaaggacaggagaggctggacaggtggatgagagagtcggtggtggagatcgtgaagaatttgaaagaagcgcctctgctggtgcaggtttttcccaaatcgg

SEQ ID NO: 8568 - DNA, 437 bp, Glycine max
  Clone ID: LIB3092-058-Q1-K1-G4
gtccctttggtcttcatcttctgttctgatccaggtatggcttctaaacgcatcttgagggagctcaaggatgtgcagaaggatcctcctacctcatgcagtgcaggccctgtggctgaggacatgtttcactggcaagccacaatcatgggacctgctgatagcccatatgcaggtggtgttttcctagtttcaattcattttcctcctgactatcccttcaagccaccaaaggttgcttttcggactaaggtgttccacccaaacatcaacagcaatggcagtatatgtcttgacattctcaaggagcaatggagcccagccctaaccatttccaaggtccttttgtcaatttgctcattgttgacggatcccaaccctgatgatccactcgtaccagagattgcacacatgtacaagactgacagggccaagta

SEQ ID NO: 8569 - DNA, 444 bp, Glycine max
  Clone ID: LIB3092-058-Q1-K1-G6
gcggccactcgtccgcccacgcgtccggacccatccaataagaactctgagccaacaagggccacaaactcgagtgatggcaacgccggatctgtcaaggccaatggattcagttcaacacaaccaccgaagcttaattttgtcaattgtgaagaaaatggtgggtcgctgaatcacagtagtaagcaaggtatggtgggttcaagttgaatttcatgagagtcctttgttgtgattcaaggatgctaagctgtattaggttgatatgatgtatattgcggttgctactggaagaggcttgcagctccacggcatcacaagaggctaaattttcatagaatgacaattttttctgggaaagaagtgtaagcaacagttaccaaatcgatttgtgtcctcaactgctgctgatactcccagaggtgatgctgctttgaaatggca

SEQ ID NO: 8570 - DNA, 143 bp, Glycine max
  Clone ID: LIB3092-058-Q1-K1-G8
acgagtttattatcgttttcctttctcccgagtgttctcctttcttgcttccttctccggccagctttatcgggatggcggcatgtctgggaattgcttgccgtggaaacaacgccaaattagggatcccaaagcagcggtgt

SEQ ID NO: 8571 - DNA, 422 bp, Glycine max
  Clone ID: LIB3092-058-Q1-K1-H12
cccacgcgtccggaatcattcaccgaaaacaatctgtgtgaagttgttagaggaatagcgggggatcttgtcgaggaggtgcaattaatagacaatttcaccaacaagaaaggaatgaccagccactgctataggattgcatataggtctatggaacgttcactcactgatgaggaaataaacgatctgcagtggaaagtaagagaacaggtgcagagcaaattgaatgttgtcttaagatgagctataaatgttgaaaatttacagctttgctgtgttcaatctcatttttgttaatgtatagatgttttgcctccctttagcgattgaacagcgctatagacagatgtattatttaatttcacatagtgaatataccctacaatacataacgagccatggctagtccaacaggattatct

SEQ ID NO: 8572 - DNA, 444 bp, Glycine max
  Clone ID: LIB3092-058-Q1-K1-F3
ctagaatggaatttcgatgctcagtcatctcttttaccattctcttctctcttgctcttgggggagagagccgtgtgcatgcatcgctacctgaggaagattattgggaagctgtttggccaaacactcccattcccactgcactgcgagagcttctaaagcctctccctgcaggtgttgaaatcgatgaactccctaagcaaattgatgatacacagtacccaaaaacattcttctataaagaagaccttcatccaggcaaaacaatgaaagtacaattcaccaagcgtccctatgcacaaccttatggtgtatatacatggttaacggatattaaagacacctctaaagaaggatatagttttgaagagatatgcatcaagaaagaagcgtttgagggagaagagaagttttgtgcaaaatccttgggaacagtaattggtt

SEQ ID NO: 8573 - DNA, 437 bp, Glycine max
  Clone ID: LIB3092-058-Q1-K1-H3
attttattatcgttttcctttctcccgagtgttctcctttcttgcttccttctccggccgtctttatcctgatggcgtcgtctctgggaattgcttgcggtggaaacaacgccaaattagggatcccaaagcagcggtgtggttcggttcttcagccgccgtgctccctcgctatggggcgctcgacggcgagggtggggaggatcacggcggcgatggccacggccacggcggtgatgaccacggccacggcgaaggagcaagagactaccactccgatgatgatggcaatggagctgttcgggaaacgcgatggacgagccaaaaacgacgctgttgagggacaggagaagctggacaggtggatgagagagtcggtggtggagatcgtgaagaatttgaaagaagcgcctctgctggtgcaaggttttcccaaa

SEQ ID NO: 8574 - DNA, 365 bp, Glycine max
  Clone ID: LIB3092-058-Q1-K1-H6
gcccaatacatatccgtcgcactctgtgttttcagcgccgtctccgatctccgacaatggcgacccaagtgagcaagaatagggagggcgtagctgatggagtgttcttcgctgaactgaacgaggttctgacaagagagttggccgaggacggttactccggcgtggaagttagggttacgccgatgcgcaccgaaatcataattagagccaccagaacccaagctgttctcggtgagaagggaaggagaataagggaacttacctctgtggttcagaagaggttcaagtttcccgagaacagtgtcgaactttatgctgaaaaggtcaacattaggggtctttgcgctattgctcaggctgag

SEQ ID NO: 8575 - DNA, 254 bp, Glycine max
  Clone ID: LIB3092-058-Q1-K1-C8
aaaatactttatttatatcttcacctattttctaatattatccttatatttcattaccgcatcacttaaactccgagcataatataacacccaatttaaaatatcctaatcgtccaactttttattaatttattaccaccattttttcacctaatattatttctttcatatttttatatatttacttttacttaaaaaaactttcatgtaattctaaaaatttattattcaaattttcatttttttattaaccc

SEQ ID NO: 8576 - DNA, 273 bp, Glycine max
  Clone ID: LIB3092-058-Q1-K1-C9
taaaatatccttaggtccaactttttatgattgtatttccatcattttttggcgtaatattactgcttttatattttgatatggtcattgtaattttaacaaacttacttgtaatgctaaaaatttattaattaaatttttattttttttataacccattttcacaccatttaattacctttttaattcttataaattttacttataaccatttattccatcccttcaattataattaattatatctacttcaatttaaaaacattatttttt

SEQ ID NO: 8577 - DNA, 276 bp, Glycine max
  Clone ID: LIB3092-058-Q1-K1-D10
gcggaagaatcttgcaagaaaccaagggaagaaatcatcaaagcaaaaatttcaagagtttatgtcaggactggagcgtcggatacgagccttattgttaaagatggataccaatggaggaaatatgggcaaaaggtgaccagagataacccttgtcctagagcatatttcaagtgctcttttgctcctagctgccctgtcaaaaagaatgtgcatagaagtgtggatgatcaatctgttctggttgctacttatgaaggggagcacaatcatcct

SEQ ID NO: 8578 - DNA, 253 bp, Glycine max
  Clone ID: LIB3092-058-Q1-K1-D3
atcgtctcagagcagccagccatctgttgccacgtggtggaaaaccacggagaagtacgaccacctgaatcggaagaacaagaaagctgcttcttctctttctctatcactgggcgatcagtttctttaccagggtttcttgcttgggaagttactaaccaggttgaacctttttaaactggcattcaaaggggtaccgatgaacgccattaaccttttttagacattcttttaactgtcattttaaagtttt

SEQ ID NO: 8579 - DNA, 426 bp, Glycine max
  Clone ID: LIB3092-058-Q1-K1-D6
gacccactcggacgatttttatctctcccttagtcaaatgtattcatcagacttcttcccatgatatcttataaaagctaaatgcataacatttactgcggggaggctagatatcccaatgttactactatgacagtccttctacttatgatcccattcacagcattctctggcgtaaaattatctctatcacatattgatatcttgaacatcaaccaactaaactatctatgaacctctccaaaattgttttgtaaatcattacctgttcaagaacctattcttaagcacttatatttaaaagcatgtctttgaaactttccttataaccatctctttctacaccccaatcaaaactcattatctttaatctaatttaacaacatttttttcttattgaaaaaatacaactcccatcatttctta

SEQ ID NO: 8580 - DNA, 413 bp, Glycine max
  Clone ID: LIB3092-058-Q1-K1-D9
gccgcggagatcagagatcccggcaagaatagccgcgtctggctcggaaccttcgacacggcggatgaggcagggcgtgcctacgacgccgcagcacgagagtttcgcggccctaaggccaagacaaacttccctctccctttggaaaatgttaagaactcgagccccagccagagcagcaccgtcgagtcctccagccgcgaccgcgacgtcgccgccgattcctcgcctctagacctcaacctcgcccctgccgccgccgcatccgctcgattccccttccagcaccagttcccggtttttaccggcgcggtgcctgcggcaaatcaggttttgtacttcgacgctgtcctacgcgccggcatggtcggtccacgtggctttgcgtttggctacaatcatcatcccgttgc

SEQ ID NO: 8581 - DNA, 421 bp, Glycine max
  Clone ID: LIB3092-058-Q1-K1-E1
atacgcccacgcgtccgtttgctttttgcatgaatagaacacttgcgccactctcctgtaacacgcttggcctataacgtggggttggcatgctcagttgcattaatcagtcgatcaagtttttcggcataagttacagctctccaactttggcctcagcactgtccgatttggtgcccgcctttaccttcatacttgccgtcatcttcagacacggatagtgagagaataccctgcagaactggtggtggtactcagtcgcattgcattaacatctatactatctgttcctgctgcactgatttcagtaaaagatctaaaagctttgagactggggtttaatatggagcttatagctattggatgttcagcaatttttgtcttatcctttcgaggtgttatccatatatggatcatgggg

SEQ ID NO: 8582 - DNA, 373 bp, Glycine max
  Clone ID: LIB3092-058-Q1-K1-E12
gttcaaaccggatggagttttccagaaactgctaaacaggatggttttgcttcaagaatgagtatgaggatggggaaaactgaaaccacttctgccatgcagagtttgacccctgagaataataaccacaggaatggttttcaatcagatcataaaaactaccaaccacaacaagttcagaccttgagcagaagatcagatgatgggtacaattggaggaaatatgggcaaaagcaagtgaaaggaagtgaaaatccaagaagctactacaagtgcacataccccaattgtccaacaaagaaaaaagttgagaaatccttagatggacatattaccgagatagttaacaaggcactcataaccattccaagcc

SEQ ID NO: 8583 - DNA, 372 bp, Glycine max
  Clone ID: LIB3092-058-Q1-K1-E3
gattactaaatattggggttcttctgatctaactattgttactcatacgcgcgaggcctgggccatgttgattaagcggtggatgggcatagtctgcactagtgtgaaaacatccatgctttgtcgacggactcataatttacgaactatacaaatatcggctcaagatcatgggatccttttctatcaaatacgaacggcttatacgcaccatgctctcgtacgcaatcgttccatatattctatatctaactatgtcaccaagatatcatgacacggcggggattctcatctgcacaactggtacttccaacttggaaccagactgaagaaactaacgatacatctttacctttccagttggtctgccag

SEQ ID NO: 8584 - DNA, 372 bp, Glycine max
  Clone ID: LIB3092-058-Q1-K1-E4
cggacgcgtgggcggacgcgtgggcttcttgttgccactgtcatctcaatgtttttggtgtacaagtatgatggaggagaattctttctggaagctggctttgaaatgatatgctgcatgattattacaggtgcagtcttggctgtgaactttgggcacggcaaataaattgggaaaggagtgagtgcctttctggttgttgtgatcttcttgttcgttttggcatatgggagatcttggtgtccccttgggtggttgaataccagcgagctcttcccattagaaatactatcatccgcactagaacatcgctgactgtatcaacatgatcctctttgcactacttgcttaatttttcactatgtcactttg

SEQ ID NO: 8585 - DNA, 444 bp, Glycine max
  Clone ID: LIB3092-058-Q1-K1-E8
gcggagaacatttgggggcccgattgtctcgagttcaggcccgaaagatggctgcgtgatggagtgttcgggccagcgtgtccttttgagtaccctgtttttcaggctggggtaagggtgtgtttggggaaggacttggctttgatggagatgaagtccgttgtgcttgcgttggttcggaggtttgatattcgggtcgttcaatcgggccaggagccccggttcgagcccggtttaaccgctactttgagaggcgggttgccggttcgggttcgggtttgtgaaaggaaatgaatagcaagtatgtggttgataaagtcataaagccataaaggagttcacaactagaatgaaatcatgaaatcaatgaggggatggaagaaccgttttcgtgtaaataataatgttgcagttgaattgaaagttttctttttccccctcttt

SEQ ID NO: 8586 - DNA, 72 bp, Glycine max
  Clone ID: LIB3092-058-Q1-K1-E9
acggccaaacatgtcagtaagccatctagagaacagtgagaatgatgaaaagcaaggtggaagggtttgatc

SEQ ID NO: 8587 - DNA, 446 bp, Glycine max
  Clone ID: LIB3092-058-Q1-K1-F1
acgcccacgcgtccgtttgctttttgcaggaaaagaacacttccgccactctcctgtaacacgcttggcctattccgtggggttggcatgctcagttgcattaatcagtcgatcaagtttttcggcataggttacagctctccaactttggcctcagcactgtccgatttggtgcccgcctttaccttcatacttgccgtcatcttcagacacggatagtgagagaataccctgcagaactggtggtggtactcagtcgcattgcattaacatctatactatctgttcctgctgcactgatttcagtaaaggatctaaaagctttgagactggggtttaatatggagcttatagctattggatgttcagcaatttttgtcttatcctttcgaggtgttatccatatatggatcatggggaagaagggccctgtctatgttgcaatg

SEQ ID NO: 8588 - DNA, 446 bp, Glycine max
  Clone ID: LIB3092-058-Q1-K1-C6
gcggcgtgcatagttccgaatccttgttcttctgatagtgaaggtagcttgaggtttatttgatttaatggggttcgagaaaagtgctgagagagagaaaatagaaaaggtgaaaaatcgaaggtcggagatgcaaatggaagctagggttggtatggcggtggatggtggtggtgtacggaagttggtgcagccgccgccgaagcagattggaactgtttctcagcttctcgccggaggagtcgccggcgcgttcagcaaaacctgtacggcgcctcttgcgagacttaccatcctctttcagtggaaatgttttcagattcagggaatgcattccaatgttgcagctttgagaaaagtcagtatatggaatgaggcttcacgaattatccatgaagaagggtttaaggctttctggaaagggaatctggttaccattgctcacc

SEQ ID NO: 8589 - DNA, 331 bp, Glycine max
  unsure at all n locations
  Clone ID: LIB3092-058-Q1-K1-F10
tcaaccgctttctcctaaaacatctcaatgggtgcttcttctattacaacatcgcccgcaaccattgccanttctgcaagggtgctcctgttcacggtctttgccgtttcctccgccctatacatgtcgataatctcgtacgacagctcccactcggacaaggccgccacgtttcgcaccgatgaggatctgatgtccatgtaccagcagttgctcgtgaagcacggtaaggtgtacaacgcgctcggctagaaggataagcgctttcagatcttcaatgacaacctgccattcatcgacgaccacaacttctcggatgaccgaacctaca

SEQ ID NO: 8590 - DNA, 325 bp, Glycine max
  Clone ID: LIB3092-058-Q1-K1-F11
caaatgacaagattcctagaaacaaggtctgcccgtgtggttcccaaaagaaatacaaaggttgttgtggatctgctgtggggaaacaatcggctaagtttgtagttcaccaagcagctgactcaaaaaagggcaaaaaagaaaggaagcaaggaaaaaaggggatttctgcaaaagctgaagtacctagtgaatatgacttggtaacacctgacatgggtgcactttgtatttgaattgataatagataagttagttttgtgctttcccagaggagataaactattgaagatcgttctacctataattgagctcttcacaatac

SEQ ID NO: 8591 - DNA, 439 bp, Glycine max
  Clone ID: LIB3092-058-Q1-K1-F2
aaagaattgatatgcagtccatgttaatttgcagagtgatataattgagatgtgcgattgggattcaatctatattgttcaatgaaatgggttggtgtggttctagaaatttaggtcttcaggagtgaataagtcattggataacttgaaagctataagttcaagttccatcaaagccaagagtccaccttcacctgatcaagcattgttaggggcaattatagctggtgtgattgctgttgttctctacaggttcaccacatctattgaggctactctcggtcgccaaacactttcagataatttctcagtccgccagataacaatcaccataaggacaataataaatggcctgtgctaccttgctacatttgtctacggcatcaattctgtcggtttatttctttattctggccagcttgccatggacaccatggga

SEQ ID NO: 8592 - DNA, 230 bp, Glycine max
  Clone ID: LIB3092-057-Q1-K1-H8
catacgcattctgaaaaacctaaattgcctcatcaaaaccaaacttttggaaaggtggaatggtcatttgaagaactttgatttggagaattctatgcggaccttgggtcacatggatctattgtgtctgctacatggttgaacagtgctagccattattatgtatgactgaactaaatgcacatccatattttggacaactgtatcactgtttaaataatagtgaggct

SEQ ID NO: 8593 - DNA, 353 bp, Glycine max
  Clone ID: LIB3092-057-Q1-K1-H9
gatcgcgatgtaactcacccatattgtctcgtcagaaccaaactgtgggaaagttgtaatgggaactgaaaaaactttgctgcggagaaaactatgcatacctaagctaacacaagtgcgtcaacctgttacaaggctgaacaatgcaccacaacatgatctacacttaaactaccaccaccgacaccttgtgcatgagagtgtcacctgttaaagcacaattagagggggctgctatgggtgtgcccgctgagaacgatggctgcaaatgtggaccaaactggtcctgcaaccccttcacttgcaagtgatgttgtaggacaccaatcttcaaccagagattgcccttaatt

SEQ ID NO: 8594 - DNA, 170 bp, Glycine max
  Clone ID: LIB3092-058-Q1-K1-A11
gatcactctagctgctgcacactgctactatataccaaaggctcttgcacacgtggagtgaccttgctgcgtcggcgggctagcctgggtcaacggctacgatgcccttgctaaagccttgccgatctacggcgacgttgccgaatcctacagctatgaacgacccggag

SEQ ID NO: 8595 - DNA, 346 bp, Glycine max
  Clone ID: LIB3092-058-Q1-K1-A12
cgcacgcgtccggtcactgctctgtttcaccgagtttgggcgtttagatcagaaccaaatggtgttctcgtccattggcaaacatggcgactcaaatgagcaagaagagaaagtttgttgcggacggagtgttctttgccgaactgaacgaggttctgacacgtgaattggcggaggacggttactccggcgtcgaagttagggttacgccgatgcgcaccgagatcatcatcagagccaccagaacccaagccgttctaggtgagaagggaaggagaattagggaacttacctcagtggtgcagaaaaggttcaaattccccgaaaacagcgtcgagctttatgc

SEQ ID NO: 8596 - DNA, 214 bp, Glycine max
  Clone ID: LIB3092-058-Q1-K1-A5
attagacctcgagcggatgcacttaaggttacaatacaaagccctgtatgtgcatgtcggcggacacggtaatgatattgtctgagtcacacatgattaattctcatatgattttctttctctagaccattaatgaagtttgatgatcatcagctgctacctatcgtggacctcagtaacattgcgactatggctaacaacgtgatatagtggc

SEQ ID NO: 8597 - DNA, 407 bp, Glycine max
  unsure at all n locations
  Clone ID: LIB3092-058-Q1-K1-A6
attccctgctctacccacacgtccgactataactccatcttatncactcaattttatcatccaattccctaactgcacatacccacctacacgtgatttttataaagtgagtcctctttttctattactcctattaatttttatctctatatcattcataactatcttaattaccacactctaacttatccttctcttttttaacccctcctctattaaaaacaacattaaataattacatcattatatacaacttcaataacttcatatatattaactcccatctaccatcaattctcatacttctatttttcatcttttttcatcttcattctttccaccttttcttctatttattacacaatatcctatatttttacccccattaattcccacttatcttaatt

SEQ ID NO: 8598 - DNA, 418 bp, Glycine max
  Clone ID: LIB3092-058-Q1-K1-A7
cccacgcgtccgcacttctggtcatcattttaccaacatgcaggttttgagttgttgggggttgaatataaagggaggccaaacggttcatccagctggttgaggagaagaagaagaagattatggacagaaaggaagctcctctgaaatgggagcagaagctggaagctgctgctgaaactaaagagaggaagctgaatgctacaaagcataaaaaaagatctggctctgatagtgacagtgataatgacagtgatgatgagagtagaaagacaagtcaaagatctcacaggaagcacagatagcattctcactatgactctggtgaccatgagaaaaggaaagaaaaaagttccaaacggaaaacaaagaaatcatcctctgagactagtgattatgatgactttgagagtagctc

SEQ ID NO: 8599 - DNA, 440 bp, Glycine max
  Clone ID: LIB3092-058-Q1-K1-B1
cccacgcgtccgcacttctggtcatcattttaccaacatgcaggttttgagttgttggggtttgaatataaagggacgccaaacggttcatccagctggttgaggagaagaagaagaagattatggagagaaaggaagctcctctgaaatgggagcagaagctggaagctgctgctgaaactaaagagaggaagctgaaggctacaaagcataaaaaaagatctggctctgatagtgacagtgataatgacagtgatgatgagagtagaaagacaagtaaaagatctcacaggaagcacagaaagcattctcactatgactctggtgaccatgagaaaaggaaagaaaaaagttccaaacggaaaacaaagaaatcatcctctgagactagtgattatgatgactttgagagtagctctgaggaagagagaagaaagaag

SEQ ID NO: 8600 - DNA, 415 bp, Glycine max
  Clone ID: LIB3092-058-Q1-K1-B10
gggggattggaggtggtgagtttggcttgtggcctggtgggaggggatactcttctgaggacacacccttgagtgttacattgctttcctctcaggtacaagacaatgaagccgcataccagtctttgaagttcttagaagaattggatggaaaaatcccaatagttcacgttgaagatgtctgtgaagctcacatcttctgcgcggagaatccatcaattaatggcagattcttggttgcaagctcatatgcatcatccgcagaaattgcaaattattatcttcaagcctatcccgaattcaatttgaaccacaagtatttggaaaggccaaaaagggatataaaatgggcgtcaaggaagctgacagacaacgggtttgtgtacaaaaatgacctgaaaatgatattggatga

SEQ ID NO: 8601 - DNA, 367 bp, Glycine max
  Clone ID: LIB3092-058-Q1-K1-B11
cggacgcgtgggcggacgcgtgggcggacgcgtgggcggacgcgtggggaaggaatagtgagtgatgttaaagatcaaggcagctgcggatcatgctggacattcagcacaactggggctttagaagcagcctatgcacaagcatttgggaagagtatctctctttctgagcagcagctagtggattgtgctggccgtttcaacaactttggctgtaatggtgggttgccatcacaagcctttgagtacatcaaatacaatggaggacttgagacagaggaagcatacccctacactggaaaagatggtgtatgcaaaatctcagctgaaaatgttgcccgtcaagtcattgactcggtcaatatca

SEQ ID NO: 8602 - DNA, 410 bp, Glycine max
  Clone ID: LIB3092-058-Q1-K1-B12
gcaaagtctttcttacttggatggcagccttccgggtgactatggatttgaccctctgggactttcagaccctgaaggaacaggagggttcattgagccgaaatggctagcatatggtgagataatcaatggtcgctatgcaatgttgggtgcagttggtgcaatagcacctgaaattctaggcaaggctggtctgatccctcaggagacagcactcccatggttcagaacgggtgtgttcccacctgcaggaacctacaactactgggcagaactcctacacacttgtccggtttgagatggccctggtgggatttgcagaacacataaaattccaagactgggccaaaccaagctctatgggcaaacaatacttcctaggactagagaagggtcttggaagttctggt

SEQ ID NO: 8603 - DNA, 135 bp, Glycine max
  Clone ID: LIB3092-058-Q1-K1-B2
ttacttctcatcatcattttaccaacattctattttttagttaataatgttataatataaatggactccaaacttttcatccacctattttattataacaataacaatattatttatataaattaatctcctctt

SEQ ID NO: 8604 - DNA, 222 bp, Glycine max
  Clone ID: LIB3092-058-Q1-K1-B3
aacggctagacaacaaaaggcggagcacattaaatcattattgactatcacgtgacagcggaagatatcttcgggagtgggaagcactggctcaatgaaattggccgctatgccacagataatgttaacaaacttttggttggaaacaagagtgatctgacagcaaatagagttgtctcatatgacacagctaaggaattcgcagatcaaattggcatacct

SEQ ID NO: 8605 - DNA, 363 bp, Glycine max
  Clone ID: LIB3092-058-Q1-K1-B5
gccacgcgtccggcgaatctacttcaggtcacaagtgattgctaaaaacgagttcgacggcggaaaatgtgaggattttgtctgggtgacacaggatgaattgacagatgattttctcgatcaagccaaatttttaaataagatgatcattagctgatgaatgtggataacagcagtataattgaaatttttgccaactagtttctataatgacagtggaaggccttgctcgaagatcaatgtacgataaagattctgggcacattggacgatttcgatttaaagttaaacgtgacatctatagttgctgagacttgtccgagttaatggatgctggtaggcctttttgtgtaacaacgtgtt

SEQ ID NO: 8606 - DNA, 294 bp, Glycine max
  Clone ID: LIB3092-057-Q1-K1-H4
gcgacacatgagatactggccgcgcatacttaaaaagctcgtgggcctctaactgatgctacagacattagtttattcaagatacggatgctatacatagtggccaaactgagagagacgacctcatcaagcccagactccgactcgaattgatcgtattcaacgaatatgtgccatattgcgcaagttgcccgatgcttcacgatctatcacacgcatgtattaatggtctgatcacaaatattgatcatctagacccatatggaagacttcgcctatctacttacggcttat

SEQ ID NO: 8607 - DNA, 393 bp, Glycine max
  Clone ID: LIB3092-058-Q1-K1-B6
attagagctgggtgttatgcagccaatgttatcatccaaaggcctggctgcacatacccagcgacgcgtgattttcattgagtgattcctctttttctgttactgctatgaatttttttctttttatcattgagaaggattttaatagccacactctaactggtgtggggttttttaaccccccggctagggaaaacagcgtgaaaaagttgcagcaagagataaaacttgaataagttcatatatttgaagtccgatcaagcatcaattctcatattgctgtttgtgatcttttttcattttcattttttccaccttttcttctttttattacagtttatgctgtatttgtacccctatcaaggcacatgtatcttaattatgctgtttgtt

SEQ ID NO: 8608 - DNA, 441 bp, Glycine max
  Clone ID: LIB3092-058-Q1-K1-B9
gccaaatcaatcaaattctttgagttgaacacaggggccaagattccttctcttgggttggggacttggcaagctgaacctggtgttgtagctgaagctctcaccacagccattcaggttggatacaggcatattgactgtgctagtgcgtataagaatcaagcagagattggttctgctcttaagaagctttttgatgatggtgtggtgaagcgtgaggacttatggatcacttccaaactctggtgttcagatcatgcaccagaagatgtgccaaaagcattggataaaacattacaggaattgcaacttgactatcttgacctctatctgatccactggccagtccgcatgaaaagtggaacatttggactcaataaagaatatcttgagcaaccagacattcccaatacatggagagcaatggaagcactctatgac

SEQ ID NO: 8609 - DNA, 302 bp, Glycine max
  Clone ID: LIB3092-058-Q1-K1-C10
cgcgtttgggagaagaagagcaaaatcgctgtgaaaatgagcggaacggtgaagaaaggtggcgatgtagcattcaaggtgggaaggaacatcgattgggatggaatggcgaagcttctggtctccgatgaggctcgcagggagttctccaatctccgtcgcgctttcgacgaggttaactcccaactccaaaccaagtttagccaggaacctgagcccattgattgggattactatagaaagggaattggcactcgtttggtggatatgtacaaagagcattatgagagcattgagatccc

SEQ ID NO: 8610 - DNA, 366 bp, Glycine max
  Clone ID: LIB3092-058-Q1-K1-C11
accggaaggattgtttacttttctggtacattattatcgaaattagtggtttaagttcattcagcccaatttgaaagtgttggttgctaacaatatttttataaggtttactggttagcaacccattgtgtgattcctcagttcaacaactctcagcaacatgcacaatcctccccctccaggctgtccagtccctcaccaccaccccgtcccacctgctccgacaccacatgctcattcatctcctccgacttctgctccttcacaccaccaccactgcccaccctttccaccgcatgcttatccaactcctccgtctactggtccttcacaccaccattccttcccaccctaaccattctttta

SEQ ID NO: 8611 - DNA, 146 bp, Glycine max
  Clone ID: LIB3092-058-Q1-K1-C3
aacaaacataacaaaaacgcctgccttgtataggatcacagactaacgaacgcgatccatgggagaatgataaataaccatatagtatacacactaagcatcatataaacgtgtgccattcgctaaacaaacaaacagaaacttgg

SEQ ID NO: 8612 - DNA, 430 bp, Glycine max
  Clone ID: LIB3092-057-Q1-K1-F12
cagattctggccgtagagtgacccttggttcagtgccctgtaccgcatatatcagcacttcagcaccaacacttgttacccttgacttgacaaaatctcagggaagcaacgatgccaagagcacaaagcctaaaggagattcacctaaagtacctcaggttttggtggaacagatggctacttctttgaccacggattctaattttagagcagcacttgttgctgccatctcaggaagattgatgcacaataattaaatggaattttggtgaagagatgctaatttagtgtcaattgtgtaagtattccataaaatagagatcattctgtagagcaaggggtctctctatgtaaatacaacatggaaagctgggacatatgtgatcctttaaagtggaaataaaattccactaatgatgacatgttgagc

SEQ ID NO: 8613 - DNA, 336 bp, Glycine max
  unsure at all n locations
  Clone ID: LIB3092-057-Q1-K1-F2
ttatttttcgattttatttcaaccttcaccacctataaacttttgccctataacaccttttgttttgttacttttttaaccaccattttttcattgaataaagtttccttaaaccaaaagttattaaatcctccaaaaancnngacagngattttcaaaatcccatatctttcacagtttttgaactccttatatgatttccaatacaagtcttttttctcagcatttgcttgcctgaccgaacaaattaagtttgaccgctatcttcatccacacttccgttattacatgagggaggtcacaacacttttttattcccaattttttgaatcttac

SEQ ID NO: 8614 - DNA, 283 bp, Glycine max
  Clone ID: LIB3092-057-Q1-K1-F3
cccacacatcctaaccctcaaccacaccgttttgatcattatcaacatataactaacgagttttatttttgctttcatcccaagccgtggcgcctataatcctccataactcaaaaaccaacacaaattcttaccaaacactcatttctttcgattatgctcccctacaattttacttttccccaaattttgacatgggtgtatacaataaaactcctaaatttctaaagatctatcctattgactaggttcctttattgcaaacacatgattctccaatatt

SEQ ID NO: 8615 - DNA, 423 bp, Glycine max
  Clone ID: LIB3092-057-Q1-K1-F4
gagctctgcgagatcttcattcgccgattttaaaagatgagtaagcttcagagtgatgctttgcgtgaagccatttcaggaatcatggccgattccaaggagaagaatcgcaaatttgtggagaccatcgaactccaaatcgggttgaaaaactacgatccacagaaggacaagcgtttcagtggctctgtcaagctgccccacatccctcgccccaagatgaaaatttgcatgcttggtgatgctcagcatgttgaagaggcggagaagataggactggactggatggatgtggaagccctgaagaagctaaacaaaaataagaagttggtgaagaaactagctaaaaagtaccatgcctttttagcttctgaagcagtcattaagcagattcctcgtcttttgggtcctggtctcaacaag

SEQ ID NO: 8616 - DNA, 370 bp, Glycine max
  Clone ID: LIB3092-057-Q1-K1-F5
atcaagaatgctgacaagttatttttggattttatttcaaccttcaccacctatgaactttggccctatgacaccttggtgtttggtactgttttgaccaacattatatcattggatagagtttccctaacgcaaaaggtcgtacatgctccacagatctcgacagagattggcaaaatcccatatctttcatagtttttgaactccttatatgattgccaatacaagtcttttttctcagcatttgctggcctgacggatcaaattaagttgaaccgctatctgcatccacactttcgttattacatgagggaggtcagaactagtgtttattcccaattgttggaatcttacaacagtgtgacaattg

SEQ ID NO: 8617 - DNA, 256 bp, Glycine max
  unsure at all n locations
  Clone ID: LIB3092-057-Q1-K1-F6
ccgggacgacccacgcggacggacacacataaaaaccataatccacgaagatctcaaaacagtgagcancaaacgaacnctttgtgttttgtgctaaaaacgagagggggcgagcttttttttataaccaaacnccaataacccacacaccaacaaaccaccaagccacaccaaaaactaagaaacaaaaaagcacaagccacacacactcactgtaaaacagccccacatcccacgccccaagatgaaacacaca

SEQ ID NO: 8618 - DNA, 395 bp, Glycine max
  Clone ID: LIB3092-057-Q1-K1-F7
aaaagccttatcaaataaagtgtgtgcagagagagaactgaagaagaagaagaagaagaaggagcttcggtatctcagccgggactttcaatttgcataagaatctgcatctgggaaacctcagacacacactcacagtgacaagaataagaaaatggtaacagaagaagttgttggaggagattctggagattcacatcaccaccaccgtaactctgacatagaactcattgccactgctgaaagggcacctttacctcacagtggaccactgaacaaaagaagaagttccaagttgagcaacgcttcttctgcttctgcttctgcttctgcttccatctctgccccagaggaacaacaagatgaaggagactacgttgaggtcaccatggaca

SEQ ID NO: 8619 - DNA, 354 bp, Glycine max
  unsure at all n locations
  Clone ID: LIB3092-057-Q1-K1-F8
ttcaagaaggctgccaagttatttttggattctatttcaaccttcaccacctatgaacttttggcctatgacacctttatatgttatactgttttgaccagcattatatcattggatagagtttccctaaagcaaaaagtagtagatgctccagagatcttgacagtgattggcaaaatcccatatctttcagagtttttgaactccttatatgattgccaatacaagtcttttttctcagcatttgctggcctgacggagcaaattaagttggaccgctatctgcatccacacttncgttattacatgagggaggtcagaacagttgtttattcccaatttttggaatcttac

SEQ ID NO: 8620 - DNA, 433 bp, Glycine max
  Clone ID: LIB3092-057-Q1-K1-F9
ttcaagaaggctgccaagttatttttggattctatttcaaccttcaccacctatgaactttgtgcctatgacacctttatattttatactgttttgaccagcattatatcattggatagagtttccctaaagcaaaaggtagtagatgctccagagatcttgacagtgattggcaaaatcccatatctttcagagtttttgaactccttatatgattgccaatacaagtcttttttctcagcatttgctggcctgacggagcaaattaagttggaccgctatctgcatccacacttacgttattacatgagggaggtcagaacagttgtttattcccaattgttggaatcttacaagagtgtgacaattgaagccatggcaaaagcctttggagtgacagtagatttcattgatgtggagctatcacgtttta

SEQ ID NO: 8621 - DNA, 360 bp, Glycine max
  Clone ID: LIB3092-057-Q1-K1-G10
gttagttgttgtaactcgttcttatttttttgttggtttccgtaagcgtttgttttttctctgaactgaaaatgtctgggtgcggtggtaactgtggttacagaagctcctgaaagtgcggcaactgttgaagaggctgaacgatgtacctatactggatctacactgagtaatccatcaccacaaccttggtgatgggagtggcacctgttaatgctcaatttgaaggtgctgaaatgactgtgccgcatgagaacaatagctgcaaatgtggaccaaactgatgctgcaaaccttgcacttgcaagtgaggtgatgcgagagcaagcttcaagcagatattgccattaattaagaata

SEQ ID NO: 8622 - DNA, 192 bp, Glycine max
  Clone ID: LIB3092-057-Q1-K1-G11
gttacgcgttcgaactaattcttattttattgttgatctccctaaccgatatttggttcattggactataaaatgactgcggtggggtgctaacttgttctacataaaatcctgatagagctccaactctttaacaacctgaataaatttcctatactagatctacacattttaaacaatcacaaaaatctt

SEQ ID NO: 8623 - DNA, 257 bp, Glycine max
  Clone ID: LIB3092-057-Q1-K1-G12
cccacgcgttcggacaattatacacgtaagaggctagttcgctaacagagattgagtatttagtgattgcaatgattgcgcattttacctacactagtgccaaaatcaaaccatgtagtggattatgtatttaattaccaaagtacaccttatattaaggacgctcacgttaaagtgacagacaataattttttggcatcttgtatgcctactgaatttgcttatgaacagagcagatgtatctaaatgtataaaat

SEQ ID NO: 8624 - DNA, 419 bp, Glycine max
  Clone ID: LIB3092-057-Q1-K1-G3
gcaaaagaagatttaaaggaagtggataaagaaattacaggtggtgaactagctgatgcaacggacatgggtattattcaggtggggaaagctatataggttggtcgagctgcgagaaacaaactcataaagcacaatctccggcttgtattgttcgtgatcaacaaatattttcaagattttgcaagtggcccgaggtttcaagatctttgtcaggcaggagttaagggacttatcacagcaattgatcgttttgagccaaaaagaagacttcagctatctacatacagtttatgttggataagacattctattcgtcgttccataaccctcttaagctttacacgtgttccttgttggacttgaaagggttagaagagaaatccaaagaacaaaacttaagtaacatttgacctcca

SEQ ID NO: 8625 - DNA, 182 bp, Glycine max
  Clone ID: LIB3092-057-Q1-K1-G5
tacaaaatctgggcttattcaattttctgatccgaaaatactttccaaaactcaattccaaattctatctgaaccctctatcatatccacttaatttttatgaactctaatattatcctactaacactttatttccattgcattaaacaccacattacatatttttaaaatcttataaaaca

SEQ ID NO: 8626 - DNA, 382 bp, Glycine max
  unsure at all n locations
  Clone ID: LIB3092-057-Q1-K1-G6
cggacgcgtgggttactgcagccacacgcctcattagaccatgggctcattgnnnnngttacagaatctaagcggcatcaattttgtgatcataaaagaggggccaaaagtgaatgcgaagttcgagctgaagccgccaccatattcacagaatgggttggagccgatgatgagccagcagacacttgagtttcattgggggaaacaccacaagacatatgtggaaaatctgaaataacaaattgtggggacagagcttgatggggaatcactagaagagattatagtgacatattataataagggtgacatttttccagctttcaacaatgcatcacaagtatagaaccatgacttgttctgggagtgcatgaaaccaggt

SEQ ID NO: 8627 - DNA, 405 bp, Glycine max
  Clone ID: LIB3092-057-Q1-K1-G9
gtttgttgttgtaactcgttcttcttcttttgttgatctgagtttgagtttgatttttctctgacctgaaaatgtcttgctgcgggggtaactgtggttgcggaagctcctgcaagtgcggcaacggctgcggaggctgcaagatgtacccagacttgagctacactgagtcaaccaccaccgagaccttggtcatgggagtggcacctggtaaggctcaatttgagggtgctgaaatgggtgtgcccgctgagaacgatggctgcaaatgtggaccaaactgctcctgcaacccctgcacttgcaagtgaggtgttgggagagcaagcttcaagcagagatagcccttaattaggaataatgatgaactattaatgtgtagctaaaaacttatgtattatgtct

SEQ ID NO: 8628 - DNA, 329 bp, Glycine max
  Clone ID: LIB3092-057-Q1-K1-H10
cccacgcgttctgccagataaaaacttaagcatcggctaccctaacctcgtcttggtctctagtaatatcagatgtgggggtcggatctatacttgacccacatcctatccagatagagctcaagctttttaaccgctggaacttagaggatattgatgatactcacattttactgactcattacattgtagttgctgcatacatgcacgcctcatatgctcttcacaccgtctgaagttacttcgtgaagcgagacaggaaggcgcaattccccattgttgtgaggctcaccaactctctcatgctgcacgggtgaaacaacggcaag

SEQ ID NO: 8629 - DNA, 437 bp, Glycine max
  Clone ID: LIB3092-057-Q1-K1-F10
ttcaagaaggctgccaagttattttttgattttatttcaaccttcaccacctatgagctttgggcctatgacacctggggattgggtactgttttgaccaacattatatcattggatagagtttccctaacgcaaaaggtcgtagatgctccagagatcttgacagtgattggcaaaatcccatatctttcatagtttttgaactccttatatgattgccaatacaagacttttttctcagcatttgctggcctgacggagcaaattaagttggaccgctatctgcatccacacttgcgttattacatgagggaggtcagaacagttgtttattcccaatttttggaatcttacaacagtgtgacaattgaatccatggcataagcctttggagtgacagtagatttcattgatgtggagctatcacgttttattgc

SEQ ID NO: 8630 - DNA, 314 bp, Glycine max
  unsure at all n locations
  Clone ID: LIB3092-057-Q1-K1-H11
taagcatctgctaccctaacctcnncttcctctctcctcatttcanatataaccggcgaacctnnnnntnttccanatcccacccanatcnatttcaagctctttaaccgctggaacttcgaagatatttaagttactgacatttcacttgctgattacattggagtttcggcatccaaacacgccacatatgttcctcacaccgccggaaattactcctttaagcttttcatgaaagcgcaatgccccattgtttaaaagctcaccaactctctcattatgcacggtagaaacaattgcaagaaactcttttc

SEQ ID NO: 8631 - DNA, 386 bp, Glycine max
  unsure at all n locations
  Clone ID: LIB3092-057-Q1-K1-C5
atttataactatttccctctcttaacacacttaacaaagatatatcatatcatctgcgctccaaatgatggggggtatctcnttgattcttcttgtgatggtggctacttttgtggtggcagccacacctggtagcttttaccaagactttcaaataacatggcgtggtgagcgtgccaaaatctatgaaaatggaaatcttctcaccctctccctaaacagagcctctggctctgtctttcgttccaaaaaagaatacttcttcggaaaaattgacatgcaactcaagctcttgcctggtaactctgctggaacagtcactgcctattatttatcttctctggcgcctactcatcacaaaatagacttcaagttttttgctaact

SEQ ID NO: 8632 - DNA, 186 bp, Glycine max
  Clone ID: LIB3092-057-Q1-K1-C7
acgctttaacttataataacaatactattaaaatttcttaaaaccaataattaatactgctactgggattactccaaatatgtgcccgagcactatcttataacctacctaatttaaaacaaaacactatttcaacataaactatataattaataacacgacaacttaacttattatctaatcata

SEQ ID NO: 8633 - DNA, 261 bp, Glycine max
  unsure at all n locations
  Clone ID: LIB3092-057-Q1-K1-C8
attaactcttatttaaaactactcaataaactttaaaaccaacataatctatccatcatcttggatgttaattctggtacctcgggtcanaaatttaatatgctccacaaacagtcaattcacacatacatttttaaaatatctctatttcatcatgctctacaaatcaatatcctcaactacaaaaatttcatctcttaaacattacctttgcttcaatctaacacttaaaattacactcttatatgctacaaaccctct

SEQ ID NO: 8634 - DNA, 160 bp, Glycine max
  Clone ID: LIB3092-057-Q1-K1-C9
attaactcttattaaaaactactcaataaactttaaaaccaatatattcaatccagcaaattgaatgttaattatgatacttcgggaaataaatttaatatgctcctcatacatacaattctcacatatattattaaaacatctcaatttcatcatcatt

SEQ ID NO: 8635 - DNA, 458 bp, Glycine max
  Clone ID: LIB3092-057-Q1-K1-D10
gtccttcctcactctgaatccgccattgggctgtgatggcgaagaagcgaaagtcggaggcggcgcgccttgacgaaggggatcgaacgatatactccactttctgcagcaccgacaactacctctctgatctctacacccacgccatgaaccaacaaaaactctcatttcaggccggcgaacgacacgctcttgagaaattgtatcaatggattctcacgcaacagcaagaaggatctagggtggccaccattgatattgctacccatttgcagaacgagctagaatatggaggagaggaggcaccagtgttcccaaggcagccaatgcatcaacagaattaccagactgcaatgcacaacactaactgtggtgcgtgcataccctctaatgcatttggagcaactgcggcatgacaggggatacgtgctggacaacctgatcaacaaccaaagaac

SEQ ID NO: 8636 - DNA, 452 bp, Glycine max
  unsure at all n locations
  Clone ID: LIB3092-057-Q1-K1-D11
tttagcctttttcggtttcgaacattcggacgaatttctctctctctctcttcaattcaacacttggaggacatgagatggatcgggaagaatatttggggaagtgttccaatatgaaatgccaaagagtggatgaatcatatgtacatgctcttcaagatgaagtaatggaagttgagcatttgcttgcagaacctaaaaatgatcatgcttccctggatggtagtttggattctcatacaactttgaatggaaaggatgatttggaactggaggcccttgatggattgctggatgatgttgaaatcaatgatcttgaaggaactggtggtttccctggtggtacatgtgaagaatattttttggattttggatttgctgaccaaattgacgaggtactangctctggtccttttgtagagtcactcttgcaaaactcaagttctgaaagc

SEQ ID NO: 8637 - DNA, 456 bp, Glycine max
  unsure at all n locations
  Clone ID: LIB3092-057-Q1-K1-D12
tttagcctttttcggtttcgaacattcggacgaatttctctctctctctcttcaattcaacacttggaggacatgagatggatcgggaagaatatttggggaagtgttccaatatgaaatgccaaagagtggatgaatcatatgtacatgctcttcaagatgaagtaatggaagttgagcatttgcttgcagaacctagaaatgatcatgcttccctggatggtagtttggattctcatacaactttgaatggaaaggatgatttggaactggaggcccttgatggattgctggatgatgttgaaatcaatgatcttgaaggaactgttggtttccctggtggtacatgtgaagaatattttttggattttggatttgctgaccaaattgacgaggtactangctctggtccttttgtagggtcactcttgcaaaactcaagttctgaaagtcatt

SEQ ID NO: 8638 - DNA, 330 bp, Glycine max
  unsure at all n locations
  Clone ID: LIB3092-057-Q1-K1-D5
ttaataatnncatcaacaatcaatgatgatcnacgtcaaaatctatatgcacaacacgacacacaggtttgcagaagagcctttgtggtcatcctcttttctttggtataacaatgggactgctttctgagatcataaattctaggctcttcacatctgtcagagattctctggggttaacatatgacgtgtcatttgaattaaacttgtttgataggcttaaactaggatggtatgtgatctctgtgacatcaactccaagcaaggtccacaaagctgttgatgcatgcaagaatgttcttagaggcctgcataccaataaaattactg

SEQ ID NO: 8639 - DNA, 438 bp, Glycine max
  unsure at all n locations
  Clone ID: LIB3092-057-Q1-K1-D6
gccacgcgtacgaccacgcgtccgattatatattcggaccagcgccaaaccgttgnggttttaccattgggggagtagacttgttcgggtgaattaataatgcatcaacaatcaatgatgatcagtcaaaatctaatgcacaacagacacaaggtttgcagaagagcctttgtggtcatcctcttttctttggtataacaatgggactgctttctgagatcataaattctaggctcttcacatctgtcagagattctctggggttaacatatgacgtgtcatttgaattaaacttgtttgataggcttaaactaggatggtatgtgatctctgtgacatcaactccaagcaaggtccacaaagctgttgatgcatgcaagaatgttcttagaggcctgcataacaataaaattactgagagggaattggacagggcta

SEQ ID NO: 8640 - DNA, 425 bp, Glycine max
  Clone ID: LIB3092-057-Q1-K1-D7
cttaactactgatatcaattataacaaaacattgaaggattattagggaagttgtagtttgaaactgcaccaattatatatacaacatgtgtcgtggaacttttgtggttgaaggatcaagggtattgcaaaatgaacagcacaatgatgaagttggtggctcaacatgccaagaaccacatagggtcagtaactgaggccaagaagctggcttctccttctacttctccttctacttcttcttcttcagtaacttcaaataacctgagagatgatgagaagagaaggatggcagaggagtctctcaaaacagttatgtatttgagcacatggggtcctaattcttagagttagaaaacattagattaatatcataaatatttagcataattcagcagggcacaaaaaatatgatgccagtgatc

SEQ ID NO: 8641 - DNA, 392 bp, Glycine max
  Clone ID: LIB3092-057-Q1-K1-D8
cccacgcgtccgcccacgcgtacggaagatggctttaggtgttcctgctcttccgttgacatacgtggctcacgttctggcagctgttgccagcgtcttggtcgtggtctgggtcgacaatttcaggggtggcttggcttgggattctgataacaagtccctcatcttcaacattcatccagttcttattgttattggcttactagttcatgggggtgaagctattataagttacaaagcttttcccctaaagaaggaagtgaagaaattgatacaccttgttttccatgccatcgcattaatacttggaatagttggaatttatactgacttcaagtttcacaatgaaagtgggattgccaatctctacagcttgcattcatggcttggga

SEQ ID NO: 8642 - DNA, 313 bp, Glycine max
  Clone ID: LIB3092-057-Q1-K1-D9
cggacgcgtgggcggacgcgtgtgctgactcgttttacggacgcgtggcgttgttgtacaacgaagggtatttttctttggtggtctgttctgaggtcaatttaccttcagtacctagaaacatttggtggttagattctggggccactactaacatcagtgtttcaatgcagggttgactcatctactggaagccaattgattctgaaacgatggatctacgttggagatggtaaatcggcggaagtggaagctatacggcactttagattattactacgtactagcttttatctggatttgaaagacactt

SEQ ID NO: 8643 - DNA, 431 bp, Glycine max
  Clone ID: LIB3092-057-Q1-K1-E11
ataatttctccgttgatttgcttttattctagtttaatgtttttattaatagcaaataaattgatctttgttgatttacttttattttactttaatgtgacataaacatcacctaatagcaaataaatttaattttagtttatcatgtactagtataattatacttcttttatgggcaaacaaatgttaaattttttttaagatacctggaaccttgctaatttagcttcttttttttttttgtgcaatcaaaattggagtgtccaatacctagaaccttgctactgttcatattgaagggaaacaattttattcatcggacagctattttcgaatttatgtttcccgtccactcccaatccactatgtagaaccttggcaagcaatcaagtaattttattcattggtcactctaatggggggtgattttt

SEQ ID NO: 8644 - DNA, 348 bp, Glycine max
  Clone ID: LIB3092-057-Q1-K1-E12
gctaaaattacttcatcatggctttctcgtgtgctaactctgccattgcaactgaggccatctgcacaccaagttcccagaagaatggatcactcttgggaagcacaaaagctttttttcttagtgggaggaaactgaaggtgaacaactttacagcaccagttggagcacgatccagcactacagtttgcgcagttgctgagcctgataggcctctgtggtttccacgcagcacctctacttcatggctagatagcaggttgtcaggagactatggctttgatcctgtacgatctgcatctgatcctgagagcctgagatggaatgtccaagcagagcttgtgcact

SEQ ID NO: 8645 - DNA, 226 bp, Glycine max
  Clone ID: LIB3092-057-Q1-K1-E7
cccacacgtcctcaaacaaaaaaatttttttttttgtcaaaaaaatttacacagactaacaggggaatatgatagactcgtggtgctaactacaaacaaaagtatattcaaataatcaatcattaaattcaaaccaaaaattacgttcattatcaactgttaaccattctatttatttaatgtgctcatttcaacattttttccttctctaacctttgctgtatat

SEQ ID NO: 8646 - DNA, 416 bp, Glycine max
  Clone ID: LIB3092-057-Q1-K1-E8
ttcaagaaggctgccaagttatttttggattctatttcaaccttcaccacctatgaactttgggcctatgacacctttatattgtatactgttttgaccagcattatatcattggatagagtttccctaaagcaaaaggtagtagatgctccagagatcttgacagtgattggcaaaatcccatatctttcagagtttttgaactccttatatgattgccaatacaagtcttttttctcagcatttgctggcctgacggagcaaattaagttggaccgctatctgcatccacacttccgttattacatgagggaggtcagaacagttgtttattcccaatttttggaatcttacaagagtgtgacaattgaagccatggcaaaagcctttggagtgacagtagatttcattgatgt

SEQ ID NO: 8647 - DNA, 295 bp, Glycine max
  Clone ID: LIB3092-057-Q1-K1-E9
aatcacgcattctctcacattattttttcattctatttcaaccttcaccacctattaactcttgccctaatacacatttctgttgtttactataatcaccaacattatatcattctatatactttccctaattcaaaaattattatattcttcaaatatctatacatctattctcataatcccatatctttcacatttttttaactccttatattacttccaatacatatctttttttttacattttatttccttacttaccaaattaatctttacctctatcttcttccaccct

SEQ ID NO: 8648 - DNA, 291 bp, Glycine max
  Clone ID: LIB3092-057-Q1-K1-C12
attatttcttttttgaaatgaacttatgcacttctacttcaacatttactatgaattgatcagtgggagcaatacaggtgggcgggccacaaatctcatattccctgaccacattcaattccgacacacttaaacaatacctaactctatgcacgaagatcactaaatcatgtactgccaccctatccagtacacctgagacatgcatctactgctttcatcaacaagttgaccaataatataatcctcaattaaaagtgtggttcaagatccaatgacatgacaactgag

SEQ ID NO: 8649 - DNA, 253 bp, Glycine max
  Clone ID: LIB3092-056-Q1-K1-H8
atcacacgctcctatacattttatctatacattattatacttgccaaccaccttcttatgagcgatcaaaccattgatcgatcgcatacctctttcatatcacgtctcttcttaacaatatctggacctattctaaatgaacacaatgttgaaactgtaacccctttcactattctaagtctaaccctattaacattttgtgcttcgattacctcgcatcaacttcatacactcttctataacaccttattat

SEQ ID NO: 8650 - DNA, 452 bp, Glycine max
  Clone ID: LIB3092-056-Q1-K1-H9
gcactctgctgtccgtacaccactttctcccctctcaaaggagggaaaagatcggttgcttgagtggtgtcagaacttcattttgtggtcaagttgtgtgcaattcaagtttctgtgggagacaaataactagaagccatggaaaccgtcttgttgttcactcactgcttggaaggaaggtgaagtctgtgaagagcagagagactgtaattcctgaaccagattacaggattccaattgtgctactcggtatagctggtggattggtttacacagataatttggtacctgcagtacctgttggtctccttggattgcttctgttgtttcagaccactagagtgagatttgtctttgatgatgaggctctggaggtaaagataggtgaacagctccaggaatcaggtgagaatgttttcgtgggaggaaaaaaccgctggaagtactcgaca

SEQ ID NO: 8651 - DNA, 141 bp, Glycine max
  Clone ID: LIB3092-057-Q1-K1-A1
atgacacggaatacaccgattacggtatagcgctgtttaaactaaatatttgaacgacagagggtgcctgccacaagctaagtatgatgcgcttatctaaatatggaatccttcaaagcgatggcgaaaaccagactctct

SEQ ID NO: 8652 - DNA, 417 bp, Glycine max
  Clone ID: LIB3092-057-Q1-K1-A10
aaagaattgatatgcagtccatgttaatttgcagagtgatataattgagatgtgcgattttgggtcaatctatattggtgagtgaaatgggttggtgtggttctagaaattcaggtcttcaggagtgaataagtcattggataacttgaaagctataagttcaagttccatcaaagccaagagtccaccttcacctgatcaagcattgttaggggcaattatagctggtgtgattgctgatgttctctacaggttcaccacatctattgaggctactctcggtcgccaaacactgtcagataatttctcagtccgccagataacaatcaccataaggacattaataaatggcctgcgctaccttgctacatttgactacgggatcaattctggccggttatttctttatttctggcc

SEQ ID NO: 8653 - DNA, 127 bp, Glycine max
  Clone ID: LIB3092-057-Q1-K1-A11
attgactcttgcgaaaaacgactcaatatactgtcaaaccaatatagacattggagcgtcttgaatgttgtttctgggacattggatcggaaatgtaataagctctacgaacagacagtctggacat

SEQ ID NO: 8654 - DNA, 316 bp, Glycine max
  Clone ID: LIB3092-057-Q1-K1-A12
attaattattgtgaaaaacgactcaatatattaggaaaccaatataaacattggagggtattgaatgttaattgtgggagattggataagaaatctaatatgcttaacgaacagacattttggacatattttgttaaaacatgacctgtgcgtgatgattgtaaaatgaatatctggaaggtgatgaggttgacctgtgaaaaggaagagatgatgaaatgtaaaagttctgattgactatgatatgcaactaggattcaagtttaagaagttatctcaacagcattaatgaatgatagtgagaattttcctgcat

SEQ ID NO: 8655 - DNA, 333 bp, Glycine max
  Clone ID: LIB3092-057-Q1-K1-A2
ctcacccggattacaaggatgtcggtattgctcggtttacaactaaatattttaacgtcagaggctgcgtgcctaatgtgaagggtgatatgcttttgtcagcatggaatccttcatctgaatggggaaaaaaagtgatgcttggagtggatgcacgacagggagctccaaaggatggaaattctccccttgaactttttgaggtagagattgatcctcttaagattcattgaacagaaatgatgcacagaatgatgtgggaatatttcttcccagaagaagaacaagattcccaacgtcgtcaggaggttcggaaggtttcaaccactgctg

SEQ ID NO: 8656 - DNA, 273 bp, Glycine max
  Clone ID: LIB3092-057-Q1-K1-A3
ccggatacccggtcgaccacgcgtccggttacatataatatacctattacaaaataacgtgaattaatacaactctttcaacgacagaggcttcctggcatatgctaaagatggtgcgcttatctaaatatctattccttccaagcaatgacaaaacccagaccctcttgctttctatacaatacaggatcgttcattcgattttgcactcatatattctcttctggaacgacatattgatccatcttatatcgtttgatcataacaatggct

SEQ ID NO: 8657 - DNA, 251 bp, Glycine max
  Clone ID: LIB3092-057-Q1-K1-A4
ctcaaatataatatacctattacagataacacctgttttatatacaactctttgcaacgacatatgcttcttgtcataacctaagtatggtgcacttatctacatatcaactccctccaagcaactacaattaccatactctcttgctctctcaacaaagccagcctcattcattcaattctgcactctactattctcttctggaactacatcttgatccattatacatcttttgatcataacaatggctc

SEQ ID NO: 8658 - DNA, 314 bp, Glycine max
  Clone ID: LIB3092-057-Q1-K1-A6
gcaaaatataacatcccatgaacaaagtcacgtgtaattatacaaacttctgaacgatttgatggcttcgtgcatcacctgaagagggtgcacgaatttacatacactacttcctaaaagcgatgacgatacccagactctctcgctgcctcaacattaccgccctcgttcattcgattctgtactcaactattgtatactgggacaacattatgatccatcatatctagattgatcctaacaacggctgctgctgtcactgtcatgaccgaggttctagaatcttttaccgctctaggagtatgtgccaacac

SEQ ID NO: 8659 - DNA, 363 bp, Glycine max
  unsure at all n locations
  Clone ID: LIB3092-057-Q1-K1-A7
actcatacggaaaacaacataatgnnattaacaaggtcattttttaaataacaccaacaaaccggcaaatggggcaattttattgggtgcaagagaaaccaaattatatattgcagcatcgagataagagattctgatacagaggagttgtttgtgataaatctgaacgacaacgagcctttggctctggatgcaattatagaagactgcgagatcaccactgagtactcgcttgatattgatattcacgacggcggtagcggcaactatgatgatgttgttatgtggcactaggcaaggatggagattagagcatggaagctctttcatgggcattgaaacaccccgtgacaccatctgcca

SEQ ID NO: 8660 - DNA, 478 bp, Glycine max
  Clone ID: LIB3092-057-Q1-K1-B10
tccggaatcgacgccacgcccccgcgtccgataacatgtcttcaccattgcccagtttaacttcgaatactccacaactcggcaacgattgatgatttgtcacaccagcgaagaaggcttcaataatctacatagctttttcctcaaagcgttaaaaattcccagactctctcgcttcctcaaaatttcgccctctttcattcaattctcttctctgctcttctcttctgaaaccaccttctgatccatcatccctcgttttctccgaacaatggctgctggtgtcactgtcaagtacgaggttctagaatcttctccccctgaaggagtatgttccaacacggaagaaaaccacctggttcagaccaatttgtctgatgggtcacccaacaagtctgagccagcatctggacttaatgcaatgatttctagtgcaaatcaccttaccatcttctataaatgggagtgtttgtgtcta

SEQ ID NO: 8661 - DNA, 343 bp, Glycine max
  Clone ID: LIB3092-057-Q1-K1-B11
attaactattgtgaaaatcgactcaatagacttttaaaccaatatatacattggatcgaattgggtgttgattatgagtgatggggtcggaaatctaataagtttatcgaacagaaaattgggacatatatatttaaaatatcactcttgcttgatgatcggtgaattaatatctgcaacgtgataaggttgacctgtgaaaagggagtggtgattataataaaaagttctagttgactatgatatgcaactaacattctggttgaagaacttatcagaattttattgatgaatgatagtgagaattatcctgcatgcaaagaaaaggaaacagctctattga

SEQ ID NO: 8662 - DNA, 441 bp, Glycine max
  Clone ID: LIB3092-057-Q1-K1-B12
gttgattctgaagatctcccactcaacatttcaagagaaatgttgcaacagaacaagatcttgaaggtcattcgtaagaacttggtcaagaagtgccttgagctcttctttgaaattgcagagaacaaggaggattacaacatgttctatgaggctttctctaagaacttatagcttggtatccatgaagattcccagaacaagggaaagattgctgaattgctcaagtaccactccaccaagagtggtgatgagctgacaagcctcaaggattatgtgaccaggatgaaggaaggtcagagtgacatctactacatgaccggtgaaagcaagaaggctgttgagaactccccattcttggagaagttgaagaagaaagggtatgacggtcttttcatggttgatgccatagatgaatatgctgtcggccaactcaaggaa

SEQ ID NO: 8663 - DNA, 418 bp, Glycine max
  unsure at all n locations
  Clone ID: LIB3092-057-Q1-K1-B2
gnttcaccgcacgaatatcttgttgtttggagcgatccgagaaaaactctgtaaacatgttgggttacgaggaccttcttacaggtgatgagcttctctctgactccttccgttacaaggaaattgagaatggaatgctgtgggaagttgaggggaagtgggttgttaaaggagcagttgatgtagacattggtgcaaacccttctgctgagggtggaggagaagatgagggagttgatgatgcagctgttaaggttgttgacattgttgacacattcagacttcaggagcaacccgcattcgataagaagcagtttgttaccttcatgaagaggtttatcaagaatttgactcccaagctcgatgcagagcaacaggagttgtttaagaagcacatcgagggagcaactaaatacct

SEQ ID NO: 8664 - DNA, 199 bp, Glycine max
  Clone ID: LIB3092-057-Q1-K1-B7
aaaaaatagaaaaaccaaagcacaaaaaacacatgtcttaatagaaaagtcggcaacgattgatggtttgtcacaccaccgaagaaggcttcaagaatctacatagctttttcctcagagcgttgaaaattcccagactctctcgcttcctcaaaatttcgccctctttcattcaattctcttctctgctcttctcttc

SEQ ID NO: 8665 - DNA, 449 bp, Glycine max
  Clone ID: LIB3092-056-Q1-K1-H7
agaacaacctgctggatatggcatctgtgcatgatgattctgcaaaaactctttctgaggagcttgcagacattgaatcccagctgaagttctttgagaccccttcttttcttgatgaagcctgggctgatgctgcattggcgtctttgctcagtgaagatgcatctcaggatgctgctggaaaccctatgaacctttggagcttcgacgacctgccttccatggcaggagtcttctgaacaccttcatatccctttttatgtaaataaagctacaagaatcgtgatcgtgatgttggtgatggaatccacagcaagaaaaccaacctgcttaaagcatatgtggagtttatttatcttgtagctaatgcagtataggactatatataggtttttataggggatcctttgtgtgaaactcaagagacctcgttttcaggggattttctg

SEQ ID NO: 8666 - DNA, 458 bp, Glycine max
  unsure at all n locations
  Clone ID: LIB3092-057-Q1-K1-B8
aaaaaatagaaaaaccaaagcacaaaaaacacatgtcttaatagaaaagtcggcaacgattgatggtttgtcacaccaccgaagaaggcttcaggaatctacatagctttttcctcagagcgttgaaaattcccagactctctcgcttcctcaaaatttcgccctctttcattcaattctcttctctgctcttctcttctgttcccaccttctgatccatcatccctcgttttctccgaacaatggctgctggtgtcactgtcaagtccgaggttctagaatcttctccccctgaaggagtatgttccaacacggaggaaaaccacctggttcagaccaatttgtctgatgggtcacccaacaagtctgtgccagcatctggacttaatgcagtgattcctagtgcanatcagcttaccatcttctataatgggagtgttngtgtctatgatggaatc

SEQ ID NO: 8667 - DNA, 316 bp, Glycine max
  Clone ID: LIB3092-057-Q1-K1-C10
gtgcactcttgtgtggaacgacccattgttcttgaagaccaacgcattctatcaagcggtggggatgttgtttctgggacttcgggtcggatatttaatatgctccgcaaacagacacttcggacatactatattaaaacatgtctattgcatgatgctgatcaaatgctttcccgcgggtttaaaaagcagatctatgaaatattccagttgcttccatctaagagtcaagagagactttgatatgctacaatgcctcccgacgcacttgttatcacaacgaaattcatgaacaaaactgtgacgatccttgcaa

SEQ ID NO: 8668 - DNA, 281 bp, Glycine max
  Clone ID: LIB3092-057-Q1-K1-C11
attaactcttacttgaaacgacccaacagactaccaaaccaacatatcctatgcatcgaactgtatgttgattttaggacgacgggccaagaaatctcatatgccccgaccacattcaattcccacacactttatcactaccttactctatgctccatgctctgaaaatccttaaccgccgcactatcaagcacacctgagaaatgctcctcctgctttcatctacaagttcaactctactacaatctgcaactaaccgtctgattccacatcttatcaca

SEQ ID NO: 8669 - DNA, 454 bp, Glycine max
  Clone ID: LIB3092-056-Q1-K1-F4
cgcatgtgtgatcacccaaagcatcttctttattcccaccgctcttctctacgctttctcacgaaatttaaaaggccatacggagcgaattctctgctgctgtttcctaaagccacggcagctcccggggccaagaagacagaatagccgcacgagagagtccagcgagtccacagcgtggaggagttcgagtcggcgctcgaatccgccaaagacaggcttgtggtggtggaatacgctgccagcgacagcgaggagagcagccagatataccctctcatggcggagctgagccgcagctgcaacgacgtggagttcatcctggtgatgggcgacgagtcggagaagacgaaggagctcctgaagcgggagaaggtggagaatgtgcctcacttcagcttctacaagagcaaggagatgatacacgaggaggaagggattggtcccgacatgc

SEQ ID NO: 8670 - DNA, 341 bp, Glycine max
  Clone ID: LIB3092-056-Q1-K1-F6
gtgccacggctaagtgggtattcgggactacatcatgacggggccacttctacacaaaggcctaattctatgagcacgccgacaaacggactgcacgctgctaccctccttcttagccggcgctaatggaacactctttacccatcacctttccaacagctactacgccatgctggaagccacacccaagccttgagcttcttataacgccgggatgaagccgaactgaccctgggaacaattgcctggaaagaaaacaagaacggcgattcctgtcacgattacttggaagacagggcgagttttagcgaatacaagcttatggactatgaaagcaacgc

SEQ ID NO: 8671 - DNA, 144 bp, Glycine max
  Clone ID: LIB3092-056-Q1-K1-F7
ctcacacacacccaaaaattacatctaaaatttatgacactgtaaaatctacaccttatcgggcatatttcattgcatatattacatacttccttcatactcctactgaacttccaaatatctagactaaaactaactatacaa

SEQ ID NO: 8672 - DNA, 452 bp, Glycine max
  Clone ID: LIB3092-056-Q1-K1-F9
ggagagctcagatatccatcttatccagaaaccaatggaacttggaggtttcccggaattggagaattccaatgttatgacaagtatatgaaagcatccttggcagcagcagccgaagacattggaaagaaagaatggggaggaggtggaccccatgactcaggccagtacaatcaatttcctgaggatactggatttttcaaaagggaaggaacatggaacactgaatatggacagttctttctggaatggtactccggtaaattgctggaacacggtgagaggatccttgtatctgccaaaggaatatttgaaacaactggggtgaaactatcagggaaagttgcaggaatccactggcattacagagcaagatctcacgcagctgaactaaccgctggctactacaacacacgaaataacgatggatatctgcctatagcaaggatgct

SEQ ID NO: 8673 - DNA, 417 bp, Glycine max
  Clone ID: LIB3092-056-Q1-K1-G10
tgctgagtgtggggggaaatgataaaaatccaatattatcggtcttggatgatgtttggccgggctcagaagcccttgttgataagtttacagtccaaataccttattataagatcttggtgacttcaagggttgcatatccaagatttggcaccaagattttgttgggtcaacttgatcacaatcaagcattggcccttttcgctcactatgctaaactaaatgacaatagctcatacatgcctgaagaagatcttttacacgagatcgtgagacgttgtatgggttcaccattggtgcttaaggtcactgccggatcactctgtgggcagccttttgagatgtgggaaaaaaagaaggatcgtttacaaaatcaatccaaaatggaatttagtcaaactgatttgttttgtcatc

SEQ ID NO: 8674 - DNA, 433 bp, Glycine max
  unsure at all n locations
  Clone ID: LIB3092-056-Q1-K1-G11
gtctgcaccgacgtgaacaggatcaacatcttcaaagataagggatcgatgatgaccgtccgggaccagaacatcctggtgatcaccttccacaacacactcgtcaccatacgacggaagataatgaccgggcatgatcgacggacagctttcacgagagaaagcacagatgccaaagatctcaatcttactctgaagcgttcgtccctctttccgtttatgaccgactttaacgtgttcatgcccaataacacactttaacacgttagcgactttcaggtcataggttgacgattggaacgatcttgcactgcctaagcatctgaatctcacaacatcngagacgcagatgcataaaaagcacacggttcagagtatttcgattgtgaaagaccaactcacggtcacagtgtgtcccaacattcaatatgca

SEQ ID NO: 8675 - DNA, 436 bp, Glycine max
  unsure at all n locations
  Clone ID: LIB3092-056-Q1-K1-G4
atattcatgaaactcgatagtggatcctactcagcgcttctntaccgtttgggactgtgcctaggtatcaagcacttnaaaaagttaatgggatcgctgaggatcttaactgggaggttttcagggacaccctgattgaacaagctgagcagggtgtatattacttcaccatccatgcaggagttcttctgagatatgttccattaacggcaaggcgcatgacaggaatagtatccaggggagggtctattcatgcaaagtggtgcttagcttaccacaaagagaattttgcttatgagcactgggatgagatacttgacatctgcaaccagtatgatgtggctctatccattggtgatgggctaagacctggatccatctatgatgcaaatgacacagcacaatttggttagctcttgacacaaggagaacttga

SEQ ID NO: 8676 - DNA, 258 bp, Glycine max
  Clone ID: LIB3092-056-Q1-K1-G5
cagggtgtatattactcaccatccattcacgacttcttctgatatatgttccattatccgctaggcgcatcacaggaatagtattcacgatatgctctattcatgcaaagtggagcttaacttaccacaaaaagaattttgctcatgagcactgcgatgagatacttgacatctgcaaccagtatgatgtggctctatccattaatgatgggctatgacctggatcatctctgatgcaaattacacaacacaatttgc

SEQ ID NO: 8677 - DNA, 176 bp, Glycine max
  Clone ID: LIB3092-056-Q1-K1-G6
accggttcggacacacccgtccgaccgccaccacccaaaaaatccatttaaaatttatgacaccgtaaaatccacatcttatcagtcatctttcagggcctatattacatacgtccttcatactcctacttaactctccaatatctttactcaccctaactatacaatcattctca

SEQ ID NO: 8678 - DNA, 190 bp, Glycine max
  unsure at all n locations
  Clone ID: LIB3092-056-Q1-K1-G7
cttgccgncgtcaaatagttttatctataatgtgggatgatgtcagaggaacaaattatcagacataaggcgttgtttatattccatttgtgctttatagtagggctgtacttgcaaggaacttgtctgcaaagagcaatacaatcaggtgcgatttttgaacatcataagatgcacatggaaaaactat

SEQ ID NO: 8679 - DNA, 325 bp, Glycine max
  unsure at all n locations
  Clone ID: LIB3092-056-Q1-K1-G9
cccacgcgtccgccatttccactccaaccgaccaaaacgcgcaacacgttgtaattaaaacgacaccgaaactaatgggcgtcttcagcgaaaacccgaatccggacccggttgtgatccgccaggtttgggcttcaaatctcgaatccgaattccaactcatccgcgaactcatcgaccactatccttttatctcgatggacacagaattccccggtgttgttttccgaccacacctggaccccacaaaaccctacaaccaccgcaacaacaatcgcaaccgccactccgaccactaccgnctnctcaagtccaacgtcgacgc

SEQ ID NO: 8680 - DNA, 389 bp, Glycine max
  Clone ID: LIB3092-056-Q1-K1-H10
cgctttcgcatccgtcactctgatgtccgtacaccactttctcctttctcaaaggagggaaaagatcggttgcttgagtggtgtcagaacttcattttgcggtcaagttgtgtgcaattcaagtttctgtgggagacaaataactagaagccatggaaaccgtcttgttgttcactcactggttgaaaggaaggcgaattctgtgaacagcagatagactgttattcctgaaccacattacaggattccaattgcgctactctgtatagctgatggattggtctacacagataatttggtacctgcaatacctgttggtctccttggattgcttctgctgtttcagaccactagagtgagatttgtatttgatgatgaggctctcgagg

SEQ ID NO: 8681 - DNA, 338 bp, Glycine max
  unsure at all n locations
  Clone ID: LIB3092-056-Q1-K1-H11
acatctntaaacggaaattcaaagtgttttggcctacattgaactaccacaacccacgcgactcccgagtgtacgacccacgctagcttcgaaagttttccttattcccagccctaatcccctgagttcggtagcacaccttctcttactctacgtcaccatcctcaccgtcatcggctacaaccaccagacagccaccaccgccgagccctgcaacgacgtcggcgtacatcgcataggttggacctttggaagcatgatttttgaactcttctattgcaccgccggcatatcacggggacacataaacccggcggtgacgttcgggttgcttttgg

SEQ ID NO: 8682 - DNA, 445 bp, Glycine max
  unsure at all n locations
  Clone ID: LIB3092-056-Q1-K1-H12
nacgccacgcgtncgcccacgcgtnctgccacgcgtncgttctttcttcaacgtttccatcatacgcagatcccaatgctctgtgaagccctaatttcccctcatttccatggccacagaagagcccactgtcgcggtggaacccgctcccgaacctgcctccgccgatcctcccccggaggagaaggaggagaccaaacctgaagccaaggctaagaaaaccaaggagcccaaacctaaaaaggtttccagacctcgcaaccctcccactcatccttcctacgaagagatggttaaagatgcaattacctcgctgaaggagaaaaccggttcgagccaatacgcgattgcgaagttcatcgaggagaagcacaagcagcttccaccgaacttcaagaagcttcttctctaccatttgaagaagctcgtcgccgccggaaaactc

SEQ ID NO: 8683 - DNA, 467 bp, Glycine max
  Clone ID: LIB3092-056-Q1-K1-H2
gaagtcgctgagcaagctcgccatgactacgcttcgcagattcatccctcacatctcaccattgatccctccctggagcttcctcaaatgacacctgtcgtcctaaagttgtgcaaggatatgttcaaggcgtggtcgaatttggatgattcttgctttgttgttgagaaaatttccgggggcataacaaatttgttactcaaggtttcagttaaacaagaaaactgcattgaggaaactataactgtcagattgtatggacccaacactgagtacattattgatcggcagagggaattgcaggctaccaaatacatcacagctgcaggatttggtgctaagtggctttggcatattggggaatggcatggtgcaatcttttataaatcacacactctatctcctcagatatgcgagagccaaagctggctgctaaaatagctaagcaacttcaaagatttcatcat

SEQ ID NO: 8684 - DNA, 118 bp, Glycine max
  unsure at all n locations
  Clone ID: LIB3092-056-Q1-K1-F3
aaaaccttttcgacccacgcctaccggaaaacccaaatattcatttttttcataatcctttttaactagaaantcttccctttttagaaaatttctattttatatacaaaccttttaa

SEQ ID NO: 8685 - DNA, 418 bp, Glycine max
  unsure at all n locations
  Clone ID: LIB3092-056-Q1-K1-H4
gagattatataattgtgttttggaaaaatnnaaagtgcatataaagacccgtggtgccaattntttttacctcctggttttcggttttaccccacctacgaggagcttctctttcagtatctgtgccgcaaggtcactggccaccatttatctcttccaatcattgccgaaattgacttgtacaagttcgacccatgggttcttccaagtaaagcgattttcggtgaaaaagagtggtactttttcagccccatagacaggaaataccctaacggttctcgacccaacagagtagctgggtcggtttattggaaagccaccggaaccgacaagatcatcaccaccgaatgtaaaaaagttgtcatataaaaagccctcgttttctacgttggcaaagcccccaagggcaccaaaacca

SEQ ID NO: 8686 - DNA, 333 bp, Glycine max
  unsure at all n locations
  Clone ID: LIB3092-056-Q1-K1-H5
ttacgtcactctgctgtccgaacattactttctgttttatcaaangaagtaaaagagacgttcccagtgctagggtcagagcttaattttccaaataatccttatcccaaacaattttctctttgacacaaataaccagaatccatcgaaaccgacttgttgttcactcactcggttacaaacaccagacaacctccacccacgaacactatatcattgtctccccccattacatgatttcaacccttctaagcatgataactgaactcttctattacacagacgatatatcacctgcacaccctttcgggctaattacattcgcgttgcttt

SEQ ID NO: 8687 - DNA, 131 bp, Glycine max
  Clone ID: LIB3092-056-Q1-K1-H6
aaacaacctgagggaacgtgaatccgtgcttcaatgttcagggaaagcgcatgtaccggcgcgagcagacaatccaagccaactccatcatcaagagacacgtaactatacactggaagaacatgaccagg

SEQ ID NO: 8688 - DNA, 443 bp, Glycine max
  Clone ID: LIB3092-056-Q1-K1-C6
gttgattttatatttaggttacaaggaaattttcatgaatccaattatttctgctgcttctggtattgctggtggggtggccgcaaggcttgcttctatttgacctcgagttggtcaaggcactgctgcaaggcaagctgtataatggattgcacgacaaccggaggcagagggaaaaatacgaggtactttattgctctaattggcttttatggaagctctaacaatttatggactgtgtgtagcattagcactcttatttgctaatccttttgtttaatcctaaaaaaatagaaatacatatcctttttttcgtggacttgctttaccggtcttgctttttcgaattctatttatattaatatttcactcctataattctttatccgttcggacaagaacacatgggtaggactaattgaaaggtgaagaattcacatact

SEQ ID NO: 8689 - DNA, 345 bp, Glycine max
  unsure at all n locations
  Clone ID: LIB3092-056-Q1-K1-C7
cccacgcgtacgggaaaacttcggacaaaaaatggagtgctacacaaggccaaacaggagtgacatccacctttcagcagaggaagaagccaccatataatcaaagaccagagagtactttgatggagtcgcaccacaacgccacacagagcctcaacgaagtgactattcaactcaatatgtcgatgctctctacaatgcccatcactcttctttaactataccagcnttaacacacttgcaactcctacagaatgatccacaagagaagacaattgtgtacaatggaagtcaagtcccggatgatattgtggaaacagagtattaccaagatctcaacatcgt

SEQ ID NO: 8690 - DNA, 291 bp, Glycine max
  unsure at all n locations
  Clone ID: LIB3092-056-Q1-K1-C8
cccacacgtncggtaaaactttgtacacaatatggagtgctacacaaggccaaacatgagtgagcatcacctctcaacagaggaagaagccaccatagattcacagaccagatagtacttttattgagtcacaccacatctccacacatagcctcaacgaagtgactattcagctcaatatgtcgatgctttctacaatgcccatcactcttctttaactataccagaattaacacaattgcaactcctccagaatgatccccaagagaagaaattggtgtacaatggaag

SEQ ID NO: 8691 - DNA, 163 bp, Glycine max
  Clone ID: LIB3092-056-Q1-K1-C9
cgtactctaactccttttattattacataatataacttgaattgaaaatatcttctttgtcgacaaacttatcactacaaaaggatcgtattctaacgattactgcacacttcgacaatcttcggaataggacccccagtgatcgcctttcacccttcacaaa

SEQ ID NO: 8692 - DNA, 449 bp, Glycine max
  Clone ID: LIB3092-056-Q1-K1-D10
gttccgtacacaagaaacattatatgaaggctgtcaattaattgataaaacatgggagagcgggcatgatgtccaggtgaaggaccgcagtttaatctggaactctgacttgattgagactattgaattggaaaatcttttgataaatgcatgcatcacaatgtactctgctgaagctaggaaagagagtagaggagctcatgcccgtgaagacttcaaggttagagatgatggaagctggatgaaacacactgtgggattctgggagaacgagaaagtccggttggactacaggccagcgcatttgaatgtattggatgatgaggttgaatcattccctcccaaggctcgggtgtgttaatatactaactaatggatggattaaacttgtctcaatgtttaatgacaggaaaaaaatgcaataaaaggaccttgatgggtgattttga

SEQ ID NO: 8693 - DNA, 58 bp, Glycine max
  Clone ID: LIB3092-056-Q1-K1-D7
cgtttaatttaatattaattttccatgaaaattatatgtaacccaataatttctactt

SEQ ID NO: 8694 - DNA, 283 bp, Glycine max
  Clone ID: LIB3092-056-Q1-K1-D9
cgaattaaaatccgttgaagatgaaaaaatagaacttgaagtgaaaattgcttctttggcggaggagttatcagtagaaaaggatcggattctaaagattagtgcagacttcgacaattttcggaagaggaccgacagtgatcgcctttcactggtcacaaatgctcaaggtgaatttgcggagaagttgttgcctgtattggataatctcgacagagcaaaaacccttattaaggttggtacagaaggagaggtgaaaataaacaacagctatcagagcata

SEQ ID NO: 8695 - DNA, 139 bp, Glycine max
  Clone ID: LIB3092-056-Q1-K1-E1
gaaaaactgcccctgtctgtaaatttttgtgagatagaaggaatctgattccttcatcacttgtgtatgtttaagttatttatttagagccgctaaatgtactctttatcctcattaataaaccatgtttgtgtaatgg

SEQ ID NO: 8696 - DNA, 437 bp, Glycine max
  Clone ID: LIB3092-056-Q1-K1-E10
catcaaagtgcttaagttcaactggatttcaggatgtaacttttaaagcttataacgggctgggacactacaccattccagaagagatggatgaggtttgtgcttggctaacatcaaaattgggccttgaggggaacattgcttagttagcaagcaaaatgtgaaaaataattcttttcgtttttggtccattgtaattttatgttattgcagatttgcttagatttctgttgatgatatgcataatatatccgctacgcattttgtaaacactcgagtttgagggcatcttcatgacaaagtactgttattgaaacaaaacacggtggttcttaaagcatggtgatggaatatgctgctaatatattatgctggagagaattctaccatgctagttgggttttcattttggtaaatgatcttatttagtgttggat

SEQ ID NO: 8697 - DNA, 361 bp, Glycine max
  Clone ID: LIB3092-056-Q1-K1-E11
cctcgaacccttgagagcgagaaaccacgtttctctcttgaggttaagtattattattattgagtattgagcatggaggcgccatctctcaccaaacccaacgacccaacaaaacctttcaacactttcagcacccttaatctggagggggggccgggcgaagcgagcccactccgaaaaatgtttgcggtggcgtccatcggcgccggcatacagttcgggtgggctctgcagctgtctctcttaaccccctacgttcagctcttatgagtcccccacgcggcggcctccttcatctggctcttggggcccatctcggggctggtggtgcagcccattgtgggctactacagcgaccact

SEQ ID NO: 8698 - DNA, 394 bp, Glycine max
  Clone ID: LIB3092-056-Q1-K1-E12
cctacaaccctttagagcgagaaaccacgtttctctcttgaggttaattattattattatggggtattgagcatggaggcgccatctctcaccaaacccaacgacccaacaaaaccttccaacacttccagcacccttagtctggagggggggccggacgaagcgagcccactccgaaaaatgtttgcggtggcgtccatcgccgtcatcatacagttcgggtgggctcttgatctgtcttttttaaccccctacgttcaactgttatgagtcccccacgcggcggcctccttcatctggctctgtgggcccatctcggggctggtggtgcagcccattgtgggctactacagctaccactgcacctctcgcttcggccgaaagcgccccttca

SEQ ID NO: 8699 - DNA, 470 bp, Glycine max
  unsure at all n locations
  Clone ID: LIB3092-056-Q1-K1-E5
cggnncgaccaacccttccgacccgccctcccgggaggaccacctttgcaaggcggccaaaaaaggtgacacggaaaaagggaggtctttcatgaactccggcgctgacgtgagccacttcaacggcaaggccctaaatcctctgatgcacgccgcaaagcacggccatgcacccgtnctcaccctcctnctctccgacggcgctccctggaacgctctttccccctccaacctctccgtccgcgactacgccatgcaagaaggccacaacgaagccttcgagcttctcgtcaacgccgggattcaagccgaactgatcctgggaacaattgcgaggaaggaaaacaagaacggcgattccggtcacgattacttggaagacagggtgagttttagcgaagacaagcttatggactctgaaagcaaagctgtgatgatggcgtgggagaatccgttgatggaggctcatg

SEQ ID NO: 8700 - DNA, 360 bp, Glycine max
  Clone ID: LIB3092-056-Q1-K1-E6
cccacgcgtccgcaagcaaaatcagttctgtcaaggtcaggggaatttaccaggcctgtcagttcaatgtggatgcatcttttataagctacaaagtatagtgtattcaaataaccgttgattaaaatgaaatgaatagttttgttttctataaactgtaagttattgcatgtattcaatcttgtaatctcaaaatattttgttttgtttcacgtggctgcatatcaatagattctttatcaattgtaggtgaaaaattgtcataggttttgtcggataaataaatattgatgtttaataggttccgtggattgtgtatgcaggcattctctggtatatgtaacgcatgaaaccttttat

SEQ ID NO: 8701 - DNA, 57 bp, Glycine max
  Clone ID: LIB3092-056-Q1-K1-E7
ctcacacgcacgcaaacatttcatccacaatttagggtgctgcaaaatctccagctt

SEQ ID NO: 8702 - DNA, 134 bp, Glycine max
  unsure at all n locations
  Clone ID: LIB3092-056-Q1-K1-E8
ctcacacncacccaaaaatttcatctataatataggatgctgcaaaatctacatcttatggggcatatttcattggatatataaaatatttactttatagtcgtgatgatcttgcaattatctggactgaaact

SEQ ID NO: 8703 - DNA, 395 bp, Glycine max
  Clone ID: LIB3092-056-Q1-K1-C12
caaacaaacaaaagcaaccattaccaccaccaccttgaactttcccagttacactaccaccagtttgattccaaataaccaccatcaccatgttcacggctagtaaactagccttcacattaacaccacctcgtccatgcactgcacccttgacaccaatctcttcaacttctggtgttcacctcattcagttcaatggcaggcacttatgcctccgccaaaagctgtttctactttctcctatggccactgcagatcaacaagggaaagttgaagaatttgaagatgattcaaatactgttgatagtaaaattctcccatattgtagcatagacaaaaaagagaagaaatcaattggtgaacttgagcaggaattcctccaagcactgcaagca

SEQ ID NO: 8704 - DNA, 197 bp, Glycine max
  Clone ID: LIB3092-056-Q1-K1-E9
ctcactctcactccttcatatattacataatctaactttacttgaaaatttctccttattcgaaaacttctcactacaaaaggatcttactctaatgattactgcagacttccacaatcttcggaataagacccacagtgctcgcctttccctcctcacaaatcctctgcatgcaatttcctaaagattcttgcctt

SEQ ID NO: 8705 - DNA, 415 bp, Glycine max
  Clone ID: LIB3092-056-Q1-K1-F10
ggagagctcagatatccatcttatccagaaaccaatggaacttgtaggttgcccggaattggggaattccaacgttatgacaagtatatgaaagcatccttggctgcaacagccgcagacattggaaagaaagaatgtggaggaggtggaccccatgactcatgccagtacaatcaatttcctgaggatactggatttttcaaaagggaatgaacatggcacactgactatggacagttctttctggaatggtacttcggtcaattgatggaacaccgtgagaggatccttgcatctgccaaaagaatatttgaaacaactgtggtgaaactatcatggaaagttgcaggaatccactggcattacatagcaagatctcacgcaactgaactaaccgctggctactacaacacac

SEQ ID NO: 8706 - DNA, 424 bp, Glycine max
  unsure at all n locations
  Clone ID: LIB3092-056-Q1-K1-F11
tcgttctgaatgntgggggaatttataaaaattcctatttattgggcctaggggatattttgcccggccttataaaccctttgggaataatttacagtccaaaatccttattataaaaactttgtgaccttaaaggttgcctatccaaaattttgcaccaaaattttgttgggtcaacttgatcacaatcaaacaatggcccttttcgctcactatgcttaactaaatgacaatagctcatacattcctgaaaaaaatcttttacacgagatcgtgatacattttattggttcaccatttgtgcttaaagtcacttgcggatcactctttgggcaaccttttgaaatgtgggaaaaaaagaaagatcgtttacaaaatcaatccaaaatggaatttaatcaaactgatttgttttgtcatcttc

SEQ ID NO: 8707 - DNA, 398 bp, Glycine max
  Clone ID: LIB3092-056-Q1-K1-F12
agaacaacctgctggatatggcatctgtgcaagatgattctgcaaaaactctttctgaggagcttgcagacattgaatcccagctgaagttctttgagaccccttcttttcttgatgaagcctgggctgatgctgcattggcgtctttgctcaatgaagatgcatatcaggatgctgctggaaaccctatgaacctttggagcttcgacgacctgccttacatggcaggagtcttctgaacaccttcatatccctttttatgtaaataaagctacaagaattgtgatcgtgatgttggtgatggaatccacagcaagaaaaccaacctgcttaaagcatatgtggagtttatttatcttgtagctaatgcaatataggactatatataggtttttata

SEQ ID NO: 8708 - DNA, 460 bp, Glycine max
  Clone ID: LIB3092-055-Q1-K1-H3
cccaaaccaaaacttttgtgacttacacacaaacacgcactcccttataactatctctggcggcgagccatgtgccagttatcatctccctccactctgtgtgaaaacaatgagggccatccaaacatgcccgtaaccagagttcatgatgagcctgacgtgttcgtccttttgatccccaaacctgcaacaacaacaacattcttcgaacaaggccaaaataaccaaaagccccataaaacccatttttcccttgatctggacgaagtcaattgcggaaccaacatagcattacccatggtgctaaccgggttactactctattctcgctccgtaatctccatgctcttcctcggtcgcgtcggtgagctcgccttagctggtggctctctcgccattggattcggcaacatcactggctattctattctctcgggcctcgccatgggcatggagccca

SEQ ID NO: 8709 - DNA, 432 bp, Glycine max
  Clone ID: LIB3092-055-Q1-K1-H4
gacaccatacctgatgccaacacctcacttacacccagtcccttataactatctctatggcctattcagggtcctcttaaatgtccctccactctctgttataacaatgatgtccatacaaacattccttcatactaaaatgatatttctccttacatgataagccttgctatacctaaactacctaactacatcaacattttttgaacatggactaaatcacctaaagccccataaaacccattattaccttgaaattgactaaaactaatacataaataacataccattacccatgcttctataccccatactactctattctcgctccataatcttcatgctcttcctcaaacgcttaagaaagctcaccttatcttgtggctctatcaccattgcattcgacaacatcacgagctattctattatctc

SEQ ID NO: 8710 - DNA, 439 bp, Glycine max
  Clone ID: LIB3092-055-Q1-K1-H8
tggctgccaacacattgatgagtactgctatctcagccttgccatctctcctttcttcctgaaaatccaaatttgccagcgcagttcctctttctagctttggtgtcaccaatgcctcttcttctcgcttttctatgagtgctgactggatgccaggccagcctagacctccttaccttgatggttcagcacctggtgactttggattcgaccctcttcgtcttggtgaagtaccagagaatcttgagaggttcaaagagtcagaactcattcactgcagatgggccatgcttgctgttccagggattttggttccagaggcattgggcttaggcaactgggtaaaggctcaggaatgggcagcagttcctgggggccaagcaacctacctaagcaatccagttccatggggcaccctacccaccattctggccattga

SEQ ID NO: 8711 - DNA, 255 bp, Glycine max
  Clone ID: LIB3092-056-Q1-K1-A1
ggatgagaagaccatctttcaccttaacccttttggccgttttgtcattggtgcccctcatggggattcttttctgactggaggaaatatcatcattgatacctattgtggttggtgtgctcatggtggaggtgccttttcagggaaggaccctaccaaggttgatagaattggtgcctatatcgtgaggcatgctgcatagagtgttttggcaaatggccttgccataatgtgcattgtccaaattttctattc

SEQ ID NO: 8712 - DNA, 119 bp, Glycine max
  Clone ID: LIB3092-056-Q1-K1-A10
ctcacacacacttaaaattttattaaacaattctcttttctttatcaacttcaccactaccaggggtcattctaacctacacagaataaactttttcacagactcctaattacacatgc

SEQ ID NO: 8713 - DNA, 53 bp, Glycine max
  unsure at all n locations
  Clone ID: LIB3092-056-Q1-K1-A12
tcaacacactcatnaaaccttttccaccaccactctcttctttatcaacttca

SEQ ID NO: 8714 - DNA, 196 bp, Glycine max
  Clone ID: LIB3092-056-Q1-K1-A2
gtaacatacaaccacttttcatcttaaccattttgacctttttatcatcggttaccttcatggagtccctttactgacataactaatctttatcaacaactccccatcaagatggggctctcatcattctaccacctaatcatacaatcaccctcccaactaacaaacaatatgagcctatatcatcttgcaacct

SEQ ID NO: 8715 - DNA, 426 bp, Glycine max
  Clone ID: LIB3092-056-Q1-K1-A7
ggatgagaagaccatcttccaccttaacccttctggccgttttgtcattggtggccctcagggggattctggtctgactggaggaaagatcatcattgatacctatggtgggtggggtgctcatggtggaggtgccttttcagggaaggaccctaccaaggttgaaagaagtggtgcctatatagtgaggcaggctgcaaagagtgttgtggcaaatggccttgccagaaggtgcattgtccaagtttcctatgccattggtgtccctgagccctcgtcagtgtttgggtacacttatgaaactggtataatccctggcatggaaatcctttaaatttggaaggagaatttcgactttagacctggaatgatcaccattaacttggaccttaataggggtggccataggttccttaagacagctgc

SEQ ID NO: 8716 - DNA, 350 bp, Glycine max
  Clone ID: LIB3092-056-Q1-K1-A8
gtaacatacaatgacttttcttcttcatcattatcagttgatgatcaactggtacttttgggggatccattgagtgacatgaagaatctctttcaacaactccccatgaagagggggctatcaagattgtaccagcgaatgtcacaatgtctcacttcactaacaaatgtgaggagcttgtatgatcttgtaaagccagagaaccctcacaacaaatgattgaagccttacaagagctatgcacgatggttgacccatatccattcaacaagggttgtttctaatgggggaaagatgctttcaacaagatcatgagggtcatggtgttatttgggaaagggcaggggcac

SEQ ID NO: 8717 - DNA, 218 bp, Glycine max
  Clone ID: LIB3092-056-Q1-K1-B1
cattaacaccttattctaatgtggttttttcaacaccaatcactaacattaccccaaatccatcacacacttaatacataggttcttatctacacaataatctcaaatcctcactcctaattaaaacctatctcacctttcaccttgcactaacaacacctcacttccactttcataatatatactttcattttcttccacatcttcaagcatccctc

SEQ ID NO: 8718 - DNA, 51 bp, Glycine max
  Clone ID: LIB3092-056-Q1-K1-B10
taaacaccttttaaacacttattcaaaactacttttttctttataaacttc

SEQ ID NO: 8719 - DNA, 394 bp, Glycine max
  Clone ID: LIB3092-056-Q1-K1-B11
cccacgcgtccgtcaaaggtaaggtaggttaacactcttcttcatcgtcgtcgcaatgggacgtgtgatccgtgcgcagcgtatgggagcatgctcggtcttcaagtcccacacgcaccaccgcaagggccctgcacgcttccggagcctggacttcagggagcgcaacggctacctcaaaggcgtggtcaccgacgtcattcatgaccctggcccgggcgcgccgctcgccaaggtcgccttccgccaccctttctgatacaagaagcagaacgagctcttcattgccgccgaaggcctctacaccggtcagttcatctactgcggcaagaaggccacccttgttgtcgggaacgttctacccctgaggtgcatccccgaaagagccgtcatc

SEQ ID NO: 8720 - DNA, 311 bp, Glycine max
  Clone ID: LIB3092-056-Q1-K1-B12
cccacgcgttcgtcaaaggtaaggtaggttaacactcttcttcatcgtcgtcgcaatgggacgtgtgatccgtgcgcagcgtaagggagcaagctcggtcttcaagtcccacacgcaccaccgcaagggccctgcacgcttccggagcctggacttcggggagcgcaacggctacctcaagggcgtggtcaccgacgtcatccatgaccctggccgcggcgcgccgctcgccaaagtcgcctttcgccaccctttcagatacaagaagcagaacgagctcttcatttccgccgaaggcctctacaccggtc

SEQ ID NO: 8721 - DNA, 449 bp, Glycine max
  Clone ID: LIB3092-056-Q1-K1-B7
ctttattatatatataggctaccaggaaattatcatgaattcaattatttctgctccttctgtgattgctgctgggacggccgaaaggctcacttctattgcacctggggttggtcaaggcactgctgcagggcacgctgtagaagggactgcacgacaaccggaggcatagggaaaaatacgatgcactttattgcttaaatcggcttttatggaagctttaacaatttatggactgcatgtagcattagcacttttatttgctaatacttttgtttaatcctaaaaaaatagaaatacatatcctttctttcaggaacttgctttaccgatcttgctttttcgaattctattcatatcaatatttcactcctataattctctatccgctcggacaagaacacacgggaaggactaattgtaaggtgaaggattcacatactgaatca

SEQ ID NO: 8722 - DNA, 280 bp, Glycine max
  Clone ID: LIB3092-056-Q1-K1-B8
ctcacatctgccctttcacttactaaataattttctcaaattcatcaatctgttctaatggggcttctatctttgtacacaaaaattcttcttactatattcctgatgacttgggtaatctctggcatgtgacacatactgcgttcatttcctactcaattacgatacactaggagattgtattataactgtatacctgtgataacactcatatttaaacatattatccttcacagactatccacatatctatacttacatttatgacacgacaattacc

SEQ ID NO: 8723 - DNA, 456 bp, Glycine max
  unsure at all n locations
  Clone ID: LIB3092-055-Q1-K1-H2
acgcccaaaccaaaacttttgtgacttacacacaaacacgcactgccttataactatctctgtggccnanccatgtgccaggtatcatctccctccactctgtgtgaaaacaatgagggccatccaaacatgcccccaaccaaaattcatgaggagcctgacatgttcgtccttttgatccccaaacccccaacaacaacaacattcttcgaacaaggccaaaataaccaaaagccccataaaacccatttttccctcgccctcgacgaagtcaaatgcgtagccaacatagcattacccatggtgctaaccgggttactactctattctcgctccgtaatctccatgctcttcctcggtcgcgtcggtgagctcgccttagctggtggctctctcgccattggattcgccaacatcacgggctattctattctctcgggcctcgccatgggcatg

SEQ ID NO: 8724 - DNA, 334 bp, Glycine max
  Clone ID: LIB3092-056-Q1-K1-B9
cttctacaaagagaatgatcacctagcaaattttagttgcctaattcactttacacctaccgaggctccttctaactgaattgcagttttcttccttatgactctctcagaccatgatatgctgactattttgccgcctactgacaacactctcaatttgaagcacgatcttatggcgcttggagtagctcgtagccgaatctttgtctaatgcgcattagcgtatgatcccgccagctacggagtcgggtcgagccgaacccattggccaaggctctgcgccatgttaagcagcaaggtgcgatctgaagaacaaacctcctgcgctgaccag

SEQ ID NO: 8725 - DNA, 379 bp, Glycine max
  unsure at all n locations
  Clone ID: LIB3092-056-Q1-K1-C10
aatcccggtcgacccaccctaccttcattaaaatcnctttattatacaaaattttctttcattaaaaataccttctttttcagaatacttatcaatgaaaaaggacccccttctaaagattactgcacacttctacaattttctgaaaaatacccaaatatatcgcctttcactcttcacaaatcctcaattttaacttttttaaagcttcttacctttattatataatttctacataacaaaaacccatattaaagttcatacagagctacaacataaaataaacaacacctatcatatcatatataaacacttcattcaaattctaaattcacttgtaatttaaccaatcaaaacactttgaacacccttttatcca

SEQ ID NO: 8726 - DNA, 369 bp, Glycine max
  Clone ID: LIB3092-056-Q1-K1-C11
caaacaaacaaaagcaaccattaccaccaccaccttgaacttttccaagtacactaccaccaggttggtttccaataaccaccatcaccatgttcacggctagtaaactagccttcacattaaaaacaacttgttcatgcactgcacccttgacaacaatctcttcagcttttggggttcacctcattcagttcaatggcaggcacttatgcctccgccaaaagctgtttctactttctcctatggccactgcagatcaacaagggaaagttgaagaatttgaagatgattcaaatactgttgatagtaaaattctcccatattgtagccttgacaaaaaagagaagaaatcaattggtgaacttgagc

SEQ ID NO: 8727 - DNA, 414 bp, Glycine max
  Clone ID: LIB3092-055-Q1-K1-F11
gacttttccgattcctggaagaagagaagagaaaacctaaatcacagatcgatggcggaggaacaccgatgtgaacctcccgaaggtcaccgactctgcgtcaacaactgcggcttcttcggtagcaccgccacgatgaacctctgctccaaatgctacagcgcgatccgtttgaaggagcaagaagaagcgtcgacgaaatccacaatcgaaaccgcgctctcttctgcctcctcggcgaaaccgtcgtcgtccacgtcacctccgccgtcggcggtcgatgtgctcatggaatctccaccgccgtctgcggcggaggttgaagttgctgtcacggtcacggtcgcggtggcgtcgagttctatttccataaactcaggttcggttgcgcaaccgaaccggtgtgccacgtgt

SEQ ID NO: 8728 - DNA, 360 bp, Glycine max
  Clone ID: LIB3092-055-Q1-K1-F12
aaattgtttagtagtagagatgacccctatcatgttccttctttgctaggggcttctaagatatggagtgagaaccctcatcttgcagaagatgatgaccagcttagctcgcatagtgcctgagaacttggatcgaatatgcgatctgttgtaacgtcttttcagcagcttacttcgtatctcactttcactacactcgctaattgatatttctaatccttaaaggattgtcaaacattctttagcgcttcattctctgaaaacttccagcaaagcgacccaaacgattaaccctgctcgaacatactacttaagcttagaatgaccagagctgcagaagatggatgctgcactccatta

SEQ ID NO: 8729 - DNA, 304 bp, Glycine max
  Clone ID: LIB3092-055-Q1-K1-F9
atgaccagtcatgattctgaactggatcagctcagagactataaagagaatgagactttggccatcagttccagtggaaagtaccacggtgtggagagagcctcttctgttaagagttctaatgcttctcagatcaaccgaatattgacatgtaatcggttggaaagttcgctatccatttctgaaactcccagcacttcaactactgatacttattcactaaagacgagggtcagttcttccatgtctgggtcttgtagtggtgcatctaagagttcatacttgtaaacatccacgattcaaa

SEQ ID NO: 8730 - DNA, 398 bp, Glycine max
  Clone ID: LIB3092-055-Q1-K1-G1
cagtatgatgaaaatgaaggtccttgttttcttggttgctacaattgtggtagcgtggcaatgccgtgcttacgatatggtcggtctccgaatgaacactggctatggtgcccgtactccttaagttaatgtctcatgttgattgctttgttaggaaacacactaacatatttggctttgagaccattcctgaagagtgcgttgaagcaacaaaagaatacatccatggcgaacaatatagatcagactttataacagttaaccatcaagcttacttttatgccagagacctcgaaatccatcccaaagacacatttgtgttcaatatagatggcaccgtactctctaatattccatactacaaaaaacatggatatggggtggagaaaattaactcg

SEQ ID NO: 8731 - DNA, 356 bp, Glycine max
  Clone ID: LIB3092-055-Q1-K1-G10
agaagttgtaaatcacgtgcacgaagaaagagcgtgaattgtcagtctctgtggatattgtgtgtgaagcctgggtgtggcttaccctgtgtacccttttgagttcagattctgagcatttgaatttgatagactctgtatcatatggacaataaaaggttcagaattagatagttatcctacgctttttattggggatgtagcaaattgtatacttaatttaggccagacttttttaagttatttcatttcactagattctaggatttctgtttatgtgacttcttgagttccacacttgtgattgtaacctatcgtgttttttttagtacaggcttaagttaacattgttgttc

SEQ ID NO: 8732 - DNA, 192 bp, Glycine max
  Clone ID: LIB3092-055-Q1-K1-G11
cccacgcgtccgccgctccagagagtgcgaggcgagagagaatgacaatagctgttttcggagttccttcgacgcctcagttgtgtaactacagaatctcatggccaattcccacttacccttctctttcttcttctaagttaactgtttcactgggctctccttcccctccaacatctgttatcgaaaaag

SEQ ID NO: 8733 - DNA, 365 bp, Glycine max
  Clone ID: LIB3092-055-Q1-K1-G12
ggcaatggcaacccaagcctctctcttaaccccacccctgtccggtctcagaagccagcgagcgcgcctccgtgccatggaagcaaaactccagcctctccttctccagcccgaagcccctcaagttctccagaacaatcagagcagcagccgccgacgagaccacagaggcaccagcaaaagtagaggctgcaccggtcgggttcaccccaccagaacttgacccaaacaccccttccccgatcttcgggggcagcaccggcgggctcctgcgcaaggcacaggtggaagaagtttatgtcattacgtgggactcacccaaagaacagatctttgaaatgcccactggcggcgccgctatcatg

SEQ ID NO: 8734 - DNA, 469 bp, Glycine max
  unsure at all n locations
  Clone ID: LIB3092-055-Q1-K1-G3
tagaaacagtgtgatgaaaatgaaggtccttgttttcttcgttgctacaattttggtagcagggcaatgccatgcgtacgatatgttccctctccgaatgaacactggctatggtgcccgtactccggaggtgaaatgcgcaagttggaggcttgctgtggaagcacacaacatctttggctttgagaccattcctgaagagtgcgttgaagcaacaaaggaatacatccatggcgaacaatatagatcagactccaaaacagttaaccaacaagcttacttttatgccagagacctcgaagtccatcccaaggacacatttgtgttcagtatagatggcaccgtactctctaatattccatactacaaaaaacatggatatggngtggagaaatttaactcgaccttgtatgatgaatgggttaacaagggcaatgcaccggcactggccgagactctaaagaaatac

SEQ ID NO: 8735 - DNA, 249 bp, Glycine max
  Clone ID: LIB3092-055-Q1-K1-G4
tagaaacatacttacacacatgcctccggtcaacctattcggtactacaattgtactagcggtccaattccgtgcgtacgatatggtcgctctccgaatgaacacttgctatagtgcccatactccgtagtttattttctcaataattatgatttctttttaatcacacatcatattttactattataccattccttaaaaatgccttgaaacaacaaaagaatacatccatggctaacaatatagatc

SEQ ID NO: 8736 - DNA, 309 bp, Glycine max
  Clone ID: LIB3092-055-Q1-K1-G5
accggtctcgaatgtcccgttcgaccgacccgtgcgatcacacttactgtccttcttctcttcgacgctacaatcttgataacagtggaatgccaggcgtacgatatgttccctgtcctaatgaacactggctatggcgcccgtactcctgaggttaaatgctcaattttgaagctttctatagaaactcacatcatcttttgctttaagaccattccttaaaagtgctttgaaacatcataagaatacatccatggcgaacaatatagatcagacttccattcagttaaccatcttgcttacttttat

SEQ ID NO: 8737 - DNA, 237 bp, Glycine max
  Clone ID: LIB3092-055-Q1-K1-G6
tttatctagtttctatcaattaataattctatactccataaacttttgtcattcatcctttggatcttaataactttttttattattattttttattttatttttattaaggtttcaagattaccatctttgttatcagcatatcattttattcatatacttatattacattccatagttcatcttatctagtcaaatgtgtcacagattttaaatctgctcttcatacaatttttt

SEQ ID NO: 8738 - DNA, 438 bp, Glycine max
  unsure at all n locations
  Clone ID: LIB3092-055-Q1-K1-G7
aaaattcccccttaattttaggaaatagtaaccacagaaggttctgaatgtgttctaactgtatttttatatttgactctgcaggtagaggaggtttacaacttctctcaagatgacctgttgccggaggatatccttatacttgacacacatgtagaagtgtttatttggattggtcattctgtggacccaaaggaaaagcaaaatgcttttgatatcggccagaaatacatagatttggctgcatctctggaggaactatctccacatgtaccactatataaagtaacagaagggaatgaaccttgctttttcacaacatacttttcatgggatcatgcaaaagctatggttctggggaactcatttcagaaaaaagtgtcactactctntggatttggccatgctgtggaggaaaagtcgaatgggtcaagtcta

SEQ ID NO: 8739 - DNA, 397 bp, Glycine max
  Clone ID: LIB3092-055-Q1-K1-G8
ttcttccatggcctccaagcggattctgaaggagcttaaggacctccagagggaccctccgacctcttgcagcggcgggcctgtagcggaagatatgtttcattggcaagcgactataatgggtccccctgatagcccttatgctgggggtgtgtatctagttactattcattttcctacggattatccattcaagccacccaaggttgcatttaggactaaagttttccacccaaatatcaacagcaatggttagatttgtcttgatatcttaaaggagcattggagccccgtcttgacaatatctaaggttttgctctccatttgctccctattgacggatccaaacccagatgatcccttggtgcctgaaattgctcatatgtacaagacagac

SEQ ID NO: 8740 - DNA, 440 bp, Glycine max
  Clone ID: LIB3092-055-Q1-K1-G9
cccacgcgtccgcacagcagctctatccggaaccatggtgagcacctcctgcatgaggaggcaacctatgacgaccaagagcctaaagacattccccaacgctctttttggtctgaaaggtggacgaggtggtcgtgtaacttgcatggcctcgtacaaggtgaagctcataaccccagaaggagaagtggagtttgaatgcccagatgatgttttcattgttgacaaggctgaggaagaaggcattgaacttccctactcgtgcagggctggttcttgcgtttcatgtgttgggaaaattgtgaaaggtgacgtggaccagtcagatggtagcttccttgatgatgaacaaatagaaagtggatgggttctcacctgtgttgctctacctaggtcagacgttgtcattgagacacacaaggatggagagatcgaatgat

SEQ ID NO: 8741 - DNA, 383 bp, Glycine max
  unsure at all n locations
  Clone ID: LIB3092-055-Q1-K1-H11
aaatcttctctcaaaatatttgtgattccatgcccaacgccctaccctgagaatatggtggccgagagagaggttaacggtaacggcgtcggagagggaagaacaacgctaatattcacctacggaaccctgaagcgaggcttctccaaccacccccttctccaagacctcattcgctccggcgacgcctccttcgtcggaacctaccgcaccgncgccaaatatcctctggtctgtgggccctacaaggtccccttcctcctcaacattcccgggtcgggtcatggggtccatggggagctttactcggtctccacgcgcgggcttgagcgcatggacgaagctcaaggaacctcacgcgcccactacgagcgtcttccgat

SEQ ID NO: 8742 - DNA, 378 bp, Glycine max
  Clone ID: LIB3092-055-Q1-K1-E9
aagaattgatattcaggctatgttaattttcacagcgatataatttagagatgctattgtaattctgtctatgttgttcaatgaaatttgttcttgttgttctagaaatttacgtcttcatgagtgaataactcattggataacttgaaagctataagttcaagttccatcaaagccaagaatccacctttacctgatcaagcattgttaggtgcaattatagctgatgttattgctgttgttctctacatttttaccacatctatttaagctactctctttctccaaacactttcataaaatttttaattcctccctattacaataaccattatgtcaattataaatttctctgttctaccttgctacatttttcta

SEQ ID NO: 8743 - DNA, 321 bp, Glycine max
  Clone ID: LIB3092-055-Q1-K1-H12
taagtcaatctccgtgaacttcttatataaatagcgcggtatcttgacgagggggtaccattgatagacaatttcaccaacaagaaaggaatgaccaaccactgctataagattgcatataggtctatggaacgttcactcactgatgaggaaatcaacgatctgcagtggaaagtaagagaacaggtgcacagcaaattgaatgttgacttaagatgagctatctatgttgaaaatctacagcttagatgacatcaatcgacttgttctgaataaatacatgagtgctctagatattcacgcatgggaatatattcctct

SEQ ID NO: 8744 - DNA, 432 bp, Glycine max
  Clone ID: LIB3092-055-Q1-K1-C12
cttcacaaaactcagttgtccaattcaccaaactcacaatggttgatctaggttggcaaacaaagatggttcacgccaacatcatgcctccaatgtcccccaaactctctctcccggatcataacattccaatcccaactttgcaactcccccttcgccaaaacgacatcaccgcagcgtcgtctcctatctgcgctgcatacgacaactaccttcgtctccctgagctcagagccctctgggcctccaaggacttccccaattgggccaacgagcccatcttaaagcccgccttacacgccctcgaaatcaccttccgcttactcgcaaccgttttctccgacccgagaccgtacatcaacaaacgcgagtggacccgacgcgtcgagtctctcgccacggcccaaatccagatcatagccatgttatgcg

SEQ ID NO: 8745 - DNA, 340 bp, Glycine max
  unsure at all n locations
  Clone ID: LIB3092-055-Q1-K1-C2
cccgcgcgtccgcggactcgtggggtttctgtaaccatggcatccaccactctatcccctgcaccccttctgagctatgctcangaaaaagtgggattttcagttcctcacaggcacttcttgtgaagccagtagtagaagcanattgatggtggaagagcaattgaattgagaattgcatgccaagccaccagcatttccgctgatagaagccctgacatgggcaaaagacagctcatgaatcttcttcttcttggggccatttcacttcccactactgggatgcttattccctacacctacctctttggcccttcaaggtcaaggtcttcaacttgcc

SEQ ID NO: 8746 - DNA, 59 bp, Glycine max
  Clone ID: LIB3092-055-Q1-K1-C3
gccgctcctacactaactctttatcctcctatatccactgcattcaccacataataccc

SEQ ID NO: 8747 - DNA, 117 bp, Glycine max
  Clone ID: LIB3092-055-Q1-K1-C5
tacgactgaactacaaccccagatcctggaaatatataaaccttcaacggcatacaacaagggtaagattaaataacccaaactaacccatattacaaataactccttacaaatcca

SEQ ID NO: 8748 - DNA, 457 bp, Glycine max
  Clone ID: LIB3092-055-Q1-K1-C7
cccacgcgtccgcccacgcgtccgcccgcgcgtccggtcggagtccgggagggtgaccgaggcgaggaagttgcggcgtgtgatggctgagaaaggctattttcctgatgaggtgacctatacttcactgatgaatgagttgtatattaagggggacgctctaggggccctggtcttgttgggggagatggaggccaaggggtgtagtccgaatgcgtgcacgtataacacgctgctgcactggttgttgaatgcgaggttgatgtagaaggctgtcaagttctaccaggtgatcagggctggcggtctgaagcttgatacagcttcttatgggacttttgtcagggcgctgtgtaaggacgggagaattgcagaagcgtatgatgtttttgattatgctgtttagagcaagagcttgacggatgttgctgcttacttgacattggagaacacgctt

SEQ ID NO: 8749 - DNA, 468 bp, Glycine max
  Clone ID: LIB3092-055-Q1-K1-C8
gactcatacgcccacgcgtccgcccacgcgtccgcccacgcgtccggtcgaagtccgggagggtgaccgaggcgaggaagttgctgcgtgtgatggctgagaaaggctattttcctgatgaggtgacctatactatactgatgaatgatatgtgtatgattgtgtacactctatgggccctggccttgttggtggagatggaggccaaggggtgtagtccgaatgcgtgcacgtataacacgctgctgcacgggttgtataatgcgaggcttttatataaggctgtcaagttctaccaggtgatcagggctggcggtctgaagcttgatacagcttcttatgggacttttgtcagggcgctgtgtagggacgggagaattgcagaggcgtatgaggtttttgattatgctgtttatagcaagagcttgacggatgttgctgcttactcgacattggagaacacgctta

SEQ ID NO: 8750 - DNA, 446 bp, Glycine max
  Clone ID: LIB3092-055-Q1-K1-D10
gagaaataaggggaaaaaatggtgtcgctgaaactgcagaagcggctggccgcaagcgtgctcaagtgtggcagaggaaaggtgtggcttgaccccaatgaagtcaacgaaatctccatggccaattctcggcaaaacatcaggaagttggttaaggatgggtttatcatcaggaagccaaccaagattcactcacgctcgcgtgctcgtaggatgaaggaggcaaagaagaagggccggcactctggttatggtaagagaaagggtacaagggaggcgaggcttcccaccaagatactttggatgagaaggatgcgtgtgctcaggcggttgcttcgtaagtacagggaatcaaagaaaattgacaagcacatgtaccatgatatgtacatgaaggtgaaaggtaatgttttcaagaacaagagagtcttgatggagagcattca

SEQ ID NO: 8751 - DNA, 415 bp, Glycine max
  Clone ID: LIB3092-055-Q1-K1-D11
gagggtttcgttccgtgtcaatggggagcgaagagcagaacggcgaattgtacctgcgtgactgcgggggtcacaagggcaagtttggtcacgagttcctggagttcgagttccgcccagacggcaagctccgctacgccaacaactccaactacaaaaacgacaccatcatccgcaaggaggtttacctaacccccgccgttctccgcgagtgccgtcgcatcatcgccgagagcgagattatgaaggaagatgataacaactggcccgaaccggatcgggtggggcggcaggagctcgagattgttatggggaacgagcacatttcgttcaccacgtcgaagattgggtctcttgttgatgttcagagcagtgctgaccccgagggtcttcgcatcttttactatcttgttca

SEQ ID NO: 8752 - DNA, 106 bp, Glycine max
  Clone ID: LIB3092-055-Q1-K1-E1
atccaattttacttacgctttcattctacgtcatatctgttctatagtgggacctatattcaggtgactggccgtcaatttacaacgtcttgactggtaaaacctt

SEQ ID NO: 8753 - DNA, 314 bp, Glycine max
  Clone ID: LIB3092-055-Q1-K1-E10
gcagcccaagaatcttcgacaattccgggatcaaatcctatgactaccgtgtgctcgccagatttgctgttacggtcggcaagaccgtttccattttggtcgccacttttttcttggaccggaccattcttcgcgtactgctgctttgcagcgttagtgggctcatactctcgcttttgactctagacctaattctcactgcggtctaccattcgcaaaccaccctgaattaaaccgttgggctcagcatatctgcgatactgtcctacatggcaactttctctatcagctctatacccatcacgtgaatttat

SEQ ID NO: 8754 - DNA, 259 bp, Glycine max
  Clone ID: LIB3092-055-Q1-K1-E11
cacactcatactctaatgtatttccaggctcaaatcctaatgctaccattgcctcgccgggcatgctggttcggtcggcaacaccttctccattctagtcaccactcatttcttgtacacgacccaacggctcttaattctacttagcatcattcgtagtcacatactcaccatctagactcttgacctaaatctcactttggtataccattcacagaccactctgaattagacctataggctcatcatatctgatatt

SEQ ID NO: 8755 - DNA, 436 bp, Glycine max
  Clone ID: LIB3092-055-Q1-K1-E12
cccacgcgtccgggaatgtggaggtggttgaggttatttatgataagactgctgcgaggagcagggggtttgggtttgtgaccatgtcttccgttgaggaagctgaagcggctgctaagcagttcaatggctattaactcgatggaagatcattgagagtgaattctggaccacctcctgctcggaatgagagtgctcctcggtttacaagtggctcttcattctgatccagagctggtggctcatcatatagtgaaaaccgtgttcatgtacgtaatcttgcttggggtgttgaccatgtaccacttgagacttcgttccgagaacaagggaagaacgtcttgcaagctacggtaatctatgacaagcaaagtggacgatctagaggctttggattcgtgactctcggtagccctgatgaggtcaaaagtgcaat

SEQ ID NO: 8756 - DNA, 301 bp, Glycine max
  unsure at all n locations
  Clone ID: LIB3092-055-Q1-K1-E2
cacngaaaaacacacttacaaatataattctaatttaatatattttaatcaatttccatatcaataagattttgatcttgaatattagaaaagatactgccatccaattaataggttctaaaactaatgcatcaatctatacatcacaattattactattaaaagttactatacttagtctgtactcactcttttatcttttgcaatcatgtcacacaaatggatctctgaaagcacataaacttgcattgaaagttaataacctgatgacaggctgcactgatttacccaatttgacttt

SEQ ID NO: 8757 - DNA, 461 bp, Glycine max
  Clone ID: LIB3092-055-Q1-K1-E4
caatataaaggataaaaaatgatgtgaatccgactgtccaaagtcatgatcttctgttggccttcccgttactgctagtcactttccaactttgttccactgaaaaacacacttacaaatatattgctaactttatctctctcactcactcacctttctgctaagatttggatcttaaaagtttgagagggtactgccatccaattaatgggttctaaaactaatgcatcgggctatagagcacgaataccactgtcaatattaactatgcttggtctgtgctgtttcttttatcttttgggagcatggcaaagaagtggatctgggaaggcagataaacttgcattgaaagttaataacctgatgacaggctgcactgttttacccaatttgaagtttgaatcccatcacagtgatgtagaaattgtcagacctgatgtgctaaaagctaaagcattcaa

SEQ ID NO: 8758 - DNA, 57 bp, Glycine max
  Clone ID: LIB3092-055-Q1-K1-E5
cccaaacctacttgaacctataattcgaattttctctgaatagaatcttgatgcatt

SEQ ID NO: 8759 - DNA, 442 bp, Glycine max
  Clone ID: LIB3092-055-Q1-K1-E6
cggcaatataaaggataaaaaatgatgtaatccgactgtccaaagtcatcatcttctgttgcccttcccgttactgctagtcactttccaactttgttccactgaaaaacacacttacaaatatagtgctaactttctctctctcactcactcaccttgctgctgtgatttggatcttgaaggtttgagagggtactgccatccaattaatgggttctaaaactaatgcatcgggctatagagcacgaaggccactgtcaatatttgctgtgcttggtctgtgctgtttcttttatcttttgggagcatggcaaagaagtggatctgggaaggcagataaacttgcattgaaagttaataacctgatgacaggctgcactgttttacccaatttgagttttgaatcccatcacagtgatgtagaaattgtcagacctgatgt

SEQ ID NO: 8760 - DNA, 427 bp, Glycine max
  Clone ID: LIB3092-055-Q1-K1-C11
atttggcgttgttgttttcttttggtgaggtatatgtttgaaggccacgtgggacgaagatgaagaccattcgccggttttgattcccaatttcattttgattctctgaagttgaataatatttttttattattcccattatgtaaacaaattttgttgttgatggtttgatttcacaaaatttgattgattttgttcatggtttatgcactgcatctgttttaccctctctatctgtgtccaatgtcgatggcagtggagatataactgatgcaaagatccataaaggttgacttaccagcccattgcaccgattttgaaatttgccatgggtcaaatggacctaccgaaatccccaaatatataagtttttaatgcaattgtgttatttgtatgtgtaaagtgaattggcaagtgatgatttatt

SEQ ID NO: 8761 - DNA, 418 bp, Glycine max
  Clone ID: LIB3092-055-Q1-K1-E7
cggcaatataaaggataaaaaatgatgtgatccgactgtccaaagtcatcatcttctgttggccttcccgttactgctagtcactttccaactttgttccactgaaaaacacacttacaaatatagtgctaactttgattctctcactcactcaccttgctgctgtgatttggatcttgaaggtttgagagggtactgccatccaattaatgggttctaaaactaatgcatcgggctatatagcacgaatgccactgtcaatatatgctgtgcttggtctgtgctgtttcttttatcttttgggagcatggcaaagaagtggatctgggaaggcagataaacttgcattgaaagttaataacctgatgacaggctgcactgttttacccaatttgagttttgaatcccatcacagtga

SEQ ID NO: 8762 - DNA, 409 bp, Glycine max
  unsure at all n locations
  Clone ID: LIB3092-055-Q1-K1-E8
acgcngcaatataaaggataaaaaattatggaatcctactgtccaaagtcatcatcttctgttccccttctcnatactgctagtcactttccaactttgttccactgaaaaacacacttacaaatatattactaactttttctcatatactaacgcacctttctactagtatttgtatctttaatgttttagagggtactgccatccaattaatgtgttctaaaactaatgcatcgggctatatatcacaatgtattttatcaataatttatttttcttgatctgtgctgtttcttttatcttttggtagcatggcaaataattatatctggtaaagcatataaacttgcattgaaagttaataacctgattacaagcttcactgttttaccccattttaatttttaat

SEQ ID NO: 8763 - DNA, 308 bp, Glycine max
  Clone ID: LIB3092-055-Q1-K1-A12
tatatagtaacatcatcatgggtttgaagaacactggcgttggtcatagagcatggagcctccttcgggcatcattgctgtgggcaagcaaaggtggcgtgttgaggcgcacagtggcgatggagctgcgtcttgtaccaaagtactttaagcgactcggccacactgctcctccaagccacattcactactttgaacacgagctctcgttcgacaaaacccccatctttcatgtcaagatgtaccgtccaaccaccatgcgcttccacttgcctcacattccttgcataaacccacatgttgatttt

SEQ ID NO: 8764 - DNA, 97 bp, Glycine max
  Clone ID: LIB3092-055-Q1-K1-A3
ccaaaaccttatcctacaatctcttcaacaattccttgacgcacttcatcttccggtggaaaacatatcacctgtcatttctctacatccacctctt

SEQ ID NO: 8765 - DNA, 387 bp, Glycine max
  Clone ID: LIB3092-055-Q1-K1-A4
gttcgactatctcaaacgcccatcatgaaagagggcaacgcagatgattctaatatagaaaaacaagatttacaaaagagttcgatcatatgaaggttagggattttctacgcatcgaatagtcactcaaattcgactcatatttattaaattagataaacttaagcattactacctatttaagtatagaatgaatgtgtgacatcatacgacttaaagcactgtaaatacttggaaaataaatagtttaatggaaatgaatatattatattttaaaatctaatcactttacatttataataagctccccattttcaagtccatcaaggactttgatgatgatgaggcaccagcttctactactccgaattcacaaatacttcattc

SEQ ID NO: 8766 - DNA, 454 bp, Glycine max
  unsure at all n locations
  Clone ID: LIB3092-055-Q1-K1-A5
cccacgcgtccgatcaattcaaagttcaaacgataggagaagaatggaggggcgactaacgcaaactgcgtcatatcgactcgttgttcatcgattggattgaagggagagagagatctggtagcggtagcattatatggataagggtaagatcgaanaggtgatctagaagcaagtgctgacggtagcgcaagccgtggaggacaagatcgacgactagatcgccgacctggagcgtctggacgccgatgacgtataggtccttggggagcgccgcctccagcagatgaagaagatggcggagaagcgctcccgctggatctccctcggccactccgaatattccgagattccctccgagaaagacttcttccccgtcgtcaaggccagcgaacgcgtcgtctagcacttctaccgcgaaaactggccttgcaaggttatggacaaacactta

SEQ ID NO: 8767 - DNA, 135 bp, Glycine max
  Clone ID: LIB3092-055-Q1-K1-A6
cccacgcgtccggcaaagagaagatgctgagtttgagatgatcttactatatttttcatatgggaccgtcttcctgtataattgtgagttacagtgtccacttaaattgaatttggtgccttttccttttgtcct

SEQ ID NO: 8768 - DNA, 433 bp, Glycine max
  unsure at all n locations
  Clone ID: LIB3092-055-Q1-K1-A7
gaaaatgtagacatttttggccaaaagcttaacctacaggctcttgcacaatcccttggcgcgattcaaggtccgggggaaaacatatcccctggcattcttggtcaagcaacctctaaaaattcccatacctgccaaaaggacaagctcctggcttcttactacatatcttgataaggacttgcgaatatcaaggggggatggtggtcttttcggtcttgccagagaagggagtccacttcttgatcagtaggaaagtaatcatactcctttcttcttcccccatgtcatccccgtcccctgagaataatgtgaacggcgtattcaaaatctctccattctttctgattattttcctcttctcaagctaatgtatatctaaaggagtgaccgnttatggtggcaggatgcaattctacaatctataaattat

SEQ ID NO: 8769 - DNA, 117 bp, Glycine max
  Clone ID: LIB3092-055-Q1-K1-A8
gaacagccatagatacctagccaaatggtgactctataaactacgagagtactggttcctgcgcttcagattgtgctgggcttcatattgactgtgacaactgatgttgcaaatctt

SEQ ID NO: 8770 - DNA, 441 bp, Glycine max
  Clone ID: LIB3092-055-Q1-K1-B10
cccacgcgtccgtgaagctagctagtgtgaatgtgtttggtttttaaaatgtgtatgaagggttttcagtggttaattatcaattggtttgattcgtgtgacaattcatggcttgcttactggcattttaatgtggtttgaggaagaggctttgaaaccacacacacagccactatggtagtttgtgtggtttatgagttttgtatgatttgtgctttgtaagcaattttcacgtgtttcttcctttcagtgtgcttaactcgggtttgcttagcacataatgtggggggttttgtgatatttttgtccgtttcttttatttcctgattattaggctttgtttgtttactgttttcaaaaacagttttgtgttttataaaatttggttttgtctcctgagcacatttgaaagtttttgtccctccttgagcacatttctgt

SEQ ID NO: 8771 - DNA, 410 bp, Glycine max
  Clone ID: LIB3092-055-Q1-K1-B12
aacgcaaagaggttataatttcattctttattctgatggaacagggcaaagctacaagacaggagcttgatcaatggggtgaggaactaatcaaagaagagtttgatgaagaatgtaattttgatgtggatgatgctgttgagaaattagagaaattaggaattgttactcgggtgagattccttaaactatccccattctaatcttcggtgattatatctatgtatataatactacctctctttaaaggaaaacttttttattattatttcaatttcttcttacaacaacaacgccttatcccactaggtggggtcggctacatggatcaacttccgccataatgttctatcaagtaccatacttctatccaaatcattaagttcgagatcctttttgataatctctct

SEQ ID NO: 8772 - DNA, 375 bp, Glycine max
  Clone ID: LIB3092-055-Q1-K1-B2
gacgaacctgccgctgctggaggtacttactccttctatatatcatcacttcatttgcatgctcacaccatcgtatatttcatcatccgtgcatgtgcacaacacgacatacacacttgaataccaagccatttatgagtttataagatatacatataatctgaatcatattggacagatgctgctgatgctactactcaacctgcttaagtggcttataaaaataatcttgtacagctaactgaagctaatatgagctacttatttatataatatattaagagggtatgtttgcctatctctcaagatgggttgtagccaattcgaaataaagttttcaggtggattacataactgtacattttgtaactctta

SEQ ID NO: 8773 - DNA, 390 bp, Glycine max
  Clone ID: LIB3092-055-Q1-K1-B3
acggccgcgcctccactgatgggtccattgttctgagatctcttgtataggaatataaggttgtgctcaaacacgtggataattatgacggggacaggatttcctgggcttcgttcgcctattactagtatttaatttacttatgattattaatagattattgatactactaattcctactttgtgttatattagtaccttgtttactgataaagattctatgactaatacctgatttagtggtacaatgttaacattatatatgttattattatttaaatttgactcctttttattcccatttttctttctccaacaataaattttcaccgttgccatttatttcatgctcactgaaaattgtaaacaagaacgccaccttgtttcaac

SEQ ID NO: 8774 - DNA, 464 bp, Glycine max
  unsure at all n locations
  Clone ID: LIB3092-055-Q1-K1-B4
caactacaagaaagaacttccttataaccaaaaccaacaacagactatggcgagttatcagaggcactacnatgatgaggggcgcaaggtctacgagtatggcaatgttgagaggcaaactgacttatatatctactatgaatcatgcaactagtatcacttatgtagcctccaaaagatttggtggctacaatgatgacgctaataagcaacatgatattactggtgtctatcccgagaaagacaccggttatcatgattatgatcaaggatacgacggtgacactaacaagcaacatgatgctactggtgtttatcccggaatagacattgctagagatcatgggactaccggtgtttatggcctaaacaccgacagacatcatggaacttctggagtgaatcccgttatagacacccataaccaacaacatgttactaccgttggttatgctgatgacact

SEQ ID NO: 8775 - DNA, 368 bp, Glycine max
  unsure at all n locations
  Clone ID: LIB3092-055-Q1-K1-B6
tcaaaaagtcgaccaactgcatccaagcacgaatcaaatcactgaaccgctagccgtccaggcctgcacactctgaggcagacccaattcgagaccaactgatcaactgaacaactaaaatagaaggaccagcagcgagagaagaaggagcgagaatatcacgagaatccaacataatgtgactgtacctagtaaaccataaccgaattaatccaaagaactgatactgaaggatgaacctaacacaggagnacagacatcaagtaatacaataaatggagtccataagaagcaattcgatgcaacatgcatgcttagcagagcgaattatattcaaatactcataggttactgccatagcctgaaaa

SEQ ID NO: 8776 - DNA, 462 bp, Glycine max
  Clone ID: LIB3092-055-Q1-K1-B8
caactacaagaaagaacttccttataaccaaaaccaacaacaactatggcaagttatcagagagcactacgatgatcagggtcgcaaggtcgacgagtatggcaatgttgagaggcaaactgacgaatatggcaacccggttcatgccactagtgtcacttatgtagccaccaaaagtgttggtggctacaatgatgacgctaataagcaacatgatattactggtgtctatcccgagaaagacaccggtagacatcattttggtcgtggttacgacggtgacactaacaagcaacatgatgctactggtgtttatcccggaatagacattggtagagatcatgggactaccggtgtttatggcctaaacaccgacagacatcatggaacttctggggtgaatcccgggatagacacccataaccaacaacatgggactaccgttggttatgctggtgacac

SEQ ID NO: 8777 - DNA, 249 bp, Glycine max
  Clone ID: LIB3092-055-Q1-K1-C1
gcgtccggatgtaactgaaccaacagtgcttagcacgtgaattttagcataaactccacgaatctagggttttattcgagcccagatcactgcgggtataggttccaccgaataatcttaaacactcactgttgtatattttcaaatatttcattttttctaaaataactgtaatatttcaccaattatatttgtttaccgctattcaatcactcatgattcattttctaaatgtcgatggtatgcttc

SEQ ID NO: 8778 - DNA, 333 bp, Glycine max
  Clone ID: LIB3092-055-Q1-K1-C10
tcctccgattttgcgttcttaatttctttttatgagttatatgcttggaagccacagggcactaaagttaaaaccattctgcggtttggattcccaatttcatttttattctcttaaattcaataatatttttttaatattcccattatttcaacaaattttttttttcattgttttatttcacaaaatttgaatgattttgctcaacgcttattcactgcatctgatttaccctctctatctgtgtccaatgtccattgcacttgaaatataactgatgcaaagatccataaaagtttacttaccatcccatttcaccgattttgaaatttt

SEQ ID NO: 8779 - DNA, 282 bp, Glycine max
  Clone ID: LIB3092-054-Q1-K1-F3
tccacgcgtccggttctgatagggccacagctctacattgtgcggttgccggaggctgtgggtcctcacttgagattgtcaagctcttgcttgatgctggggctgatgccgagtgccttgatgccagtggcaacaagccggtcaatctgattgctcctgcctttgattctttgtcaaaatcgcgaaggaaggccatggatatgttcctcacgggtggtggcgaaatagacgatgaactcatgagccatgagattcatgagagaaaagaagcaatttgtgata

SEQ ID NO: 8780 - DNA, 258 bp, Glycine max
  Clone ID: LIB3092-054-Q1-K1-F5
acacttgcgagattaccgaagtgcctaccgggctggacaaaccctagccattggcactatgctgaggctaggcgcatatctctcacgtagggaagcttactaacgctatcttccataggtactgactgcctcataacgatatcccatgagtgggatcgcatttgctaggtgcatgcctagcactagatgaactagggacctatgaatgagctggtgatgctccataggtgctcactgcttatgggacagatacttgac

SEQ ID NO: 8781 - DNA, 247 bp, Glycine max
  Clone ID: LIB3092-054-Q1-K1-F6
tccacgcgtccggttctgatagggccacatttctacattgcgcggctgcctgcggctctgggtcctcacttgagattggcaagctcttgcttgatgctggcgctgatgccgagtgccttgatgccagtggcaacatgccgctcaatctgattgctcctgcctttgattctttgtcaaaatcgcgaaggagggccatgagagagagagctgacgtgtgcttgcgagatagacgatgaactcatgatcc

SEQ ID NO: 8782 - DNA, 419 bp, Glycine max
  Clone ID: LIB3092-054-Q1-K1-F8
ttttgcttgtggatttgagggtaagctctatgtgatgggtggaaggtcaagctttactaggggaaactccaagtttgttgatatatataaccccgagagacatagctggtgtgagattaagaatggttgtgttatggtcactgctcatgcagtattaggaaagaagttgttctgcatagagtggaagaaccaacggaagctagctatattcagtccagaggacaattcatggaaaatggtaccagttccattgacaggaagctcaagtattggttttcgatttgggatactagatggtaagttgttgctattccctctggaagctgaaactgcttttcagacattgttgtatgatccaaatgcatctctggggtcagagtggcagacttgtgacataaggccatctggtttgtgcttat

SEQ ID NO: 8783 - DNA, 410 bp, Glycine max
  Clone ID: LIB3092-054-Q1-K1-G1
tccacgcgtccggttctgatagggccacagctctacattgtgcggctgccgacggctgtgggtcctcacttgagattgtgaagctcttgcttgatgctggcgctgatgccgagtgccttgatgccagtggcaacatgccggacaatctgattgctcctgcctttgattctttgccaaaatcgcgaaggaaggccctggactagttgctcacgggtgctggcgaaagagacgatgaactcatgaaccaggagattcaagagagaaaagacgcatttagtgataatactaaagaataccctgttgatatatgactggccgacataaacaacagtgtgtatggcacagatgattgtaggatgtacaacttcatggtgaagccttgcatatgcgctgactcccatgactggacc

SEQ ID NO: 8784 - DNA, 421 bp, Glycine max
  Clone ID: LIB3092-054-Q1-K1-G10
acgttctggttctttaaagaagaaacctttctctttgcgcgtgtcccgttctcttctcgaatcgtcctccatccccactgggtgatctgatcctaaaccttatagccatgactaccatggagattaagctatggaatgacaagcgcgaaagagaaatgtatgacaactttggggagctttatgccattatcaaagccactgagaggcttgagaaggcctatgttagagatataatttcaccgcaggaatatgagttggagtgccagaagctcatagctcatttcaaaaccttagcttccacccttaaagacactgtgcctagcattgagcgatttgcagatacttacaagatggagtgccctgcagcgattaaccgtctcgtggtttctggtgtgcctgccaccgtggagcatcgtgcaac

SEQ ID NO: 8785 - DNA, 459 bp, Glycine max
  Clone ID: LIB3092-054-Q1-K1-G11
aattcccggtgggccgacgcgtccgttctggttctttaaagaataaacctttctctttgcgcgtgtcccgttctcttctccggtcggcctccatgcccactgtgtgatctgatcctaaaccttatagccatgactaccatggagattaagctatggaatgacaagcgcgaaagagaaatgtatgacaactttggggagctttatgccattatcaaagccactgagaggcttgagaaggcctatgttagagatataatttcaccgcaggaatatgagttggagtgccagaagctcatagctcatttcaaaaccttagcttccacccttaaagacactgtgcctagcattgagcgatttgcagatacttacaagatggagtgccctgcagcgattaaccgtctcgtggtttctggtgtgcctgccaccgtggagcatcgtgcaactgcggctgcctttgct

SEQ ID NO: 8786 - DNA, 432 bp, Glycine max
  Clone ID: LIB3092-054-Q1-K1-G12
aaatcatactctataaaaatgacctatccttttgcgcatcaatcacataacaccgggcaggtcctctttggtctgtagaggcgatccattcacaatcttataagcattactaccatatagattaagaacaaaaatcacaagcacaaaagacttatccacctcaactcttgtttatctcaacgccataactaattctactactactttaacaacaacctctactacaactacaaatactcatacagattataatatagtgaaccataagctcatagctaatttcaaaacctctgcttccaccctcatatacactctgactatcaacaaacgaattgatgatacttccaatatgcattgcaattctcctattttacaacttgttatctctgatcttcatcccaacactgaactttatacatctacacttaactc

SEQ ID NO: 8787 - DNA, 245 bp, Glycine max
  Clone ID: LIB3092-054-Q1-K1-G2
gacttttgacagctggcgggcctttcctgagacagcgtactggactaaaccatggattgtggactgttcaccatctaccggaatctgaaacctgtaaagatccttggattgcgatgcgtagagtctcctgacgctaatagcatcgtgctgaaacatgtcataaacagcatcaaccagtgcctgcacttgaacactcgcttcaacccccactactactccatcaccgtcgtgtgcaacagtatgga

SEQ ID NO: 8788 - DNA, 423 bp, Glycine max
  Clone ID: LIB3092-054-Q1-K1-G4
tccacacaaactataatagaaagagtgaccactcactaaaacgatcgatgtggtgaacaacggtgagcatcacatggctccttctacactcgctcccactctcagcctctccaccaaatcccactgctatctccccaacaccaaacaccggttttcatgtcccagaataaagctattctactccaagcaccgctccttctccgtagtaacttctgcttctgcttccacttcaaattcgcttcaggctctcatattcgactgcgacggcgtgatcctcgagtctgagcacctgcatctgcaagcctacaacgatgcctttgttcacttcaacgttcgctgcccctcttcttcttctccgggcccactcaactgggacgttcaaatctacgactaactccagaaccccattggtggaggcaaacc

SEQ ID NO: 8789 - DNA, 144 bp, Glycine max
  Clone ID: LIB3092-054-Q1-K1-G5
aactttagaccgcgggcgcgcctttcctgaggcattctactgaactaaaccatggattgtggtctgttcttcatcttcagggttctgaaacctgtaaagatccttggattgcgaggcgtagtttcacctgacgcttatatcatc

SEQ ID NO: 8790 - DNA, 361 bp, Glycine max
  Clone ID: LIB3092-054-Q1-K1-G7
catcagtgaactccgagggacgtgaattgatgatcataatgctgcctaagcagtagttcgacttcagctcggagctaacagtctctacgctactattgttaagcttcttttaaagtgaaaaaaacgagtgagactttatagttcttgtttagatggacgatagtcctaacaaggtagaaacctagaaccttgtgtagactacccagacactgcattaacccaaccctaatgggctaaataacggattgtatgaaatagagaaccgataatgtatcgaactatcaatagtactggtaacatggttaagacctagaatcttgtgtaagctacccataccttttgttattagaccgaccctgat

SEQ ID NO: 8791 - DNA, 372 bp, Glycine max
  Clone ID: LIB3092-054-Q1-K1-G8
ttatccaaagacaatagttgtgttgtgttcagttaagggtgaaccttagcaacagcgggggcatcactattctgtgtggaacctgttaaatgtgctatagctttatttcaacttctacatggcttcttttctttccttatctcttcccaagttaaacttaattaaggcctcttcagcagctaacaccactacaacgacagcggccactcttcccacagctgagacacttaatgagacatttggcagaaaaggcatcaagttcttggagtctgataacactcccataattgacttaacagtgagaaatggcatctccttgaggctgaggatacctgatgctcatgtgacatcatacataccaaaagttaattg

SEQ ID NO: 8792 - DNA, 420 bp, Glycine max
  Clone ID: LIB3092-054-Q1-K1-G9
ttctggttctttaaagaagaaacctttctctttgcgcgtgtcccgttctcttctccaatccgcctccatccccactgtgtgatctgatcctaaaccttatagccatgactaccatggagattaagctatggaatgacaagcgcgaaagagaaatgtatgacaactttggggagctttatgccattatcaaagccactgagaggcttgagaaggcctatgttagagatataatttcaccgcaggaatatgagttggagtgccagaagctcatagctcatttcaaaaccttagcttccacccttaaagacactgtgcctagcattgagcgatttgcagatacttacaagatggagtgccctgcaacgattaaccgtctcgtggtttctggtgtgcctgccaccgtggagcatcgtgcaactg

SEQ ID NO: 8793 - DNA, 396 bp, Glycine max
  unsure at all n locations
  Clone ID: LIB3092-054-Q1-K1-H11
gaggagttcaacaccggaccactatctgtactcatgatgagtgttaaaaataatactcagggactgataaattgtcggaacaacaaaaagcttctgggtcgtgtaagggcttttgacaggcactgcaacatggttcttgaaaatgtcagggagatgtggactgaggtgccaaagactggtaaaggaaagaaaaaggcccagccagtcaacaaggatagattcatcagcaaaatgtttctacgtggagactctgtcatcattgttcttagaaaccccaaatgagattctgtcatcaacttgtangagtaaatggctctgtagtatttgccttttcngtatatcttgaattcttgataaacgaatatgtagacattctgtccttcaaaatatattatg

SEQ ID NO: 8794 - DNA, 391 bp, Glycine max
  Clone ID: LIB3092-054-Q1-K1-F12
acgtcagtgctaatagaaagaaatagattaagctcttatggaactcatactgaatcacgtgatgactcatagcgagtgagggtgttcctacctgatatctgatggtatcttccttttacgcctcacctatgatcgcaagtcttttctgaagaaccatccccattattttatttcgaatcctgatactctgcccgatttaacctttaactttaatttttgtcattacactattccctttaagactgtcacttattcgtatgttttctacttccctcttactctacactttatttaatactacccattcatatcttcaaattataaattcccacatcgtttctttccaccctaatttttatccttcttttactttttgctatcctatacttaa

SEQ ID NO: 8795 - DNA, 213 bp, Glycine max
  Clone ID: LIB3092-054-Q1-K1-H12
acggaggagttcaacaccgaaccactatctgtactcatgatgagtgttaataataatactcaagtactgataaattgtgggaacaacacaaagcttctgtgtcatgtaagggcttttgacaggcactgtaacatggttcttgaaaatgtcaggtagatgtggactgacgtgccaaacactgttataggaaagaaaaaggcccagccattcaac

SEQ ID NO: 8796 - DNA, 292 bp, Glycine max
  Clone ID: LIB3092-054-Q1-K1-H2
tccacgcgtccgcttgggtcgggagaaaagaacagacaatggaagcgagttgagagctaggtgcggttgaacatcatcgagatcgaataatcacttttacacatgacttatccttctattccgatttaagcccctaaacgaactatcgaagccacttcaaaaactactcttagattgcttctatggtcgatcactacaacaagctgtgataactagcggcgagggctttctacgatgatctaacgagtaaaggagagaatcaacccagatcgggaaggagtgataacagagg

SEQ ID NO: 8797 - DNA, 224 bp, Glycine max
  Clone ID: LIB3092-054-Q1-K1-H5
cttcatcttttataggagaaaactgcgagctacgtgaggcaaataacattttgaaggccatacatgtggtgctcgaaccaggactctatactcgattacactgcctcctttgtgaatgctgtcctggactgactgacggagctgtgcctgatggttctaaagacgcaccttatgctgctgtacagagttgatataacattccacctcatacaaggagacatgac

SEQ ID NO: 8798 - DNA, 353 bp, Glycine max
  Clone ID: LIB3092-054-Q1-K1-C4
gttgaattcaatatgagtcttaagggatccttcgagggaggcgtcgctacccatcgtcgcaggctgcaccactcacccactcgacctcatcaaagttcgaatgcaacttcacgaaacccacagtctccgcccagccttcgcctttcacgctaccacttcaatgactactccgccgccctccgggcccatctccgtcgaccgtctgaatatgccagtcggaggcactcgtcggtcttgtctacggcgtctacgacaccgacctacgacagacgctctactgcaccacccgcatgggcctctacgacatcctcaagcgccactggaccgaccccgaccgcggaaccatgcgcctc

SEQ ID NO: 8799 - DNA, 238 bp, Glycine max
  Clone ID: LIB3092-054-Q1-K1-C8
gggtactgctgaatttcttgtgagctttgatgacttgtacccaacagattttgggtgaagtaataaccaggaggatgataggagtcaatttggaaccttaaagatttgtggaaaagatgtgcctcgtggatactggatgttttgccgggccagtagaattgaaccagaagctttaattggggtttatgggttcttattttttcaactatctgtgaggattgatgatggatagagccag

SEQ ID NO: 8800 - DNA, 433 bp, Glycine max
  Clone ID: LIB3092-054-Q1-K1-C9
gttacatgccttaagatggtcatgccatcgttctacacaccgtctatccgtgtaacgagcgactactaagtggacaagacttctaaaaatcgattgtggtggatttaactgcttcctaccgagatccatccctatgtattgccaccactcttacatacattgctatgcatactcatcaaccgatcttgcttatgatgaatatccattaattttaggcttattgctgaccaatatatcattgaacccattacaaccttgatcttattaaaagataccttgatcctatataaacataattactctaataatgtgcaactgtatcatctcatatcctagcatagatctactattactacttcttatatatacgcagatttatcacattcatacagatccttactcatgcattttaacgatctcaactcagctttca

SEQ ID NO: 8801 - DNA, 440 bp, Glycine max
  Clone ID: LIB3092-054-Q1-K1-D10
ttcactactttgcttccttagaaagaggaactacaactgatagctagcctccacgaggacgtattttaggtgaaaccggccaagaaaacccacggaaggtaccaaaacacataccaattatggatttgatgtcatccatcttcaattgctttgttccatcttcatcaactcaagtctctgactatgccaaaggatcatctcaattgaaatctccttcttcagagaaaccaaagagcaaaccaaaatcaaacggagctccaatcgttgattcctatttccctgtcaaccattatccgtcacgcttgtagttgatatatatattaatttgcatctgcatcgatacgtgatcagtgatatgtttgcatgtgcttattggcggtggtggccttttacccttttcagggtgcttggtttacacagttgaaatttgatgtattcta

SEQ ID NO: 8802 - DNA, 262 bp, Glycine max
  Clone ID: LIB3092-054-Q1-K1-D11
gacccacacatacaatcactactatacttccttataaacaccaattacaactcatatctaccctccaccagaacgtattctatctaaaaccgaccactaaaacccactttacttaccaaaacacataccaatcattaatttaatctcatccatcttcaatttctatcttccatcttcatcaactcatatctactcctataccaaaaaatcatataaattcatatctcctcctttatataaaccaaatatcaatccaaaatca

SEQ ID NO: 8803 - DNA, 151 bp, Glycine max
  Clone ID: LIB3092-054-Q1-K1-D12
aattcccgtctcgaccgcactcatactctcactacctatcttacttataaatattttctccaactcacaactaacctcctacgcatcgttttttatctaatacccaccatttaaatccctctacaatttaccataactcataccatttata

SEQ ID NO: 8804 - DNA, 270 bp, Glycine max
  Clone ID: LIB3092-054-Q1-K1-D8
cccacgcgtccgctagagagagaaaactctccgtcggcacccctccggcgatgacatgagggccgtttccctcacgtggtgcgtagacctttgatgcgccgatcgaatgcccgcactcgcagcgccgtctccaatctcaacaacaacaacgaattaatggatccgatcaaaaccaaaacccgctccaccaacctgttagttgggaaccatgaggccgcgcaatcgaagtccctccgttccataatcctcgtctgcatcgcgctctccttc

SEQ ID NO: 8805 - DNA, 439 bp, Glycine max
  Clone ID: LIB3092-054-Q1-K1-D9
cttaaaaacaatggaattgatgtgccattgttcgagctttcttcttccgccggagagtccgaacacgacgtgttcggtgtctctaaagtacgctctcgttgttctcaaccaaagcctaccgagatttgctcctctgctctgggaccacgctcaagtacgagtttgcgctgatggaggtgccaatagggtgtatgatgaaatgcctcttttcttccctcatcaacaaccttcccatgttcgcaccaggtacaagcctgatgtaattaaaggagacatggattcaatcatgacagaagtacttgacttctatgcaaagctgggaactaagataattgatgagtctcatgatcaggacaccacagatttacacaaatgtgtggcatacatacgtgacctcaccccaaatgttgatggatcagaactatgcattcttgttgct

SEQ ID NO: 8806 - DNA, 462 bp, Glycine max
  Clone ID: LIB3092-054-Q1-K1-E10
aattcccgggggggccgacgcgtacgcccacgcgtccgcccacgcgtccggtgcttttaagtctatggagaaggagcctagggctggtcagtttacgatctttggggctgggcaagttgttgtgtttgatgattttcctgctgaaaaattggaggagataacgtcattagccggcaagggaatatcccaaagccaaaacacctctgcttatgctcacactcataaccagcaagtgaatcatccttcctttgttcctaatatctcccctcaagcaccgtccagaccacttgtttgtgatctgccaattgctaggaaagcttcacttcatcggttcctttctaagagaaaagatagaattgctgccaaagcaccctatcaaataaacaatcccaactctgcttcaagtaagccggctgaatccatgtcatggcttggattacgtgctcaatcaacacaagtcta

SEQ ID NO: 8807 - DNA, 348 bp, Glycine max
  Clone ID: LIB3092-054-Q1-K1-E12
caaggaaggtcctcactgttattacatctttctttcctctgtgcaggagatataaagacgtgctaaaaaacaacaaagtcttttcttccaatgcaaaatcaccttgatgtaccaaaccaacctaactggtatgttttgtgtcttcatattttcaccttctgatactgatttgggtctaagctcctaatgatttaatatccaatgcatctggtattctatcttgactcatataccctttttcttaatgctatatttctactttctttatctcccccattttccaatcactcataccgttatcactattttatattatattgacttccattataatgcttaaaattaaaa

SEQ ID NO: 8808 - DNA, 441 bp, Glycine max
  Clone ID: LIB3092-054-Q1-K1-E2
gaccctccgtcagacggatcatgcctatgaggcctgtgacagaattgggctcgagctgctcaagcggggatctgatttccgcctatgggagaagagaccctgagagtgttgagcaggctatcgtgcttaaagaaaggttcatgatcaagatggcccaaggactgaagcgctttgggatgaagaattgtaagaacagatggtttcggttgaccatccatgaatttacctaccacaaaagcataggggaccagcctctctacagcattcacatcgagaacatactgtcagtggagtagcttgaagaggagtcttttaaaatgaataacatgtttcatgtcatccagccatagcgtgcgctgtacatacagtgcaacaactgctttgaggccaaagactggatcgacattctcaccaaagtgagccaatgcaaccagaatcgcc

SEQ ID NO: 8809 - DNA, 264 bp, Glycine max
  Clone ID: LIB3092-054-Q1-K1-E8
ctggatatggcaaaatgccagaatatgaacatatatttacagacttcctgttgagcttggggcaggggaagtacaagagaagataggctaaaataactgtttccagcccttttatttatgtcccccacatgacgtaagcccccttgcctctcagtttgaagctcaaaactatggctgtaggaaagtatcttataaagcataagtgataataactttttcagttatgctgtgtgatggaagtgccatgggaaactatcaagactt

SEQ ID NO: 8810 - DNA, 232 bp, Glycine max
  Clone ID: LIB3092-054-Q1-K1-C12
tatcaacctatagactatatatagcaaatgttcatacaatagtcttcaagactatgggtcgacttcttaaaacacattgtgtgccacataaacttacccaaaattactcctaatcttaatattacttacctaaccccctttaacttgtatcaccctatatattatctcaccctaaaaacaatttatacttaaaaataaaaaacaacttattcaaactttttaaccacccctc

SEQ ID NO: 8811 - DNA, 227 bp, Glycine max
  Clone ID: LIB3092-054-Q1-K1-E9
ccactcatccaattcatttacattaatatccaaactcaaccttgaacagcttttttataaaaactacacctccaccccaatccttcacctctctttccaaatcaccatccccctccctcactctcaaatctttttctttaaacacatccctaccttcaccacaaccaaaaccttaacacaccatccactaatatctttccccaatcatcctctttaactccatctac

SEQ ID NO: 8812 - DNA, 440 bp, Glycine max
  Clone ID: LIB3092-054-Q1-K1-F11
gcagtgcgaagagaaagaaagagaagaagcgcttatcgaactcggacggaagcactgagtgggctcagagcgagtgaaagtgttgctgcgtgatgtctggtggtatcgcccgtggacgcctcaccgaggagcgcaagtcgtggcggaagaaccatccccatggttttgttgcgaagccggagacgctgcccgatggaaccgtgaacttgatggtgtggcattgcactattcccgggaagactgggactgattgggagggtggctacttcccgcttacgctgcactttagtgaagactacccaagcaagcctccaaagtgtaaattcccacaaggtttcttccaccctaatgtttatccttctgggactgtttgcttgtctatacttaatgaggatagtgggtggagaccagccataacagttaagcaaattcttgtgggc

SEQ ID NO: 8813 - DNA, 290 bp, Glycine max
  Clone ID: LIB3092-054-Q1-K1-A11
accaatccttataccacattcacatttgatcatcaaataattaatgttccttgaggcctattagatatttccattctctcttacccaactaaatttatcaaatccaattccaaagcacaaactacccttgcttacttttaaacatctacctcaactattaaccatataagacccataaatacttccactcatccacttaactaacaattagacattacaaatcttatcaatgactcttctaccacatatcaaccttatataccataaaatgctatcaatttatacctata

SEQ ID NO: 8814 - DNA, 280 bp, Glycine max
  Clone ID: LIB3092-054-Q1-K1-A12
tcttacaacaagtatcccatttttctcaatctcaacttctgatcatctaaatatttttccttcgttaggctcttttcaaattcgcgatttatcaaataaaaccaaacataatcccccctacatatactctcataataaaatttattctttttaaacacatacatttactttaattttttcaatacaattattaaatataacaaacccttcatcaactttttacacaaattaattaattatacaataatacctttatcattatcatttcaactactaacaa

SEQ ID NO: 8815 - DNA, 239 bp, Glycine max
  Clone ID: LIB3092-054-Q1-K1-A2
aaatgaacagaagctcctcctccacttactcttcctctcactgttgctctttagagtgcaagcatatgagccccagcgggccagacagaatcaaaggcccatggagcgcccaagaggatcggatcctgacacgactagtcgaacaatacgggcctcgaaactggtccctcatcagccgctacattaagggcaggtccggtatattgtgccagctgcagtggtgcaatcagctgagcccc

SEQ ID NO: 8816 - DNA, 461 bp, Glycine max
  Clone ID: LIB3092-054-Q1-K1-A3
aattaccggtcgagcgggcgtccgttagatcattctattgagttcagcaggtctcgattttctgagattggggaatcctgcatgggggatgatgatggcaagatgagacccttggttctgaaaaacaagcctccaagatggcatgaacagttacaatgttggtgccttaatttccgtggacgagtaacagttgcgtctgttaaaaactttcagttgattgctgccaccgagccagctgctggtgcacctacaccatctcaaccagctccaccggagcacgataagatcattcttcagtttggcaaagttgggaatgacatgttcaccatggattatcggtaccctttatctgcattccaagcttttgcaatatgcttgagcagctttgacaccaaattggcttgtgaataagatgaatcatgaatcagaatggttataagttagctaatgaaacaatgatg

SEQ ID NO: 8817 - DNA, 454 bp, Glycine max
  Clone ID: LIB3092-054-Q1-K1-A4
cccacgcgtccgcccacgcgtccgctgctctctcacgagaagaatactactaactgtgtgggaatacctcagtggagaacaggatgaatccatggaacatgagaacttccaagttactctctcaacaacttgcttatcctccttatcgcttggtagaagagattccaaacatgggaaattccagttgtgtgagcaaggagccaagaggttcacagatgacaatcttttatggtggccaagttcttgtcttggatgatattcaagctgacaaagccaaggacatcatgtcttttgccggcaaaggaatgtctcaaaaccagaacgactgtgcttacactttccctgctacaacttctgctactcccagtagaccattcccttttctaatgaatatcattccacccactggcaacatttcggttcaggaccaccctcaaacaccatccaaacctgt

SEQ ID NO: 8818 - DNA, 219 bp, Glycine max
  Clone ID: LIB3092-054-Q1-K1-A5
tcaaagcaggaattcttacgaagtgaattatggtccaaaattttgatgaacttgtctctaaactatgtaacatatacacattctcatttttgagtggcattatggaatgtgttcttctggcaacatgttttccttataaaaatgacttctgttataattattatgtcagatattttaagacacatatacatatatgtctgatatatctttaacttgaaa

SEQ ID NO: 8819 - DNA, 307 bp, Glycine max
  Clone ID: LIB3092-054-Q1-K1-A8
tcaacatcattctcttctcaatctttccattcctgagttctcagggtggttctaaacaacggcgggcctcatgtattcatggtttttggaactaatggtcatcttatcaaaaaatcttttcttcattgcttctttaagcttgctcaatacattacattattttaccttttttttagttcttttggagttcgtttcattgtgcgctgtcactccatatttgtgtgtacatatttgtcaactatttcttaacacaagtatcatcaaacaatttgtggccaaaagtatatacttaaatgtgtaaaattct

SEQ ID NO: 8820 - DNA, 331 bp, Glycine max
  Clone ID: LIB3092-054-Q1-K1-A9
gtgaggtccaatcctggtgcccccctcacagtggatcagcaggttgtttgtggggctggagccggagtagctgtttccattcttgcttgcccaactgaattgatcaaatgcaggttgcaagcacaaagtgcgcttgctggctctgaaacagctaccgtggctgttaagtatggaggacccatggatgtggccaggcatgttctcaagtcagaagggggcatgagaggtcttttcaagggcttggttcccactatggggcgtgagatacctggaaatgctatcatgtttggtgtatacgaagcattaaagcaaaagtttgcaggaggcactg

SEQ ID NO: 8821 - DNA, 438 bp, Glycine max
  Clone ID: LIB3092-054-Q1-K1-B10
gcaggtgtcccatttttctcaatctcaggttctgagtttgtagagatgtttgttggtgtgggggcttctcgagtccgcgatttattcaggaaggccaaagagaatgccccatgcattgtttttgttgatgaaattgatgctgttggaaggcaaagaggtactggaattggtggagggaatgatgaaagagaacagaccctcaatcaacttttgacagaaatggatggatttgagggtaataccggtatcattgtcattgcagctactaacagggttgacattcttgattctgcattgttaaggccgggacgatttgataggcaggtcacggttgatgttccagatatacgaggaaggactgaaattttaaaggttcatggtagcaataaaaagtttgaagctgatgtttcacttgaggtaattgctatgagaacacct

SEQ ID NO: 8822 - DNA, 441 bp, Glycine max
  Clone ID: LIB3092-054-Q1-K1-B11
acggcaggtgtcccatttttctcaatctcaggttctgagtttgtagagatgtttgttggggttgtggcttctggagtccgggatttattcaggaaggccaaagagaatgccccatgcattgtttttgttgatgaaattgatgctgttggaaggcaaagaggtactgtaattggtggagggaatgatgaaagagaacagaccctcaatcaacttttgacagaaatggatggatttgagggtaataccggtatcattgtcattgcagctactaacagggttgacattcttgattctgcattgttaaggccgggacgatttgataggcaagtcacggttgatgttccagatatacgaggaaggactgaaattttaaaggttcatggtagcaataaaaagtttgaagctgatgtttcacttgaagtaattgctatgagaacacct

SEQ ID NO: 8823 - DNA, 441 bp, Glycine max
  Clone ID: LIB3092-054-Q1-K1-B12
acggcaggtgtcccatttttctcaatctcaggttctgagtttgtagagatgtttgttggtgttggtgcttctcaagtccgggatttattcacgaaggccaaatagaatgccccatgcattgtttttgttgatgaaattgatgctgttgtaaggcaaagaggtactggaatttgtggagggaatgatgaaagagaacagaccctcaatcaacttttgacagaaatggatggatttgagggtaataccggtatcattgtcattgcatctactaacagggttgacattcttgattctgcattgttaatgccgggacgatttgataggcaagtcacggttgatgttccagatatactaggaaggactgaaattctaaaggttcatggttatcaataaaaagtttgaagctgatgtttcacttgatgtaattgctatgagaacacc

SEQ ID NO: 8824 - DNA, 466 bp, Glycine max
  Clone ID: LIB3092-054-Q1-K1-B2
attgttcaagagtggaaagcaaagaagccttggcttccacaagaaagagtagacgaggtcataaaaagttctgaaaaattgaagaattggttggatgagaaagaagctgagcaaaagaagacttctggattcagtaagccagcatttacatctgaagaagtatatctgaaggtgcttgatctgcaaaccaaggttgccagtattaatagaattcccaagcccaaacctaaggttcagaagcctgtaaagaacgaaactgagagcagcagtgcgcagaatacagagacttctgattctaactcagctgatagttcctcttcaagtgattcatctgccaacagttcagaaggcacaagcaaagagacggttactgagcaatctgaaggtcacgatgagctatgattaactgggcatgcatgtaaggccggttttaatcatctacctgcaacgtttttatagtcagaga

SEQ ID NO: 8825 - DNA, 185 bp, Glycine max
  Clone ID: LIB3092-054-Q1-K1-B3
ccctccgtcagcacggatcaggcactcgacaggccgtcgacccacgtcgtccgattccatacttagggatgggctcataaatggcgacgacaccaaacttatctcatatacttaacgctacaactggataacctatttccactaaccataagcaccaatactgccaagattaataccacatcctc

SEQ ID NO: 8826 - DNA, 457 bp, Glycine max
  Clone ID: LIB3092-054-Q1-K1-B7
ggccaagctcctggagaagacagtgaagtgattatatacccacaagccattttcagggatgcattcagaaggggcaacaatatcttggttatctgtgatacttacactccagctggagaacccattcccactaacaagaggcacgatgctgccaaggttttcagccatcctgatgttgttgctgaagagacatggtatggtattgagcaggaatacaccttgttgcagaaagatatccaatggcctcttgggtggcctgttggtggtttccctggaccacagggtccatactactgtggtgttggcgctgacaaggcttttggccgtgacattgttgacgcacattacaaagcctgtctttatgctggcatcaacatcagtggaattaatggagaagtgatgcccggtcagtgggaattccaagttggaccttcagttggaatctcagctggtgacg

SEQ ID NO: 8827 - DNA, 321 bp, Glycine max
  Clone ID: LIB3092-054-Q1-K1-B8
tcatgttatcatgcctgtcattcctcaaaagtacctggatgagaggaccatcttccacgttagcccttctggccgttttgtcattggtggccctcatggtgatgctgaactcactggaagaaagatcatcattgatacctatggtgggtggggtgctcatggtggaggtgcctttttaatgttttaccctaccaatgttgacagaaatggtgcctatatcgtgaggcatgctgcaaagagtgatttagcaaattgccttgccagaatgtgcattgttcaagtgttctatgccattggtttccctgagcccttatcagtgtt

SEQ ID NO: 8828 - DNA, 292 bp, Glycine max
  Clone ID: LIB3092-054-Q1-K1-C1
aacctgcagatgcggggactgtaataagcgcggaggcgccctgtacgtggactttgccatagacggcatccacagcattgggtacgccaactctacactggagaagaacttccgtatgaacgaagtcaacaggctgggagccatctctatatgacttaaatccgagacaggtacgcgtatggacatggtgcattacagccactagggcacctttgatgccatacagctggacgactaacatattgactacctgtcgagcttcacagaagctgtcatgaacctagagtggatt

SEQ ID NO: 8829 - DNA, 442 bp, Glycine max
  Clone ID: LIB3092-054-Q1-K1-A10
aatctgagaattctctaaaagagatctttatctgctctttgaagaaagaagggtctttggtgcattttggagatgtcggtgctctcagatctcatcaaccttaacctctccgataccaccgagaaggtgatcgcagagtacatatggatcggtggatcaggaatggacctgaggagcaaagcaaggactctcccacgaccagttagcgacccttcagagcttcccaagtggaactatgatggttccagcacaggtcaagctcctggtgaagacagtgaagtgattttatacccacacgccattttcagggatccattcagaaggggtaacaatatcttggttatctgtgatgcctacactcctgctggacaacctattcccactaacaagaggcacgctgctgccaaggttttcagccatcctgatgatggtgctgaagtgc

SEQ ID NO: 8830 - DNA, 440 bp, Glycine max
  Clone ID: LIB3092-054-Q1-K1-C10
acgcttagaaacaatggaattgatatgccattgttcgagctttcttctatccccgtagaatccggacactacgtgttcgcggtctctaaagtacgctctcgttgttctcaaccaaagcctaccgagatttactcctctgctctgggaccacgctcaaatacaactttacgcttattgatgtaccaatatggtgtatgatgaaatgcctcttttcttccctcatcaacaacctatccatgttcgcaccatttacaagcctgatgtaattaaaggatacatggattcaatcaagacagaattactctacttctatgcaaatctgggaactaatataattgatgagtctcattatcaggacaccacatatttacacaaatgtctggcatacatacgtgaccttaccccaaatgtttatggatcagaactatgcattcttgttg

SEQ ID NO: 8831 - DNA, 430 bp, Glycine max
  Clone ID: LIB3092-053-Q1-K1-F8
ggtgaccatggcatacatgattatggcttccacaaaacctctggttccagtctgcgcgcaggtcccgttcccccacaccaaaactccccattctccaaatttcactccccaaagccccaaccttgaaactgaaactcccaatttcaaagccccagatgctgtccctcctgggagggatagcaccactggtcttggccagaccctccctagcagaagaatttgagaaagcagcactctttgacttcaacctcaccctgcccataataatggtggagtttctgctgctgatggttgccttggacaagatatggttcaccccgcttgggaaattcatggacgagagggacgcggcgatcagggagaagctgagcagcgtgaaggacacgtcggaggaagtgaagcagctggaggagaaggccaatgctgtcat

SEQ ID NO: 8832 - DNA, 433 bp, Glycine max
  Clone ID: LIB3092-053-Q1-K1-G1
gaattgagttgagaagagaagaggtcatagacacaacacaagacatgtctgttgtcgagtgaggtgaacacaacaacatcagaggagtaccaactcatggtggacgctatgttcagtacaatatctatggcaatctctttgaagtttccagaaagtatgtccctcctattcgtcctgtgggtagaggcgcttatggtattgtttgcgctgctgtaaatgcagagacaggtgaggaagttgccattaagaagattggcaatgcatttgataacagaatagatgccaaaaggaccttacgagaaattaaacttcttcggcacatggatcatgcaaatattatgtccattaaagatattatacgtcctccacagaaggaaaacttcaatgatgtgtaccttgtttctgagttaatggacacagatctgcatcaaat

SEQ ID NO: 8833 - DNA, 310 bp, Glycine max
  Clone ID: LIB3092-053-Q1-K1-G11
gttagagagagaaagagagttgtgaagcacatgatctaaaaacgtgttatctgacaagactggggaacatcacgctcctcacttttcaaaggtttcagttgtgacatcctccaagtgacaagagtggaacattcattcctttagtggcactttgggtatatattaaattctgggctgtgagtatattagaacaaatgtccttccgcaatatagttcgtgaagtaagggatggatttggaagcctatcaaggaagagttttgaggtaaggcttcctggccataacaggggcaaggcacgtagtttggtcca

SEQ ID NO: 8834 - DNA, 396 bp, Glycine max
  unsure at all n locations
  Clone ID: LIB3092-053-Q1-K1-G3
tctttaaatacttttcattgtataccccacacaaactcatatcaacatttacgactgcgcccaatattgagaagtttataactaacctatcatttantatttcacaccaccaccaataattttcaacatatcaccaccctaattctcaccatgttctcaacaataaaattgtttattaagaggatattattttattatcccgcctcatccacattcttcaccaccacccttaaactcattataaaatcaatgtcgtggaatattaacaaattcctttacattcccctcttctattaatagaaaaatatttattacaacgatcgttactactctccaatgtattttaaatttacaaatgttaaaacacctataacctgttttcatatgtctttttat

SEQ ID NO: 8835 - DNA, 318 bp, Glycine max
  Clone ID: LIB3092-053-Q1-K1-G4
aattacttgtgagtgtttacccaacacaaactaagatcaacatggagtcgacacccgcgtttgagaagttgagagggaacctatcatggagtattccacaccacgaccaatgatgggcaactaccaccaccctaatgctcaccgtgtcctcaacgagaagattgtttatgaggaggatgtgattggaggatcccgccacaaccacatgcatcaccaccaccctgagactcatgagagagtcaaggtggtggagtatgaacaagttcctgagaggcgcgttgtctatgaagagaaagttccttataacaacgatctttt

SEQ ID NO: 8836 - DNA, 404 bp, Glycine max
  Clone ID: LIB3092-053-Q1-K1-G5
cccacgcgtccgcaaagtacttgtgagtgtatacccaacacaaactaagatcaacatggacgactacacccgcgtttgagaagttgagagggaacctatcatggagtattccacaccacgaccaatgatgggcaactaccaccaccctaatgctcaccgtgtcctcaacgagaagattgtttatgaggaggatgtgattggaggatcccgccacaaccacatgcatcaccaccaccctgagactcatgagagagtcaaggtggtggagtatgaacaagttcctgagaggcgcgttgtctatgaagagaaagttgcttatgacaacgatcgttactactctccaaggtattgaaattggacaaatggaagaacacctataacgtgttatcatgtggctttttatt

SEQ ID NO: 8837 - DNA, 429 bp, Glycine max
  Clone ID: LIB3092-053-Q1-K1-G7
acgaaaagaaacatttgcccatttattcagagtcaaaagaaaagagttactgaagaataaaatgcgtgcgagaaaagaggccttggcataagacttcttccagctactgaacaagattctgccacggcaaaatcggtgaaattttcagcaaagtttgacaaaaataggaaggacaagagggcattgatcagttctgaatctatcttctctggaggctctagctattctatgtctgacaagagaaaacgagagctagagtcaaaacgaagaaaaatttgtgcgacttcagcatccatccttctatctggtagggtaaagccatcatcatggtcacagccttcaagcaagcaaaagggaactgtaagatgttagaaagatgaaacatgtctgacattggttagcactggtcactggcgaccttgacaattg

SEQ ID NO: 8838 - DNA, 380 bp, Glycine max
  Clone ID: LIB3092-053-Q1-K1-H11
caaaaagctcaaccttcatttgctcaatatgatgctacgtttaatcagttaggtcagatgtgggaaactcaggcctgacttggctatatacctccttcaaccccgataatgggtccttttggcaccacaggattaaatcagacatctagtgagggtggttacctacagtggcctagtgctgcaatgatgtatgcacattcatacgaccaatttagacatgctgttttccaggctccatttggtcaacagccgttgagctttgactattcacagaactattagatgacatttaggggagaatattcaatttggatgcaaaagttatgttagcttttttaaaatttcatgttagggtcatttgtcagggctgtcagaaaccc

SEQ ID NO: 8839 - DNA, 400 bp, Glycine max
  Clone ID: LIB3092-053-Q1-K1-H2
cggagtcactgcagagctgcgcgttgatctataaaaatggcgaggataaaggtgtacgaggggaggaataaaacaaaggcggagctactgaaccagctcaaggatctcaaggcggagctagccctgctccgcgtcgccaaggttaccggcggcgccccaaacaagctctccaaaattaaggtggcgaggctatcgatagcgcacgttttgacggttatttcccaaaagcagaaagcggcgctgagagaggcttacaagaagaagaagtatttgccccttgacctccgtcccaagaagacccgcgccattcgcagacgccttaccaaacaccaggtgtctttgaagacggaacgtgagaagaaaaaggagctgtactttccactaagaaagtatgcgatca

SEQ ID NO: 8840 - DNA, 429 bp, Glycine max
  Clone ID: LIB3092-053-Q1-K1-H3
gtgaagttggaacgcattgtgctagatcaattggatcatccaggcattgtgcgggtgtatgtcacatttcaagactcattttctctatacatggctcttgaatcctgtgaaggtggagaactttttgatcaaataaccaggaaaggtcgtctatcagaggatgaggcacgattctatgcagctgaagttgttgatgctctcgaatacatacataatttgggagtcatacatcgtgatattaagccagagaacttattacttacagctgaaggacatattaaaatagccgattttgggagtgtgaagcctatgcaggatagccaaataactgtccttccaaatgcagcatcagatgacaaagcctgcacttttgtgggaacagctgcttatgttcctccagaggttcttaattcctctccagcaactttt

SEQ ID NO: 8841 - DNA, 274 bp, Glycine max
  unsure at all n locations
  Clone ID: LIB3092-053-Q1-K1-H4
tcacatatatctanacatcaacctcttttttctctctcaccacaaacaccctnagaggctagcacaaataataaagacgtcctccccatccttctttttaatatcacttaattccaacactttcacctcatactcaatcatcctcattttcaacacaaataacaaccctctctatactttttataaaatacttatattaaccatcattcataaacaccttcatcatcacacaccctactctacttaaatcttaaccaataccaacaccttattc

SEQ ID NO: 8842 - DNA, 176 bp, Glycine max
  Clone ID: LIB3092-053-Q1-K1-H5
cacgcttaagatcacccaacatagaacctaatacacacaacacaacacacacacaccgagggggaggagaaatcatcaaggcatcagctgcatccgggtttgtgttgtcacttaaaggtgcagctgccaccacatactcaacggtggtcatgttcaacatcaaaaacaacgctcct

SEQ ID NO: 8843 - DNA, 428 bp, Glycine max
  Clone ID: LIB3092-053-Q1-K1-H6
tgcacatatatcagtactcattctcttccctctcctctcactacttgtcatcaaaggctggaactcacatccactaccgtgcactgttattcataaaaaagattatatttacacaacaatatataatggccagatttctacacatgcttataatgctctctagccttgctctaattatctcagttttgccattggcctccgcatctttgaaggtggacttctataaaactacgtgcccatctgcagaggcaatagtgaaaagagccgtaaacaaagccgtttctctcaacccgggcatcgctgctggtttgataagaatgcattttcatgattgttttgtgaggggttgtgatggttctgtgctattagaatccacccaaggcaacccatcagagagagagcaccctgccaacaacccaagttacgtg

SEQ ID NO: 8844 - DNA, 381 bp, Glycine max
  Clone ID: LIB3092-053-Q1-K1-H7
gtgaagttggaacgcattgtgctagatcaattggatcatccaggcattgtccggttatatgtcacatttcaagactgagtttctctatacatggctcttgaatcctgtgaaggtggagaactttttgatcaaataaccaggaaaggtcgtctatcagaggatgaggcacgattctatgcagctgaagttgttgatgctctcgaatacatacataatttgggagtcatacatcgtgatattaagccagagaacttattacttacagctgaaggacatattaaaatatccgattttgggagtgtgaaacctatgcaggatagccaaataactgtccttccaaatgcagcatcagatgacaaagcctgcacttttgtgggaaca

SEQ ID NO: 8845 - DNA, 396 bp, Glycine max
  Clone ID: LIB3092-053-Q1-K1-H8
acggtgaggtttgaacgcattgtgctagatcaattggatcatccaggcattgtgcggttataggtcacatttcaagactcattttctctatacatggctcttgaatcctgtgaaggtggagaactttttgatcaaataaccacgaaaggtcgtctatcacaggatgaggcacgattctatgcaactgaagttgttgatgctctcgaatacatacataatttgggagtcatacatcgtgatattaagccagagaacttattacttacagctgaacgacatattaaaatatccgattttgggagtgtgaagcctatgcaggatagccaaataactgtccttccaaatgcagcatcatatgacaaagcctgcacttttgtgggaacagctgcttatgtt

SEQ ID NO: 8846 - DNA, 419 bp, Glycine max
  Clone ID: LIB3092-053-Q1-K1-F7
ctgcacgcgtggggttagagccataagagtgatcaactcatctcaagacatgtttgttgacgagtggggtgtacacaacaacatcactgctgttaaccaatttgaattgcactcaggatggacactatctatgttgcactcttttaatgaatctgaaagaatgcacctattattctttctgtgagtagaggcacttatggcattgtttagtgatattcttaagaatcctgtcgtcacagagattgcatagagattgtggaagacaccatcacaagctgcccttatatggggcttgcattcacgtcatattgtgctttctatgagcactattgagcccataatcaagggaatatttgatatctctgacttgcctagaaggaaaacattaatgatgtgtaccttgtttctgagttaatgga

SEQ ID NO: 8847 - DNA, 390 bp, Glycine max
  Clone ID: LIB3092-053-Q1-K1-H9
cccacgcgtccgcccacgcgtccggatgtttgcgaagaatgaaatgaggattctgatggtaggtgtctatgctggtggttagacaaccatcttgtacaagctcaagcttggagaaatcgtcaccactatccccaccatcagatttaatgttgagactgtggagtacaagaacatcagcttcactgagtaggatgttggtggtcaggacaagatccgtccactgtggaggcattatttccagaacactcagggtctcatttttgtggttgatatcaatgatagagatcgagtgggttaggcaagggatgagctgctcacaaaggttgaatgaggataaactttagagatgctgttttgcttgtttttgccaacaagcaagatctttctaat

SEQ ID NO: 8848 - DNA, 133 bp, Glycine max
  Clone ID: LIB3092-054-Q1-K1-A1
atgtgatggagccggaaggcgtgatcgatagatactggaatgagagtgatgacatcatctatgacatgaacctactacaactgcttctcagtggcatctacgcctatcgtttagacaagtcctatgacaaaca

SEQ ID NO: 8849 - DNA, 209 bp, Glycine max
  Clone ID: LIB3092-053-Q1-K1-D2
cccacgcgtacgcactcatcatggtttttgacttgaaacgggaagaagcgatgcaactcgcgtagagtcagtcatacatacattgtcaatgtctaaatgaaacgagggacttaatcatagaatctattacagccctatgtattgtaaaatatatcactaacaaaaggtcaagagctcttattataaatgttagcctgttgcggtaccat

SEQ ID NO: 8850 - DNA, 253 bp, Glycine max
  Clone ID: LIB3092-053-Q1-K1-D3
acgcccacgcgtacgcactcatcagggattttgacttgaaacgggaagaagcgatgcaacttgggtagagtcagtcatacatacattgtcaatgtctaaatgaaacgaaggacttaatcgtccgatctattacagcccctatgtattgctaaatctttcaactaccaaagtttaaaaacctttaataataaatttaaccctgttccggtcccttaaaaaaaaaaaaaaggggcgccccttctaaagaacccat

SEQ ID NO: 8851 - DNA, 439 bp, Glycine max
  Clone ID: LIB3092-053-Q1-K1-D4
ccaagaacaacatgaattttctaaccttcgttactgttctactcttcatactaccagcaagctcatcttcccagtatttggggaacaaccttctcactcatcgcaagatattcctaaaaaaagacaacattattacctcgtacgctgtcatctttgacggtggtagcacaggaacccgtgtgcatgtcttccattttgaccagaatttggatctccttcccattggtgatagtcttgagcttaataaaaagatcacacccggtttaagtgcttacgaggatgatcccgagcaagctgcagaatctctgattccacttttggaggaagcagaaagtgtagttcctgaggacttgcgtcccaacacacccgttaggctaggggcaactgcaggcttaaggcttttgaaagggaatgcttctgaacaaatattgcaagcggt

SEQ ID NO: 8852 - DNA, 370 bp, Glycine max
  unsure at all n locations
  Clone ID: LIB3092-053-Q1-K1-D5
gnttctggtgctaggtcctctaaaccatccagtgccatcctcgtcgctgcacctacacacgctctcgccgtcgccatgactgaacatatgacccttcgtggcaccctcaagggccacaactgctgtgtaacccagatcgctactaccccgcagctccctgacatgatcctctccgcctatcgagataagaccatcatcatgttgaaactgaccatggatgataccaactatcgaattccacaacgtgctctgcggggtcactcccactttgttagtgatgttggtatctcctcagatggccagctcgccctctcaggctcctgggatcgaaccctgctcctgtgggatctcacaactagcaccaccacta

SEQ ID NO: 8853 - DNA, 401 bp, Glycine max
  Clone ID: LIB3092-053-Q1-K1-D6
caaaaacttgttcttgtgcacggctgacgctgctgcaacctcctttggggaaccagggagggagaaacaaaagtttttgggtattgaagttgccaccttgaagaaaattgtgcctctggggatgatgttcttttgcatccttttcaactatacaatcttaagggacacaaaagatgtgttggttgtgaccgccacaggaagcagtgctgagattataccgtttctcaaaacctgggtgaaccttcccatggccattgggttcatgttattgtacacaaagttggctaatgtgttgtccaagcaggctctcttctactctattattcttcccttcattgccttctttggggcctttggttttgttttgtaccctctcagcaactatattcaccctgatgctt

SEQ ID NO: 8854 - DNA, 218 bp, Glycine max
  Clone ID: LIB3092-053-Q1-K1-D7
cccacacttgctctaaatcattgctatttctcatgaagcctgctttgaatatcctgagagggttgctccaaaatttttgggtattgaaattgccaccttgaaaaaaatggcgccccttctaatgaatccattcttacttctcttgcactcacaatcttaatggacacaaaagataccttaattgaaaccaccagccgaagctttacaaagattatacc

SEQ ID NO: 8855 - DNA, 338 bp, Glycine max
  Clone ID: LIB3092-053-Q1-K1-D9
ggcgcgtccgattaattgtaatactcattcaccaattgagtatataatttgattttattttttctaaaaaggaaggaaagaaaaaggtgctggagtggtaatgtacagtacgtgagggaacctaaatatccctagtttcgcttcccactgatataaagttgggccaaatgcaagtggggatcttagaggagaggtgcggagattgcttttgcaggtacgcccaagataataacggtgtcattcgatatgcaaaaccaaaggaggagtttcgaaggatcgattgggaaaaggtatcgggttagggtgaaacgaagtcaagatcattcagtgaagtgtgg

SEQ ID NO: 8856 - DNA, 435 bp, Glycine max
  Clone ID: LIB3092-053-Q1-K1-E11
gcacattcttcatcacttcattcaacatttctctctcccttagctagtttttaccaatggctgctgcggttagtgctgcagtctcttttccatccaccaagtctacctctctcccaagcaggacctccatcattaccccagagagagttgtattcaagaaggcttcattgcaatacagagatgtttgtagcagtggaagggtagtttccatcagagctcaagtcaccactgaggctccagccaaggttgaaaaagagtccaagaaacaggatgaaggtgtggttgtgaacaagttcaaacccaagaccccttacagtggtagatgcctgctcaacacaaagatcactggggatgaagctccaagagaaacttggcacatggtcttcagcaccgagggagagaatccttacagagaaagacaatcaattgggggaa

SEQ ID NO: 8857 - DNA, 292 bp, Glycine max
  Clone ID: LIB3092-053-Q1-K1-E3
gggggggaccgaagcgtacgcccactcgtccattccctaaccccttccccctaccacctccactccttcaaattccggcccgattaacaatccatcgtgtcacactaaattacactcctctacattacctacattataacctactcctacaccaacatcttaatcgtcaataccacttctgccttgctctacttctcgtacgatctcatcaagaaccctcccgtaatcatgaccataatcaaacattcatttatccccaacaacaaaacataactcggccggcagctcttct

SEQ ID NO: 8858 - DNA, 363 bp, Glycine max
  Clone ID: LIB3092-053-Q1-K1-E4
attcccttcacccacctacctaacttcccattttcaatcatttctataccactatctcttacctttagaaagttaacaaaaatttttttcaccaaattaacccattttctttccttattatttcatatttttaccaaaatcttccttaaaaaatcacctctaattttttaaaattttccatctatctaatcttatatccatacaccaatcaatatctatactctatatttatatatccccaaaaacaaaaaaaaaaattttcttcctctctttaacatcaaaacttacctacacctccattccaacttcttacctcttcctatattttcacctaaattcaattaactttaccacctttttaca

SEQ ID NO: 8859 - DNA, 121 bp, Glycine max
  Clone ID: LIB3092-053-Q1-K1-E7
gccccaactaccttgcgaccccacagcgaccctctttcagtgctatcaggcctcgatgcccgtcagacccacacgtactatcatttttaaatgggctcttgattaatcaacccatattttc

SEQ ID NO: 8860 - DNA, 262 bp, Glycine max
  Clone ID: LIB3092-053-Q1-K1-E8
acaacttcctcattttataattcatttccaataccaccttctctacttacctttcgatatgattcaacaatactgtttcttcacctaatcaacctcactctatttccatttttatttcatatttctgatccaaaatcttcctcaacaatatcacctctactcttcttaaactatccattaatctaatcaaaatccataccaaaatcatcttctatcccatccatatacttatacccaaatacaataaaccaaaattactttc

SEQ ID NO: 8861 - DNA, 210 bp, Glycine max
  Clone ID: LIB3092-053-Q1-K1-E9
aggcttatgtggatacctatgcaccgatagactatgaatgtcttaataagcgacgaagggcttctgtgggggggatatttatcttagatcctttgtttccctatattagtcaaccaatcaaactgctgcttaatccacgggcaggcaatgagacaaccttgggaactgtaacatcttagaagccagaggaaatgaaagctaaatcttttc

SEQ ID NO: 8862 - DNA, 431 bp, Glycine max
  Clone ID: LIB3092-053-Q1-K1-F2
aaatcaacaccaacaacacctgatgatgaagttccaacaaggttctggtgatgaaaacaacgatggtggatcaatggtggattacatgcctcaaacaacaacaacactacccccacatggtttttatggtactgctaccagtgctgccacaacatcctatgacaaactcagttttgcagatgtgatgcagtttgcagattttggaccgaagttggctttgaaccaagcaaaaagctgtgaagaatctgcaatagacccggtttattttcttaagtttcccgtgttgaacgacaagatggaggaggatcatcagcagaacatgatggtgaataatgatgaccctgatggtgatgaagcagaaaatcatcatcatcttgatgagaggttcaatttggtgagtgtggaaggcaaagatcaaggaatgatgatga

SEQ ID NO: 8863 - DNA, 418 bp, Glycine max
  Clone ID: LIB3092-053-Q1-K1-F4
agaacaaacaagtcctcttacatgcaacaccaacaccaacaacatcactaacgcaatttcagttgagtatattttgactcccacgcgcgcttacttccttccttcccctatccctgttccgtttcggcgcgtgccatgggcgcgtcgctgtcttcgaacggttccagtatcggcccgggcctcggggacataccggagagctgcgtggcgtgcgtgttcctccacctgacaccgccggagatctgcaacctcgcccgcctcaaccgcgcgttccgcggcgccgcatcgtcggactccgtctgggaggccaagctgccgcgcaactaccaggatctgctcgatctcgttccgccggagcgccaccgcagcctctcgaaaaaggacatcttcgcgctcctcttccgacccctacccttcg

SEQ ID NO: 8864 - DNA, 401 bp, Glycine max
  Clone ID: LIB3092-053-Q1-K1-F5
cttgtcttccgtctaaagtatccacgcatcctctctcacacttacggaagattggctaggggatggttcacactaaaatcgatgtaattgcccatgtctaacatcgtaaatactctaccactggtgacctgacccacattattggacgcattgaccatcctgttattgacaggtttgataataaagctgatgacatgaacaataggtctttcaaacatccctgcatgctgaacagactatgggccgcgcgctatagaggaacctccaccgctgttgctttgtggatttctgacacaacaaacgcttatctcacaagtatcgatgcgcctgcacatatggatttcattcataatatgattactacgacatcccaatctgactgtgactgtcttatcattgat

SEQ ID NO: 8865 - DNA, 388 bp, Glycine max
  unsure at all n locations
  Clone ID: LIB3092-053-Q1-K1-A4
catcccaacccttggtgaatttctgagcagtgagcagcatgttgtcattgttccgtaacttgttcctcttgctatcactgttaattggtctatgcaattgcagggtgcaaaccctaaacactaacccaactcacttcaacccacaggtcccacccctccgaaccctctcgtcctcgaagcgcttcgaggggtcctcggagttcgtcaagctgaaataccacatggggccggtgctttcatctccgatcaatatctacctcatctggtacggcaagtggccccaatcccagaagctcctcatcaaggacttcctcaactcaatctccgaccaccgcgccgnccnctcccccttcgtctccgactggtggcgcaccgtctccctctacac

SEQ ID NO: 8866 - DNA, 301 bp, Glycine max
  unsure at all n locations
  Clone ID: LIB3092-053-Q1-K1-A7
gacgtacgcttatctaccatcaaattatttaccattaactaaacactccttcttgataaaaaccaatgggcatagccaccttactggctgggaaccattatccacttcttcccaanccactcttacccatatcgtgaagcaacataaccattgacattctatcgaatttataacctctcacttccgacactctcataaagaaaacactcttatagtttacatcctatattaaaacttgctctagattatactaggattcttttcacaccacaccatcacttgcatttactcttttcataca

SEQ ID NO: 8867 - DNA, 203 bp, Glycine max
  Clone ID: LIB3092-053-Q1-K1-A9
ctatttgcatgcgggacccgcttaacaagagtgttaatttgcaggagttaacagctgatgcatgaaattgtgaaacatgttaattgctaaaggaagattgtttctgggaaaacaatagttgttaaaaaaaaaatcgtgctagcaacaaatattgctgagagtagcatcaccataaatgacgttgtgtatgtcataaactgggg

SEQ ID NO: 8868 - DNA, 438 bp, Glycine max
  Clone ID: LIB3092-053-Q1-K1-B1
gcaacgcttcgagtccagcgaggaagtacgttgtggatattcgatagaaacaaatgagaggcggcgccttccaaacagctaacatttatcgccttcttctcaaggcagtcaacaaacatattgggaaggaagagaacaagagacattttatagaatttgtaacctcagagttccgtaacaaccgaaatttgtctgactgtgtggctatccaacagaaaataaagcttgctcgtgattatacttttcttcttaacagtgtacaccatcacaaggatttacttttttcatacaatattgccgtggataggtcagatgacacaaaaaggactcttggaaaatctgcttctagtgttggtcttcagcttcccgaggtttatcagccataatgattggtagtgttcatttttgcatgcatggaacatgcctttgtactacact

SEQ ID NO: 8869 - DNA, 293 bp, Glycine max
  Clone ID: LIB3092-053-Q1-K1-B11
gcgtacgcccacgcgttcgcaaacctcttctttcaggtccaattcactcgcttattcttttctttcagggacatgcagggagtaagttcgaataagttcaagactggcatggacttttttcaccgcgcgaaggcggtgcgcctccgcagccaccacgacaagtacctcctctcggaggacgacgaggattcggtgacgcatgaccgcaaaggctcctcgtaaagcgcgcggtggacggagaaatacgtggctgaatacgaaaacataattcgcctgaagagctgttacgggaa

SEQ ID NO: 8870 - DNA, 380 bp, Glycine max
  unsure at all n locations
  Clone ID: LIB3092-053-Q1-K1-B2
ccaccagactacaaacaaaatgaaccttgttattaatgatagggatgaactcattcaaacttaggatgaacagatacacaaaatacaattaanttccagggatcacttccaaaggatttttactgaccatgaaaagctcaaattgcaactggaatctcacaaaaatgagcttgagttgccgaaagttgaattgtaaaaacgcgaagcacataacgaaagtgaaaagaaaaagttggcagaggaaattgaggagaatgcatcgaaaaatagctctcttcagatggctgctttagagcaaatgaaagctgatgaaaatgttatgaaactggctgaagatcaaaagacgcaaaaagaacaactccatgctaaaatcattcaac

SEQ ID NO: 8871 - DNA, 408 bp, Glycine max
  Clone ID: LIB3092-053-Q1-K1-B5
ctataacttgccactatactttctgccactttgtggctcttgatattttcaaacgagaaggggaccctaaagtgggtggattttcatttgcactatttctacacgagatgattgcatgctgccctcctttattacgcaaaacatgacaatgaagttcctacctgatatgctgcaacagaccatacacctttcacagctccagcctaccattactcctatagaattcgagaatttattcaagagtgctggactgaaaacacaaccaaaaggccaacatttatgcatacaataacaacgctggagtccatctacaacacaattagtcacaaaagacatttgaaggttaggccattgaaatgctttcaaaatctggaggccttatttgatagagatcattcaaatggaaat

SEQ ID NO: 8872 - DNA, 317 bp, Glycine max
  Clone ID: LIB3092-053-Q1-K1-B7
tcctactatttctctctccttctcctccttcttacctgcaagtttttcacaaaccttggtcccacactaccaaccttttcaataaaaaaataattctcactactgttcccactacctcttccccgacaagaacttctcctatctctatcaattccaattcctccccctccaaagcttccacaaaaactccaatctcattcttctcatcttattcaaattctttcactcaacccctcttaattcctaacctcttaaacaatatttattccacaaaattttcattcatctaccacattttccattacttattttttaca

SEQ ID NO: 8873 - DNA, 160 bp, Glycine max
  Clone ID: LIB3092-053-Q1-K1-C1
cacaaccaaccttatcaataataatataattttcactactgttcccagtacctcttccccgacaagaacttcttctatctctatcaatttcaattcctccacctccaaagctcccacaaaaactccaatcgcattctccccatcttctgcaaatactttc

SEQ ID NO: 8874 - DNA, 396 bp, Glycine max
  Clone ID: LIB3092-053-Q1-K1-C2
aattggaatttcggagccggccgacccgtcacgcagtcccatactttattcctttgtcctccctaccgtaaccatgtctcagactgttggggggggacattgatatgtcatgtgacacatatgccttatcagtgctgagagctctagtaaaattgtatggaggggaatcatataacattgatttcaacgaacaaaaagtgttagttaaaggaaatgtccagccagacacatttctgcagaccgtttgcaaaactgtgaacatgactacctcctgtgaacgtgacccaggatcatctgaaactatcacagcaactgcctataacatttgcctctattctgtgcagaacacgttactgcgtgaatcaaatactatttgatggtcttgaaataatgatg

SEQ ID NO: 8875 - DNA, 178 bp, Glycine max
  Clone ID: LIB3092-053-Q1-K1-C3
aaaatggataaagattgcttttgattccagttgtttaattgtcaactgtttaagaagagcgatgttgcaaagtagagactactgtgtggtgttgttgatttattagtagagtataaaattaaggatgttttgtcaatgtgtgatgctacatattttctactttgatagtttcctgttc

SEQ ID NO: 8876 - DNA, 335 bp, Glycine max
  Clone ID: LIB3092-053-Q1-K1-C4
ctctatgctgtgtacgtgtaccaccagatagcatggatgagttaacaagacatgatgaagggccgggattgcctcctgaaggtcgatatccactgcgatggccgggaacagaaagtctagaaaatcctgcagaaaattgatggggtgtattctgtgaacataggatcctaacgatggactgtgatctgcgtaggacatgtctattcagctgaaccgatctaaaaactctacaagtgatggtagcatgcctgactttgaggtggccactgaggcttgatatacaaccaatactaccgcacctaccctcagttcgagaacttgcacatagatcacac

SEQ ID NO: 8877 - DNA, 427 bp, Glycine max
  Clone ID: LIB3092-053-Q1-K1-C5
ctgcgaaggcaggatcaatcctaggattcctcggacccagtcctgccgtcagacctcggcggcgatgcacgaaccttgcttccacacgagcaacagcctcatatacaaaagcattggcgcgactgttcccagcacctgtccgccgacgaggacttctgcgatctcgatcagtcgcaattcctccgcctccaatgctgcgacaaaaactccaatcgcattctgcgcatcagatgcacgtactttcccgcatccgttgtgagtgcagagcggctgaagaggtatgtgttccacaaaatctgcagagagctgccagaggggccattctgtattgggcacatgcacagcaccgttcagaaagaggacaattcccctggcatcaccatcttgagctggatctatgaagaactttctgctgatttcaaggaca

SEQ ID NO: 8878 - DNA, 433 bp, Glycine max
  Clone ID: LIB3092-053-Q1-K1-C6
cagacaagaacttaagtctgtagccatggcaatagtaatcaaagtggcggctctctgtgggtcccttagaaaagcttcataccactcaagccttatccgagctggttccatctctctcaattatcttcatgttttgtttttaatttttgtttcatctttgatatatgcttaattgcaaattattgtggtgttgttgactttggtgagtgttggtgatgatgatgatcatggttgcagcaattgaactgagcaaaggggaaattgaaggaattgaaattgagttcattgaaatttcggagcttcccatgttgaacactgatcttgagatcaatgggacctacccaccaatagttgaagcttttcgtcaaaagattcttcaagctgatagtattctctttgcttctcctgaatataattactctgtcacagctct

SEQ ID NO: 8879 - DNA, 430 bp, Glycine max
  Clone ID: LIB3092-053-Q1-K1-A3
ctgacgcgtgggcgaaaagtggaatatgaattgggctttggaggaggagtggatgagaaagatgatgtgattgtagggggaggagggcacccctggtgccaagccgctcttgcctctgcacgtttgggagcaaggactcttcttcttactctcaacattgaccgaattgcgtggcagccttgcaatccagctgttggtgggcccgcaaagtcccaacttgttcatgaagtggatgcacttggtggtcaaatacggaagattgctgatagatgttacttacagaagcgtgtactcaatgtctcaagaggtcctgcagttcgtgcattacgtgctcagaccgataaaagggactatgccattcaaatgaaaagtgtagtagaaagcactccaaacctttctattcgaaaggctatggtcacagatattttac

SEQ ID NO: 8880 - DNA, 178 bp, Glycine max
  Clone ID: LIB3092-053-Q1-K1-C7
aaaatggataaagattgcttttgattccagttgtttaattgtcaactgtttaagagtagcgatgttgcaaagtagagactactgtgtggtgttgttgatttattagtagagtataaaattaaggatgttttgtcaatgtgtgatgctacatattttctactttgatagtttcctgttc

SEQ ID NO: 8881 - DNA, 399 bp, Glycine max
  Clone ID: LIB3092-053-Q1-K1-C8
caaacaaaaacttatttcttttgccttcactttattaatcaaaaactgggatatatgtgcgtcccttcaaaaagctgactaccactcatgccttatcctatctgattacatctctatcaattatcttcatgtttagtttttaatttctacatacatctttaatatatgcttaatctgcaaattattgtagagttgttgacttcgctgactctttataataaccatgatcatgactgcagcaatcgaactcatcaatttggtatttgaacgaattgaaattgatttcatccaaatttcccaactttccatgatgaacactaatcttgatatcaatggtacctaccctccaatcatttgttcttttcttcaaaagattcttcaagctgatagcattctctt

SEQ ID NO: 8882 - DNA, 349 bp, Glycine max
  Clone ID: LIB3092-053-Q1-K1-C9
cccacgcgtccgcccacgcgtccgcattaacgggtggtgcctctcttccatctccccagcggtaacctctcggaagaaggccacattaggcccttctttcttcgcaaccgttagcactccttcttctccttcttcttcttcttcttcttccttcccttctctcattcaatacaggcctgtctttgctgcccctgcccctatcatcaccccaactgtgagagaggatatggcaaaggaatacgagcaagctattgaagaacttctgaatttgttgagggagatgagtgaactcaaagccacatcttcttagatagtggatcagataacagcttttttgggaacatcatca

SEQ ID NO: 8883 - DNA, 147 bp, Glycine max
  unsure at all n locations
  Clone ID: LIB3092-051-Q1-K1-G11
caaattgaaagattatagatctaactagtcagaacagtctctganaaccaggctgggctttattggctgacgtcccaactaaacacatattcatanattttattcaattctatatttctttttttcttctcttcttctaatattaat

SEQ ID NO: 8884 - DNA, 337 bp, Glycine max
  Clone ID: LIB3092-051-Q1-K1-H10
gacccagacagcaaagttgcctgctttacatgcaccaaaaccaactttggcttagcttttttaaataacgaccaaggccaacgtttactactataatataattctttacaacttcatgaacattatctttctcttaaatgatttgttacttgattcccacaacttcaaagtccttcataacatttatcatcataacccttatattgctcaggtttacactttcaccttaccaaaaaacctgaataaatttgttcttgttaccaaattcacatttttttctattccacttattaaaccccttaatttataccatttaaccattttttttcaacaaaat

SEQ ID NO: 8885 - DNA, 268 bp, Glycine max
  Clone ID: LIB3092-051-Q1-K1-H12
atcccataccaacttttcatagcttctttaaatcacgaccaacccaacatttactactataacatatttcataacaccttcattaacattcacttcttctcaaatcattttatactttatccctacaacttcaaattcctcttcaacattcatcatcaaatccctaatattcctcatattttacacttccaccttaccaaaaaacctcattaaattattcctattaaccatattcacatttttcccttttccactaattaaacccctt

SEQ ID NO: 8886 - DNA, 446 bp, Glycine max
  Clone ID: LIB3092-051-Q1-K1-H9
gcctcgagcaggacccagacagcaaagttgcctgcgaaacatgcaccaaaaccaacttggtgatgggcttcggagaaatcacgaccaaggccaacgttgactacgagaagatagtgcgtgacacctgcaggaacatcggcttcgtctcaaatgatgtgggactggatgccgacaactgcaaggtcctcgtcaacattgagcagcagagccctgatattgctcagggtgtacacggccaccttaccaaaaaacctgaagaaattggtgctggtgaccagggtcacatgtttggctatgccactgatgaaacccctgaattgatgccattgagccatgttcttgcaacaaaactcggtgctcgtctcaccgaggttcgcaagaacggtacctgcccttggctgaggcctgatgggaagacccaagtgaccgttgagtattacaatgac

SEQ ID NO: 8887 - DNA, 395 bp, Glycine max
  Clone ID: LIB3092-052-Q1-K1-A11
cccacgcgtccggaaatttctaaactgcttgacaaacttaaaggaaataacttagttggagaccctagcaagttcttaatccttcctttacatggctcaatgcctactgtcaaccaatgtgaaatatttgaacgtcctccccctaacaagagtgttaatttgcaggagttaacagctgatgcatgaaattgtgaaacatgttaattgctagaggaagattgtttctgggaaaacaatagttgttagaagaaaaatcgtgctagcaacaaatattgctgagagtagcatcaccatagatgacgttgtgtatgtcatagactggggaaaagcaaaggagaccagctatgatgctctaaataagcttgcttgctttgtgccatcatggatttcaaagg

SEQ ID NO: 8888 - DNA, 263 bp, Glycine max
  Clone ID: LIB3092-052-Q1-K1-A9
gcaccagcaatgagtcctctaaacttgatcgcaaaaccattgaaaggaaccgcagaactcagatgaaatccgtgtgccatcagctttcttctcttattcctcccaatctcaaaccagtcaaacccaagttgatgctagggctgcaggaccagctggatcttgcagcaaggtgtataagacaaatgacagagagagtagagaaactgaagaggcagaaggagcaagccatgtcaaaccaaagcaatgatggtagaaaaatgttc

SEQ ID NO: 8889 - DNA, 440 bp, Glycine max
  Clone ID: LIB3092-052-Q1-K1-B11
ctgtgttccgtttcgcgaacaattactagagtattatggaaataacaaaggcatattggacggggaagaaaatcttttaacttgcttagcggacttattttcacagataagttcccagaagaaaaaaactggtgtcattgctcccaaacgatttgtacagaggttgaaaaaacagaatgaactcttccgtagctatatgcaccaggatgcccatgagttcttgaactttttgctgaatgaacttgttgacattctggagaaagaggctcaggctgcaaaaactgatcaggagacatctccaccttctgaaaaggctgttaatgggcccaagaatggtcaagctaatggtgttcacaaagagcctttagttacttgggtacacaaaaattttcagggaatactcaccaatgagacaaggtgcttgcaatgtgaaacagtga

SEQ ID NO: 8890 - DNA, 394 bp, Glycine max
  Clone ID: LIB3092-052-Q1-K1-C11
cccacgcgtccgcataggacaggcccaaaaccaaaaaaaagcctcgtctctcgtgccgattgtccaggacaattcccttcacccaacctaattgcaattagtgtagaagatgagtacgttggatgcaacaagggctgaacttggtcttcttgttttatatttgggcaaggctgaagcaagggacaaaatatgcagggcaatacaatatggttccaaatttttgagtaacggggaacctggtactgctcagaatgtcgacaaaacaaccagcttggcacgaaaagtcttccgtctttttaagtttgtcaatgacctacatgctttgataagtccaacaccacagggcactcccctccccctaattcttgtgggaaagtccaagaatgcactactc

SEQ ID NO: 8891 - DNA, 412 bp, Glycine max
  unsure at all n locations
  Clone ID: LIB3092-052-Q1-K1-D11
aaaantatgtacacataaatctagctccaattcctaatcacctggttaatttcttcacatagagctatcaagatccaacgttaacatgaagaatgttttagtaaggtcagctgcgcgagctctgcttggcggcggtgggcggagctactaccgccagctctcaacggcggcgatcgtggaacagagacaccagcacggtggcggcgcgtttggaagcttccacttgcggaggatgtccactcttccagaggtaaaggatcagcactcagaggagaaaaagaacgaggtcaacgacaccagtaacgccgtcgttacgagttactggggaatcacaaggcccaaggttcgtagggaggacgggacagagtggccgtggaactgcttcatgccatgggatagttaccactctgat

SEQ ID NO: 8892 - DNA, 441 bp, Glycine max
  unsure at all n locations
  Clone ID: LIB3092-052-Q1-K1-D9
cccacgcgtccgaatttcgcctctttctttctcaactcccttagattctctccatcgggtgtgtcaaaaatgcggatgagctgcaatggatgtcgagttctcagaaaaggttgcagtgaaaattgcagcatcagaccctgtttacaatggatcaaaagcccagaatctcaagccaatgctactgtgtttcttgccaagttctacggccgtgctggtctaatgaacctggttaacgcaggccccgaacatcttcgtccagcgatctttcgttcgttgttgtacgaggcatgcggtcggatattgaacccgatttacgggtctgtcgggttgttatggtccgggagctggcagctatgtcaagccgccgtggaaaacgtcttgaaaggcgcaccgattacgccgatcacgtncgaagccgcggctagcgggcggggcccaccg

SEQ ID NO: 8893 - DNA, 208 bp, Glycine max
  Clone ID: LIB3092-052-Q1-K1-E10
tgaaaaggttcaaggagctgtttttgatcttcctgaggagatcgcttaagaattacttaagagggacataccacctggaaacaccgtttacaagatcaccaagctaccttctttgcatgatgatgggcctccaagtgtattctatgggagagtctctaactgagatagaagttaccgtagaggttctacctctaggggaggttttagt

SEQ ID NO: 8894 - DNA, 385 bp, Glycine max
  unsure at all n locations
  Clone ID: LIB3092-052-Q1-K1-E9
cccacgcgtccgcggacgcgtgggctcccatctcacacacccctcgcatgcaacaatgtctggcaccattcccttcaacctctccaagcccgccgccctccgccccaaactaagcccaaagctaaagtccgccgccacaaccaccatcgtctgcagcaccaccaacaacaacaacaacaacaacgtgtcctccgacctgaaggcgttctccgccgcgctggccctctcctacatactnctctccagccctcttcccggcggcgccgacatctcggggctcaccccatgcaaggagtcgaagcagttcgcgaagcgtgagaagcagtcgataaagaagctggagtcgtcgctgaagctctacgaggcgggcagcgcccccgcactg

SEQ ID NO: 8895 - DNA, 377 bp, Glycine max
  Clone ID: LIB3092-052-Q1-K1-F11
cactcactcattgaggctcacacataatggatgaagcctggttcataatcctagtctctcggtgtgtctgcgttctcataagagtcatattattattcttccttcacaaaaaaaccctagccaccccaccaggccctcctcacatcccaatcatcacaagctttctatggctcaaaaaatccttcatagaactcgagccattcctccgaaccctcgccgccaaacacgggcctatcttcactctccgcataggatcacgccccgtcatattcatcgccaacagagccctggcccaccaagccctaattccaaaacggttccattttcttccgatcgccccaaagccctccccggcggcaaaaatctcagcagcaacc

SEQ ID NO: 8896 - DNA, 419 bp, Glycine max
  Clone ID: LIB3092-052-Q1-K1-G11
gcttcggagacgactgcagtttcgagaacggcgttgagtactacaatctgttcctcgaatacgccgccggcgggagccttgccgatgaattgaagaatcacgatggccagatttccgagcatgaggctcgggaatacacgagggccatcgtggagggtctgagccacgtgcacaaaagcgggtttgttcactgcgacataaagctgcagaacatcctcgtattcggggacggaggtatcaaaattgcggatttcgggcttgcgagggaggcagggcagaaacaggagaagagtgaatgcagggggactccgatgtttatgtcgccggagcaagcgaccggcggcgagtgcgaatcgccggccgatatatgggctttgggatgtacaattgtgggagatggtgaccggggaaaccgcgtg

SEQ ID NO: 8897 - DNA, 427 bp, Glycine max
  Clone ID: LIB3092-052-Q1-K1-G9
cccacgcgtccgctgcatcaaaaaattcttaaggatggccacagcagaagaaatttcaactgggaaactgttgcgccaatatctcttgggggatatttcagacccttttctcaccaatctcattccagtaaaactcgaagaccgctcatcagaacttgatatgggttcaaacttctcagaacatagcagcttctgcaagttgctagaatgcattgattttgaagcagacacagaagtggtaggtctcacgtctcatcataaggtcgaaaactccattgaaacaagtcttccacataattccaatttgccagaagaaccaatggtgtcaacgaaaaaggaagcaacatgttatgcaacaaggcgttacagatgtgtgaggagaaagccatgggggaaagttgcggcagagattcgcgaccccaaaaag

SEQ ID NO: 8898 - DNA, 448 bp, Glycine max
  Clone ID: LIB3092-051-Q1-K1-G10
atggcttcagccaaattgaaagatgagaaagctaagcagtcagaagagtctctgagaaccggcatgtacttgaggggctggggtcccaactaaacacagatgcatggattttatgcaattctggatttctttttttcttctcttcttggaatatgaattgcaggaagatgagaaatggaagactcaaaagatgcaccaatcagagaagattctcaagtaacatgttacatggatgctaatatgctatgcttgaacacctgttgatcagaccgaatcagaagctgaactgagaatatatagtctgaagcatgtcttctgctgctggggagagacgtatggattggatttggaagagtgcgccagtaccaattcatggcaatcgccttaatttgatcgataatcatctttggaatgatgaaatttgagacagcaattgctacatatgtat

SEQ ID NO: 8899 - DNA, 346 bp, Glycine max
  unsure at all n locations
  Clone ID: LIB3092-052-Q1-K1-H9
cccacgcgtccggggaagattgccctccaaatggatgttattcagatgggaatagtcttcaggcagttttgggaatattatggcgcanattagtcaggatgactgccaacactatgcacacgtgatcttgttgcctctatataaagtttgtgaaggatttgcgggaaaagttgttactgataatgtcaagaagttggcagaagacacctgtaaaaaactagagaatattttgggtactcagaactttgtgcaagtttacaaccttatcaggaagaaccttaaattgaaaagaaataagaggagacaagaagaaaagctcatgggcgttatcaatccgatgcgaaat

SEQ ID NO: 8900 - DNA, 345 bp, Glycine max
  unsure at all n locations
  Clone ID: LIB3092-053-Q1-K1-A2
aaattttnaactcattgttctatatcaattcgatcatccaggcattttccccttatatagcacatttcaaaactcgaggttctctatacattccctcttaatcctcttaatatgtacaacttttttatcaaataaccaataaagctcgcctatcaaaagatgattcactattctattcatcttaaatttttgattctctctaatacttacataatttcgtattcattacatcatgattttaatcccataaaacttattacttacacctaaacgacatactaaaataccctatttttctaccgttatacctatccatcatttccaaaatacctttcccttcaaatt

SEQ ID NO: 8901 - DNA, 426 bp, Glycine max
  Clone ID: LIB3092-050-Q1-K1-H9
cggacgcgtgggcggacacatgggctcttatttccatcttagattccaatcctttctggcttcaaattctagggtatttaccctttgttggtccgcgaagtttcttgttccctcatctttctctttcttcgattcacacacaatgggtctctgggattccttcctcaattggctccgcagcttgttttttaaacaggagatggaactttcacttgttggccttcagaatgctggcaagacttctcttgtcaatgcaattgctactgggggctacagtgaggacatgattccaactgttggcttcaacatgagaaaagtgactaagggaaatgtcacaataaagctttgggaccttggtggacagacgaggtttcggtcaatgtgggagcgatacctgcccggtgtctctgctattgtatatgatgt

SEQ ID NO: 8902 - DNA, 205 bp, Glycine max
  Clone ID: LIB3092-051-Q1-K1-A12
atccccatcactgaacaatatataaaataattcataacttcactccacaaacaaaatacacaactattttttttcactatacttaaaaaacttttacctcttattacatttttttctaatattattcatcatactttttctcaattattacaaataacacttttcatcacttcctactataaatctatctctccaaatatcatta

SEQ ID NO: 8903 - DNA, 253 bp, Glycine max
  unsure at all n locations
  Clone ID: LIB3092-051-Q1-K1-A9
gcgctaggtgttacctgggatgtggacttgtacggngaattgctgaaaattggaggcggaaaagaaagggtgacagcatactttaacaaggtgggttggcctgcgaatgccccaacaggtgaacaagaaagaaaagaattcatagcttcactccacaaacaaaagacagaactatttatggcccttatagagaaaaaactgttgcctcttcgtacaggtgttgcaaagattatcgatcaggcttttgctcaag

SEQ ID NO: 8904 - DNA, 287 bp, Glycine max
  Clone ID: LIB3092-051-Q1-K1-B10
acggcaggtgtcccatttttctcaatctcatgttctgagtttgtagagatgtttgttggtgttagtgcttctcgaatccgggatttattcatgaaggccaaagagaatgccccatgcattgtttttgttgatgaaattgatgctgttggaatgcaaagaggtactggaattggtggagggaatgatgaaagagaacagaccctcaatcaacttttgacagaaatggatggatttgaaggtaataccggtatcattgtcattgcagctactaacaaggtttacattct

SEQ ID NO: 8905 - DNA, 451 bp, Glycine max
  unsure at all n locations
  Clone ID: LIB3092-051-Q1-K1-B11
acgcccacgcgtccggttggttgtctccataggagggcttgtggtcaatgtcattggcttgatgttcggtcatgaggagcatcatcatgctcatggccatgtattatctggatcatcatgctcccattcgcacacacacacggagtcgcatagtcaccacacccaccatcatcatgatcatgatcatgatcatgatcatctgcatagccatggtcacgaaacaacaatccatggaagcaatcaagaatatatatcagtttcaagtgattgccgagacgattcatgccctggtgatcatggccatcatcataatcataaccactgtagtcatgagaggaagcatcatggtgagtgtcatgatcatgaagacaaacacagcattccgagctttaagcatcatgatgctngccgccactgccatgaccatggtgaacatcatgatcaaactggg

SEQ ID NO: 8906 - DNA, 207 bp, Glycine max
  Clone ID: LIB3092-051-Q1-K1-B12
ctttcccattttttctaatcttaagtttttaatttttaaaaatattttcttgttttggcgcttttttaatcccggatttattcattaaagccaaacataattccccattcattttttttgtttattaaatttattcttatttaaagcaaatatattctttaatttttttaaataatgattaaaaaaaacaaacccttaattcacttt

SEQ ID NO: 8907 - DNA, 312 bp, Glycine max
  Clone ID: LIB3092-051-Q1-K1-C10
ccatttttctcaattcttaacttttcagtttatagacatatttatttggataaggtcttctctaaaccgggatttattcattaattccaaacacaataccccattcattctttttattcatcaaattcatactattatatatcaaatatatacattaatttttttattcaattatcaaatataacataccctcaatcaactttttacataaatttatctattctatttctaataccactatcattatcattactactactaacatctttaacattcttcattctccattatttactccattactattttata

SEQ ID NO: 8908 - DNA, 172 bp, Glycine max
  Clone ID: LIB3092-051-Q1-K1-C11
acgaaacaatctccttggttttcctgatgattgatctaaagcctttttctcccctctatctctagggtgaaaagtctttgtgagggatgataatcattttatgtaatatttggatcccctaaatattcagtcttaaatgttgaattgaatatcatgtcgatgcaagcaatat

SEQ ID NO: 8909 - DNA, 174 bp, Glycine max
  Clone ID: LIB3092-051-Q1-K1-C9
atcatcatactcattaccatctattatcattatcatcattctcccattcacacacacacacctaatctcatatactccacacccaccatcttcattatcataatcatcatcatcatcatttacataaccatactcactaaacatcatttcattcaaataatctttattatatat

SEQ ID NO: 8910 - DNA, 443 bp, Glycine max
  Clone ID: LIB3092-051-Q1-K1-D10
tttgcttcgacagcttccaggatcaatgattgtcaccacaaatcaacatgagatttcctagcgtgttttgtcctcattcacatgttttccaggaaacttcccagaaagtcatgcatcacataattgctctaagtcaaacacgcttgattgtggagctcttaaatgataggctaccgaaaaatagatgcatcttgtgggtataggtagatactaattaattcttttaagtcatcctcaatcgtacagttctacatctgcacaatctttggatccctctcattccgatgtgattcgcctggagtattatatgcccaccagctttcatggtgttgtggcataataaacacaaaacttgggaagttagtgtgagttaccctaagttgtgtccgttttaactcttaaggtatcaaaaaggattcctcacaaagtgaacttgggagtat

SEQ ID NO: 8911 - DNA, 429 bp, Glycine max
  Clone ID: LIB3092-051-Q1-K1-D11
gttataagccgcatggtgttggaaaaaaagtaccttgaggaatccgaaaacgccgtcgttgcgcccgatgatttcaagaagatgcttgatgagttgtttttgcttaatggggtgtataacatcggggactttattccttggatggatttcttggacctgcagggttacataaagaggatgaaggctttgagcaagaagtttgatatgttcatggagcacgtcttggatgaacatattgagaggaagaaaggggttgaggattacgtggcgaaggacatggttgatgttcttttgcaacttgccgaggatcctactcttgaggtcaagcttgagaggcatggagtcaaggcttttacacaggatctaatagcaagtgggactgagagttcagcaataacagtggaatgggcaatcacagagctattgaga

SEQ ID NO: 8912 - DNA, 266 bp, Glycine max
  Clone ID: LIB3092-051-Q1-K1-D12
gttatttcccgatttgagcttacaaaagagttccttcacgaatccatacatgacgcaatcgggcccgttgatctgagttaacatgcttaactctatgattttaattactgctgtctttaacttgtctacccttcttcaactcgatcctgtctctgaccaacatgcatatatctatcttatccacgcatcataactgacttatcatatgttcctcgaacacgattggttcaatcatattttaccaataaaacgctgctgattactat

SEQ ID NO: 8913 - DNA, 442 bp, Glycine max
  Clone ID: LIB3092-051-Q1-K1-D9
gtagattcaggatttgagcatccttcagaagtgcaacacgaatgcatccctcaagcaatctgaggaatggatgtcatttgccaagcgaaatctgggatgggaaagactgctgtttttgttttgtctacacttcagcaagttgatcctgttcctggtcaagttgcagctcttgttctttgccacacaagagaactggcttatcagatttgccacgaatttgagaggttcagcacatatcttcctgatataaaggctgctgttttctatggtggtgtcaacatcaaggttcacaaagaattgctcaagaatgaatgcccacacattgttgttggaacacctgggaggattcttgctctggctagagataaagaccttggtttaaagaacgtgaggcattttatacttgatgagtgtgacaagatgctcgaatcacttgatatga

SEQ ID NO: 8914 - DNA, 463 bp, Glycine max
  unsure at all n locations
  Clone ID: LIB3092-051-Q1-K1-E10
cactttttactgggttgcaattttaagacatancttttctncccgtcatccacanggaaggggtttggccgcaatcgagatttgattgggtagaaaatggagattccatcgtgcaactttcctggtggcactggaggtgtgaagaccattggaaactatgctgcagttctgaaggcacagtctgaagcaaaagctaaaggctactctgatgttttataccttgactgtgtgcacaaaagatatttggaggaggtttcttcatgcaacatttttgttgttaagggtaacattatttcaactccagctattaaagggacaatcctacctggcattactcgcaaaagtataattgatgtggctcgaagcgaagggtttcaggttgaggagcgattagtttcagtggatgaattgctagatgctgatgaggttttctgcacgggaacagctgtggttgtatcacctg

SEQ ID NO: 8915 - DNA, 314 bp, Glycine max
  Clone ID: LIB3092-051-Q1-K1-E11
ttttacacatacctttactctcctcaccacactaattcttctcccgaacgattttaattaaaaaaagtgaattccatctaccaactcctactatcactccaaatttcaataccattttaaactattctacaacctctcaatacacattctcaatcaaaatctaaaatctactctaatatcttataccttcactctctccacaaaatatatttatactacatttcttcattcaacattattattcttaatcttaacattatttcaactccatctattaaatatacaatcctacctgacattactctcaaaactat

SEQ ID NO: 8916 - DNA, 300 bp, Glycine max
  Clone ID: LIB3092-051-Q1-K1-E12
atacttttcttcttcaccacttaacttttccgcaagattttattaaaaaagtgaattccatcttacaactcctttttccactttacatttcaataccattttaaactattcttcaattctcaaatcacattcttaatcaaaatctaaaatctactctaatatttcataccttcactattttcacaaaacatatttttattatatttcttcattcaacatttttcttattaaatttaacattatttcaactccatctattaaatctacaatcctaccttacattactctcacaattataat

SEQ ID NO: 8917 - DNA, 394 bp, Glycine max
  Clone ID: LIB3092-051-Q1-K1-F10
ctctctctttctttcaaatctcaaacttgtccactacatgaaaattcctccactgttcatgtacagctctcatctaatatgaactctactttcttatatactcaacctttcattatcttaatttatattctatatcattaactacatctgcatcgatcataaattacaccattacactccttttacataccctaattacatacttacattttatgcatcatttatatttcctctcattttaccaaataatctatttttacctcatattcctttacattaaccttttatttttattccttatttaaacatttcttccacttcctattttattttttatcaaaatcttcccttataataaatttataccacttatcaacataccatttataaccta

SEQ ID NO: 8918 - DNA, 184 bp, Glycine max
  Clone ID: LIB3092-050-Q1-K1-H7
cttagaaacgatatggaatcggttgtcttgtctctacgagctatacgtgaaggtcggatgaatgaacattatccgcatgttctgtatactgtcgcattggatgttcatcttatgctaaatcagcttacattgattccatgtatttcatgcagaacactataacgatgtatcaaattgatatatt

SEQ ID NO: 8919 - DNA, 389 bp, Glycine max
  Clone ID: LIB3092-051-Q1-K1-F12
ttcttgtcatatctcaaactgtttcactacatgaaaattcctccatctttcagatacagcttttcacgtgatatgaactctacttactactttattaaacctttcattcactttttctatcttttatatcattaattacatctgcatatattataaatttcaccataacattccttttacataccctaattacatatttacatttcatacatcaattatatatattctcattttaccaaatattctatttttaccttttttactttacattaaccttatatttttattcctcattttaacattactttcagattcctattttactacttatcaaaatctttcctcataaaaaaatttataccactgatcaacataccatttataaccta

SEQ ID NO: 8920 - DNA, 442 bp, Glycine max
  Clone ID: LIB3092-051-Q1-K1-F9
ctctctctttcttgtcagatctcaaacttggccactacatgaaaattcctccacggtgcatgtacgccgctcagctggtgggaactctagttgctggtgtagtgaacctggcagtggcttggtggatgttggatagcattaaggacatctgcatggatgataaagtgcaccatgacagtccttggacatgccctaagtacagagtgacatttgatgcatcagttatatggggtctgattggaccaaagaggctatttggacctggtgggctgtacaggaaccttgtgtggttattcctgattggagcagtgcttccagttcctatttgggtgttgagcaaaatcttccctgagaagaaatggataccactgatcaacataccagttataacctatggctttgctggaatgccgccagcaactcctgccaatattgcaagctg

SEQ ID NO: 8921 - DNA, 376 bp, Glycine max
  Clone ID: LIB3092-050-Q1-K1-E8
ctcaatctgacttgcactcttcaactctactgaatcagccctgcaacagacacatcacaacgtcattacatacggcgaccactgatcaaagacagcacacacggacccgaaaacgcgccaattattatcaaaagtatgccttagcgtgacggtaatggatactcgacaccaccctcacacggtggtgactaactagcacttgttcttcatgatccatgcgatctacacgccaatatacatcccgttttcagaattgcggttcttccacaaattgttattctacaaacccttattaacatgctaactactggtctgcgcttgaaaatctccatgtcactgatgctttcatgacagccatctccaaaattgctcattc

SEQ ID NO: 8922 - DNA, 236 bp, Glycine max
  Clone ID: LIB3092-050-Q1-K1-E9
ctggattcctgagaaagtttcttctggtgattgtgacaagatggtcatggctgcttgtgggtggcggcatacagtttctggttcatatttgggtggcttatacacatatgggtggagcaaatatggccagttaggacatggaaattatggagattcttttgtgccttaaaaactttaagcctttgatgataaagtaatcagtcaagtataggctgtgttgaggcatattatggtac

SEQ ID NO: 8923 - DNA, 350 bp, Glycine max
  Clone ID: LIB3092-050-Q1-K1-F10
gccgtaaacagatgtgaacggttccttcctccttcattgttcgcctcatcaacattaccgccttcttccaccgtgtcataggataggaccactcctaacacgtttttgcctttttaattaattcctttctttttattcttcccttccctgagtcttccacattattttccttcttctcatcaagaaattttggtggcagaccctgtgagaaatattaaagacgggccactttcaaaatataccatggagccacaattagaatcccctttgggaagaaaagattctacaggaagtgccgattcttctaagccttcaaagcatgtcattgagacaactgtgccctttgaatt

SEQ ID NO: 8924 - DNA, 439 bp, Glycine max
  unsure at all n locations
  Clone ID: LIB3092-050-Q1-K1-F11
caacattcactccctctctcttgtcttttcctctacgttcctgcattgctcgtcgcaaacgctaaccatggccggcggaggtttcaccagcggcggcggcgccggagatttcgaggccaaaatcactcccatcgtcatcatttcatgtatcatggctgccaccggaggtctcatgttcggctacgacgtcggcgtttcaggtggtgtgacgtctatgcccccgttcttgaagaagttttttccgacggtatacagaaagacagtggaagagaaaggactggacagtaattactgcaaatacgacaaccaaggattacagcttttcacgtcgactctgtatctggctggattgacttcgacgttctttgcttcatacacgactcgtangttgtgaagaaggctgaccatgttgattgctggggtattcttcatctgtgga

SEQ ID NO: 8925 - DNA, 390 bp, Glycine max
  Clone ID: LIB3092-050-Q1-K1-F12
ctacaacaatggactaaacaaacccttatccatcacaacgataatggccacctgtgctattcaacaatgggcgctgactgggcaaactgatctgaagcagctcactgagttcggcgcaagaccgaaggcgctggcaaaggtcgcactaacatgcgccgcaccgtcaagagtgatactcagaacatatgttatggccctaaccgatccaaggacttgggtccattctcggaacagattgcatcatacctgaccggagaaaaccgtggaaactacggctgggacacatggtggattatcatctgacccggaaaccattaccaggtaccctgaactgtaggtgattcacagcacaccctcaatgctcgttgcccttgactgcaccttcccaga

SEQ ID NO: 8926 - DNA, 446 bp, Glycine max
  Clone ID: LIB3092-050-Q1-K1-F3
tccgaaatgttcaaactttatctggttcccctgctaattttgcagtatacactgcagttcttaaaccacatgatcggataatgggtttggacttgcctcacggaggacatttgtctcatggattcatgacacccaaaaaacgtgtatcagccacatcaatttattttgaatctatgccttatcgacttgatgaatcaacaggtcttattgattatgatatgctggagaaaactgctactctgtttcgtccaaaactcattgttgctggtgctagtgcttatcctcgggacattgactaccctcgtatgagaaaaattgcagatgaagtaggtgcttttcttatgatggatatggctcatataagtgggcttgttgctgcatctgtactttctaatccctttgagtattgtgatattgtgaccaccacaacccacaagtctttacga

SEQ ID NO: 8927 - DNA, 256 bp, Glycine max
  Clone ID: LIB3092-050-Q1-K1-F5
gggataatgatataaaaagcaccaagcatacattaaaggaaatgataatacattattcttgtctagaactgcctgaagggaaggctgtgatcaaatcagagtccatggctgatctagcgtaagttaatttttccttatcacttgcctccgtgcttgcaatgtatactaggtgttgactatagaacaatataatcaattgtgacatgtttgtatactccaattatttttcagtgactttacactatgcatcatttgt

SEQ ID NO: 8928 - DNA, 248 bp, Glycine max
  Clone ID: LIB3092-050-Q1-K1-F6
cataatgatataaaaatcaccaagcgttctttatatgaaatgataatacattattctggggtagaactgccgtgggggggggctgtaatcaaatcaaaatccatcgctgatctaacgtaagataatttttccttatcacttacctccctacttgcaatgtatactaaatgttgactatacaacaatataatctattttgacatgtttctatactccaattatttttcatcaactttacactatccact

SEQ ID NO: 8929 - DNA, 445 bp, Glycine max
  Clone ID: LIB3092-050-Q1-K1-F7
cccacgcgtccggagccgatgacccttctcttcccttgtcctttccttctctcaaacaggctaaacaagaaccgtgttccactaaaagcttttgcagaaaattttcttggatgtgttcctctgccttcaacactgtctcagattttggatggagtgtattgaagagtagcatcattagtgatgataaaacaccgataaggtttggagacgaatgagccgactatcaaccattttccatatcaagcatgacattctccattgaccacatcagggacatcaaatcaaggctcggagtgacaataaatgatgtggtcactggaattgtcttctatggaactagattatatatgcaagatatggactccaaatcaaagaccgcacactccacagcattggtattactgaatacgagaaacgttgaaggttaccaatcgatcaatgatat

SEQ ID NO: 8930 - DNA, 147 bp, Glycine max
  Clone ID: LIB3092-050-Q1-K1-F9
aactaacatattctatcgctatttcaaatgctcgaaacccactaccaccccaaaaactgggacgactaccagcgggccttctacgccggaatctccggaaaaggttacgacttgaacgacgcaatgattacgctcgccgacactaac

SEQ ID NO: 8931 - DNA, 240 bp, Glycine max
  Clone ID: LIB3092-050-Q1-K1-G11
cgcaaaacctaaccctaacgaaagccgtttacgataccgataactctcgttgatccgaggccataaccctaacggggttttttcgattgtttggatagaattggcatcgaagggaggcgatcgattggaaattgttagtagtagtttagcgttgaagaacgatatctgctgctgtgtacggaagcaagagatctttcttcgaagagcttactacttctacgccactctccaaaaggctac

SEQ ID NO: 8932 - DNA, 229 bp, Glycine max
  unsure at all n locations
  Clone ID: LIB3092-050-Q1-K1-G4
cgcctcgtgtttccgtttccgtttcaatttcctctcacaggctttaaccttaccaactggaggggggacatgggcgggggcgaaggcccatgcantccggaagaggacgaggctctgcagaagctggtggagaaacacgggcccacgaactggtctctgatcagcaagtacatccctggcccatccggcaagtcctgcacgctcctatggtacaaccagctttcccccc

SEQ ID NO: 8933 - DNA, 300 bp, Glycine max
  Clone ID: LIB3092-050-Q1-K1-G5
tttttcaggatcacaataataaattgccccaatcgcgtgctgggaaaagcagcaaaaggaggggctttattgccaggggcaaatctgttttttcactcaatggatggcaagttcgtcaaggaacttacttccaaaatgtagttgccacacaatatgatggaggaatggttgctaaatttgagttcaatgagaatggaaatgctgttttctcagggtatgtctttaacagaggaggctatgtggaactatcaaaaaagctttctttgccactaagttatactcttgataggaatgagggtt

SEQ ID NO: 8934 - DNA, 438 bp, Glycine max
  Clone ID: LIB3092-050-Q1-K1-E7
ctccaacaagtgtttctgtaaccatggcatccaccactctatcccctacaaccccttctgagctatgctcaggaaagagtgggattttcagtccctcacaggcacttcttgtgaagccagtgaagaggcagatgatggggaagagcaagggaatgagaattgcatgccaagccaccagcattcctgctgatagagtccctgacatgggcaaaagacagctcatgaatctgcttcttcttggtgccatttcactcccctctgctggaatgcttattccctacacctacttttttgtccctccaggttcaggttcttcagctggtggtactgttgccaaggatgctgttggaaatgatgtaattgcagagaattggctcaaggcacatggacctggtgaccgaacccttgcacaaggattgaagggagatcctacctatc

SEQ ID NO: 8935 - DNA, 466 bp, Glycine max
  Clone ID: LIB3092-050-Q1-K1-G7
aaaaaaaaaacgcgccgccgcgtccaaaacaatccaattaatcaaaacacacagcttatatcgtatgaatacaatttttcacttcgcgacaaatataatgtgtttctttattctaatctcttattctatacttgttaatcaacaacttgttcttattaactctttttttctataatttatatataatttaatttacacaataaaagctttttctattcttctattaacttatttatgtataggattccattcaacccattttttttaactagttatttttttcttctataaacatttatcattttctcacaattatcaaattatatctgctcttgaatccacttattcagtcattttatatacatttttaaaatatttcatttttctttattttaatctcctatctccattacttttcatcatttatcatttatataataattcacttaccaaaatattcacttat

SEQ ID NO: 8936 - DNA, 348 bp, Glycine max
  Clone ID: LIB3092-050-Q1-K1-H10
accggacggatcccggtgcgacgcgcagcgtacgcgacgcgtcgagacacctgactctttcgccatttgaaatccaatcctagtgggataaatgctcggtaggcccccataattggccacgaattttctgtattccatcatcctggtttttttgccaatcacacactactggaaggggaatgccataccaattggctaaacccttgttttttaaaatgagaaggaacatccacttttgcccttttaaaaagtggcaagatttatcttgccaatgcacatgatacagggtgctccattgaggacaggttgacaatttttgggttcaacccgtgttaaggaacaaaggta

SEQ ID NO: 8937 - DNA, 261 bp, Glycine max
  Clone ID: LIB3092-050-Q1-K1-H4
gaaaacccggatgcgcgcacgcgtccgcccacgcgtcctcacacattgaaatttattttccatgtaaattatatcaaaatattgcgggttctacaagccggtgtgtctgttgctacacataattttcaccattattgagaaatgacgcgttgatgctactgatcatctttttgacatgactgcccacacatttgtttgttcgtctatccaactatcatgtatatttatctgcagaatccttatatttgttttataattatg

SEQ ID NO: 8938 - DNA, 378 bp, Glycine max
  Clone ID: LIB3092-050-Q1-K1-H6
gaaaaggttcacttctatcagttctgagacaatttgctcgattgaaacgtgataagcaggcaggatctgttggattggttggatacccaaatgttgggaagtcatccgtaatcaacacattgcgtacaaagaatgtctgcaaggttgctccaattcctgcggaaacaaaagtatggcagtatataaccctaacaaagaggatctttctgattgatttgccaggtgtggtctaccacaacaatgatttttaaacagatgttgcattgaacggtgtggtgcgtggaactaatttgaaaaattcttgagaccatataggtgagggtttgaaacctgtgaaaaaagagcatttggagagagcattttaaataaaaagagtgg

SEQ ID NO: 8939 - DNA, 224 bp, Glycine max
  Clone ID: LIB3092-050-Q1-K1-C8
ctcatacctaagtaaaaattattataaaatttttatcttaatttaaaaatatttttcaggctaaatccaatgtgggtggatccactgtattaaataatataatatccaacctaatataattaattatttactttaaaacactaattatagactttcatatacataaaatgccacaaatttcgtgctatacatgatattatactattattaataataacaaacct

SEQ ID NO: 8940 - DNA, 340 bp, Glycine max
  Clone ID: LIB3092-050-Q1-K1-C9
cttttaaccgaggcaaaactgggatttatacactatatatacaacatcttatggaccaagagagtactacaccgaaaacgatgcaccagccaaatataacctatacaaacctctaaagaatcaaactatatgatctgctgtgcaaggtttgttagcctgagatgatgagaggtaccttgcctcgcagaacatacaaagttacagtattggatgaataacaattattgcactcgtgaaagataggacgaaactcacatatctgatcaaacaagatgaaactcgcaacagctgcggtggaaaatgctaattgcttctcaaactagttgcaggggatcgaaac

SEQ ID NO: 8941 - DNA, 442 bp, Glycine max
  Clone ID: LIB3092-050-Q1-K1-D10
ctttcagctccggcaacctctcttccggcgccgccgctatctcggccgcgcaccaatcgggaatttgattgctggggtcaacgatttctgtcattctcaatcatggcaactagacttcagtttgaaaataattgtgaagttggagtcttctctaaacttaccaatgcctactgtttggttgccattggtggttctgaaagcttctacagtgtatttgaagccgagttagcaggtgttatccctgtggtcaagacatccattggcggtactcgtattattggtcgtctttgtgctggtaacaagaatgggcttctcttgccccataccaccacagaccaagaacttcaacatttgagaaacagtctacctgatcaagttgttgttcagcgaatagacgaaaggttatctgctctgggaaattgtatagcatgtaatgaccatg

SEQ ID NO: 8942 - DNA, 300 bp, Glycine max
  Clone ID: LIB3092-050-Q1-K1-D11
gggctttgcagtccaagctgccgccactggcaagggcccgctcaacaactgggccaccgacttgagtgacccggtccacacaaccatcattgacaccttctcatcctcctcttaagaagaagcaaaagaagaagaatagtctttcttgtgcctggtcattctagttatattgaaaaagtcttttcttcttctttcgctttggggtggaaataaaaaatttcttacatacttggataagaagaactgggaaaaaactggaaacgggaaatggagaaggttaagcaaaattgtttttgttgg

SEQ ID NO: 8943 - DNA, 440 bp, Glycine max
  Clone ID: LIB3092-050-Q1-K1-D12
cccacgcgtccgcattggcaagctacaattatgggtcctccagacagtccctatgctggaggtgttttcctagtgactattcatttccctccagattatccctttaagccacccaaggttgcattcaggacgaaggtgttccacccaaatataaatagcaatggaagcatttgccttgatatattgaaggagcagtggagccctgctctaaccatttccaaggtgttgctctcaatttgttccctgttgacggacccaaatcctgatgatcctttggtccccgaaattgcacacatgtacaagacagacaggaacaagtacgagtcaactgcaagaagctggacccagaaatatgccatgggctaattgacatagagaagagagcgatttttactttcagtgtttaggccaaacagccttgtatgaatatttgtggtctt

SEQ ID NO: 8944 - DNA, 270 bp, Glycine max
  unsure at all n locations
  Clone ID: LIB3092-050-Q1-K1-D2
tatcatgcgtcgactcttccgctgtcgctcagaacgtgggctgaaagattttcttcacttggatgattttgataaggatactattttgaagatgttggaccgggcccttgaggtcaaggcattgctgaagtcaggggacaggtcatttcggccttttgcggggaagacaatggcaatgatatgtacaaagccgtgcatgagaacacgtgtatcgttcgagactggctntacattgttaggtggccatgctatatatataggacccgatga

SEQ ID NO: 8945 - DNA, 53 bp, Glycine max
  Clone ID: LIB3092-050-Q1-K1-D3
acaagggtcagttagatttcctcaaaaattgcgttcaccttggttccaaaacc

SEQ ID NO: 8946 - DNA, 166 bp, Glycine max
  Clone ID: LIB3092-050-Q1-K1-D4
ccgaaattcccggtccaacccacccgtccgacaacgcttacattaaatttcctaaaagttttctttcaccttctttacataaccaacacgagctctcacatgggtcgacgtacatatgcttttaatatgctacacatacatttttcaacaatgaacgatttctata

SEQ ID NO: 8947 - DNA, 363 bp, Glycine max
  unsure at all n locations
  Clone ID: LIB3092-050-Q1-K1-D6
cggaaataccgggncggcccgcggcgtccgcaaagtttcacttcagccttatccggtttagggtttcggtttttgacccaacctttgacgtggcgaaaccttaagtggcggatcaggtctgancaatctggttggtagaacctttggtcttagagagtcaagttttatgtctgaattagacgatcaaattcctactgccttcgatccttttgctgatgcaaatgctgatgactcgggtgctgggtcaaaagagtatgtgcatattcgcgtacagcagcgaaatggaaggaaaagcctgacaaccgttcagggattgaaaaaagaattcagctattacaagatacttaaagatgtttaaaaaga

SEQ ID NO: 8948 - DNA, 440 bp, Glycine max
  Clone ID: LIB3092-050-Q1-K1-D7
catcaccgcaagtccacaacatggctgccactgccgctgcaggcataacttccttgttggcttcttctattagcggcgtcaaatgtcttcgttcctccaagaactgctccattatagacccccttataaccacagtgccctcaaaccgtggcatgtttgtgtcacacttggtggaacctttgtccattgggggtgccattaattctcacaagttgtgggggcctacaatttctgctgctgttgcacaagaagaggctgttgttgtggctgatgatgaagtagatgatggtgctggtttagttgaagaagagaaagtggacgagaatgaacgagaaataattgcagaacaagactctgattcctctgccaccaagctttattttgggaatttgccttatagtgttgatagtgccaaacttgcagggctaattcacgatttt

SEQ ID NO: 8949 - DNA, 245 bp, Glycine max
  unsure at all n locations
  Clone ID: LIB3092-050-Q1-K1-D8
atcacatcactaggcacaccaccgcatgttcgcattatcaagatgcccttgcattgctggcctttgaacgtgcggcgtgagaggatcccanccacaccatcaaatcggctttaaactcctgcaccctgacaatggactacgtactatccgacttgcttctcattactaaccaaaatactggactaacaaatcctttcaataaatatattaagatatcaaagcttgatcctctggacctttatata

SEQ ID NO: 8950 - DNA, 61 bp, Glycine max
  Clone ID: LIB3092-050-Q1-K1-D9
cctaaacaaaactataatttatatatatacatactacacattatttattgggggtgtatta

SEQ ID NO: 8951 - DNA, 333 bp, Glycine max
  unsure at all n locations
  Clone ID: LIB3092-050-Q1-K1-E10
cacccacatacgtgtattgtcgtaccttgcaaccaaatgcttacaatagctcaaaatgggcgcacatcctggggttcctgatatacttcaacctttctaactgccgtttaatccacggccagacctgaccacaacctcatgaactgaaacattttattacgccagaggaaaacaaagcaaaagctatttccgtattatcgtccaacgaaatgtgagcaacctaaaccgtgaaaaccactttgcgccaaacctatacaaatctagtgcttttatgctaatcaacaaacaatgctgcatcctanatggcgagagtgcaataaccaaatgcatcac

SEQ ID NO: 8952 - DNA, 444 bp, Glycine max
  unsure at all n locations
  Clone ID: LIB3092-050-Q1-K1-E11
actgtcccaaaccattgtgttcccaccttgcttcgcactcactctcccaaccacccatggtgccaaaacctggcatttccttccacaccatcaaattctcaatttttcggcctcaagttatctcattcttctgtttcatctatcccttcatcttcttcactcaaaggcaccattttcgccaaggtgaataaaggttcaaagccaccgaattttacgctgaaagatcagaatgggaagaatgtgagcctctccaacttcaaaggaaaaccagtaattgtgtatttctaccctgctgatgagacccctggctgtaccaaacaggcttgcgctttcagggattcatacgagaagttcaagaaagcangagcagtggttgttgggataagtggtgatgatgctgcctctcacaaggcatttgccagcaagtacaggcttccatttact

SEQ ID NO: 8953 - DNA, 205 bp, Glycine max
  Clone ID: LIB3092-050-Q1-K1-E12
cttcgtccaatgaatactgttcctatattattcaaccttcaaaacatgctcgactcaagggttaactatgtgggacgtacgtataacctaaaggagcatattattccgttgcaaggattaacaaacttactgcggcattacttcatctatcatgggcgccaataaaagcagcatgtgcatatactacaacgctagctgaggagac

SEQ ID NO: 8954 - DNA, 452 bp, Glycine max
  Clone ID: LIB3092-050-Q1-K1-E2
cgcaaaaattctcacgtaccaagcttctgaggatgtggtttacaaaggctacagatcaactgtggggtctacaagcacggaggattcattgatgggttttgctgtctgggagccacctcatggtcgatacaaaatgcttagatatccatggcaaaattatgtgaaagtaagtggagcactaaggcattgtgcgtttatggtcatggctatgcatggatgtatactttctgaaatacaggctccacctgagaagaggcaagtgtttagtagggaggttcaaaagctaggttctgaagcagccaaaattctacgagaacttgggaacaaagtaaaaaagatggagaaactaggcgaggaagacattctttatgaagttcacgaagcagcagaagaattgcaacagaagattgacaaaaaatccttcctccttgtaaattcaaaaagctgggaaa

SEQ ID NO: 8955 - DNA, 378 bp, Glycine max
  Clone ID: LIB3092-050-Q1-K1-E4
gcgtccgcataaccctaaaacatataaggcaacatgatattccctctcttttgcatacacaaagaggggataacatcgagggcgcgcaactatcttattttaatctcaaaactgacacccttacacatttttccgaaaagccaagttctgaaaagaacacccttgaatagatgctccacctgctcttaatatatacgatctgaactacttccacctaaaattcactggattcctatttgttgctactactactacctatgtctccccttctcttgttttagaacttttacaaaaaattgcacctttcttcaacaattaccttagagttctcaatgaatctttctttagcaagaactccgtgcttcgttatgaattact

SEQ ID NO: 8956 - DNA, 242 bp, Glycine max
  Clone ID: LIB3092-050-Q1-K1-C7
gtcattacttagggtagatggtgctcaactttttcccttaagtggaggaggtttttgaggccgtagcccttctgaccccgtacgatgatgtatagattatgatatcgaaccaaatttatcacatgcgagtcttgaaaaccataatcacagctttgcagatccatacaaagggacagatgtcgagccataactggtaggatacgaaatatgaatgataacgaacacgttgctgcatatatgta

SEQ ID NO: 8957 - DNA, 377 bp, Glycine max
  Clone ID: LIB3092-050-Q1-K1-E5
ctatcacttcttccacttccttcaagtccctcactatggccgagtcctgcctcctctcttctggctcctaactcttgagcagcaaaaccaaaccctctctattctcacccccctccaaacccctcacactccaattctcatgcatcaactcctcagtctctctctccctcgccgcgcgagctcaccgctctcccctcgtcacgcgcgtggcccaaacttccgattgggcccaacaagaagaagacgacaccgccaccttccaagactaagaacatggccttaatgaaacccacaccggcctttccagttgggaacccaacggcgaatacgccttgaaagaaaacttctccgaaccgccggaagaggcaaaactcttc

SEQ ID NO: 8958 - DNA, 437 bp, Glycine max
  unsure at all n locations
  Clone ID: LIB3092-050-Q1-K1-E6
tccgatttaccaagtctttaccatcataatnacgcttattctgacgcagaacttcattttctgttggttaattaactccgcgtgtcctccttaaaaaaactttatttccactttaaatgatcaaatatttcccacccttccatgttttatttacatacatagacccctttctctaaacaattatctctattttatagaatacttaaacaatttacactaaattatcaacacttcaccaaaattccatttaattattgttcaacaatcttcctgacattgcaccaacaaattctcctctaaaattatcatcctttgtcaaaaaactatccatcttttccaccaaaaaccttactactttatgttaatctcctttacgctttgttctcttttaacccctctctaaccatttccacaaatgttctttcaattttatccct

SEQ ID NO: 8959 - DNA, 96 bp, Glycine max
  Clone ID: LIB3092-050-Q1-K1-A4
agccttccgccaaaccttccggtaaacctatctttattgctttatcaaaaaaaaaaaaattttctttggcggaaaaccattcccatgggtgatcta

SEQ ID NO: 8960 - DNA, 159 bp, Glycine max
  Clone ID: LIB3092-050-Q1-K1-A8
ttctaaatataaaaatttttatattattccttaaaacattactacattgtcttatcaaaacgtggcactgaatgctaacaattatataattatattttcaatatccaacctcaataacatccactcctcatttccttcttacattttcaaatcattttt

SEQ ID NO: 8961 - DNA, 296 bp, Glycine max
  Clone ID: LIB3092-050-Q1-K1-A9
atcataccgaactagatctcagagatcttacatgttcatcacaatcatagatgtggggtgtgctactacaaggctaaatttgatagaacccattggtgcaacattgctgcagcatcaagttgctcctattgctgaagttatattagaaaaacggatgaatcaagttgttgacgaagcttgccaaactatacctttgctagatactgtgcaaggatgccatgggtacttgttttgaagactgttttcatactagaacgcaaaatgtggatattgcacttaatattgtgatgtgtaaa

SEQ ID NO: 8962 - DNA, 300 bp, Glycine max
  Clone ID: LIB3092-050-Q1-K1-B1
ctaatcattacatattcaaatatacctacagtccatcgaactttttaataaaatcgattcagtgcctgctgatgcgtctaattcacattctatcaatgaaccggctaattctagtacggctgaagagaccgacagacaaacttctgattctgtagcctccacgcaagataattctgcacatgacgcataatctaggctatctgacaccggcatatcggcctgggccacaaactcgacaatttctcacgcattttctggccaccaagacaactgatcaagtggcaatgcttggaaatcaac

SEQ ID NO: 8963 - DNA, 433 bp, Glycine max
  Clone ID: LIB3092-050-Q1-K1-B10
attcgaatcaaaataacgggtctcttctttcaagcacttcattttcttcttttccacctgctgtatcaaataagtttaccagtcagaatatatctagttcatcatctgctgccacaagcagtggcattagtgccactggaaattctactagcatggcaactatctcacctgccacaattgcatctagtaatagttgtttctctaccccagtggtggcatcctcatcgtcagcaatttccttttttaaatttggatcctctcctgtccaatcagcaggtttacctgtgtcatcttctggttcagaaccaccagaaactaaaagcagacaggatgcaggaatcagtggtcttagcagcactgcatttggtgctagcagtggtatttttggcttcagctcttcagcaatgacaactgtaaatagccagtctcagag

SEQ ID NO: 8964 - DNA, 437 bp, Glycine max
  Clone ID: LIB3092-050-Q1-K1-B11
attcgaatcaaaataacgggtctcttctttcaagcacttcattttcttcttttccaccgggtgtatcaaatagttttaccagtcagaatatatctagttcatcatctgctgccacaagcagtggcattagtgccactggaaattctactagcatggcaactatctcacctgccacaattgcatctagtaatagttgtttctctaccccaatggtggcatactcatcgtgagcaatttccttttttaaatttggatcctctgctgtccaatcagcacgtttacctgtgtcatcttctggttcagaaccaccagaaactaaaagcagacaggatgcaggaatcagtggtcttagcagcactgcatttggtgctagcagcggtatttttggcttcagctcttcagcaatgacaactgtaaatagccagtctcagagttct

SEQ ID NO: 8965 - DNA, 361 bp, Glycine max
  Clone ID: LIB3092-050-Q1-K1-B12
accacacttacaaaaactctttctctttgtctttttcctaatctcacacccaaaccgcgtgtaaatctctggcgacgaacgtcttaattatatcaagatcatatattgctgcaatcattactggaaaaaatgcaccattaattcttactactacaactacatttattcatgccatcacttgaataactactactctagcttgttcaacaatccctttaatctccacgaactcattctccaatattaaaaacacattcttttttcaattattaacacttatccatctgttacttaatttttcacaaactctagcttctaaattcaaaaatacttcttcaacatcttcaaatacttccactat

SEQ ID NO: 8966 - DNA, 226 bp, Glycine max
  Clone ID: LIB3092-050-Q1-K1-B2
cttatgcgtaccatcaacttcttctgacttctaaactctgtgaccttcctactctacatgccgatcctagtggccggagtgccgctgatctattatgacaccaccgaccgctaaccttatctgaaaaaattcttgatttcacttcgacacttactaatttctcgatcattcatcgatctcgttcatacatgcttactacacattttattactctagctttaccttc

SEQ ID NO: 8967 - DNA, 272 bp, Glycine max
  Clone ID: LIB3092-050-Q1-K1-B3
ccgataaagaatactgtcttttcctcccaaattcattatctcaagactttcaaccattaactgcggaaccacacataccgacttcctgccaatctatattatccattctacttttccaattttacaaaaaaatatttgttttcatatgtcaactaaataaatttcactcttccccaacacacaacccgaagactgcaaaaacacttgcgttccccaaataaatactttttctcaaaattcccctttctccagctagttttttaacgaaaaac

SEQ ID NO: 8968 - DNA, 396 bp, Glycine max
  Clone ID: LIB3092-050-Q1-K1-B5
aaaaccggaccgacccacgcctcccattctaatcaaaataactaatctcttcttttaagcacttcattttcttcttttccacctgctttatcaaataggtttaccagtcacaatatatctagttcatcatctgctgccacaagcagtgtcattagtgccactggaaattctactagcatgtcaactatttcaccttccacaattgcatctaataatacttgtttctctaccccaatagtttcattctcatcgtcaacaattttcctttttaatatattgatccttttctttccaatcaacaactttaccctttttcatcttttggttcaaaacccccactaaactaaaatccaaacaccattcaataaatcattttttcttaaccaacacttcatt

SEQ ID NO: 8969 - DNA, 433 bp, Glycine max
  Clone ID: LIB3092-050-Q1-K1-B6
ccgtccgggtttttttaagggtgggccgactccggagcatgctctttttgctttggggccttggggtgaggcagatgatctgctgctgtaacaagatggatgccactaccccgaagtactctaaggctaggtatgatgaaattgtgaaggaagtctcttcctacttgaagaaggttggttacaacccagacaagattccatttgtgcccatctctggtttcgagggtgacaacatgattgagaggtccaccaaccttgactggtacaagggaccaactctccttgaggctcttgaccaaatcaatgagcccaagaggccctcagacaagccactcaggcttccattgcaggatgtctacaaaattggtggtattggtaccgtgccagtgggacgtgttgagactggtgtcgtgaagcccggtatggtggtgac

SEQ ID NO: 8970 - DNA, 392 bp, Glycine max
  Clone ID: LIB3092-050-Q1-K1-B7
cgaccatgaaactaatgacagcaacaacaacgtttgatgtctctgccacttgcttgcgggcccatcctcgtgggggctcaatgaatccatgccacaccagtttttcagttataaactccctgaatcctcacaagggacgacggataagcgttgctgttccacccaagtttccaaacttccggagggaagcatctttgcatgggaatttggaggctattagagtcccaacttcagtgcctgtgcgtgtaacatacgagcttcttctagctgttcatcgatattttgatgtaatgaccccggaagagttcgatgctggacacgctcctggcgcaattaacataccttatatgttcaaaatttgatcatggatgacaaaaaacaacaactttatt

SEQ ID NO: 8971 - DNA, 332 bp, Glycine max
  Clone ID: LIB3092-050-Q1-K1-B8
ctcactcagagatccaactcgtcatataattcaagacagaatcccgcgttttctgcgttgctagaccttctacgctacaagctgacgtataaattcattatggtggcaacagctgcaacttcatcatttatacctgatacttgaccctcgccggactctgatggagcaggcaacacacttggtggtgagcctgcgaaccttggaagtctaaaattcaaatatgtgtcttttggtggcttgaacgcaaaggctcaaacctctttgaaaattaatggaaccacaggtgttacatgtaaagaaatgttgaagcatgaggatgatctaccttcacc

SEQ ID NO: 8972 - DNA, 338 bp, Glycine max
  Clone ID: LIB3092-050-Q1-K1-B9
cggacacgtgggttttttttttttttttattgaaaactccatatgttgttaaaaaaatggttataaacaatgggcccaaatattttaacaaacaaactatcataaaaaataaaaacaaaactgaaaaacttgcaataaaatataataaccctaacatcgttttctttaagccttatcacccttggcagcacctgcaacaccttgtcctctaaaacgaccagttcttctagcagcaatgataccaaccttctgtccaggatgagcataactcctgacaatacttgcgttaccaatatgcttatgattacctcctgcgtggaattctcaacacggttcat

SEQ ID NO: 8973 - DNA, 399 bp, Glycine max
  Clone ID: LIB3092-050-Q1-K1-C10
cttttaaccaatacaaaactataatttatacatatatatacatcaccttatttaccaggagattattacaccgggggccgcgccacaccaaatataacacattcaactctattaaatcaaacaatatctctcttcaatgttttttaaccagatcaaataaaattaccttcctgacaaaatacaaatatcagatttatgaatcacaatattcaccttaaaatagacgacacccatatctgatcaaacttatcaactctaacattttctgttaacaacctaattacttctaaatcctttgcaatggatcaaaacttataagccaaacactgtattacaatcgacaccattttataacactagctattttatcataaacacatatttattaagaatgattat

SEQ ID NO: 8974 - DNA, 311 bp, Glycine max
  unsure at all n locations
  Clone ID: LIB3092-050-Q1-K1-A2
gggccaagtataggggcatgaagattatgtttgtcggtgactccttgtgctgaaccagttcaactctctggcttgtatgattcactcttgggtgcccaacactagaaccagtttcataaagcangatgctctctccaaaatcacattttaggactatggccttcagttatttctataccgcacagcatacttggtagaccttgaccgtgagaacgttggaagggttctgaagattgattcaataaanagtggtgatgcttgtagaggcatggacctcctaaattttaacacgtggcactggttgacccaca

SEQ ID NO: 8975 - DNA, 436 bp, Glycine max
  Clone ID: LIB3092-050-Q1-K1-C11
tgagaagatttgtcctccacactgcattttaacatcaaacacatcaactattgaccggggggttattgggggggcgaccagctctcaaaatcgcattgcgggtgctcattttttcagtcctgcccacattatgcctcttttggagattataccaaccgataaaacatctgcacaagtgattcttgatctgataacagctggtaaaatcataaagaagacacctgttgtggtgggtaattgtactggctttgcagtgaataaaacattcttcccatattcacaaggtgcccatttgttggtcaacttgcgcgtggatgttttcagaattgacacattgatacgcaactttggctttccgattggtcctttccagcttcaacactttgctggctatggaactgccgtttctaccttaaaaaatatttgcttgatgctt

SEQ ID NO: 8976 - DNA, 331 bp, Glycine max
  Clone ID: LIB3092-050-Q1-K1-C12
attacacttacgaaaactctttctttttttcacattcttaatctcataccctaaccggggggtaatcactgggggcgaacggtttaaatatatgaagatcatatatcacttcaataattaacagaattaattcaacattatttcttatttctataacaacattttctcattccaccactgacataacaactctatgagtttctacaacaatccttttaaactcatctagctcaattttcaaaattaaatacacatccttttattagttattaacacttatcactcttttattttatttttcacaaactctagaaactaaattttaaaatac

SEQ ID NO: 8977 - DNA, 254 bp, Glycine max
  Clone ID: LIB3092-050-Q1-K1-C3
caacaaacaacacaaatctctaactaatattcatcctttatttttcttcttattcttaactttaccacttatatatatgtaactacttttattaatatgtgagctttttttggaaacttatccaatttacattatatccaaagacgaacgtaaaaaactactacaacgacatctgtacattatctcaaaacttttctctctctatatctaaaaccatatccttcttcaatcatctaccataaacatttctatac

SEQ ID NO: 8978 - DNA, 296 bp, Glycine max
  Clone ID: LIB3092-050-Q1-K1-C6
tcctttgcatatctgtaggctgattttcttctcatggaatcagaacaacgatacaatgatgaatcagtacgaagagatatatacatcgatgagtgacatgataaaagttttgatattaattcttctgcaccacattccaatcagaggtttagcactggagcatcaattgactcacccactaatcagaacgtcatttcgcacccgtttggatactttcactattcccaacaaaatggttcagagttattaacaattgcccttacatgatcacactagctaacttctagttcacgact

SEQ ID NO: 8979 - DNA, 381 bp, Glycine max
  Clone ID: LIB3092-049-Q1-K1-G3
gtttgaccaagggtggagcagctgaatatagagcagatgcatatggctgcatgagcagcaagggctgctgccatgacaaagctaattggatattctgacataggccgcctatctatattattgaatgatctcattgatctacaactgaccctactatccacaacattacacaatattatacataggaattggatgagagatgatcttgcatagagcatacttcaggttaacccaaagatttgaacggagagctacaactactaagtcatgctagacttatacatacgttccaccaagaatgatgctgaatactaatatatgattattgtataatgaggatcatctatatacgccgttttctctacgctgaagatggatagc

SEQ ID NO: 8980 - DNA, 458 bp, Glycine max
  Clone ID: LIB3092-049-Q1-K1-G4
ctctgacatcatttgccactcccgcgtttactttatcatattcttattccgccatgtcccaggtgaacggagcctactatggcccctgcatcccgccgccgtaaacctcctaccaccgcccagggcgcggcagaagctgctgctgcggctgcctattcagcctcatcttcaagctcatcttaaccgtgataatcatcgttggcatagccgggttcgtgttctggctcatagtccgtccgaacgtggtgaaattccacgtgaccgacgccaccctgacgcagttcaactacaccgtcaacaacacttttcactacgacctcgccctaaacatgacggtccgaaaccccaacaagaggctcggaatctactacgaccgcattgaagcgcgtgcaatgatgcacgacgcaaggttcgattcacagtttccggagccgttctactcaggccacaagagcacg

SEQ ID NO: 8981 - DNA, 454 bp, Glycine max
  Clone ID: LIB3092-049-Q1-K1-G5
cccacgcgtccgcccacgcgtccgatggtcatagtctacacctaattagccaaacacaccagagcaccaaactagttggctcaattctctttgaatggctttggaggctttgaattcaccaacagcagccaccactcccttccgtggttaccaagaagaggaggaggaggttgaccttcacctacgcgagccttgggccaagagaaaacgctccaaacgacctcgttttgagtcggaggaagagtacttggctctttgcctcatcatgcttgcacaaagcggtaacaacaacaacacccaattaccgtcttcgtcacagtcacacaaagaagcgtcaccgccgctgaaactatcacacaggtgcaccgtttgcaacaaggcttttccttcttaccaagcactcggtggacacaaggccagccaccgcaaggcctcgtcggaatccaacaccacc

SEQ ID NO: 8982 - DNA, 433 bp, Glycine max
  Clone ID: LIB3092-049-Q1-K1-G6
ctcacacgtcctcccacgcgtccgatggtcatagaccacacctaattagggacacacaccgggggaacgaactagacgactcaattctcattgaatggctaaggacgctttgaaatcaccaacagcagacactactccctttcgtggttaccaagacgaggaagatgacgatgaccttcatctacgcgagccttgtgccaagagaaaacgctcaaaacgacctagttataagtcggacgaagagtacttggctctctgcctcatgatgcttgcacaaaacggtaacaacagcaacacacaattactcgctacgtcacagtcacacaaagaagcatcaccccagatgtaactatgacacacgtgctctatttgcatcaaggctttgtcttattaccaaacactcagtggacacaaggtcaaccaccgcaaggac

SEQ ID NO: 8983 - DNA, 452 bp, Glycine max
  Clone ID: LIB3092-049-Q1-K1-G7
gataggtggcattgacagtattctacgatactagctggacatcagcacaggagctgagtcagctgatgatggagaagtgtatgatgattctgattaagttactgttactgcagaacacattactttgttttggaagaatggggccttcaaaaatgaataggatattaccgactattgttgtaagactgagactttgccctaagattgctgatccataagatgtgtatgattcactcattacgtttactatgctttatacatagtgcatttcacgctattagaccatgtatgcatatggcaactttgccagattgtgcactgactcatcaagaaataactcttaggaggacatgacacgaagagttatatgctaaatcaatgactcatctgaagtatatactatgctttggttacatgattgatgattcacatactatatctccgtatgaaca

SEQ ID NO: 8984 - DNA, 264 bp, Glycine max
  Clone ID: LIB3092-049-Q1-K1-G9
gtcagacatgtaagacgcatggctcaaggtttttacgcataccgtttcgccggaatattaaggtacattactagcattgtgagatacatttgttctggtgcaaagccatatgattgctaagactcaaatatttactaacggcaatggttactcatacaggatcgttactcaattgagcataacttctagatgctagcactgccttattatgatgacgactagttaccactactcatgatcacgatgaatggatgcatccacatt

SEQ ID NO: 8985 - DNA, 173 bp, Glycine max
  Clone ID: LIB3092-049-Q1-K1-H1
cccacgcgtccgctcacgggaaatgctgtcattcagaacatatattgctcgatatgacaacgagtcactcattgtcgtgtgttgatttaacactgaggcatacagcgagctaatctctttgagaatgaccaattcccatcgctcagaagagtcttctagtaacttctaagagg

SEQ ID NO: 8986 - DNA, 421 bp, Glycine max
  Clone ID: LIB3092-049-Q1-K1-H10
tcggagaattatgaattgggtttgccagtaattatataaagctggtgttgaccagaaaattgaagtcagagaaggtcctgctctcccagttcttgatgaaatggttaaagatgagaagaaccatgggagctatgacttcatctttgtggacgcagacaaggacaactacctcaactaccacaagaggttgatagagcttgtcaaagttgggggagtgatcgggtacgacaacaccctatggaacggctctgtggtggcacccccagatgctcctctcaggaagtacgttagatactacagggacttcgggctcgagctcaacaaggcactcgctgtggaccccaggatcgagatttgcatggctcccggtggtgatggaatcactatatgccgtccgatcaagtgattctgattttctgat

SEQ ID NO: 8987 - DNA, 467 bp, Glycine max
  Clone ID: LIB3092-049-Q1-K1-H3
gtttggtgccttctgttctggagctagcaaatcaacccatcatcgaagttccagaacgatatgttcatgccaagcaagatccacatattctttccaacacaatttctttaccacaagttcccatcatagacttgcatcaattgttgtctgaagatccaagtgaactagagaagctggaccatgcgtgcaaagaatggggtttctttcagcttataaaccatggagtggaccctccagtggtggaaaatatgaagataggtgttcaagaattcttcaaccttccaatggaagagaagcagaaattttggcaaacaccagaggatatgcaggggtttggccagttatttgttgtattagaggaacaaaagctagaatgggcagacatgttctatgctcacacatttccattacattcaaggaatcctcatcttattcctaagattccccaaccattcagagaaaatcta

SEQ ID NO: 8988 - DNA, 465 bp, Glycine max
  Clone ID: LIB3092-049-Q1-K1-H4
ctctgacatcatttgccactcccgcgtttactttatcatattcttattccgccatgtcccaggtgaacggagcctactatggcccctgcatcccgccgacgtaaaccttctaccaccgcccagggcgcggcggaggctgctgctgcggctgcctcttcagcctcatcttcaagctcatcttaaccgtgataatcatcgttggcatagccgggttcgcgttctggctcatagtccgtccgaacgtggtgaaattccacgtgaccgacgccaccctgacgcagttcaactacaccgtcaacaacactctccactacgacctagccctaaacatgacggtccgaaaccccaacaagaggctcggaatctactacgaccgcatcgaggcgcgtgcaatgttgcacgacgcaaggttcgattcacagttcccggagccgctctaccagggccacaagagcacgaatgtgc

SEQ ID NO: 8989 - DNA, 387 bp, Glycine max
  Clone ID: LIB3092-049-Q1-K1-H5
gtaagactttgtggaaacagagtgttaccaatatctcaacagcgtgtacggacacgatcatgggactgggacaggattgatcaaagttgataaaaatggaaatgactttcacatagaaccagatgatgacactggttgccatcactcttgcaagggcaatccagcaaccaatgattgtgttcctgctcattctactgaggtgggtttcaattcatgcaaacctaacaggagtgacaactagaaatggtggagtggctacatgaagatatcaatatgtcatgttaatttcagattgtgtggattacatgtgttgattaaaatgaccttccaaatatatatatatatatatatatatatctctatatatatatagatctatatttagat

SEQ ID NO: 8990 - DNA, 456 bp, Glycine max
  Clone ID: LIB3092-049-Q1-K1-H7
gttattttttgtcatttaaaaagaaaatcaaagcaagagtttctttgaagaagacttgtacacaaagatgagttcaagcagaacttgggctgtggcagccagtgttggagttgtggaggccttgaaggaccagggtctgtgtaggtggaacaatgctttaagatcagcacaatatcaagtgaaaaaccatgtgagatccttgtctcaggcaaacaaggtttcttcttcctcatcttctgctgtggtttctagtagattaaaggaagagggtgcgaagcagtcagaggaatcattgaggacagtcatgtacttaagttgttggggtcccaactagagtcataaggcagttactaaataactaaatatttgatagggaaagttggggcagagatttgtagacttgtaatggtgcttgttaattagcattcaaagttgcgacagatattgatgtaaatc

SEQ ID NO: 8991 - DNA, 442 bp, Glycine max
  Clone ID: LIB3092-049-Q1-K1-H8
gcttccccaaaatttcacccctttcattcaattcttccctcttctctgcggctgatccatcgctcgttttctccgaacaatggctgctggtgtcactgtcaagtccgaggttctagaatcttctcctcctgaaggagtttgttccaacacggtggaaaaccacctggtccagaccaatttgtctgatgggtcacccaacaagtctgtgccagcatctggacttgatgcagtgattcctagtgcaaatcagcttaccatcttctataatgggagtgtttgtgtctatgatggaatccctgcagagaaggtgcatgaaataatgcttattgctgctgctgctgccaagtccactgaaatgaagaagattgggacccaaactaccctcatttcacctgttccgtcaaggccttcttcttcacatggaatcactaacaatattggt

SEQ ID NO: 8992 - DNA, 413 bp, Glycine max
  Clone ID: LIB3092-050-Q1-K1-A10
cccacgcgtacggttccttcaaagtggaaccctagttgtctctatccttaagttccgccggcgaccaagtgtggagacccaaccaagtcttcttttattcatggcgggaggacttatttttcaattaaaccatatgctagaaaaaaatgggacaccaagtcatgtaaaagggctggtgatgctgaatctgatgcttaactttcttcccatcacaaaaggagatgacacttaaaaaagtttcaaggaggaagaggaaattaaaagcaggaaaaggaaagaactcttgcaacagactgatccaccatcaatttctgttattgaccttttcccatctggagattttcctgaaggtgaaattcagcagtacaaagacgataacctatggagaactacatcagaagagaagagagaac

SEQ ID NO: 8993 - DNA, 283 bp, Glycine max
  Clone ID: LIB3092-050-Q1-K1-A11
cttgatgataacatgggttttggctggaaggcatgactaacacaatcttggacatgaagggggcatatcatgtgttgatgaagtgtttatcttattatctttgtacaggacactttaaatagatgctgtttttttccttgtttttccctgttattttcttgatggaatttgtttggactcggactcggactcgagtaggtttttagagattttatttgagggtttttgtcctgcaagtgtaatctattggacaatttaatgaacagttagtttattatacggc

SEQ ID NO: 8994 - DNA, 428 bp, Glycine max
  Clone ID: LIB3092-050-Q1-K1-A12
gtcttgacggtcccattttcaccccattgtgcaaattgaaagtagtagggaacccctacgatagctactacatggggacaatgacgtcaccttaacgtctctcgtgttgacacgtagctcaatgaggctatttcgctgcatcctccaaaaaagtgtttggaaagatcctttccaccccatgccaaaagcgagcatatttatttaaaaaaattgaaaaaaattaaacacaattttattttattataggatatttattaggtatttattggatataaatggcaacatgctttaatcctaagcctgataaaaaggccaaaaactttaaggttttggctctttgcaaaatctttgagtgacacatacctaactatcacctcaatggattactattttggaaaccttaatcctaacccttattaccatcactc

SEQ ID NO: 8995 - DNA, 128 bp, Glycine max
  Clone ID: LIB3092-049-Q1-K1-G2
cccacgcgtccgttcgcgcgtccggctttcctttacaagatatattcaccacatggacaacgagtcacttacaggattacattactataactcaaaggcatacaacgattacatttcattctaactag

SEQ ID NO: 8996 - DNA, 460 bp, Glycine max
  Clone ID: LIB3092-049-Q1-K1-E7
gggcgattaccaccgctatctcgcagagtttaaggttggggatgagagagaaaccgctgctgaggataccatgttgtcttacaaggctgcccaggacattgcttctggggatcttccccctactcaccccatcagattgggtctcgctctcaacttctccgtcttctactatgaaatcctcaaccagtctgacaaagcgtgtgccatggctaaacaggcttttgaggaagcaattgctgagctggacaccttgggagaagaatcctacaaagacagcacgctcataatgcagcttttaagagacaacctcaccctttggacttctgatgtccaggaccagctagatgagccctgatatccattataggtttgatgggtggtattcttcctctcatggaagtgggctttgaatgtcatttctttgtgctaaattaagaatcgccctagtttataaaatgat

SEQ ID NO: 8997 - DNA, 404 bp, Glycine max
  Clone ID: LIB3092-049-Q1-K1-E8
gttatttgaccatacaagcatgctccaatttttgccactatattcaaaagggtcgctacctgatgaaatttccacacagaatcaggtatcaagttcattgacgactttctttatgcaaatgcatacttttatggggctcaacacacaatggacgacttacaaacttatcgttctagtgtggagaaaccctgttactttattgcaaatgcttgcccgatgtacaagcttgtcttatattaacttcatgaaagcattcccatcaatgcttaaatggtgcgattcaatggaccagctacttgattcagccgaagctgctactgcgtaacctgaagcttttgctggtcactactatgatgaccttgatctcttactcgatgagactgtcgaagacaaacaggtgtcac

SEQ ID NO: 8998 - DNA, 305 bp, Glycine max
  Clone ID: LIB3092-049-Q1-K1-E9
gactggcgctgcaaccttggttggcctctattttggtcgcaatgttgttaagcaagtggttgatgatgctcgtgactgaatgcagatgctttcgttggacattgctgtctttatttatgattttggtgttgaatattcattgttctttgcatgtccttcgcaatcattttcaattgcggtatttgcgatagcactgtaacttaaacatctattagttgaaacgtattccctgagtgttatcatatggtaaagccttttgatacttaatcttgatgtgaagatgaggatacaatttcgttacttat

SEQ ID NO: 8999 - DNA, 374 bp, Glycine max
  Clone ID: LIB3092-049-Q1-K1-F1
cccacgcgtacgtacgccggaacggctgatcttgtagagggatagtcacacggtgggcaacgagtctcaaactcgaaaacaaaagctcgagcccatcatggattcacggaattaaatacatgtgaatcggagctttacgcatcaacttgtatcgcacctcaagaaattcctaagaggcattgactagtccccagagtacatggccggatatgctcatatgactgatcaacttgactaacctaagaacaagctctattgtctagagatgaccagacccatcatctatgaaagggaaaatttgaagagcattgatgacacggtcaagacctgtgcaagcaaattccatgaagagatgtctagaaccatcatagaca

SEQ ID NO: 9000 - DNA, 298 bp, Glycine max
  Clone ID: LIB3092-049-Q1-K1-F10
cggagatagattatttaggtttacattatcacatccatgcaagtttccaaacctacaaatgtgtagtatatagacctcctccctttttcgacttgcttgttcaagagatcaacttagtacttgttattataagataatatgttgacagtgtatatgtaattgattgtagttgtaatattttagatgaattttagttgactatgtagatattctggtaagccatggtcattatttgttagggttggttgacacttgaaataatttgactctggatatatatataaaatcattttttttc

SEQ ID NO: 9001 - DNA, 176 bp, Glycine max
  Clone ID: LIB3092-049-Q1-K1-F12
gtcagcatacatatacttttaaatgttatgactcaatattcagggtaacattgggaaattctaaatagatatgatcatcaactatgatatcaagagacaagattaacatacttacaatgtaaaatatagttttaaacttatactactggttcaatatgaaacatatgctcttcatt

SEQ ID NO: 9002 - DNA, 447 bp, Glycine max
  Clone ID: LIB3092-049-Q1-K1-F2
tttgtgttacaagagtgtcaactgatccacttgcacctcattcatttggggcatggattcaggatgttgctgggaatcacattggtgcaatatcattgctaatagccgattatttcctcttctgaggcgtgattactctgacagttgtgcacgctagtcagatatcacgcaatattacaacaaatgaaatggcacatgcaatgcagtatagatacctcagaggtccaggtcgtagatttagaaacccatatgatcatggtctcaagaagaactgttctgatttcctgatcaatgggtacaacgaatacgttgagtgcattgaagaattaagtaactcataagagggtataagaatgatgcatatggtcagaagctcgaacttggcaaatggagactcgcacactcatactgaatatgcaagaggcaatggaaatgagcatcatgcta

SEQ ID NO: 9003 - DNA, 469 bp, Glycine max
  unsure at all n locations
  Clone ID: LIB3092-049-Q1-K1-F3
cgcgtgctcacctaagccgccggcaccggatgatggaggacgactagaagacacccttggtgggagaaatcgaggaggtggacgcgagtcccgtggaggaggagggcacgagcgagcgggagaagcgcgtgcggaccaaggtcccggaggcagagatccacctgtatcggcaggggaagggccccgtggcggtgttcaagtcggcactgggcggctgggagcaggatcagctcgagatcagggaggacatcctcgagaagtacggcatgaaatcggtcttcgcgttcaatccgaccgtcggggggcgcggcgttcctgtccggttcaatcccagaaatgggaggtcgattntgacgtacagggatggggctgttgtttaccttgatggagaacctaaggattcacttgttaaaccagtgacgaggatcttggttggggttgctttaataacctgtatgataacactagt

SEQ ID NO: 9004 - DNA, 454 bp, Glycine max
  Clone ID: LIB3092-049-Q1-K1-F4
gccaggcgtacggccacgcgtgcggcttgctgtgtttgccgagttcgcgttcgttgttcgaggggagaataccggtttccatatcgtgggtcacttgagatggcatcatgacaccgtgtgcacagagaacccttgaatgctcgaagggggtacccggcataatggccatatgctcgcgtgccttccatgcctagtccgccacctcctattcctgctgatgcggctgtgttggaagaggaacttgaattttagcatgcctagatgcggacactcgtggcagacaacaagaggttgattgatgaccgaatggcgttgcagcgagaccttggggccgctaaggaagagctacatcgtatgaatcttgccattggtgacattcgcgcccagcatgatgctcattcgagggagcttgctgagaaaggcatgaagatggatgctgaccttagggcaaatg

SEQ ID NO: 9005 - DNA, 453 bp, Glycine max
  Clone ID: LIB3092-049-Q1-K1-F5
caagcacagacacagaaaaatggctctaacatttcgctcttcaatttcccgggacaaccagggagaaaccaaactcccaaaagccaatgactaggttcccaccaaagtgttttactttggaaaaaccaacccatctttccgtctcagagcaaagagttccatgcaacaaacacacgtcacacgaaacaacagctttaactccgaagtaacgatgataaacgagaaaagggagaaggttcacgctccatcggttgcacatagctcacaatgattcaatgagagtgccagtgtttgtgatgctgacattggacactgtaactatggcacggactatgaataagccgagagcaacgaatgctaatgtgatggaccttgaaagtgcatgagtggaaggagtgatggttgatgcttggaggggctaggcggaaaaagacgtacccttgaagtataatt

SEQ ID NO: 9006 - DNA, 459 bp, Glycine max
  Clone ID: LIB3092-049-Q1-K1-F7
ctctggtggctatcataccatctagcggtgctccaaatgcatatacttcgtgcattgcaaaggccggaaccacactggcagagggagccatctcttataatcactcaggattgacggctacccatcagagcactgaggtcaccatctatgctaccctcactcttcccagtggtaccaccactttggtccacctttggaacgatggtcctgtgtcttctggtacccctgcaatgcattctatgacttcttccaacacccaatccaaggaaagcttggatcttctttctggctccagtcaagcaggaagtgggaattcacttaggagaagaagaaatgtccatggagtgctgaatgcactgagctgggggattttgatgcccgttggtgccataatagcaaggtatttgaaggtgttcaaatctgcagaccctgcttggttttaccttcatgttacatgcc

SEQ ID NO: 9007 - DNA, 454 bp, Glycine max
  Clone ID: LIB3092-049-Q1-K1-F8
cgaatcgcccttgcctgtttaaaacaagccttttgagcagataactatggggaaacaagaaggcaaacaagagggaaaatcagaaatagaaccggaaaaggaacaggataagaagaaacagaagaaacgtggttcagtgaagagagtttctagcgcagggcttcgtgttgattctgtgttgcaaagagagaccgataatttcaaggagttcttcactcttgggagaaaacttggacagggtcagttcgggacaacgttcttgtgcgtggaaaaggcaacagggctggagtgcgcctgcaaatctattgcaaagaggaagctcgccaccgatgatgatgtcgagcatgtgagaagagaaattcagataatgcaccacttggtcgggcatcctaatgttatatccatcaaaggtgcatatgaagatgccgtggctgttcatgttgtgatggaatta

SEQ ID NO: 9008 - DNA, 126 bp, Glycine max
  Clone ID: LIB3092-049-Q1-K1-F9
cgaatgcaccttgactgcctaaaacaagctttttgagcatataactatgcgggaacatgaaggcaaactagagggaaaatcagaaatataaccggaaaaggaacaggataagaagaaacagactaa

SEQ ID NO: 9009 - DNA, 389 bp, Glycine max
  Clone ID: LIB3092-049-Q1-K1-G1
cccacgcgtccgctcgcgggaactgcatttctttataagatagattacccgcatctacaacgagtctctgataggaatcaattgttatatctcagagtcattcagcgagttcatttcattgtaactgagctttccacaaccctcagatctctcctctcgaacgtgcaaagagtcactacttgaccgaatgctgaagcggctgaaatcggtctgagaaatatgattcttacgatacctctactaccctatggactcctagtacaccgtatgcgcccttccttggacctaaaacacggtagattctcctctcatagtatgagacatgttcaaacaagtgacatgagtaagtggcttagatcacattacgagctctctttacttctgtgtac

SEQ ID NO: 9010 - DNA, 350 bp, Glycine max
  unsure at all n locations
  Clone ID: LIB3092-049-Q1-K1-G10
gccttcaaaggatgtctctttcccagaaattaatctccaaaccggttcaataaacggtttgattggtgggccatctgcgtctagacgtccacttttggccttctttgctggtgggcttcacggcccaattaggcccgttcttcttgaacactgggaaaacaaggacgaagacattcaggttcacaagtaccttccaaagggtgtgtcatactatgagatgttgaggaagagcaagttctgtctttgtcctagtgggtacgaggtaacaagtcccagagtggtggaggcaatctacacaaggtgtgtgccagtgctcattttagaccattatgtgcctncattcaatgatg

SEQ ID NO: 9011 - DNA, 362 bp, Glycine max
  Clone ID: LIB3092-049-Q1-K1-G11
gccttcaaaggatgtctctttcccagaaatttatctccaaaccggttcaatggacggtttcggtggtgggccatctgcgtctagacgtccacttttggccttctttgctggtgggcttcacggcccaattaggcccgttcttcttgaacactgggaaaacaaggactaagacattcaggttcacaagtaccttccaaagggtgtgtcatactatgagatgttgaggaagagcaagttctgtctttgtcctagtgggtacgaggtagcaagtcccagagtgttggaggcaatctacacagggtgtgtgccagtgctcatttcagaccattatgtgcctccattcaatgatgttttgaattgga

SEQ ID NO: 9012 - DNA, 451 bp, Glycine max
  Clone ID: LIB3092-049-Q1-K1-E6
cccacgcgtccgcttctctctccaccatgcaccaagccatttcccacagaagcttcatccccataggagcacgtggcatgccacacgcaggaggaatcaaagaatccaatggcacctatccatccaaagctgccacaatggtatcggagaacgcggtggtaatcattggaaaacggggatgctgcatgtgccacgtggtaaaaaggttgttacaaggtctgggagtgaaccctcccgtgtacgaggtggacgaggaccacgaagccgtcgttgctctccacctgtccccgcagggcgccgaaacggtgcagtttccggcggtgttcctggccggcaagttgttcggagggttggaaagagttatggccactcatatctcaggtgaattggttcccatcttgaaggatgctggtgccttgtggctctgactcttactctagctacttgcatc

SEQ ID NO: 9013 - DNA, 241 bp, Glycine max
  Clone ID: LIB3092-049-Q1-K1-G12
tcgccagagggggagttctcaattgctatacacttttccacggacttgctcagggagcctgccgatgggttgatctacttgcacccgacagctataggttcccaggttatgtactatacatgattccagaagagatatataatgttaattagacaccaatcataagtgataagaccttgatgaaaagaagatgataagaataggtgtttcaaggattatatgatatataaaatcctatata

SEQ ID NO: 9014 - DNA, 252 bp, Glycine max
  Clone ID: LIB3092-049-Q1-K1-C7
cccacgcgtccggaacagctagagcaccggttttaaaatctactccatagggtgactcatacagaaattaccagtatagaacttcaccaaacctatctagaactgctactactaatgacaatgcaatcagctaggctgttgtcgatatgatactgaaactacaggatctggaccatagacagttactacattactacatcgaaacagatctatacggctaaatcagacatgaacctaatctggcataggcac

SEQ ID NO: 9015 - DNA, 453 bp, Glycine max
  Clone ID: LIB3092-049-Q1-K1-C8
aaagcgcagactctagtggaacaaataagcactgttggaaatacgagacacgcatctataaaggtgttgaggaaagaattaatgattttcaagaacctcgggatttgaggtcaaatccttttcaagggggagggaatgatgcaatcctatccgcaagggtattggatatgagactccaagtagattgggccaaagatgcaagagaaggccctagggttcttatgagtcttagggtagattttgggcccatgggccaagtacgaacccacttatctatgtaaatattagattaaggtttcattatttttgggccttgtatttagggctccataatgtaggtagggtaccttagaaatataggatttttcagcccttgtattttaaggtacctagactagtttttgttttaagggtagttttgtaatttcacatgcactaagtgaatatttgatg

SEQ ID NO: 9016 - DNA, 223 bp, Glycine max
  Clone ID: LIB3092-049-Q1-K1-D1
atgggacattcagcaggtgaacaacagtgcttatgaatgtcacaggaatcatgaagggctggggagctgataatgctacaagacaatcttgaaagacgagtccattgtagaaacgcgatttatgcacgacaaagtcgctgatagacgactcttcagaagctccgctagtggtagtcaactcctactaaagtcagctcaatcagtaagagtggaaagacacatg

SEQ ID NO: 9017 - DNA, 68 bp, Glycine max
  Clone ID: LIB3092-049-Q1-K1-D11
cccacacgtccacaacacctttatcacatgttttatattcaaatctttaatggtacaaatgggtaaat

SEQ ID NO: 9018 - DNA, 68 bp, Glycine max
  Clone ID: LIB3092-049-Q1-K1-D12
ctcaaacatacaatacagttttttattattttttgtactcaattattcagtggaacatttgggtaatt

SEQ ID NO: 9019 - DNA, 377 bp, Glycine max
  Clone ID: LIB3092-049-Q1-K1-D2
acaacacctctgtcaacacatgaatattctcggacaatcatacaacgaatcaaacaacggaagctactcttgggggtcgacggatactgatagctcctctaacattccaaacactttatactccgacgaggaagtgcacacactagcttatgcgcatcctaagaaacgtgcggtgcgtcgtatttttaaggagacaagacacccgatgtaccgaggagtacgaaggacgaacaacaacaagctggtctgacaggttcgagatgccaactactagtccaccatgattcgtcttggaacgtatacagtgcctgagatggccgtacgtgcgcacgatgtttccgcgctcgaacttcagggcaagtcggcttgactcaact

SEQ ID NO: 9020 - DNA, 114 bp, Glycine max
  Clone ID: LIB3092-049-Q1-K1-D3
cccacacgtccggaacagcaagcgcacttattttagataccactttctaaaacaactcatagggaaactaccgggatagagactcaaccaaccagtatcttatagttcatacaa

SEQ ID NO: 9021 - DNA, 196 bp, Glycine max
  Clone ID: LIB3092-049-Q1-K1-D4
cccacacgtccggtacagactgctaacaggttttacatgcaacttcctaagattactcagggggaaactaccgggatattcattcaccacaaccagaatcttatagacctaacaatttatatgatacccgtactgccctataaatatgaagctaaatgtacattacacaaacgatccgacgtttaatcattactac

SEQ ID NO: 9022 - DNA, 453 bp, Glycine max
  Clone ID: LIB3092-049-Q1-K1-D6
ctttcaccacttgaagattctccttttcaaatttcaacctttttcccccaaaactaacaaacccctcttcttctcaatcattgcatggctcttcactgattctataataataatttcagattcgtttttcgttttttgttaccatggagttgatttcaggtctaccagaggacgtagcccgagactgtttgattagggttccctatgatcaattcccggcggttgcttcagtctgcaaaggctggagcgcggagattcactcgccggactttcaccgtcggaggagaaccaccaaacaagcccagaaaatcctcgtcacggttcagtccaagatagactccgataaaacccgaaccggtttgctcgcgaagtccaccaccaacccggtttaccggctcagcgtattcgaaccgaagacgggttcatggtgcgagttacccctgggacccgaac

SEQ ID NO: 9023 - DNA, 461 bp, Glycine max
  unsure at all n locations
  Clone ID: LIB3092-049-Q1-K1-D7
cccacgcgtccgcaacaccaatctcacccatttcaaaaaaaggccgttagtgttactattcgtaaaatggccactcttgttctttaccaattctttctcaaactcttgctcctaatttcagtctttcagctttcctttgctgctaggagactcaaccagctggttcaggaccagtcacagttactccattaccacaacggtcctcttctatacggcaaaatcgccgtgaacctaatctggtatggtcacttcaaaccatcccaaaaggccatcatcaccgatttcgttacctcactgtcatccccatcgtctcagagcagccagccatctgttgccacgtggtggaaaaccacggagaagtactaccaactgagtcccaagaacaagaaggctgcttcttctctttctctatcactgngcgatcagtttctcgacgagggtttctcgctggngaagtcact

SEQ ID NO: 9024 - DNA, 456 bp, Glycine max
  Clone ID: LIB3092-049-Q1-K1-D8
gcctggtggttattgggtgctttcgggtccttcaatcaattggaaggctaactacaaatcctggctgagacctaaggaagaacttgaggaagagcaaagaaagattgaagagactgctaagcaactttgctgggagaagaggtcagagaaggctgaaatggccatttggcaaaaggttgtagactctgaatcatgtcaaaggagaaaagatgattctagtgtggaattttgcgagtcctcagatgccgatgatgtctggtataagaaaatggaggcctgcattactcccactcctaaagttactggcgggaatcttaaaccatttccaagcaggctatatgccattcctcccagaattgctagtggcttagttcctggagtttcctctgagacataccaggatgataacaaaaagtggaaaaaacacgtaaaagcttacaagaaaactaatagact

SEQ ID NO: 9025 - DNA, 464 bp, Glycine max
  unsure at all n locations
  Clone ID: LIB3092-049-Q1-K1-E1
gtcctgcatggcttcctccaccggtttcttcacacccctccatgatttcactcaagccagagcagccccatcaggctctttgcctttcatcaaatcctcctttgcttcctccaagtcaaccttttttcaccctgccctttccctacaaacctcttccaactttcccaggctttttggaaagcctaagtatttctctgttcatgcaagggctgccacagaaaaaaccatttatgattttactgtcaaggatattgacagaaaggatgtttctcttagcaagtttaaggggaaggttctattgattgtcaatgttgcttcacgatgtggtttgacatcatcaaattactcggagctgtcacgcttgtatgaaaaatataagaatcaaggtttggagattatagctntcccctgcaatcaatttggtatgcatgaacctggatcatatgaagatattaagcaatttg

SEQ ID NO: 9026 - DNA, 329 bp, Glycine max
  Clone ID: LIB3092-049-Q1-K1-E11
ctagaacacacaatatccttcgttactgatgcatgaactcgaagcttcactgtggcgaatgaggcggctctgttagacacatggacacgtccattagggatgaggcaccagattgcactcgctgaatagggtatcaaatatgagggcaactaatacgacttgctgaacatgaaccgttcgcttctcatactgaacccggggcatatgaaaattcaggacctcatgagatctggcaaaccgatttggcaatctaatggtgctggatagaacactgacgaggtctgtaacgacacacatactttgtcgtcttctgaccttatccagatagc

SEQ ID NO: 9027 - DNA, 331 bp, Glycine max
  Clone ID: LIB3092-049-Q1-K1-C6
aatgtattttggggaaaaacagctcatggtttaaaaacgctaccatttaacatgcctatagggaaccatgcgtatcacactcttcaaatgggtcattgaaatattgctaagttaatgcacatctcattccttggacataatgcatttgatctcctatcttattgaatactactacaatatcgaattccttggtaggcctagtctcttctgtgggccttataatattgcttgataaatgctcaatgttgctataaacctataccacataagagcatatttatgttggagtaatcatactcgaagatgatatagacgattataggatagactc

SEQ ID NO: 9028 - DNA, 442 bp, Glycine max
  Clone ID: LIB3092-049-Q1-K1-E12
cggacgcgtgggcggacgcgtgggcggacgcgtgggcataacacaaagcacaaagcaaagctcatccttgagttaaaaaatggcagcagcttcttccatggctctctcatccccatccttggctggcaaggccgtgaagctgggcccatcagccccagaagtgggaagggtgagcatgaggaagaccgtcaccaagcaggtctcctcaggaagcccatggtacggcccagaccgagtcaagtacttgggcccattctctggcgagcccccgtcctacctaaccggagagttcccaggcgactacggctgggacactgctgggctttccgcagacccagaaaccttcgccaagaaccgtgaactcgaagtgatccactccaggtgggccatgctcggagccttgggctgcgtcttcccggaggtgctgtcccgcaacggggtg

SEQ ID NO: 9029 - DNA, 237 bp, Glycine max
  Clone ID: LIB3092-049-Q1-K1-E2
gtcacacgttcgttccactcatccacttttctttacaacagcatttcaccattttccacagtggctatctaccggtattatcacgtggcataccacactcatgaagtaccaaagaatccaatgccaccgatccatacaccaatatcacgatgccatctctgaacacatttgtcatcattgcaaaacaagcaaactgccatatccacgtaggaaaaaagttgtttcaaggtttaaaac

SEQ ID NO: 9030 - DNA, 431 bp, Glycine max
  Clone ID: LIB3092-049-Q1-K1-E4
cgcagagcccgattccagattgcgaaattccgatggataaaacggtgaaagacaactcagcgtggaacgacatcgttttgcagggggtcatggttctggtgatggtcctctcctacttcttcatgcacgacgtgcccaagaagctgtgggccaagctccgtctaagcaaccgcgccgacatccaagccaagcgccacttcgtccaaggggcccagctcctggcccgggcccgcgccttcaagtccaaggccctcgccaaggaggcccaggcccaggctcagcgcgccatcgccctcgacccgagcgacgccgcgccgcacctcctcaaggccctcgccttagacttcctgggcctccgctccgctgcgctggactcgctcgacgaggcgctctcccccgccgccgcgaagtccctttcggactcggagcgc

SEQ ID NO: 9031 - DNA, 420 bp, Glycine max
  Clone ID: LIB3092-049-Q1-K1-E5
cggacgcgtgggcggacgcgtgggcggacgcgtgggcggacgcgtgggcggacgcgtgggcagagggcaaattgaagggtattttgggttacacagaagatgatgttgtgtctactgattttgctggtgataacaggtctagcatatttgacgccaaggccggaatttctttgaatgacaactttgtaaaacttgtttcctggtatgacaacgaatggggttacagttcccgtgtgattgatttgattgtccacattgcatccgtggcttaaagaattgagtctgaacttggatatcatcgctacaccgttccaaatttttatcttaatcgagtttattttagtgtgaattcggaataaacactttgtgttgctgtgagagatatcattgaaaaacagtgcaatatgttgagttggtaga

SEQ ID NO: 9032 - DNA, 455 bp, Glycine max
  unsure at all n locations
  Clone ID: LIB3092-049-Q1-K1-B12
agcgcttatacgagcacaactggaagcgagtagaacagttcataaacgaagttaagatcctgacacgtttgcgtcacaaaaatcttgtgtcactctacggctgcacttcacggcacagccgtgaactcctacttgtgtatgaatacatttcaaacggcactgtagcgtgtcatctccatggtggattagcgaagcctggctccctaccatggtctacacgaatgaaaattgccgtagagactgctagtgcattggcttatctccacgcctctgacatcattcaccgtgacgtgaaaacaaacaatattctcctcgacaacaacttttgtgttaaggtagcagattttggactttcaagagacgtccccaacgatgtcacacatgtctccacagctccacaagggtccccaggttaccttgaccctgaatattacaatngctatcagcttactagt

SEQ ID NO: 9033 - DNA, 237 bp, Glycine max
  Clone ID: LIB3092-049-Q1-K1-B3
cccacgcgtccggcagagtctgatcacaggtttaacataccccaacctaggcacaatgacggggaagctagcgcgagctagataggtcgaattagtgtcgtggaatagagacagtgcatgagatgacggctcagtttatgcatgatgaccatgagagtatcatacacgtatacatagaagtcgtaacttgatcacagaaccatagataggtaccgatctacgcacatgaaaaccatc

SEQ ID NO: 9034 - DNA, 467 bp, Glycine max
  Clone ID: LIB3092-049-Q1-K1-B4
cccacgcgtccggaagagacatggaaaaatcgtaataggccaaaacctatatacagcaaggatatcctgtccgatgaaccggctcaacaaaatggaaatttggagaaaaaaatatgaatctgatgaattatcagtttccgccatggcatccttgggcatgaagaacccacaggatatttggagtctcaaagaaaattctagaatatttcttgaagcatttagacttttttttacaaaaagggaaaaggagattggcaatctaagctttgataaagatgatcagttggctgtagaatttgttactgcagctgcaaacataagggctgcttcatttggcatccctctccaaaacctttttgaagctaaaggtattgctggtaatattgtgcatgctgatgcgactacaaatgctgtgattgctgggttgattgtcattgaagcaatcaaagtgctgaataatgacaata

SEQ ID NO: 9035 - DNA, 446 bp, Glycine max
  Clone ID: LIB3092-049-Q1-K1-B6
catagagttaccgcaaagccagatcactggattaagcacctcataagtcatatcattcataggcacctcacggataatgaagagaaaagagaaaaagttggaatagacagatggatcaagagtatttactttaaactatatatatatatatctataggtgtattaaatattcatacaaaagctagctcgttagtatctcatctgacttctacatgcatgataggaatggataacaaagagtcactcctacaatcactgtatcattaatagctgcattacctgaactcagtattcagtagcatcggcataaagagacgtgatgaactgatcatgtgtcaatcatgatgacatcaattctttttatcgacgattattaattattaggtttcgttagcaaatatcgaaccacattgatctttctgctttcctctaccactacggatggc

SEQ ID NO: 9036 - DNA, 432 bp, Glycine max
  Clone ID: LIB3092-049-Q1-K1-B7
cccacgcgtccgtagatgctagagatccttcaatatgttttaaatcattgtctgaaagatacaagtattgaaggccctttaactcccctaaccaggatggaacagaatcaaaattgttttttgaaaggtcgagggaaactaaggaagtcagattctctaaagcagatggaagtgagccataaagagcattactatcgagaaatagatggacaaggttagtacaagttcccaaccaaaatggagtggaattcaagttgttggaagaaaggtcaatctctgcaatggaattcatattttgaaaagcatccagaaatggagcttgaatttcattttctgctagattgaggacttccaatctggaaaggtttgtggctctaacaagttgatgagtgtgtaacttgttgagtccacaattcatcaattctatttcta

SEQ ID NO: 9037 - DNA, 456 bp, Glycine max
  Clone ID: LIB3092-049-Q1-K1-B8
cccacgcgtccggtccagttatagctgatgttgtcacagctttgagttaccttgcttcacagaaatatgacccgaatactcagacattacaaagctctcgccttgctcctggtactcctccaagatccaagaggggatattgatatggagcttaatgtttattagctatataatagtctggtgaaaatttcaaacatcttacaagttatagatttgtagatgttaataccagttgtcttatggtggtgttctttcttcagagcatagatgctaaaaatgttgtaaatttttgttctaccctggtgcacagaactgctcctatttccatttggagccaagatagtatatcctcttccttttcttagtttctatttaaaggcatattgctggattcatgattcatgttccttctgtcttactggagtcccagcattctatagctgtctattcttcttt

SEQ ID NO: 9038 - DNA, 357 bp, Glycine max
  Clone ID: LIB3092-049-Q1-K1-B9
ctcacgcgcattccaattatctacatcatcttcggatctggttaagatgaggggtactacaggcacctcacgaatttacgttgacaagccaaagtaggcacatagagtttccacatcaatagatcattctatgcactcaatattatgtctcttaacatttatgatctattttctcatctcaggaagtgttacttactttagacgtataaatatatgtatactctgatacaccttgatacattgttttgatttatgataaggacgtaaatcattgtttaaactgtaattttggttgaatctaagttcacttaactttagagattcctttttatagctttatattggccatcgaactga

SEQ ID NO: 9039 - DNA, 459 bp, Glycine max
  Clone ID: LIB3092-049-Q1-K1-C1
aattcttaccagaggaagaatcctcagaacctgaaaatccatcaaaggacaacatggatgatgacacacttctgctttcttcaattgaatctgaggagaatgtgaagttaccagtctcagctaaaatcaaacaccaaattggaaagcttttagtcaactccaatttcagagccatattttcaccagcaactcttggagcgattgttggctttattgttggagtagttccccagatacgtaaattgatgattggcggcgatgcttcacttcatgtgattcaggactcagttaccatggttggtgaagcagccgtcccagttataacccttataatgggagcaaacctccttaaaggtttgaagggagcaaatacttcgttttggacaattcttggaattatagtagttcgatatattttcctgccaattttgggtattctagttattaaaggagcaacac

SEQ ID NO: 9040 - DNA, 441 bp, Glycine max
  Clone ID: LIB3092-049-Q1-K1-C10
ctctgacaccattgacaatgttaaggctaatattcaggacaaagagggtatgccaccagaccaacagaggctcatctttgctggaaagcagctagaagatggccgaaccttggctgattacaacatccaaaaagaatctaccctgcacttggttctacgccttcgtggtgggatgcaaatctttgtcaagactctcactggaaagaccatcacccttgaggtggagagctctgacactattgacaatgtcaaagccaagattcaggacaaagaaggtatcccaccagaccaacagaggctcatttttgctggcaaacagcttgaagatggccgaaccttggctgattacaacatccaaaaagaatctaccctacacttggtgctccgtctgcgcggtggtatgcaaatctttgtgaagacccttactgggaagaccattac

SEQ ID NO: 9041 - DNA, 417 bp, Glycine max
  Clone ID: LIB3092-049-Q1-K1-C11
atcaaatttgatgtggggaatgttgttatggtcactggtggaaggaacagaggccgtgtcggtgtcatcaagaacagagagaaacacaagggaagttttgagaccatccatgtccaggatgcaactggtcacgaatttgcaactcgtatgggtaatgtcttcatcattggcaaagggacaaaaccttgggtgtctcttcccaaaggcaagggtatcaagttgtctatcattgaggaggctagaaagaggcttgctgcacaaaatgaaacagttgcctaaatgattttgctggtaaaatttagctattttatctcttcggctgtctgagcataggatttttggtgaaatgactgagcatagttttgtatcaaactttatattacaattttgagctgttgatttcagtttttattaaaa

SEQ ID NO: 9042 - DNA, 124 bp, Glycine max
  Clone ID: LIB3092-049-Q1-K1-C12
atcacacgtgctatttggtgtgtcatcatgttctgtgttaaatggttcagcggcatggtcgtggttgtcataaccataatgtctgcctatgtgcgtgtatagatgatcactgtccaacattcaa

SEQ ID NO: 9043 - DNA, 318 bp, Glycine max
  Clone ID: LIB3092-049-Q1-K1-C2
accacacgtccggtagtgtgtgaggagtagtttacacatgagctgtgatcatctcatgagacgcacaccttagggagctacatagactgaatatgacgtaaacatctcagacactggatactattctttgaaagtcttaacactatcgtatgcaaatatctcaatacttcacagttcaaacatatctgcgaagctcacatacactgcgcgtataaaacatcaagtaatgggacattcttagatcgaagctaatatgcttgatgagcttaaatcgcctactatcatatttaagtctatacctaaaccggtccgaacaac

SEQ ID NO: 9044 - DNA, 463 bp, Glycine max
  Clone ID: LIB3092-049-Q1-K1-C4
cccacgcgtccgtcatagtctgatcattggtccaacatagcccagcctaaaatttaagtaggagaagctagcactagctagttaggtctaatttctgtcttgtaattgagacaatttatgaaataaccgcacaattgattcatgatgaagaagagagtagcaagcaccagcaatgagtcctctaaacttgatcgcaaaaccattgataggaaccgcagaactcacatgaaatccctctgccatcagctatcttctcttattactcccaatctcaaaccagtcaaacccaaattgatgctagggctgcaggaccagctggatcttgcagcaaggtatatatgacatatgacagagagagtagagtaactgaataggcagaaggagcaagccatgtcaaaccaaagcaatgatggtagaaaaatgttcaacaataatgttgagtccaaattgccaatacttgagc

SEQ ID NO: 9045 - DNA, 239 bp, Glycine max
  Clone ID: LIB3092-049-Q1-K1-B10
atcaacgtactatacggtttttcatcatgttctcagctcaatgggacagggggatctacggggacctcacgaacatactcagacactcaacaggtatcgagacgatacatgtcctctatggatcatcatatgaccttatagatagcattggtaatgtacttgttctattcaatactatagtgaatcgttacaaactctacacagaccatgatatcaaatcgctgataaacctagattca

SEQ ID NO: 9046 - DNA, 450 bp, Glycine max
  Clone ID: LIB3092-049-Q1-K1-C5
caaaaagtaaccgtaaagcaagaacacttgactaagcaccgcataagtcataacattcagattcaggacacggagaaggaagagaaaagagaaaaagttggaataaacagatggatcaagtgtcttgagtttaaattttagatatatatatatatagttgtattaaatattcatacaaaagttttctcgttagtattttatctgatttcaacatgaatgataggaatggaaaacattgagccgcacctacaatcactgcaactttaattgctacaatacctgaactcaatattcagtagcagcagcataaagagacgtgatgaactgatgatgtgtgaattatgatgacattaattttttttattgacaattattaattattagtttttgttagcaaagatggaaccacattgtttttccttcttccctacaccactacggatggcgttc

SEQ ID NO: 9047 - DNA, 448 bp, Glycine max
  Clone ID: LIB3092-048-Q1-K1-H6
cccacgcgtccgaaatcgaggaggtataggatggaacaggggatatacgcggagctgagcgaggcgatggagtgtttggaacacatatgctatgaggggtgcacccacgttggaccgtacgatgcggaggtgaagagggagaggacgccgtgtgggagattcgccacgtgccagggtcttcaggttctgatccgccactttgccacgtgcgagaagaaggttcgcggtggctgcgtgcggtgcaagagaatgtggcagctctttcgactccattcctatgtttgtcacgacaccgattcctcctgcaaggttcccttttgcaggcaatttcaattgagaatgcagcaagagaaaaggaaagatgatgctaagtggaaactactaacgaggaaggtggccttagccaaagtcatgtcttcattgtcactgccaaagaggaagcgagatg

SEQ ID NO: 9048 - DNA, 209 bp, Glycine max
  Clone ID: LIB3092-048-Q1-K1-H7
tttctgaaatcttggggggaggatgatttttgcacacttatgtgatgaacctaaaggtctgaaaactgtgatgtgcatgtccctcatgttttaccattggccattgccaaagtacttgcattcagactaaatgatagggatcctttagtagatgatagactaattcttcttgggtactgtgcatttttagagaccctatactttcattt

SEQ ID NO: 9049 - DNA, 428 bp, Glycine max
  Clone ID: LIB3092-048-Q1-K1-H8
aagagcaccaaagtacttgtgagtgtatacttaacacaaactaagatcaacatggactacggcacccgcgtttcagaagttgagagggaacctatcatggagtattccacaccacgaccaatgatgggcaactaccaccaccctaatgctcaccgtgtcctcaacgagaagattgtttatgaggaggatgtgattggaggatcccgccacaaccacatgcatcaccaccaccctgagactcatgagagagtcaaggtggtggagtatgaacaagttcctgagaggcgcgttgtctatgaagagaaagttgcttatgacaacgatcgttactactcttcaaggtattgaaattggacatatggaagaacacctataacgtgttatcatgtggctttttattatgcaggctacctagtataccaaaagca

SEQ ID NO: 9050 - DNA, 427 bp, Glycine max
  Clone ID: LIB3092-048-Q1-K1-H9
cccacgcgtccgcagattattatgacaagcagctgctacaggtacagggaaggagggcgtggtacataggtcctctttccctgtgcaaccaagacaaaggcaagcgaggaaagcaagcttccgttgaccaaggagacattttgaagtggctggactccaagaaagcaaattcggtggtgtacgtttgttttgagaagcatagccaacttcagtgaaactcagctgagagaaatagcgagggggcttgaggattcggggcaacaattcatatgggttgtgaggagaagcgacaaagacgacaaggggtggcttccagaggggtttgagacaagaacgacaagtgaagggagaagagtgattatatggggttgggcaccccaagtgctaattctggaccatcaagctgtgggagcctttgtcacacact

SEQ ID NO: 9051 - DNA, 99 bp, Glycine max
  Clone ID: LIB3092-049-Q1-K1-A1
gacacacgttcaggcaatagtaacaacgcttattacttgttattttcttcattttattatgatgtcacatcatggtgcttggaagatcaaacaataatc

SEQ ID NO: 9052 - DNA, 435 bp, Glycine max
  Clone ID: LIB3092-049-Q1-K1-A10
gctttatcttcccttcccttcatctccgcttcaaaataatatcctcctctctatctctgttcgaaacaagtccaacaccagcaacacactgcttcaatctcaatcgggtacccttctctttttctcttcaccttttaatgttttttgtttcggtctttttagaaaaattaactagattattctttgacattgcattacatcaattgggtgatcttgggtgtggaaaaagattagatttttgcccttgcttttctatggttttgtttagagccaaatgggtatgtgtgtgcttgtgaatttattttcattgtcatatttgtgtttgatttgttgcatgacaggcacattgagaaatggttttgagtaatgggaaaactgaagcaccattgccaagtagtaatgggggaagtgctgagaatgataacaatgagaaga

SEQ ID NO: 9053 - DNA, 403 bp, Glycine max
  Clone ID: LIB3092-049-Q1-K1-A12
caggaattgatgtgcgcagtaaatcaagaattatatcaaagcctgttgaagggccctctgagctccctaaatggaactatgatggatctagcactggacaggcacctggtgatgatagtgaagtaatcctatatcctcaatcaattttcaaagatcctttccgtggcggtaacaatattttggtcatttgcgattcttacaccccacaaggtgagcctatccctacgaacaagagacacatagctgctgaaattttcagtaacccaaaggtccaatctgaagttccatggtatggaatataacaagagtacaccttacttcaaacaaatgtgaaatggccattaagatggccggttgatggctattccggcgctcagggtccttattattgcaatgcttgggc

SEQ ID NO: 9054 - DNA, 402 bp, Glycine max
  Clone ID: LIB3092-049-Q1-K1-A2
ccacgcgtccggaagagatggccaccgttccaaggcagctcgtgtgtgagatcgtcaagagggacatttcctggttggtcaagcactttggaaggggcacccagagcgtacaattcatcagagagagcaacaatctctacaacctcaattcgatcaagtactatggtttggcatacaagaaatctgatactgtacagcctgagggctaagatcaggctgagtagttggctacaaccaagacatagaatcaatgcatgaccgctgcattgctccacaaatctgtgatgaagaaagagttcaagaggatggcaaaagctgatgaaaaccatgtggcccaaaattactacaggcccgatctcaagaaagctgcccttgcaaggttgagtgctgttcacagaagcc

SEQ ID NO: 9055 - DNA, 322 bp, Glycine max
  Clone ID: LIB3092-049-Q1-K1-A3
cccacgcgtccggacaagaccattgatggcagcaacaagctctggcactcttacagcaactgcgtccctagggcaaggcacgggcaccaaagccaatgctcttagagatgatgattcaatggaaacagcaacatacaccatgggcaaagatttgtgaaatggaccagactgagagaaatacttggtgacccttttcagctcagacgccttcatactagaaaggacaatgcccacgggattatcgatgggacactgctggcttatctgctgacccggaaacctttgacaagaacagggctcatgaggatatccataggagatg

SEQ ID NO: 9056 - DNA, 285 bp, Glycine max
  Clone ID: LIB3092-049-Q1-K1-A4
gccacacgtccagaatagacattcaataacttttataagcccatacctatatacagcaatgagatcctttccggggaacctgagtaacaaaatcgaaattcttacaagatactattaatcatgaagaattatcagaataccgccattgcatacttgggcattaataacccacacagatacattgagtcttaaacaaaacatctacaatatctttttacacattcagacttttcttaacaaatatgcaaaaggacatttgctatctaatcttttataaagaacatc

SEQ ID NO: 9057 - DNA, 459 bp, Glycine max
  Clone ID: LIB3092-049-Q1-K1-A5
cccacgcgtccggaggtgtttctggagatgagatgatacggaatcgtgtggtagaagctttatatcgacggattatgcgagcttacaatgacaaaaaatctttcagggttatagttgtcatacctatcctgcctggctttcagggcggtcttgatgatagaggagcagcatctgtgagagccataatgcattgacagtatcgaaccatttgacgagggcagaattctatcatgcataatctttatgaacttcgtggttctaaaatacatgactacatctctttttatggcctaaggtcttatggtagactctctaatggtggccctgtggcaaccagacaggggtatgttcacagtaaaatcatgattgttgatgatagtattactgtgattggatctgctaatattaatgataggagcttacttggctccagagattctgagattggtatagttttag

SEQ ID NO: 9058 - DNA, 457 bp, Glycine max
  Clone ID: LIB3092-049-Q1-K1-A6
attaggatgtcattgactggcaagctgacatagaaaaatgcttgacttgggaagctcacaggcgactttcaaacggattgtctattaactttcttgataccgctgccaaagagttaggctgtactatttccatgtgaaatgaaatcatccatcttagtccgtgacaatttttttctatacgtctagtaaaaaaacagttattgatatgcttattgaactaacgggtttgcaaataagcataattctgctagtcctgttgaaaagagctgcagtcataattctagtatgtttatagaaagctcattttgtatcatgtatgtactgtagctaaactaagtttcaccctgaacttgcttgtgagtctgctctcgatagaacagtcttgtacagtaacgaaaaacgctgtaaccaggtccttctctatattgtctcattttgcgttatgcttatgttgatt

SEQ ID NO: 9059 - DNA, 453 bp, Glycine max
  Clone ID: LIB3092-049-Q1-K1-A7
acctcgtcttccaaaatattcacgtttcttttcccacacactatcttaagtgttaaaaacatgttttttttcaaagcaattagaatttagaccacaaaaggaacaccgaagagatgtacggacagagtagtagtagcagtagttcttacgaatcggatttggcgctgttggattcgattcggcaccacttgctgggcgagtccgaatccatattcggcgccccgaatttcgggtcgggtcggagctccagtttcagcagcttggactcgtgtttgagcgacaattggggcgagcttccgtttaaggaggacgatacagaagacatggtgttgtacggcgttctccgtgacgccgttaacgtcgggtgggtcccatctctcgatgccgggtcgtccgagagcgtgtccgtcggttttccggcggtgaagctggaaccggacttgatgccggcgc

SEQ ID NO: 9060 - DNA, 455 bp, Glycine max
  Clone ID: LIB3092-049-Q1-K1-A8
gggcctacagaaaatgggagtcatacctgtgatggttacaggagataactggagaacagctggagctgtagccaaagaggttggcattcaagatgttagggcagaagttatgcctgcaggaaaggctgatgttgttcgttcattccaaaaggatggaagtatagttgcaatggtgggtgatggcatcaatgactctccagcattagctgctgcagatgttggtatggcaattggggctgggacagatgttgcaatagaagctgctaactatgtgctgatgagagataacttggaagatgtgatcactgccattgatctttccaaaaagacctttttccgtattcgattgaattatgtatttgcgatggcttacaatgttgttgctataccagttgctgccggggttttctttccttggttggggatcaagctgtcaccatgggttgctggtgcat

SEQ ID NO: 9061 - DNA, 441 bp, Glycine max
  unsure at all n locations
  Clone ID: LIB3092-049-Q1-K1-A9
caaaaactcccgttttctctctctgtttttccatggccatctgatcaaactgttcttgattgtctctctcagtttttgctattctgagtgatgggtatgccctgccgctgttcccacacctcccacatcactgagatcatcatcaccagcttcttccgccacaagtcttaaattacaacaatttccctcaattattcatcaaccaaccaccttaatagccttttccaatggttccttaaagatccaacttggtcggagtaaacatggcggctagtggaagttccttttccaacatcactagcttccttcgcaaccaacaaccctcttcccaacctctcgattcttctctcttcctctctgctccttcaatttttgtttcaggttcgagatccatggtgagttttgaagcanaatgaagggaaggggtgtaacggctccttc

SEQ ID NO: 9062 - DNA, 318 bp, Glycine max
  Clone ID: LIB3092-048-Q1-K1-F4
gcattctctgactcgaataaagatggtgtgatctacccatgggagactcttaaaggcgttgcgtgaagtctggactggagcattgctgtgcggtagacgtactcttttcatgaatcgtcatgtctcaggcagagtactcgtcccggataggctccatatatacgttcatcgattgaaattgagactgtccaacgcggcactcacggcaatgacactggagtctacgatactgaatgaagggtagcaccttcagaatttgaagcaatttctaacatgcatgcacatgcacatccaaatgcttcgacatatgatgagtta

SEQ ID NO: 9063 - DNA, 424 bp, Glycine max
  Clone ID: LIB3092-048-Q1-K1-F5
gttcgtcctcatcgttcttctcttcgccttcaccatcttcgccttcgttgtcaccaacaagggcgctggcgaagttgtgtctaatagagggtataaggagtataggcttggggattactcgaactggttgcagaagagggttaacaacactaagacgtggaacaggatcaggagttgcttgcaatctgggaaagtctgcactgagtttcaatccaagtttctaaacgacaccgttactgagttttactccgaaaacctgtccgcgcttcagtctggatgctgtaaacctgcagaagaatgccagtttagctatgtgaatccaacgacatggacgaagcccacatatgtgactaatcagagcaacccagattgtgatgcttggaataacgatccaacagttctgtgctttaattgccaatcatgc

SEQ ID NO: 9064 - DNA, 439 bp, Glycine max
  Clone ID: LIB3092-048-Q1-K1-F6
cccacgcgtccggccacatgaatgagagattgcggaagaggaagaagaagatgatcaacagcaacaacaacaacaagcaacacagcaacaccaactgaaacatcatcatcagaatcatcatcatcatctacgaccctaaattttttcactttctctctctctctctctctctctccctccctctctctgtctgtgtctgtgtctgtgtctgtgtctttttttttttttttttttttaattgtgagagaggaaggagataaagaagatgaaggaaaacagtgatgggtttgtgagagcggatcaaattgatctgaagagcatagatgaacagttggagaggcaccttagcaaggtgttgaccatataaaagaaaaagcgctctgaagggggcgaagaaaatgctgctgctcatgatcatgttcacaccaccagtgccact

SEQ ID NO: 9065 - DNA, 444 bp, Glycine max
  Clone ID: LIB3092-048-Q1-K1-F8
cccacgcgtccgctgaaacgcaatatgctatacgatcactgacagagtcagtgtttctgggtgtttgcactttagattcaaacctgataggcgtcgttgtaaaaggaaaaaaaaagttcagtgtttttgtggtctcgtatcagaactcagaagttatcatccttaatatcttcaaacaaggtttttcacagcacatcgatacgaggatgttgcggctgtcgattcaacgagtgaggaagttgaactttctcagtccccagatctctgctttgggaaggtcccatttgtcaactgctgctgaaccatcttccagtaagagcaatccaccgagggttccaaatcttattggaggcaagtttgttgactcaaaagcatcaactgtcattgatgttataaacccagcaacccaagaaagttgttcacaagttcctttgtctactgatg

SEQ ID NO: 9066 - DNA, 430 bp, Glycine max
  Clone ID: LIB3092-048-Q1-K1-G10
caacaaatgaatattctcggacaatcattcaacgaatcaaacaacggaagctactcttgtgcgtcgccggagactggtagctcctctaacattccaaacacttttcactccgacgaggaagtgcacacactagcttctgcgcgtcctaagaaacgtgcggggcgtcgaatttttaaggagacaagacacccgttgtaccgaggagtacgaaggaggaacaacaacaagtgggtctgcgaggttcgtgttcccaacgacaagtccaccaggatttggcttggaacgtatccagtgcctgagatggcctcacgtgcgcacgacgtcgccgcgcttgcgcttcggggcaagtcggcttgcctcaacttcgccaactcggcgtggcggctgcccttgccggcgtcgacaaatgcgaaggagatacggcgagtgg

SEQ ID NO: 9067 - DNA, 458 bp, Glycine max
  unsure at all n locations
  Clone ID: LIB3092-048-Q1-K1-G12
ggcacgcttgtcactgctcattttcgcgttctgcgccgtcgccgtcgccgtcgccgtcgcgggctcctccttcgatgatgccaaccctatccgtttagcgtcggacttggagtcgcaggtgctggacgtgatcggacagagccgccacgctctctccttcgcccgcttcgctcgccgccacggcaagcgctaccgttccgtcgacgagatccgcaaccgcttccggatcttctctgataatcttaaactcatcagatccaccaacaggaggtctctcacctacacgctcggcgtcaatcattttgctgactggacttgggaggagttcaccagacacaagctcggcgctcctcagaattgctctgccacgctcaaaggcaaccacaggctcaccgatgctgntctttctgacgagaaagactggagaaaagaaggtataggcagccaatgttaagatc

SEQ ID NO: 9068 - DNA, 409 bp, Glycine max
  Clone ID: LIB3092-048-Q1-K1-G3
cccacgcgtccgctccgccttggccaaatccctagcctcttgttgtttgattgagatgacgatggcgttgttagcgggtcagagctccatttccgcgcttccctttgttaacccaacttccttgagcttcaaacctctcgcctttaccaaatccctagctctcccttcagcacagaggccaacttcgctgaggctgaaatgcaagatggagagcgacggcgacattctgcgggggagcactcgcacggtgacgacgctgatgggactcgccgtgttgctgatgaagaaggcggccattccagtgttgaacatcaacatcaacagcagcagcaacagcgtgtccacgatgggtgctttgatcttggcatctctgcgggaccgttccagtgcgagtggggccctaaacacg

SEQ ID NO: 9069 - DNA, 449 bp, Glycine max
  Clone ID: LIB3092-048-Q1-K1-G5
aaagagccattgaactttgactataatattcagagttcagattactcactctaatcttctgagttttcattttggggtttaagtttctgaaggaaaaaaaaatgataaagtttgttctatttttgttctgctttgcctctgcactgaccctttcagtatcggagtccaaatcagcttcagtgcaacctcatgctgctgaatctttctctgttggatatattcagatgaagactgcagcgaactgttcttacctggtagttatatctacgagttgttcatcgcctaagttcacaacggataagatcggtatcacgtttggggatgctaatggcaaccaggtatatgaaccaagactggatgatccaatttcaaggacatttgagcagtgttcttcagatacatttcagatagattgtgcttgtgcatctccaaattgctatgtgtaccta

SEQ ID NO: 9070 - DNA, 447 bp, Glycine max
  unsure at all n locations
  Clone ID: LIB3092-048-Q1-K1-G6
cccacgcgtccgcttgcctgtgatggccaacaagcttggtggggatggcctaattgatgaactgtgcaatgggttcaatctgttgaaggattctgataaaggggtcatcacctttgagagcctcaagaggaactctgccttgtttggccttcagggtcttagtgatgaagatcttcggtccatggttttggaaggtgactttgatggtgatggtgcactcaatcagttggagttctgtgttttgatgttcagactcagccctgaattgatggaaggctcaaagatgtggcttgaacaagtccttcaacaagagcttaaggattatttctaactttcctttnttttttttcctccttacccttttcattcatttggcattttgggctatttgccatatacttgtgtaagaaaattggaaagtaaaaccaagaaatgaaatggcaaaat

SEQ ID NO: 9071 - DNA, 125 bp, Glycine max
  Clone ID: LIB3092-048-Q1-K1-G9
gtcactgacaactgaatccatcaattatacctttatcacctaaaactcatttaaaaatgtggaactatgaatatctgtttaggaaaattttgtttaatgcaaattgttgtttcttgtgtgttttg

SEQ ID NO: 9072 - DNA, 456 bp, Glycine max
  unsure at all n locations
  Clone ID: LIB3092-048-Q1-K1-H11
cccacgcgtccgccaccctttattctcttacgtctccaactaatcatacagatcgataatcgtaatcatatctatagctaattaacttaattattttcatccctctactcttcttctctcctctaaactctcttttccattcttgcttcctttgtgggttgtttgagttttctttccttcaatttaattgaaagatggcttgcttggtatctcgctcgggaagggaattgcagaggtacaacaacatgggtggccggcaagttgttgggtgcataccttatagatataaacaagacatagagggtaaaatgagcaacgaattggaagtactagtggttagttcacagaaaggtcaaggatngatgttccctaanggaagatgggaactngatgaatccgtagaagaagcagcttataaggaatccctngaagaagcangagtaatgggaaatgatg

SEQ ID NO: 9073 - DNA, 474 bp, Glycine max
  unsure at all n locations
  Clone ID: LIB3092-048-Q1-K1-H12
aaatccgattactcgcgaagaacaagccggagaatcgcatcaaaatcgcgaaagccggcgcaatcaaaccgctaatttctctcatttcctcgccggaccttcagctccaggaatacggcgtcaccgcgattttgaacctctcgctctgcgacgagaacaaggaggtgatagcctcctcaggcgcgatcaagccgctggttcgcgcgctgaacagtggaaccgccacggcgaaggagaacgcggcgtgcgcgcttctaagactctcgcaggtggaggagaacaaggcggcgatcgggcggtccggcgcgattccgcttcttgtgagcctcctggagagcggcgggttccgcgcgaagaaggacgcgtcgacggcgctgtactcgctgtgcacggtgaaggagaataagatcagagcggtgaaggcggngatcatgaatgtgctggtggagttgatggcggacttcgagtcgaaca

SEQ ID NO: 9074 - DNA, 445 bp, Glycine max
  Clone ID: LIB3092-048-Q1-K1-H2
aaaaaaacccacctttttagttttctctcatagtctcatctcatcacgacaaacaacaatgtaatctatgcaaccccaaagaaacccaattcaatagaaaaagaaaacaaaaaatcagatgagccagtggatacacgtggcggtggcagcatccgccgtgggatgcgtctcgacccttttgttggtctttctctggcgttggtgccataaaagaaatcatcgcagaaatttcgttgagccggctagtttgaccagagtggagagtgtccagggagggatttctgtttccaggcttcatcaacaacaacaaccttttcaattggatcagggaaacaagaacaacaacaagggcaattacaattactatgtttttcgcggtggtggcgtgtcggggaaaagaaagttgttcaattggggtgatcatccatctatggccgctgatgct

SEQ ID NO: 9075 - DNA, 441 bp, Glycine max
  unsure at all n locations
  Clone ID: LIB3092-048-Q1-K1-F2
cttatcccttcaccttcttcttcctccttaaaccctatcacactctccctaaaccctaaatgcccagacctctccgccgcagcagcatttcaatctcgatattctccggcaccggcgccggaggcctaattccactcttcggtgctccgcctcctcgttctcggagaagcaccacacgaactcctcgaactccgacgacgtggtggagctccccctgttccctctccctctggtcctcttccctggcgccatcctccccttgcagatcttcgagttccgctaccgcatcatgatgcacacgctcctncacaccgacctacgcttcggcatcatctacaccgacgccgtctctggaaccgccgaagtcggctgcgtcggcgaagtcatcaagcacgagcgcctcgtcgacgaccgggtctttctcatctgcaaggggcaaga

SEQ ID NO: 9076 - DNA, 450 bp, Glycine max
  Clone ID: LIB3092-048-Q1-K1-C5
cctcattctccttcttaaaattcatcttcaattcaattctctctctctgtctctgtgaccggtcctcattcgcatggagaacgacaccgccgccgccgctaacaataacaccaccgccaccgccgccgcgaaagcaggttccggaggagtgaaatcgaacaaccataacctagaagaggagcattccaatttgaatggcgaggagcagatggcagaacaagtggaggcagaagaagaagaagaagaagaagaagatcgacaagccgatgaaggcgaaggagaagaaactggatctgctgcgcccaacccgcgccaaccttccagaacccctttcactaatctcagccaggtcgatgctgacctcgctctcgctcgaacccttcaggagcaggaaagggcatatatgatgctgagaatgaataatgatggaagtgattatggaagttggga

SEQ ID NO: 9077 - DNA, 445 bp, Glycine max
  unsure at all n locations
  Clone ID: LIB3092-048-Q1-K1-C7
ctctctctcgtgactcaatcacttcgttttctccgctttcatcttctcatctcttctcttgtccctgctaatcatggcaaccttgtcaactgtgaaggtttccccccattgcatgtttcaaacagcaagcaaaaatccatccactgttgccaccacaatgaagtgcccttcttcttttgggtctgtgaagagcatttccagatcttttggcttgaagtcatcctcttcatttagagtcactgccatggcttcttacaaggttaagctgattggcccagatggaacagagaacgagtttgaagccactgacgatacttacatcttagatgcagcagagagtgctggagttgaacttccttactcttgccgagccggagcatgctctacctgtgctgngaagattgttgctggttctgtggaccagtctgatggctcattcctcgat

SEQ ID NO: 9078 - DNA, 413 bp, Glycine max
  Clone ID: LIB3092-048-Q1-K1-C8
tttccattctcttcaacctaacgcagcatcgctatactcttcattccatggctttgcccaagcagcaaaccgtggattaccctagtttcaaactcgttatcgtcggtgatggtggcacaggaaagacaacctttgtgaaaaggcatctcaccggagaattcgagaagaaatatgagccaaccatcggtgtggaggttcacccattggattttttcacaaactgtggaaagattcgattctactgctgggatactgctggacaggagaagtttggtggcctcagagatggatactatatccatgggcaatgtgctattataatgtttgatgttactgcccggctaacatacaaaaatgttcccacctggcaccgtgatctttgcagggtctgtgaaaacatcccaattgttctt

SEQ ID NO: 9079 - DNA, 315 bp, Glycine max
  Clone ID: LIB3092-048-Q1-K1-C9
gatggctatctgcagaatgcagacttaggcagtgtgcacaacgcttagatctcgatatgcgaagtctctggttcaggtccaggattgcccagctgcgccagggaaaagaatagaagaagcgtctagactccttcatgcatgctccacttagctctagatgtaattagctcagttggtagagctccgctcttgcaattgggtcgttgcaattacaaggtaggatgtctaattatccaggcggtaatgatagaagcttgtacctgaaccggtgactcactttttctaagtaatggggaagaggaccgaaacatgcca

SEQ ID NO: 9080 - DNA, 473 bp, Glycine max
  Clone ID: LIB3092-048-Q1-K1-D12
cggacgcgtggggtttggctctatgttcaagtcccacattctaggttgtccctgcgtgatgatttccagccccgaggctgcaaagtttgtgctcaacaaagctcaactcttcaagccaacattcccagcaagcaaagagaggatgttgggaaaacaagctatcttctttcaccaaggagagtaccatgctaacttgagaaggcttgttcttcgcaccttcatgcccgaatccataaaaaacatcgtacctgacattgaatccattgcccaagattgcttaaagtcttgggaaggccgtctgatcaccactttccttgaaatgaaaacgttcaccttcaacgttgctctgctttcaattttcgggaaagaagagattctgtacagagatgctctgaaacggtgctactacactctggagcaagggtacaactcaatgcccataaacgttccaaggacactgttccacaaggcga

SEQ ID NO: 9081 - DNA, 439 bp, Glycine max
  Clone ID: LIB3092-048-Q1-K1-D4
gaaagaaacaaaaaacaaaaaaaagagaataaaaaacggtgtcgtttcgagattcgaatcaggccaactgaacatgaatgatgaatgatgatgaatcacagagtagagaaaagtgagaaccgagaaagagaaacggtggtgtttttttttttaaacttttttttaaattttattttgtagttaagtttaaatataagtttaatttccctttacttgagggtaaaaaatagtaataattttggcactgtgcagaagaacctcaggacagaagggaaggatgatgataatcaatcaaatagtgttttttttttttctgttaaacagtagtaattttttgtatgaaagttgttaggaatgggtttaagtctgaaagatattaaaatggttgtaggaaggaaaaataatgtgtgtgttgggtaattgaaaaaatggttgaata

SEQ ID NO: 9082 - DNA, 429 bp, Glycine max
  unsure at all n locations
  Clone ID: LIB3092-048-Q1-K1-D6
gtcggactaggaaagttttcaaagccaagctaatacgagctttacccaattttcttgctgttgaattttccactgttcaatcttcaaaatcacatttttctcgatcttcaccttctgggttgcttttttttttcttcttcttcttcttcttcttttgttttcgctatggaatcgaaaaaccctgcgaggtttacgctggggaagcagtcgtcgcttgccccagaacgccataacaaagaagcagagctccaaaaagatggggaagctgttgatcagggtgtgaggttgatgtattcggcattcgaaggcgatgtggatggaattcgcgaggcgttggagtctggtgtgagtgtgaattacaaggatattgataatcgcactgctcttcatgttgcggcgtgtgaaggcttcactgatgtntgtgattta

SEQ ID NO: 9083 - DNA, 125 bp, Glycine max
  Clone ID: LIB3092-048-Q1-K1-D7
cggacgcgtgggctttttttgtacacatatataccctcatcgtaagtaataagagtaagaagcagtaatttttttctttttctttatttttggtttaaattacttaatataggagggtttaattc

SEQ ID NO: 9084 - DNA, 445 bp, Glycine max
  Clone ID: LIB3092-048-Q1-K1-E2
gggtatcaagcaatttcatgtcaatgttgataaagaggaatggaagcttgacacactgtgtgatctttatgagacattggcaattactcagagtgtcatttttgtgaacaccagaagaaaggttgattggctgactgacaagatgcgaagtcgagaccacacagtctcagcaacccatggagacatggaccagaataccagggacattattatgcgtgaattccgttctgggtcatcccgtgttttgataactactgatcttttggcccgtggtattgatgtccagcaagtgtctttagttataaattatgatctcccaacgcagcctgagaactatctccatcgtattggacgtagtggaaggtttggtaagaaaggtgttgccattaacttcgtcacaaaggatgatgaaaaaatgctgtttgacatccagaggttttacaat

SEQ ID NO: 9085 - DNA, 444 bp, Glycine max
  Clone ID: LIB3092-048-Q1-K1-E5
ccaaaatggccaaagacccagttcgcgttctcgtcactggagctgcagggcaaattgggtgtgctcttgtccctatgattgctaggggagtgatgttgggtcctgaccagcccgtgatcctccacatgcttgacattcctccggcagcagagtcattgaatggggttaaaatggaattggtggatgctgcattccctcttcttaaaggtgttgttgccacaactgatgtggttgaggcatgcactggggtcaatattgccgtgatggttggtggattcccaagaaaagaaggtatggagaggaaggatgtgatgactaagaacgtctccatttacaagtcccaggcttttgcccttgaaaagcatgctgctgccaactgcaaggttcttgttgttgctaaaccagcaaacaccaatgcattgatcttgaagaaattgctccatc

SEQ ID NO: 9086 - DNA, 449 bp, Glycine max
  Clone ID: LIB3092-048-Q1-K1-E7
cccacgcgtccgtgcagatcttctaatcaagccgattctggtaaatcaccagtgacatgcagctatgatgtctactgttttgggaagattttacttgagctcattaccggtaacattgaagtcagcaagtcagatgatgccactacaaaggagtggttagagcaaaccttgccttacatcactatatacgataaagaacgggtgactaagattattgacccatcattgatcgtggatgaggacctattggaagaggtatgggctatggcaattgtggccaatgcatgcttgaaacccaagccttccaaacgtcctcctatgagacatgtcctgaaagcattggaaaatccattgaagattgtgagagaagaaaatactagctcagcaaggttgagaacaaactcttctaggaaatcttggagcactgcattctttggtagctggaggca

SEQ ID NO: 9087 - DNA, 408 bp, Glycine max
  Clone ID: LIB3092-048-Q1-K1-E8
cttctagtatttttcaagtaacttaaggtttcaaacctaggaagttggaagtcatggcaggaacattgatggcagcaacaagttctggcactcttaaagcaactcctttcctaggccaaggcaagggtgccaatgccaatgctcttagggatgttgtttccatgggaactgggaagtacaccatgggcaatgatttgtggtatggaccagacagagtgaaatacttgggacccttttcagctcagaccccttcatacttgaaaggagaattcccaggggattatggatgggacactgctggcttatctgctgacccggaagcatttgccaagaacagggctcttgaggttatccatgggagatgggccatgcttggagcactaagatgcatcaccccagaggtgctag

SEQ ID NO: 9088 - DNA, 472 bp, Glycine max
  unsure at all n locations
  Clone ID: LIB3092-048-Q1-K1-F10
gtcacagacaccgacacagatctgtcttccgaagcaggaactaaatatggctgacttgttggaatggtcaaagcaagataagaaacgaatgcttcatgtcgtctaccgtgttggtgaccttgatcgcaccatcaaattttacacagaatgtttaggaatgaagcttttgaggcaaagagatatcccagaggagaaatatgctaatgcttttcttggatttggccctgaagaatcccattttgttgttgaattaacatataattatggggttacctcgtatgacattggcgatggctttggacattttgcaattgcaactcaggacatttataaattggttgagcacatcaaggccaagggtggaaacatcacnagggaacctggtccagttcaaggtggaactactgntatcgcctttgttaaggatcctgatgggtatactttggaactatccaaagacctacagtccatg

SEQ ID NO: 9089 - DNA, 415 bp, Glycine max
  Clone ID: LIB3092-048-Q1-K1-F12
cggacgcgtgtggggagttaggttctgcattctctgcttccagcgagtgttcttgcttcggttcaacaccttaatttgcacacgctgcttcttcagcttgagaaatggcacaagaaacctttctattcacatctgaagctgtgaacgagggtcaccccgacaagctgtgcgaccagatctctgatgcagtgcttgatgcgtgccttgaacaggaccctgacagcaaggttgcctgtgagacatgcaccaagaccaacatggtcatggtctttggagagatcacaaccaaggccaacgtagactatgagatgattgtccgtgacacatgccgtgaaattggattcattgctgatgatgttggtcttgatgctgacaaatgcaaggtgttggtcaacattgagcagcagagccctga

SEQ ID NO: 9090 - DNA, 417 bp, Glycine max
  Clone ID: LIB3092-048-Q1-K1-C4
cggacgcgtgggcggacgcgtgggtgagcataggttggttgcgagcgaaacacagaaaatgatacccagatgctctgtttcaccccctcagattcgcccatttcagtttcagaacttgaacggtctccgacaactcgccgaaacgcggcgtttcaaggtatggttgctggaccagttcggagtcctccacgatggaaaacaaccttaccccggtgccatttcaaccttagaaaatatagctaagacgggtgctaagatggtgatcataagcaactcatcgagacgttcatcggtgactattgagaaagtcaagggtcttggatttgatgcctctctttttctgggtgccatcactagtggagaactaactcaccagtacttgcaaaggagagatgatccttggtttgcagctttggg

SEQ ID NO: 9091 - DNA, 442 bp, Glycine max
  Clone ID: LIB3092-048-Q1-K1-A5
tggttatcgactcgggtaagaacctagggttcttattctcctgttttgctcactccttgcgaatctcgcgttacgcatgcgtttcttcttcgctttgtttattcaattggagcttagtactgatctatcgaaaactcaagtcctctgaggtctgtggttttactgttctaaattttgataaattaaggcaaagacgatgactaagaagaagaatcccctggtgtttatggatgtgtcgatcgatggggatcctgttgaaaggatggtttttgagcttttctatgatgttgctcccaagactgcagaaaactttcgtgcattatgtacaggagaaaaaggcatcagtccaaatactggaaaatcactgcactacaagggttctttcttccatcagatcataaaaggttccattgtgcagggtggagattttgtcaatcgaaat

SEQ ID NO: 9092 - DNA, 277 bp, Glycine max
  Clone ID: LIB3092-048-Q1-K1-A6
aataaccggcccgacccacgcgttcgttgtgatcgtctcacataagaacctataattctcattctgctgttatgctcactcggggcaaatttcgcgtaactcgtgcggaggatcatctctgcgcacatatgtgaggaacctaatgctgatctaactgggactcacatgctcctcaggctgctgccatactgcattgactatggacttgcatacacacttactaagactggtactataaatcatgtgagactaatggatgttgggtactatgcatatt

SEQ ID NO: 9093 - DNA, 290 bp, Glycine max
  Clone ID: LIB3092-048-Q1-K1-B1
caatctcttcggggatgtatttatggtctaaaaattaaaccccgatgtcaaaaaattattcgataaattcactcacattgaatcaagaagtgaaaagtttgacatgtttatgcaccttgacattaattccgagatatatccgttaaaggttggtcataagtttgctcttgtgcttgtttcaacacttaatcctgattgaactccagacactggatattattcccagatcagtttacaattactgtccatcaattttcaatatgtcatgtattggaagctttacaggataa

SEQ ID NO: 9094 - DNA, 467 bp, Glycine max
  unsure at all n locations
  Clone ID: LIB3092-048-Q1-K1-B10
gagaaaacattcttgtggggtaggtactctatggaaatgtccgctgtcatttacaaggactgggttttcactgatcaagcattacctaatgatcttgtaaagagaggagttgctgttaaggacccatctgctccccatggagttcgtcttttgattgaggactatccttatgcttctgatgggctagagatatgggatgccatcaagtcctgggtgcaagaatatgtctcattctactacaagtcagatgaggaactccaaaaagaccctgaactccaagcttggtggaaagaacttgtagaggtgggtcatggtgatttgaaagataagccatggtggcaaaagatgcaaactcgtgaagagttggttgaagcttccgctatcctcatatggattgcttcagcccttcatgctngctgtaactttggacagtatccatatggaggtttaatccttaaacagccaac

SEQ ID NO: 9095 - DNA, 314 bp, Glycine max
  Clone ID: LIB3092-048-Q1-K1-B11
cttttctccccagcattcaatttctattagtatccaaaccttgattgcgttcttggattcggttgtgggtagggggtttctcctctctttctctgcagtttgatggatcgggaaggaggatccaacgcctgatcttgtctctactccgttctcgggattcgtagggatgcctccttctctgatattcgcattgcctaccgcaaactctctatgatgcggcacccgtacaagtggtctccgaatccctgaaccgcctgcgaatccaagcgccggcttcagcatatccaagaagtcctactatttttttccgatca

SEQ ID NO: 9096 - DNA, 472 bp, Glycine max
  Clone ID: LIB3092-048-Q1-K1-B12
ggttcatgccactagtgtcacttatgtagccaccaaaagtgttggtggctacaatgatgaggctaataagcaacatgatattactggtgtctatcccgagaaagacaccggtagacatcattttggtcgtggttactacggtgacactaacaagcaacatgatgctactggtgtttatcccggaatagacattggtagagatcatgggactaccggtgtttatggcctaaacaccgacagacatcatggaacttctggggtgaatcccgggatagacacccataaccaacaacatgggactaccgttggttatgctggtgacactggaaggcagcatgggaatacaggtggcctttactatggaaccgacaccgcggacacaggaaccggtcctagaagtggaaacaccggtggcaccggttatggaggcactggtggtactgattatggaacagctggtggcactggttat

SEQ ID NO: 9097 - DNA, 451 bp, Glycine max
  Clone ID: LIB3092-048-Q1-K1-B2
ggttgtgctgcaccatccagagccattccagaggatcaatcaggttaacagtaaatttagagtatggctttacttgctgaagagaccattggcaaattcttgcagctactagtgcagagaaggataatgggcaataatctgtagttgtagggcgagccctggtacagtagttaagttgcgccttggtgaccgattggtcatgggttcaaatctggaaacaacttctttgtatatgcaaaagtaaagttgcgtacaatgatccacccccatacctttgcatggcgaggaaccttttggcaccaaggtacaatagttttaacgctcagtctgcagccacaaattcaaattttttcacctaaaagtttttgaaagtatgtgtatgagaattgtgctagtctttgtatattgtcttagtagaatagatgctcatggagttcagtcccttgagtta

SEQ ID NO: 9098 - DNA, 307 bp, Glycine max
  Clone ID: LIB3092-048-Q1-K1-B3
acccacgcgtacgcattgtgctgcaccattcatagccattccatatgattaaccaggctaacagtaaatttagggtatggctttacttgctgaagagaccatccgcaaattcttgcagctactactgcacttaatcataatgaacattaatctgtaattgtacagctatcactaaaccagttcttaaattactccttaatcaccaaatcttcttggtctcaaatcttctaacaacttcttaatatatccaaaattaaagttccatacaatgatccacaacaataccataactttcacagtaaccttt

SEQ ID NO: 9099 - DNA, 439 bp, Glycine max
  Clone ID: LIB3092-048-Q1-K1-B5
cactgaacgaaccgtagttgttccgtttcagccatggtggagaacaatctcttcgaggatatatttagggtcgaaaaattaaaccccgatgacaaaaaattattcgataaagtcactcgcattgaagcaagaagtgaaaagtttgacatgtttatgcacctggacattaattccgagatatatccgttaaaggttggtcagaagtttgctcttgtgcttgtttcaacacttaatcctgatggaactccagacactggatattatacccagatcagtcgacaatcactggccaacaattttgaatatgtcatgtatgggaagctctacaggataacagagggttcagggcgtgaaaaagcggagatgaatatttcatttggtgggcttctgatgatgctgaagggagatacctctcattgcaacaagtttgagctggatc

SEQ ID NO: 9100 - DNA, 441 bp, Glycine max
  Clone ID: LIB3092-048-Q1-K1-B6
gagaacatttgggggcccgattgtctcgagttcaggcccgaaagatggctgcgtgatggagtgttcgtgccagcgtgtccttttaagtaccctgtttttcaggctggggtaagggtgtgtttggggaaggacttggctttgatggagatgaagtccgttgtgcttgcgttggttcggaggtttgatattcgggtcgttcaatcgggccaggagccccggttcgagcccggtttaaccgctactttgagaggcgggttgccggttcgggttcgggtttgtgaaaggaaatgaatagcaagtatgtggttgataaagtcataaagccataaaggagttcacaactagaatgaaatcatgaaatcaatgatgggatggaagaaccgttttcgtgtaaataataatgttgcagttgaattgaaagttttctttttcccccttttt

SEQ ID NO: 9101 - DNA, 445 bp, Glycine max
  Clone ID: LIB3092-048-Q1-K1-B7
caggggccaagattccttctcttgggttagggacttggcaagctgaacctggtgttgtagctgaagctctcaccacagccattcaggttggatacaggcatattgactgtgctagtgcgtataagaatcaagcagagattggttctgctcttaagaagctttttgatgatggtgtggtgaagcgtgaggacttatggatcacttccaaactctggtgttcagatcatgcaccagaagatgtgccaaaagcattggataaaacattacaggaattgcaacttgactatcttgacctctatgatccactggccagtccgcatgaaaagtggaacatttggactcaataaagaatatcttgagcaaccagacattcccaatacatggagagcaatggaggcactctatgactcagacaaggctagagccataggagtgagcaattttc

SEQ ID NO: 9102 - DNA, 233 bp, Glycine max
  Clone ID: LIB3092-048-Q1-K1-B8
cataggccaagattccttctctagtttgagttttcttgacaagctaaacctgttgggagaggtgaaactttcaccacagccattcacgttctatacatacatatctactgtactagtgcgtataataatcaaccttatattgattctgctcttaataagcctttctatgatatttatttcaatctttaatacttatatatcactaacaaactctatttttcatatcttacacc

SEQ ID NO: 9103 - DNA, 471 bp, Glycine max
  Clone ID: LIB3092-048-Q1-K1-B9
gcggcccagaaggcgcccatcctccccaccaagtgatctccccaaggatttcgattggcgagacgaaggagccgtcactaacgtcaaggaccaaggggcgtgtggttcgtgttggtctttcagtacgacgggagcgtttgaaggagctcattatctggccactggtgagctcgtgagccttagcgagcaacagcttgtggattgcgatcacgtgtgtgatccagaagaatatggagcgtgtgactcaggctgtaatggtgggttgatgaacaacgcatttgagtacatacttcagtctgggggagtacagaaagaaaaggactatccatacaccgggagagatggcacctgcaaatttgacaaaaccaaagttgcggctactgtatctaattacagtgtggtttcccttgatgaagaacaaattgctggaaacctagtatagaatggctctcttgcagttgctatcaatgc

SEQ ID NO: 9104 - DNA, 225 bp, Glycine max
  Clone ID: LIB3092-048-Q1-K1-C1
cccaggcgtgcgagcagcctccaattcgtgtcactctcttcaaaatggccgttaccttctggaaggtccacacagaatcagggctcaagtccctcgacgacttcctctctgggaaggtctacgtttctggggatcagttcacaatggacgacatcaaagtgtatggtgctgtttttgagaatccaggtgtactcttttccaatgctgccaagtggtactaggttt

SEQ ID NO: 9105 - DNA, 203 bp, Glycine max
  Clone ID: LIB3092-048-Q1-K1-C2
cattgattaccaatgccctcaaataatgtaatcttaggttgaccttttatgtagcattattgaataatcttaattgcatattagtagctctgtgcccatatgaaaagagattttaaaccgatttgcttgtaaactttgaaacagcgataagttttccagttagattgactaatgttatatattgaaaattaaattttgacccg

SEQ ID NO: 9106 - DNA, 427 bp, Glycine max
  unsure at all n locations
  Clone ID: LIB3092-048-Q1-K1-A4
cttaggtttaggagaggcgaatctcgcgggtaagaagatattcctttacgacgccgtttgcgggccgagcgagattcactcgttggagacgacgccgtttgattacgtggggaactgcgagaacaagacgctgcacgcgacgcagcagatcgcggagtgttggacgcgcgcggtgaggaagctgctggagagagtggtggagtcggtggagagaaaaacgttggagaaggcggcgagggagtgtcacgcggtggagcggatctggaagttgttaacggaggttgaggacgtgcacgtgatgatggatccggaggatttcttgaggttgaagaaggagttggggatgatgagaaattgcggngaaatggtggcgttttgcttcaggtcgagggagctcgtggaggtggcgaggatgtgtagggatctg

SEQ ID NO: 9107 - DNA, 447 bp, Glycine max
  Clone ID: LIB3092-048-Q1-K1-C3
cccacgcgtccgcttgacaagagtgactactaaagagttgatagcaaaatacggtcttgatgataacactatagacttcattggtcatgctttggcgcttcatagtgatgatcgctacttggctgagccagcactggacactgtgaagagaatgaagttatatgcagagtctcttgcacgctttcaaggagggtcaccttacatatatcctttgtatggtttaggagagcttccccaggcatttgcacggcttagtgctgtttatggtgggacatatatgttgaataagcctgagtgcaaggtagaatttgatgaggaaggaaaggttgttggtgtcacatctgaaggggaaactgcaaagtgcaaaaaagttgtttgtgatccatcatatttgcccggcaaggtgaggaaagttggtaggggtgcaagagcaatagccataatgag

SEQ ID NO: 9108 - DNA, 325 bp, Glycine max
  Clone ID: LIB3092-047-Q1-K1-G5
tctttttcctctttaacatatcttaatatctttcaacatccaaaaacttctggtatcacccattccatattatctcgagacatttacaaaacactttctatttataactgttgatgacattaaaactcaaacatccaataaaattaactctattgtttttcctgttactaacttacttctcaaatccttacttgcaaaggaaaaaattgaatcactatgtgacctatcctttctagcaacatatgaatcaatcaaaacatttatctgctctcaacgaattgacatttctgaatcatttacacaagcttttgcctacataactacc

SEQ ID NO: 9109 - DNA, 456 bp, Glycine max
  Clone ID: LIB3092-047-Q1-K1-G6
tggtggaagtgcggatgcaagggctgtgttgaatttaaagggggttgatggagggtgggacgaggagttcttgtcccaacgaaatggttttgaacgcgtgctttgttcggttgaaagcacgatgaattccacaacgaacaaattattgctcgcgccttcttcagaaaaatgcacgctacaaaagggttatgtgatggggaatctgggttcaatggaaagtctaaaggatctacatggctcctttccactttgctttaaagagtcttggcagtcttggaaactacacggcttacatgatagtgatacaattattttcttacatgatatgattattttcagttgtctatttgccataaagaatttctattattgacctttgttcttgtatgaaacttttaatgtgagaaaatgaagtacttgaaactaatttacacaatattagaactttcaaataac

SEQ ID NO: 9110 - DNA, 462 bp, Glycine max
  unsure at all n locations
  Clone ID: LIB3092-047-Q1-K1-G7
acggtactctcgtgtcatntggaatganttcctggtatggggnaagggttactcctgctgaaatttcgggatgcagagaagaatttgcagaacatggaagctatgatagaagcaatgacccctgaggagagggaaaagccagaactgttggcagaatcccctgtcaggaggaaaagagttgctcaggattcagggaaaacagagcagcaggtaagccaacttgtagctcaacttttccaaatgcgtgttcgtatgaagaacctgatgggtgtaatggaaagtggatcacttccaacacttagtaatcttgaggaagcgcttaaagcagaggaaaaggccccacctggcactgcaaggaggaggaagagatcggaatcaaggagtgtatttggggactcaacaccagcaaggccaagtcctcgtggttttgggagcaaaaattgaaaatccataaagggttta

SEQ ID NO: 9111 - DNA, 429 bp, Glycine max
  Clone ID: LIB3092-047-Q1-K1-G8
gacactcaaattacatggccatagtgtacacctaactaggcaaacacaccgggcaccaagggccaaactagatggctcaattctatttgaatggctttggaggctttgaattcaccaacagcagccaccactccgatccgtggctaccaagaatatgaggaggacgaggaggctgaccttcacttacgtgagccttgtgctaaaacgaaacgctccaaacgaccgtgttttgagacggacgaagagtacctctctctttgcctcatcatgctcgcacaaagcgtgaacaccataaacattcacaacaacaacacccaattaccgtcttcttcactgtcacacaaagaagcgtcaccaccggtgaaactaacacacaggtgcaccgtttgcaacaaggactatggttcttatcaagcactcagtggacac

SEQ ID NO: 9112 - DNA, 473 bp, Glycine max
  Clone ID: LIB3092-047-Q1-K1-G9
gggccgacggacgcgtccgcccacgcgtccgagcttttctctttcctttttgactgcaaaactgaaaaaggcgagctctgctactccccatcctcacgcatgtccttactgagcgccagtttcaccgcctcgacgccaattgccttggcctcctcgtcgtctctgtcatcaaggccaaccgcacgctctatactgggcgatggtcctgccgagaccctttgtgaaagctgctaaaaattttagaattcttttgtttttgaaagaatttaaaattctaaatttatagttaaaaatatattccatgttaaaatgttaaaattttaaatttcttctatgagcatctaaaaagattattcaggcggaaaaaattttaaatcctctaaataattacttttcccattttaattccctcattcaaacataaaacaaatccaacttgtactgttttcactaatttttcccccactaatttt

SEQ ID NO: 9113 - DNA, 322 bp, Glycine max
  unsure at all n locations
  Clone ID: LIB3092-047-Q1-K1-H12
gtcatatgtancatattccaattgcctcggttgcaatcaatgaacaacgccgggtctgaagcttgttctccttcttcttcttcttttggttctcttgtgtacttctacttcttctgaacatggaactgttgtctctgagactcaccccttcaccttcgagttcgacttcatcgcttcctgcagcacttgctcactgctccaagctatgtgaatttcagccgaagaagaataagaaagcgtgcttcgacgcgcctaagcttgctgagcggtgtgtgaaggcctcagcggagcgaaccggtgatacgatcgatgatggggaggc

SEQ ID NO: 9114 - DNA, 413 bp, Glycine max
  unsure at all n locations
  Clone ID: LIB3092-047-Q1-K1-H2
cgaccgacgcgtgcgcaaacataatcaatgctgctgtgaccccagcttttgttgcttaattcccaagtctcaatggcgttgacctgtctgcagcaagattagaccttggtcctggtggtgttatcccactccacactcaccctggtgccaatgaactactcattgttctccaaggtcacatccttgctggattcatatcttcaggtaacatagtttatcagaaggtgctaaaaaagggagagctcatggttttcccacaagggttggtgcacttccaaattgctgttggtaagagaaaggcccttgcttttcctgtctttaacagagcttttgctggccttcaaatactagactntgcactctttgccagcaatttctccactcctttggtgacacagaccacttttcttgac

SEQ ID NO: 9115 - DNA, 411 bp, Glycine max
  unsure at all n locations
  Clone ID: LIB3092-047-Q1-K1-H7
cttcaaaacggtttttagattttcaacaaaaaaaacaatgggctttctgtaatttcctacgcaacanaatcaagcaagntcagaaaagaagaagggaaaaaccgattaccgtgccaggattcggttgattaatcaggacaagaacaaatataacactcctaaataccgatttgtggttcgctttagcaacaaggacattgttgcacaaataatatctgctagcattgccggcgatttagttcttgctacagcatattcacatgagctgccactatatggtcttgaagtaggacttacaaattatgcaacagcttattgcactggtctcctgttggcccgaagagtcctcaaaacacttgaaatggatgatgagtattaaagaaatgttgacgctactggagaggattattc

SEQ ID NO: 9116 - DNA, 212 bp, Glycine max
  unsure at all n locations
  Clone ID: LIB3092-047-Q1-K1-H8
ttttatatccacacataccnccncaacaccttaatctgatccaaataatctatttacctcatccaattacaaatgcacgtatgtacagtactatttttgaaatttttctaatatatacacatcctaaaccttcctggccacttttctattctttaaaattgaaccagtccttaccattttcaactggccaaatttgcctcccattatcatta

SEQ ID NO: 9117 - DNA, 453 bp, Glycine max
  unsure at all n locations
  Clone ID: LIB3092-048-Q1-K1-A10
gtttggtttagagagaagaaaacgttggtcggagaacattaccggaaagagaatctttgtggattccagaaatgtctagcatcgcttcctcacaccaaagcttcctcaccaacgcccttattccactaacgcacaacccaaagttcaggaccactgttactttcccttcttcactcaaaactgtctcttgcagttccccacaacatgaacagcaacaatctccaaggaagaagaatgagaacaagttagcaaagttggcaatagttgcacttgctgctggtgtgttaacacttgggtcagttcatgatgcatcagccgccaagactggtggtagaatcggnggccaggccttcaagtcagcagctccgcgctcctcaccaagaatcaacaattccagaaccaatatctatattaatcctcgagtggcacctncgctagttggtggcttggcta

SEQ ID NO: 9118 - DNA, 456 bp, Glycine max
  Clone ID: LIB3092-048-Q1-K1-A11
tggatctgctagtttgggggagattgctattttagctggcgggtgcgatttggacggtcatatccttgactctgctgaactgtacaattctgagaatcaaacctgggaactactccctagcatgaacaagccgtggaagatgtgctctggggtatttatggatggaaagttttatgttattggtggaattggtggaaaagattctaagcttcttacatgtggtgaggagtacaatatacaaactagaacatggacagaaattcctaacatgtcccctggacgcagtgccaggggagctgaaatgcctgcaacagctgaagcgccacctctggttgccgttgctaatgatgaattatatgctgctgattatgctgacatggaggtaaaaaaatacgacaaggagcgaagagtgggggttaccattgggagactacctgagcgagcagtgtcgatgaa

SEQ ID NO: 9119 - DNA, 397 bp, Glycine max
  unsure at all n locations
  Clone ID: LIB3092-048-Q1-K1-A12
tccttgtgcaccgaagggttgtgaagcattagagaagagctcatggtgcacgtgtcttggaccaaactatgggaaaacgtgtaagaagcctcgtcgtccgtacgagaaggagcgtttggacgccgagttgaagttttttngtgagtacggacttcgctgcaagagggagttgtggagggttcattacgctttcagccgcatccgttacaacgttagaaatcttatgatcctcgacgagaagaacccgcgccgtatcttttagggagaagcccttctcctaagaatgttccgtttcggactttttgtttagactcaaaacaagcttgattacttgttggctctttccgtcgagatctttctcgaacgccgtcttcaaacccttgttttcaagtctggc

SEQ ID NO: 9120 - DNA, 322 bp, Glycine max
  Clone ID: LIB3092-048-Q1-K1-A2
gattatttgtcaccatcagacatcatggggaaatattcacatttagttgttataggaacaggactgactttcggatatcttgtggggaggatgattttggcacacttatgtgatgaacctaagggtctgaaaactgggatgtgcatgtccctcatgtttctcccattgggcattgccaatgtacttgcattcaggctaaatgatggggttcctttagtagatgagagactaggtcttcttgggtactgggcattttcagtgacactatacttgcattttgccacattagtcattcatgaaattaccaatgccctgggaatat

SEQ ID NO: 9121 - DNA, 453 bp, Glycine max
  unsure at all n locations
  Clone ID: LIB3092-048-Q1-K1-A3
agctgtcgcaaagctcttggtctgccattgtaagagccaggaagatatatggatgctagtggttttggtaaagatcaatatgatcctacaagtcctctgtatcgttatgactactggggggaacccaagaattcggagaagagcatgcaagagcggatgacagatctccataacaaaaaaatcgtgggcaagggcaatgtttggtacgaaatgtcatatgaagattgcatccagcaacagatggaaagtgaagcccagtctaaggagcaagaaaacgatgaagatacaaggcaaggtcaagctgatgaagatgaggatgacgaggatgatgatgatgattttgacttcagtattctgagcagtttcggtagtaatttctccgatcagcctcatgttaatgggaccgagtcttctacaatatcangtgagggcatgtttgacgattgatgctac

SEQ ID NO: 9122 - DNA, 458 bp, Glycine max
  unsure at all n locations
  Clone ID: LIB3092-047-Q1-K1-G4
cccacgcgtncgcagagatgcctctaattggtacttgcagtcagtatcgtcaccagggaatgtgccgactgcttgtgagtgctattgaacagatgttaatatctttcaaggtggaaaagcttgtggtatcagccattccagatttggtcgaaacatggacaaaaggctttggatttataactgtcgatgacattgaaaggcaaagattgaataaaattaacttgatggttgttactgggacagagttacttgtgaaatccttacatgggaaggagaaaattgaaagactgtgtgatctatcaattctagcaacagatgaatcaatcaaagcatgtatctgttctgaaggaatggccatttctgaatcatttgcacaagttggtggaaacataactaccaacaaaggtggagcaaaagcagaacatgaacctgtggatggaaaaaatcaatcagactat

SEQ ID NO: 9123 - DNA, 450 bp, Glycine max
  Clone ID: LIB3092-047-Q1-K1-E9
aactccttcctcatttctcatttctcattctacaccatggcaagaaaaaccgagtccattgtcttggccttcttactactatgctctttctcactgggggtagtggtagtagcccaagaggaggcaatagcaaaatccgaaagtgaagcattaggggaaccagagaaaagagaaacacttgaaatcatcattggtggaggtggttcacctgctccttctccctctccccctacatattgcccacctcctccaccaaaaccactgagccggttggagaaagcaaaacgtgttcttctcaaattcaaaaccacaatcgacgaccccaattgttacacgcaaaactggagccaggacacagacgcgtgtaaattcaatggggtacgatgcgccaatttcccagacgatcagcagcgagcagtagctggacttgacctaaacggagcaaaactc

SEQ ID NO: 9124 - DNA, 311 bp, Glycine max
  Clone ID: LIB3092-047-Q1-K1-F1
gcttgcggacgcctactaactccttcctcataactgatctctgattattcatcatgcaacagatacaccgattgcatggtcccgatcttccgacgacgacactcatcctatgtgcctgatggactacctgctccagtccaggcaataccatcttctgaccgtgccgcattcggccatcgacggcagaaacagacactcctacgacgacgggtacacgctggtcctcggccacgaccacgttttcatgcacatagacaggagattcctctacatgaccgatcttgacatcaacctaagtattaccgggtggt

SEQ ID NO: 9125 - DNA, 357 bp, Glycine max
  Clone ID: LIB3092-047-Q1-K1-F10
gccgcacaaccaaacaccctttacataaatttccgaacaaaaccccctagtgcgggtttcgcagatctcactacccaatttaaacaaatcaacactctaccctaaccccactctctaccttcctcccatgtatcgccccataccagatatcttttcctatttgttgatcgcagccacgacacccacataagcccacgactactgactaagtccgcactattaaaaaatatcacttatctaaagacaatactgtattgaaatacaaaatttgaaccaatctcataacctattccgcagatcactcagcagttctttaactatgacacgattctactgcatatcaaatgtctcacaaaa

SEQ ID NO: 9126 - DNA, 461 bp, Glycine max
  unsure at all n locations
  Clone ID: LIB3092-047-Q1-K1-F11
attgaatcggtttgcatggtttaagggtcttaggctgacaaacacacatgggattccaggggagtcgctatacagtttanaaatgaggaaaagagtgaggccttccattgtgtattccaacaatggaagaagggattcgatgttcaaggaggaaacttacctaatggaactgatgtaataacttctaaaagcaaatttgatgaaaagatagagccatcttctgcaaaaatgtattttcattattacggacaacttctgcatcagcaaaatatgttgcaggactatgtgaggacaggaacctattatgctgcagttcttgagaatcgtgcagatttcgtaagtcgtgtagtaattgatgttggtgctggtagcggcattttgtcactatttgctgcccaggctggtgcaaaacatgtttatgccgtggaagcatctgaaatggcagaatatgcacgaaaact

SEQ ID NO: 9127 - DNA, 222 bp, Glycine max
  Clone ID: LIB3092-047-Q1-K1-F12
ctcaatccttacatactcctttccatccttcccatattgtaccccatacccaataactaaacttatttttttatcctaatcccaaaactcacaaaatcaaacttcatcaaaatatacccccactttttacaaatatcaattttcattattccactcctacttctacatcatcaatatatactactctactatcctattacacaaacctcttatccttcattt

SEQ ID NO: 9128 - DNA, 422 bp, Glycine max
  unsure at all n locations
  Clone ID: LIB3092-047-Q1-K1-F2
aatccgacgaattcgtcctaaccacgttcacaacgcatactacggttttcctaatcanaaaccctaatgtgtgattcgcatctttgatccagaaattcaaacactattaagggtctcttcaattctaagcctcgcactcctccacatgtaatgctctacaccagacatcttctgctctttgttgatcgcagcccctaaacccgcaaaaccaaacgtgatgagaagatatcctagctatttaaaaatatcacggagctaaagtcaatcctgtatcgaaatagtgaatctgaaccagtctcagaagcttgtgcgcaattgactcangagttctttaacgaggacacgttgccactgcttatcaaatgtcttccaaaattgaatttggaggccacaaaagatgccactcaagtttttgcaaattt

SEQ ID NO: 9129 - DNA, 141 bp, Glycine max
  Clone ID: LIB3092-047-Q1-K1-F3
aacaattcatgctcacactcacacccttgtgactccattacccaaacaagacccacaaaaccataatcagtggtggcgccaccccaaaaccatcaaacccagtttcaatcacagtatgatcaagttcaacaccttgcacac

SEQ ID NO: 9130 - DNA, 318 bp, Glycine max
  Clone ID: LIB3092-047-Q1-K1-F4
gaatattttaatcacaggatgggcaacacgcttgctgaatagatgaaaaaagggcacaagggggccattagtgtgttcatcggatcagttcaaaagctgatgactgcgttcgaccacgccaggataccacttcctttgacagctgacaccaccatagtctttgatactgtatccaacggactcgatttctactgcaatgctactcttgccagatttcaggctctgaacgtggatgtctacaccatatgtatcgagcccgagaaaaaatggcaagagcttgctcaaactgccaaacaagggtgggatgaccatgttctt

SEQ ID NO: 9131 - DNA, 89 bp, Glycine max
  unsure at all n locations
  Clone ID: LIB3092-047-Q1-K1-F5
gcgcccacgcgtncgatcaaaatttcacatcagccttatgcaatttaaggtttcgggtccttgggggaccttgggcggatcaaaaccct

SEQ ID NO: 9132 - DNA, 402 bp, Glycine max
  Clone ID: LIB3092-047-Q1-K1-F6
gttgttttccaaaaccctaatttatcgaaaggtagggttttgcagaacctgctactccggtgccagtttggtcttctttatgctctctcctttcttcttccattcctctaacctaagatgggcaagtcaagcacgaaatcagctatcaaggttgacgctgctccacctgtggttccgccatccaagtctgccaagaagggaggcaagcgacaagctcaagatgaaattgagaagcaagtgagtgccaaaaaacagaagatagaggaggttgctcagaatcaaaagaaggaggccaaggtgcaaaagaaggaggccaaggtgcaaaagaagaaggaagtagttcacatgattcttcggaatctgaagaagagaaacctgcacccaaacctgtactttcaaaaa

SEQ ID NO: 9133 - DNA, 331 bp, Glycine max
  unsure at all n locations
  Clone ID: LIB3092-047-Q1-K1-F7
caaactccttcctaattactcatttctaagcttacaccaaaacaaaaaaaaccgcgaacatcgtcttgttctnattactactatactcattcaaactgcaaatactggtaataccccaagacgacgcaatatcaaaatcctaaagtgaaccctaaggttatcatccccatcgagaaacactaacaatcatcatagatcgagaaggctcacctactccttctccctctccccctacatattgcccaccttcttcaccaaaaccactataggaagaagaatctctcctctcccgtctctataagagtaggagttcggtaacctatatatattc

SEQ ID NO: 9134 - DNA, 451 bp, Glycine max
  unsure at all n locations
  Clone ID: LIB3092-047-Q1-K1-F8
cccacgcgtccgcccacgcgtccgctggtctcccgaatcagaaaccctaatcagtgtttgggatttcagataaagaaatttaaacagatgaagggtctcttcaagtctaagcctcgcactcctgcagatgtagtgcgccagaccagagatcttctgctctttgttgatcgcagccccgaaacccgcgaaagcaaacgtgaggagaagatgtccgagctatttaaaaatatcagggagctaaagtcaatcctgtatggaaatagtgaatctgaaccagtctcagaagcttgtgcgcagttgactcangagttctttaaggaggacacgttgcgactgcttatcaaatgtcttccaaaattgaatttggaggccagaaaagatgccactcaagttgttgcaaatttacaaaggcaacaggttcagtttaagttgattgcatctgattacctgg

SEQ ID NO: 9135 - DNA, 416 bp, Glycine max
  Clone ID: LIB3092-047-Q1-K1-F9
ggtggataacgaaatttcttagacaaaaaacaaggatcagaaccgttgaatgaagttgagggagatggcactagtctctggaggaagatcaacactgaaccctaacgcccctctttacattcctgccgcgtttcgccaagtggaggatttctctccggaatggtggcagctggtgacgacgctgacatggtaccatgactactggctaagccagcagcacgatgagggagccttctacggcgaggacgacgggtttgatggcaatgatgtcactgatttgcttactgattcctctgatcttgatgctggcgaggatctttgtgacgagtttataagatcttctgaatcccacgaagaaacttggcccaaacgaactgcatgacgcttagagatgaacccatttaaagaatctacct

SEQ ID NO: 9136 - DNA, 54 bp, Glycine max
  Clone ID: LIB3092-047-Q1-K1-G1
gcgggctaagtcactttcaatgtttggcttttgcgttcacctctttatcaacct

SEQ ID NO: 9137 - DNA, 443 bp, Glycine max
  unsure at all n locations
  Clone ID: LIB3092-047-Q1-K1-G10
cactcatacaancttttttttttccttttttactgaaaaaaaaaaaactgcaaaatctgctacttttcatcctcacncatctccttactgaactccagattcaccgactcgacaccaattgccttgccctcctcgtcgtctctgtcatcaaggccaacctcacgctctatactgggcgatattcctgccgacaccctttgtgaaagctcctaaaaattttacaattcttttgtttttgaaagaatttaaaattctaaatttatagttaaaaatatattccatgttaaaatgttaaaattttaaattctcttctatgagcatctaaaaagattattcacgcggaaaaaattttaaatcctttaaataattactttttccattttaattccctcattcaaacataaaacaaatccaacttgtactgctttcactaatttttcccc

SEQ ID NO: 9138 - DNA, 386 bp, Glycine max
  Clone ID: LIB3092-047-Q1-K1-G11
agaaaaatttatttggatctttaaattcttttgaagcctatataacaatgggggcttatcgtgactattcattatcacgctcgctctctttcgaccaattaaaactgatatactggacctgtaatccacaatactgtggcgccattgaacacagttcatcatgctcaacggtgacattacctattttaatacaaccagaaggccatccacgtttgaacatattgcaccatagaatggactcattggaaaagattcctgaaacccatgaatatctttatggcccttaattacacgcgctcttgtgcctcacatttatctccactatggattgagcaccacacaatatgattggttcactagtacacaagttcacagctagttgtttc

SEQ ID NO: 9139 - DNA, 483 bp, Glycine max
  Clone ID: LIB3092-047-Q1-K1-E8
ggaataggggggccgaccgcacgcgtccgcccacgcgtccggtctcaaagtcccacggttcctcactcctcttccatagggggcggcctgcactctcatctcctggtctccactgagatgaaccctagctccaattggtccctttaatcaattacctcttaattagtaattacttaatctcaattagcctttcactctcccacacaacaacatcatgggcgtcaaaggttttgtcgaaggaggcatcgcttccatcattgcaggatgttccacacacccacttgatctcatcaaggtccgcatgcagcttcagggcgaaaacaatttgcccaaaccggttcaaaatctccgacccgcactcgccttccaaaccggttcgaccgtccacgtggcagcggctattccgcagacccgcgtgggtcccatcgcggttggggttcgcctcgtccagcaagaaagccttgcggccttgttcttcggcgt

SEQ ID NO: 9140 - DNA, 210 bp, Glycine max
  Clone ID: LIB3092-047-Q1-K1-G12
cgaccacgtacaaccacccgttctcccattcgtacgaattcaacaacattgggggcgcaaggcagctatacaaactggacaatactgtccatcaaaacacaggcaaatactgtctccatgcataccttttattcgcataacaaatagccacaggtctcaaggacccggataatccgatactaataccagaagctttcaagatctatagga

SEQ ID NO: 9141 - DNA, 290 bp, Glycine max
  Clone ID: LIB3092-047-Q1-K1-G2
gcggtcttcttacattatactactttaccacacttatactttttatttgaaataacaaaccatgggataagtggaatcatcaacaaagcttggattgtactggattccgtccttttaagcaaacgactcggggagttttggggtgaaaaaaaaatgtgatttggagaaacaatcaattcagtttttcgggggacattaagtttcaacaaagatgatagatgttgcacactcatacgatggagactaacaaaattgtaatccgtgcggtcgaaggaaaaaaatgatcttta

SEQ ID NO: 9142 - DNA, 455 bp, Glycine max
  Clone ID: LIB3092-047-Q1-K1-C9
gaaggagtggacaccacaatttctctccattccatttgagagtttactttcgcaaaacgggggtagtgatactcttccaccctttcagtcatttttagaggttgaggaagctgaaactacctcagacccagagtcactttctgaatcgccttcactgtcactttccttggaagaggaacagatacatggtgaatcgtcttttgattatgcagcagaagcagcacatgccctcagtgaggcaaataaatcatcacctattggagtgaatccggacggatcgagatggtggaaagagacaggaattgagcgaagacctgatggcgtgatctgcagatggacaatgaccagaggtgttagtgctgacaaagctattgagtggcaagagaagtactgggaagcttctgatgattttggctataaagaacttggttcagagaaatctggacgtgatgcaa

SEQ ID NO: 9143 - DNA, 450 bp, Glycine max
  unsure at all n locations
  Clone ID: LIB3092-047-Q1-K1-D1
gcggntacccttacattctccacacaaacgactttacctcaagccaagggaacagagagcaacaatggtacctgtggttcgaccccaccagaaacttacacacttactccatcatctggaagccccaacacatcatattcttggtggataacattcccataagggtgttcaagaatggtgagactattggcgttcctttcccaaagaagcaacccatgagaatctattctagcctgtggaacgctgatgactgggccaccagatgtggcttggtgaaaactgattggtccaaggcaccctttacagactactaccgtaatttcaaagccacagagttcttcaccaattccttctctgatgctgcatggcataacaacgaacttgatgcctatggcagaagaaaactgagatgggttcagaagtacttcatgatctataactactgcaacg

SEQ ID NO: 9144 - DNA, 418 bp, Glycine max
  Clone ID: LIB3092-047-Q1-K1-D11
agaagaagaagaagagaaggtggtaccgccttcaattctctttttctctcggcatttctgagcctcatcatcttattattcctcttccatctctattctccataacacccaccacaccacttgtgaaaaacctcattaatatcacacactgacatgtatctctgagctccaatccaatacaagaccacaccttgtcgtgtcggacgaaccttggtgtctgttttttttttttttttttcattattttctccgaagagatgaggaagggcagaggtggaggcgcctcggcggcggcggtggatgtgaacggatccattttaaaggagcctcggtaccggggcgtgaggaagagaccgtgggggagattcgccgcggagatcagagacccgttgaaaaaagccagggtttggttgggaac

SEQ ID NO: 9145 - DNA, 259 bp, Glycine max
  Clone ID: LIB3092-047-Q1-K1-D12
atcttattattcctcttccatctctattctccataacacccaccacaccacttgtgaaaaacctcattaatatcacacactgacatgtatctcttatctccaatccaatacaagaccacaccttgtcgtgtcagacgaaccttggtgtctgttattttttttattttttcattattttctccgaaaagatcatgaacgccaaaattgtatgcacctcaacagcggcagtttatctgaactgatccattttaaaggagcc

SEQ ID NO: 9146 - DNA, 223 bp, Glycine max
  Clone ID: LIB3092-047-Q1-K1-D2
gcgcagaccttaaaatgattcagtgaaaaacaaactgactgggatatctcggtgtgcatgcggtgcatccttcgggatgaagattcagctccgaaccatctcctgtattatatggctccaccaggatgcacatcaggtagtcgtggccctatgcacaacaaggatggatcggtcggtactgctagggactgaaacacaagatcaatctggtgcctataaacac

SEQ ID NO: 9147 - DNA, 320 bp, Glycine max
  unsure at all n locations
  Clone ID: LIB3092-047-Q1-K1-D3
gggtaccaatgacttaaaacggggtaagggaggatgcggtaaagggcttaaaatgggaaggcgcccaactgtaactcaggcagaggaggaaataaaaaatgaagcanctgaagctgctgaattatgcaagctgcttatggatgattatggagctgacagaaagaaaaagaagaaagctaaagttatggtgggagaagcaagattggtaccgaaaatgcaatcaaaattttcctttgacaatgctgaacaagttaagcaaataactaatactgtacaattagatggaactaatcacttgaaagaggatgcaatcacagatc

SEQ ID NO: 9148 - DNA, 264 bp, Glycine max
  unsure at all n locations
  Clone ID: LIB3092-047-Q1-K1-D4
atacccggtcgaccgacgcgtgcgcacagccttntccacatttgacataatcacataaagcgaatattgctgcaatgtctgtattcggaacttggatacttgcatgataatgctgatccacatattattcatcgggacatcaattcaacgaactgtgctaatttcttgatgatgatcgccgctaaatattgcagacttttgatttatcaaatcagagctccctgacattggccgaaccgtattcacttctacgtcgtcgtcctt

SEQ ID NO: 9149 - DNA, 322 bp, Glycine max
  Clone ID: LIB3092-047-Q1-K1-D5
gctttctattcctttcattgtttcttttctcttcgttctgaaatttcgtttctctctccaacgctacagggtcggaggctaaaacccaaatggaatccataaggaagggggtcgtcaaccacaacctccgaactgttggtaaaatttctcaatcccccacttaattcgttctttggggtttcctcattcatgggtattggattttgttaatttcgatctttttgcggtttttgcgatttttatttggatcagggtgtctgtggctcagtggtatttcgggttcaatcgcttacaattggtctcgacccaatatgaaaactag

SEQ ID NO: 9150 - DNA, 134 bp, Glycine max
  unsure at all n locations
  Clone ID: LIB3092-047-Q1-K1-D6
cacatcataatacactcctccaacatctatattctccataacacccaccacaccactngtcaaaaacctcatttatatcacacactgactataatctttttatctcaaaccaacacaaaaacacaccttttctt

SEQ ID NO: 9151 - DNA, 121 bp, Glycine max
  Clone ID: LIB3092-047-Q1-K1-D7
cgcacgcgtattccgacacgtgtacagacgacttgggtcgtgaacgacaagtgagaaaatgttacattgagaacgaaaatgactcactgacactacgacgctgtaactaaatgcactatgg

SEQ ID NO: 9152 - DNA, 446 bp, Glycine max
  unsure at all n locations
  Clone ID: LIB3092-047-Q1-K1-D9
cccacgcgtncggaagaaacttaatcgatcatcacttcacttcactaatacggcatggcgggcgagacccagaacaagtatgagagctctgaggttgaggtccaggatcgtggtgtttttgactttctcggtaagaaaaaggatgaagaagacaagcctcatcctcaggaggaggtcatcgccaccgagtttcaaaaagtcactgtctcagaccaaggagagaacaagcacagcctcttagaaaagcttcaccgatctgacagcagctctagctcttcaagtgaggaggaaggagaagatggagagaaaaggaagaagaagaagaaggaaaagaaagggctgaaagagaagatcgaggagaaaatagagggtgatcatcatcatcacaaggatgaggacacaagtgtccctgttgagaaagttgaggttgttgaaacagcacatgc

SEQ ID NO: 9153 - DNA, 445 bp, Glycine max
  Clone ID: LIB3092-047-Q1-K1-E10
caaattcgctggttccaccggaatcagggatgtatcatctatatgtatcatgtgctcgtggttgggctctcaggtgccttgcttacttgaatatcaaaggacttgacaaagccatcagtttctcggctgtcaaacccatatttgagagaactagagaatcatatgaatataaaggatggatttttcctgaatcggaaaccgaggtgcctggagctgaacctgataggtttaatggagcaaagactattaaggaactttatgaaattgcaagtgaaaactatgccggaaagtacactgtttcggttctgtgggataagaaactcaagactattgttaacaacgagagctgacagataatccgcatgtttaatactgaattcaataatattgcacaaaaccccaccttggactagtatccaactgatttaaaagcccaaattgatga

SEQ ID NO: 9154 - DNA, 401 bp, Glycine max
  Clone ID: LIB3092-047-Q1-K1-E11
cgaccgcacgcgtccgaaaattctattaatccatcattttcaaggtttcatcatatatatatataatatgctcattgttttgctctcatgtcccctactcacttaaatatcaaaggacttgacaaaaccatcagatcactccactgtcaaacccatatttgaaagaactagacaatcaaatgaatataaagactctatttttcctaaatcagaaacctaagtacctcgatcttaaccttatacatttaaataatcaaaaactattaaacaactatattaaattgcaagttaaaactataccggaaaatacactaaattcaaatctgcacaataagaaactcaagactactattaacaacgagagctcacagataatccgtatgtttaatactgaattcaat

SEQ ID NO: 9155 - DNA, 462 bp, Glycine max
  Clone ID: LIB3092-047-Q1-K1-E2
gcggttccatacctcaatggacactggcttggcccaaaccctcctcatattatattattgctggatttgtttgtacaactgtttctgttccatatcttcgttccgagtatggaaaggattatgaatatgaagctccagtcaagcttttggataaactgctgcattcgatgccacaatcaccggatgaacaacttgttgtggtctctcaagtgctggtggctgatatcaacattggatatgaagatattgttaacacccaggtccttgctttcaatggtcaaccagtgaaaaacctgaagagcctagccactatggtagagagctgcaatgatgaatatctaaaatttgatctagattatgatcagatcgtggtgcttcgcatgaagactgcaaaagcagctactcttgatattcttgcaacgcactgtattccatcagcaatgtctgatgatcttaagtcat

SEQ ID NO: 9156 - DNA, 320 bp, Glycine max
  Clone ID: LIB3092-047-Q1-K1-E3
aactccttcctcatttctcatttctcattctacaccatggcaagaaaaaccaagtccatggtcttggccttcttactactatactctttctcactgggggtagaggtagtagcccaagaggaggcaatagcaaaatccgaaagtgaagcattaggggaaccagagaaaagagaaacacttgaaatcatcattggtggaggtggttcacctgctccttctccctctccccctacatattgcccacctcctccaccaaaaccactgagccggttggagaaagcaaaacgtgttcttcttaaattcaaaaccacaatcgacga

SEQ ID NO: 9157 - DNA, 437 bp, Glycine max
  Clone ID: LIB3092-047-Q1-K1-E4
gcgagttggtgttagtcttggtgtagtgtagctagggagggatatatatctgagtaagatggcgtcagagcgtgaattgcccccaggcttcagattccatccaacggacgaagagctggtgttgcactatctctgccgcaaatgcgcgtcgcagccaatcgccgttcccatcatcgccgaaatcgacctctacaaatacgacccctgggacttacccggattggctacttatggagagaaagagtggtacttcttttcaccacgggaccggaaatacccaaacggttcgaggccgaaccgggcggctggcaccggttactggaaagcaaccggggcggataagcccattggtcagcccaaaccggttgggattaaaaaagctttggtgttttactgcaggaaagctcctaaaggggacaaaagcaattggatcatgc

SEQ ID NO: 9158 - DNA, 405 bp, Glycine max
  Clone ID: LIB3092-047-Q1-K1-C8
aaaaacacttgcagactagatttgtgggtggaacatatcgcattacattacagcagattgggggcatatcaatggcctcgtcactacaagcagcatctactttcatgcaacccaccaagtttttgcagctaaagtctactcacgccatatctaacgcttttggtttggaacctgctggaattaataaagtcacatgctcccttcaggctgatcttaatagacttgactcacaagtgtcttgatgctaccaaaactgcatgctttgccctagacacctatgatctcgtaggatctggagcacgtgctgaacgaataccaaatcggataaccttacacgaaatgcagaacaagacctacttggaagtgaaggggacaggaacaccacaccagtgtccaacaattgat

SEQ ID NO: 9159 - DNA, 395 bp, Glycine max
  unsure at all n locations
  Clone ID: LIB3092-047-Q1-K1-E6
attccctttcgacccacgcgtgcggccacgcgtncgagagaagaaaagagagatatggagagcgtgcgtgagaggaagatcttcgatgtanggtggtcaatttcggattcaccaaggccgcgcgtgtgacatttttagagagagagatgtgacgacgctgagtgctctgctgagagattccataaccccaagaggaagacgaggaggagaaggcggatagaacctttttcctttttttttgtgctcgtaatttatcctcaaaacggtggatagggatttttcactctgcagcgataccgtccattgagattagtcgaagtttctgatggagcaccgaaagcttgaggttttggggattccgtgggatatcgatactgacggattgagggaatata

SEQ ID NO: 9160 - DNA, 329 bp, Glycine max
  unsure at all n locations
  Clone ID: LIB3092-047-Q1-K1-E7
tcaattttccacggtttctcactcctcttccatagcgtgcaatctgcactgcgtgtctgctgnnctccaaaaaaataaaccctanctccaattggtccctttaatcaattacctcttaattagtaattacttaatctcaattattctttcactctcccacacaacaacatcatgggcgtcaaaggttttgtcgaatgaggcatcgcttccatcattgcaagatgttccacacacccacttgatctcatcaaggtccgcatgcaacttcaaggcgaaaacaatttgcccaaaccggttcaaaatctccgacccgcactcgccttccaaac

SEQ ID NO: 9161 - DNA, 412 bp, Glycine max
  Clone ID: LIB3092-047-Q1-K1-B10
cactgactcacacccacaattttcgtgggctttttcaaagtacctacacattgtctccttgtcttactgttctcttctcttctacatcatttttattttttccaatcaaaccaaacaaaacataagcaccgttcttttctctccgaaatccccatctcccttcacttctgacctctggaccagatcccatatctcaccatctttcacacactcttccatcagattcaccctttcgtttaacgcaaactcataacttgaaggttaatggctgctacacctgcaagggctcgtgccgattacgattatctcataaagcttctcttgatcggcgacaacggtgttgggaaaagatgcctccttctgcgtttctccgatggttctttcaccactagtttcatcacaactatatgca

SEQ ID NO: 9162 - DNA, 454 bp, Glycine max
  Clone ID: LIB3092-047-Q1-K1-B11
cctccttcctttgcctctttcgcttttgctttctaggattttttttttttttgttgctctgtctctgtgtcgatggcgggaaaaggagggaaggggcttgtggccggaaaaaccacggcagcgaacaaggacaaagacaaggataagaaaaggcctgtctctcgttcatcccgtgctgggatccagtttcctgtgggtcgtatccataggcagttgaagcaaagggtgcaagcaaatggacgtgtgggggcgactgctgctgtgtacttggcctccattctggaatatctgactgctgaggtgctggagctggcggggaatgctagcaaagatctgaaggtgaagaggatcacaccaaggcacttgcaactcgctatcaggggagacgaagagcttgacaccctcatcaaagggaccattgctggtggtggtgttatccctcacattcacaagt

SEQ ID NO: 9163 - DNA, 457 bp, Glycine max
  unsure at all n locations
  Clone ID: LIB3092-047-Q1-K1-B12
agccaattcccctcctcaccaatggccaaactatgtctggtgagattccatgtgccacacgtgatactcaatctgtgcgaactacttcaggtcctctgggcccatctgaaaaggttcactcacttccctatgttgatccaaggcaaccagttccagtaagaattgtggacccatcaaaggacttgaattcttatggtctgggaaatgttgactggaaagaaagggttgaaggttggaagcttaagcaggagaaaaatatggtgcaaatgactggtagatacgctgaagggaaaggtggagatgttgaagggactggttctaatggaaaagaacttcaaatggtagatgatgctcgacaacctatgagtcgtgttgtgccaattccttcatctcagctgacgccttatcgagttgntatcatccctccgctgattattcttggcttcttcttacaata

SEQ ID NO: 9164 - DNA, 338 bp, Glycine max
  Clone ID: LIB3092-047-Q1-K1-B2
gcggaaaaagaaaaagaaaaagaaaaaaatatttgcgaggaatagaaacgaaccgaaacggggaatcattgtcggcgtctgtaaattgtaaattgcatcatccctgaagctgaacctcaaaaccctagctgccggcttgtctgcaacggcatcgtttcagtatctcgttatgattagttgagaatccaaaagaatcgaatcgaatcatctcgacgagaagcaaaacaccggctatagttatgtacagagagcgaggaggcgtcggatccaaatcggaagtaacttccgttgatcggaagcgaatcaatgacgtgctcgataaacagctcgaacgatcc

SEQ ID NO: 9165 - DNA, 270 bp, Glycine max
  Clone ID: LIB3092-047-Q1-K1-B4
gccgtgtatgaagtgacatcatcctcataaccccttcccttaaaaaacccacttccaaaatgctcaacaacgtcaacttaggcaacaaaataaaaagaaaaagaaaaagaaagaaaaaaaagagattgagaactacgaatgaaggaagggccataacgattccaacgatcgattgatatcacttcttgaggcttccgcgaacaccggtgcgaggcttgaatgactctggaacgctggtggtggcgtgaacattgacaactatgtcctact

SEQ ID NO: 9166 - DNA, 206 bp, Glycine max
  Clone ID: LIB3092-047-Q1-K1-B5
cccgggccgacgcacgcgtacgactacacccttaccctctgtttttttggctttctacgaaattattttatattgtggctctgtctctgtgacaatggcgaaaaaccgatgcaaagggcttgaaaccggaaaaaccactgcatcgaacaacgacaaagacgaggataaaaaaaggcctgtctgtctttcataccgagctgagatcc

SEQ ID NO: 9167 - DNA, 456 bp, Glycine max
  Clone ID: LIB3092-047-Q1-K1-B7
ggtgctttcatctctagattagtactcacaccttataaaagagaaagaaaaagaaaaagagagtgatgaaagcggagatgaaggatggagctcctcaagttgtgatgaatcataatggtaaccacggcaaattctcacacctacttgcttcccaagatcgtgactatcttctctctccaactggggctcaggtgaaagtttctgatcttgaagggaaagtagtgggtctattattcgctgcgaattggtacccaccttgccgtggattcacccaagtcctagctggaatctacgaggagctaaaaagcagagtccctcaatttgagattgtgtatgtgtcctcagatgaggacttgaatgcctttaatagcttctatggaagcatgccctggattgcaattccgttctctgatttggaaacaaagaagtctttgaccagaaagtttgacgtggaac

SEQ ID NO: 9168 - DNA, 391 bp, Glycine max
  Clone ID: LIB3092-047-Q1-K1-B8
gctgcacgaacccccacttttatgatgatcttgctaaaactacttaaaaaggggaaaatgggcctgatcactaaacggaatagacacattaacactttgtaaaaaattgaagaactattaattgctactggtccctgcagattgatcgatatgatactttgcaacgaacactgaacctctataacttattttttgtttcccattgaagtttttacacgatttatctttacatgttctattgtgagagattaatactgtaatatttaacacacattttttgtatcattgccggtagcttactacgtcgttattatgaatatgttggctgctcaatgctacctcaatttgctgcacacatcatttataatctatataagtaagcttggagatg

SEQ ID NO: 9169 - DNA, 440 bp, Glycine max
  Clone ID: LIB3092-047-Q1-K1-B9
ttgtaactcgttcttcttcttttgttgttctgtgtttgtgtttgttttttgtctcacctgggaatgtcttgctgcggtggtaactgtggttgcggaagctcctgcaagtgcggcaacggctgcggaggctgcaagatgtacccagacttgagctacactgagtcaaccaccaccgagaccttggtcatgggagtggcacctgttaaggctcaatttgagggtgctgaaatgggtgtgcccgctgagaacgatggctgcaaatgtggaccaaactgctcctgcaacccctgcacttgcaagtgaggtgttgggagagcaagcttcaagcagagatagcccttaattaggaataatgataaactattaatgtgtagctaaaaacttatgtattatgtctgtgatggttttcgtgcactctggtgttttgtgttaaacaaaca

SEQ ID NO: 9170 - DNA, 366 bp, Glycine max
  Clone ID: LIB3092-047-Q1-K1-C1
gcggcttgcggtcaaattgttatatgcgcaccttaaacaaaggtgttagaccaccctgccacagcgtgttttggtactcactgcagttggaattctaccttagtatgtgaattcaatgcggtacctttcttgtgttggccttattatgctgaccaattaattgacaaagcttacatttgcaatatgaggaaagtgggtgtgggatttgattgagatgacacacggctgatatcaccctgtgagacaaagcacaaagttgaccatgtccttggagatgagaacatgaagcgaatgtctgaaaaactgaatgaaatggttctaaattacattgcggaaggtggacaatcctatgcgaattttaacaag

SEQ ID NO: 9171 - DNA, 286 bp, Glycine max
  Clone ID: LIB3092-047-Q1-K1-C2
cactgtgttgtatcccatacgaatctgtgtttgtgagcgttttgacgcgatatggaggctgctgacttcaaactcgagaaagctcttggagaccaattgcacgcatgagaacgtaacttgggtctggacaatttccgctgcacttgttactgcaacagcgtcttgcgcgcactatacttctgtgttccggttcgcgaacaattactagagtattatggagatgaccaatgcatattgtacagggaaaaaaatcttttaacttgcttagcggacttattatcacaga

SEQ ID NO: 9172 - DNA, 387 bp, Glycine max
  unsure at all n locations
  Clone ID: LIB3092-047-Q1-K1-C3
gcgacctgatgaaggttctagcacgggagggaatattatatcttatcccacatcgatggaagcgtgtggacggtgcattgaattgacacaaaatggccaaaaacattctttcacatatgataaagtttttgcacctgatacatcacaagaagaagtttttattgaaatttcacagcttgtgcaaagtgctcttgatggttataaggtttgcatttttgcctatggtcagacagggtcagggaaaacttacacgatgatgggcaagcctggacattcatgagaaaagggcttgatccctcgttcactaaaacaaatatttcaaacaaaacagtctcagcaactcccaggctggaaatatgaaatgcangtgtctatgttggaaatata

SEQ ID NO: 9173 - DNA, 434 bp, Glycine max
  unsure at all n locations
  Clone ID: LIB3092-047-Q1-K1-C4
gcggcgggctcaagtgctccccactctcatcttcttctctcttctccaaaccttctctttggacggcaacaatcgcaaaagcgcgtttcaattaccattgcgaactcaatagcaatagccaatgcgcagaacaaagagagagcgaggcttaagaaactcttcgaagaagcctacgagagatgccgcaatgctccaatggaaggtgtttccttcaccatcgaagacttcactgctgctcttgacaagtacgacttcgattctgaagttggcggcaagattaaaggcactgtgttctacacagataacaatggagcagttgttgatatcactgcaaagtcttcggcatatttgccactgcaagaggcgtgcatccacagggttaagcatgttgaagaagcangcttagttcctgggttcaagaggagtttttgatc

SEQ ID NO: 9174 - DNA, 222 bp, Glycine max
  Clone ID: LIB3092-047-Q1-K1-C6
catcacatttgacttttgatgctcagagtgctgttagtatttgtaagaagttgacattgccaaaagattatcatgcaaaaacagagcatgggaaataaacaaacaaacatctgatatgcatcgatgttctttaaaaagaaatgaagacgaatccaatggctgcggatgcctgtatgtctatccataccatggctgatgatctccacatgaaactactgtacc

SEQ ID NO: 9175 - DNA, 402 bp, Glycine max
  Clone ID: LIB3092-047-Q1-K1-B1
gcgcccacgcgtccgcttaccttatctcttaatccatatacgatggcagacatggcaaccacagggctatcggaaaccccaaactctcattcttgaacggaaagcccgtcacatattctttccgcgtggcgcccaccaccaaattatcctcatacaaacaaggcacaatttccatgtccctaacctcaccctgctacgaccttcaaagcttcaaattccagcccatcaaagaatccatcgtgtcacgggaaatgacgcgccgctacatgaccgacatgataacctacgccgacaccgacttcgtaatcagctgagccggttcggccgggctctcctgcgcgtacgagctcaccaagaaccccgccgtgagcgtggccatagtcgagcaggcagtgagccccg

SEQ ID NO: 9176 - DNA, 282 bp, Glycine max
  unsure at all n locations
  Clone ID: LIB3092-047-Q1-K1-C7
gattgtcatgtgctaacatgaaaattagaatagagattaatatggtcacaggaaatttaggttccacgattgaaaaattgcaagttgaaattatccaaactctgtgctgccacggactctgccctgcctgtaggcgttttgacaatatagaaagaaaaaaaaacatttcatgaggatgattatgtttgattttgttgcatgcatgccacgccaaaagggctgggtacaatttccactgtcaaaataataagaatgtatttgcgtgatgcaatttgtaccana

SEQ ID NO: 9177 - DNA, 296 bp, Glycine max
  unsure at all n locations
  Clone ID: LIB3092-046-Q1-K1-G8
ggcggacgtangccagtaactggcttacatctttttctagttggaagcaagcacaatctgcggggtgttcgcgttcaacactaggtatcccttccnaaaatccttcacccatattgggacagccatgtcgctataggtgctcccaagtggcagggccctgaggagcaagacatccggtggtttgagcctgttaagtgtaagaacttttctcatgtgagcacggcaccaattgagaaccttgaaaccttcttaggagacttctctggtgtctacatagttactggagcacaacttgt

SEQ ID NO: 9178 - DNA, 438 bp, Glycine max
  Clone ID: LIB3092-046-Q1-K1-H1
cgtgcgggctggtcttggtatgcttagtcgaatttcaaaggggactacttatactccagcgaagttgcgtccaaagcctcttaaattatgggcatatgaggggtctcctttctgcaaacttggacgtgaagtacttgtggaattggagctgccacacttgcttgtcagatgtgctaggggtagcccaaagagacatatactttatcagaaaactggaactttccaagcaccttttttggaagatccaaacactgggatagaaatgtttgaaagtgcagaaatcatagagtatctaagagcaacatacgctctttagtaagtgatgctatgatagggagaggcttgtaagggtttttaagtctcatgatatgcacacttcatttcctttgtaaatgtaattgctaatgggttctaagttctaacgggtaaatcaaattt

SEQ ID NO: 9179 - DNA, 337 bp, Glycine max
  Clone ID: LIB3092-046-Q1-K1-H10
ggaaaccaaaaaacaaagtatctgacacaatttgaaaacaaaggctgaaatgggaagaaacggacatcattgggtgcgaaatatatcgcagacgttgtcttgctagtcgatgattccaaactactttctgcgattcctcgctgcagaatttgtcatgaagaagagtttgaaagcgtagaaaccttgaaagcacctcgtgcttgttctgcaaccgttaaggacgctcatagagattgcatacagagatggcgcaactaaaaaggaactacagcctgtgaaatatgtctgcaccgatacaaacccggatatacatcttctgcctcaaagaagtctaaga

SEQ ID NO: 9180 - DNA, 118 bp, Glycine max
  Clone ID: LIB3092-046-Q1-K1-H11
aaaaaaaaaaaaaaaaaaaattttaaaaaattataaaaaaaaacaaatataaagatataaaaggaaaaaatttgaccggcccttctaaaacataccaaccttacgtacccatacattc

SEQ ID NO: 9181 - DNA, 382 bp, Glycine max
  unsure at all n locations
  Clone ID: LIB3092-046-Q1-K1-H2
ccacgcgtncgccacgcgtncgcagaatcagatgtcggatttaagggttccagtcgaaagggtctgcaagaaggattaaattgttattcaataccagaaaatttatttggcaaggtctgcgtcattattgataaaaatgggaaaattcccgctgacgagataaagaaagagttgaaagctgttggtctatctcaagaagctgtccaagagctattgcaagtcctttctgtgaagtcattgaccgagttagaagaaagacttgggagcaatggggaagcagttgctgatctgaaacagctattctcccttgctgaaaaaattggttactctaaatggcttcaatttgatgcatcagatggttcgaggtcttgcttactacact

SEQ ID NO: 9182 - DNA, 444 bp, Glycine max
  unsure at all n locations
  Clone ID: LIB3092-046-Q1-K1-H4
cgcagaatatgtgagctttgatcttcgaccttcagatgctatcaatattgcagtaagatgcagggttcctagacaagtcaacaagtacttggcatacagtgatggtatgagagtaattgaatcaagcaaattgtcaacacagttccctggtatggatggccgactattcactgaaatggaccggccaagtggtcaaccttgtgccgagaccacggagtttaatcttttacacaatatgttgaaagctgttgttgaagaacgctataaagatgctgctttgttcagggaccaacttaatcaacttagggcgggaaaaaacatgaaaaacagattctgaatgctttaattgtaaatacaatcttatattagaatatcgatggggttcggtacagctgagctgattgcagtcatgtctctcccttcctcggnctatgtatgcttaca

SEQ ID NO: 9183 - DNA, 293 bp, Glycine max
  Clone ID: LIB3092-046-Q1-K1-H9
aacaaagatgtgtggatagattcaattcaccatgtcgagctcatcggagtactctgaattttccggccagaaaccggcgaggtcgccggagaaatcgagcttctctcagacttgcagtctgttgagtcaatacatcaaggagaagggtagcttcggagatcttaccctcggaatgacatcatgtgggtcacctgagacatcttgtcaatctgctacaaccatgaacttgtttcctcccaaggaaaacaacgtggcaccaaagaacctgacagctatggatttgctctctccac

SEQ ID NO: 9184 - DNA, 413 bp, Glycine max
  unsure at all n locations
  Clone ID: LIB3092-047-Q1-K1-A1
gcgcttacaccattctcacaaaacaactttcaaactctgagaaagaatggctgccaacacattgatgagtactgctatctcagccttcccatctctcctttcttcctcaaaatccagatttgccaccgcagttcctctttctagctttggtgtcaccaatgcctcttcttctcgcttttctatgagtgctgactggatgccaggccagcctaaacctccttaccttgatggttcagcacctggtgactttggattcgaccctcttcgtcttggtgaagtaccagagaatcttgagaggttcaaagagtcagaactcattcactgcagatgggccatgcttgctgttccagggattttggttccagaggcattgggcttangcaactgggtaaaggctcangaatgggcagcag

SEQ ID NO: 9185 - DNA, 449 bp, Glycine max
  Clone ID: LIB3092-047-Q1-K1-A10
cccacgcgtccgtccaaaacatttgagagaggcagaagaagaagaagaaaagatggtgggggcagtgagacctcagtttgtgctctttggttcttccattgttcagctcagttactctctccaaggttggggcgctattcttgctcatttgtatgctcgcaaggcggatataattctgcgaggatactctggttggaattcaaggcgtgctgtgcaagttctggatgaaattttccctaagaacgccactgagcaaccagatttggtaattgtgtactttggtggtaatgattctcttcttccacatccaagtggtcttggtcaacatgtacctctccaagaatacattgaaaatatgagaaagattggtacccatctaaagagcctttcaaagaagactcgccttatatttctcagtgctcctcctgtcaatgaggcacaaatttatg

SEQ ID NO: 9186 - DNA, 448 bp, Glycine max
  Clone ID: LIB3092-047-Q1-K1-A11
acgtgagttttggaagtttggagaataggggaataaatacttccgacatgcaactgggcagatggatgcaatctcaaaggatttggccacttacatttccatcaacaagccgattttgcataaatatgctaatgaagatgtctcgcttggtgcatggttcattggtcttgaagttgagcatattgatgaccgcaatatgtgttgtggaactcctccagactgtgagtggaaggcacaggccggtaacgtatgtgttgcatcatttgattggagctgcagtggaatttgcaagtcagtggagaagattaaatatgtccactcaaagtgtggtgaaggagatgaagctgtttggagtgctttattttagattgtttcaaagggagatggttttttctggttcggagaaggactgattatttaattgcagctgggacaaagtcaattttca

SEQ ID NO: 9187 - DNA, 413 bp, Glycine max
  unsure at all n locations
  Clone ID: LIB3092-047-Q1-K1-A12
nccacgcatccatccaaaacattagagagttttataacaacaacaanaatcgggggaattgccagttatacctcacaacttgctctttgctacttccattacccagctcagttactctctccaaggttgtggcgctattcttgctcattcgtatgctcctaagccggatataattcttccaggatactctacttccaattcaacgcctactacgaacactatgcatgaaatattccctaacaacgccactgagcaaccagatttgataatcttgtactttggtggtaatgatactcttattacacattcaatcagtcttggtcaacatgtacctgtccaacaatacattgaaaatatgacaaagattggtacccatttaaacagccttttaaagaagactacgcttatatttc

SEQ ID NO: 9188 - DNA, 399 bp, Glycine max
  Clone ID: LIB3092-047-Q1-K1-A2
gcggctcgatcggtatgggcactgttctcagaacccccaccttctggtcaccggcttctgcgagcggccgcaagtcgacgaaaccatcgcgcttcgccgtcaggtccttcaaacagagcatcacctgcgggagaaaaccctcctcgcttatgtacatcctgccggaacctaatgttccctctctacggatcgtcaggttcgaacccttcgctttcgacggcgacaccgaagccccgcaagttcaggagccggaggttcaagttctggacccttcagatggtgctgatggtgtaaacaacagtgcaagtgataatgaggttagtgatgctgatgaaacattagattcacctgtcttactgttacttcaatcctacaaaaaagcattaactaataacgacg

SEQ ID NO: 9189 - DNA, 412 bp, Glycine max
  Clone ID: LIB3092-047-Q1-K1-A4
gacccacgcgtgcgcgtgtctcatggcgtctgttattcctcgatgccttcctgcttcaattccaattgcacaccgacgaaaggcgcaggtggtgaaatcgtgtcaccaaaacgagagctctgcttcagctcacacagaccactcctcaaatccaaaggaactccgagtaacagtttccaggcgtaattgtctctcatgtttgtgttctactatagttttgattaaagattgcgccatgcctatttttttaccaaaagcatccgctgctgatggaaatggaatcatggaaaaacctgtgtgcagaaattgcttgggaagcggtgctgcgctttgtgatatgtgtggtggcacaggaaaatggaaagctcttaaccggaagcgagctaaagatgtttatgaatatactgagtgt

SEQ ID NO: 9190 - DNA, 129 bp, Glycine max
  Clone ID: LIB3092-047-Q1-K1-A7
tccaatacacccagattttctatcgactcaacaccaaccgtactacttttactataatttctaactcccttataaacaatacccctaacgaatattactactacgacaaagctattatcattttctttt

SEQ ID NO: 9191 - DNA, 398 bp, Glycine max
  Clone ID: LIB3092-046-Q1-K1-G12
caatcgtttaatcgtgaacttcggctcgatttagctcgggaaaggggtgcgtgtgccccggacagcagcaactggaacaactcatcccagaaaagtgaaagaggccactctcaaacaatatttgtaaggggtttcgatacatccgttggggaagatgagataagagggagtttgcaagaacattttggatcttgtggggacattaccagggtgtcaattactaaagattacgagtctggtgctgtaaaggggattgctaatgtggattttggtgatgctgatagcatgggcaaagctctagaactccatgaaactgaactcggaggttataccttgacagtggatgaagcctaacctagagataatcagggttctgggggtagaggtgctggtggtag

SEQ ID NO: 9192 - DNA, 462 bp, Glycine max
  unsure at all n locations
  Clone ID: LIB3092-047-Q1-K1-A8
ccgggccgacgacgcgtacgttcgtggaacacttggaaggcacaatgggatggaggaagaagaagttcatcggcgagaagggctctgccactttccaactcatcgctcgcgacacctccgacccttctttctcccaatccgaccgcgtcttcgtccgcgtcgacaacaaccccgtttccttccccgtcgccgatgactccgcttttgatgacgcccccgacgactactactacgacgacgacgccggagttagcggtggtcccttgccggaggacgtgaggagggagattctggagctagggtttccggatgatggctataactacttgaatcacttgagggaaatcaagaacagtggcgctggtgctgctttctaccacaaccccaagttcaagctacaacacctncctcgcgatgttaaggcatttgatgcttctagattgcaaattgctgaggcggatg

SEQ ID NO: 9193 - DNA, 458 bp, Glycine max
  unsure at all n locations
  Clone ID: LIB3092-047-Q1-K1-A9
nccacgcaacactgtgcttttatcttgcattttttcaatacatataaaccggggatattcgatttttttaagcgacggactaaaantaataacatcttttaaaaaaaattgaaccgtggcggccatctacatctctatgggatcatcactttcgttactttcatcatcctcggaacaaaccgttaggcatacactctttgctacttacttctaacttcactattccttccaaagatggggctcttattctgagatcatgcagcttcaaaaaaagagaatcagaaactactataaagggtacctctactaccaacacttcaagcaaattgaaagattgcacgctcgaacacatgtttctcaaaagaaacctttcgtgcattaacgatatcctgatcatgggatcagacataagtgtacaattacagcacatgcctgtgcctgttctttctctgactaaa

SEQ ID NO: 9194 - DNA, 356 bp, Glycine max
  Clone ID: LIB3092-046-Q1-K1-D7
cccacgcgttcgcgcgaatgtttgtagaattttagacgccaccagggttcaggttttatttgactgattaagaattggtcaatcactacttgagaaggaagtgcgcggatcaaccaatctcggttcccatcatcaaataggtcgatttgtacaagatatattcatggcatcttccacaaattgactactactgctagaaagaatggtacttcttttcttctcgggatcagaaatactcgaacggttcacggcctaaaccgtgccatcttaagcggatattggtaagctcacccgcgctgataagccatcggaaataccaaagcgctagggatccaataatgctttggttttttacg

SEQ ID NO: 9195 - DNA, 464 bp, Glycine max
  Clone ID: LIB3092-046-Q1-K1-D8
aagaaatttaagtgaggagctatataatgattatgaagtctgctatgtgtgcagtggtgggtgtagcacttcttcttctggcggaggtggggcccatggctgaggctgtgacatgcaccccaacagagttgagtccgtgtcttccagcaatcacttccggtgctaaaccttccaatgcttgttgcacgaagctgaagcagcaaaaaccatgcttatgtggctacctcaaaaacgctagcttgaagcagtatgttaactctcctaatgcccgaaaaaccgttgcttcttgtgggattccctttccaacttgttaattaattaagccttcttataattaaagtgtgggatatatatatatatatagataaacagtttaatttatacacactttgatcctacaaagcatcttgacacaggcattcaataggatttcaccactttatcgcaacattttaacatgatgc

SEQ ID NO: 9196 - DNA, 468 bp, Glycine max
  Clone ID: LIB3092-046-Q1-K1-D9
tgctaagaagcatcaggccactcctgcccagttggcattagcatgggtacttgagcaaggcgaggatgttgtacctatccctggaacaactaagattaagaacctggatcaaaacataggtgccttagcagtgaaactgtcagaaaaagacctgagagaaatttctgaggcggttcccattggtgatgtagcaggtggtagatactacaatggattggatcacttttcatggaagtatgctaacacacctccaaaagattcaaaaatctcaacctgacgcacccaaccaaccctttggttagggaatctaccaagtcatcatgaattgagggtaacaaggctggcaaaggctaatatcaggatgtctttttaaatatcaataatgtagcccctcttgatgttggacttcctagatatttggttggttaaaatttttaatttagactgtaatactattttatatgcaac

SEQ ID NO: 9197 - DNA, 422 bp, Glycine max
  Clone ID: LIB3092-046-Q1-K1-E1
tgctaagaatcatcaggccacttctgcccttttgcatagcatggtacttggcaaggcgaggatgttggacctatccctggaacaactaatattaagaacctggatcaaaacataggtgccttagcagtgaaactgtcagaaaaagacctgagagaaatttctgaggcggttcccattggtgatgtatcaggtggtagatactacaatggattggatcacttttcatggaagtatgctaacacaccttcaaaagattcaaaaatcttaacctgacgcacccaaccaacccttttgttagggaatctaccaagtcatcatgaattgagggtaacaaggcttgctaaggctaatattatgatgcttattaaatttcaataatgtaccctttcttgattgtggacttcctagattattggttggtt

SEQ ID NO: 9198 - DNA, 469 bp, Glycine max
  Clone ID: LIB3092-046-Q1-K1-E12
acgggctggttcaactgacgtgatggcttcgaatttgccttctcccgcccaagtggagccctgagttttctcttcaaataactccacaaaacttccaggtagcttttctttgaagagaaaagatagtgacacaacagtacagagacgagtttattgctctgccgctgctcaatcaccaccaccagcatggccaggaacagctattcccgagccttctgatttcaagacatgggatgggcaaaaacctatttctgtcttaggatctacgggttcaattggaactcagacactgagtatagtggctgagttcccagaaagatttaaagttgtgagccttgctgctggctctaatattactcttcttgctgaccagattaaaacatttaagcctgaagttgttggtcttagaaatgagtctttaattgatgaactcaaagaggctttggctgatgtggatcacaaacccgaa

SEQ ID NO: 9199 - DNA, 333 bp, Glycine max
  Clone ID: LIB3092-046-Q1-K1-E2
tcggccacgcgttcgaatagaatattctaaggctttgggaatagtgctgcaacggcttcaagtcaggaggaggggacccttttgggagctacttgaagcccaattgtgtgcaggggttatattggcctcaagttgaagggaggtcaataccaatatttcgaagaaaatttgaggaacaagagtgaactgcttcttaaattcaacccaattcacaagaaaggtccagtgtttatttacaatgagaagcccataaccgaatctattgtggttggtggatacattgatgagacattgaagaaccaccccaaattggcttttgaatcttaacaaaaa

SEQ ID NO: 9200 - DNA, 135 bp, Glycine max
  unsure at all n locations
  Clone ID: LIB3092-046-Q1-K1-E3
naatagatngagagcgagtgngtatattctttttaanacccagaattatctaagggatatctctatctatcattatatcattttcctaaaattgtcatatcaataaatttaatcttttgttttaaaaaggaaaaa

SEQ ID NO: 9201 - DNA, 394 bp, Glycine max
  Clone ID: LIB3092-046-Q1-K1-E7
cacaaccaagccacccatgataataacaatttcctgcttcggctctaccctcggcactcgggactcacagttctcaactcaaccacccattattaaccctcaccgcaatctatgattcgatctttttcaattgacgggtttcccatataccacaaggcatacgcctgtgtgaatgtgtgatatgctgagtgattgtcggcaagacccaatctctagtgtactactttaccaacctatagcgcacgattagatgtttttctattggaatcggacaaaggttccactgggactgaaactgtcagaggccaaagaatgctcgattcggaccttctggcgctatccttgccgagccttggcatgagcggggtattgatcgcgtacattggccttcttt

SEQ ID NO: 9202 - DNA, 390 bp, Glycine max
  Clone ID: LIB3092-046-Q1-K1-E8
caaacctgaaaccttattggatttttatttttacaatgcaggttttctcaaaagagaatcggattacgtccagaatgctatttccagagatgggttggagtggctatttaaaaggatgattgagttgggaaaaacggggcttgttttcaatccttatggagggaaaatggctgaaattccttctgatgcgacgccgtttccgcaccgtaaagggaacttgtataaaatccagtactctgtgaactgggatgatccttcacccggtgctgctctgaatttcacgaaccaggctaaaaggttgttcagttacatgaccccttttgtgtccaagaatcccagaagtgcgtttttgaataatagggatcttgatattggggttaacagctttgg

SEQ ID NO: 9203 - DNA, 123 bp, Glycine max
  Clone ID: LIB3092-046-Q1-K1-E9
aatttattgtgagtgagtttgaataaacttcttaatactgagaattatgtaatggatatcagctatctatcattatattattgggttagaattgtcatatcaataaagttaatcttttgtttt

SEQ ID NO: 9204 - DNA, 462 bp, Glycine max
  Clone ID: LIB3092-046-Q1-K1-F12
cccgtagattaagtgggggacttggtaccactagagttggaggtgaagaagttaatcagcgacattctggggggagcaacaacagtctcgttctgaagaaccgagagtgcgagaggaccgacacgctgatagagacagggaaatatcacgtgaaagaggtagggacaaagacagagaacgggagcgatcacgtgaacattctcatgaaagggtcagggatcgtgatcatagggaggataggcaccacacataccgggataggaacagggacagagaccgagacagggaaagagatagagatcgtgggcgtgatcgagatataacacgggaccgtgatcgtgagcgagggagggaccgtgatcgggatcgagaatatgatcgacatcgtgagagggatagaagattatgaagttggtgaccctgatcgaggacgctcacgtgataaggagtctgattatgatc

SEQ ID NO: 9205 - DNA, 270 bp, Glycine max
  Clone ID: LIB3092-046-Q1-K1-F4
gcggaagaagaaaggcgtggaccaattcccgttctgcgtgcacctggtctcgtgggagaaggaggacgtcttcagcgaggctttggaggcggcgcgcatcgcatgcaacaagtacatggccaagttcgccggaaaagatgccttccacctgcgcgtgagggtgcattccttccacgtgctccgcatcaacaagatgctatcgtgcgccggggccgacaggctccagaccggcatgaggggcgccttttggaagccgcaagggacgtgcgc

SEQ ID NO: 9206 - DNA, 164 bp, Glycine max
  Clone ID: LIB3092-046-Q1-K1-F5
gttgttataaaggggttgatgcagattaactacttgctatcctgggagaagcatgcttattctaaattgttttaaacattagtttatgtacagctaaatttgtaacaagattattggcattgcttttatcgggaattcactggcttactaatttccgagggtgt

SEQ ID NO: 9207 - DNA, 344 bp, Glycine max
  unsure at all n locations
  Clone ID: LIB3092-046-Q1-K1-F6
atgacagtgtgattgctttggcgactagatgcccccatctgaggtacctaggactgtactactgctagaacatcacagatagagcaatgtatttcttggcacacaccaaggtgaacaacaggatgtggggaactgtcgaaggacgaggaaatgatgaagatggtttaaggacttttgacattagccaatgcactgcactcaccccatctgctgttcaagctgtttgagactcattcccttctctccacacatgctcanggaggcactcactcatcatgagtggctgccttaacttgacatcagtgcattgtgcctgtgctgtccatgctcaccgtgcattcacc

SEQ ID NO: 9208 - DNA, 414 bp, Glycine max
  Clone ID: LIB3092-046-Q1-K1-F7
cggacgcgtggggtaaacctttaaagacaagttgggctgaagctgtatttagtatactaaagttccagttacgaaaagcatcgttatctgaagatgatgcatttgcctttctgaagggtgacaactatgctgattctgtgacatattttagcttctccgaagcacttcggcaggtgaagttaattggtgtgccttatggactacgttttcaacagttgcaagatctatggaatcaagcagatgctgatggaaatggtgtcatagactttgaagaattcaagcagaaaatatggaattctacatgtccagagcatgtgttggaaaatctgaatggttgcacggaagattgtaacacagaacaggagcaagaagctattggttttaaggtgaagaatgcaatgctgtatccgcgtg

SEQ ID NO: 9209 - DNA, 183 bp, Glycine max
  Clone ID: LIB3092-046-Q1-K1-F8
atttgaaccagatctacacgccgatcgtggttttggacaggtcttttatatatctggagcttagccgcttagatctacagtaccgaggctcaacaaaaaatcgatgacaagaacgcatatccgactgtagatccagccgatttcgcttgttctatcgctacagacccctgtattggatcatta

SEQ ID NO: 9210 - DNA, 228 bp, Glycine max
  unsure at all n locations
  Clone ID: LIB3092-046-Q1-K1-D2
tcgggcttagaatagctggtctacancgcccgccagtattcacatattggaaagaattagagcgccgaggaaaaccgccgttcacggcggtgaaactcgtcttcgaatccagagcctatctcggatgctcactcttatcacattgagcgcaacgccaaaaaagtcaattttacgattgaagaattggagcagtggaaggaacaactttcttacttagctaacctagct

SEQ ID NO: 9211 - DNA, 427 bp, Glycine max
  Clone ID: LIB3092-046-Q1-K1-F9
tgctgcttggaactgtgtatgcgagtttaggaaacccacgtgtgtagtagtagagcatacgaatccatgtggggtagcatcacgtgatgatattcttgaagcctacagactagctgttaaagctgatcccgtgagtgcatttggtggaattgtagctttcaatgtggaaattgatgaggcacttgctaaagaaattcgagaatttagaagccccacagatggggagacaaggatgttttatgaaatagtggttgcgcccagctatacagagaagggccttgagattctttgtggaaagtctaagactctaaggattcttgaagcgaaaaagaatgaagctggaaagctttcactcaaacaagttggtggaggatggttagctcaggattcagatgattaaaccccacaggacatcaaatttcaacgt

SEQ ID NO: 9212 - DNA, 262 bp, Glycine max
  unsure at all n locations
  Clone ID: LIB3092-046-Q1-K1-G1
tcctgcttgtaaactgtgtatgtcttttttagtttaacccacntgtgtagtantaaggcatactgatccatgtggggtagcatcacgttatgatattcttgaagcctacagactagctgttaaagctgatcccgtgagtgcatttggtggaattgtagctttcaatgtggaaattgatgaggcacttgctaaagaaattcgagaatntagaagccccacagatggtgagacaaggatgttttatgaaatagtggttgcgccc

SEQ ID NO: 9213 - DNA, 397 bp, Glycine max
  Clone ID: LIB3092-046-Q1-K1-B5
ggacggcccgggccgaccgacgcgtacgcttaaaacgacgttgttttgattgtacaacacgggaacagcacgaaaaaggatgacagagaagtccatttcatcatttttagcgaacatattggagttcgtatattatagtggagctgttactacggtgcaccagctatgcaagtggtttattatggaccacttttatataccgtaagattaatttcatcgacacacttacatggtgtcaacaccaattttttggctctttctttctctggatccccctcaaccatgggtacacactttctgaggaagaagaaacatccttcaagcatgtacttcactggatgttccctggcagtgcaccactggctaacaagaacaccttgactactttaccaccatt

SEQ ID NO: 9214 - DNA, 444 bp, Glycine max
  Clone ID: LIB3092-046-Q1-K1-B7
cgatgagctgcaaaatcacatcattatttgtgtatttgggcgagttgggcagatgattgcacgacttctttctgagcaacttattccctttgttgcactagacgtgagaagtgatagagtggcaattgggcgttccctagatctccctgtgtactttggagatgctggtagtcgagaggtcctacacaaggttggggctgaaagggcaagtgctgctgcggtaactctagattcccctggagcaaattatagaacagtttgggctctgagcaagcacttcccaaacgtgaagacttttgtccgtgctcatgatgttgatcatggattgaatttagaaaaggctggagctaccgctgttgtcccagagaccttggaaccaagtcttcaactagcagccgccgtgcttgctcaggctaaacttcctacatcggagattgcagcgac

SEQ ID NO: 9215 - DNA, 456 bp, Glycine max
  Clone ID: LIB3092-046-Q1-K1-B8
cccacgcgtccgattctgctctggaacaccattgttactaccctcttcctgcttctgctggagaaagctgatcatcccaatcataatgatggtgaaaaagaagaaacttgtgcagaggaaggtagctctcaacatcagcctaacacatcacagaattgtgtttcataccaaagcaataagcctcgcctcaacagatatgcacttggtggtgctatcttggcttccacaaactccatcctcttaggctatgatattggggtcatgagtggtgcttctcttttaataaggcaagatctaaagatcacatcagtccaagtagaaatccttgttgggtgcttaaatgtgtgttccctgataggatctcttgcttcaggcaagacctctgattggattgagagaaggtacaccataatggttgctgcagcaacattcctgattggtgctattctgatgggt

SEQ ID NO: 9216 - DNA, 399 bp, Glycine max
  Clone ID: LIB3092-046-Q1-K1-B9
atgatagctggtcttagcatgccagaagttgcatctcgccatgaatgacaggaagacattgctcatgaaataactgcactgtgctgccttttctactatggatagcgaagaaattcacatgactccatctaattcgaattctgaaacaaaatcactattgaagtcttacacacctctatgtgtttagagctacaatcggtattgcactctgggctgcttgccggtattttctgtctctgatggctctacttcaggactggactataattcagcctatctccttcaatcgtttaacctatcaactatgatgatatatacggactggctaatggatcaaagtcagtccatggttgccgttaacgaacctgcatacgccattcaaatggcactagatgactg

SEQ ID NO: 9217 - DNA, 412 bp, Glycine max
  Clone ID: LIB3092-046-Q1-K1-C11
gggtttttgagtgcggtgcggtgatcctagcactctcttatgcagctttcgccgacagctggattcaccatggctgagcaaaccgagaaggcttttttgaaacaaccaaaagtgtttctcagctcgaagaaaactgggaagggaaagagacccggaaagggtgggaaccgcttttggaaatccattgggcttggatttaagactcccagggaagccatcgaaggaacctacattgacaagaagtgccccttcactggcaatgtttccatccgtggccgtatcttggctggaacatgtcacagtgctaagatgaacaggactattattggttaggaggaattatctccatgttatcaagaagtaccagaggtacgagaaaaagcactccaacattcctgctcatatatcacct

SEQ ID NO: 9218 - DNA, 458 bp, Glycine max
  Clone ID: LIB3092-046-Q1-K1-C12
cccacgcgtccgcggacgcgtggggcgaatggacctgcttttgggtgtgtgctgatgaaggatttcctcaaggcactcgcaaagcgcctcaagcacaacaatactgcatatgaaaattaccacaggatatttgtccctgatgggcatcctttgaaggctgcacccagagagcctttgagggttaatgttctgttccaacatatacaaaatatgctgtctggtgaaactgctgtaattgctgagacaggggactcctggtttaattgccaaaagctgaaattgccaaaggcatgtgggtatgagttccaaatgcaatatggttcaattggatggtctgttggtgctactctgggttatgctcaagccgttcctgagaagcgagtgattgcctgcattggtgatggaagtttcaggtgactgcccaagatgtatcgacaatgttacggtgcgggcaaaaa

SEQ ID NO: 9219 - DNA, 380 bp, Glycine max
  Clone ID: LIB3092-046-Q1-K1-C3
cagcaactatctataatccttattaattgtgtatacgaaacactaggcacacacatggctacggataccaagactttcatataggaaccaccaatgtgtgatcactcaaagtagcttttttattgataccgttcttttatacgctatctaaccaaatttaaaaccttgtacagagcgaattctcggcgggtggtttcaaaagccacagcagctctcggtgacaagaagacagaaaagccgtacgagagagttcatacgagtccacaccgtggaagagtgaaagtcggtcctcgaatgccccaaagactggctagcgggggtggaatactctgccaaccacagcgcggagagcagcctaatataccgtttcatggaggagc

SEQ ID NO: 9220 - DNA, 374 bp, Glycine max
  unsure at all n locations
  Clone ID: LIB3092-046-Q1-K1-C4
gcgcttnccttnccttcatctccgcttcaaaataatatcctcctttctatctctggtccaaaccagggcaacaccagccacacactggttcaatctcaatcgggtacccttctctttttctcttcaccttttaatgttttttgtttcggtctttttagaaaaattaactagattattctttgacattgcattacatcaattgggtgatcttgggtgtggaaaaagattagatttttgcccttgcttttctatggttttcgttagagccaaatgggtatgtgtgtgcttgtgaatttattttcattgtcatatttgtgtttgatttgttgcatgacaagcacattgagaaatggtttttgagtaatgggaaaact

SEQ ID NO: 9221 - DNA, 258 bp, Glycine max
  Clone ID: LIB3092-046-Q1-K1-C6
ttctttttccactgctgtttcaatgtgggatgctgatttctatgtcaaggtggatgatgatgtccatgtcaatttaggtgtcctggcaacaacccttgctcgtcatctatcaaaacccagggtctacattgggtgtatgaaatctggacctgtcctttctagaaaggatgtcaaataccatgaacctgagttttggaagtttggagaagaggggaacaaatacttccgacatgcaactgggcagatatatgcgatctc

SEQ ID NO: 9222 - DNA, 432 bp, Glycine max
  Clone ID: LIB3092-046-Q1-K1-C8
ggatgagcaaggagtagaattcaaggccattgtggaaaacgggttaaagctgggagcatcggtagccatggcagaacacatcccttggcttcgctggatgttcccactggaagaaggagcttttgccaagcatggagcccgccgcgaccgactcaccagagccatcatggcagagcacactgaagcacgcaagaaatctggtggtgccaagcaacattttgttgatgccctcctcacattgcaagacaaatatgaccttagtgaagacaccatcattggtctcctttgggatatgatcacagcagggatggacacaactgcaatttcagttgagtgggccatggctgagttgataagaaacccaagggtgcaacaaaaggtccaagaggagctagacagggtaattgggcttgaaagggtgatgactgaagc

SEQ ID NO: 9223 - DNA, 442 bp, Glycine max
  Clone ID: LIB3092-046-Q1-K1-C9
tttcaaacacaaaatataccactcttcaattcacaaaaaaacacacaaacctcttcagttcagaaaccacacaacctcttctaatattcgttttctgatctacgcaaggttaaggttaatttgcttctatctacatggacattaacgagatcgatgttccttcattctttctctgccccatttcgttagaaatcatgaaggatccagtgacggtctcaacaggcatcacctacgaccgtgaaagcatcgaaacatggctgttctcgaagaaaaacacgacatgccccatgaccaaacagcccttgatagattacaccgatctcacaccaaaccacacccttcggagactcatccaagcgtggtgtaccatgaacacttctcacggcatcgaaaggatcccaacccccaaaccccccattaacaaaaatcaaatttccaagct

SEQ ID NO: 9224 - DNA, 462 bp, Glycine max
  Clone ID: LIB3092-046-Q1-K1-D11
tggctcgtcactccttgctcttagccctccttctcttcgccgccgtggccaccgccgcgatggcggtggccgcgtccgacgccgacgacatcctgatccgtcaggtggtgccagatgttggcgaagccgaagaggaggacaacctgctgaacgccgagcaccacttcgcgagcttcaaggccaagttcgccaagacctacgccaccaaggaggagcacgatcatcgcttcggcgtcttcaagtccaacctccgcagagccaggctgcacgccaagctcgacccctccgccgtccacggcgtcaccaaattctccgatctaactccggccgagttccgccgccagttcctcggcctcaagccgttccgtttcccggcgcacgcccagaaggcgcccatcctccccaccaagggatctccccaaggatttcgattggcgagacaaaggagccgtcactaacgtc

SEQ ID NO: 9225 - DNA, 467 bp, Glycine max
  Clone ID: LIB3092-046-Q1-K1-D12
cggacgcgtgggttctcgttctcgatctctttcgatttttccttcccttttctccataaacgaggtgcttcagatttgctcataataggagggaatcgaatcgaatcgaatcgaaaggaaagtgcagaatggatgacatgccgttgccggcgctctttgagcaagcccgcaagatccacgccgcagccaccgattccggcgccgaccaggaggttgtgaagaaggggtgcgaggctctgcatagatgcgaggacatggtcaataatctaggtttgttctctcccaacgagaccaaagaagatatcagcaccacgaatctcaaatacattctggtgccattttatcttgcggagttgacagaaaaaatagcacaggatgacaggatacagattctaaagtcttcccaggcaaaacttaaggagtttatctcattttgtgaagcaatggagctggtcccaaaagaggag

SEQ ID NO: 9226 - DNA, 468 bp, Glycine max
  Clone ID: LIB3092-046-Q1-K1-B12
cggacgcgtgggttctcgttcttgatctctttcgatttttccttccctttgcgccataaaggaggtgcttcagatttgctcataataggagggaatcgaatcgaatcgaatcgaaaggaaagtgcagaatggatgacatgccgttgccggcgctctttgagcaagcccgcaagatccacgccgcagccaccgattccggcgccgaccaggaggttgtgaagaaggggtgcgaggctctgcatagatgcgaggacatggtcaataatctaggtttgttctctcccaacgagaccaaagaagaaatcagcaccacgaatctcaaatacattctggtgccattttatcttgcggagttgacagaaaaaatagcacaggatgacaggatacagattctaaagtcttcccaggcaaaacttaaggagtttatctcattttgtgaagcaatggagctggtcccaaaagaggagt

SEQ ID NO: 9227 - DNA, 454 bp, Glycine max
  Clone ID: LIB3092-045-Q1-K1-H1
aaacacgtcactaatcgtatcaacaattcaccatgcgcttgagctgcaatggatgccgcgtgctccgcagagggtgcaccactgagtgccccattcgcatctccctccaatggatcaattcccctaactcccaatccaacgcaaccctcttccttgcaaagttctatggccgccaaggcctcctcaccctcctcaccaacgctccctcacaactacaacaagccgttttaaaatctttgctttacgaagcatgcggtcgaatagtgaacccggttctcggctcgaccgggttgctctccaccgggaattggcatttgtgcgaagccgcggtcaaagccgttcttaatggcgcgccgattgagcaggctcctttggacggcgccacaagcctgcagctcaaggcttgtaatattcgccacgtggcaaagagtgataaatcgtgcggctctgatac

SEQ ID NO: 9228 - DNA, 405 bp, Glycine max
  unsure at all n locations
  Clone ID: LIB3092-045-Q1-K1-H10
atttccataaccttagtgatcttgttctatcatctttctccctaacggtggggatgtaaagatatggcggaagaacacagatgccatgcaccgcgcttctgcgccaacaattgcggtttctttggcagccctgccacgcagaatatgtgctccaagtgctaccgcgatttccagctcaaggagcagcaatcttccaacgccaagatggttctcaatcagtcgctggttccttcaccgncaccggcggtgatttctcagccgtcatcttattcttcggccgcagtagatccgtcatcggcggtggttgatgacgcgccacgcgaggcagatgaagttaaagcgccgcagcacaaccggtgtatgacgtgcaggcggcgcgtggtgctcacagggttcaagtgtcgg

SEQ ID NO: 9229 - DNA, 443 bp, Glycine max
  Clone ID: LIB3092-045-Q1-K1-H11
cccacgcgtccgcccacgcgtccggtcgtcctgctcgaacatggaggattcatgcagtggaagactgtaatgtatatgtaggaactctggatacatttatagaggaaagagaaatcataagagagacagaaccataccttggtggcagtattgacggaaaggataatggacctgaacttggtatttgggaattggatctaagatctcagttccctgttctatttgaaccctataaagaagtgcgggaaaagattccccattctgaagttatagaaaagtgcacagtttgtgcaagacggggaagtacagtctgtgctacatgcaatgcagaccaagaacctggattttataaggaaaatcagatgactcagtgtgcaacttgttatggaaggggtttaatcgctcataaagatggttctgacactgtatgtgtgaaatgtaat

SEQ ID NO: 9230 - DNA, 332 bp, Glycine max
  Clone ID: LIB3092-045-Q1-K1-H12
tctgatcttaacagattgagggtggcttctgtgtcactaaagtcaagactagaccatgagaagactgttctggtatgccttaatcaaagtctgcaaaagtctaggactgaggttgtgtatcttcgacctgaactgtccaagtctacgtcatccatagcttggatacagatgatggacattgaatcatgagagatgatgtctgagttgccctacatgctgctataagcatcatatagaggctgatgaggtcaaatcacttgctcatgcaacttaggcaaagctaatcgaagcacaagacgaggttgaaccagcctatgctacatgcagcacat

SEQ ID NO: 9231 - DNA, 289 bp, Glycine max
  unsure at all n locations
  Clone ID: LIB3092-045-Q1-K1-H2
acgcggtccgattgggatctcacatggacactgttgntgatgctgggatgtttgatggatcactaggaattgtctctgcaatatctgccgtgaaggctatgcatgtcaatggaaagctgcaaaagctaaagcgccccgttgaggtgattgcatttagtgatgaagagggtgtcagatttcaaactactttcttgggaagtggtgctatagctggtattttacctggtacaacattggagatatctgataagagggaggtgatgattaaagattttctcaaggagaactc

SEQ ID NO: 9232 - DNA, 309 bp, Glycine max
  Clone ID: LIB3092-045-Q1-K1-H3
cgtccggaggttcgttccctgcaaccatacctgaatatgaacttagatttacacctgctataattggcccaataacgtggtctttgcctaacaattttgtatccttgacaggttcatctccttgtagcactattgttagaattttatattatgctgactcttattattattcctcacccttaccctttaatcattgaaggaacgatgaacaactatattaatatctatatcgatatctatcttaataacctaactatcatgcatgagcattgtgttatgatctcttaaagatggatgatatcccttata

SEQ ID NO: 9233 - DNA, 307 bp, Glycine max
  unsure at all n locations
  Clone ID: LIB3092-045-Q1-K1-H5
agacttgttgagtgaagagatagctgaagaggaacttagaatgacacgtgctataattggaccaatgacgtagtatatgcctaagaatttcgtatcctggacaggtacatatccttgtaccactattggaagaactctagatcatggtgactgtgattattattgcgcatccttagcttntgaagcatggaaggatcgatgaagaactatattagatatctatatcgatatctatgttaatgacctaattagtatgcatgagattgctgtgatgatctcgctagaatggatgatatcggttatatgc

SEQ ID NO: 9234 - DNA, 451 bp, Glycine max
  Clone ID: LIB3092-045-Q1-K1-H6
cttgtttctttcgtttctttgtttctctttctctagctagctaagtccgttcgtgatcgaaaagagaaaaagatcatggaagaaagtctagtaaaaaaacatgaagaagatagagtagtaagatggggtgtttatagtgaagaaatgagaaggatctgtgaaatagcagggcctatggtggcagtggtttcttcccaatatttgttgcaagttgtgtcaaccatgatagttggtcatttaggtgaactctatctctctagcgcagccttagccatttccctatcaggggtcactggtttcagtcttcatatgggaatggctagtggactggaaacaatttgtggacaggcttatggagctcaacaatatcaaagaattggaatgcaaacatacactgctatattctctctcatattggtttctattcccgtgtctatcctttggatcaaca

SEQ ID NO: 9235 - DNA, 437 bp, Glycine max
  Clone ID: LIB3092-045-Q1-K1-H7
aaagatcttcatcaatatacgcaatctaaaaactgtatagaggaaaagacgagaaactttagggaggaaaagaagagagtgaagcggtgacatgaaatagaactctggatgtcccaccgaatgctacctgaggacttaaagcaaagaattagacgttttgaacattacaaatggcacgaaaatagcggtgttgactaggaggcattaattcgcaaccttactaaagatctcataagggacactaagcgtcacctttgcttagctttagttagaaaggtgccaatgtttggattaatggatcagcagttgatgcgtgcaatgtgcgatagactgaagacagtactttatgattagcatagctgcattgcctgtgaaggaaatccacttgatgagacgggatgcattatgagtggtaaaggttattctgcgacaacaaa

SEQ ID NO: 9236 - DNA, 336 bp, Glycine max
  Clone ID: LIB3092-046-Q1-K1-A10
atacactcttaaaactattggttatagtcaatgggtgtatctgtacaataaccaatttttggggattaaatgaattgaagcggggacataaagaaacaaaacgcgccccccttgacgacgttctaagctaacacactcatacacacaacagacccgttcttgtatacgtgcaggtagcttaaatttattacctgtctctccaccattctctgaatggccgaacacttcctctacgccgttcattcctttaaacacgcatctgacattttcgacgtcatattctagcgatacgcggtcctcgtggcggctttcgtggtacttgccgagaccgaatgg

SEQ ID NO: 9237 - DNA, 469 bp, Glycine max
  Clone ID: LIB3092-046-Q1-K1-A11
cccacgcgtccgatccgcagctgttgttattcgcaccgcaaacaaacagtgagccatggccggcggaaagaacaagcgcatctccaaagggaaaaagggtggcaagaagaaggcagctgatccctttgccaagaaggattggtatgacattaaggccccttctctttttcaagtgaaaaatgttggcaaaaccctcgtctctcgtacgcagggtaccaagattgcttctgaaggacttaaacatagagtgtttgaggtctccttggctgatcttcaaggggatgaggatcatgcattcaagaagattaggttgagagctgaagatgtgcaagggaagaatggtcctgacaaatttctggggaatggatttcacaactgacaagctgaggtcattggtgcgaaaatggcaaactctaattgaaagcccatgtggatgtgaagacaactgataactacacattgaggatgt

SEQ ID NO: 9238 - DNA, 437 bp, Glycine max
  Clone ID: LIB3092-046-Q1-K1-A12
ggcatttcactgaatagaaccactcactaccaccatgttgccttcattccaggtcttaaccggcccttgtcttccaacaaatactatgtgataaatctcagtgggaaaaaaagaggggaggcatacattaactcaaagggggaagatttggacacattctgtttctacaatgctgtatctgatgtaccactacatccaatagttatcaatgacacatatcaagagtttgagatatttcctagaagaagcaaagttactttcaggagtggtttttcagctaaatctgttgccccagatgggataccctccaagatttttgagtacaaggtggaaagtgagtgcttcaacttcaagtgattctagcctaggagaagcatcaggtgtgaatgaaaccctccgtgccagcaagccagagttccaattctccttagcaaaaa

SEQ ID NO: 9239 - DNA, 138 bp, Glycine max
  Clone ID: LIB3092-046-Q1-K1-A3
caaagctttccctcagcaacggaattcaccttactctcgcatcaaacaacccccatttctggcgcgtggcagcgaaaacgtcacctcttcttttatttgtgtagaaaaaaaaaaaaacgggttatacggggtgttttt

SEQ ID NO: 9240 - DNA, 470 bp, Glycine max
  Clone ID: LIB3092-046-Q1-K1-A8
tcgcaaagctttcccttagaaacggttttcaccttactctcgcatcaatcttccttgcttttgtggagagagagagagagagagagcgctgtgtctgaatcgtgttctccgattgcaccggtggttcgatttatggtcgtcggagaatcgccgatctcgctgagagtttcgaatcgcaccggtgaccggaggagatggtgaattccatggtggaacgcgccacgagcgacatgctcatagggcctgattgggccatgaacatcgagatctgcgacatgctcaatcatgaccctgggcaagcaaaggatgttgttaaaggtataaagaagcggattggaagtaaaaattcaaaagttcaacttcttgcactaactttgttggagacaatcataaagaactgtggagatattgttcacatgcatgttgcaaaaagagatgtgcttcatgagatggtgaaaatagtaaagaaa

SEQ ID NO: 9241 - DNA, 442 bp, Glycine max
  Clone ID: LIB3092-046-Q1-K1-B10
cttaaaacgacgttgttttgaagggacaacacgggaacagcacgaaaaaggataacagagaagtccatttcatcatttttagcgaacatattggagttcgtatattatagtggagctgttactacggtgcaccagctatgcaagtggtttattatggaccacttttatataccgtaagattaatctcatcgacacacttacatggtgtcaacaccaattttttgtttctttctttctctgtttctccctcatccatgggttcacactttctgaggaaggaggaaacatcctgcgagcatgtcctccactggatgttccttggcagtgcaccactgtcgaacaagaacaccttgactactttaccaccattcatcgtcgtgtacgaaaggtcaaccggttggctatgacattcccaaggttgatgtttgaattcggcgccact

SEQ ID NO: 9242 - DNA, 297 bp, Glycine max
  Clone ID: LIB3092-046-Q1-K1-B11
catacgtacacttaaaaccacacttaattagatatgtcaacattgcaacaacaccaaaaaaaattgcagaaatttacatttcatcatgtctaacaaacatattataatccttatattatattaaacctctaactacactccaccatctatccaatttaattattatgaaccacttttatataccttatgattaatcttattcacacactatcattatttcaacaccaattatatccttctttttttctttacttctccctcatactatgttattacactcctcttaccaattattat

SEQ ID NO: 9243 - DNA, 241 bp, Glycine max
  Clone ID: LIB3092-045-Q1-K1-G8
gccacgcgtccgggtttggtttggaaggaagatgaaaatgaaggccatagcgataactaggcggggaggtcccgagagtgctccaacttgaggaagtggaagatcccctagtcggagacgacgagcttctcatcggagtccacgccacttaccttaacagaaccgatacctttcagaggaaaggctcctaccctcccactaagggcgccagcccttacctaggtcttcaatgttccggaac

SEQ ID NO: 9244 - DNA, 448 bp, Glycine max
  Clone ID: LIB3092-045-Q1-K1-F10
cttgggcttataaacatatacaaataattaggtgttgaaattgaaacaggggaacctccgggaaccattatccattccgtatattatattattggcaaagtactcaatcatcagcactagcatcagccatgggagaggtagacccagctattatccatgacctataacacagaccaaagctctccataatccaatctgaaggaactcccataatagacctctctgcaatattcaaccacacagtatcagatccatattccatagaccacttagtaaactatataaggactgcatgcatcaaatggggcaccttactcgtaaccaaccactggcagcccatgactcttacacgatcattattaaaacctcaatattgttctgtgcacataatttgcacgagataataaaggctaacatttatgacagtgttccaaatgattacgattac

SEQ ID NO: 9245 - DNA, 453 bp, Glycine max
  unsure at all n locations
  Clone ID: LIB3092-045-Q1-K1-F11
cccacgcgtccgcccacgcgtccgcaaaaaatggcttctagttcagaatctgaatctcagtgtaaaccgctccaagaccgagttgcaatcgtcaccggctcgtcccgcggaatcggccgagaaatcgcgcttcacctcgcctcactcggcgcgcgactcgtcgtcaactacacctncaactcggcccaagccgactcagtcgcggcgcagatcaacgccggttccgccaccacgacaccgcgcgccgtcgtggtccaagccgacgtgtccgatccggctcaggtgaagtcgctcttcgactcggccgagcgcgccttcgactcgccgatccacatccttgtcaactcggcgggcgtgatcgacggcacgtatcccttcgtcgncgacaccaccgtggagtccttcgacccgactttcgcggtgaacgcgcgtggcgccttcgcgtgcgccagg

SEQ ID NO: 9246 - DNA, 357 bp, Glycine max
  Clone ID: LIB3092-045-Q1-K1-F12
ggaacatagtccgaggaacagccaacacatgtatggtagggagttccaatcgatgttggacggactcgacgaggaagggtgtgttgaagaaccggggtatcaatctgagaagaagcgtcgtctaagtgtggatcaagtgaaggctttggagaagaactttgaggttgaaaacaagcttgaacctgagaggaaggtgaagcttgcccaagaacttgggttgcaacctagacaggtagccgtatggttccaaaaccgtcgagccagatggaaaaccaaacaattggagagagattatggtgtactcaaagccaattatgatgctcttaaagcttaactttgacaccctcgatcaggaca

SEQ ID NO: 9247 - DNA, 414 bp, Glycine max
  Clone ID: LIB3092-045-Q1-K1-F3
cccacgcgtccgctcttccaaatccaaaatcatctttgccacataacacattgaaactaaactccaagttcctaccatagtgctaggaaagtgagtgagagaaagagatcacatagcagaatggcttctactcaatgtttcttgcaccaccatgctcttaccacccctgccagatccccatcacaacgcatcatggttagcaccaagcctaaccagcttgtttgcaaggcacagaagccagaggatattgatgtcagcccaatctctcgacggttagctctaaccgtgctcattggtgctgctgctgatggctccaaagtccaacctgctgatgcagcttatggggaagctgccaatgcgtttggaaagccaaagacagacacagatttcctgccatacaatggagatggattc

SEQ ID NO: 9248 - DNA, 390 bp, Glycine max
  Clone ID: LIB3092-045-Q1-K1-F4
aaacaacttaatagaagatgccttccaagaggcttcaatggagatccttagtacttggttggttcaaggccaccaagaaccaatccttggaatctccaaacatagtttccaagaaatcatcttcaagtagaatcttcctttctgatttaagcctaagcgattattcatcagtttctatcatgagtgatttgtccaattctctcgtgggatcaaatcttcgtattttcacctaccaagagctctatgaggttacacacaacttcagcaaatccaactatcttggggaaggtgggtttgggaaggtgtataaaggatttattgatgacaatcttaaacgtggattgaaagctcaaactgtggcagttaaggccttaaacttggatggaaaac

SEQ ID NO: 9249 - DNA, 313 bp, Glycine max
  Clone ID: LIB3092-045-Q1-K1-F5
cgacccagcgttcgcgaaccttctccctcttcatgacatttttaacgcccatattaagcccacttacagcattatctcttccaacaccagcttaaccttcttcgagaatcatctcttacctcttgtcaaatcctaccttccttacgtctttaacttaacccctgacagcgacatttaaaccctccgacatcacgacttttacgtaaaactcacgttcaacatgacttctcaccctaaaataaaccctaacacatcttattgcttcccacttctttactgtcccgttctaccgttcctaatctactttcgtttt

SEQ ID NO: 9250 - DNA, 293 bp, Glycine max
  Clone ID: LIB3092-045-Q1-K1-F6
tcggataaactaattctttgggtcattcttttccactctctaccacagagactagtgatcgattaagcaacttaacacagaattgcatatatgggaaacacttgtgcaccaactcaatacgcaagcaaaggcggaaaccatagttggcaatccacggtgaacatagttcacttagatggaaagttgcaacaattgaaggagtcaattaaagcatggcaagtgttgtctgagaacccaaactgctacatatgctgctcagaatccatgtatgttgggtcaccgatgccttcttt

SEQ ID NO: 9251 - DNA, 284 bp, Glycine max
  unsure at all n locations
  Clone ID: LIB3092-045-Q1-K1-F7
gccacgcgaccgggggacccgacgcnggccataaanagagcacgaaacccagcccccgcacacacaccaaagcgccnnacaagcaccacgagagaaagagaaggaaaaagaaaaagaaagacgcncacgcaancaccaagaccangaaagaccccagagcacaaaanacagcgangggaagaggacaccnnggancaanggnggaaccaggnaaacncagacgaagccaccacccngcactgaccaacaccaagcagagcctaaccccacccggcaaccaagac

SEQ ID NO: 9252 - DNA, 352 bp, Glycine max
  unsure at all n locations
  Clone ID: LIB3092-045-Q1-K1-F8
gccacgcgtccggcttcatgtagcgcacctccctccctgatgctggtccaccctcaagaccgctctcgctctgagagaaccacattctctctctatcctctcctttttaagccctccaaatgcctccacatagagcccaaatccaggacttgccatgccctcgtcgccgctttggctgcagaggtccaagtgcctctaactgtccacgacacggaggaggacgacggttctgatggctccaccgacaccttcgtcgncaccaccaccaccaccaccaccaagcctaagaaaggcaaggccgcgttgcctcttaagagggacaggacgagatctaagaggttcttggaaattc

SEQ ID NO: 9253 - DNA, 451 bp, Glycine max
  unsure at all n locations
  Clone ID: LIB3092-045-Q1-K1-G1
ctcagctgtgtctgtttgcaatatataactctcacctttctaccattgctgtgcacctctggctccttttgtcaaattcttctgttcaacaggtctttgccaatggatactaagtcggctgtagaattaatggagtcttccgcagaggttcatttttctggatttcacatggatggttttgagcaaagaaaggctagcatagaacaaccaacaacctcagaaactgacatgtataaacaaccttttgtcataggtgttgctgggggtgcagcatctggcaagacaacagtttgtgatatgattattcagcagcttcatgatcaacgagttgtacttgttaatcaggattctttttacaataacttgacggaggaggaactttacagagtacaagattacaactttgaccatnctgatgcttttgatactgagcaattgctacgcgttatgg

SEQ ID NO: 9254 - DNA, 336 bp, Glycine max
  Clone ID: LIB3092-045-Q1-K1-G10
caaacacaaacatcatagtatatagtatctatctaaagtaaataatcatggcacgggagaggcctcttgttattggtggtgtgattggggatgttctcaacccttttacaagctccgtttctttgactgtttcaatcaataatagggcgattagcaatggcttggaactcacgccctctcaagctgttaatcgccctacggttactgttggtggtgaagacctaaggaccttctacactctggttatggtggatgcagatgcacctatccctaacaaccctgtcttgacggaataccttcactggattgtgacagatattccagctaccacaaatg

SEQ ID NO: 9255 - DNA, 291 bp, Glycine max
  Clone ID: LIB3092-045-Q1-K1-G11
ccacgcgtccgccacgcgttcggtcgtcctgctcgaacatggatgattggtgcagtggagagactgtaatgtatatgtaggaactctggatacatttatagaggaaagagaaatcataagagagacagaaccataccttggtggcagtattgacggaaaggataatggacctgaacttggtatttgggaattggatctaagatctgaggtccctgttctatttgaaccctatatagatgtgcgggaaaagattgcacattcttaagttatagaaaagtgcacagtttgtgc

SEQ ID NO: 9256 - DNA, 455 bp, Glycine max
  Clone ID: LIB3092-045-Q1-K1-G12
cacacacacacacattgcagcagcatcaacaaccacacacgattccatgagtcgctacgatcccaatcccttcggcgaagaagccggtcgaggttaatccctacacggatggagcagctaaaggaaaaggctcatggcaatcacgttatagtgcatgtgcattatatactactaacactgcaagtgtcccttcctaaaactcaacgctctcaccactgccaccatagccttatgatcgtgaggcaactattgacatcccactcaataatcgcaacgacgcaaaagcaaaagaaaaggaacttcaagctaaagaagctgaattgaaatgaaggcaacaggaactaatacgaatggaatatgctatagcactagctataatagctatagatgcgaaaaattggccaacttttttccccatcattcatcatgacattgcaaaggaaattccagtacat

SEQ ID NO: 9257 - DNA, 347 bp, Glycine max
  Clone ID: LIB3092-045-Q1-K1-G4
cccacgcgtccgggtttggtttggaaggaagaagaaaatgaaggccatagtgataacgaggccaggaggtcccgaagtgctccaacttgaggaagtggaagatcccctagtcggagacgacgagcttctcatcggagtccacgccacttcccttaacagagccgatacctttcagaggaaaggctcctaccctccccctaagggcgccagcccttacctcggtctcgaatgttccggaactgtcctttccctgggtaaaaacgtttccagctggaaaatcggtgatcaggtgtgtgctcttctcgccggaggcggatatgccgagaaagttgcagttccggtaggac

SEQ ID NO: 9258 - DNA, 462 bp, Glycine max
  Clone ID: LIB3092-045-Q1-K1-G5
ctgtgctctctttttcacactcttccgtttcgagctctctctcacacacattgaatttcaaggtcgcgacgcgaaatatgagctctgaataacaaacaaacagagttggtgtcgatatcaaggcatgagagatggttagagaaaatgctgtaatgggtggtgccagtgaagagcgtggtgttcgggtcactcgagcaatggctagagctgttttgggtggggtctctgcctcttctagaccgtccttcaagaagcaacacaagaacaacaagggtttcggtagggtagcactagcagatgtcactaacataagcaagaaagggtgtgctacatcaaaatctcaggcaagaggaggttacaagaagactaacacaaagggagcttccaatgtctccattcaagttttgtcaactcaagaagatgttagagcaaaattagcaaaagatttaccctcaatatcaa

SEQ ID NO: 9259 - DNA, 454 bp, Glycine max
  Clone ID: LIB3092-045-Q1-K1-F1
gcggcacgtggctccctctccgctgcacgtttcttaacggggcagtttaaccccgctaacggcattggcctggccaacaccagcttagccttcttcgggaatcgtctcttcgcgcttggcgaatccgacctcccttacgtcgttaacgtaacccctgacggcgacatcgaaaccctcggccgtcacgactttgacggaaaactcacgttcagcatgacggcgcaccctaagatagaccccgacacagcggagtgcttcgccttccgttacggccccgtgccaccgttcctcacctacttccgtttcgacggtaacggctaataacacgaggacgttcctattttctccatgctaacaccttcgttcctccacgatttcgccattacgaagaaatacgcgatcttctgtgatattcagctcggattgaaccctcttgacatgatctccggtggct

SEQ ID NO: 9260 - DNA, 200 bp, Glycine max
  Clone ID: LIB3092-045-Q1-K1-D12
atcagacttacagactcgctttcaagagttgcatcactatctcttcctcggaacctatccggtctaccactttcctcacctgcgcactctacttactatactacatctaccaagctaaacagctatactattactgtacatactcatcataattacatccagactctctcaattgatcctccagcacatcaacatgatca

SEQ ID NO: 9261 - DNA, 453 bp, Glycine max
  unsure at all n locations
  Clone ID: LIB3092-045-Q1-K1-D2
cccacgcgtccggacagatcaagtatgagcagtgcccaaatttcaggctcagcaaatgggaggctagtctcaagctttgcttctaaacagcagaccagggcaactggtgctgtgtacccttctcgaagataggaagatggaagggcgtgttagattatcctgtctcaccaggatgcggatgaaaacatacaagattatttatcgggtttgtgggagaatgttttttgaagcattgacggagtaatcttgtgccctgggcaaaatatgattttaagttgccggtgctatctccactttctgtagtaatttatttctcccagctgttacaattcggtgtgctttcattaatgtgggcctcatgctgtggtattcttgcatacatngcatctgataaactgcgatttttttggtgaatgctngaaaggataatcaccatagttaaccttttcagtt

SEQ ID NO: 9262 - DNA, 447 bp, Glycine max
  Clone ID: LIB3092-045-Q1-K1-D3
cccacgcgtccggtttttataagtttgattgtcaaatcaatatccatggcgtccgaggacagaaactaataagagcttcacgttctattggtggcattctctgcccaaggtcacatcaaccctttgcttaggcttggcaaaaaactactaagcagaggccttcacgtcaccctcgccaccaccgaattagtttaccaccgcgtcttcaagtcctacgtcgtcacccccaccgtcaccgtccccacttcaatcaccaccaacggaatccaagagctattcttctccgacggcttctgaaccgggctagacaacaagaccatcacccccgaccaatacatggaactcataggaaaatttggtcccatcagcctctccaacatcatcaaagaccacttccttaacggttcccaaaaactcgtatgcatcatcaactacccctttgttcca

SEQ ID NO: 9263 - DNA, 335 bp, Glycine max
  Clone ID: LIB3092-045-Q1-K1-D4
aactggctcacccttccccttctccttacttctcactctctttccaaaacactcgctttctgtttccccttacccttcttctgtgtgtgatgatgtagatagagaataaaaagagaccagtgtgcagtgagaaagaggttggtcacttcttgtgtggctatgatttgatctttgcgttggaatttgctgatgggtgaagagggagaagaggcgtcaagagataaggaacagcaacacatgggagtttatggaaatgagtggttgtttagtagtttctgtgcaaattggcgccgattaagacaccagaattcctgttctatgcctccttttgagtg

SEQ ID NO: 9264 - DNA, 464 bp, Glycine max
  Clone ID: LIB3092-045-Q1-K1-D5
tgacacactaataatacacattatgtatactagagagaaaagggatggcaacgatctcgttatcacacagaagagatctctagttgaagctctgaccggttacacagcacaactgacgacacttgatgggaggaatcttacagtctccaccaattccatcatcagtccgacgtacgaagaagttattaaaggagagggtatgccaattcccaaggaaccttccaaaaagggaaacttgaggatcaagttcaatatcaagttcccctctagactcacatcagagcagaaaaccggcattaaacgattattgacatcataaacgctggtgatgcctctccttatcacataccaaatcatgtaagattggaattatttttacccagtttttgattttcaaatggaaattctttcccttttcgagatggttttcagttagaaatatttattagaaagttgatatttgg

SEQ ID NO: 9265 - DNA, 265 bp, Glycine max
  Clone ID: LIB3092-045-Q1-K1-D7
gcctggattgagcactcgctcgaatttactcgaatcgcttaattggcatttgattagttaaagcgcaacgcggaatctctgctatcgaactggctaactctcaggcaagacgttcagacgctgattccagcaacaagccgctggtgctcgcactggatgacgccctaaactccggctactccgacgccgaattcaagatcggcgtctacgacctttagtggtggttccatggtccagcctaacaccagtttatgatgcgcatgct

SEQ ID NO: 9266 - DNA, 453 bp, Glycine max
  Clone ID: LIB3092-045-Q1-K1-D9
cccacgcgtccgctttctgagaagagggccaaattagagttagattattagggtttaaccgggcctccccttccttttcaccataatcaacatcaacctcttccaaatcccaatggatccgaccaagaagcgcaagctcgacgagaacggcttcatcaacaacgactcctccgagcccctcaagctctccccctccgacgcccgcaagctcatcgagcgcttcaccactgaccagctcttcgacatcctccaggacacggtggcgcgccaccccgacgtcctcgctgccgtgcgcgctgtctcagaccccgacgtctcccagcgtaagctcttcatccgcggcctcggctgggacaccaccaccgacggcctccgctccctcttctccacctacggcgacctcgaggaggcccgcgtcatactcgacaaggccaccggcaagtctaagggcta

SEQ ID NO: 9267 - DNA, 244 bp, Glycine max
  Clone ID: LIB3092-045-Q1-K1-E1
cacccttccccttatccttacttttcactctctttccaaaacgctccatttcaggatccccttacccttcttctgtgtctcataatctatatatacaataaaatgagaccaaccttcactcataaatacttctaacacatctagtctttcactgcttagaactctatcttccaatttatttatgtatcaacaaagataataagtctcaacatataacgaacatcaacacatcctaatttattta

SEQ ID NO: 9268 - DNA, 452 bp, Glycine max
  unsure at all n locations
  Clone ID: LIB3092-045-Q1-K1-E11
cccacgcgtccgcccacgcgtccgaagatcaccaaagtacttgtgagtgtatacccaacacagactaagatcaacatggactactacacccgcgtttcagaagttgagagggaacctatcatggagtattccacaccacgaccaatgatgggcaactaccaccaccctaatgctcaccgtgtcctcaacgagaagattgtttatgaggaggatgtgattggaggatcccgccacaaccacatgcatcaccaccaccctgagactcatgagagagtcaaggtggtggagtatgaacaagttcctgagaggcgcgttgtctatgaagagaaagttgcttatgacaacgatcgntactactctccaaggtattgaaattggacaaatggaagaacacctataacgtgttatcatgtggctttntaataggcaggctacctagtataccaaaagca

SEQ ID NO: 9269 - DNA, 456 bp, Glycine max
  Clone ID: LIB3092-045-Q1-K1-E12
cccacgcgtccgcccacgcgtccgagtgtgtccacactacttgggagtgtgtgcccaccagagactctaatcaactgtatactactacacgacgcattgaagaagatgagaacgaaacctatcatgagatgttgcacaccacgaccaatgatactcaattaccaccaccataatgcttaccgcgagctcaacctcaagatcgagaatcaggaggaagacattgtaagatccagccacaaacacgtgcataaccaccatactgagactcatgagagagataacgtggtcgaggatgaacatgatgctgtgatgggcgatgtatatgaagagaaagctgcttataacgacgagcgggactactctaccatgtattgaaactggacagatggaagaacacctataacgttgaatcatgtggatatttattaagcaggctacctagtataccaaaagcac

SEQ ID NO: 9270 - DNA, 434 bp, Glycine max
  Clone ID: LIB3092-045-Q1-K1-E4
gggcaaccacttggagcaaagggagaagttaggattgacttctgccccaaaagggcagtcgaagtcacggccaacactttctgagccatcaaatgcgctcgaaaaagttgaggttgaaaaagggaagcaagatgatgcactgtcagatttaagtgatctcttgggagaactgaaaggcatggccattgacatgggatctgaaatcgggaggcaaaaccaagccttggacggttttgacaatgatatggagaagttgaccgtccgtgtgaatggtgctaatcaacgtagtcatcgtttgcttgggaaataggggcgtatatcatgagattgatactaatttttaccttgcattattcaattaaaggagcttccaatgttccaggatactggtttcaaatatagtaatgtacaatccgcttgtgaaatatttggct

SEQ ID NO: 9271 - DNA, 419 bp, Glycine max
  unsure at all n locations
  Clone ID: LIB3092-045-Q1-K1-E5
ccattttatccattttatcttcctgcatctgcattctctatcgctcgacagaccctagcgatgtgatgctgtgcgatgcgactcgctgagttgaaccggataaagatctgagtcgcggtgatcggttcgacgccctcatgggtgctgcggactccaagctcgagaaggctctcggcgaccaattctcccgaatgagagcgttactttggcctcgagaattttggcaatacttgttactgcaacagcgtttggcatgcactatacttctgtgctccatttggagaacaatcgctagaatattatgcagataacagaagcataacagatgcaaaggaaaatcttntgacttgcctagccgacttatttccacagagaagttcccagaagaagaaaacacgtgtcattgctcccaaacgatt

SEQ ID NO: 9272 - DNA, 406 bp, Glycine max
  Clone ID: LIB3092-045-Q1-K1-E6
gttggggatatcgctggtatgggatctgatctttttggttcatatgccgagtcatcctgtgcggctcttgttgttgcttccatctcttcttttggggtgaatcatgagttgactgctatgttataccctctcattatcagttctgtgggtatccttgtttgtttgctcacaaccttatttgcaactgacttctttgagatcaaggctgtaaaggagattgagcctgcattgaagaaacaactcatcatttccactgccctgatgactattgggattgcaattgctagttggattgcactcccaacttccttcactatcttcaattttggagttcagaaagatgtcaagaattggcagctattcttgtgtgttgctgttggtctttgggcaagtcttattattggat

SEQ ID NO: 9273 - DNA, 257 bp, Glycine max
  Clone ID: LIB3092-045-Q1-K1-E8
cggacgcatggaatcgggtaaaccccatttcaccaagaacccttcctgaacttagcgccagggctgcacctcgtgcttaagcctcatctgaggcacctgcttctgcactacaaccagtacctgcaccaagagttgctcgaacagaaccacctatggaagctgctgctccaatgccataatggatgccccctggctctggtcttgcacaaaatgacgcgaggaatcctacagctgatactggaacgcacagaatgtga

SEQ ID NO: 9274 - DNA, 393 bp, Glycine max
  Clone ID: LIB3092-045-Q1-K1-D11
attgagtttaagaacttaagttcattcgttgtgttttgctttcttcctcaagagcaaacatggccaacacatgcggcaactgcgactgcgctgacaagactagctgcaccaagggaaacagctatggtgttactgtctagactgagacgagttacatcgagactgttgccatggatgttccagcagctgagcatgatgggaagtgcaagtgtggcactaactgcacttgcacggactgcacctgtggccattaacgaatatgtatgacaatgtaatcgccatgtgtttggcaatccatatctccaaataatgtaatcttcctatgaataaatgtatgtgctgatatgctacttcaagtctgagtagccatgcacgctgaatcatttcaagttc

SEQ ID NO: 9275 - DNA, 259 bp, Glycine max
  unsure at all n locations
  Clone ID: LIB3092-045-Q1-K1-B3
gcacactttgctgtaacatatcacttnnnnttctgtatgnngggcattcagcgtatagttcgagattttattatactttgtataagattagctggaacccaaccattcaatattcctgggatccttctaattgttgacatgacaaaatatgttgcaaggggccatttttcttatctttaggctaaacatatcttagacaaacttgatttggatagatattattctgattataacagtattctttgcaaacagtaaccta

SEQ ID NO: 9276 - DNA, 455 bp, Glycine max
  unsure at all n locations
  Clone ID: LIB3092-045-Q1-K1-B4
gtcgtccaagaaagaagcaccacaaattaattctcgtttcccattcccatgcccatgccaacgattttgcataggattttccttctttacaacctcgtacactcattcctcctctgtctggtccccaagaaggtgcgtcccttcctccccccttcttggttccaaaccaaaaccatcactgcaccttcttcttcttcttcttcttcttccagtgcccgcatcatcaagagaacaacaatggaccccaacgagctgaagcgcgtgttccagatgttcgaccgcaacggcgacggaagaataacgaagaaggagctgaacgactcgctggagaatcttggcatcttcattcctgacaaggagctcggccaaatgatcgagaggattgacgtcaacggcgatggctgcgtcgacatcgacgagttcggngagctctaccagaccatcatggacgagcg

SEQ ID NO: 9277 - DNA, 454 bp, Glycine max
  unsure at all n locations
  Clone ID: LIB3092-045-Q1-K1-B5
ttcgttttgcccctttcgttgccctaatttcaaccatgcctcgccgtagctccggtggaagatctgcccgtggtgctcctcgtgcagcacctcgtcctgctccagttcaccatgctcctcctccagcccctgctcagagcggtggcggatctatgcttggtggcattggttcaaccatagctcaaggtatggcttttggcactggaagtgcagtggcacacagggctgtggatgctgtcatgggtcctcgtaccattcaacatgaagcagtagtcacggaggctgctgctgctgcccctgcacccactgcaaatacttttggtggcgatgcatgcaatgttcatacaaaggcattccaggattgcctgaacagctatggcagtgaccttagcaagtgccagttttacatggatatgcttgcagattgcangaagaactctggagccctcgtgag

SEQ ID NO: 9278 - DNA, 384 bp, Glycine max
  Clone ID: LIB3092-045-Q1-K1-B7
atgacccattaaagcaagcagatgtacatcatcatcctcaaaaaatatctggggagcattcaacaaagagttgagaagttgagtctactttctctaagattagctggaacccaaccattcaatattcctgggatcctcctaattgttgacatgacagattatgttgcagggggccatttttcttatctttaggctaaacatatcttagacaaacttgatttggatagatattatcctgtttataacagcattctttgcaaacagtaacctctcgccttcattggttgcttgttgatgaagaaaagaaacagtgttagggttcttcgtagtcttgtctattctatgtaatctcatctaattgaatttaaatgtgaagaacttact

SEQ ID NO: 9279 - DNA, 337 bp, Glycine max
  Clone ID: LIB3092-045-Q1-K1-B9
cttcttctcatccagcaccgagtcacagactcaccgatcttccgattccctttcgctaggggatgagctcgaaggagagacccactcttggtggcacgcggattaagacccgcaaacgggatattgctgcgccgctggaccctgcaacattctcggatgcagaggtccagatttatttggataatgctggtgatctggaacttattgctaagagcattgaatcttcagaccttaacttttcaagatacggcgataccgttattgaggttgctttcactggggggcgtacacaacctgtaactaccaaacctgatgagggggaccggcattcatactc

SEQ ID NO: 9280 - DNA, 359 bp, Glycine max
  unsure at all n locations
  Clone ID: LIB3092-045-Q1-K1-C1
atcacattgtttcagcatacaaaagaactggtagaagagccatatttcttgattatgatggtgctatcgtaccaaaatcttctataaataagacccccagccctgaagtcatatccatgctaaatgatatgtgcaatgatcctaaaaatactgtgttcattgtgagtggaaggggaagagattctttaagtgattnggttacttcatgcaaaatgattggacttgcagccgaacacggatactttctaaggcggagtaaagattctgaatgggaaaccagtcccttgtctcctgatcttgattggaaaaagattgtggaacctgtcatgcagttgtatacagaggcaactgatggatct

SEQ ID NO: 9281 - DNA, 183 bp, Glycine max
  Clone ID: LIB3092-045-Q1-K1-C10
ataagtcacatatccaatttaagcgcgtgcacgagcccattaacgtatggcgagaatatcgggttatcttcagcccccaaatatccaggaagggagcgatgctctttttaaaagtgcttagctcctagcaaaaggttgggcacctggatttcaagataaaattttggtggctgctcggggaat

SEQ ID NO: 9282 - DNA, 354 bp, Glycine max
  Clone ID: LIB3092-045-Q1-K1-C11
cccacgcgtccgcggacgcgtgggcgaaatcgcgaacagaacagcaacgtgaacaatggggggtagatacgaggtggaactgaagctatcatcggcacgcgctctcaagaacgtgaactggcgccatggcccgaaccgcccatacgtgagcgttagggtcgacccaagcaacaagctctcgacgcgcgtggacgaaagcggtgacactgacgcgaattgggaccaaacgctcacaatttcgttgccaccaaagcctctcgaggatcaaacgttgtacatcgacgtggttcacgcctgctcgtaggaggacaccaagccgcttatcggctcggctcggctaaagctggtggacat

SEQ ID NO: 9283 - DNA, 330 bp, Glycine max
  Clone ID: LIB3092-045-Q1-K1-C12
cccacgcgacggcacacgcgggagcgagctcacgaacagaacagcgacggggacaaagaggggcagctactaggcggaacggaagccctcatgggcacgcggtagcaagaacgagaactggcggcatggcccaaaccggcgatacgtggtcccaagggtcgacccaagcaacaagctgtcgacgcgcgtgaccgaaaccggggacactgacgcgaaatgcgaccaaacgctaacaatatcggtgacaccaaagcctctctaggatcaaacgttgtacatcgacgcggcgcacgcacggctcgcaggaggacaccaagccacttatcggct

SEQ ID NO: 9284 - DNA, 446 bp, Glycine max
  Clone ID: LIB3092-045-Q1-K1-C3
aaaccctgaagaaagacacagccattgtttgtttactttccattgattgagcgaaagcttggttttttctgcgatcattttccattgggtggaagaaagtctcaacctttagtcgaaagagcaaggatctgagtgagtgagcgatcatgtgtggtggtgcgattatctccgacttcattccagcgggtcccgccggcggggcgcagcgcgtgaccgccgacatcctgtggccgaatttgaggaagcggttctcgaagtcgctgctggacgatgatttcgaggcagggttcagagaattcgaggatgactcggaaatcgaggatgtcgatgatgaagacgatgaagaggaggaggagttgaagaagaagaagccctttgggttctctcgctccaacaaacaggctgcttctaagcctctctctcgtggagcaacaactgtgaaatct

SEQ ID NO: 9285 - DNA, 397 bp, Glycine max
  Clone ID: LIB3092-045-Q1-K1-C4
atccccacaaacactttcacctccgcaagaagcttcaacaaaacgacatcgtcgactgcgcggccgcacctcaattacctcgactccgtagaatcctcgtcgttctcccgcaacaccaactcttgggacgatcccttcgcaccagcgtccagattcgtgctcagatccacgctctcctcgctctagtcctctatctaccgcctgcactctgagcgctttctaaccctcaccgctccatcattgccaaaaccaactagctctccaacctccaccacaccaccaagctcctccagcactccatcagcgaccgcatggccaccgtcaactccgaaaaactccatctcgccaaggcccgctaactccaattcgagatcctaatggtgtaagaatattcaac

SEQ ID NO: 9286 - DNA, 361 bp, Glycine max
  Clone ID: LIB3092-045-Q1-K1-C5
tcgctcagaatccaaaccctaggaaatttccccttcagacgaaaccctagatttcctctcacaaagctctctcagggtccccattctcgggattcggcgtccagatcacagatcccgttcaattttttttccgcatcccccgatcgggtttggattctgaagaaagttcaatttcgcacaaattcgagacaattgctgctgtcgaggctcgcgttgcgcatgggtaagattctgagagaaaccgcgaggccgttctcgaattgttcgtcgtcgtcggcgtcttcgttgtcggcgccgccggcaacgacgttgtcgacgtcgttgacggacacggtgagggggtcgcaccggctcaagatca

SEQ ID NO: 9287 - DNA, 403 bp, Glycine max
  Clone ID: LIB3092-045-Q1-K1-C6
gatgaatttggatcagattatacgccaaagatggcaatagatgaccctttaaccagagcaaggtttctgcctgcacttgggaatgggcagtctcgtaacccgatttccaaattggatgaatgcattgaggaggaagaggaagaagaggaggaagctgaaggagaatctactcaggggtctgttacttctgctgctgaataaaaaatcccaagtgattcagaactttctgtgactctgaaaaataccatgttagatgggaaaaaccagaatcagcagaaatattcatgaggaaaggtggagaatggtcattttgcaaatacattatctggtcacacgagtgccaatgagcatgttgcttcaagcataagctatgaggatgtgaccgaaatgaccgatgatgaat

SEQ ID NO: 9288 - DNA, 291 bp, Glycine max
  unsure at all n locations
  Clone ID: LIB3092-045-Q1-K1-C8
cccacgcgtccggggaagaaccccacacgttccatcaattgcattgttnncaacccnaccttgtattctgcgcgggcgcacctaaatgacctggtctcaccataatccccaacgatctaccactgcacccactctagggaccatcccttggcaccagcagccatatacgagcccaaatccacgctcacctctctctaatcctctatctacccgcgtcgctctgagcgctttctgaccctcaacagttccccgttggctaaaccaacctcgctcttcaacctacaccacacc

SEQ ID NO: 9289 - DNA, 453 bp, Glycine max
  unsure at all n locations
  Clone ID: LIB3092-045-Q1-K1-C9
gataagcgaaaagaggcttttgagaaggaagaaaaatccaagaagtccgtgagcatcactgggtttctgaagcctgctgagggggaagcatactataacccagggcgtggtaggggtcgtggccgtggttcacgaggtggaggcggaggcggaggtgtttaccgtggaagttccaccaacaatgcacctgctccatccattgaagatcctgggcatttcccaaacttgggtgccaagtgaggccttgctagaacccttttgtcatatccctgtcctattttcaattttgggttctcttatttgaacttaatcaggaaaagaactatggtaattggatttcctggattggaaggttcatttaattttatgccttgaaagtgtaaacttatgttgttgttcttcatacggtcctgtacccttgaagcctgttcccccttgtgctntacttttact

SEQ ID NO: 9290 - DNA, 406 bp, Glycine max
  unsure at all n locations
  Clone ID: LIB3092-045-Q1-K1-D1
cccacgcgtccgcgctcagccgcaagatcgaggccggtctcatcgccggtggcatctgcggggccgtggggaaccccgtcgacgtggccatggtccgaatgcatgcagacgggcgcctccctccggcacagcggcgcaactacaagtccgtcgtggacgccatcacgcgaatggcgaagcaagaaggcgtcactagcctttggagaggctcatcgcttacggtgaaccgcgccatgctcgtgacggcgtcgcagctcgcgtcgtacgaccagttcaaagaaacgatcttggagaacggcatgatgcgcgacgggctcgggacccatgtcacggcgagcttcgcggcggngttcgtggcggcagtggcgtcgaaccccgtcgacgtgatcaagacgagggtgatgaa

SEQ ID NO: 9291 - DNA, 412 bp, Glycine max
  Clone ID: LIB3092-045-Q1-K1-D10
attgaattcaaaaacttaagttcattccttgtgttttgctttcttcctcaaaaccaaacatgtcgaacacatgcggcaactgcgactgcgctgacaagactagctgcaccaagggaaacagctatggtgttattgtagagactgagaagagttacatcgagactgttgtcatggatgttccagcagctgagcatgatgggaagtgcaagtgtggcactaactgcacttgcacggactgcacctgtggccattaaggaatatgtatgaaaatgtaattgccatgtgtttggcaatacatatatccaaataatgtaatcttcgtatgaataaatgtgtgtgctgctatcctacttcacgtctgtgtagtcatgcagtctgaataaattcaagttcctgtcttagttaatataac

SEQ ID NO: 9292 - DNA, 283 bp, Glycine max
  Clone ID: LIB3092-045-Q1-K1-B2
cccacgcttacggacacaccaggggcaatatcgatggacctcatgagaaggggacaattgctgcggtcaacaattgaccttgcagctttccattcgagggtctcctactgctacttgtggttgttcccaatctggaggcaaaatttgcccttgatccaaaggctatttaatcggtaattgcatgtacattggcgctgggtttaaacaagggcttaccattacttgtactaacgccttaacttttaatgaactggttagaatggcatacgaacctgttaaattt

SEQ ID NO: 9293 - DNA, 175 bp, Glycine max
  unsure at all n locations
  Clone ID: LIB3092-044-Q1-K1-H2
ctaacacatacactactctntctctctctcttattgnntggccaccaagagganancactagagatcaccagaattanggaaacgagtcgacaaccggatctggacttccaacgcacctactctaacttcaaggaggggagcatacaataacggctcagagcacaacaagaaccc

SEQ ID NO: 9294 - DNA, 459 bp, Glycine max
  Clone ID: LIB3092-044-Q1-K1-H3
cccacgcgtccgggggtaatagcctgattggtgctcttccacatgcccactactacccattggataaggaagaaaactactggtttttgcttgcggattctgtttcaaacaacgtgtggttttctcagaaggttagtttcatggatgaagctgctgctgtaactgctgcatctaatgcaattgaggagtctatggaggggtcaggagcaaatgtgaaggagaccagtaaggtagttgcagaagcagttgagaaggtgaaagggggctctagattagtattgggcatgttccaggccccatcagagggtaactacaattaggcttgctattgtttgtgtgattcttggttgggctgtgacagaaggacaaatttaaagctcaaagttttgaaacgaactcgggctggcaccaggggtgcttgtctggctgatgaaggacctatcatggatgatggagttg

SEQ ID NO: 9295 - DNA, 188 bp, Glycine max
  Clone ID: LIB3092-044-Q1-K1-H4
ctcacgcgtatccgccataaccattaatccttaagcaacggttgcatcaatgggatcattggttcaaaccactgctctgatatacattttcccatcttccctaagctctgccgcgtccacacgttcaggaaatgaactgcgtgcagagaatcccaaaatggcaaaacttgcagcccgtctagcgttat

SEQ ID NO: 9296 - DNA, 427 bp, Glycine max
  unsure at all n locations
  Clone ID: LIB3092-044-Q1-K1-H5
cccacgcgnccgggggnaaaagcccgacnggtgcncggccacaggcccacnagtgcccatttgataaggaataaaactactggtttttgcttgcggattctgttttttacaacttgttgtttattcagaaggttagtttcatggatgaagctgctgctgtaactgctgcatctaattcaattgaggagtctatggagtgtttaggagcaaatgtgaaggataccagtgtggtagttgcagtaactgttgtaaatgtgttagggggctctagattattattgggtaatgttcaggccccatcaaagggtaactacaattttattggctattgtttgtgtaattcttatntgtgctgtgacagaaagacaaatttaaagctcaaagttatttaactaactcgggcttttaccaggggtgctgatttggc

SEQ ID NO: 9297 - DNA, 216 bp, Glycine max
  unsure at all n locations
  Clone ID: LIB3092-044-Q1-K1-H6
ctaacacatacactactctctctctctctcttattgtatggccgccaattccagtagccgagggatcaccgccttagggaagcgagtcgccaaccggatctggacttccaacgcacctnctctcacttcaaggaggggagcatacagtagcggctcagtgtacgacaagaaccctgatgatgagatccagtctgggcaggtcccagacgatgtgat

SEQ ID NO: 9298 - DNA, 386 bp, Glycine max
  Clone ID: LIB3092-044-Q1-K1-H7
gcgacgaaatcatgattttactatgcgggttattgattaatccccaagcaacggttgcatcaatgggtgttctgattcaaaccactgctctgatatacattttcccatcttccctaagctttgccgtttccacacgtgttggaaatgaactgggtgcggagaatcccaaaaaggcaaaacttgcagtcctcgtggggttatgttttagttacagtttgggattctcggctttgcttttcgcagtttccgtgaggcacgtgtgggcttctatgttcacaagtgacgcggagatcattgctttgacatcgatggtgttgcccatcattggactatgtgaacttggaaattgtccgcaaacaacggtttgcggcgttttgaagggaacc

SEQ ID NO: 9299 - DNA, 321 bp, Glycine max
  Clone ID: LIB3092-044-Q1-K1-H8
gcgtacgcccacgcgtacactccataaccacgggtatttacaccatggcttctccttttggctgcatagtcttcaatttggacgacaccttgtacccctacagcaccggaattgacaagtgcgtcacgaaaaacatccaactctttctaatccagaactgcggattctcagaatccaaagcctttatccaacgagacgagctattcataacctacggaagcacccttgccggcttaagagcacacggccttaatatcactgcagaggactaccacggtttcatgcacggaaggcaatcttacgactccatcgacactgatc

SEQ ID NO: 9300 - DNA, 343 bp, Glycine max
  Clone ID: LIB3092-045-Q1-K1-A10
cccacgcgtccgcagagccaagaagaagaagaagaataccaacataatccacgagcatcaacgggataaagcttgcaaatgagaagaatcttcagattaaaggtaataagaacacacaagaataaagagaagatgaaacgctcgcgaatgaagggagaattagagttgccacctgtgttcagatttcaccctactgatgaacaattggtgaatcactactctggtaggaagggcgctgggtaaccagatgctgttcccgtcatgaacatgtcgatttgctgcaatttgatgcatgggcgcttgcaagatcgattagctacttatgggttaccttttgcgtgaa

SEQ ID NO: 9301 - DNA, 251 bp, Glycine max
  Clone ID: LIB3092-045-Q1-K1-A11
acgcatctttactccaatgcaagaaatgactggataccatcgaactcgagaactcaagagcaaaagtttgaagatgctacttcattgacgaacaaacataagatgagctcgcatggacaaggaactagcactgagcatctcgaatgatggcagaatatgggtttacaccagggtttggatttcatttgactaataaactatcggatcttcactacatgagtgtgaaaacttcttgtcaaaaggactttact

SEQ ID NO: 9302 - DNA, 448 bp, Glycine max
  unsure at all n locations
  Clone ID: LIB3092-045-Q1-K1-A12
cccgtgtgcccatcatcgtcaccggtaacgatttctcaacactgtatgctgctctcatccgtgatgggcgtatggagaagttctactgggcacctacaagggacgatcgtgttggcgtctgcaatggaattttccgcactgacaatgttcctaaggatgacattgtcaagcttgttgacaccttacccggccaatctattgatttctttggtgcactcagggctagagtatatgatgatgaggtgaggaagtggatttctgatgttggtgttgacttcattgggaagaagcttgtgaactccaaggaaggacctncaacctttgaccaaccgaagatgactttgagcaagctcttggagtatggtaacatgcttgtccaagaacaagagaatgtgaagagagtacaactggcagacaagtacttgaaagaggctgctcttggtgatgc

SEQ ID NO: 9303 - DNA, 279 bp, Glycine max
  Clone ID: LIB3092-045-Q1-K1-A2
cttgggactcacgcttattttgctctctcattctacctagctaatcccgtgggttatcaacgggatacaaagatcatggcagaaagtctcatcaataaacattaagaagatcgagtagtaacatgacgtgattatacgtgcagaacagacaccgatctgcaaaatagcatgtactaaagaggcaccggtccgatcgcaatatccagcagatgctcagtctgccatgataatgggacatttactttaactctgtatttatagcgcagcctgagccattta

SEQ ID NO: 9304 - DNA, 422 bp, Glycine max
  unsure at all n locations
  Clone ID: LIB3092-045-Q1-K1-A3
ctttctgaaacagagcatggctcctctcacattctccttcttcttcatccgtatctcttacgtttcttcatcatcagttgtcaactttctgacgggctttgcagaagcgggatcaatcggaataaactatggaagaattgcgaacgacctacctacaccggcgaaagtggtggagcttcttaagagtcaggggctgaaccgtgtgaagctctacgacaccgacgccaccgtcttaaccgcgtttgccaactcaggaatgaaggtggtggttgccatgccaaacgagcttctcgccaacgccgncgcggaacagtccttcaccgacgcgtgggtccaagccaacatctncagctactaccccgncacgcaaatcgaagccataaccgtgggaaacganagtgtcggggacccgacaacacgac

SEQ ID NO: 9305 - DNA, 451 bp, Glycine max
  unsure at all n locations
  Clone ID: LIB3092-045-Q1-K1-A4
ctttctgaaacagagcatggctcctctcacattctccttcttcttcatccgtatctcttacgtttcttcatcatcagttgtcaactttctgacgggctttgcagaagcgggatcaatcggaataaactatggaagaattgcgaacgacctacctacaccggcgaaagtggtggagcttcttaagagtcaggggctgaaccgtgtgaagctctacgacaccgacgccaccgtcttaaccgcgtttgccaactcaggaatgaaggtggtggttgccatgccaaacgagcttctcgccaacgccgccgcggaacagtccttcaccgacgcgtgggtccaagccaacatctncagctactaccccgtcacgcaaatcgaagccatagccgtgggaaacgaagtgttcgtggacccgaacaacacgacaaagttcctcgtacccgccatgaagaac

SEQ ID NO: 9306 - DNA, 398 bp, Glycine max
  Clone ID: LIB3092-045-Q1-K1-A5
agaaaaagcaatccactcagagagctagaagaattcaacaatgcctcgctatgatgataaatacggcaatacccgcctctatgtgggacacttgtcttcgaggactcgttcccgtgatctggagcgagcctttagcagatatggaagagttcgaggtgtggatatgaagaacgatttcggttttggtgattttagagatcctcgagatgctgatgatgcaagatataacctggatggtcgggatgttgatggaagtcggattattgtggaatttgcaaaaggggctcctcgtgggtcccgggaatatctggggcgaggtcctgctgctggctctggacgctgcttcaattgtggccttgatggccattgggcacgggattgcaaagctggggattgga

SEQ ID NO: 9307 - DNA, 330 bp, Glycine max
  Clone ID: LIB3092-045-Q1-K1-A9
acttgccatgccactgtccaagacttctgtgtggcagacctcaaaggtgcagacacccctggaggctacccctgcaagccacctgctaatgtcacttcagatgactttgtgtacactggcttagctgaagctgcaaatgtcacaaacataatcaatgctgctgtgaccccagcttttggtgctcaattcccaggtctcaatggccttgaactatctgcagcaaggttggaccttggtcctagtggtgttatcccactccacactcatccaagtgccaatgaactactcattgtgcttcaaggtcacatccttgctggattcatatcttca

SEQ ID NO: 9308 - DNA, 355 bp, Glycine max
  Clone ID: LIB3092-045-Q1-K1-B1
aacgaaatcgcgaacagaacagcaacgttaacaatgggttctcgctacgaggtggaactgaagctctcatcggcacgcgctctcaagaacgtgaactggcgccatggcccgaaccgcccatacgtcgtcgtttgggtcgacccaagcaacaagctctcgacgcgcgtggacgaaagcggcgacactgacgcgaattgggaccaaacgctcacaattccgttgccaccaaagcctttcgaggatcaaacgttgtacatcgacgtggtccacgccggctcggaagaagacaccaagccgcttatcggctcggctcggctcaagctggtggacattctcgacgacgttggaatcggcg

SEQ ID NO: 9309 - DNA, 318 bp, Glycine max
  Clone ID: LIB3092-045-Q1-K1-B10
ctcacgcgtacgcagaaagcaagctcatactaaaggttcaaaaatggccggggcctcctgagggctctctcttacccatccttggctggcaaggccgcgaagctgggcccatcagcccccgaaatcgctagggtcagtatgaggaagacccgtaccaagcacgccttctccggaagcccatggtactgcccagaccccgtcaagtacttgtgcccactttgtggcgagcccccgtactacctcactggccagtgcccacgtgactacggctgggacacctgtgggctttacgccgacccagaaaccttagccagaaac

SEQ ID NO: 9310 - DNA, 325 bp, Glycine max
  Clone ID: LIB3092-045-Q1-K1-B11
ctcacgcgtacgcagaaagcaagctcatactaaaggttcaaaaatgtcaggggcctcctgcgggactatctctaacccatactcgactgtcaaggccgcgaagctggaaccatcagaccccgaatactgcagggtcagcatgacgtagaccgtcaccaaacaggcctactccggaagcccatgatactgcccagaccgtgtcacgtacttgtacccactctctagctagccaccgtactacctcactggccagttcccacgtgactaatgctgggacactggtgggctttcggccgacccaaaaaccttagccagaaaccgtgag

SEQ ID NO: 9311 - DNA, 426 bp, Glycine max
  Clone ID: LIB3092-044-Q1-K1-H12
gtccagcgttaaggagttagttgaatctaagtgtctgagttctgttccctccaactacattggccttgaaaatcccgaagattctatattgaattatgaaacagataatattccaaccattgatttttcccaactcacctcttctaatcccagtgtacgctccaaggcaatcaaacaactaggagatgcttgccgcgattggggtttctttatgctaatcaatcacggtgtgtcggagatactaagggatgaggtgattaggacaagccagggcttttttgatctgactgagaaagaaaaaatggagcacgcaagaaggaacctatttgatccaataagatatgggacaagcttcaatgtcacggtggacaagacccttttctggagagattatctcaaatgtcatgttcaccctcactttaatgc

SEQ ID NO: 9312 - DNA, 476 bp, Glycine max
  Clone ID: LIB3092-044-Q1-K1-F3
aagaaattagagggattcctccaaacttgaaaactttctctgcaatggattccccagccttgacctcctcgagcataagcatgttgctgaatcaggaactgcatgaggctggagacaccgactttagtttgccaagagtacagattccacagtggtttgagcacaagaatccgggacggccaattcgtttctggttccgtaacgatttcccagccataggtgcttgcattgctaagtcagattttcagggagttttcgattatccagatctcaacgtgttcattaatggaagggaacataaacattacggtcgtacccctgtccttgaaaaaccttgtacagttctttttcatcttctaatagaagatgatttagatgtatcactgttagagaacgaatggaaccgtgcagagattgtatgttatggttcatgggacgaatgctgaatccatgtattgaaagagctaaatagcatg

SEQ ID NO: 9313 - DNA, 471 bp, Glycine max
  Clone ID: LIB3092-044-Q1-K1-F6
caatatattccattctctctgtgtatttccctacctctcccttcaaggttagtcgatttcggctgtttttcttcttcgttctttccatgaattgtgtatgttctttgatcaatacgatgttgatttgattgtgttttgtttggtttcatcgatcttcaattttcataatcagattcagcttttattatctttacaacaacgtccttaatttgatgattctttaatcgtagatttgctctaattagagctttttcatgtcagatccctttacaacaagccttaattgatgattcattaatcgtagattaggggcttttttaattaataacttcagatcccgtaaacgtaaccatagatcagggctttttcatgaaatacttcagatccgttaaacaacagccttattttttatacttctgtggtttttcaagaaatggttcagatccgttgacaaaaagccttattcgttga

SEQ ID NO: 9314 - DNA, 467 bp, Glycine max
  Clone ID: LIB3092-044-Q1-K1-F7
gaagagcaactgaaccaccaccattgtttaggcatgtcctctcaacgtggtggtgacacttttacaactcaacagtcagcagcagacgtggttgccttaatcttttgtcaaaagaatgttaacaatggcaaaaggatttgctcgtaagaatttaatggaagattatactggaagttaaaaaggaaaatacttgcggtgaaatttgttctggtcattggaagaacaagaaagaaaaaaaacgtggttattaaaacctttttttttttacaataaacgtgaattcacatacccatagacttgtagagctaagttctgccgtgaatgaaaggcagagttgcagattaatcatggaatccttggcacaagtgttcaagttggcaatgtgccatattttggtacaattttgatacaatttggctttgcaggaatgtccataatttgtaaattcaccgaggatcaagggctta

SEQ ID NO: 9315 - DNA, 317 bp, Glycine max
  Clone ID: LIB3092-044-Q1-K1-F8
gaggattgcatcacatagaaaaaaatagctttcaaactgaaaatttgtgcagaaagttctctgttgttggagagtgtagacaaattgaggcacaatctctttgatctttcacagaatatagctctaatccgagattcagactatccaagaaaattttatcctcgttacaaccttgaagatacctcaagtttccaggattcggatgatcatatcatgaatgttctcaaaagattattcaacgactactatgtctgtcgtcaatagaatctttggaggcaaaatgcattgaataccctgcctgtacttctaaattcatc

SEQ ID NO: 9316 - DNA, 307 bp, Glycine max
  Clone ID: LIB3092-044-Q1-K1-F9
cccacgcgtccgctttgaccttgttggaaacaaccttcccgtcttctttgtacgtgatggcgtgaagtttcgagatatggttcatgctcttaaacccaatcccaagaaccacatccaggagaatcggaggatccttgactacttctctcactttgcagaaagccttcacatgttcaccttcttatttgatgatttgcgtgttccacaagattacaggcgtatggatggattaggagttaacacatacacactgatcaacaaggctgagaatgaagagtatgtgaaatttcactggaagaccactatt

SEQ ID NO: 9317 - DNA, 327 bp, Glycine max
  unsure at all n locations
  Clone ID: LIB3092-044-Q1-K1-G1
gacccacgcgcccggaagagcaaccgaaccaccaccacngnnnaggcanggccccncaacgcagnggggacacttggacaacccaacagncaggagcagacgngggcgccccaaacatttggcaaaagaacnggaacagnggcaaaaggaanngccccgaagaaaacaanggaagaaaanaccggaaggtagaaaggaaaatacattccgcgaaatttgttcttgttattggaagaacaagaatgaaaaaaaacgattttatttaaacctttttttttttacaataaacgtgaattcacatacccatagacttgtagagctaaattc

SEQ ID NO: 9318 - DNA, 463 bp, Glycine max
  Clone ID: LIB3092-044-Q1-K1-G10
attccaaactccgccatggccactgccaccgccgccgccgccacgtcatactttttcggcagccgtctaaacaacgttaacacgacaaccttaaacaacggaagattccacgcgctcttgaacttcggcaaaaagaagacggcgccgcagccgccgccgaagaaaaaggaagtgaaagtgaaaccctccggagaccggctggtgtggttcccgaatgcggagccgccggagtggctcgatggaagcatgatcggcgaccgcgggttcgacccgttcgggttcgcgaagcccgcggagtacctgcagttcgacctggactcgctggaccagaacctcgcgaagaacatcgccggcgatgtgatcggaaccagggtggaggtcgccgaggttaagccgacgccgtttcagccctactcggagggtttcgggattcagaggttccgtgagtgcgaactcattcatg

SEQ ID NO: 9319 - DNA, 434 bp, Glycine max
  unsure at all n locations
  Clone ID: LIB3092-044-Q1-K1-G11
cccacgcgtccgctttgcatgtcacttgatattgagcagctgaggagtctctgtgagaacatggaangcagacagatgttattagaacaagcaaaagttttgagatatgcactgagttctaagaaagaagaggtggttgatgagaaaactaatcaacaaaatgccaatggttccatcaaggctaatgggatttcttccctaagcaacattgagaagaaggagaaaccatggagtaaagaagagattgatctattgaggaaaggaatgcagaaatatcccaaaggaacctcgcggagatgggaggttatttcagaatacattggtactggaagatctgttgaagaaatcatgaaggcaactaaaactgtactccttcagaaacctgattcgtcaaaagcttttgacacatttcttgagaaaaggaaacctggtgc

SEQ ID NO: 9320 - DNA, 440 bp, Glycine max
  Clone ID: LIB3092-044-Q1-K1-G2
ggcgaatcagccactggcactgaacaattaaccattaacaagaacaagaacatttcaagggaggacatagtaatggacatggttctgcattcagccttgtacccaccatctctgtcttgttcctcttctactactggaacaagatggcccaattcccgggttggtgttagtttgagttggaggagcttgtccttggtgccttgtgcactgaaggcatattatgattctgaattggagaataaaaagcatctacttctgacctctgtccaagacacgcaaaggggcctcttaacaacttctgatcaacgctcttgtatcgaggaagctcttgtgagtctcgaaggatgcaacattggctctcaccctatcaatctctccaacttggatggaacatggcgccttcagtacacttctgcctttgatggtctcattcttcttca

SEQ ID NO: 9321 - DNA, 174 bp, Glycine max
  unsure at all n locations
  Clone ID: LIB3092-044-Q1-K1-G3
ggagaatcgncaagtgagtcatgaatacggccgctatggatacccaacaactgtagttctgggtgataagggtagtccatagtagggggccgaatcaactgctaaaatggcgtctgcgatgttttctatcttctgcctcatgatggcccagttcccagcttggggacagttcga

SEQ ID NO: 9322 - DNA, 432 bp, Glycine max
  Clone ID: LIB3092-044-Q1-K1-G4
gcgttatttcctaggctgctgctattaatcaagtccaatgcccatgagtgataaatgccttttattgtgtgatgcatgaatatggtgtttactagagtgataaataatttctactgtatcaccatgagataatgaactagatgcctgatcaaatctttaataatgattgaacatatgaagttatatggttgcttttggttcaaatttttatagttttgttctctgtatgtattccagtggcagatgcacacacatttgttctggaaactatcgaagttttttttctcttagaaaataatacttttgaagtatgcacagcatatggatcatttaacagaagttgcagtactgtataagagtatggggttgtgggctcaataagtaagttgtgtactggtgtataagtatgtggagataacatgtttttttttc

SEQ ID NO: 9323 - DNA, 338 bp, Glycine max
  Clone ID: LIB3092-044-Q1-K1-G6
ttttgaagaaaattgagcaggtgggaacatctgatgggaaacctacccagccagttaaaatgattgattgtggtgaagtctctgaaacaaaaattcagcatactgcagagaaggagaaaggaaaaaggagaaaatctgggaagtccttatcttctgatgatggttctgacaaaaaatcaaggggaaaaaggaaaaaatcttccaaagacacaaggaagagaaggaggagatactcaacatctgatagtgatagctattcctcagattctgagtcagattcagattctgaatcggattcatcagtttctgattctagttcctctagtgatgggaaacac

SEQ ID NO: 9324 - DNA, 450 bp, Glycine max
  Clone ID: LIB3092-044-Q1-K1-G9
cccacgcgtccgcccacgcgttcgcaaaaaatggcttctagttcagaatctgaatctcattcgaaaccgttccaagaccgagttgcaatcgtcaccggctcgtcccgcggaatcggccgagaaatcgcgcttcacctcgcctcactcggcgcgcgactcgtcgtcaactacacctccaactcggcccaagccgactcagtcgcggcgcagatcaacgccggttccgccaccacgacaccgcgcgccgtcgtggtccaagccgacgtgtccgatccggctcaggtgaagtcgctcttcgactcggccgagcgcgccttcgactcgccgatccacatccttgtcaactcggcgggcgtgatcgacggcacgtatcccttcgtcgccgacaccaccgtggagtccttcgaccgcactttcgcggtgaacgcgcgtggcgccttcgcgtgcgcc

SEQ ID NO: 9325 - DNA, 431 bp, Glycine max
  Clone ID: LIB3092-044-Q1-K1-H1
gtttgaggacactcacccaagctgtaacctctggtgagcgacctacccaacactctgcaatgcgcgattgccgtcaatgactttgagcatatcttcatggtagctccagggtgagccaccggatcccggagattgatgaaggtagccctgatcgattgaagaacatactccatgagttcactggagagcctgttgacactgtggataaacactaggaacaaccagtggagctgcttagcatgacatcatgatatctgactcagaatgagcgagctaggatcatatgctccatcgcttttaaaatcagcatgaatgcacctctcatgggttagttagcagctgaaactgacccactataaactgctacgtaggaactacaagagcataatatgccctttacaattcagaactccttgccttatggctgttat

SEQ ID NO: 9326 - DNA, 441 bp, Glycine max
  Clone ID: LIB3092-044-Q1-K1-H11
gccaaatcaatcaaattctttgagttgaacacaggggccaagattccttctcttgggttagggacttggcaagctgaacctggtgttgtagctgaagctctcaccacagccattcaggttggatacaggcatattgactgtgctagtgcgtataagaatcaagcagagattggttctgctcttaagaagctttttgatgatggtgtggtgaagcgtgaggacttatggatcacttccaaactctggtgttcagatcatgcaccagaagatgtgccaaaagcattggataaaacattacaggaattgcaacttgactatcttgacctctatctgatccactggccagtccgcatgaaaagtggaacatttggactcaataaagaatatcttgagcaaccagacattcccaatacatggagagcaatggaggcactctatgac

SEQ ID NO: 9327 - DNA, 481 bp, Glycine max
  unsure at all n locations
  Clone ID: LIB3092-044-Q1-K1-F2
caacattcccacgtgggtttgctttggaaattctgcacgtgtactctggaccacccgtgattgtgtacaagttcaggcactggggctacatggagggtcccttcaaaggccacgcccccactggagacaaaattgaagtctatgggatggccattttcacgttggatgagaattcaaaaatcgtgaaggtggagttcttttatgatcctgccgaattgcttggaggtctcctgaaaggtgccaagtttgatggcagtgctgaagatgctgttgcaagctgtcctgtactcaagaacaccggctagagcagcacatgttcaaaaagtttatcctttgaaagtaaaggttaattgcagatngtgcatcaatggcttggttaacttttagtttttacaaggtatatctgtaggtaatatttactggagactcttcaaatnccagccaattaatggttgaatcaataacacccccaacccccttt

SEQ ID NO: 9328 - DNA, 475 bp, Glycine max
  Clone ID: LIB3092-044-Q1-K1-D6
cccacgcgttcggtttggaaatggcagcggcaggttgtcagaagcttctggaattgagcacgaagatcgtcgctgttggcagaaactacgctgctcatgccaaagaactaggcaacgccgttcccaaggagccggtgttgtttctgaaaccgacgtcgtcttactcgagtaacggcggaaccattcaaatcccacacaacgagggctctctgcatcacgaggttgagctctctgtggtcatctgcaagaaagcccgtgacgtctccgaatcctctgccatggattacgtcgacggttatgcactggctctggatatgactgatagggaccttcaagctgctgctaagtctgcaggtcttccatggagtttggcaaaaggccaggacactttgaccgctattagctctattgtgccaaagactacagtgccgaatcccgatgatctagaattatggttaaaggttgacgacgaaat

SEQ ID NO: 9329 - DNA, 506 bp, Glycine max
  Clone ID: LIB3092-044-Q1-K1-D7
cccgggtccgacccacgccgtccgcctggtcttacctgtgtggtgacctgtgctctgtctctcatctcatatcatattcattgtcaatggcgaactcaaggtcaatgtcagttacctgctaaagctggagtggccttgggaacccaacaaggcccttatccgtccaagacgttcaggttgctccgcctcaggccggcgaggtccgtgtccaattcctcttcaccgctctctgccacaccgatgcttacacttggagcggcaaggatcccgaaggtctcgtacgctgtattctcggtcacgaagctgcagggattgtggatagtgttggagaaggtgttactaatgttcagcctgtgtatcatgtcattccctgttaccaggctgagtgtggggagtgcaagacttgcaaatcggggaagacaaacctttgtggcaaggttcgttccggcactggaagttgggtcatgcttcatgatggaaagagccgggtctacattaatgggaag

SEQ ID NO: 9330 - DNA, 197 bp, Glycine max
  Clone ID: LIB3092-044-Q1-K1-D8
ttctgagcacaccctccttctcattttcattatctagctagcgttaccactttcaatttcggattcactctcagaaattagaatggctagccaatcaaacactaaatcagttcacgatttcaaagttaaagatgccaggggaaataatgttaatctggccgattccaaaggaaaggtcttcctaatggccaatgttg

SEQ ID NO: 9331 - DNA, 226 bp, Glycine max
  Clone ID: LIB3092-044-Q1-K1-D9
aatctttaacataacaacaacactgaacaatttttggctctctactaaatataactaaatctttcatctacactcactctcaataaccttaactttcaccatttccctaaccatccatacttcttcattattttctacccaaacaacaaactctccactctcttttactaaatcttctacacttactctaatatctaccaaacactcacaatttctttaccaccaa

SEQ ID NO: 9332 - DNA, 433 bp, Glycine max
  Clone ID: LIB3092-044-Q1-K1-E1
gcatagcatgctacactcgcgggcctttcttgcctagtgtttcttccaagcactctccacctgccatttggccatcttttggcttgaggagtctgaaatcaagctctttatttggagaatcgctaagagtggcctccaaatcaacaataaaggtttcaaagacaaagaatacttcactcgtgaccagatgtgaaattggtgacagtctcgaagaattgctcacaaaagcaacaccagataaggggttgatcaggttgttggtgtccatgggagaagcattgagaacaatttcctttaaagtgaagacggcttcatgtggtggaacacaatgtgttaatactcttggggattaacagcttgcaatggatttgctagcttatcaggttcttttttgaggcttaaattactctcatttctgcaagtatgcttgctc

SEQ ID NO: 9333 - DNA, 452 bp, Glycine max
  unsure at all n locations
  Clone ID: LIB3092-044-Q1-K1-E10
ctcaatcttcattccccattcttactactgtgaccatttcagcattggagaccgaatcggtgcaagttaatgcagtgcaggggtatacattttcatcaaatcttcttggaggttctggcaggataatcccagagagtgtgatctacagttatggaactgttcttctggatcttctaagtggcaagcatattcctccaagccatcatactatgggaaagcgcagaaagttgaatatcattcagaatgatggtcaatcacaagcaaaagagcaatcaattgaaagctctactgaagtgaaccaaaataacaactctatacttgaagaaaatgcacaatttgaagaagaacaacacatacaagaagatagtcatgttcagtctcatacttctcttgaaagtgcaagtgaaagttcaactaangataaaaagaagactagaggttatacacatatg

SEQ ID NO: 9334 - DNA, 451 bp, Glycine max
  Clone ID: LIB3092-044-Q1-K1-E11
cccacgcgtccgcaagaagttgggtcaaatattgatgaagcttcaatattaaaagtgtagatggtaatatccctcttagttatattccctcctaggattgccttatctagaagcactccaaagatggtttactgttaaagcgggatatcatcaagctgtcgatgctaattgtagattcttagcttactctagccacacccctggagatttatggaagacactcaggaagatcaaaactttacagaagtgccagaaccttgcttggacagcctgtaaaaatatcctcacagtaatggtaaatctgaaatctagaggaacgaatgtggatgaaaatgatcgtgcttgacttccaatttcgagtttatgggggagaatttgtgaattagtctagaaatccgatcaaattcaatcttcaatctggaggaatgaaacttggcctctgagatgagct

SEQ ID NO: 9335 - DNA, 461 bp, Glycine max
  Clone ID: LIB3092-044-Q1-K1-E12
cgagtcacgaaaattgttgaggttcacctcgaaaggcttcagattagcgacgttggattgcgagcgatagcgaattattcgagtttggagattttgcatcttgttaagacacctgaatgttctgatattggacttgttgctattgcagacaggtgcaagcttttgaggaagcttcatattgatggatggaaggcgaatcgaattggggacgaaggtttgatagctgttgcaaaaggttgccctaatttgcttgaattagtgctaattggggttaaccctactaaggcgagtttggaaatgttggcgtctaattgccagaatctcgagcggttggctttgtgtggaagtgattcggttggtgatcctgagatatcttgcattgctgcaaagtgtgtggctttgaagaaactgtgtattaagagttgtcccgtttccgatcaaaggatggaggcattggggaa

SEQ ID NO: 9336 - DNA, 453 bp, Glycine max
  Clone ID: LIB3092-044-Q1-K1-E3
cccacgcgtccgctcagctataaataatcacaaaacccttccaaacccttttcctctttcagctcgccttgagcttccacaatcctatcgcacatctttctcagttctacgatggagttttggggtgccgaggttaaggttggagagtctgttaaggtagacccagccgaatttgaggcatgcatacacctttctcaggctgctcttggtgaggcaaagaaagataagcctgaaccggtggttctctacatgaaagttggtgaacagaaatttgtcttgggaaccctttccagggagaaaatccctcaaatatctctggaattggtgttggaaaaggagtttgagctttcccacagttcaaagagtgccagtgttcatttctggggatacaaggcatattacgatgccgataatagtgacgaggatgaatttactgatagcgatgaagatgat

SEQ ID NO: 9337 - DNA, 233 bp, Glycine max
  Clone ID: LIB3092-044-Q1-K1-E4
cacgcacgcactgagatactcacaatcacatagcccttttaaacccatcacatccattatggcacctggggctttcacaatcctctagcacatcttatctaattctacgatggacaatatcaatgccttaattaaagtatcataaactgttaatcataaccccaacttacataacgcatccatatacctttctcaggcttctcttaataatacaaaaaaatataatcctgaac

SEQ ID NO: 9338 - DNA, 236 bp, Glycine max
  Clone ID: LIB3092-044-Q1-K1-E6
ctgacgcgttcaatggcttctgatgtccaagcgcatatgaatgtatccacttacaggaacggggactttcatagcatcctaatattatgaatggacattcacagcatccttcttaaaacatttttttcaagaattccaatctcaggatctacctccagatttaacttgtttaatcacttaacatgcattccataaggcaagtgttacccttcttaatagtccactaagcctaaaaa

SEQ ID NO: 9339 - DNA, 466 bp, Glycine max
  Clone ID: LIB3092-044-Q1-K1-E7
aagagaaacaggagcagaataaccctcaaactccgtttcactctgagagaaagtgctgcaggggacacacccaaacagagagaggaagaggtgtgtgagggatagactaagaattgaacgaaaaaacgtttgcaaaggaagaaaccttgcaaatttaacaccagaaaagaagatctgtgatttatctttcttttatctttgtgtttgcataggaaaaaaacacacacccttcatctgagcctgaatttgtatcattgagaattttcaaaaaggattgtctcttcagagacacagatcttgaggttggagtcaaatccttcacactttggtatggagacagaagagaggaaccagaaagggtgcaaggcttcggagccagagtttttcttgcagtgggggaacaggaagaggctgagatgtgtgagggtgaaggaccctcggatttcagcgagactcaacggtggaa

SEQ ID NO: 9340 - DNA, 432 bp, Glycine max
  unsure at all n locations
  Clone ID: LIB3092-044-Q1-K1-E8
cacgaagatactcacaaagagggagattgaatgagggatatcagatccctatttgtatttggggttgtctttctgaacaaccccatcatatatcattaagaggggtatcaagatcaatccttgattagcaagatcataaattttcattcatatacacaatttacatatcgtaacaagatcacatttgttttgttttgtgttgtttgcgttgttgttgtgttgctgatctcataataacaacatggagggtgagaacaagaagtacatcacatctgaggagctgaangagcacaataagccatgggatttgtggatttcagtccaagggaaggttaacaatgtttcaaattgggcaaaggaccaccctgcaggacaggttcccttgttgaaccttgcaggccaggatgtgactgatgcattcgtagcatacca

SEQ ID NO: 9341 - DNA, 306 bp, Glycine max
  Clone ID: LIB3092-044-Q1-K1-F1
gcgcgatcatggacgccgattcacaacctcaacaactcgaagagagaacagaggagcaagaactgaagtacctggaattcgtgcaattcgcgaccatacaggctctgatgcgctgcgccatcctctactcatacgccaaggagcgcgcgggtcctctgaagcccggtgtcgacaccgtggaggaggccgtgaagaccgtcgtggctccagtctacgataggttccaccttgtccccggcgaaggcctcaaatacgcggatcggaaaggtgcccaattagacagccacgttcccttcaacgtgaaaa

SEQ ID NO: 9342 - DNA, 452 bp, Glycine max
  Clone ID: LIB3092-044-Q1-K1-F10
aaaagaagcactcactcgtgaaccccacgcagtgttcgataatcaaatcttctttcttttgcttccgcagtcccaaccttcatggattctcactcacacatcattgcttggggctctggtgaagatggtcagctaggaatcggaagcaacgaagagaaagaatgggtctgcctcgtcaaagccctccagccccaccgtattcgctccgtcgtcgccggcagcagaaactccctcgccatcgctgacgacggcaaattgttcacttggggttggaaccaaagggccacacttgggcaccctgctgagaccaagtctgagaacaagactgagaacactcccagccaggtcaaggctctttccagtggtaaaattgttcaagcggctattggggggtggcactgtttggcccgtgatgatcagggcagagcttatgctttgggtggaaatgaata

SEQ ID NO: 9343 - DNA, 462 bp, Glycine max
  Clone ID: LIB3092-044-Q1-K1-F12
gttctccttttcatgggctcacttaaagaggatcttgcaactactatggaatcttttgccggtttagaggttgcttgtaaggaactaagaaacaaccggctgttcctcaagcttcttgaagccgttctcaaaactggcaaccgaatgaatgatggaactttccgtggtggtgcacaagcatttaaacttgatacacttctgaaattatctgatgtaaaaggaacagatggcaagactacactcttacattttgttgttctagagattatccgctccgagggcataaaagccatcagaaaggcaaaagagagccagaaatcgtctagtattaaattggatgaccttcacgatagtacccgagaaacagaagatcgctaccatgaaatcggtcttcaagtggtttcacgattgagcagtgaacttgagaatgtaaaaaaagcagcaattatagatgctgacagc

SEQ ID NO: 9344 - DNA, 470 bp, Glycine max
  Clone ID: LIB3092-044-Q1-K1-D5
cgtcgctgctgccgccgatcatcggcatcatcactatctgtctcccgcggcagcggcagcggcgttggtgtatcagtctgctccttccacggcggcatttacggcggcgcccggtggcttctcgggattccgcgtgccggcacgaattcagggtgaggaggagcacgacggcggcatgtccgataagccgtcctctgcttcctccgattctcgccgttgaaccgtcgagatcgtcagccgatttctgtctccttggaatcaattgggtatgtgtgtgatctgatttttgcagggatggaggagacgaagttggacttgtaatggttcggttcggttcagtggactattatgcttgtggaatgaagaaaatctggggttgaatatccaggtttttgaattctccaatctgttatgttaatttaatttatgtttttcatgtttcattaaggagactttcaagtttgagtact

SEQ ID NO: 9345 - DNA, 288 bp, Glycine max
  Clone ID: LIB3092-044-Q1-K1-C1
gcgctttactctgaagcgttcgtcccttatccagtttaagaccaaattagatgtgtttttggccgataactcaggataagatgtttgtgactttaaggtcaaaggtagttggtaggaacgatcttgcgttgtttgtgctggtgaatctaacaacatcgtagcccagatgcataaaaagcacacggttgagagtatttatatagtgaatttataatttatggttacagtgtatcccaacattgattattcgattgttgtgtcactaattgttattcttgacgagattaa

SEQ ID NO: 9346 - DNA, 452 bp, Glycine max
  unsure at all n locations
  Clone ID: LIB3092-044-Q1-K1-C10
cccacgcgtccgcatttttcacaccaccaacacaagatgtttctccacattgtgttcctcctgttccttctctcatccacttcccatgccactgtccaagacttctgtgtggcagacctcaaaggtgcagacacccctgcaggctacccctgcaagccacctgctaatgtcacttcagatgactttgtgtacactggcttagctgaagctgcaaatgtcacaaacataatcaatgctgctgtgaccccagcttttgttgctcaattcccaggtctcaatggccttgaactatctgcagcaaggttggaccttggtcctagtggtgttatcccactccacactcatccaagtgccaatgaactactcattgtgcttcaaggtcacatccttgctggattcatatcttcaggtaacatagtttatcanaaggtgcttaaaaaaggagagctcat

SEQ ID NO: 9347 - DNA, 447 bp, Glycine max
  Clone ID: LIB3092-044-Q1-K1-C11
aaagaacagaagatggcacaaacgctggcaatgcccgtggcaccttcgctcgctatcatctggaattctcgcgggtccaagacactctccgctcccgttctcaacaacccaaagtttcaagggttaagcatcaagtgcgttcgtgttggaggtgtggagattccgaacaacaagcgaatcgagtactcgctgcagtacattcatggagttggcaggaccagagcaaaacagattctgtgtgatatccaaatggataacaaaatcacgaaggaactcactgaggaggagctcatcactctcagggacgaagtctccaaatatatgattgaaggcgacctgagacggttcaatgcggttaatataaagagactgaatgacattcactgctacagaggaataaggcacattcaggggcttccttgcagaggccagctaaccaagaacaat

SEQ ID NO: 9348 - DNA, 214 bp, Glycine max
  Clone ID: LIB3092-044-Q1-K1-C12
ccgaacacccagctcccataatacataccatttaaccacacccacccatcaacattgcaaaattcggcaatcttcacctccaaaaatccaccaagaatcatcctcctcttaacactcttatccacacaaatgcttacccacctcgatccaaagatacaatctactacctgccctcgaatcgtcaaccccttcatttcttatgactatgaaccca

SEQ ID NO: 9349 - DNA, 466 bp, Glycine max
  Clone ID: LIB3092-044-Q1-K1-C2
tttcatgccaaaaggtcaacgtaacctgctacgattgttataaactggagttgttatcatcacaatgttggatgtgaatggtagttgcgggttttatatctctagttgtgttctccacttagctgaatggcacccattggaatagcaacgttgagtagggcttgaagccctgtttttacttcctctatcaagtaagaaccttagcctagtatttcatctggttgacaagatgattgattgaggatttgattttttattgttgttggcgtagtaaattgtttttttcctttctttttttagattttttattttttagggtgagagatacggcaattacatttaagattcaatcttcagatgctcaataagactctttcttttgcgatggggtgctggagttgctttgggttcatcaggacacctaaccgtcaaagtcaaaggtctaagcctactactaacaataatc

SEQ ID NO: 9350 - DNA, 438 bp, Glycine max
  Clone ID: LIB3092-044-Q1-K1-C3
gcgctggtattgtgctaggaagttacatggcactaatgacagtagtatttttctggatcatgaaggataccgagttcttctcggacaagttcggtgtgaggtctataaggaacagccccggagaaatgatggcatccctgtacctacaagtcagtatcataagtcaagcactaatttttgtcacaaggtcccgcagctggtcctatgatgaaagacctggtcttcttctactgagtgcttttatgattgcacaactggtggcaacttttctggcagtatatgctaactggggcttagcaagaattcatggaatgggatggggttgggctagggtaatctggctctacagtttagtgacatatatccctcttgatatacttcaattcgcaatccgctattttctgaatgggaaaggcctgggataatcttttggagaac

SEQ ID NO: 9351 - DNA, 475 bp, Glycine max
  unsure at all n locations
  Clone ID: LIB3092-044-Q1-K1-C4
gttgaagctcacatccccaaccttctcctgtgcaatgagcaacatgcttccagccatgacttttgtgatggcagtgttttgccggatggagaagatagacataaagaaggtgagatgcatagcaaagatagtgggaacattagtcacagtggcaggggcaatgttgatgaccttatacagaggtcctatagtggagatggtgtgggccaaacattcacacaataaaaccaatgcaacaaccaccacaggatcattggacaaagattggttcttaggatgcacctttcttatcattgccacccttgcttgggcttccctatttgttttacaagccaaagctatacagacgtacaagaatcatcagctaagcttaacttcacttgtgtgctttataggcactcttcaagctattgctggtacttttgtagttgaacacaatccttctgtatggagaattggctgngatgtgagctta

SEQ ID NO: 9352 - DNA, 468 bp, Glycine max
  Clone ID: LIB3092-044-Q1-K1-C5
cccacgcgtccgaaaaaaaaaccctagtaatgccgccgatggggaggaagcgaaaggtagcagccaaatcttctctatccaccgagccacctctcaagcagcaacaaccaaaacccgaaaatccccctcaagaatacgaagaagtcgaagaggaagttgaggaagaagaggtagaggaagaggtcgaagaggaagaagaagaagaagaggaggacgaggaagaagaggtggaggaagaagaggatgaagaagaaaacgacgtcgtcaaacaacagcagcagcaacagcaagacgaagacgacatcccgatatcgaaacttttggaaccgttgggcaaggaccagcttatgaaccttctttgcgacgcggcggcgaagcaccgcgatgtgtatgagaggatccgaaaggctgctgatggagatccggtgcaccggaagatatttgtccacggattgggctgggacacta

SEQ ID NO: 9353 - DNA, 467 bp, Glycine max
  unsure at all n locations
  Clone ID: LIB3092-044-Q1-K1-C6
cggacgcgtgggcggacgcgtgggctagaactagtcgcttcagcatgtgttggtaattcacgcaaatgtaggccttcgatggctcaagtggcaaccattttgaacaacttagaaacggaagtgtgtctctgatcttcatgatgatgcagtcaaaagtcaatttgattgaacaaattgccttccaattttgtaccaaaaaaatggggtctgaccaattaccaataattggtataaaaaaggcatgtgttctagtcagaaaaaaaaacttggtcttatgactcttatcatatgattagttaccaaattgattgaaatgaagatcgaggacaatattagtgaggtaagttaggtgagattgacattcatcggatggcagtaattggtaagaaaattggtgggtttttgatgagggaagtgccttatggcttatcccctatngtgtgacaggctaangagtcagagaatca

SEQ ID NO: 9354 - DNA, 472 bp, Glycine max
  unsure at all n locations
  Clone ID: LIB3092-044-Q1-K1-C8
cccacgcgtccgctgatgctaggatagagtacaggccgaacacagaggatgatccgcacaagggaaagcctgatataagtagggctaaggatcaacttggctgggaacccaaggttgatctgcgcaagggcctcccactaatggtttctgacttccggcaacgcatttttggtgaccagaaggaaaaggcaaccgtagcctaattcttgcgtgtcatgtatcttagagtgagaaagggatataagattataatagttcgaggataaccctggcccgccaaaggtcccattagtcatcacaggattatatgagctctactaaaangtccctttgtcgtttgttctcctgtcaatcttacatgccgggttatgtaccctctttcaagaatgactaccacccctgattccatttttcaaattcctgccatctatattctatttctttcttctattttttggatgtaattggtatg

SEQ ID NO: 9355 - DNA, 429 bp, Glycine max
  Clone ID: LIB3092-044-Q1-K1-D11
caaatgtgagtttgaaggagtctgatgcctggcctgctgagccacaagatgcatatgggctggagaagcttgcaacagaagagttatgcaagcattataacaaggattttggaattgagtgccggattgggagattccataacatatatggtccttatgggacatggaagggtggaagggagaaggctcctgctgctttttgtcgcaagacacttacttccaaagatcgatttgagatgtggggagatggattgcaaacaagatccttcaccttcattgatgagtgtgttgaaggtgtactgagattgactaaatcagacttccgggagccagtgaatattggaagtgatgaaatggtcagtatgaatgagatggcagagatggttcttagctttgaggataagaatataccaatataccatattcctg

SEQ ID NO: 9356 - DNA, 387 bp, Glycine max
  Clone ID: LIB3092-044-Q1-K1-D2
cccacgcgtccggaagatgttgcagaggcttttgaagttatccttcacaagggagaggtcgggcatgtttacaatattggtactaagaaggaaaggagggttattgatgttgccaaagatatatgcaggctttttaagatggacccagagactagtataaaatttgtggagaacagaccatttaatgaccagagatactttcttgatgatgaaaagctgaaaatcttgggttggtctgagaggaccacttgggaagagggcttgaagaaaaccatggactggtatatcaacaatcctgattggtggggtgatgtcaatggtgcattggtttcccattcaaagatgctgatgatgctcggtggactggagagacattttgatggatct

SEQ ID NO: 9357 - DNA, 400 bp, Glycine max
  unsure at all n locations
  Clone ID: LIB3092-044-Q1-K1-D3
cccacgcgcgcgcacacgcgcgcggaagaaagcgcagaggcgattgaagttatccttcacaagggagaggtcgggcgtgttggcaatattggtactaacaaggacaggaaggttattgatgtcgccaaagatatatgcaggcattctaagatggacccagagactagtctaaaatttgcggagaacagaccatttattgaccatagatactttcttgatgatgaaaagctgtacatcttgcgttggtatgataggaccacatgaaaaaaaggcttgaagaaaaccatgtactgggatatcaactatcctgattggaggggtgatgtcagtggtgcatatagaacccatccaaggatgcttatnatccctgtggactggagagacatttcgatggatctga

SEQ ID NO: 9358 - DNA, 167 bp, Glycine max
  Clone ID: LIB3092-044-Q1-K1-D4
cccacgcgtccgggaagaatcactccctcattcatagccacaccacaccatggcctcaaccggcgctttggctatatccttaattctacgctctcccaaccgccagactctgacccgaatagcgaaccataaattaagagtgacttaccggctaccgtataaccggt

SEQ ID NO: 9359 - DNA, 467 bp, Glycine max
  unsure at all n locations
  Clone ID: LIB3092-044-Q1-K1-B9
gaaaaaaaaaaggaaaatgaggaaagaaaacgtatagaaatagcagaagcctgggatagcattgtatttgctcaggtaataagaggtattttattaataacccaatccattcttagaaaatatattctattaccttcattgataataactaaaaatattgctcgtatactattttttcaatttcccgaatggtcggaagattttagggattggaagagagaaatgtatattaaatgcacatataatggtgttcaattatccgaaagagaatttccaaaaaaatggctaacagatggtattcagataaagatcttatttccttttcgtctcaaaccttggcacaaatctaagctacgatccaatgaaaagaaaaaggatctaatgaanaaaaagaacttttgttntctaacagttntggggatggaagtcgacttgcccttttctggttctccccaaaaaatagattt

SEQ ID NO: 9360 - DNA, 419 bp, Glycine max
  Clone ID: LIB3092-044-Q1-K1-A11
taccggtcctgaattacgcgtccgactaactaatgagttacaaaaccaggtgattctgaccgagattcatgcaacagttatggaaagtggtccgagagggaccgaattgaaaggcgtgtgttcgcctccggcccctccggctttcacggttggcttggatgttcatttgagggagatgaaggtcaagttgctgaataaccaccaccatgctggatctgtgctcacggtcaccggaacaccaggctcagggaagtcaacgttggttaaaaagttttgttgtgatgaggaagtcaaaggtatattcaaggaaaacatattcttcatcacctttgcgcaaaagcccaagttaaataccatagtgcagagactgtttcaacacaatgcttgccaagtgccagagtttcaaagtgacgatgatg

SEQ ID NO: 9361 - DNA, 459 bp, Glycine max
  Clone ID: LIB3092-044-Q1-K1-A12
gcagcattcactgaaagcactcagtagggtttgcggtttcagagtttgtgacgcacgcatccgtggccaccaggaccaacgccgccgcagccccgacgcgccagctctcccagaaggaagccgacatccagatgatgttagccgccgacgtccacctcggcaccaaaaactgcgacttccaaatggaacgttacatcttcaagcgccgcaacgacgggatttacattattaaccttgggaagacatgggagaagcttcagttagcagctatggttattgttgcaattgagaaccctcaagatatcattgctcaatccgcaaggccttatggtcaaagagcggttctgaagcttgctcagtacactggtgctcatgctattgctggaaggcacactcccggtaccttcaccaatcagcttcagacttcgttcagtgagccctcggctcttatgctcactg

SEQ ID NO: 9362 - DNA, 377 bp, Glycine max
  unsure at all n locations
  Clone ID: LIB3092-044-Q1-K1-A2
ctgaggcattcactcatctacacctaagcattttagagagctcatgcatgtcggtggcctaggtaacgatgaattgaagagccatgtacaaaaatacctactgtatacgcagagagttcctgttgcatgaactaatcaaccatacgtgggtctcggaggtttgtagatgtatcaagatcattacaatgactcttcaaaagttagcaactaagngcacattctgctcatagatctcttaattactctgcacgatatctacaaggtacattatctactgaaagttgcagtttagaacatgatgaatatgcaattaactgtaagtatatttgggaaaatgatatgaacaaaccaagaaaagttgatgtataggatactac

SEQ ID NO: 9363 - DNA, 211 bp, Glycine max
  Clone ID: LIB3092-044-Q1-K1-A3
gcgtacgcccacgcgtccgcccacgcgtccgggaagaatggcttttgggcgagatatcgggaatattgggggccatttgctaaattccaatcaagttgatgtggttcatatgaaccgtgtgaatataaacgtcctttgacaaatggagctgagccacagcagtgaccagcgcacgaaggctcatgaagcaaatgaacacttatgaagatag

SEQ ID NO: 9364 - DNA, 463 bp, Glycine max
  Clone ID: LIB3092-044-Q1-K1-A4
cacaaatctatttccattccattccctcagagagagcaagatcacccttctatagagagaaagcacactcacacacacacaaaacaaaactctgcttcttatactaactgttcttctgtgtccacagaaaaaccaagtgaatttaaggctagagctgggatcacagtgaagaacatgatcaacgaagattcctaagagaccatcgtgaagcataatgaggctcttactgacaggattggaaagaatgttgaccttgaacttgttagcactgatattgatccaataccaaatttgcaaagaaaagtaatcgatcagtgcttaaggattggtcaaagaagtgcaatcttaatgcacagagagttaattacacggcttgatccatgattgactctagatctggcgagccaggagctagtactgtgacatacatgcaccataaagagttcttcttgatagcataacc

SEQ ID NO: 9365 - DNA, 438 bp, Glycine max
  Clone ID: LIB3092-044-Q1-K1-A5
cccacgcgtccgcccacgcgtccgggaagaaaggcttttgggcaagatatcgtggagatttaggtccatttgctaaattccagtcaggttgatgtggttcatatgaactgtatgaatataaacgtcctttgacaaatggagctgagccaaagcagtgacgagcgcaagaaggcagaggaagcaaatgaacatttatgaagatagttatgcttcagttgtttttatggtagtagaggcagactgctgcagacagcaaaataaggtttaacaatcaatcatacgctggaaacttaaaaatgtgtttttaactattgtatttatatgttcaatgaatacaaattaacataactttgcaagttaagtcaagtgaaagctgaacaaggcgaatcttgagaacagacaggatcactcaatgttgtatttgattaatgttggctc

SEQ ID NO: 9366 - DNA, 396 bp, Glycine max
  unsure at all n locations
  Clone ID: LIB3092-044-Q1-K1-A6
gcgcccacgcttccgtattgcaccaactgcggaatttgaattcattctctctctccttcaattatgttatactggggacacctgaaagcttcctcaggatttatcaactgtaactcctacaagctttcggtttattcagttctagtcttcagaaggggttcttcatgccttgcgtctccttactaatctgaatattgatcatcaagatttaaatgtcaatttnaatcaagctatgacatacatcttgagatatataataatacaaaaactgagaacttgatgaacaaaaaaaattattcttgactatgttaaaaaaacgaaggtgaactttttttttatgcaaacaatgtttcaattgctgacacaaaaccctcaaataaagaggttcttgaatca

SEQ ID NO: 9367 - DNA, 378 bp, Glycine max
  Clone ID: LIB3092-044-Q1-K1-A7
cccacgcgtccgcccacgcgttcgggaagaaaggcttttgggcaagatatcggggagatttggctccatttgctaaattccagtcaggttgatgtggctcatatgaactgtatgaatataaacgtcctttgacaaatggagctgagccaaagcagtgactagcgcaagaaggcatatgaagcaaatgaacatttatgaagatagttatgctatagttggctttatggtactagaggcagactgctgcagaccgcaaaataaggtttaacaatcaatcatacgctgcaaacttaaaaatgtgtttttaactattggatgtttatgttcaatgaatacaaattaacatatctttgcaagttaagtcaagcgaaagctgaa

SEQ ID NO: 9368 - DNA, 459 bp, Glycine max
  unsure at all n locations
  Clone ID: LIB3092-044-Q1-K1-A8
gcggtcactgctctgtttcaccgagtttgggcgtttagatcagatccaaatcgtgttctcttccgttggcaaaggtggcaactcaaatgagcaagaagagaaagtttgttgcggacggagtgttctttgccgaactgaacgaggttctgacacgtgaattggcggaggacggttactccggcgtctaagttagggttacgccgatgcgcaccgagatcatcatcagagccaccagaatccaagccgttctaggtgagaagggaaggagaattagggaacttacctcagtggttcataagaggttcaaattccccgaaaacagcgtcgatcgttatgctgagaaggtcaacaacataggcctgtgtgccattgctcaggccgagtcgcttcgctacaaactttctcggtggcctcttcgttcgcagggcttgctatggtgtnttaagatttgtgatggaa

SEQ ID NO: 9369 - DNA, 499 bp, Glycine max
  unsure at all n locations
  Clone ID: LIB3092-044-Q1-K1-B1
gctcaaccgccgtgtcgtcccacgcgtgcgcccacgcgtccgcccacgcgtccgcccacgcgtccgataaaatcaactttcattccgtttcggtctttcttgccctttgccaaattttacattaattacatgacatggcataatacacatcacaccaccctctctctctatatataccgtacctctcagattcagacagaaactcaattgcttcttctttttgtttcctgtaatccaggaaatgaaattgctagcttaatattgatctgtagagaagacaagggaacttgcttgctatggcaactctgagcaattcaactaatatcttttggcaagattgtcaagtaggaaggcttgaaaggcagaagctacttaaccaaaagggatgtgttgtatggattactggactcagcggatcanganaaagcacattggcatgttccctaagcagagaactgcactcanagggaaagtaatctatgtccttgatggagataac

SEQ ID NO: 9370 - DNA, 352 bp, Glycine max
  Clone ID: LIB3092-044-Q1-K1-B10
gcccacgcatacgaccatgtgcccatcatacttaccgataacgatttatcaacactatatcctgctattatccgggatgatcttatgcataagttctactgaccacctacaatctacgatcatatattctatctaccatgaaatattacaccctgacaattttcctaaagactacattgtcaatcttgctgacaccttacccgatcaatctatttataactttgatacacttatgacttgcacatatgatgatgaacaattgtactaaatatattttgcataatgatacttcattgataataatcttataaacttcaaataaacacctccaatcttcgatcaacccaatatt

SEQ ID NO: 9371 - DNA, 421 bp, Glycine max
  Clone ID: LIB3092-044-Q1-K1-B11
accggtccggcccacgcgtccgcacttccttgcctactacacattcttcatcacttcattcaacatttctccccttagcttgtggcaccaatgggtgctgcggttagtgctgcagtctcttttccatccaccaagtctacctctcttccaagcaggacctccctcattgccccagagagagttgtgttcaagaaggcttcattgcaaaacagagatgtttctagcagtggacgggtagtttccatcagagctcaagtcaccactgaggcaccagccaaggttgaaaaagagtccaagaaacaggatgaaggtgtggttgtgaacaagtttaaacccaagaccccttacattggtagatgcctgctcaacacaaagatcactggggatgatgctccaggagaaacttggcacatggtcttca

SEQ ID NO: 9372 - DNA, 311 bp, Glycine max
  Clone ID: LIB3092-044-Q1-K1-B12
aaaaaattttctcatcctatatttttaaaaataacacgagcctatttcaggactctttctaccccatccttcacttacaaatcccacaatcttatcccatcatccccctaattctcaaaatcatcattaccaataccctcaccaaacaatcctactcccaaaacccattttactacccaaacacattcaaatacttattcccattctctttctaacccccttactacctcactatccaattcccaaattaactaccctattacacatctatactttcctcctacccataaacctttaccataaacccttaa

SEQ ID NO: 9373 - DNA, 423 bp, Glycine max
  Clone ID: LIB3092-044-Q1-K1-B3
cccacgcgtccgggttgactcttactttagagacatctatcctgagacatttacagatctgtgattgttgcagacaacaaagtggtgaacaagatttgggagtcattataaaagtatacaaagaagcttgcccgtgctgaagcagtatatgcagggtcgaaaacaactgccaaaccagaatgttcaagacctacaaacaagactggcttccttggacttgttggtaaaaaggtggattccatagaatatggcaacgagaagattaaatgaactcgatgccagaatggaatctgatcaaaaggtcactcttagagagaagcagcaagattttggtgtaatatttttctcaatgtatgttgttgcaacatctgcatctcacatgttacatgctcaaaatgttgacacttggtcagtttttgatgc

SEQ ID NO: 9374 - DNA, 474 bp, Glycine max
  Clone ID: LIB3092-044-Q1-K1-B4
cccacgcgtccggccaacctgagcatatacgacccgcaagtaaccgaggaccaaatccagagggatctatgcatgaacaagtttgattgggatcatcctatccacttgcagcccacaagtcctactactgtgaagaaggtcagtgttgtttgggatgcctatgaagcaacaaaggatgcacatggcctttgcattctaaccgagtgggatgagttcaagactcttgattaccagaagatatttgacaacatgcaaaaaccagcatttggttttgatggcagaaacattgtggatgctgataagttgcgtgagattggcttcatagtttactcaattggtaagccactggacccatggctcaaagacatgcctgctgtggcataaaatagatcattgatcaagtacaatgcaatatcagtcaaatgttgaggcaatcagtttgattccttattaatttttgtaagagttttcttt

SEQ ID NO: 9375 - DNA, 276 bp, Glycine max
  Clone ID: LIB3092-044-Q1-K1-A10
tgccacgcctccgtacacgcttccagacgaactgttcgaacatcacacattcgtgcacttcatgcactcaaatccttctctaggaactcttgctacatttatagaagaaagacacaccataagatagacataaccatacccttccaccattattcacagaactgataatgccactgaactcattatatctccattggctctaacatctcaattcccacttactatatgaaccctataataagtcaaacttaagattccccattctgaatttatata

SEQ ID NO: 9376 - DNA, 398 bp, Glycine max
  unsure at all n locations
  Clone ID: LIB3092-043-Q1-K1-G2
aacaatttaccagctatacttgttccttttgaaggttagaagtgctacaatacaaacaatggcagctactcaggaagatgtgaagcttttgggtattgtgggaagcccatttgtgtgcagggtccagattgcccttaagttgaagggagttgaatacaaatttttggaagaaaatttgggcaacaagagtgatttgcttctcaaatacaaccctgttcacaagaaggttccagtgtttgttcacaatgagaagcccatagcagagtctcttgtgattgttgaatacattgatgagacatggaagaacaaccccatcttaccttctgatccctaccaaagagccttggctcgttttctgtccaaattcatngatgataagattgtgggtgctgtatgga

SEQ ID NO: 9377 - DNA, 273 bp, Glycine max
  Clone ID: LIB3092-043-Q1-K1-G3
aacaaacctttcataacttcttttcttcctccttgttcttcgggttgctgttgtatacgcatcgcgcatggcagctgtccttcgactctggattccacgatggaagatattatcttgtccaccctgacttgatagcaaatctttcatgaaattgagaatagctgctgctaataaacaagcttccattgatatgggggagctcaccgcgagtggtgagtatgtgactatcggctaatttccttcatccaggacatattactcaagtaaagtttc

SEQ ID NO: 9378 - DNA, 449 bp, Glycine max
  Clone ID: LIB3092-043-Q1-K1-G4
ccttgatgagaaggaaaggtttagggatctgagggctcagaagagtcttaacaccataagacctagctcagaggaagtgaggacttattttaggaaggaggaggttctcaggtactcaattcctgacagagccttttcatatactgcagctgatggtaaaaaatctattgcggcacccttgagaagatgtggtggtaagccaacatcaaaagcccgagaccattttatgttgaaacgtgatcgaccaccacatgttacaattctttgtcttgtaagagatgctgcagctagattacctggaagtattggcactagagcagatgtttgtactttaattcgagattctcaatatattgttgaagatgtttctgatgcacaaattaaccaagtaggtagtggagccttggatagattgcattatgaacgtgatccttgtgtacaatttgatg

SEQ ID NO: 9379 - DNA, 362 bp, Glycine max
  Clone ID: LIB3092-043-Q1-K1-G5
cgcgtgctacagagaactcttgcacgcgcttgtagccgacctcgccgaagccggcaaagccaggggccgcgatgccgacgaccaaggcgcctttaactgtctatcacgcttcctatctaactccaacctcgtcgataccaaactgggcctcgacggtccaaagatcgtgcagaaatgggttctctttcagatcggcccgaacgtgcgattgggcctacctaaattcttagaaggatccaccatccgaaccttgcgtctcccgtgctctctgatggctatagattaccagagactgtacgatttcttctacgagtctttcggtctagtcttagacgacacggatcgaatgcggatcacgcgcg

SEQ ID NO: 9380 - DNA, 176 bp, Glycine max
  Clone ID: LIB3092-043-Q1-K1-G6
acgcgtccgcccacgcgaccaagaactcttgcacgcgcatttatccaaccacgaataagccaaaaatacctgggtgcactacaacggctaacaatcctcctctaacagtcaataacgcaccataactaactcctacccttcatatgccaaaccggacctcatcgaccccaagacac

SEQ ID NO: 9381 - DNA, 458 bp, Glycine max
  unsure at all n locations
  Clone ID: LIB3092-043-Q1-K1-G7
gatcccaccactctgaatagacaggggaatgatgtgggaacacagtacagatctggaatatactactacacaccggaacaagagaaggcggccaaggagtcattggagcaacagcagaagcagttgaacaggaagattgttactgagatccttcctgccaagaagttctacagggcagaggagtaccatcagcagtaccttgagaaaggtggccgatctggtttcaagcaatctgcttctaaaggctgcaatgatccaattcggtgctatggttaactgccataaatgaattgccatcaaagatcaatgcaaccggttcttcagatattgaaagtccatangttttgttgtatttgntaatatatcaacaaagcttgtgcacactgtatttgaagttgaagatggacatagccataaattcagttgtagagttgtatattgtcttttatatataatat

SEQ ID NO: 9382 - DNA, 312 bp, Glycine max
  Clone ID: LIB3092-043-Q1-K1-G8
gaaaccatgagtagcgccgcctttaaggtcggtgtgttggggagtggaatttcaggagccgtgcgtgcttcaactcttgccagaaatggggtttctgttactctctttgagtcagctagaggccctggtggacgcatgtcccaaagaagagagagaactgaagatgggacggagctgcattttgaccatggtgctccatttttctcggttagcaagtctgaagttttacatctggttcaagagtgggaatcaaggggtctcgtagctgaatggaaagagaagtttgccctcgtcgattttcacacacttaaa

SEQ ID NO: 9383 - DNA, 403 bp, Glycine max
  Clone ID: LIB3092-043-Q1-K1-G9
ggcgggtgcagcggttatgcgaatggaaacccggacccgaacgagatgggagaggttaggacctagaatataggatgcgaagtcgaactcatgcaaggactaagctatcgctaccttaatatctgactgaacacagaaatatactgcagcagatggcgaccacatgattacggcaccaaacacttgatccagcggaacgcgaacttcaaccactagcgactattcaaggtcaacactgactctatcaacataattcacaacggtctgactctcacgaaatgctgcagctagattaccgacctggacggaaactggtgcatatgggaatacaactatcgtgacttctacgtatctcgtgacacatacgcttgatactccatcgatctaatccgtcatcagggca

SEQ ID NO: 9384 - DNA, 448 bp, Glycine max
  Clone ID: LIB3092-043-Q1-K1-H1
cgctccttcgttgtcaaagcctcctccagcgagcttccgctggttggtaacaccgcaccggatttcgaagcagaggctgtgtttgaccaggagtttatcaacgtgaaactatctgattacattgggaagaaatatgttgtgctcttcttctacccgttggacttcacctttgtctgccccacagaaatcactgctttcagtgaccgacatgcagagttcgaggcactaaatactgagatattgggtgtttcagttgacagtgtgttctcgcaccttgcatggatccaaacagatagaaagtcaggtggccttggtgacttgaactatcctttgatttctgatgtcaccaaatccatatcgaaatcttatggtgttctcattcctgatcagggaattgcattgagaggatgggtcattattgacaaggaagggggtattcagcattcta

SEQ ID NO: 9385 - DNA, 350 bp, Glycine max
  unsure at all n locations
  Clone ID: LIB3092-043-Q1-K1-H10
gttaaaagccttagtcttccctacaactccaaacacaaagacatcatgatccatggctgcctgcgtctgcactgtcggagctgtcaacagagctcttttgaacctgaatggttctggagctggagcttcagctcccagttcagccttctttgggaccagcttgaagaaggttattgcctcaagggtccncaacagcaaggtttccggtggaagcttcaagattgttgctgtagaagagaagaaagagattgaagagacccagcagaccgacaaggacagatggaagggtcttgcctaagatatctcaaacgaccaacaggaccataccaagaggaagggtttgggttgac

SEQ ID NO: 9386 - DNA, 466 bp, Glycine max
  Clone ID: LIB3092-043-Q1-K1-H11
gttaaaagccttagctttccctacaactccaaacacaaagacatcatgatccattgctgcctgcgtctgcactgtcggagctgtcaacagagctctattgaacctgaatggttctggagctggagcttcagctcccagttcagccttctttgggaccagcttgaagaaggttattgcctcaagggtccccaacagcaaggtttccggtggaagcttcaagattgttgctgtagaagagaagaaagagattgaagagacccagcagaccgacaaggacagatggaagggtcttgcctatgatatctcagacgaccaacaagacatcacaagaggaaagggtatggttgactcccttttccaagctccacaggatgctggaactcactatgcagtcatgagctcctacgagtacctcagcactggacttcgccagtacttggacaacaaaatggatggattctacatt

SEQ ID NO: 9387 - DNA, 151 bp, Glycine max
  Clone ID: LIB3092-043-Q1-K1-H12
ttcgacccactcttcctcttaaaagccatagtcttccctacaactccatacacaaactcatcagcacacatttaaacctgcgtctgcactctcctaacattcaacaaagctctaattaaccttacatattcttaatctatatcttcacctc

SEQ ID NO: 9388 - DNA, 384 bp, Glycine max
  Clone ID: LIB3092-043-Q1-K1-H2
cgctccttcgttgtcaaagcctcctccagcgagctttcgctggttggtgacaccgcaccggagttcgaagcagaggctgtgtttgaccaggagtttatcaacgtgaaactatctgattacattgggaagaaatatgttgtgctcttcttctacccgttggacttcacctttgtctgccccacagaaatcactgctttcagtgaccgacatgcagagttcgaggcactaaatactgagatattgggtgtttcatgtgacagtgtgttctcgcaccttgcatggatccaaacagatagaaaggtcggtggcctttgtgacttgaactatcctttggattctgatgtcaccaaatccatattcaaatcttatggtggtctcatttct

SEQ ID NO: 9389 - DNA, 448 bp, Glycine max
  Clone ID: LIB3092-043-Q1-K1-H3
cccacgcgtccgtttttcttcatcccccaaagtttcaatctttgtattcgattcaccctttctgtctctccatggccacttgtgttgatgccccaacccctctttctcggaagcctaacgggtcccaatccgatgatcattccttcaattacatgaaattctgccgacccactttctctgatcgcgttccctgcatacccatttgcaagaatcgtgacactgccttcacacgcgtggaggagtttgacacatgtgtggaggataatgatgatattgaggttgaggttgtggagggtgttgatctttggttgaagattcaagaagaggcaaggttagatgttgatcaagaaccaattttatccagctactatttcagttccattttgtctcacaaatctttggagagtgccttggccaaccacctctccacaaaattgagcagcttgag

SEQ ID NO: 9390 - DNA, 439 bp, Glycine max
  Clone ID: LIB3092-043-Q1-K1-H4
gcgggggaatatggatggggaactacacataatgttatttccgttcccaggtcaggggcacttgataccaatgagtgatatggcgagagcatttaatggaagaggggtgaggacaaccatagtgaccactccactcaacgcagccactattcgtggaacaataggaaaagagacagagacagatatagaaatcctgacggtgaaattccctagtgcagaggctggtttacctgagggatgcgaaaatacagagtcaatcccctcccctgacttggtactgactttcttaaaggcaatcaagatgttggaagcccccttggaacacctactccttcaacaccgtcctcattgccttatagccagtgctttcttcccttgggcatctcattccgccactaaactcaaaatccccaggcttgtctttcatggcaccggtgtc

SEQ ID NO: 9391 - DNA, 462 bp, Glycine max
  Clone ID: LIB3092-043-Q1-K1-H9
aaaaaaaacatggtggtcatattttcgagattctctgttggaagaaaggtccaccgacgaacgcaaagtgccctgtatgagagggaagtgaggcccccaaactcagaggctgctgctgcagttgcaagtgctgcaactgccacttctcatgggattgaagtggctgtggagtttaagccagttgaacatccaattgaaccacttgacaatgataggcccattcagtgcccgttgccagaaccatctattcttaatgatggaagaatatggaaagaacgagtatctgctactgtgcgtagaataggggatctgccattgatgaaggaaggcggaacgcttgaatctgaagatgctcgagcaaggtcacgtacgtactggtctaatctgatgatcttaccatctgttagtgctccggagcataatcttttaaaacttcttgaaaagtgcaatgcttcacgcatc

SEQ ID NO: 9392 - DNA, 416 bp, Glycine max
  Clone ID: LIB3092-044-Q1-K1-A1
accacgcgtgcggattgcaccaactgcggaaaatgagtgcatgctctctctccttcaattatgtggaactatcaagacctggaaacgtcctcaggatttatcaactggaactcctacaagttttgggttatatgagttcgagtctgcagaaggggttcttcgtgccttgcgtctacttactaaactgaatattgatgggcaagaattgaaggtcaatgtgaatcaagctatgaaagaaatctggagcggtatgataagacaaaaactgagaacttgaagaacaaaaaaactcaggcaggagtaggtgaaaaaaacgaaggtgaacaaccttctaatgcaaacaaggatgcaaaggctgacacagaacccttaaattaagaggttcttgaatcatcaaacaatgaatcacatgatgt

SEQ ID NO: 9393 - DNA, 245 bp, Glycine max
  Clone ID: LIB3092-043-Q1-K1-G12
attataaccagattttccgtataacagcatgcgtaaactcatcagtacactctactcccggcgtttggacaaacctaacattaaacaaagctctaattaacgctacataaccctgtatcaatagctgaacgttccagatcaatatcgtcaagcaccacttattataacgtaattatcacttcggagaacatcaccaaagaaataagagtaagcttaattactggtactctacaatagtaaaaaga

SEQ ID NO: 9394 - DNA, 320 bp, Glycine max
  Clone ID: LIB3092-043-Q1-K1-E5
cccacgcgtccggaaaataaaaaagagaagattaaaaaacttggttttagcttctttgttattagtatattcacttcttcaatatcttggttctttgatattattattcgattgagcaaaaaatgggagttccagagagagaccctcttgcacaattgagcttgcctcctggatttagattttatcccactgatgaggagcttttggttcagtacctttgccgcaaggtttctgcccatattttctctcttccaatcattgctgaagttgatttgtacaagtttgatccatgggttcttccatgtaaggcacctttttga

SEQ ID NO: 9395 - DNA, 444 bp, Glycine max
  Clone ID: LIB3092-043-Q1-K1-E6
cccacgcgtccgagaggatccaaatccaagtacggttggcgagaaaatccgatcctgaaacacaccagaccctaaaacgcgaaataggttctcagaatttgcgaaggaaagagcgtatcggagatggagattcactacagtaacagctacttcgagaggcgccccatcctcaagtccaaggctcccgcagttaaatgggtcaaagaatgggttccccaagatcttgtgacgacgggagggaagtgcatgatcttaaaatgggtaacacaggataccgtgaagaccttgaaagaaaatgtgaaagagccttcagtgccaggaccagaaccagagccaactactgaagtactttatctttgcagctatgatggctgtcgaaagacattcatagatgctcgtggcttgaggaaacattctgacattcatggaaagaggcaatatgtt

SEQ ID NO: 9396 - DNA, 418 bp, Glycine max
  Clone ID: LIB3092-043-Q1-K1-E7
caagcatgcaacagaacttcagaacttctgggttgggttaaagatgtcttccagcattgtgcaccatcatgggatggagaggccttgatgagggaacttgatttcgtcagtaggatctttcatggtagtaaagacccgcgggggaggaaactttattggaagtgtgatgatctcaaggaaaaattgaaaagtggaaaagtggaatctaaggcagcatgcagggcaatattgatggttttccaagagcttgagctggactctccaaagagcctggaaaatgcagaaagtggaaagctaattgctccccaggaggcatgcaatagaattgctgaagtggtccatgaggctataagaaagatggaaatagtagctgatgaaaagatgagaatgttcaagaaggctcgcttggcttttgatg

SEQ ID NO: 9397 - DNA, 452 bp, Glycine max
  unsure at all n locations
  Clone ID: LIB3092-043-Q1-K1-E9
ggatttccaatccttggagttgagtggcagaagatggaaaatcctgagttacgaatgtcaatgggcatgggaccagatcaaaaaggtgtgcgtatcagaagaattgaacccactgctccagaatctcatgttctgaagccatctgatgtaattctcagctttgatggggtcaatatttcgaatgatggaacagttccattcaggcatggggagcgcattggtttcagttaccttgtctctcaaaagtacactggggatagagctctagtaaaggttttccggaatttacagatacttgaatttaacgtaaaacttgcaactcataagcggcttgttccagcacacatcaaaggcaggcctncttcttattacatcattgctggattntgttttactgcttgttctgtcccctatcttcgttctgagtatggtaaagattattgaattgatgc

SEQ ID NO: 9398 - DNA, 336 bp, Glycine max
  Clone ID: LIB3092-043-Q1-K1-F10
acgcacccatcaacagtttatcactatggaacctttctctcactcactaggtatcatatcaagggggagctgatctgcatttatatcgcaaagtagaaacaattatgctcgaaaaactcccaaatggtaaatactactacacttaaacactgataccgacttcatctagctttagcccatcttcatatgatagagccattttttatctactataactcattatcaaatggatgcgatatataatcccttattttctcatcaagaggcgtctctctggatcattacaaacacaatacacatttcttaagatgaaagattgctagatgcttattgaaa

SEQ ID NO: 9399 - DNA, 464 bp, Glycine max
  Clone ID: LIB3092-043-Q1-K1-F11
aagtgaggaaatgggaggtgactacccatcaaagccaatgtcattatgcgccaccatatgggatgcatcaaattgggctacatccggtggaaaatacaaagtgaactataagtatgcaccttttgtgaccgaattcaaggacctagtcctaaagggttgctccgccgatcccatccaagaggtttccggcaccgagtcttgctccgaccaacacgctgatctcgaggctcaagactatgccgccgtaacccccatgcgccgcctcgccatgcagcggttccgccagcgttacatgtattattcatattgctatgatacattaaggtaccccgtgccacaacccgagtgtgtcattgtaccctcggaaaaacaaaggtttaaggagaccggaaggttgaaattcggtggcagccaccgcaggcaatctcgacggaggggccgtacaacaactccggtggatgata

SEQ ID NO: 9400 - DNA, 404 bp, Glycine max
  Clone ID: LIB3092-043-Q1-K1-F12
aaaatattttagtggtggtagtatcacagtacgagtcaacttatccggacaatctaagccaggcattctggaaaagctaaaatcaatggaagagctgattgggctacttaacctgttatcaatggaagaacgttgcagattaatagcgtcaagccttgctcattctagcttagttatgacttcggagaacattacagaagaaataagagtgaggggaattacgggtagctccttttagtgaggggagccacctaggcagttttgtattcaatacccttgtagcagctctgctctgggttttcttatgaaatacactgtcctcataaatagcactattctattctataatcatcttttacttgtctcaaaaaaaaattaaaaaaataatttataataaaaattaa

SEQ ID NO: 9401 - DNA, 343 bp, Glycine max
  Clone ID: LIB3092-043-Q1-K1-F2
ggttaagtctgttgagatgcaccatgaggctttcacagaggctcttccaggtgacaatgttggatttaatgtgaagaatgttgcagtcaaggatctcaagcgtggttttgttgcatccaactccaaggacgaccctgccaaggaagctgccaacttcacatcccaagtcattatcatgaaccatcctggccagattggtaatggatacgcaccagtccttgactgccacacttctcacattgctgtgaagttttctgaaatcttgaccaagattgacaggcgatctggtaaggagcttgagaaggagcccaaatttttgaagaatggtgatgctggtttggtt

SEQ ID NO: 9402 - DNA, 347 bp, Glycine max
  Clone ID: LIB3092-043-Q1-K1-F3
caattcgcagtttgttacctcactttgcgctttttctctgcagtaatagggtaacaataaatggagaagtttaataagaagaacaacaagaagatgttgacggttgcagctagaatgctctcttctctctcctcctcctctccgttgcggcccaaccacgccgcttccgcttatgtctctcgaaacgcagtcattgatgaccgcagatccgatccttcctcccatcccctttttcccttcatacgttttgctactgaatcccttatccacccaatacaaaacagcattattcctgacatttctgcaactgctactgctgttaagaaccctacttctaagattgtcta

SEQ ID NO: 9403 - DNA, 402 bp, Glycine max
  Clone ID: LIB3092-043-Q1-K1-F4
cccacgcgtccgcctcgatgctcacttaaaccaacccgatgtcaccacgttttacacacatcatcctgtgctttcttcaacccaaccccaagtaatgttattatgattaccagttagcactcatcttgcactatcacaatccctccacttggacttgtataattaactaactaccatcatcttctattatggctttcctttccctattcaaaccatattctgtttcggttaaaaaaaaaaaaaaataaaataaattataaatataataaattttatataaaaaaataaatatataacattataatattatatattatattaaatattttaaatttaaatttaataatttttaatttatataaaaaaaaaaaagggggggcccttttaaaggacccaattttt

SEQ ID NO: 9404 - DNA, 460 bp, Glycine max
  Clone ID: LIB3092-043-Q1-K1-F5
cccacgcgtccgcccacgcgtccgaatggatgctactacacccaagtattccaaggccaggtatgatgaaattgtgaaggaagtctcttcctacttgaagaaagtaggatacaaccctgacaagattccttttgttcctatctctggttttgagggagacaacatgattgagaggtccacaaaccttgactggtacaagggtccaactctgcttgatgcacttgaccagattagtgagcccaagaggccctctgacaagcccctcaggcttccccttcaggatgtgtacaagattggaggtattggaactgtgccagtgggacgtgttgagaccggtgtcttgaagcctggaatggtggtgacttttgcaccaactggactgacaactgaagtcaagtctgtggagatgcaccatgaatctcttacagaggcacattctggtgacaatgtgggattcaat

SEQ ID NO: 9405 - DNA, 347 bp, Glycine max
  unsure at all n locations
  Clone ID: LIB3092-043-Q1-K1-F8
aattccaacaacaccacaatgggaagaagaccggcgaggtgttaccggcagataaagaacaaaccgtacccgaaatcccgtttctgccgcggcgtgccggagccgaagatccgaatctacgacgtgggaatgaagaagaaaggcgtggacgagttcccgttctgcgtgcacctggtctcgtgggagaaggagaacgtctccagcgaggctttggaggcggcgcgcatcgcatgcaacaagtacatggccaagttcgccggaaaagatgccttccacctgcgcgtgagggtgcatcccttccacgtgctccgcatcaacaagatgctatcgtngcgccgggccgacag

SEQ ID NO: 9406 - DNA, 464 bp, Glycine max
  unsure at all n locations
  Clone ID: LIB3092-043-Q1-K1-F9
ccttgatgagaaggaaaggtttagggatctgagggctcagaagagtcgtaacaccataagacctagctcagaggaagtgaggacttattttaggaaggaggaggttctcaggtactcaattcctgacagagccttttcatatactgcagctgatggtaaaaaatctattgtggcacccttgagaagatgtggtggtaagccaacatcaaaagcccgagaccattttatgttgaaacgtgatcgaccaccacatgttacaattctttgtcttgtaagagatgctgcagctagattacctggaagtattggcactagagcagatgtttgtactttaattcgagattctcaatatattgttgaagatgtttctgatgcacaaattaaccaagtagttagtggagcctnggatagattgcattatgaacgtgatccttgtgtacaatttgatggtgaaaggaaactgt

SEQ ID NO: 9407 - DNA, 150 bp, Glycine max
  Clone ID: LIB3092-043-Q1-K1-G10
ctattattgtcatatttatcattcatttttgctttgtgtttttcctaggggacatgatctccttataattaagtgataattaactatatatgtgtaagaaaaaggattgaatttcatgcaatcccataaccggtatttgtaccttttatc

SEQ ID NO: 9408 - DNA, 462 bp, Glycine max
  unsure at all n locations
  Clone ID: LIB3092-043-Q1-K1-G11
cttggtccaaattgctgnctatatatgcttttgccttccagaaaaagggaattctaggtccaaaatttgtatactttttggaattgagtaggtcttatttttggtgagtggctgtggagctggagcttcacctcccagatcagccttctttgggaccagttagaataacgttattgcctcaagggtccacatcagcaaggtttccggtggaagcttcaagactgttggtgtagaagagaagaaagagattgaagagacccagcataccgactaggacagatgcaagggtgttgcctatgatatctaagactaccatcaagacaatacacgaggaaagggtatggttgactcccttttccaagctctcaatgatgctggaacttactatgcattcatgagcttctacgagtacctgaccactggacttttgcagttcttggtccacaaaatggatggattcta

SEQ ID NO: 9409 - DNA, 451 bp, Glycine max
  Clone ID: LIB3092-043-Q1-K1-E4
cccacgcgtccggcggaaggaggaatcggcggtgctcccccggcaatcgctcatcggcgccggcgaacttcagatcgcttctcttgcttctccgaggtttgtgccttgcggtttttttcagaggcatttgttgttggaaatcttgcagtacgggtttgtttggctcaccggtggaaaattgttatatatgggctgaggtgtgcttttcatgggaggtgtggaggatgaagaaccagctttgaaacgcatgaaattatcctctaaaggattagttggtctctcaaacggttcgtcttcagtggagtctgttggaggctcttctagtgacttgatggctcggcccctgtcatctgaaggggacggcgaagttattggttccaaaggggttatgaaacgggaggaatttgttaggataatcacaaaggcatttgattcgcttggttacaagaag

SEQ ID NO: 9410 - DNA, 281 bp, Glycine max
  Clone ID: LIB3092-043-Q1-K1-D10
cacaacgtccccttttacatggaatttgcatttctacaaatagcaagcgatacctaataatggaggcgggtccatcgactattcaaggagatcggaactcaaaccttatgaatcaagccttccaacatcaacagcttactcaccaaatcaaaacttaccaaagaaattttatgaattcaattatagctcctaaaactaaccctttatccatatggaaaactcatcctaaaagaataatgtctgaaatgcataagaaacttataccaccttattcactatac

SEQ ID NO: 9411 - DNA, 353 bp, Glycine max
  Clone ID: LIB3092-043-Q1-K1-D11
gacaaacgtgctcttttgcatcgtcctacggttactaatgttagcatgcgtaattatgaaggggcggaggtgctaaccactattgacggagactagaatccacactttaagaaacctctcggcatcaatgaaaagtattctcaggaaaggaaaactttccaaggaactatatcatagtcaggagtaactcctgaatctaaacctttccataaaattgaaactgctcctcatataaataattgccaattagagaagatagtgcaactaccatacgcagaaaacaatcactaggactctagatgtcacacaatcagtgcatcagtgaccaatgctccaaacgtagccattttaaa

SEQ ID NO: 9412 - DNA, 419 bp, Glycine max
  Clone ID: LIB3092-043-Q1-K1-D2
ggacgcgaggcagatgaagttgaacccatactggatgctctgcctaatctggagcagtttatttactgctcttctgccggtgtctatctcaaatctgatctattacctcacgcagagactgatgcagttgatcctaagagcagacacaagggaaagcttgagacagagagtttgctacaagcaaggggtgttaattggacatctataaggccagtctacatctatggacccttgaactacaaccctgttgaagagtggttcttccatagattgaaagcgggacgcccaattcctatccccggctcaggaatacagataacccaacttggtcatgttaagggatttgcaaaagcttttatccaggttcttggtaatgagaaagccagcaaggtagtattcaacatctcgggagataagta

SEQ ID NO: 9413 - DNA, 437 bp, Glycine max
  Clone ID: LIB3092-043-Q1-K1-D3
atcccctgcacacgattctcacaaacacctcttgagaaagaaagaatggctgccaacacatcgatgagttctgccatctcagccttcccatatctcctatcctcctcaaaatccagatttgccgcagcagatcctctttccagctttgttgtcaccaatgcctcttcttctcgcttttccatgagtgctgactggatgcctggccagcctagaccccactaccttgatggttcagcacctggtgactatggattcgaccctgatcgtcttggtgcactaccatagaatgttgacaggttcaaagagtcagaactcattcactgcacatgggccatgcttgctggaccagggattatggttccagaggcattgcgcttaggcaactgggtaaaggctcatgaatgggctgcagatcctggtggccaagcaacctacct

SEQ ID NO: 9414 - DNA, 335 bp, Glycine max
  Clone ID: LIB3092-043-Q1-K1-D4
aacacgcgtgcgcttgtctgcgtaattcgcagctagggaaaatgaaatggatgcctaataatagaaacgtgtcggccgagtcgccgaggggatcggtactccgaccggtatttttaagccttccaacaacgctaacttatcaaccggttcggactggggcgaagtgtattgatgtttggaataatagttttgaggaggaaccgtgattggagaggtgtggagcaaggcaggggaataagggctaagatgtttgagaagcttagcaaggagaattcactagacagcctaagcttggacttccgatctagtgtgactattggaactagctaagtgag

SEQ ID NO: 9415 - DNA, 321 bp, Glycine max
  Clone ID: LIB3092-043-Q1-K1-D5
atcccctgcacacgattttcacaaacacctcttgagaacgaaagaatgggtgccaacacatcgatgagttctgccatctcagccttcccatatctcctttcctcctcaaaatccagatttgccgcagcagatcctctttccagctttgatgtcaccaatgcctcttcttctcgctgttccatgagtgctgactggatgcctggccagcctagacctcactaccttgatggttcagcacctggtgactatggattcgaccctcttcgtcttggtgcagtaccatagaatcttgacaaggtcacagagtcagaactcattcac

SEQ ID NO: 9416 - DNA, 331 bp, Glycine max
  Clone ID: LIB3092-043-Q1-K1-D6
cggacgcgtgggggctggatttcttcttcttggcttcattggtgttcttatatggtgcatgagaaggcaaaagagaaagctgcctgtgagtggtggttatgtcatgccatccactcttgcctcatctcctgaatcagattcatccttttttaagacacactcctcagctcctcttgtacaaagtggctctggcagtgatgttgtgtacacaccatctgaccctggtggactaggcaactcaaggtcatggttttcatatgaagaactaatcaaggtcacaaatggtttctcaactcaaaatcttttgggcgaaggttggattgggtgtgtg

SEQ ID NO: 9417 - DNA, 442 bp, Glycine max
  Clone ID: LIB3092-043-Q1-K1-D7
attatcatcccctcctcttccttccttctcctctcattccatacctcaacaaaacaaggttcagagacttttccgattcctggaagaagagaagagaaaacctaaatcacagatccatggcggaagaacaccgatgtgaacctcccgaaggtcaccgactctgcgtcaacaactgcggcttcttcggtagcaccgccacgatgaacctctgctccaaatgctacagcgcgatccgtttgaaggagcaagaagaagcgtcgacgaaatccacaatcgaaaccgcgctctcttctgcctcctcggcgaaaccgtcgtcgtccacgtcacctccgccgtcggcggtcgatgtgctcatggaatctccaccgccgtctgcggcggaggttgaggttgctgtcacggtcacggtcgcggtggcgtcgagttctatttccataaactc

SEQ ID NO: 9418 - DNA, 244 bp, Glycine max
  Clone ID: LIB3092-043-Q1-K1-D8
acgattatgattccctcctcttccttccttctcctttcattccatacctcaacaaaacaaggttcagagacttttgcgattgctggaagaacagaatagaaaacctaaatcacagatccatggcagaagaacaccgatgtgaacctcccgaaggtcaccgactctgcgtcaacaactgcggcttcttcggtagcaccgtcacgatgaacctctgctacaaatgctacagcgcgatccgattgaa

SEQ ID NO: 9419 - DNA, 405 bp, Glycine max
  Clone ID: LIB3092-043-Q1-K1-D9
cacacgcgagctcgttacgtaacattgtgctttttctgagaatcaagtggatacctaataagggagacgtgtaagacgaataacaataagaatatgtacatcgtagcagctataaagatattccaacatcgacaacttatcagtggcttccgaatcaagataattgctcttatgtatgtcataacacattcaaagatgaccgcgaatccgatactttctagcatgccatacttcctacaatatgatatgctactgaatcctagattcgaccattcactagcagcattatttctgactttacagctagtgtaactgttggaactaaccctactaataacatgttctattattagcacaaccactaatgatttgacgcatgttacctaagcatgaggtcatgtgtct

SEQ ID NO: 9420 - DNA, 416 bp, Glycine max
  Clone ID: LIB3092-043-Q1-K1-E1
cccacgcgtccggaaaaaaaaaaagagaagaaaaaaaaacttggttttatcttctttgttattattatattcacttcttcaatatcttggttctttgatattattattcgattgagcaaaaaatgggagttccagagagagaccctcttgcacaattgagcttgcctcctggatttagattttatcccactgatgaggagcttttggttcagtacctttgccgcaaggttgctggccatcatttctctcttccaatcattgctgaagttgatttgtacaagtttgatccatgggttcttccaggtaaggcagcgtttggagagaaggagtggtacttcttcagtccaagagacaggaagtacccgaatggttcacgaccaaacagagttgcggtttctgggtattggaaagccact

SEQ ID NO: 9421 - DNA, 458 bp, Glycine max
  unsure at all n locations
  Clone ID: LIB3092-043-Q1-K1-E10
ggatgaggcgccactcgatgtttccatttgcctgcatgcctttggtattgtggggtgtggttcgtttagtggtgtcaagtcttgcgaacgtgagggtgcatgagtggtaatcgggatgtttttgttgcacggctccatgcttgcgcatgcaacgtgtgacatgcatccttttcattgtcaccttagccttcgtggcttaggtgctgacgattggttcctgtgttgcctacctaccaaacggtattcgtgtggctagtcagacccattccatccaggcctctttgttggggacgctggaggatttcaaagtcccacacgtgaaccacgttagtcgtccatcataacggcttcctgtggcacacgtgtggtgattgttctctcggatgcggtgcatgcagtgaacgtgggtggtctagtgcccncacattgttccttaaaatcggttgtctcggatgacg

SEQ ID NO: 9422 - DNA, 479 bp, Glycine max
  unsure at all n locations
  Clone ID: LIB3092-043-Q1-K1-E11
gggggacaggaattgatgtgcgcagtaaatcaagaacaatatcaaagcctgttgaacatccctgtgagctccctaaatggaactatgatggatctagcactggacaggcaccgggtgatgatagtgaagtaatcctatatcctcaagcaattttcaaagatcctttccgtggtggtaacaatattttggtcatttgcgattcttacaccccacaaggtgagcctatccctacaaacaagagacacagagctgctgaaattttcagtaacccaaaggtccaagcagaagttccatggtatggaatagaacaagagtacaccttacttcaaacaaatgtgaaatggccattaggttggcccgttggtggctatcctggtcctcaaggtccttattattgcagcgcttgggcagacaagtcatttggacgtgacatatctgatgctcattacaaggcttgcttatatgctggaantaacatc

SEQ ID NO: 9423 - DNA, 438 bp, Glycine max
  Clone ID: LIB3092-043-Q1-K1-E12
aaaacacagtagatttagaacaatcacaaagttagtcaaccaacccagacaacttaatacagggagccttgaaaaaccaaacacaatacaagcgccgattgatctacttaacctgatatcaactccagaacctatcataaaaaatccgtcaagccttgctcactctatcttagccatgacctattataacactacacaagaaataccaatcacgacaatcacgatacacacatcttattgaattgagccacatacacagatacatactcaatacccttggaacagattatgcactagagtacccttatgaaacacactgatcttataaaatcctcaattctatcctataatcaatttcaactttttctatatacttaatatttcatcactatatcatacaattcattttttactgacatattcttatacttataacaa

SEQ ID NO: 9424 - DNA, 416 bp, Glycine max
  Clone ID: LIB3092-043-Q1-K1-E2
ggttaagtctgttgagatgcaccatgaggctctcacagaggctcttccaggtgacaatgttggatttaatgtgaagaatgttgcagtcaaggatctcaagcgtggttttgttgcatccaactccaaggacgaccctgccaaggaagctgccaacttcacatcccaagtcattatcatgaaccatcctggccagattggtaatggatacgcaccagtccttgactgccacacttctcacattgctgtgaagttttctgaaatcttgaccaagattgacaggcgatctggtaaggagcttgagaaggagcccaaatttttgaagaatggtgatgctggtatggttaagatggttccaaccaagcccatggtggttgaaactttctctgagtatccctcccttggtcgttttgctttta

SEQ ID NO: 9425 - DNA, 451 bp, Glycine max
  Clone ID: LIB3092-043-Q1-K1-E3
caattcgcagtttgttacctcactttgttttttttctctgcagtaatagaaaaaaaagaaagagagaagaagaagaagaagaagaagaagaagatgttgagggttgcagctagaaggctctcttctctctcctcctcctctccgtggcggcccaaccacgccgcttccgcttatgtctctcgaaacgcagtcgttgatgaccgcagatccgatccttcctcccatcccctttttcccttcagaggttttgctactgaatccctgatccacccaatagaaaacagcattattcctgagattcctgcaactgttactgctgttaagaaccctacttctaagattgtctatgatgagcacaaccatgaaagatttcccccaggtgacccaagcaagagggcatttgcctacttcgtccttacaggtggtaggtttgcttatgcctctttggtcc

SEQ ID NO: 9426 - DNA, 363 bp, Glycine max
  Clone ID: LIB3092-043-Q1-K1-D1
cggacgcatgcaggcttgatttcacctactcggcttgatcggtgtacggggatgctgcatgagaaggcataagagaaagctgcctgtgagaggtggtaacgacatgccaaccactctagtctcatatcctgaatcagattcatactcatgtaagacacactgattaactgctcttgtacaaagaggctctggcagtgatcatgtatacacaccatctgaacctggtggactaggcaactcaaggccatggaagagatatgaagaactaatcagggtcacaaacggcttatcaactcaaaatcttcaggactacagatgacccagctgggtgaataaaaggagccttcctgatcggagagacat

SEQ ID NO: 9427 - DNA, 445 bp, Glycine max
  Clone ID: LIB3092-043-Q1-K1-B3
acggccacgcgtccggggattggtgagcaagaagaagatgatttcttcactgcagacgaaaatatgcagcgaaaaaaacttgatgttgagttggaggagacagacgaacatgtgaagaaacgggagaaggcagcatatagcatatatgcatgtctcttgaccggattggtatgtcatatggaatcatcaactttggaaggtcttgagaatttcctgcaggttttattacctggtggcttcttctgcctgcttcgtgcacattatgaaaattcaggtgttagctgaacgtgagcaaaaaattcaaactgaagtgcaagaaatccgaaaggtgttctattgtgatctctgcaacaagcaatacaaattggcaatggaatttgaagcacacttgagctcttatgatcacaatcacagaaagcgtttcatacaaatgaaagaaatgcat

SEQ ID NO: 9428 - DNA, 356 bp, Glycine max
  Clone ID: LIB3092-043-Q1-K1-B4
aggatattcagctggcaagaaggattcgtggtgagcgtgcttgagttggtgcgttctgtgtttgtgaagatggattgttggtggctgcggatggtgttttgttactaagttttctttttgttgaagcctataggttattagggaaaaataggtgtttacttggtagtcatattaattgtcattggcaaatactgcctaagacactgtgaaggtctggttgttagaaatttggcatgtatttgatttttttggatcctttatttctcgttttatttctggttgtgcagccactttgggaattgtattggacaactttctgttgccatctaatctagttgaagctagcttatcgtgtc

SEQ ID NO: 9429 - DNA, 391 bp, Glycine max
  Clone ID: LIB3092-043-Q1-K1-B5
ggaattatctgtattttgcaatttgcaatgatatttggttttacattgtgtctatctggctaaaataataatggttggattatttttctttgtcatgaattgtttctgcaggtacttgaaaaggggtgtgaatgatcgggggagggttgctaatgatgttgagacagagcagattgtccttgatgaagaatcaggctcttgcaagggaaagatgagttcagttgtgcaaatgcgtggatcaataccacttttctggtcacaagaagcatcaagatttagccccaagcctgatataaatatgcagaggtatgatccaacatactcagcaacataattgcattttgaagacctaacttagaaatattgcaatccaattattgggctgaatttg

SEQ ID NO: 9430 - DNA, 465 bp, Glycine max
  Clone ID: LIB3092-043-Q1-K1-B6
gtgtgcacccattgatgacaagcaaccccattgcatggaagcctaagaggaggagaagacgaagaggacaagggtaactgaatcgccgcttctgcagcttcgttctttcgtttttgtttcatctttttagcttcagagggtaaataaaaaatggaggttttggtgggtcccgctttcaccatcgacgttccctcgtctccgccgcagcatgccggttccgatgatcggatctttcttaacgtgtcacccgaagaaggtgatgggtcgaactttcgtatttcgggcccacccaagttcttcgccggcggcgagtcggagagttcgtcgtcgatcggaacccctgattacagcgacaacgaagaagaagaagaagtgcagaaccagttaaagatacgaactgggttgggttctttggatgctttggaagaatctcttcccatcaagaggggattgtcgagtcatttt

SEQ ID NO: 9431 - DNA, 206 bp, Glycine max
  Clone ID: LIB3092-043-Q1-K1-B8
cccttgacttggggcgcacggtactgtgaaatattatgcatggtatcatctctaggtgaaatgctactaatttttcattttgttgaaacctatatatattcctgaaaaatccgcagataacttcctagaatactaattgacattgctaaatacttgcttagacactgtgaatgtatggttgaaagaaatttttcatgtatttaatt

SEQ ID NO: 9432 - DNA, 458 bp, Glycine max
  Clone ID: LIB3092-043-Q1-K1-B9
cctttcgctacttgcttcacctttcttcatatgaagaccaaattctgcctcaacaaaccaagagtcaaggagatgatgggtgcatgctgcaagagaagacaatccaacataaaattattctcttcaagttctgacctgtcaacctcttctttccttcacatgaagctctccactcagtttcatcaagttttcaagcttattgacactaatggggatgggaagatctcaatcaatgagctcagtgaattgctctcaagccttggatacaacaagtgcactgctgtcaaggaagctgaaggcatggtgaaagtgttggacttcaatagagatgggtttgtggacttggatgagttcatgattgtcatgaatggcatggaagaagaaaaagaagagaaatttggaagtggcatggagcatgatggtggttacctcatggatgcttttcttatctttgacac

SEQ ID NO: 9433 - DNA, 251 bp, Glycine max
  Clone ID: LIB3092-043-Q1-K1-C1
gtccgtttgaacctttcgtacggaagaagtattctttacggggttaaattaaaatggccttttactttgaaagcaagttactgtgttgatctatgcatggatcgatgtctattgcaaaaacttttatttatttattgtattataagcagtatatagaccagtagatgccacagaaaatacctttgattacttgtgaacgaagctcttgacgagggttgcaatcgtgtctgaatggtaaaataatatacttt

SEQ ID NO: 9434 - DNA, 455 bp, Glycine max
  unsure at all n locations
  Clone ID: LIB3092-043-Q1-K1-C10
cccacgcgtccgctctcaccaaattcttattagaacgaaaaaagaagagaaaagaaaaaagagcgatttttccctcaccaaagaagaaccaaaacaatggcggatcaactcaccgatgaacagatctccgagttcaaggaagccttcagcttgttcgataaggacggcgatggttgcatcacaaccaaggagcttggaactgttatgcgttcattggggcaaaacccaactgaggcagaactccaggacatgatcaatgaagtggatgctgatgggaatggtaccattgacttccctgagttcctaaacctcatggctaggaagatgaaggacactgattctgaggaggagctgaaagaggcattccgggttttcgacaaggatcagaatgggttcatctctgctgctgagctccgtcatgtgatgaccaacctcggngagaaactcaccgatga

SEQ ID NO: 9435 - DNA, 442 bp, Glycine max
  Clone ID: LIB3092-043-Q1-K1-C11
gagaaaatggaacccataccgagtaccaagggttcgataggaagccggcaaaactctgatggggcttagaaactaagcgcttctgccatggaatttcttccacagcttgtggaaaacccctgcattaagaagtctagatcacagggacctgaaactccccaattgacaatattctatgctggaaaaatgttggtgtttgatgccttttcgccggagaaggctactgatgtcatggagatggccaccaagttggcctcgtacaactacggcaccgaaaaaagtaccactagtgctccagatgccactgaaaaattggctgtgtgcaaagtgccccaaacaaacacattctcagaaacctgtaatgcaggaaaccaacgggttggttcagatatgaggtacccaaggagagcttcacttctaaaatttcttgagaaaagaaaat

SEQ ID NO: 9436 - DNA, 467 bp, Glycine max
  Clone ID: LIB3092-043-Q1-K1-C12
agttagagagggttggaggagtgaggtgtgtatactaaagaatataagatagaagattgggggtagggtttgatcggacgcaatggctggcaccggcatccacccataccaccagcaatgggctccggcggctgccgctcctcctcctactccggcagccgcgggcggtcctcctcctcaccctggggaggaggttcgaacgatattcataactggtcttccggaagacgtgaaagagagagagctgcaaaatctgctgaaatggctgcccggtttcgaaacatctcaactgaatttcaaagctgagaagccaatgggttctgctctcttctccgcaccacaccaagcactcgtcgccaaagacattcttcaagacatgctcttcgatccatacaccaagtccgtgctccacactgagatggcaaagaaaaatctattcgtcaaaagaggaatcggagctgctgatg

SEQ ID NO: 9437 - DNA, 409 bp, Glycine max
  Clone ID: LIB3092-043-Q1-K1-C2
gtgtcgtttgcacgagttggcaaataaaaggagaatttcagtgacaggagcctcaaagctacttgccaatattttatactcttatcgtggaatggggttatctgttggtaccatgattgctggatgggatgagacgggtcctggtctatattatgttgatagtgaaggaggaagacttaaaggcactagattctctgttggatctggttcaccatatgcttatggtgtattggacagcgggtaccgatatgacctgtcagttgaggaagctgctgaacttgctcgacgagcaatttatcacgcaacatttcgtgatggggccagtggtggagttgctagcgtttactatgtgggtccaaatggatggaagaaattgtcccgtgatgattgttgggaacttcattaccat

SEQ ID NO: 9438 - DNA, 386 bp, Glycine max
  Clone ID: LIB3092-043-Q1-K1-C4
aacgcttgcggccaagcatctcaattacaacaaaaccaccataggggttgcttcctatggccactattggcgaaacctacggcgtttaaccaccgtggagctattttctaccactcgccttgccatgctcactagcgttcgagtagaagaggtgcagttgatggtgaagcaactgtttgaagaatgcaaaggacgtcaacaaataatgatagacctcagagcaagacttttagaggtttctttcaatattatgctgaggatgatatctgggaaacgctattatggtaagcatgcgattgcccaagaagggaaggagtttcagattctgatgaaggagtttgtggagcttctaggaaagtgaaatttgaatgacttttccccttact

SEQ ID NO: 9439 - DNA, 449 bp, Glycine max
  Clone ID: LIB3092-043-Q1-K1-C6
cggacgcgtgggggctggatttcttcttcttggcttcattggtgttcttatatggtgcatgagagggcataagagaaagctgcctgtgagtggtggttatgtcatgccatccactcttgcctcatctcctgaatcagattcatccttttttaagacacactcctcagctcctcttgtacaaagtggctctggcagtgatgttgtgtacacaccatctgaccctggtggactaggcaactcaaggtcatggttttcatatgaagaactaatcaaggtcacaaatggtttctcaactcaaaatccttttggctaaggttgatttggttgggtggataaaaggtgccttcctgatgggagagacatagcattcaaacagcttaagattggtggaagtcaaggagagagagagttcaaggcccaagtggatattattggtcgcatacatcatc

SEQ ID NO: 9440 - DNA, 337 bp, Glycine max
  Clone ID: LIB3092-043-Q1-K1-C7
cggacccaggcaggctttatttcacctacattgcatgatcggtgtactgagatgctgcatgggaacgcaaaagataacgctgcctatcagagatggtaatgacaagccatccactatagccttacatcctgaatcagaagcatactcatctaagacacactagataaactactctcgtacaaagtggctctggcagtgatcatgtatacacaccatctgaccctattgaactatgcaactcaaggccatggaatacatattaagaactaatcagggtcacaaacggcttcttaacacaaaatctttaggactacagaggatccgactgggtgaataa

SEQ ID NO: 9441 - DNA, 456 bp, Glycine max
  Clone ID: LIB3092-043-Q1-K1-C9
cccacgcgtccggtttgacatgctacgaagacaatctcttcgcccagatcacataaaaatgtgtggtttggatgaggctgatgaaatgctttcacgtggtttcaaggaccagatctatgacatcttccagctactgccaggtcaaattcaggttggagtgttctctgctacaatgccacctgaggccctggagattacaaggaagttcatgaataagccagtgagaatcctggtaaagcgtgatgaattgacgcttgagggtatcaagcagttttatgtgaatgttgataaggaagattggaaactggagacattatgcgacctttatgagactttggctatcactcagagtgtcatctttgtgaacaccaggcgcaaggtggactggctcactgacaagatgcgaagcaatgaccatacagtctcagccacccatggagacatggaccaaaacac

SEQ ID NO: 9442 - DNA, 445 bp, Glycine max
  Clone ID: LIB3092-043-Q1-K1-B12
cccacgcgtccggttgagtttcatggagttcctgtttatgctccaaatgtgacaagggaaatgcttgatatcaggccaggagaggccttggctgtgaattttcccttgcaactccatcacacagctgatgagagtgttcatgtgagcaacccaagggatggacttctgagattggtaaggtcactttctcccaaggtgaccacactggtggagcaggaatcaaacacaaacacaacccctttcttcaacaggttcattgaaaccttggattactacttggcaatctttgagtccattgatgtcaccctcccaagagatagcaaggagaggattaatgtggagcaacattgtctggccagggatattgtgaatatcattgcttgtgaaggcaaggaaagggttgagagacatgaactgttcggcaagtggaagtccaggttaacga

SEQ ID NO: 9443 - DNA, 476 bp, Glycine max
  unsure at all n locations
  Clone ID: LIB3092-042-Q1-K1-H6
ggcggagaacggtgaaggcggcgaggagtacctgttcaagatagtgctgattggggactccgcggtggggaagtccaacctcctctcgcggttcgcgcggaacgagttcgatagcaactccaaggccaccattggggtcgagttccagacgcagctcgtcgagatcgacggcaaagagatcaaggcgcagatctgggacactgcgggacaagagaggtttcgagctgtcacctctgcttactacagaggcgctgttggtgcgctcgttgtttacgatatcagcaggaggggcaccttcgacagcatcaagcgatggctccaagaactcactactcaaaatgatagcaccgtagcaagaatgttggtgggaaataaatgtgacttggagaatattagagaggtgagcacagaagagggcaaaagtcttgcagaagaagaaggtttgntctttatggagacatctgcactcgatgcta

SEQ ID NO: 9444 - DNA, 401 bp, Glycine max
  Clone ID: LIB3092-042-Q1-K1-H8
cgtccttcttcttcttcttcttcttccttcccttctctcattcaagacaggcctgtcgttgcttgccctgcccccatcatcagcccaactgtgagagaggatatggcaaaggaatacgagcaagctattgaagaactccagaaattgttgagggagaagagtgaactcaaagccacagctgctgagaaagtggagcagataacagcttctctgggaacatcatcatctgatggcatcccatcatcagaagcctcagacaggatcaaagctggtttcattcacttcaagaaggagaaatatgacaagaatccagctttgtatggtgaacttgccaaaggccagagccccaagtttatggtgtttgcttgctcagactcaagggtgtgcccatctcatgtgct

SEQ ID NO: 9445 - DNA, 255 bp, Glycine max
  Clone ID: LIB3092-043-Q1-K1-A1
ccaccgtccgctctgttctgtcttgttttcggctgattttccaacaagctcgggcttttttatggcaggtttactcatcatgggtaatgaaaagactcacatcaacattgtcgtcattggacatgtcgactctgggaagtcaactactcactggtcatttgatctacaagcttggaggtattgacaagcgtgtgattgagaggttcgagaaggaggctgcttagatgaacaaagaggtcattcaagtttccctgg

SEQ ID NO: 9446 - DNA, 306 bp, Glycine max
  Clone ID: LIB3092-043-Q1-K1-A11
acccacacccacctttccaccaacatccccttcctcacctccccatgctaccatctaaacctgcggcacgtccctcccatccttccaccccaattcccctctccacttctaaaactcctccctccaccactccaccatactcccctacattcactaattcttcataacatccattctatactccctcacccaattatcctaccaaaccctaaacccatactccaaaccctctatatttcctacttccatctaactcctacaatcatcacccatctccaacaaccaccactaccacttccacaccca

SEQ ID NO: 9447 - DNA, 316 bp, Glycine max
  Clone ID: LIB3092-043-Q1-K1-A2
cggacgcgtgggctttttctcgcctataaaatgtccgccactgcttcactctgcgccacttccagaacaactttctcatcatcgaagcccgtcgcgagaagaagctgcttcgtcgcggttcccaaaatcgcgtttcccaagctccgtttcaaacccgtcgctatggctacgctcggcgctcgcatggtggccgacgcacccaccgtcactccgccggcctcgctcgacttcgaaacctccgttttcaagaaggagaagattaacctcgctggacacgacgagtacatcgtgaaaggaaggaaggatttgttccctc

SEQ ID NO: 9448 - DNA, 444 bp, Glycine max
  Clone ID: LIB3092-043-Q1-K1-A3
ctttctctcttcatcatcttcccctctctctcttcctttgccttgtctccgtgtgaaagatcacaactccaccgtcaccgatttccaaggtttcttggtgctgctggtgtattatacatgcttacatctgcatgtgctggtgagatgtgcttgcgttggaaattctccttcattctctctattccccacttttctttagcaatttacccttcacggatcttttcaagcattttttggttatggaagtgaatgaattccttcatttggtttcttcaattatgttgtctgaatcacagatgacgtatcaggaattttgagtcttgggttaatggggtgactatagaaatgatgactttgtcatgagcatttatgtcaggatttattaacatgatatgccgctgttatggattggtatatgccaactttcatataggaagaagaaag

SEQ ID NO: 9449 - DNA, 449 bp, Glycine max
  Clone ID: LIB3092-043-Q1-K1-A4
gcacaaattaatatccaacactctcaagctttccactttcaaactctgcccgctcaatttgctgtatctttccgagatttatatacacttttattgaaactgttgggattcaagtctgaaacaaaatcttaagaagtttgcggcagctgatgccatcatcttttagtatggattcgcaacagctcttcagtttcgaattaccttacatgtcatctttacccaccgttccatcgcttcttggatccttgaaatatgacacaggaaactcacctaattcacccttctccacttattttgattctgacactctttcggcattgagtgacggccaggagcaatacagccctggagaaatcctctctggtgtcagcccctcttgtaactcttctctggaaaccaaccattatatgtatagatcagtctccactttggacagtttcccattatat

SEQ ID NO: 9450 - DNA, 448 bp, Glycine max
  Clone ID: LIB3092-043-Q1-K1-A5
ctctgtttctgtctctgtgtttgcggctgaggattccgaacgagcgaccttcttcgtttctcgcaaagtttaagtcatcatgggtaaggaaaagactcacatcaacattgtcgtcattggacatgtcgactctgggaagtcaactaccactggtcatttgatctacaagcttggaggtattgacaagcgtgtgattgagaggttcgagaaggaggctgctgagatgaacaagaggtcattcaagtatgcctgggtgcttgacaagctcaaggctgagcgcgaaagaggaattaccattgatattgctttgtggaagtttgaaaccaccaagtactactgcacagtcatcgatgcccccggacatcgtgactttatcaagaacatgattactggtacctcccaggctgattgtgctgtccttatcattgactccaccactggtggtttt

SEQ ID NO: 9451 - DNA, 445 bp, Glycine max
  Clone ID: LIB3092-043-Q1-K1-A6
cactgatctccattcccattccatggcttccactgaatcatcccctttcaagaaaattcagattcaaagggatgacactacatttgacgcatatgtggttggaaaagaggatgctcctggaattgttgtgattcaggagtggtggggtgtggattacgaaattaagaaccatgccgtgaagatttctcagcttggtagtgggtttaaagctcttattccagatttatacagaggaaaggttggtctggatgttgctgaagctcagcatttgatggatggtcttgattggcaaggtgctgtgaaagatattgctgcttcggttaactggcttaaagcaaatggctcaaagaaggctggtgtaactggattttgtatgggaagtgctctctctattgccagttctgtcttggttcaagaggttgacgcttctgtagcattctatgga

SEQ ID NO: 9452 - DNA, 312 bp, Glycine max
  Clone ID: LIB3092-043-Q1-K1-A7
ctctgtatctgactctttgtttgcagctgatgattccaaaccagcgagcttcttcattactggcaaagtctaagtcatcaagggttaagaaaatactcatatgatcatcgactacataggacatgatgactatgggaagtcaacttccactggtcatttgatctacaatctagaaggtattgacaagcgtgtgattgagaggttccagatagacgcatctgatatagaacatatgtcatacaaaaatgcctgaatgctctacaagctcaattctgagctcgaaagaagaatcaccatatgacatatcattaa

SEQ ID NO: 9453 - DNA, 332 bp, Glycine max
  Clone ID: LIB3092-043-Q1-K1-A8
caacggacaagcttcgttctggcgaagaatggcggcgccgggctcatccgccggcggcggcggagggacggcgaaggctacggtggcggagcagatctcgcaggcggtgcagtccacctccaacctcctccaccttatgcggcactcttctcctgcccaggctcaactggttaagcttcctaagaatcttttggcaaaggtttccaccatcaagaatacagagcaggttttggagcagttgcctggggtgatatcatctcttgacgcacacatggaaaatgggttgcaaaatgttccacatctaaagaccgtggttcaggtactttcaaata

SEQ ID NO: 9454 - DNA, 426 bp, Glycine max
  Clone ID: LIB3092-043-Q1-K1-A9
cccacgcgtccgttgtttcactaaaaagaggcacaactgttataatgggggacttgtacacgggcgttcatgtaggtctaggaaagcattaacagctgccctggctcctaatcctgggaagccatatcacgtttgtgattcttgctttgtaaaattgaacaaggttgcagaattgggcaacaataatcgaaggaatgctatgcctcgtttgtcaagtgaaaacaaggacagattagagaagcctgagctaagattgaccaagacagcaaacccttctaatatggatttcataaagcaacttgatagtaaggcaactaaacacgggaagaaggctgatacattctctctggttcgcacctctcaaccacagtctttgctacagctcaaagatgttgacttgactactgctatcgatttgaagcgaac

SEQ ID NO: 9455 - DNA, 449 bp, Glycine max
  Clone ID: LIB3092-043-Q1-K1-B1
ctctgtttctgactctgtgtttgcggcatgatgattccgaacgagcgacgcttcttcgtttctcgcaaagtttaagtcatcatgggtaaggaaaagactcacatcaacattgtcgtcattggacatgtcgactctgggaagtcaactaccactggtcatttgatctacaagcttggaggtattgacaagcgtgtgattgagaggttcgagaaggaggctgctgagatgaacaagaggtcattcaagtatgcctgggtgcttgacaagctcaaggctgagcgcgaaagaggaattaccattgatattgctttgtggaagtttgaaaccaccaagtactactgcacagtcatcgatgcccccggacatcgtgactttatcaagaacatgattactggtacctcccaggctgattgtgctgtccttatcattgactccaccactggtggttt

SEQ ID NO: 9456 - DNA, 467 bp, Glycine max
  Clone ID: LIB3092-043-Q1-K1-B10
gaccgatgtgccttcttgcatggtcctcctgctcctactcctagcactggtaataaagtagctgctcaggttccagtgactattcaaggagccgagaatccaagttttaagaagccttttgtcagcaatgaaaagtatactcaggaaaggaaaacttcccaaggaaattttgcaaagtcaggtggagctcctgaagctaaaccttcccccaaaattgaaactgctcctcaaagaaatatgtttgaattggagaagaaagtgccaccaccatctgcagaattcaataatgaggcttctagatttaagacaatttctccaccagtgaccaatgggcccattgtggcccggtcaaaccgtctgcaccaagctcgtgtgccagatgatcacaatttccagagtggcaaggacagtgatgagtttctcagagaatcatctcctgggtttgatgttcttgtagctgatgaact

SEQ ID NO: 9457 - DNA, 457 bp, Glycine max
  Clone ID: LIB3092-043-Q1-K1-B11
cccacgcgtccgcccacgcgtccgctcaccgtgttcgttattttcctgaccagcgttggatccttgttgatctctgcattgatggttggattggcgatcgtgtgctcgcacggcgcgttccgcgttcccgaggatctgtttctcgacgatcaggagccgaacagctccggattcctctcgttcctcggtggcgccgccgcttcagccgccgcgccggccgtcgcgcgcgtgtaaacggcgggatctggacgaacgctgtgtccggtggattcttctcaggttggttcggccttttttgttgtaatatgttaaattgaaaattgttgcgatattctttgccttttgagatccaaggcgaattgcttagggtttagttctgttactgcttactactttttgttttacgccgaaatattattgtgctattaaacctcaagtaatgcatcttagtcattga

SEQ ID NO: 9458 - DNA, 426 bp, Glycine max
  Clone ID: LIB3092-042-Q1-K1-H4
tcaggcatgtctctaatagcttcactctccttcacaacttcacaactcacttcccttccttgcctccctgtcttcctcctctccactttctcgcaaatttcccctcactttccgggaaaaaaacagaactccaatcacacctcacaagctccctttttcagcaaggcctaccaccaccagagtggtgttggtgaagtctcaggccacagcacctgcttcttctgaggctgtggcagtgacacctgtgtcttctgagatgaaggcatgggtctatggggaatatgggggtgtggatgttctgaagctggactccaatgttactgtgcctgatgtgaaggaagatcaggttctaatcaaagttgttgctgctgctcttaaccctgttgatgccaagaggaggcagggaaagtttaaggccactgattc

SEQ ID NO: 9459 - DNA, 456 bp, Glycine max
  Clone ID: LIB3092-042-Q1-K1-F7
ttttgcagagtataagatctcgcttccacgtttctcattacttgcaaccttcatctgcactggtgaattccaaccagcctgtgggtcaaaactactccaatcccagtactagcttctttcatgtcctcttcaatgctgcagcctttgcattatacattctatcgaccctatctattgataactttgtcatcattttcctgatgactgtccttcttaccgacctttatttttgtatacccaataatgtcaatgttctaattccagatctattgatgatcttcaatgaaattaatgatctgcttgagaatgtttgtaaatttgaatgtcttgaccactagtcattgactctgatgaacaatattgactcatggctactctgatgcaccctgtatctcacagcgattctgttaatcgagcttgctatattctcactcataatgcttcaaactgattatc

SEQ ID NO: 9460 - DNA, 458 bp, Glycine max
  Clone ID: LIB3092-042-Q1-K1-F9
gaacaattccagaaggtccttaggtacataaagtccggtattgaaagcaaggccacccttgagtgtggtggtgaccaaattggctcaaagggcttctttgtccagcccactgtcttctcaaatgttcaggatgacatgttgatagcaaaagatgaaatatttggccctgtacaaaccatcttgaagttcaaggacatcgacgaagtaattcgaaggtcaaacgcaacgcactatggtctagctgcaggagttttcactaagaatgtgcacacagccaacactttgatgcgagcactgagggttggaacagtatggatcaattgctttgatgtttttgatgctgcaattccctttggagggtacaaaatgagcggcattggcagggagaagggtatctacagtctcaacaattacctgcaagtgaaagctgtggtttcaccagtgaagaaacctgcatg

SEQ ID NO: 9461 - DNA, 461 bp, Glycine max
  unsure at all n locations
  Clone ID: LIB3092-042-Q1-K1-G10
gaaatatccaaaagtcagaagatggcattgcgaggattgagtgcggtggcggtgacggcgtcggtacgccctcccggtcctcgattcagagtagacagcggcacatcaaggattccctcttccggatgcagaatctcggtgcggtgtaaagctgtcggagaaagccgacaaggttccttggaggaaaccgttgtttatgagggtatttatggcccctggaccattgacgactccgatgttcgagaggtaattttgtacagatcaggattggtaacagctgctgcatcatttgtggtcgctggttctgctgccttttttcccgatactctgaagcagaatgttgatttattgtatgtccttgggtctggtgggttgggtttatccgtgctcttgattcacatatatgtgtctgagatcaagcgcgccctacaagcactatgggggcttggtgttgntggatc

SEQ ID NO: 9462 - DNA, 476 bp, Glycine max
  unsure at all n locations
  Clone ID: LIB3092-042-Q1-K1-G11
actcaagatccattattaccaaaaaaaaagaataaaggatatcaaacacccttttcatcattaggactctcagttccctctttccctatcaaaaccctttcccacaacactactcactccagtacaagaaaccctttttcaatttggtttcaacagcacacacacacacacatatatatatatatagcatgtttaccttgaatcattcttctgatttgtaccatgtttcccctgagctctcatcttccttggacacatcctcgccggcttcggagggctctcgtggcgtggcattttccgacgaggaggtgcggctggcggtgaggcacccgaagaagcgggcaggtcggaagaagttccgggagacgcgccacccggtgtaccggggggtgaggaggaggaactcggataagtgggtgtgtgaagtgagggagcccaacaagaagaccaggatttggctggngactttccccacg

SEQ ID NO: 9463 - DNA, 191 bp, Glycine max
  unsure at all n locations
  Clone ID: LIB3092-042-Q1-K1-G12
aaaacccnnacccacaacacnacacactccannacaagaaaccnccanacaaatagaaatcaacagcacacacacacacacatatatatatatatatcatgtttacctttaatcattcttctgatttgtaccatatttcccctaatctctcatcttccttgtacacatcctttctcacttctaaaatctct

SEQ ID NO: 9464 - DNA, 444 bp, Glycine max
  unsure at all n locations
  Clone ID: LIB3092-042-Q1-K1-G2
taaaataaaggactttggtgatagtattccgggacatggtggaattaccgacagagtggattgccagatggttatggccgtgtttgcatacatatatcatcagtcatttgttgtgccgcaaactctctcggttgaaatgattttggaccagatatcgatgaacctaacattcgatgagcaacaagctctatattggaggcttggggaaattttacaacaggggtttgctaggatgtcttagattcatggcgaggtgtatttgttctgtcaccttctattgtattccttcacatacaggggaaaaggaaaagatactatgtacatgtgtttgttttctatcttttgagtgaaacanattaaaggttcagaagctgtcaagatgtgcatagtgtatgttgaccgttagtttcattctggttttctcgctctattagttgattgatg

SEQ ID NO: 9465 - DNA, 470 bp, Glycine max
  Clone ID: LIB3092-042-Q1-K1-G3
catttcacataagagaggaatgaaacttagacttatgaatggaatagcatacaatgagacgtggtttggcagttggggttacaaatttggtcgaggatgctttggtgtaactcaatccatgtaccacaaggccatacaagcaataagaagcatgtcattatacttgatcatacaccacattgccaattctagccatggcattccactaatcttctcaaggaaccagacactttcagatcaatccctagtgacccttggtgacctattttgttacatgttagaccttaaatcatgtcttcctcgtgaaacctgaattagttcctataaaacaaatgccttagttgagaccaattgtcgttggtcccctaaaaggattgagatggcaacaagggttattgttgaggccttgaaaagaacagagtttaaatgggtttcaagacaagaagttagagatgcttgtcgtgcataca

SEQ ID NO: 9466 - DNA, 436 bp, Glycine max
  unsure at all n locations
  Clone ID: LIB3092-042-Q1-K1-G4
caccacatttcatttacacaaatcatcaatggcctctcttgtatcctcaagtgtgcttttaggcctctttctgataatttccgcgctccatttgggcgcagcagcaagaattctgagtgaaaaggaccaacaacaacaattgcagttccaataccacaaaggccctcttctcagtggcaaaatctccgtcaatctcatctggtacggtaacttcaagccttcccagcgagccatcatctccgatttcatcacctccctttcatctcacaaatccacagcccaaccatccgtcgccacgtggtggaaaggtacccaaaaatactaccaactcataaagtcatcaccaaaactcaccctcactctcggtacccaaatcctcgacgagaactactccctaggaaaatcactcaccaacgacaacattgntagtttagca

SEQ ID NO: 9467 - DNA, 470 bp, Glycine max
  unsure at all n locations
  Clone ID: LIB3092-042-Q1-K1-G5
cgcgaatcaggagcggcggagtttatttcggccatggcggcggggtggaactcgcggctcatggtggagacgtggtcgcagggaggagttattgccaccagcgtgggattagccgtggcgaggtctcacacgtgcggacgacacgtgtgcgtagtttccgacgagcgggcgaggtcggagtacgtggagagaatgggcgaggcgggcgtaacggcggagatcgtggttggggaaccggaggatgtgatggagggtttggtcggcgtagatttcttggtggttgattctcgaaggaaggattttacgcgtgtgctgaggcttgcaaagttgagtaacaaaggtgccgtgttgctctgtaagaacgcgaattcaaactccaagggttttatatggcggagcctcgtggcgaaaggttcttcgcggcgtcttgttcgttcggcgtttcttcctgtggngaagggacttgacat

SEQ ID NO: 9468 - DNA, 466 bp, Glycine max
  Clone ID: LIB3092-042-Q1-K1-G7
cgatttcgtataacatttcatttcacttcacttatggtggtgcatttgcaaccctttaatttccgcacaaaaatggaggaacgtagtttgtactcactagtgtttcttgtgcttgctttggctattgtgaacaaagtgcatgggcaagggacgcgtgtagggttctattcgagtacatgcccacgcgctgagtccattgttaagtccacagttacaacccatgttaattctgatagtactttggctgctgggttgcttcggatgcacttccatgattgctttgtgcaaggttgtgacgcttctgttctcattgccggttctggcactgagagaacagcatttgcaaaccttggtttacgaggatttgaggttattgatgatgcaaagaaacagctcgaggctgcatgccccggtgttgtgtcttgcgctgatatccttgctcttgctgctcgtgattccgttgttc

SEQ ID NO: 9469 - DNA, 436 bp, Glycine max
  Clone ID: LIB3092-042-Q1-K1-G8
caattgtctatattcttcttcccaccggtcatcatgttgtggctgttgcaggtcggtctccggagcttcaaagttaactgagaaagatcctaaccctaacctaagcctccctccctcgttcccttaacggtctctgaataattgaagatttgtcgaagggatttgtttttgcttgtgtgctgtgttgaatgtgaaatttaagcattaatgtgttgggagctatgagattgcattgtttagcttgtggtgaaccttaattactgcgttggtgagaaaataaaatgccatctaattacttttcaaggctcgcagcttcgattcagagatcgattgcggggaaagaaggccgaatccgggactctgccgaagttctcattgggcaagggaagttgtggtttggtagttctaagttttttcattctgtgcatagctcata

SEQ ID NO: 9470 - DNA, 462 bp, Glycine max
  Clone ID: LIB3092-042-Q1-K1-G9
ctctcgccaacggataaagagagagaagggtcccttcattctctcacacagaaaaatggcagcgtcagtttcgtgctcatggctaacccttccctcccaaatgaggagcctctccctcacatcctcttcttcatccctttgcatctccaattccgcttctctcagtttctccagaaacctctcacgccctttcttctcaaaaggtaactccttgtcgctaagcacagtactgaggcgcgcgtctgtggtttgcgaggctgcgccgaagaagaaggtggattcggcggtaaagagagcgcgccaagccgagaagcaccgcgtttacaacaaagctcgcaaatcggagattaaaacacgtaccaagaaggttttggaagctctagaagtacttaagaagaaatcagatgcgcaggccgaagaaatcctcccaattgagaaagtgattggagaggcatactcaat

SEQ ID NO: 9471 - DNA, 468 bp, Glycine max
  Clone ID: LIB3092-042-Q1-K1-H1
cttccgatcctgtttttgcttcctctactatgacttttaccaacgttttgctgagcccgtggaaaaaattaaccaggacagctaactacaatgcatgggccgctgctgttcagctttggttccaaggccaaggccatgctgatcacttgacatgcttcattgtgtagtgtcctttggttctcttgctcctaaccttcaaccacaatttcaagcttttcccacttgttatgaggtatggaataaggctaagaaggtctattccaatgatgtccatcgtctttacaatgtcataacctccttgaagaccatggaattggagaacatggatatgcaaactaccttggtaagcttgaacgtttaattgatgattataacactctcatgccttttacaaatgatgcagatacgttttatgaggaacgcagccagttctttatggtccttgcccttgttggccttgcacctaaa

SEQ ID NO: 9472 - DNA, 244 bp, Glycine max
  unsure at all n locations
  Clone ID: LIB3092-042-Q1-K1-H11
accaaatacaagaatacacaacaacaaacacccacaacaacaaaaagaccatttaaaaacgcagggccgcccaaaacacantaccacaacaccacnacacaccaaaacaacaaacccaaacacaataacaacaaaacataacacacacacacacaaatatcaaaataaaacaaacccaccaaacatccaacataaaaacaataccataacacccccatacacaaacctaacccaaacacaacca

SEQ ID NO: 9473 - DNA, 400 bp, Glycine max
  Clone ID: LIB3092-042-Q1-K1-H2
gatcctgttattgcttctatttactatttactcttaccaacgttttatctcagcccattgaaaaatttaacacagcacatctaactacaatacatcttcctatacttatcacctctgtatccaaacccaattccattcttatcactttacattcttcattatctactttcctttgatcctcttgctactaaccttcaaccacaatttcaaacttttcccacttgttatcatttattaaataagactaacatattctattccaattatgtccataatatttacaatgtcataaccttctttaataccatcaaatttcaaaacatatatattcaaactaccttaatcatctttaacatttaatttatgattataacactctcattccatttacaaattattc

SEQ ID NO: 9474 - DNA, 385 bp, Glycine max
  Clone ID: LIB3092-042-Q1-K1-F6
caaaaaatggagccattattttcttcagcagcttcaatatgtgtggtgactgtgtgggtagcggtgattcccatatgggcactgaagatgctgaactcgctgtggcttatgccaaagaggtttgaaaggcttcttagagcgcaaggttttcatggtgacccatactcactttctcatcacaacttcaaccaaacccttttgcaacaacaccagctcaattcccaaccttttcctctatccgatgatgttgctcctcgtgtatcctccttgttacatcacactatcgacaaatatggcaagaaatccttcttttgggaaagtagaacaccaaaagtgatcattacggacccaaatcaactcaaagaagtcttcaacaacattcatg

SEQ ID NO: 9475 - DNA, 466 bp, Glycine max
  Clone ID: LIB3092-042-Q1-K1-E1
cgcgtccgaagttattgaagtatgtttgaaaaatgaggttagtgtcaaagtatcaagcggcaatatgctggaggaaaatttagaagaacctgggacgatacaaagcttcagacacacaggaacaaatgctaacaaggaagtaaactataagaaagtagtaccagcttcaccagagcagaatctttcaagaccaatggaagcaaaccaggctgattcatattctttgaaaaatgggacaactctggaccaaacaatatatgataacaagcaattaaacagtgatgcagtccaagatatgtcttcagatgacctgaaaaagtcaaccagggagataaagtatcgatactgttgttttatgcattaactaagaagagaaaagtgtgaaagccaataacaagaaaatagggtatttagaggcatgaggtccacttgccaagggaccaggtaaccggtttggactaatttt

SEQ ID NO: 9476 - DNA, 483 bp, Glycine max
  Clone ID: LIB3092-042-Q1-K1-E10
gagaacaacaacaacaaccacaacctcatcgtccctaatcctcaagattcactgtggatgatggatttgaggactggggaaacaatggattctggatcttatccggagcgtccaggggagccggattgttcatattacatgagaacaggcctttgtagatttggtgcaacgtgtcgatttaatcatcctcctaacaggaagctggctattgccactgcaaggatgataggcgagttcccagaaagaatagggcaaccagaatgccagtactatctgaagacaggaacatgcaaatttggagccacatgcaaatttcatcatcctaaagatcaggctggaattgctggaagagttgccttaaatattttaggctatcctctccgccctaatgagcctgaatgcacttattatttgagaaccggacaatgcaaatttgggaacacttgcaaattccaccatcctcaaccaagtaatatgatgctc

SEQ ID NO: 9477 - DNA, 455 bp, Glycine max
  unsure at all n locations
  Clone ID: LIB3092-042-Q1-K1-E11
caacaacaaccacaacctcatcgttcctaatcctcaagattcactgnacatgatagattatattacaaaggaaacaatgcattctcaatcttatcctgagcttccatatgagccttattgttcatattacatgataacattcctttatagattttattcaacgtttctatttaatcatcctcctaacaagaagctctctattgccacttcaaatattatagtctagttcccacaaagaatactgcaaccataattccattactatcttaatacagtaacatgcaaatttttaaccacatgcaaatttcatcatcctaaatatcaggctttaatttctttaaaaatttccttaaatattttaagctatcctatccttcctaattatccttaatgcacttattatttgataacccgacaattcaaatttgtcaacactttcaaatttcaccattctt

SEQ ID NO: 9478 - DNA, 420 bp, Glycine max
  Clone ID: LIB3092-042-Q1-K1-E2
aagttattgaagtatgtgtttttaattttgttagtgtcaaagtatcaagcggaataggctgaatgaaaattgagaagaacctgagacgatacaaagcttcagacacacaggaacaaatgctaacaaggaagtaaactataagaaagtagtaccagcttcaccagagcataatctttcaagaccaatggaagcaaaccacgctgattcatattctttgaaaaatgggacaactattgaccaaacaatatatgataacaagcaattaaacagtgatgcagtccaagatatgtcttcagatgacctgaaaaagtcaaccattgagataaagtatcgatactgatgttttatgcattaactatgaagagaaaagtgtgaaagccaattacaagaaaatagggtatttataggcatgaggtccac

SEQ ID NO: 9479 - DNA, 449 bp, Glycine max
  Clone ID: LIB3092-042-Q1-K1-E4
tcatttatatgataatatgacagtcatgttcaaagaaaagtgctaacaatacattgtttattatgggttaaaatttagtagaaatttcaaaatgagactcattgtataagtagaacctgcaaaattttgtaatttcacataaatttcaatcaatagtagaagactagagagtattcaaaaaagtgtattagagagtgttggtaccatttctcaaatcatgttaaaatatgacatgagactaatgagaagactcattatcatttttgtaccataactcctattctttattacatacaaatagctacaaaaagaaattgttctattttgttttattcaatttcattaggttggaagtaccattagtaataataacaatgagcaaaatgatgtgagttgctggcaacgacctgaagatatgacatatgagagaccagtttcaatttgtgatg

SEQ ID NO: 9480 - DNA, 476 bp, Glycine max
  Clone ID: LIB3092-042-Q1-K1-E5
cgttcaactcatctgcttcccctagcaaccttcttcttacttctctccgcttcttatcgtccagagggctggggcggaagcacaaccgttgactagtctcaagcttaactctcatattcttcaggagtctactgctaaagagattaatgaaaatcccgaggcaggatgggaggctgctataaatcctcgtttctccaattatacagttgaacaatttaagcgccttcttggagtcaaaccaatgcctaagaaggaacttagaagtacacctgctatatctcacccaaagacgttgaaattgccaaagaattttgatgcgaggacagcttggtcgcagtgtagcactattggaagaattctagatcagggtcactgtggttcttgttgggcatttggtgctgttgaatcattgtcagatcgcttttgcattcattttgatgttaatatctctctctctggtaatgaccttcttgcat

SEQ ID NO: 9481 - DNA, 254 bp, Glycine max
  Clone ID: LIB3092-042-Q1-K1-E6
cacaattatacttattaactaacataaacctacataattttctaatttcacataaaattcaatcactaatacaacactacaaactattcaaaaaactctattatacaatattcataccatttctcatatcatcctaaaatattacattacactaactaaaaaaactcattatcatttttctaccataacttctattctttattacatactaatctcttcaataagaaacttttccattttcttctaatcaattt

SEQ ID NO: 9482 - DNA, 463 bp, Glycine max
  Clone ID: LIB3092-042-Q1-K1-E7
gtgatgtgcaaaacatgtctctaatagcttcactctcctccacaacttcacaactggcttccggtccttccctcccttcttcctgctctccactttctcgcaaatttcccctcactttccgggaaaaaaacagaactccaatcacacctcacaagctccctttttcagcaaggcctaccaccaccagagtggtgttggtgaagtctcaggccacagcacctgcttcttctgaggctgtggcagtgacacctgtgtcttctgagatgaaggcatgggtctatggggaatatgggggtgtggatgttctgaagctggactccaatgttactgtgcctgatgtgaaagaagatcaggttctaatcaaagttgttgctgctgctcttaaccctgttgatgccaagaggaagcaaggaaagtttaaagccactgattctccccttccgactgttccgggctacgatgt

SEQ ID NO: 9483 - DNA, 205 bp, Glycine max
  Clone ID: LIB3092-042-Q1-K1-E8
ttttattaataaaacctccaaaaattttcaatttcacataaacttcaatcaataatataatactacaaaatattcaaaaaaatatattacaaaatattattaccaattcctaaatcattttaaaatattacactacactaattaaaacacttattatcaattttataccataactcctattctctaatacataccaattacctcc

SEQ ID NO: 9484 - DNA, 450 bp, Glycine max
  Clone ID: LIB3092-042-Q1-K1-E9
attgaagttgctgttgttgatatctctaaatcccgcattgcagcctggaacagtgaccagctggctatctatgaacctggccttgatggtgttgtgaagcaatgccgtggcaagaacctcttcttcagcactgatgttgaaaagcatgtctttgaggctgacatagtgtttgtctctgtcaacaccccaaccaaaactcagggtcttggagctggtaaagcagcagatttgacatattgggagagcgcagctcgcatgattgctgatgtttcgaagtctgacaagatcgttgtagagaaatccacagtcccggttaaaacagctgaggcaatagagaagattctgacccacaatagcaagggaatcagattccagattttatcaaaccctgaattccttgctgagggaactgcaatcaaagatctctttaacccagaccgtgttcttatt

SEQ ID NO: 9485 - DNA, 467 bp, Glycine max
  Clone ID: LIB3092-042-Q1-K1-F1
atctcgggggtggtgaaactcgacgtgtcgaagggggaggagcggagggactgcacggtggggtgcaggatgtacggcgagggttgctacggcggagaaccgttcttcgtggcgagggaagaagggggcgaggaagatgatgggtacttggtgagttacgtgcacgatgagaggaagggggagtcgaggtttttggtgatggacgcgaagtcgccggagctagatgttgtggcggcggtgaggcttccgcggcgggtgccgtacgggttccatgggctgtttgtgaaggagagtgagctgaggaaagtgtcgttgtcgtgaagctgagacatgatggttcgtgtgtggggcttgtcttccacgcttctgtccattatacatgtgtcctgtaatgtaatgtatagcaccattattgcttctcagaattaattgatgaggtgtaattagtaattacatgcaagtctatg

SEQ ID NO: 9486 - DNA, 431 bp, Glycine max
  Clone ID: LIB3092-042-Q1-K1-F2
gtggtgaaactcgacgtgtctaatttttaggagcggagggactgcacgtgggtattgaggatttacggcgagggttgctactgcggagaaccgttcttcgtggcgagggaagaagggggcgaggaagatgatgggtacttggtgagttacgtgcacgatgagaggaatggggagtcgaggtttttgttaatggactcaaattcgccgaacctagatcttgttccgccggtaaggcttccgcggcgtttgccttactggttccatggtctgtttgtgaaggatagcgagctgatgaaagtgtcgttgtcgtgaagcttacacatgatggttcctgtgtggggcttgacttccactcttctgtccattatacatgtgtcctgtaatgaaatgtttaccaccattattgtttctcacaattaatttatcaatgt

SEQ ID NO: 9487 - DNA, 469 bp, Glycine max
  Clone ID: LIB3092-042-Q1-K1-F3
cgcgtgggcggacgcgtgggcggacgcgtgggcggacgcgtgggagtaagcaaaggaatgggcgggttattttcttattcatcacttcccgaggaggagagtcctgacgtgaaagcattccactccgcggagagctggcagagccacttgaaagagatcaaagagtcccctaagctagttgtgatatatttcacggcgtcctggtgtggcccttgcaaattcatcactccagtgtttaaccagatagccgcagagtttgcaaacgctgacttcgtcaagatcgacgtggacgaattatctggtgtggcgaaggagtttaaggtggaggcgatgccgacgttcgtgttgtggaaggaaggaaaggaagttgagagggttgtgggagccaagaaggaagagctcgagaaaaagattaagcaactttctcaatcgtgaaagcatgtatgatagtaatcttttagctattcaa

SEQ ID NO: 9488 - DNA, 269 bp, Glycine max
  Clone ID: LIB3092-042-Q1-K1-F4
ttcttattcatcacttccctattcttacactccttactttaaatcattccactcctcatatatctttcatatccactttaaatatatcaaccaatcctctattctattatccatatatttcactacctccttttttcacccttactaattcatcactccattgtttaaccacatttccttatatttttcaaactcttacttcctcaatatcaacatttactaattatctaataataccaactattttaaattttaaacaattcctacta

SEQ ID NO: 9489 - DNA, 466 bp, Glycine max
  Clone ID: LIB3092-042-Q1-K1-F5
acgcgtccgcaaaacttcaatttctgtttcagttcgcggagatcaatattttggctaggtgcatcgtcgatagaagatacgagaaaccaaaggcaatgtttttgtgggattggttttatgggattctagcgtcgctcgggctgtggcagaaggaggccaagatcttattcttgggcctcgataacgctggcaaaactaccttgcttcacatgctcaaagatgagagattagtccagcatcagcctacccagtatcctacatcggaggagttgagtattgggaagatcaagtttaaagcttttgatctagggggtcatcagattgctcgaagagtttggaaagattactatgcccaggtggatgcagtggtgtacttggttgatgcttatgacaaggagagatttgctgagtcaaataaagagctggatgctctactctctgatgaatctttagccagtgtcccttt

SEQ ID NO: 9490 - DNA, 466 bp, Glycine max
  Clone ID: LIB3092-042-Q1-K1-D6
atcaaagggtcataaaattcattactctggtccattaacatcaagcaacatggatcaggtgtggaaagaccatgaccgccaaattcaagaggcggttagacgggcacgtttggataaggcaaaaatgagaaggctccaagctgaagggaaccagataaccaattcattatttgtttcaggccgttgatttgtagagttgttgagatgcaacaaggcatcataaaggatctttaattcttttttaatggggggcctgtatagggagaaagtatcctttgcaaaatgccctggtggccgtgttaggtaactctatagcttagaaaagctctcccttaaaatttatcacatattttctttctacttaccgctgtaatttctggcataagcccattcttgtaaagcttatcagccttaagctgttagaaatctggggaacaattgtgtcatgagagttaataatattcac

SEQ ID NO: 9491 - DNA, 430 bp, Glycine max
  Clone ID: LIB3092-042-Q1-K1-B4
acgcgtccgtttctctgtgtgtcgtaatggctctcccagactcttcttcccgtcgcaactccctgatgccctccttcatctactcctcttcctccaaaacgctccctctccaccacatgctcaacaccgcctccgctgccgccgccgccgctccctccccgccgccggccaatctcgacgccggatcgcgtggcctcatgattccctctcccagcgagtcacgcaagatcgagttgtactcccccgccttctacgccgcctgcaccgccggtggaatcctcagctgtggcctcactcacatgaccgtcactcctcttgacctagtcaagtgtaatatgcagattgaccctgctaagtacaagagcatctcgtctggttttggagttttgcttaaagagcaaggattcaggggcttttttcgtggctgggt

SEQ ID NO: 9492 - DNA, 425 bp, Glycine max
  Clone ID: LIB3092-042-Q1-K1-B5
gagcttttcacatggaaatcggcttccccgcattccttaccctcgaagactattcgggcttctgcttccctgacatggatcccattcccaattccaatgtcaacaagcgtcgtgcaaacaacgaccagttcgacttaaatgactccgcattcagccacctcctcaattccatcatggatcctaaccatttccaacaccaatccaaaccaatccaattcgactcctccccgaccaagagagctcgccgtgacctcctcgttctcgaagacagccacctcaaccccgcctcggccccgcaacagcagcgccgtctctgggtcaaggaccgctccaaggactggtggcagcggtgcaacagcccggactttcccgaaaaggaattccggcgccacttccgcatgagcaaggccaccttcgacatgatc

SEQ ID NO: 9493 - DNA, 329 bp, Glycine max
  Clone ID: LIB3092-042-Q1-K1-B7
ggtcatttttgacgttcatagacatattaccaggcctgattcaagagtgatacaatgaattaagcgaatgggagctcgatcgattccaaatcaaaggagaattttgtgcatgaacaagattgatctagtagagaaaaagaaagacttattgaaagttgccgaagaattcaaagatcttcctggatatgaaaggtatttcatgatatcaggactgaaggggtctggagtaaaagatctgactcagtacttgatggagcaagcagttcaacgaccctgggaagaagatccatttaccatgagtgaggaaggtatgaagatgatagcattag

SEQ ID NO: 9494 - DNA, 449 bp, Glycine max
  unsure at all n locations
  Clone ID: LIB3092-042-Q1-K1-B8
gtccggtatgaagagagagaaaggaagagagaggaatgaagagcacagcactacacagctgcgaaataggangnggagaaattttgtatgcgttggatttcgtagatctgaataaatgacaaatgtatcattcaaagaatgttcctagtgcaagtttaattggtggtaattcattaagtcatggtcagcacatagattgtggtggcagcacaatggatcctggcagtggaggaaatggtcttagcaacaactctaatctcacctcanaacaacgtttacggtggacacatgaattgcatgagcgctttgttgatgctgtggctcaacttggtgggccagatcgtgccacacccaaaggcgtgctcagagttatgggtgtacaaggctttgaccattaccatgtcaaaagtcatttacagaaataccgactttgcaaatatttacctgac

SEQ ID NO: 9495 - DNA, 456 bp, Glycine max
  Clone ID: LIB3092-042-Q1-K1-C1
gcgtgggttcgggagaaaaagcaatccactcagagagctagaagaattcaacgatgcgtcgctgtgatgataaatacggcaatacccgcctctatgtggggcacttatcttcgaggactcgttcccgggatctggagcgtgccttcagcagatatggaagagttcggggtgtggatatgaagaatgatttcgcctttgttgtaagttgtcaccctttctttatctttgtctatttatttatttatttcctaggacttcaatttcttcttatttatttgctaaaatgtggcttctagtatctgcttggaggaattcagttgtagatgatggtatgatttctgtgttactttcttggcttgttccttacaacctttggacaggattttagtgatcctcgagatgctgatgatgcaagataataactggatggtcgggatgttgatggaagtcgtatta

SEQ ID NO: 9496 - DNA, 470 bp, Glycine max
  Clone ID: LIB3092-042-Q1-K1-C11
ctcttccgcctcccttcccttcaactccacggcgcagatccgaggagtttgggaaaccctaagtcattcctctttgcttcttctatctctattcctctaacaccagtgatggcaggtttggctccagaaggatcgcagtttgatgctcggcaatatgattctaagatgaatgaattgctttccgccgatggacaagaatttttcacttcatatgacgaagtctatgatagttttgatgcaatgggccttcaagaaaatcttctgagaggcatatatgcttatggttttgagaggccttctgcaatccagcagaggggaattgttcctttctgcaagggtctggatgtgattcagcaggctcagtctggaactggaaagacagcaacgttctgttcaggaattttgcagcagcttgactatggattggttcagtgtcaggctttggttttggcaccaacaaaggagcttgc

SEQ ID NO: 9497 - DNA, 471 bp, Glycine max
  unsure at all n locations
  Clone ID: LIB3092-042-Q1-K1-C2
gctactcaatccggaagcactgacaccgtcattaatcctccatctcccatcaaacgacgcgtgaagtggaagctagcccgcaccaagaaaattggtgacatgacatctgaggcaacaaaggaaatcgctgacaagattgtaaatcactttcaattcataattgtaattattttttattattgtgtgattgagtatagaataaatgtgttcttcacaggatgcgcttgaggagcaggcctcacagggttcctttgttacccatggacgtcatgatatattgactgctgccattgggcgaccagaacaccctggtcgtgtgcgtgctgtaggagccggtataaccatcaagcaatactttggatcagcttcaaggacctcctncattgctcccgaataactgcaacagttgacgcaacaaatcaaggaccagctgaaggattcaatcacagaaaaagtcactcgacgactaat

SEQ ID NO: 9498 - DNA, 461 bp, Glycine max
  Clone ID: LIB3092-042-Q1-K1-C4
ggtcagatgatgggtacaattggaggaaatatggccaaaaacaagtgaagggaagtgaggatccgagaagttattacaaatgcacataccccaactgccctacaaagaagaaggttgagaggtctttagatggacaaattactgagatcgtttataagggtactcataaccatcctaagcctcaaaatactaggagaaactcatcaaattcctcttctcttgcaatccctcattcaaatcccatcagcgctgaaatcccagatcaatcctatgccacacatggaagtggacaaatggattcagctgccaccccagaaaactcatcaatatcaattggagatgatgattttgagcagagttctcaaaagtgtaaatcaggaggggatgaatatgatgaagatgaacctgatgccaaaagatggaaaattgaaggtgaaaatgagggtatgtctgcccctgga

SEQ ID NO: 9499 - DNA, 460 bp, Glycine max
  Clone ID: LIB3092-042-Q1-K1-C6
gggcggctgcgagacccgttgtgttctctcttctctctctcttcttttttttttctgtgtcccgctcttcttcgctccttttagggttttctcaactcttcgatttggggcttaaaccctctccgattcagattcggatttagggcttccctttctctattccgcctccaaagaaaaacagatctcgtggttggttcgtcatggccaccgttgctaatcccgcggatcaagcaactgatttgctacagaagctatcgttagaaactcagcccaagcccttggagattcctgagcctaccaaaaaggccactgggaatcagtatggatcagttgattcaggaaatgccgcgaatggccagatccagtcgtatgatcggtctgtaactcccgtgttgcaggattttattgatcctactatgtgttacctcccaaatggttacccatctactgcctattatta

SEQ ID NO: 9500 - DNA, 340 bp, Glycine max
  Clone ID: LIB3092-042-Q1-K1-C9
tgctcacatatgctcagccatgggaccttcaatcaggttaaatatcagggagatgcttgattgcagacctccatcagaatagaaccctcacatgtaaatgttcgtttggcctcagtcagctatcccgggtgccattgtgagatcttgccaaatatttattcaaagatgttaccaaagttacatacaggggatgggatctctctgttccaaatgtttgcacactgctacattacataatctttgaccccggctgaggattttccttgtattactttgtaactaacaccagagatctaattatattttctttcgtgggaataaattttcatttttacgtttt

SEQ ID NO: 9501 - DNA, 224 bp, Glycine max
  Clone ID: LIB3092-042-Q1-K1-D1
ccttacaccttacgaagtattaagtttacataaacacttaataaatacggctccatgaagcttattactgaggaagcggactatacgtcattcacttaagcaagtgaacctgcatctcttgatctgatctcacttttcatggatattcatttgtatgagctattcccgttactgattatacataattcacatacttattactactattttgataatacagttat

SEQ ID NO: 9502 - DNA, 496 bp, Glycine max
  unsure at all n locations
  Clone ID: LIB3092-042-Q1-K1-D11
ttcccggtcggcnacgcgtccgcttcccccattttttcctctttcttcctcgcctagctagctccagaaaattaggatctgcttgagatctagtgtttccctgtcccaaatcacgagtccattgagtttgattttgtggatgaaaagcatagatagggcttttgcaaaactctccaatgtttcttgaaattatatgaccatgcgtcgaattcgtatgctgcactccttctccgtcgtgttcctctactggttctacgttttctcatgaactccctcttaaatccgtgattaattagatctatctccttagttaatccttgtcttttccaataattaattagatctgcgtctcctttttggattagtttcttttttggttctgttatcaaatcaaataaaaaatctccttctcggaaatggcatcaccgatccaacaacaacaacgctcgactactacaagttctggatctgaaggaggagatccgcatatcatcga

SEQ ID NO: 9503 - DNA, 476 bp, Glycine max
  Clone ID: LIB3092-042-Q1-K1-D2
cttaaaaatattcagtgaagatcaacctcaatggcatctcttggcgtgcgaccaggtgttcccgctccattaacttccatctccgacccacctcctcttttcgatggcaccaccaggttgtacatcagttattcttgcccctatgcacaacgtgtgtggatcgctaggaactacaaggggctacaagataagatcaatttggtccctattaaccttcaagacaggccagcttggtataaggagaaagtctaccctgaaaataaggtgccatccttggagcacaatggcaaggtgttgggagaaagtcttgatttgatcaaatatgtagatgcaaactttgaagggacacctttgtttcccagtgatcctgccaagaaagagttcggtgagcaattgatatcccatgttgatacattcagcaaagacctgttcgtttcattgaaaggggatgctgtacagcaagccagtcccgcttt

SEQ ID NO: 9504 - DNA, 479 bp, Glycine max
  Clone ID: LIB3092-042-Q1-K1-D3
atggcttctactcaatgtttcttgcaccaccatgctcttaccacccctgccagatcccgatcacagcgcatcatggttagcaccaagcctaaccagcttgtttgcaaggcacagaagcaagaggatattgatgtcagcccaatctctcgccggttagctctaaccgtgctcattggtgctgctgctgttggctccaaagtccaacctgctgatgcagcttatggggaagctgccaatgtgtttggaaagccaaagacagacacagatttcctgccatacaatggagatggattcaaactatcgattccctcaaagtggaacccaagcaaagaggttgagtacacaggtcaggttgttagatatgaggataactttgattcaaccaccaacgtggttgtcaccatcactccgactgataagaagtctatcactgactatggttcacccgaagagttcctctctaaggtggattatttact

SEQ ID NO: 9505 - DNA, 358 bp, Glycine max
  Clone ID: LIB3092-042-Q1-K1-B3
accttttctcttcctcaactatctcgaggcattagggtaatcgtatcttggtcctacacaatacacatgaaacaactcagcatgaacatgccaccctcattaacattgctgataaccctatcaaagtgcaccttactattctatacaactactaaaaataccccgcatttcatatcatcatcaccgataacgatttctcaacactatatgcttcactcattcattatgcacgcatgtaaaccatctactgaacacctaccatttaccatcattttggcatctataatgaaaatttcctcactaacaatgcttctaatgatgacataccctagccattttacaccttccccagacaatc

SEQ ID NO: 9506 - DNA, 386 bp, Glycine max
  Clone ID: LIB3092-041-Q1-K1-H6
cccacgcgtccggtctcaaaggcccacgattcctcactcttcttccatagcctgcggccttcactctcatctcctggtctccagtgagatgaaccctagctccaattggtcccattagttacctctttcctgcatctcatatatcccattctttctcattcacacagcatcatgggcgtcaaaggttttgttgaaggaggcatcgcttccatcatcgcaggatgttccacacacccacttgatctcatcaaggtccgcatgcagctccagggtgaaaacaatttgcccaaaccggttcaaaatctccgacccgcactcgcctttcaaaccggttcgaccctacacgtggcagctgcaagttcttcgcccgcgtgggccccatctcg

SEQ ID NO: 9507 - DNA, 292 bp, Glycine max
  unsure at all n locations
  Clone ID: LIB3092-041-Q1-K1-H7
cccacgcgtccgaaggcataggaccagtangaaacataggctaatttccaacaccttagtaatgtcaacatgcaagatgatggtgttgctcaaatggctggacccaatggaagatcacctttgccagacatatttcaaccaaattttcaaactcaaactcctagctcaatgatcaacacttcaaggaaagaagaaactaaagcattngactttatctcggaccatatgacctctggtcgtgattcaagaggatgagattaaactttctatcttgagcctgtgtggaggatat

SEQ ID NO: 9508 - DNA, 329 bp, Glycine max
  Clone ID: LIB3092-041-Q1-K1-H8
accacgcgtccggaggaagtgggggaagtacgtgtcggaaattaggttacccaacagccgtcaaaggatttggttgggttcctatgacagcgccgagaatgcatgacgcgcgttctactctggcttgtactgatgacatggaccagaagggcttatctgtgatggtttttagcacggacgaatctacgaacaaggctgtagtgtgtgccggagtgccagagaaaggaggtaaaggtaatctggatgtggcagattggctgagtaatgctttggggcctctaaaagggagatgtggtaaaggaaaaggtggtcttgcaacgggtcagggt

SEQ ID NO: 9509 - DNA, 475 bp, Glycine max
  Clone ID: LIB3092-042-Q1-K1-A1
aacgtactttgcaaaaaccctaaaccctctctctttctctctcggcgactctgcactcggcaatggcaacgcaatcgttagacgaagaaacaactaagaaagtcatacgacaggttgagttttatttcggcgatagcaaccttctcaccgatggtttcatgaggaatagtatcactgaaagcgaagatggcatgattagtttggcgctgatttgctcgtttaatcgaatgcgaaagcaccttaatttgggtgatgtaaagcccgaagaagtggcccaagataccgtgaatgctgttgctcaaactttgagaaattcagctacactcaaggtctccgaagatgggaaaaaagttggcaggaaaactgaacttccaaagctagaagaggttgagcaggtggagataagaacacttgctgtatcgccatttgaacatgatctgaagctttgagatgtggagaaactctttgtcaatat

SEQ ID NO: 9510 - DNA, 472 bp, Glycine max
  Clone ID: LIB3092-042-Q1-K1-A10
cagccacatggtctaaagctcatattggaagactacccttatgcagctgatggaatactaatctggtctgcaatagaagactgggttcgaacctatgtgaaccattactaccctcactcaagccttatatgcaatgacaaagagttacaatcttggtactctgagtcaatcaatgtaggccatgctgatctcaggcatgaaagttggtggccaacattgaacaatagtgaggatcttgtgtccattctttccacattgatttggaatgcatctgcacaacatgctgctctcaactttggccagtacccttatggtggctatgtgcctaatcgtccaccactgatgagaaggttaataccagaagagggtgatccagaatatgcaagtttccatgctgaccctcagaagtattttctgaatgcattgcctagcttgctgcaagccacaaagttcatggctgtggttgacacac

SEQ ID NO: 9511 - DNA, 308 bp, Glycine max
  Clone ID: LIB3092-042-Q1-K1-A12
ttcaaattacttccctatcaactttaggtggtattataaagggctaccatcctaaccacatgttaccaataattataattctattccataaatgcaaccttataaatcattaccacatccaattaaggcagcaatctctcaaattacccaatcctcacaccctaatttattaacaataaataacaatactcttctcattcaatctcctaattttaatcattacaatctaaatcccttaaccattatccattatatttcaaatcttataccaacatcctctgtaatttcatttccaataacatatattt

SEQ ID NO: 9512 - DNA, 321 bp, Glycine max
  Clone ID: LIB3092-042-Q1-K1-A2
ctttgcaaaaaccctaaaccctttctcattctctctcaccaactctgcactcagcaatctgaacacaatcctcagaccaagaatcatctaataaagtcatacgacaactacatttatatttcacctataacaaccttctcacccaaccttttataaccacaaatatcactcaaatcgattatacctttatttcttaccctcctatttgcccttttaatttaatacaaaattaccctaaaccttttcatccaaaacctcaacaattttacccacatactctcaattctacatctcaaacttttaaaaattcaaccacactca

SEQ ID NO: 9513 - DNA, 215 bp, Glycine max
  Clone ID: LIB3092-042-Q1-K1-A3
aaaacccggatacttaccctaaattcatccatcaattttaatcttaaaatctctaatccaaatttcaactcatacactaactcatcaaacactatacttttatctcaatagacacaaaataccccttctcttatttcctaccacactctaaccccacaaaaccctacaaccacctaaacaacaatcataaccttcactccaaacactaccaactc

SEQ ID NO: 9514 - DNA, 445 bp, Glycine max
  unsure at all n locations
  Clone ID: LIB3092-042-Q1-K1-A5
cgattccactcccaccgaccaaaacgcgcaacacgttgtaattaaaacgacaccgaagctaattgtcgtcttcagcgaaaacccgaatccggacccggttgtgatccgccaggtttgggcttcaaatctcgaatccgaattccaactcatccgcgaactcatcgaccactatccttttatctcgatggacacagaattccccggtgttgttttccgaccacacctggaccccacaaaaccctacaaccaccgcaacaacaatcgcaaccgccactccgaccactaccgcctcctcaagtccaacgtcgacgctctcaacctcatccaggtcggcctcactctcaccgacgccgncggcaacctttccgatctcgccggaaaccgctccatctgggaattcaacttccgtgacttcgacgttgcgcgtgacgcctacgcgctggac

SEQ ID NO: 9515 - DNA, 475 bp, Glycine max
  unsure at all n locations
  Clone ID: LIB3092-042-Q1-K1-A6
cggagaaacttggcagttgatatttggtggctcatctgtttctggttgaagtgtttgggcancagtgccatggtaggcggaaccatgatggctgcgtatttgcgtgtatccatgcccacttccccacagtcccccaccactacgaggaggagatgcagaaatctgaaaacttcttgctccgttaacagacccaaaattccaatgccccctctcaaccctaaagacccctttctctccaagctcgctttcgtcgctgcttcttcccctgaaacgctcctcaacactcccaaaaactccgacacccttccttatctcgacatcttcgactcccccaaactcatggcaactcccgctcaagttgaaaggtctgtttcatacaacgaacaccggcccagaaggccgtcacctgacctgccttcgctgcttctccatggtagaattggttacattggcatgcctttggtgccagctgtca

SEQ ID NO: 9516 - DNA, 391 bp, Glycine max
  Clone ID: LIB3092-042-Q1-K1-A7
tttctttttattaagtttcatgtttttagaaacactgaacaaaaaaggtacaggtacatttagttgaggaggcagatgaagctgcatttcctgcagcaagtgaagctgcatttcttgatctgctttcattaatcatggatagtcattattataaactattcccttaactgaatatacataattcacatacttattactactattctaataatacactgatcaatatctcacacttgcttcatcttcaaatagtatccatcatactaatatattatactgtttataaaacatttgtattgaccaatctttcttcatattcttctatttctaatctacacttctctctatatatatattttttatatcatctaaatttatttaccaattaatt

SEQ ID NO: 9517 - DNA, 469 bp, Glycine max
  Clone ID: LIB3092-042-Q1-K1-A8
cgcccacgcgtccgatgtaatacatgctaaaaaaagccttgacttcatagtccttacggtaatatgcctctttcctcttcttggtcttctttctttcttccgccactgccgcagagcgtagaaggaaatcaaacagcagagagagggtaaagcatacgtgggttaaatccatgcgcatgagtcggaagaatttgtgttagcggtgaggagatatattgagaattaatatttgatagtgtatatatggggaggggaagagtggagttgaagaggatcgagaacaagatcaataggcaagtgacgttctcaaagagaaggtctggtttgctgaagaaagcgcgcgagatctctgtgctgtgcgatgctgatgtggctctcatcgtcttctccaccaaaggcaagcttttggactactccaaccaaccttgtacggaaagaattcttgaacggtatgagaggtattcgtatg

SEQ ID NO: 9518 - DNA, 464 bp, Glycine max
  Clone ID: LIB3092-042-Q1-K1-A9
acggagagtttgaggaagaaatcatcatggcttctgcagcatctgggtttgtgctgtctcttaatgttgcagcttccaccacagactcaagggtggtcttgttcaacacaaagaacaacgcttctagacttcttgtgagggcttcagatgagcctgcagcggcggcacctgccaccgccacacccccagctgaagctgaagccaaaccaaaaccaccaccaattggtcccaagagaggtgctaaggtgaagattcttaggaaggaatcctactggtacaaaggcactggttcagtggttgctgttgatcaggaccccaacactcgctaccctgttgtggtccgattcaacaaagtcaactatgccaatgtatcaacaaacaactatgctttggatgagatcgtggaagtggaatgagtccaatttatttgtaattttgatacttgtcatgctatcgcagttact

SEQ ID NO: 9519 - DNA, 456 bp, Glycine max
  Clone ID: LIB3092-042-Q1-K1-B1
gcgtccgctcctttcgccttaggaagcatcatgtgtagagaaacactgaagaaaaaggctgtcattgagcagattgttgaggaagcagaggaagcggcatttcctggagcaagtgaagctgcatttcttgatctggtttcagtggtcatggatagtcatttggatgagctattcccgtgactgaatatacataattcacatacttattactactattttgataatacagtgataaagtggtcgtgcttgtttcgtcttcaaagaggatccatcaaactcgtttagtagactgtggttaaaacttctgtattgaccaatcaagcatttgatgcttgtattgcaaatatcgacttctcttatatatatatctcttataacatggaaatatattgaccaggaatgtttatggagtcctgtgcaataatattcctcttatgttctttggtgaatataaaa

SEQ ID NO: 9520 - DNA, 459 bp, Glycine max
  unsure at all n locations
  Clone ID: LIB3092-042-Q1-K1-B2
gaagccgcagacatgatcaagaagggaaagatgtgtgctctcttcatcaacgatcttgatgcangagctggtcgtcttggtggaactacacaatacactgtcaacaaccagatggtgaatgccaccctcatgaacattgctgataaccccaccaatgtgcagcttcctggtatgtacaacaaggaagagaacccccgtgtgcccatcatcgtcaccggtaacgatttctcaacactgtatgctcctctcatccgtgatgggcgtatggagaagttctactgggcacctacaagggacgatcgtgttggcgtctgcaatggaattttccgcactgacaatgttcctaaggatgacattgtcaagcttgttgacaccttccccggccaatctattgatttctttggtgcactcagggctagagtatatgatgatgaggtgaggaagtggatttctgttggt

SEQ ID NO: 9521 - DNA, 494 bp, Glycine max
  Clone ID: LIB3092-041-Q1-K1-H4
cggtccggaatcgtccgaagcaggtcgctgaggaaaacaagcgtaaagctgtaatgattacagcagagaaggctgaacttgctgtttcaaatgggaaaacattttgtatatctcttgttgatgttggtctggatgtagctgcagttcgtgaggctgttacaaaagtcatggaccagaagggcttatctgtgatggtttttagcacggacgaatctacgaacaaggctgtagtgtgtgccggggtgccagagaaaggaggtaaaggtaatctggatgtggcagattggctgagtaatgctttggggcctctaaaagggagatgtggtaaaggaaaaggtggtcttgcaacgggtcagggtacagaggcatcacatgtaaacgaggctatagatctggcagaaaaatttgcgtcgatgaaattgagttaatggtgtatttgcagtatatccttcctggggtgtaagcatgatatggatctttcgtttggtggtata

SEQ ID NO: 9522 - DNA, 375 bp, Glycine max
  Clone ID: LIB3092-041-Q1-K1-D8
caacgccagttcacactctctgcttcgcgtgtaccaacaagtgcaagttcgaatcaatggccagcgctcagctcacagcaatagcgtcatcgatctctacggcgtcgtttgaagggcttcgaccttccgctgttcagtttgcttccacgggcagaattagaattggcaatctctcccaaaggtccttccggggcttggttgtcaaagccgccaccgttgttgcccccaaatacactgcgatgaagcctttgggagatagagtgctaataaaaattaaggaagcagaggagaaaactgagggtgggattttgctttcatcaactgctcaaactgaaccttaaggtggtgaggtggttgctggtggggaagggaaga

SEQ ID NO: 9523 - DNA, 398 bp, Glycine max
  Clone ID: LIB3092-041-Q1-K1-D9
tcgcccacgcgtccgcatcttcctctttttctcaaccaaaaggggttcaattctagctagttggatacatcgtccgcgaccatgaacatggcgatcgtgcttctgttcatggttttcgcagtctcatcagctttagacatgtcaataatatcacatgacaacgctcatgctgatagggccacgaggcgcaccgacgactaggtgatgtcaatgttcgaggagtggctggtgaaacacgactaggtgtacaacgcgctcggtgagaatgagaagaggtttcaaatcttcaagaacaatttgcgctttatcgatgaacgaaactctttgaacccaacctacaagttgggactcatcgtgttctctgatcttacccattctgaattcagaatccttgtcct

SEQ ID NO: 9524 - DNA, 246 bp, Glycine max
  Clone ID: LIB3092-041-Q1-K1-E10
tgcctgctcaagtacaagtgctacactcagactgtcaaatgttgcagagagcacaagcgtgcagcggcgtaagtgttaccctaatactaataagctgaaagttatagcggggtttggaagttgttctggagtggcagtgggtagcgagagaaagaaaaggaattggaaaggttagggttcggattttggcgagctctatgtccgacgaagcaatgagtgctcattcaaaagtgactcagaaagtat

SEQ ID NO: 9525 - DNA, 409 bp, Glycine max
  Clone ID: LIB3092-041-Q1-K1-E3
acgaccacgcgtccgcaaaattgtttcaagcaccgacagaaccggaagcaccctttgtttcaaaggttcaaagaggggaggacgggttattcacatttcatttgatggtcagaggcgaattgaaagctaagctgtggtaattctaaggattccccccgggaaaaatagagatgtctcctacgttacccgtaccatgtggaagtagcgacgtaatttcatagagtcattcagtctgaatgctacatgaagaacataagccagatgaaggaacgggaagacctaggatgtagaatatcataacatgagtgattcggcagatttggattcctatatacccactatggcggtacttcattgtatgatctatatctatatagctatatctatatatctatctatagatatatag

SEQ ID NO: 9526 - DNA, 438 bp, Glycine max
  unsure at all n locations
  Clone ID: LIB3092-041-Q1-K1-E4
gcggagtgaatggtgagggagcgggtgtccagatagaaggggccgctgtggggggtttggagactgaagagtgccgaggcgtggatggtggatgagggcaagtccaggtagagactcagggctacgtgccttgtccttgcttgccttgagtccgtgaacgagtgaggatcaactgctgccatcttcctaaattctctctctctctctctataaacttctctctcttcccctctttccttctcactctctctctctgtcaaccgactcactcactctcttactctctgcatgcttctgctttttctctcggtctgattccgcggaatcaattcaaatcagcttctgggaatcgaatctcagatctcggagatcagaatggtggatccaactggaaaaggatcggnaggtgaagtgaggactcaaactcaaaccctacgc

SEQ ID NO: 9527 - DNA, 206 bp, Glycine max
  Clone ID: LIB3092-041-Q1-K1-E5
caaagtcatttagatccattaggtaactaaatgactatgtagacgcgtgtgtcgtcacgataattacgtaccgataatgcagccgatctagcatctaaatgggtgtgtaatattattgtctctaattcattttattcgcactgtaaacaaaattcagattacacaaatcgttcatcattacatgaacatacagattctaggttcat

SEQ ID NO: 9528 - DNA, 283 bp, Glycine max
  unsure at all n locations
  Clone ID: LIB3092-041-Q1-K1-F1
attctcctttattaatttttaatcctttttttctccaaatctaacgggcccctcttcttggcaatcattatatttctcttcactcattctatctaataatttcacattctcttttctttttttcttaccatttactttatttcatctctaccatattacatatccccaaactatttcattacttttccctataatcaattccctcatgtttgctcactctgtaaaggctgtatcncattcttncactcgccggactttcaccgtctgangagaaccaccaaac

SEQ ID NO: 9529 - DNA, 128 bp, Glycine max
  Clone ID: LIB3092-041-Q1-K1-F3
cttcccgcatcacgcccaccaccaaattatcctcatccaaacaaggcacaattaccatgtccctaaccccacacccctactacctccattccttcaaattccatcccatcaaacaatccatcttatca

SEQ ID NO: 9530 - DNA, 382 bp, Glycine max
  Clone ID: LIB3092-041-Q1-K1-F6
ttaccttttctcttaatccaaatacgatggcagccatggcaaccacaaccctctcttcaaaccccaaactctcattcttcaacggaaagcccgtcacatattcttcccgcgtcgcgcccaccaccaaattatcctcatccaaacaaggcacaatttccatgtccctaaccccacccccctacgacctccagtccttcaaattccagcccatcaaagaatccatcgtgtcacgggaaatgacgcgccgctacatgaccgacatgataacctacgccgacaccgacgtcgtaatcgtcggatccggttcggccgggctctcctgcgcgtacgaactcagtaagaaccctgccgtgagcgtggccatagtcgagcagtcagtgag

SEQ ID NO: 9531 - DNA, 288 bp, Glycine max
  Clone ID: LIB3092-041-Q1-K1-F9
tcgtccacgcgtccgcagacctatttctcatggttctaagctacatgcactaattggtgcctggcatagtggcactgttctagatttgccatttctttgcagaatgaacaggagtgggcaatatgtatgggaggaccatcgccctagatctggtgtatggaagggatctagtggtggagacattatctgcttcagtggatgcgatgatcattaaacttcagctgatacatctgctctatcgaagattacattgactggggcaatgacattttgcttcatccaatccat

SEQ ID NO: 9532 - DNA, 159 bp, Glycine max
  unsure at all n locations
  Clone ID: LIB3092-041-Q1-K1-G1
cggacgcgtgggcgcgaacagaacagcaacgttaacaatgggttctcgctacgaggtggaactgaagctctcatcggcacgcgctctcaagaacgtgaactggcgccatggcccgaaccgnccatacgtcgtcgtttgggtcgacccaagcaacaagct

SEQ ID NO: 9533 - DNA, 421 bp, Glycine max
  Clone ID: LIB3092-041-Q1-K1-G3
aattcccggtcgacgattcatacggtacgcgtccggatggcttttcctcttcttactccttacaagatgggcgaattcaatctgggccatagagttgttttggcaccgctgaccagacagaggtcttacgacaactgcccacaaccccatgccatcctctactactcccagagaacttccaacggaggccttctcattactgaagccactggcgtctctgacacggctcaaggctatccgcaaacccctggcatatggactaaatgcattgttcaagcttggaaatccattgtcgatgccgtccacgccaaaagcggtgtttacatttgtcagatattgcacattgagatagatatatatttagtttatcagccaaatggacaagctcccatatcttctacggacaagccactctcacccc

SEQ ID NO: 9534 - DNA, 299 bp, Glycine max
  Clone ID: LIB3092-041-Q1-K1-G6
tcgaagaaaggatgacagcatactttaacaaggtgggttggcctgcgaatgccccaacaggtgaacaagaaagaaaagaattcatagcttcactccacaaacaaaagacagaactatttatggcccttatagagaaaaaactgttgcctcttcgtccaggtgttgcaaagattatcgatcaggcttttgctcaaggagtccaagttgcagtttgcagcacttccaacgagaaggcggtctctgcaatagtaacattcttgctgggacctgagagagcagaaaaaatcaagatatttgca

SEQ ID NO: 9535 - DNA, 397 bp, Glycine max
  Clone ID: LIB3092-041-Q1-K1-G7
ttattttcctttgtaagggaaagtagaaacccttcatcgtcaaagcacgcgttttttttaatctctctctctcaacaaatatttgtgggtagattcaattcaccatgtcgagctcatcggagtactctgaattttccggccagaaaccggcgaggtcgccggagaaatcgagcttctctcagacttgcagtctgttgagtcaatacatcaaggagaagggtagcttcggagatcttaccctcggaatgacatcattggggtcacctgagacatcttgtcaatctgctacaaccatgaacttggttcctcccaagaaaacaacgtgcaccaaagaacctgacagctatggatttgctctcttcacaagctttcttctatggaccttcagaggagattc

SEQ ID NO: 9536 - DNA, 415 bp, Glycine max
  Clone ID: LIB3092-041-Q1-K1-G8
ggggggctgagtgagcacacccaagaaggttctaattggggcgacaagaaatttggttcatgcgatgtatctggtgattccagtggaaatcagggtagtaatggttggggtcagaaaagcaattggaactctggatctaggagtgggaatgagaaccagaattctcactggagttctgggcgtaatgagcctggaaatcaagattccaacttggacaagaaaagcaattggaactctggaaacagtggaaacctggcttccgatccaaaaagtaacaattggaattctggatctggtaattccaatgaaaattccaactggggaaccaatgtcaataacaaatcttcatggggtactggaaatgaaaacaagaattccagctggagttctgggcatagtgatcctggaaataaga

SEQ ID NO: 9537 - DNA, 176 bp, Glycine max
  Clone ID: LIB3092-041-Q1-K1-G9
cccacgcgttcgtacacgcgtttgtccacgctttcgtccacgcttgcgcaccgagcttgggacggaactttttgataactagctgagtgaagacgacatctgccagccattccaactcacagagaggctattatcaattacctttccttgattgttccgtcttatactctctatag

SEQ ID NO: 9538 - DNA, 436 bp, Glycine max
  Clone ID: LIB3092-041-Q1-K1-H1
gaaaagggcttcaaggctagtggatcaagtttatggaaaaatgattcaaaatgcttagcatggctagacaaatgggaacctaactcagtcatatatgttaattatggaagtataacggtgatgacagagcatcacttgaaagaatttgcttggggactagcaaatagcaagcaacatttcttatggataataaggccagatgtagtaatgggtgaatctatatctttgccacaagagttctttgatgcgatcaaggacaggggatatataacaagttggtgtgttcaagagaaagtgctttctcatccatcagttggggcctttctaacccattgtggttggaattctacacttgaaagtatatctgcaggtaggcctatgatttgttggcctttctttgccgagcaacaaacagattgcaagtatgcatgcacaa

SEQ ID NO: 9539 - DNA, 263 bp, Glycine max
  Clone ID: LIB3092-041-Q1-K1-H10
ccctcgcacaggcttcaggcgagtttgctgtaatttgaatccccggtattggcggcaatggtagctatttgtagcccccaaaattctgcacctgtcaaacaatacccccattaatcctcttatctttttcggggctatttccataaaaacacccgccatgctctttttagatggattgtcactctggagacttcatacatatacgattttgctggtgtttattcccggatatacaacattgtagactactggatcaccctcta

SEQ ID NO: 9540 - DNA, 256 bp, Glycine max
  Clone ID: LIB3092-041-Q1-K1-H11
cccacgcgtccgctcagctgtgtctgtttgcaatatataactctcacctttctaccattgctgtgcacctctttctccttttgtcaaattcttctgttcaacaggtctttgccaatggatactaagtcggctgtagaattaatggagtcttccgcagaggttcatttttctggatttcacatggatggttttgagcaaagaaaggctagcatagaacaaccaacgacctcataacctgacatgtgtaaacaacctt

SEQ ID NO: 9541 - DNA, 185 bp, Glycine max
  unsure at all n locations
  Clone ID: LIB3092-041-Q1-K1-D5
gaagcaagaggatatcgatgtcagcccaatctctcgccggttagctctaaccgtgctcattggtgctgctgatgatggctccaaagtccaacctgctgatgcaacttatggggaagctgccaatgtgtttggaaagccaaatacagacacagaattccatccatacaatgganatggattcaaac

SEQ ID NO: 9542 - DNA, 350 bp, Glycine max
  Clone ID: LIB3092-041-Q1-K1-H12
gtcgacgagtatggcaatgttgagaggcaaactgacgaatatggcaacccggttcatgccactagtgtcacttatgtagccaccaaaagtgttggtggctacaatgatgacgcttataagcaacatgatattactggtgtctatcccgagaaagacaccggtagacatcattttggtcgtggttacgacggtgacactaacaagcaacatgatgctactggtgtttatcccggaatagacattggtagagatcatgggactaccggtgtttatgggctaaacaccgacagacatcatggaacttctggggtgaatcccgggatatacacccatatccaacaacatgggac

SEQ ID NO: 9543 - DNA, 430 bp, Glycine max
  Clone ID: LIB3092-041-Q1-K1-A7
gtcgacgacgcgtccgctctctcacgagaagaatactactaactgtgttgtaatacctcagtggagaacaagatgaatccatggaacatgagaacttccaagttactctctcaacaacttgcttatcctccttatcgcttggtagaagagattccaaacatgggaaattccagttgtgtgagcaaggagccaagaggttcacagatgacaatcttttatggtggccaagttcttgtcttggatgatattcaagctgacaaagccaaggacatcatgtcttttgccggcaaaggaatgtctcaaaaccagaacgactgtgcttacactttccctgctacaacttctgctactcccagtagaccattccctttgcttatgaatatcattccaaccactgccaacaattcggttcaagaccaccctcaaacac

SEQ ID NO: 9544 - DNA, 299 bp, Glycine max
  Clone ID: LIB3092-041-Q1-K1-A8
ctctatgaagagaaggatactactaactgaggtttaatacctcaatgtgaaaacaagatgagggatgaacatgagaacttccaagttactctctcaacaacttgctgatcctccttatcgcttgagagaagagattccaaacatgggaaattccagttgtgtgagcaaggagccaagaggttcacagatgacaatcttttatggtggccaagttcttagcttgcatgatattcaagctgacaaagccaaagaaatagtgtcttttgcccgccagggaatgtcttaaaaccagaacgact

SEQ ID NO: 9545 - DNA, 447 bp, Glycine max
  Clone ID: LIB3092-041-Q1-K1-A9
cccacgcgtccggaactggatagacagagtgtagtacgtgaaaaggaaagcgcgggaagaaagcacagcctctactacatcatcccatttcagtaccttttctttctgagtctcagtttcaacaattgaagaagaaaatggttgacaatgaatcgctctcagaattcctcgcatctgcggtcgacgcggctcagaaagctggcgagattattcgaaaaggcttctaccagaccaaaaacgtcgaacacaaaggacaagttgatttggtcacacgaaactgataaagcatgtgaagaactcatattttataatctcaaacagctttatcccactcacaagttcatcgggggagaaaccaccgctggctatggcaccacagaacttacagatgaacccacctggatagatgatcccctggatgggactactaactttttgcatggggtt

SEQ ID NO: 9546 - DNA, 362 bp, Glycine max
  Clone ID: LIB3092-041-Q1-K1-B1
ctctctcacgagaagaatactactaactgtgttgtaatacctcagtggagaacaagatgaatccatggaacatgagaacttccaagttactctctcaacaacttgcttatcctccttatcgcttggtagaagagattccaaacatgggaaattccagttgtgtgagcaaggagccaagaggttcacagatgacaatcttttatggtggccaagttcttgtcttggatgatattcaagctgacaaagccaaggacatcatgtcttttgccggcaaaggaatgtcttaaaaccagaacgactgtgcttacactttccctgctacaacttctggtactcccaagagaccattcccttttcttatg

SEQ ID NO: 9547 - DNA, 133 bp, Glycine max
  Clone ID: LIB3092-041-Q1-K1-B10
cccccacaaacacaacttccaacttttctaataaaaaatattcccggcattaggtaccaaattatcaattcctatcatgatcaatatagtattgccattgctacacatacaattcattacaacaccctttaac

SEQ ID NO: 9548 - DNA, 203 bp, Glycine max
  Clone ID: LIB3092-041-Q1-K1-B3
ctcgacttacgacgacggtgcacgctcgggtgctagcatcggtgcgttcgcgaataatggatctaccataatgactcgcggcagccacagggatcgtgatcgcgaaagggctcacgctagaactggagctaaaggcaagcagaaagatgatggatggacccctgaacagcgcatggaaagagatgcaaaggcgctgcacgaaa

SEQ ID NO: 9549 - DNA, 271 bp, Glycine max
  Clone ID: LIB3092-041-Q1-K1-B5
ctttctttcgatcagggtttacgttcggctgcggactcgtttcgttctcgaataatcgatctacgataatgactcgcggtagccagagggatcgtgatcgcgaaagggctcaggctagaactggtgctaaaggcaagcagaaagatgatggattgacccctgaacagcgcatggaaagagatgcaaaggcgctgcacgagaaggccgcaaagaaagcggcacagggtgcatgagggaataatgcaggctggaagcaaagaataggaaataa

SEQ ID NO: 9550 - DNA, 280 bp, Glycine max
  Clone ID: LIB3092-041-Q1-K1-B6
agagaatctctcctttctataaacccataatttagggcgcgctttttcccggcctcccttcgccaccgtatctccatccatctccgccaccgtcgccacctctctctctctctcacagttcgtatttatacatcttctctggtcttagcaatgagcttctcaacatgcgccgagatatcgcgttgtttcgccgcagcaacggcagcagcttcagcgaaacctaattccgggaagtcaaacgggacccgcacaacatgcctcaggtttctcactccaatcg

SEQ ID NO: 9551 - DNA, 197 bp, Glycine max
  unsure at all n locations
  Clone ID: LIB3092-041-Q1-K1-B7
tccttttcgatggacccggccgtccaactaagggtccattcactttcgatctcaccgatcaccaacgatcctntttctcctcaggttcccttagtcaactttcggttttttgattgttgaggatggtcctggttttagccctgggggatttgcacataccccacagggcacctgatcttcctgcaaagttcaaatcc

SEQ ID NO: 9552 - DNA, 424 bp, Glycine max
  unsure at all n locations
  Clone ID: LIB3092-041-Q1-K1-B8
ggcggngataagattaaagattcaacaatggcctctgcttctgctactcttctcaagtcatctcctgttcttgacaagtgcgagtgggtcaaaggccagacccttcgccaacctctcgtgagatgtaacccttcctcagcatcagctctcaccatcaaagctgcttcctatgctgacgagctcgtcaaaaccgccaaaacagtggcctcaccggggcgtggtattttggcgatggatgagtcaaatgcaacctgcgggaagcgtttggcatctattgggttagagaacacagaagctaatcggcaggcataccgtaccctacttgtgacagtacctggtcttggtgaatacatctctggtgccattctctttgaggaaactctctaccaatccactgtcgatggaaggaagatcgtcgacgtac

SEQ ID NO: 9553 - DNA, 295 bp, Glycine max
  Clone ID: LIB3092-041-Q1-K1-B9
gtaccttcggagaccttaccctcgggatgacttgcacttccgaaacaaacggttcccctgggacatggggtcactctgcaacaaccatggagttgtttcccacgatcattacgcaacggaacccaactactgtggatttcctatctccccagactgcttatcctcaccactcataggttccaatcatggttaaatcaagtgcttttaagtctatggagaaagagcctaaagctgctcacttgacgatcttttatgctgggcaagttgttgtgtttgatgattttcctgctgaaaa

SEQ ID NO: 9554 - DNA, 301 bp, Glycine max
  Clone ID: LIB3092-041-Q1-K1-C1
cttttcttctcaaacaaactcttgagattctctaattccgttccttccgtaggcccctagatccggagatgaagaaccccaggaagaagaagaggccgaagccggcgcagaagaaggtacttgaggagaacaacaaaggtgttgttgttgctgggattgaaaccgaagaagaagagaagagaacacacagcgtttggaacgctctgttaggggctctcctcgtgtttaatcagggaagctatcatggcgtatgagattgcacgggaggatcccgacaggggttttgagatactcaggaaag

SEQ ID NO: 9555 - DNA, 312 bp, Glycine max
  Clone ID: LIB3092-041-Q1-K1-C10
tcgcccacgcgttcgcatcttcctctttttctcaaccaaaaggggttcaattctagcgagttctattacatcgtccgcgaccatgaacatggcgatcgtgcttctgttcatggttttcgcagtttcatcagctttagacatgtcaataatatcacatgacaacgctcatgcggatagggccacgaggcgcaccgacgacgaggtgatgtcaatgttcgaagagtggctggtgaaacacgacaaggtgtacaacgcgctcggtgagaaagtgaagaggttttaaatcttcaagaacaatctgggctttatcga

SEQ ID NO: 9556 - DNA, 444 bp, Glycine max
  Clone ID: LIB3092-041-Q1-K1-C5
cccacgcgtccggtggatgtgaaactgggaaaatggggagagcctttgtgtatgtgattcttggaggaggcgtggctgctggctatgctgctcttgaattcgtcaagaaaggagtctctcatggtgaactctgtattatttccgatgaaccagttgctccttatgaaaggcctgcattgagcaaaggatttttgcttccagaagctgctgcccggcttccatcctttcatacctgtgttggtgcaaatgaggagaggctaactccaaaatggtataaagagcatgggattgaattagttcttggaaccggagttaaatccactgatgtgaaacgtaagacactattaacaacaactggagagaccataagttacaagattctgattgttgctactggtgctcgggctttgaagctggaagaatttggggtgaagtgatcagatg

SEQ ID NO: 9557 - DNA, 299 bp, Glycine max
  Clone ID: LIB3092-041-Q1-K1-C6
ccctcagcgagtttcactgatgaagaaattgaggagttgactgtcaggattcaaaatgctggaactgaagttgttgaagcaaaggcaggtgcagggtctgctaccttgtcaatggcgtatgcagcagctagatttgttgaatcgtctcttcgtgcccttgatggagatggggatgtgtatgagtgctcatatgtggaatcagatttgactgaccttccattctttgcttcaagggtgaagcttggtaggaaaggagtggaggcattaattccatctgacctccaagggttgactgacta

SEQ ID NO: 9558 - DNA, 304 bp, Glycine max
  unsure at all n locations
  Clone ID: LIB3092-041-Q1-K1-C8
cacgacctgngttttctgattcattttcaagcactgacttggaagctttagagattgaagagggctctcctaggagtcaagggtctgaaaccccaagttcaagggccagcacttctgattcggagagtcagggatcttttgctggggcacctaataccaataaccaatggcggggtttctttaaactactcaagaaaggatcacaaatgcctttccaaccttttcacccacttaaaaatgttccaaactgacaggaggaaaagcangaggatcagggaggacctcattccttctctgaattctc

SEQ ID NO: 9559 - DNA, 401 bp, Glycine max
  Clone ID: LIB3092-041-Q1-K1-D1
cttttcttctcaaacaaactcttgagattctctaattccgttccttccgtaggcccctagagccggagatgaagaaccccaggaagaagaagaggccgaagccggcgcagaagaaggtacttgaggagaacaacaaaggtgttgttgttgctgggaatgaaaacgaagaagaagagaagagaaaacgcagcgttttggaggcactggttgaggctttctccttgtcttcaatcagggaagctttcatggcctatgagattgcaaggggagatcccgacagggcttcggagatctctgaggaagggttcttcggacagattcgaggattcattctagtgtttttcttatggttcttcttctagcggcggaagcagctgggggggcggttcttcttcttgttc

SEQ ID NO: 9560 - DNA, 397 bp, Glycine max
  Clone ID: LIB3092-041-Q1-K1-D3
gagaaatagagagagaacttcaagtgagggtgagagtgacacatatctagagagagcactagtactctaaaagtctattatattcttcaaaatatgaccatgcatcgcgagtcttgggcttttgtcttcggcgttatgggcaacatcatctcctttggagtgttccttgctccattgccaaccttttaccaaatctacaagaagaaatccactgaaggtttccagtcacttccttatagtgatgcactgttcagtgcaatgctttggatttactatgctttcgtgaaaagggaaactgccctacttctcattaccattaacacatttggaattgttgtggagtcaatttacctttctatctagctaatttatggcccaaggaagccaaggtttacaa

SEQ ID NO: 9561 - DNA, 226 bp, Glycine max
  unsure at all n locations
  Clone ID: LIB3092-041-Q1-K1-A6
gcttgttgaagaatgggcagttccttggaaaggcttggagaatttttataagaggtttagactgaattgtcttggaaagttgagaagcaatccttggtcagaactagatggtcttcagccagagacaaagataataaatgagctgctggaaaagattaacacaaagggcttnctcaccatcaatagccagccagctgtcaatggggaaaagtcagattctcctact

SEQ ID NO: 9562 - DNA, 309 bp, Glycine max
  Clone ID: LIB3092-041-Q1-K1-D4
tgcaattacaaatcggagacaatttcagcttatcgggtggccatattaaggctcagaaacctccaaatgttgcggctgctgtggtggttacaaactgcaatttagactagacccatgccaagtagaatgtaattaaattatttctctctctgtttccttgtgtagaggctatggtattgcaaaatttgttaaaagagtccaaaattattggtatgtaggtattgaattcttttgttcatttattcttttatgaagaatattgtaatatatttatgagtggaatattaatgttgacattaatttactttt

SEQ ID NO: 9563 - DNA, 438 bp, Glycine max
  Clone ID: LIB3092-040-Q1-K1-G3
aaaatcggggcgacgcacgcgtgcggggtgagcaaaatcaaagacggatatatcccggcttcttggatgttggaagttacaaggtcaacggaggaacttagtttgggtgttgattttactgacttgtacaagaattctgatctatataggataaacaagcagcttatacaagaactgggtcaacctgctcccggttcaaaggatctttatttccctactcaatactctcagtcattcttggtccaatgccaagcttgcttattgaaacaacgttggtcatattggcgtaatttaccatacactgctgtgaggtttttcttcactactttcatagcccctgttgttcggaacaatgttctgggacctcggaagtagacgtacaacaagaggagacctgtgtgaatgctctatgtttaatgttttcttgtgttttttttc

SEQ ID NO: 9564 - DNA, 412 bp, Glycine max
  Clone ID: LIB3092-040-Q1-K1-G4
ccaaaaccctaatttatcgaaaggtagggttttgcagagcctcctcctccgttaccagtttcttcttctttatcctctctcctttcttcttccattcctctaacctaagatgggcaagtcaagcaagaaatcagctatcaaggttgacgctgctccagctgtggttccgccatccaagtctgccaagaagggaggcaagcgacaagctcaagatgaaattgagaagcaagtgagtgccaaaaaacagaagatagaggaggttgctcagaagcaaaagaaggaggccaaggtgcaaaagaaggaggccaaggtgcaaaagaagaaggaaagtagttcagatgattcttcggaatctgaagaggagaaacctgcacccaaacctgtactttcaaaaaaggtacctgctaagaat

SEQ ID NO: 9565 - DNA, 423 bp, Glycine max
  Clone ID: LIB3092-040-Q1-K1-G5
cccacgcgtccgctgctttgctttctgagattggactgaacatccaagaagcacatgccttttctacaactgatggtttctcattagatgtgtttgttgttgaaggatggccccatgaggaaaccgaaaagcttaaagctgctttggaaagaggagtcttgaagaagattgagaggcaggtgaagtctagtccacaatccgtatcttctgttgacaagcccgatcaagcaaagatgaaaagcgaactggattatttgacaataccaactgatgggacagatgtttgggaaatagatcctaaacatttgaaatatggaactcaaattgcatctgggtcatatggtgaactatttaaaggtgtatattgtagccaggaagtggccatcaaagttctcaaggctgaccatgtaaactcagaattgc

SEQ ID NO: 9566 - DNA, 392 bp, Glycine max
  Clone ID: LIB3092-040-Q1-K1-G6
acactttttcctactttcttctccatccatcccttgactaattaattatccctcacaactaccaatggccgaagagaaacaccacaagcaccgcctctttcaccaccacaaggacgaggataataagccagtagaaaccgatactggttacgacaacacatcatattccaagccttctgatgactatgactctggtttcaacaagccatcgtatgagtcttctggcggtggctatgaaggtggttacaacaaaacatcttattctagtgatgagccagcttctggtggtggctatgaaggtgggtacaagaaaacaggttattctggtggcattgatgagacttctggtggctatggcgctggtggtggtggatactctgacgtcactgatg

SEQ ID NO: 9567 - DNA, 201 bp, Glycine max
  Clone ID: LIB3092-040-Q1-K1-H11
tcagggcgaaaaacaccacaacccgctttccacaccacggacgagattataagccagaaaaccatctggttacacacacaatattcaagcctttgatactatacttggttaacaagccacgatgatctttggggtggctatgaagggtacacaaacatttatcaggatagccactttgtggggctatgaagggtacaaaaa

SEQ ID NO: 9568 - DNA, 423 bp, Glycine max
  Clone ID: LIB3092-040-Q1-K1-H12
cccacgcgtccgatcagatctggagcaggagaatagcgttgggagcgttcgcgtttgttctgcttttcctatcggcctcagcagacgacgtcgttgtgctctctgaagataacttcgagaaggaagttggtcaggacagaggagctctcgttgagttctatgctccttggtgtggacactgcaaaaagcttgctccagaatatgaaaagcttggtagcagcttcaagaaagccaaatctgttttaatcggcaaggttgactgtgatgagcacaagagtttgtgcagcaaatatggagtctctgggtacccaacaattcagtggtttccaaaaggatctcttgaacccaaaaagtatgaagggccacgcactgctgattcacttgctgagtttgtaaatacggaaggaggaacaaatgtgaaga

SEQ ID NO: 9569 - DNA, 442 bp, Glycine max
  Clone ID: LIB3092-040-Q1-K1-H2
cccacgcgtccgcttttttccctttctaagacaggaacttaaacaatgaagactgcaaagggcaagggagcagcgaggccctcaaaagaatcactgaagcctgttgatgaccgaaaggttggaaagcggaaggcttctggtaagcctgagaaaagcagagcaccaaagaaggagaagaaggccaagaaagaccccaacaagcctaaaagaccaccgagtgctttcttcgtgttccttgaggagttcaggaagacctttaaggctgagaatcctctcgtgaaggctgtatcagttgttggaaaagctggaggagagaaatggaaatccctgtccagtgctgagaaagctccatatgaagccaaggctgcaaaaaggaaagctgagtatgaaaaacttatcaaagcttatgagaaaaagcaggcaagctctgcagatgatgatg

SEQ ID NO: 9570 - DNA, 434 bp, Glycine max
  Clone ID: LIB3092-040-Q1-K1-H4
acggactcgagctgttcggagcacgtggtatcgccggaattcgcgagcgaggtgcagagcgagccaaagtggaaggagtgggagaaaagcctcgagtttccgtttaattacgtggatgccactctgaacaacagcaacagcttcacgacgcaattccagggcaataatcagatgatgtcgccgctgcaggacatgttcatgtactggcccaacaagcccttctgaacaaaccgatccacgccgcccattcgcatttgcacggtagcacgagactcaaggtctatgagtgtgcctgtgcgaccacacacagacgattatttatcaagttagcttagctagggcaaagaaagataaaaacattgaagctggaaacgcatgtgtttgttgggtccaccgtctgcaccggttctttttggtgttttgctatgtgacga

SEQ ID NO: 9571 - DNA, 435 bp, Glycine max
  Clone ID: LIB3092-040-Q1-K1-H6
cccagcgtccgctttctctctttgaccaatcccaaacccaaaacaaaaaataaaaatggagggggatctgaagcagaagctgttgagaagaagaaaggaagaggaagaagaagaagaagaagagttatcattggccaagagggtgtggaatgagagcaaggttatgtggatagtggcggcaccagccatattcacaaggttttccacctttggaatcagtgttataagccaagcttttgttggccatattggttctaaggaattggccgcttatgctctcgttttcaccgttctcattaggttcgccaatggtgttctgttaggaatggcgagtgcgttgtcaacactttgtggacaagcatatggggcaaaagaatatggcatgatgggagtgtatcttcaaagatcatggatagttttgttcttaactgcagt

SEQ ID NO: 9572 - DNA, 409 bp, Glycine max
  Clone ID: LIB3092-040-Q1-K1-H8
attctctcttctctctgcatcgcttcggttcttctgaaaagatgtctcgcgtgtatgttggtaacttggattcacgagtcaccgagagagatctcgaagacgaattccgtgttttcggagttattcggagtgtttgggttgcacgtagaccacctggttatgcttttattgactttgatgaccgcagagatgcacaggatgctatccgtgaattggatggtatgtttagaagaattatgttgttggaatgtaatagaattaaaatcaaaattaaaatgtgcatatatatgtatatttgctacattcttcttatctgctaatgtgttattgtttttcccccatgttttttccggttgatatgttgaagggttttcctcaactagctagttaagtcttctttttggcctat

SEQ ID NO: 9573 - DNA, 292 bp, Glycine max
  unsure at all n locations
  Clone ID: LIB3092-040-Q1-K1-H9
cccacgcgtccgnccacgcgtccgggccgccgggccaacggactcttttgggccaccggttgaaggcccaacccctccgccaatttttcattcgccgcggccaaggccattaacggcttgaaggatcaaagccaagttttaacttccccttacccaacttacgtgggggttaacaacggcaacgggggcccgaaacttcttgaattgtgaaacagcgcctctttccttatatgcacacattcgccactgagcaaagaaggttgtctgtggatgtgataaaaaaggcattcag

SEQ ID NO: 9574 - DNA, 193 bp, Glycine max
  Clone ID: LIB3092-041-Q1-K1-A1
cgtcgcgtcaagcgacgcgttcgattatggcgatatcgaaaagcccggatgtcgaggaattgattacggaggaagtggaccggctgatgggtccggaccaggagtttccttcgattgagcaaatacgacaaatgcattacctgaacgcagtgattcacgacggcttgatgctggaccaaccgattcagttata

SEQ ID NO: 9575 - DNA, 388 bp, Glycine max
  Clone ID: LIB3092-041-Q1-K1-A10
cccacgcgtccggcaaatctggccctgtctctgctgatatgagaaatattgtggacattgaacaagaaagaagcttctacttgtatgatgatatgagagtagtgtttcctcaacgtcattcagattctgatgagggcaagttacatgtggaatatcatttcccttcaaatccaaaatacttcgacatcagctgctgaaatgccgctgtctctcagtgatttttgtatatatagttgtaaatgttgtacgtatacaattcatttctttcaattctggggtgaattggcttcaaggtacctattaattggaaaattggaatggaaaatgtcatatttgaatcataacacttgctttgacccaaaaaaaaaaaaaatttaattataatttt

SEQ ID NO: 9576 - DNA, 237 bp, Glycine max
  Clone ID: LIB3092-041-Q1-K1-A2
gaataattcagactgcaacatcgtgaacgagcttgggtttcctcgaatgttgatgcaccttgcctcaagtgaagattcagatgtgagagaagctgcccttcgtggccttctccagcttgctcacaatgcgaaagatggcaaggatggcaatgagaaagacagtgcgaaaataaagcaacttcttcaagaacgaataaacaacatcagtttaatgtcagctgaggaccttggtgtagt

SEQ ID NO: 9577 - DNA, 323 bp, Glycine max
  Clone ID: LIB3092-041-Q1-K1-A4
catttgcattctcaggagttctctttcacttcttcacgccatctggacaagactgtggactcaatgtctttttcattactatgaccatgattcttgcatttgtttttgccatagtggcattgcatcctgcagtaaatggaagtgttttgcctgcttcagtaatatcattatactgcacttatctctgctatagtgcactggctagtgaaccaagagattatgagtgcaatggtcttcacaaacactcaaaagctgtttccactggcacccttactttgggtttagctacaactgttctatctgtcggttattctgctgtgcgt

SEQ ID NO: 9578 - DNA, 235 bp, Glycine max
  Clone ID: LIB3092-041-Q1-K1-A5
gcgatgaagatgaattgctactggtggcatgccctgataatgagtggctgcgtgttgggcttgggcgtgggcataggaggttgtgaatgtcgtggtggagaacgagaatggaagaatcatcattgatattagcctcaggaaccatccttatatgcccgacgggcaatccagggatcgcctgacacacttttagtggcttacaagactcagtgccaatggttctctggctaacttc

SEQ ID NO: 9579 - DNA, 427 bp, Glycine max
  Clone ID: LIB3092-040-Q1-K1-G2
gggtgagcaaaatcaaagacggatataacccggctacttggatgttggaagttacaacttcagcacaagaacttagtttgggtgttgattttactgacttgtacaagaattctgatctatataggagaaacaagcagcttatacaagaactgggtcaacctgctcccggttcaaaggatctttatttccctactcaatactctcagtcattcttggtccaatgccaagcttgcttatggaaacaacgttggtcatattggcgtaatccaccatacactgctgtgaggtttttcttcactactttcatagccctgatgttcggaacaatgttctgggacctcggaagtagacgtacaacaagaggagacctgttgaatgctctaggttcaatgtattctgctgttctcttccttggaatacaaaatgc

SEQ ID NO: 9580 - DNA, 438 bp, Glycine max
  Clone ID: LIB3092-040-Q1-K1-C9
cccacgcgtccgcccacgcgtccgaaaagttagggtttgtaactttgtctggggcttgcgaatctgaatcgaataataatcaatcaatcatcatgtcgtcggcgaagaagatcacactgaagagttcggacggcgaggctttcgaggtggacgaggcggtggcgctggagtctcagacgataaagcacatgatcgaggacgactgcgccgacagcggcatccctctgccgaacgtgacgagcaagatcctggcgaaggtgatcgagtactgcaagaagcacgtcgaggccgcgaatcccgaagacaaaccctccgaggacgatctcaaagcctgggacgccgatttcgtcaaggtcgaccaggccacgctcttcgatcttatcctggctgcgaactacttgaacatcaagagcctgctggaccttacatgccaaactg

SEQ ID NO: 9581 - DNA, 397 bp, Glycine max
  Clone ID: LIB3092-040-Q1-K1-D1
cccacgcgtccgcccacgcgtccgcccacgcgtccgactgtctgatgttgaagggttatgcgtatgatttgctggtatttataactcatctgatcctgtacttgctgtaaaggaatatttgaaggaagaaccatatacagctgaagaaattgaagcagttacaggggaaaagctgacttcatttttgaacaataatgcagcttatttagaagtgttaaaagttgcaaagcaatacaagttgcatcagagagctgctcatgtgtattcagaagccaagagggttcatgctttcaaggatgtcgtatcttcgaatctaagtgacgaggacatgctaaagaagcttggtgaccttatgaacgagagtcatcatagctgcagcgttttatatgaatgcagc

SEQ ID NO: 9582 - DNA, 443 bp, Glycine max
  Clone ID: LIB3092-040-Q1-K1-D2
cccacgcgtccgcccacgcgtccgcaaagtgagaaggacaagaagaaacaaatgactacagaagagaagaaggctttgaaggaagagaaaatgaaactagaggagaaatacatgtgggctattgttgatggtgttaaagagaaggttgggaattttagagttgaaccaccaggattgttccgaggccgaggagagcaccccaagatgggaaaattgaaaaaacgcattcatccaggtgatatcacaattaatattgcaaaggatgccccaattcctgaatgtcctattcctggcgaaaggtggaaggagataagacatgataatacagttacttggttagcctattggagtgaccctatcaatcccaagctattcaaatatgtgtttctggctgctagtagttccttgaaggggcagagcgacaaggaaaagtatgagaaagc

SEQ ID NO: 9583 - DNA, 414 bp, Glycine max
  Clone ID: LIB3092-040-Q1-K1-D3
cgacgaagtaattcgaaggtcaaacgcaacgcactatggtctagctgcaggagttttcactaagaatgtgcacacagccaacactttgatgcgagcactgagggttggaacagtatggatcaattgctttgatgtttttgatgctgcaattccctttggagggtacaaaatgagcggcattggcagggagaagggtatctacagtctcaacaattacctgcaagtgaaagctgtggtttcaccagtgaagaaacctgcatggttgtgatttgtgaattgctcaaactgctatgaccgaaatcctacgtggctatcatctttttccgctgaggcaatggcatgcaataaataatgtgatgttactaagataaaacctgattaggtacctgaacattataccagttgaatttatgt

SEQ ID NO: 9584 - DNA, 409 bp, Glycine max
  Clone ID: LIB3092-040-Q1-K1-D4
cccacgcgtccgcccacgcgtccgcccacgcgtccgcccacgcgtccgcaaaacccacgtaagaaaatataaaaaagagcattacttttttaatttctccttcttttatgcaaccagaagtgtagtgtgttgtgtatgactaggtttctgccagccctggggataatgggtaattatctagattcttcagctaaagtagaagcagctcacagttccagaaccccttctggaatttcaaaaactagaccttcatctgttcctcccaacttatctattctgtcatatagtgaagcaagtgatttctcaaatcttcccacaccgaggtccgagggtgaaatcttgtcttccccaaatcttaaggcctttacctttaacaagctaaagaatgccaccaggaactttcgccccg

SEQ ID NO: 9585 - DNA, 421 bp, Glycine max
  Clone ID: LIB3092-040-Q1-K1-D5
gctgattctctccatatattatctcaattccctctcacagaatgggaagtgctggaggaactgactgtggtgcatacacttatgagaatcttgagagagagccttactggccatcagagaagcttaagatttccatcactggtgctgggggttttatcgggtcacacatagctcggcgcctcaagacagaagggcattacattattgcttctgattggaagaaaaatgagcacatgactgaggacatgttctgggatgaattccatcttgttgatctcagggtcatgaataactgcctcaagggtacagaggggggtgatcatgttttcaatcttgccgcagacatgggtgggatgggttttattcagtctaaccactctgtcattatgtacaacaacacaatgattagctttaacatgat

SEQ ID NO: 9586 - DNA, 149 bp, Glycine max
  Clone ID: LIB3092-040-Q1-K1-D8
acgtccacgcgtccgcttgaagcaaagctgtgtttgcaatgattggaatttcggggccagagattatgagggacattgcgtataataatgtactaattgcagtggtaaactattgccatggaaagaataatcgattattgattcatact

SEQ ID NO: 9587 - DNA, 418 bp, Glycine max
  Clone ID: LIB3092-040-Q1-K1-D9
cccacgcgtccgagagagttgaatgagatcagaatggcagacttgatgaagagaatccggcaaatgattgaggctgaacaagcaagcaaagggtccaaccatggttcttcaaactcacataacagctatggcagcggaagccagaatggatcaaccatcaacagtggcaatcatcttaacaacggcaacaggtatgacgactcataccactacggtgaacgccctatttataacagtggcactttcaatggtaatggcaacgggtcacatatcaagggtggctttgactcctcaacaaggaactactatggtcgtcgttatgattattaattatctgtatttgatacagtatatgctagctagctgggcaaaatatataatatgctatgctacgttgtactagcaataaataatgttg

SEQ ID NO: 9588 - DNA, 358 bp, Glycine max
  Clone ID: LIB3092-040-Q1-K1-E2
cccacgcgtccgctgtagacgaaggtttcattacacccgctgcccgtcacattattgggtctgcccaaactgcccaagatctcatgtgcaagcttgaggaatatgtcccgaagcactgtggcgtggcaccaaagcaaagttgggagatgaaccaacagttataaaaaagttaacactgcaaattaccaaattcagatacttgtcgttaaccaagtcgaatctacatattttctctaccccattaaaaaatagctttctcaatacaaatcaagccttttttggctgacactgtgtaattgcggatcaaaatctgatctgtatgatccaagaacgtgacacttgaaaactttcattattt

SEQ ID NO: 9589 - DNA, 144 bp, Glycine max
  Clone ID: LIB3092-040-Q1-K1-E3
cacatatttctctaaaccagtaagttatcttctagtatttttcaaggaacttaagggttcaaacctaagaaggtggaaggcatggcaacaacattggagggcgcaaccaggtctggcacttttaaaaccacttcttttcttagg

SEQ ID NO: 9590 - DNA, 427 bp, Glycine max
  Clone ID: LIB3092-040-Q1-K1-E9
cccacgcgtccggagatgatgaagagatctggaaaacatgaagcggagggaggagaagacatactcatcgacagattcctcaagcgcctctctttcgtagccatcgcagtagcctcctcctctccgccgcttcctccaacaactacaaccactcccgcgtcctctgcgtctccgccggcgccggccacgaggtcgccgcgctccgccgcctcgggatcgacgatgtcaccggagtcgagatcctcgagtccccgccgctcgtccgccgcgccgatccgcacaatctgccgttcttcgacggcgcgttcgacctcgccttcaccgcgagattcgacgaggcactgttcccggcacggttcgccgccgagatggagcgcgtcgtccggccaggtggcgcgtgctttcttctcgttgcggagtctgggga

SEQ ID NO: 9591 - DNA, 149 bp, Glycine max
  Clone ID: LIB3092-040-Q1-K1-F10
cggacgcgtgggcgaggcactcgtccggttcggcgtctatgtcaccgctgatgtacagggtgtcgccgacaatcccaacaacctcctcaagttcatgggacatgaagcaaatcagagagtttgattgggaagtatggtgtggaagcttt

SEQ ID NO: 9592 - DNA, 429 bp, Glycine max
  Clone ID: LIB3092-040-Q1-K1-F2
gcggttttgtagatggcaagtgggtttggggaatcaacagggagatcacccccaagcccttcctacttgaacaacaataataacaatgatgctgccaattttgaatgcaacatttgctttgaattagcgcaagacccgataattactttgtgtggtcatcttttctgctggccctgtctttacaaatggcttcactttcactcacaatcacgagaatgcccggtgtgcaaggccctcgtggaggaggagaagctggttcccttgtatgggagaggaaagtcgtcgactgatccaagatcaaaatctattccgggcgataacatcccgcatcgtccggctggtcagaggcctgaaactgctcctccacctgaaacaaatcattttcatcaacatgggtttggatttatgggtggcttggggggatttgcg

SEQ ID NO: 9593 - DNA, 182 bp, Glycine max
  Clone ID: LIB3092-040-Q1-K1-F5
cttttgaaaacactccctctctactcatattcttcttctttccttctcacacccctcttatttctcaacaaaataatcttaatttattaccatcaacctatttttactcacctctattacattaaaccatcttcttttttccacaacataaactttcattcatatccatttctaaattttaa

SEQ ID NO: 9594 - DNA, 426 bp, Glycine max
  Clone ID: LIB3092-040-Q1-K1-G10
agcggatctgtatcttgggttgggtcgggtgtgtgttctgttacccttggctttcctgtggagttgggttcgggtgacaacacaaacacaaacacgatggtgtgttgatcagactcttttctctctctttccatttgatgtctctccccaccaaacggtcgggcaccgctggttcctccccgtcgccgccaccccctatgaaaaaggccaagtccctcctcctccactcctcctcctcctacgacgccgttctggacccttcctccatgcctctcgacgacgatctccccaatgcccgcgccgccaatctcgcccgcaagaaagccaccccggcccaacccgccaagaagctcctcatcaagctccacaaagctaaaccaacattgcccacaaatttttgaggaggatacatgggcaaaactaaag

SEQ ID NO: 9595 - DNA, 391 bp, Glycine max
  Clone ID: LIB3092-040-Q1-K1-G12
cacagtggaggcaggccaatgggaccaaaaacagatgcaagcttgggtgttcgttacaagaccggccggctcttcccgagtaccggcctgctgcaagtcactttttgcccatctggcactaaatctcataaaaaggcctggaaatgagatgcaggggcattgacaaatccggtttgcaatcaattcagctgcctcacccaactatccaaacactaacagcagcctgccctggatacatgtgattgaaggatgatcctttgtggaaatttctctttcattgctgccctttaagtcatgtcttatgttatttcttattgatatttcatttctttggttcattggtttttgtacagggtttgactgggggaataggagccataaatgatgatga

SEQ ID NO: 9596 - DNA, 439 bp, Glycine max
  Clone ID: LIB3092-040-Q1-K1-C4
tgttgcacaactagaggtgcaaaaataaagtacaatgattccattgtgcaatgttttttgcaattctacttatgcaacaaaagtgtattttcattgtgcattgggggaaagatatttttgaaattttgaaatgatggtaaggaccaatagcaacccccacatataaatgttctacttgaattttaaatctttaacattatgtatttttttggaaagtccaatatgtaggacagtttcagacgcagttcatgtgcttgatgtcattgttgggttcgacccaagagaccatgaagcgacaaagtcagcggctaagcttatacctcctaatggatataagcagttcctaaaaatagatgggctcaaaggaaagaagttaggaaatttctagggacacctagcgttttgctggtacatccagcagaagatgaaaaagtctaat

SEQ ID NO: 9597 - DNA, 432 bp, Glycine max
  Clone ID: LIB3092-039-Q1-K1-H9
ttagcaacggttgctctgctctacgtaaaggacaagcaagtggaagcacgggccttggatgacgccacgcaaccctcgtgcttctttcagcttttcggtgctctgaaagagctcaagagaccgatgtggatgctgatgctggtgacagctgtgaactgggtggggtggttcccttactttttgttcgacaccgattggatggggcgcgaggtgtacggtggtcaagtgggggaggacgcgtacgccaatggagtgcgcgttgggtcgctagggctgatggtaaacgccgtcgttttgggcttcatgtcgctggcggtggagccgttggggaagatggttgggggagtgaagaggctgtgggcgattgtgaactttattctggcaattgggttcggaatgacggtggtgatcaccaaggtggcggagcaccaa

SEQ ID NO: 9598 - DNA, 345 bp, Glycine max
  Clone ID: LIB3092-040-Q1-K1-A10
cccacccgtccgtggaggattgggatcaacagaccttggggaaggtgggggagtcaaagaaaactgagtataattagaataaaccaactgacatagtctgtaaatactttttgggtgcagtggaaaagaagcaatatggttggttttgggtctgccccaatggtggtaagaattgccattatagacatgctcttgcacctggatatgttttcgaaatctcaaatgaatgctttgttcgaggaagaaagtgaaaaaatatcaattgaagaggatgattgaaatcaggcgtgccaaagtggcaactacaactcctatgactcctgagatattctttgagtggaagaa

SEQ ID NO: 9599 - DNA, 429 bp, Glycine max
  Clone ID: LIB3092-040-Q1-K1-A11
cccacgcgttcgtggaggattgggatcaagagaccttggagaaagtggggcagtcaaagaaaactgagtataatcagaataaaccaactgacatagtctgtaaatactttttggatgcagtagaaaagaagcaatatggttggttttgggtctgccccaatggtggtaagaattgccattatagacatgctcttccacctggttatgttttgaaatctcaaatgaaggctttgttagaagaagaaagtgaaaaaatatcaattgaagaggagattgaaaatcagcgtgccaaagtggcaactacaactcctatgacttctgagttattctttgagtggaagaagaagaaaattgaagagagagatgcccatataactgcacaacaagctgaaagggctaaaaatgatcgcatgaatggtccggaactat

SEQ ID NO: 9600 - DNA, 470 bp, Glycine max
  Clone ID: LIB3092-040-Q1-K1-A4
aattcccggggcttgttgttgttggaaagaaaccctagcaagcggaacaatggcagacgttgaggtcgatgtggcggctgcagcagcagcagggcagccgaagaagagaacgttcaagaagttcagtttcaggggcgtggatctcgatgcgcttctggacatgtccaccgatgaactcgtgaagatgttcagtgctcgcgcacgtagaaggttccagagaggcctcaccagaaagcccatggccttgatcaagaagcttcgcaaagcgaaaagagaagctccaccaggtgagaagccagaacctgtccgcacccacctccgcaacatgattattgtgcctgagatgattggtagcattattggagtgtacaatggcaagacctttaatcaggttgaaatcaaacctgagatgattgggcattatctggcagagttttctatttcatacaaacccgttaagcacgggagac

SEQ ID NO: 9601 - DNA, 433 bp, Glycine max
  Clone ID: LIB3092-040-Q1-K1-A5
gcggcaactgtgggcaagtttagtgtgatatgggattttcagcaggtgaagaacagtgctcatgaatgtgacaggaatcaagaagggctgaagagctgttactgttacaagataatattgaaggatgagtccattgtagaatcgcgatttatgcacgacaaatttgctgttagtgactctccagaagctccgttggtggtggcaactcctatgaaagtcagctcaatcagcatgtctggaaagcgacatggttaaacctctgtttacattttttctttaaaggtttcaaatttctagtgttaggagtgtctttgaagtttgaacaatatacttgcttgtatccaagtttgagatgctgttatttttctgtaaagcacgttttaggttgccctgtatgtattttcttcttttttgtgattagtttgggtttgct

SEQ ID NO: 9602 - DNA, 375 bp, Glycine max
  Clone ID: LIB3092-040-Q1-K1-A6
gcaactgggggcaagattagtgtgaggtgggattgtcagtaggagaagaacagggctcgggaatgttacaggaatcaaaaatggcttaacagctgttactggttcacgataatataggacgatgagtccattgtagaatcgcgatttatgcacgacaaatgtgctgatagagactctccagaagctccgtacggtggtggcaactcctatgaaaggcaggtcaatcagcatgtatggaaagcgacatggataaacctgtgtttacattttttctttaaaggattcaaatttctagtgttaggagtgtctctgaagcctgaacaatatacttgctcgtatccaagattgagatgctgttatttttctgtaaagcac

SEQ ID NO: 9603 - DNA, 436 bp, Glycine max
  Clone ID: LIB3092-040-Q1-K1-A9
cacctccttagtttcgaaagcatggcttccctggcggcttccaccgcgggtgtgtcaggaatccttggaaaccccgttaacctcagatgcgcaaccaggtctgctccatcaccaactacacctgccaccttcaagaccgtcgcacttttctccaagaagaagccagctccacctccaaagaaaaagcctgccgctgtatcccccgccaatgaggaactcgccaagtggtatggtcctgacagaaggatcttcttgcctgagggtctcttggaccgatctgagatccccgagtacttgaccggagaagtgcctggagattatggttatgatccgtttggtcttagcaagaagccagaggacttcgccaagtaccaggcgtttgagttgattcatgccagatgggcaatgcttggtgctgctggattcatcattcctg

SEQ ID NO: 9604 - DNA, 430 bp, Glycine max
  Clone ID: LIB3092-040-Q1-K1-B1
gcgctctactctactgcttcaccttctgctctagaaaattcagtggtgatacatggcttcggctactctctctgtagccaaaccagcccttcaggcaaatgggaaaggcttctctgaattctctggcctccgcagctcatcaggcttccttcccttttctagaaaatcttcagaggatttccattctgtcattgccttccagacctatgcagttggaagcagtggaggatacaagaagggtgtgacagaagcaaaactgaaggttgccataaacggatttggaaggattggaaggaacttcttgaggtgctggcacggtcgcaaagactcccctcttgatgtcattgccatcaacgacaccggtggcgtgaaacaagcctctcaccttctcaagtacgattcgatcctcggaaccttcgatgctgatgtc

SEQ ID NO: 9605 - DNA, 358 bp, Glycine max
  Clone ID: LIB3092-040-Q1-K1-B10
cccagcgtccgcttgcttccaaagattatggagttggtggggctagggtgcactggatggtttgtctaccgataccttctgtttaagtctagcaggaaggagctagctacagacattgagtcactgaagaagaaaattactggaactgaatagagtggtgttagcaggtaccaagtcaagtttatcttctgtgagcatcatttgtttttgttgtgctgtttatctcatgtataagagtcatatgtatcccttgaagtagaatagaattcctctcaacctgtaatgaacccatttcattgttaaaaataatgtagcaaattttacgtatatggctctgaatggaaaccattatcctttc

SEQ ID NO: 9606 - DNA, 443 bp, Glycine max
  Clone ID: LIB3092-040-Q1-K1-B2
ttcacgtccctgtgaatgatgagtggactgcaatcatctaatattttactagacaaagactttgagccccatctcgctgatttcggcattgcaaaaagtctatgcccatctaagacccacacttcaacttacataatgggcacaattggctacatagaccctgagtatgctagaacttcccgcctcactgagaagtccgatgtgtatagctatggtatcgtattgcttgagcttctaactgggaggaaagctgttgacaacgaatcaaacctccatcatctgattttgtccaagacagctaatgatggcgtaatggaaaccgttgatccagatattactaccacatgcagggacatgggagcagtaaaaaaggtttttcagcttgctcttttatgcacaaagaagcaaccagtcgataggcctacaatgcatgaagtgactcg

SEQ ID NO: 9607 - DNA, 439 bp, Glycine max
  Clone ID: LIB3092-040-Q1-K1-B5
gttcttcttcttcttctcctttaaccaaacaacaagaaaaaaaaaatcacattccccagaacacccttctcgctccgcatggcgaaaacgaggccaggcagaaaggacgtggactcgtacaccataagaggaaccagcaagatcgtccgagctggagactgtgttctgatgcggccctcggacacgtcgaagccgccttacgtggcgcgcgtggagaagatcgagcaggacaacaggagcaacgtgaaggtgcgtgtgaggtggtactaccggccagaagagtcgattggtggtcggagacagttccacggggctaaggaactgttcctctccgaccactacgatgtgcaaagtgcacacaccattgagggcaagtgtgttgtgcactcttttaagaactacaccaagcttgagaatgtgggtgctgaggattactatt

SEQ ID NO: 9608 - DNA, 189 bp, Glycine max
  unsure at all n locations
  Clone ID: LIB3092-040-Q1-K1-B8
aagcacaacnncnnncaccanggcananacaagagacccacnngcncnnncncncgganagaaacaaaggnggggncnnnnaacgggaanagcnngaaacngagagnaggcagggagagcnngngccccnngggaggngcagngnnnaaaaanggggaagagaaggggngcaagagggaaaagagggcg

SEQ ID NO: 9609 - DNA, 422 bp, Glycine max
  Clone ID: LIB3092-040-Q1-K1-C10
gtaataaggaccacatgtctgctactcggacaatggataattctgtgcaggaaaaacgggatgattatgacaaacttgtcaaacaaatggggttggaaatgcgtgctcgcccttcagataggacaaagacaccagaggagattgctcaggaggaaaaagaacgtttagagcaattggaggaagagcggcagaagaggatggttgctgctgaagattcaagtgatgaagacaatgaagactcagaaaagccatctgaacagaaaccaagatctatatctggtgatgatcttggtgattccttttctgttaatgaacaaattatgaccaagaagggttgggttgatgagattcttgaaagaagagatgaggaagattcttctagtgaagatgatgatggtgaagatcctggacaatttggaagc

SEQ ID NO: 9610 - DNA, 227 bp, Glycine max
  Clone ID: LIB3092-039-Q1-K1-F7
ccggattgcaaccatgtcgaggagaaaggttagagagccaaaggaggaaaacgtgactctgggcccagctgttagagatggtgaacatgtttttggagtcgctcgcatctttgcctccttcaatgacaccttcattcatgtcactgatctgtctgggagggaaacacttgtccgcatcactggcgggatgaaagttaaagctgacagaaatgaatcatcttcatatg

SEQ ID NO: 9611 - DNA, 428 bp, Glycine max
  Clone ID: LIB3092-039-Q1-K1-F8
agatcattgttttagagagagagagagagagagagagagagagagagaggatgtttggttcaaagaaaactcctctgagagatgctaaacctacctctgttgaccatgcccataacccctttgattctgatgaagatacaaaagataacaagtataattcttctaagaagactttgaccaacaccaacccctttgatgatgatcatgttaatgccactggccactcttcatcatcttcttatggcctttcgtctacccatcgaaataggtataagaacgatttccgcgactcaggggggttggagagtcaatctgtgcacgaattggagaactatgctgtttacaaggctgaagagacgacaaattcagtgaacagttgtttaaagatagctgaggaaatgagagaagatgctaccaagactttggtg

SEQ ID NO: 9612 - DNA, 379 bp, Glycine max
  unsure at all n locations
  Clone ID: LIB3092-039-Q1-K1-F9
cgacccacccctccnattccacaacannnnnangganannnaaagagagagtggaaaagatggcgcggttgatcacagtggtgtggtgcgcggtggcggtgctattatgcgccgcggccggtgcgtcgtgggtggaggaggcggcgaacccgatacgaatggtgtctggcgtggaggcggaggtggttcgggtgatcggggagtgccggcgtgcgttgaagtttgctaggttcgtgagcaggttcgggaagagttaccaaagcgaggaagagatgaaggagaggtacgagatattctcgcagaatctcaagttcatccgctcccacaacaagaagcgtttgccctatactctctctgttaatcattttgctgattggac

SEQ ID NO: 9613 - DNA, 144 bp, Glycine max
  Clone ID: LIB3092-039-Q1-K1-G10
tatccgactctcggcattgctctgaatcgttttcctcatcttccattttcttcaaaatcctcgtgacagatctaatctaatcttccttttgtgggtgttttaaacattgcatccatatggttggttatctaggatgctataaaa

SEQ ID NO: 9614 - DNA, 417 bp, Glycine max
  Clone ID: LIB3092-039-Q1-K1-G12
gaagatggaggctttgaggtaataaagaaggcgatattgaatctatcgcttcgccacaaagatcacatcagtgcatatggagaaggaaatgagagaaggttgactggaaagcatgagacagcaagcatcaacacattttcttggggagtggctaaccgtggttgctcaatccgtgtgggaagagacactgagaagaatggcaaaggttacttggaagataggcgaccggcttcaaacatggatccatatgttgtgacatcattacttgcagagactacactattgtgggagccaactctggaggctgaagctcttgcagctcaaaagttagcattgaaggtctaaacctattgattgatgaagagctggaaaatactttcactttccttttagattatctatattataatgatcttg

SEQ ID NO: 9615 - DNA, 421 bp, Glycine max
  Clone ID: LIB3092-039-Q1-K1-G2
aactatcctgagtggaaactgttcgttcagacaatagatcctgagcatgaagacaaatttgactttgaccctcttgatgttactaagacttggcctgaggacattatacccttgcagcctgttggtcgcttggtcctgaataaaaacatagataatttctttgctgagaatgaacaacttgcattttgccctgccattgtggttcctggtgtatactactcagatgataagatgcttcagaccaggatattctcttatgctgattcacaaaggcacagacttggaccaaactatctgcaacttcctgctaatgctcccaagtgtgctcaccacaataatcatcatgaaggtttcatgaatttcattcacagggatgaggaagtcaattacttcccttcaggtatgatcctgttcgtcatgc

SEQ ID NO: 9616 - DNA, 424 bp, Glycine max
  Clone ID: LIB3092-039-Q1-K1-G3
cttacagagaagagtgagtgtgtgtgataataattgggatcaactaatcaatcaatttgaatggcatcatccaattcggctcagctagaagggaacaaacccgcaaagagaaaacccgtgttcaccaaagtggatcagctcaaacctggaaccaacggtcacacgttggtggctaaggtcttgtcctccgacaccgtcgtacacaaaccgcgaccctcttccgcccacaacctcaaacccactgtcatcgccgagtgcctcatcggcgacgacaccggcaccatcgtcttcaccgctcgcaacgaacaagttgatatgatgaaggctggagctacagtaattattcgcaatgcaaagattgacatgttcaagggatcaatgaggatggctgttgacaaatggggccgtgttgaggtaactgatc

SEQ ID NO: 9617 - DNA, 296 bp, Glycine max
  unsure at all n locations
  Clone ID: LIB3092-039-Q1-K1-G4
gagatggaaagagtagcatcagtatctcggccactgaaaatatacttcctcccattcttctcaccggggcacctaatccctctggtccagctggctcgcttggtggcggcacgaggccagcacgtgaccatcatcaccacccccgccaacgctcaactcttcgaccagaacatcgacaaggacaccgncttcgggcaccacattcgggttcacattattaaggtccccaacgcccacgtagggctaccggaaggcattgagcaccttttcgccgccaccaacaatgaaaccgccta

SEQ ID NO: 9618 - DNA, 399 bp, Glycine max
  Clone ID: LIB3092-039-Q1-K1-G5
gtcccacacacccgcgcacgattcgaacggaacagcatctccgacttttcctcccaagtttcccttcgattttcccgagaaaatctcgttccgagaaaatctagctcaatctctgcaacactcatatatccacagcgcctcatactcatggatcggaggagaaacgcgagtccggtgtacgcgcggcagtggagcggcggttccagcagcaccggttcttcgtcgccggcgatgtcgccggctcatcctcagtcacgcctcggccctacttccgccaccggtctgtacaccgtcaagcgcacgcaaaacgtggccgtcaaagccgccgcgcagcgacttgctcgcgtcatggcgtctcaaaccaccaccgccgatgacggcgaggacgacgacgatctc

SEQ ID NO: 9619 - DNA, 287 bp, Glycine max
  Clone ID: LIB3092-039-Q1-K1-G6
ccacacacccgcgcacgattcgaacggggcagcatctccgacttttcctcccaagtttcccttcgattttcccgagaaaatctcgttccgagaaaatctagctcaatctctgcaacactcatatatccacagcgcctcatactcatggatcggaggagaaacgcgagtccggtgtacgcccggcagtggagcggcggttccagcagcaccggatcttcgtcgccggcgatgtcgccggctcattcgtagtcacgcctcggccctacttccgccaccggtcttttcac

SEQ ID NO: 9620 - DNA, 304 bp, Glycine max
  unsure at all n locations
  Clone ID: LIB3092-039-Q1-K1-G9
ttgcacatcggaagggagggctatcaaactctaaggattgctctgaatcggtttcgtcttcttcgtttttcttcaaaatcctcgtgacagatctaatctaatcagccttttgggggtgtttcagacattgcatgcatatgggtggttgtgttggatgctataaaaggccttcactgagtcccacagtggatgtgccatcaaaagggttggcaacacanagtaacgtagtgaggaaaccgagttcatcagaggatttttggaccaccagcacgcatgatatggacaacagcgctgttcagtcaca

SEQ ID NO: 9621 - DNA, 418 bp, Glycine max
  Clone ID: LIB3092-039-Q1-K1-H10
aaaattaagcaacgattcaagaagaaaatgggttctgaacttgaagctcccattcacgtcctcatggtgtcctatccagcacaaggacacataaaccctttgctcagactaggtaagtgccttgctgcaaagggcttatttgtaaccttcaccacctcagagaccgctggtaaaaacatgcgaaccgccaataacatcactgacaaatcagtgattcctgtcggcgatggttttctcaagttcgatttctttgaagatggcatggcagatgatgatgatggtcccaagaagataaatctcggtgatttcagtgcacagcttgagcttttcgggaagcaatacgtttcccaaatggtcaagaagcatgctgaagaaaaccacccattttctggcatcataaacaacccttttgttccat

SEQ ID NO: 9622 - DNA, 343 bp, Glycine max
  Clone ID: LIB3092-039-Q1-K1-H12
aaccttgcaggccaggatgtgactgatgcattcgtagcataccatccaggctcagcatggaagtatcttgatcccttcttcacagggtaccacctaagagatttcaaggtctcagaggtgtcaaaagattacagaaagcttgtgtctgagtttgtcaaaatgggtctttttgagaagaaagagcatgttactctttacacactgtcctctgttgctgtcatgttttcaattgttggttatggtgtcatagggtgcagaaaggtgtgggctcatcttggtgctgccccttttgtgggcttgctttggatgcaaagcacttacgtgggtcatgacgctggcacta

SEQ ID NO: 9623 - DNA, 271 bp, Glycine max
  Clone ID: LIB3092-039-Q1-K1-H2
ggaactaaccctgtttgccatttccttggaagcaaggccattttatgggtacccaatttatctatggacactgtctatcagactaacgttgttgtttaattagtccatgcatctgcatcttgggcaccataagattgtatataaaataaattatggtgtgttgtgtatgttgtgcaagacctggaacttcacctttctacgtacgtgtgctgttaggatgcagtgtgctttgatgatgctttgatgaatatgcagtgtgcttttttaagtc

SEQ ID NO: 9624 - DNA, 301 bp, Glycine max
  Clone ID: LIB3092-039-Q1-K1-H5
cttagcagcagtagcagaaatggctaccacttctgcttcattcgctcgcttctccgtcatatcgcgaccttcttcgtcaaatccccaattcatcctcttcaacgccgctccccgaaccggaacccctcattcccgaaccggttcggcccggttcaagtgcttggccggccagaccgggttcttcacgaaactagggcggttgataaaggagaaggcgaagagcgacgtggagaagctcttctcgggattcttcaagacccgcagcaacctcgccgtcatcgacgagcttctcctctattgg

SEQ ID NO: 9625 - DNA, 420 bp, Glycine max
  Clone ID: LIB3092-039-Q1-K1-H6
agaacgtttggcaacatgaggtccttcgtaagcaattcgatgggtggtctcaggggcggaagcaaccttgcttcttgggtcgtcgccggaaccctagcttacttcctctggatcaaaccctcccaagacctcaagcgtgaacagcaggagaaggccgctcttgccgccgccgagtctgatccttatcgttacgttgagactcgtaaacccattcccgatcctcaagttacgggtttgatatatggaaacaagaacaaggacaaaccaaccaaaccagaggattgattcattcattagcattcatggttcaaaatggagataattaataataaggcatatctcgtgttttcatgcacgctcttattcatctttgctaatatattactactgggttatggattcacgtttatgtgtttatac

SEQ ID NO: 9626 - DNA, 362 bp, Glycine max
  Clone ID: LIB3092-039-Q1-K1-H7
aatagcatgtgaaggggaggaaagagtggaacgtgacgagcttctgaagaagtggagatcgcgttttactatggctggattcgcaccatatccactgaactcgtttattacttgttcaataaaaaatcttcagcgaagctaccgaggacattacactctagaggagagagatggggctctgtgtcttggttggatgaatcaagttcttattacctcttgtgcttggaggtgatgatccaatggcaactgggtcaattttgttatttcagacttttagttagttatgtatcatcatatcttctaccagaatcatagcaagtactctgagttgtataaataaataaaaaaaacacttattatgt

SEQ ID NO: 9627 - DNA, 406 bp, Glycine max
  unsure at all n locations
  Clone ID: LIB3092-039-Q1-K1-F4
tcctccggttccagcgaccaaaagctgggccgacgaagcggacgaagaaaccaacgcctccaccgccgaggcagaaacctcctccgttaacctggaagcgttaaccatcgacgacaaagaaaagaactcttcaaaactcttggacgaccccgacgattctaatattcaagcggttacttctggcgatacgccgtacacgtcggcagcgaggttcgaggacctaagcctctcgccagagcttttgaaggggctctatgtggagatgaagtttgagaagccgagcaagatccaggctatcagtttgccgatgatccttagcccgcccaatcgggacctgattgcgcaagcacacaatggctctggcaagacgactngcttcgtgcttgggatgcttagccgtgtcgat

SEQ ID NO: 9628 - DNA, 351 bp, Glycine max
  Clone ID: LIB3092-039-Q1-K1-D9
ctctttcaaactccatcgcagattcttcgctcgtttccattgattcaaaacatggctaccactcctgccagatctttcctccaagtcgccgcaacggaggaggctgcgccgcctctcagagtcgtccagattgaaggactggttatcctgaagataattaagcattgtaaggaccactcgccttctttagtcactggacaacttcttgggttggatgttggcagtgttcttgaagttaccaactgcttcccctttccaatgagggaggaggatgaggaaattgaagctgatggtgccaattatcagcttgaaatgatgagatgcctgagggaggttaatgttgacaacaac

SEQ ID NO: 9629 - DNA, 426 bp, Glycine max
  Clone ID: LIB3092-039-Q1-K1-E1
tcgccgcaatccgttttgcccgagttttgttccccaagtttctcttatgggggctccatggagctcatggctgtcccaaaacgcaaggtttctccccataaaagaggaataaggaatggaccaaaagctctgaaacctattcctgtgattgtcctatgcaagagttgtggtcgtgctaggcttccacacttcttttgttgtggtgggaaaccaaatcagggtaatactggtgaacataaaggtagtacaagctaagctaatcaagttgtttgtgaagcagcagatgttggttcgtgtgcagggccacccgtaagtaggtccatttggtagtaatgctttatttccttatttcttaagcaatgccatcattagatccgaggttttttgttttggaagataaatggagtagttggtggggaaaatact

SEQ ID NO: 9630 - DNA, 481 bp, Glycine max
  unsure at all n locations
  Clone ID: LIB3092-039-Q1-K1-E10
cgggnccgcccacgcgnccgcgccccggccactctgcngnannnnnccacttcttctccttccttctctcggatcatcactcctcgtttcgctttcgctccaatcactcgcatctctctccgaaacggcgtccgtagcaaggcgatcgaagcagtgaagttggagaatggaaggccgagcgcgagcgagttcgtagtcagcggaagcggaaacgcaattccgagttacgtcgtggcgccaaacgcgcgtgttcaggatttggttaaccgaaacgacactcgcctccggatattctccggcactgccaatccggctcttgctcaggaaattgcatgctacctgggcctggagctaggaaaaattaagataaagcgttttgctgatggtgagatatatgtccagctgcaagagagtgtcagggggtgtgatgtgtttcttgtgcagcccacatgtcctcctgcaaatgagaatcttatggagc

SEQ ID NO: 9631 - DNA, 413 bp, Glycine max
  Clone ID: LIB3092-039-Q1-K1-E11
cgttcacgctacccctttctgctcttcttctacctttcaagttttaaaagtataaagatggcagagacattcctatttacctcagagtcggtgaacgagggacaccctgacaagctctgcgaccaaatctccgatgctgtcctcgacgcttgcctcgagcaggacccagacagcaaagttgcctgcgaaacatgcaccaaaaccaacttggtcatggtcttcggagaaatcacgaccaaggccaacgttgactacgagaagatagtgcgtgacacctgcaggaacatcggcttcgtctcaaatgatgtgggactggatgccgacaactgcaaggtcctcgtcaacattgagcagcagagccctgatattgctcaaggtgtacacggccaccttaccaaaaaacctgaagaaat

SEQ ID NO: 9632 - DNA, 396 bp, Glycine max
  Clone ID: LIB3092-039-Q1-K1-E12
tcacgctacccctttctgctctggttctaggtttcaagttttaaaagtataaagatggcagagacattcctatttacctcagagtcggtgaacgagggacaccctgacaagctctgcgaccaaatctccgatgctgtcctcgacgcttgccttgagcaggacccagacagcaaagttgcctgcgaaacatgcaccaaaaccaacttggtcatggtcttcggagaaatcacgaccaaggtcaacgttgactacgagaagatagtgcgtgacacctgcaggaacattggcttcgtctcaaatgatgtgggactggatgccgacaactgtcaagtccttgtcaacattgagcaccacagccctgatattgctcatggtggacacgggcaccttaccaaa

SEQ ID NO: 9633 - DNA, 393 bp, Glycine max
  unsure at all n locations
  Clone ID: LIB3092-039-Q1-K1-E2
ttgtgttctcccttgctctcctaaccgccgcttttcgcgaaagcgaaatccactcaccaatggttagtgccattcaatcctctcaattcaacaacaacaacacctgccctgattacaaaacagctttgaactctgctgaatggacttgcatgacatgcctaaaggcttcaccatcttgtggttattgtgctgctgatgacaagcttttacccggggcatgtttgatagccaatgttgacacaaagaagatgtgtggcaatgaccatagggcatggtacactacggngtgtcctagcaaatatggttgggctgccctaataggccttgctctatacatcatattcttctcacccggcatgggaactgttccatgggttgtgaactctgagatct

SEQ ID NO: 9634 - DNA, 423 bp, Glycine max
  unsure at all n locations
  Clone ID: LIB3092-039-Q1-K1-E3
gaacaacatgaaacaacagaaagacatagaagaagggatggtagaaagtggagtcaagaacaagaggaaaccttttgccaccaaccgcgcctatttctactgggttactcgtgagcaaggttcctttgaatggttcaagggtgtgatggatgatgttgccgagtatgacaaggatggaataatagaacttcacaactattgcacaagtgtgtatgaagaaggagatgctcgatctgctttgatcactatgcttcaatcgctccaccatgccaaaagtggcgttgatatagtttcagggacaagggtcaagacacactttgctagaccaaattggcgcagtgttttcaaacacactgcactcaaacaccctgngaaaagaatggtgttttctactgtggggcgcacacattggttggagaactt

SEQ ID NO: 9635 - DNA, 111 bp, Glycine max
  unsure at all n locations
  Clone ID: LIB3092-039-Q1-K1-E4
cccacgcgtccgcccacgcgtccgggaaagnnagtgcaaactgacgatatgactgtgctgacggtaaggggtggantaaggggcgtctacaacctccgtcatctttttgcc

SEQ ID NO: 9636 - DNA, 411 bp, Glycine max
  Clone ID: LIB3092-039-Q1-K1-E5
tcaatatcattttatctctcctctccctctcccacgcctccgtggtggatttctgcgtagcagactacacaggccccaatggccccgcagggtactcatgcaagagcccagcaaaggtcacggtggacgacttcgtctactccggccttggcaccgccggcaacacctcaaacatcatcaaagccgcggtgacgccggcgttcgacgcgcaattccccggcgtcaacgggcttggaatctccattgcacgcctagacctagcagccggtggagtcatccctcttcacacgcaccctggtgcctcaaagctgctggtggttgtgcagggaacaatctgcaccggcttcgttgcttcggacaacactgtgtacctcaaaaccctaaaaaagggtgatgtcatggtgtaccctc

SEQ ID NO: 9637 - DNA, 413 bp, Glycine max
  Clone ID: LIB3092-039-Q1-K1-E6
ccaaaggaagctgctaatggaaggaaactggttagcaaatggcatcccacaacaaagggtacacttagaaggaactatagagtcccatccaagcccgaggggagacgtcttcttaaagctattgcatctctattatcagatgatgaccactttgttgatgccacctctcacaagggttgccaaatccgtagggaaagtgctcatggagaaagtgtgtgttgcaacaatgtgagagctctttttgatgagctcccaacaccccatatcattgtggaaatcacaccttttcccgctggaccccttaatgacaatgattacattaaagctgagaagcttgagaaggttctcagatctaagccttctgtttgatctgtctatgtatggggtttcatgctttcacgtacatattcttt

SEQ ID NO: 9638 - DNA, 391 bp, Glycine max
  Clone ID: LIB3092-039-Q1-K1-E7
atgtttttccttcttcttctctaagactaagactcgaattgccctctcttcttcactcgaagctcaaacaagcacgctttccgtttccgtcgttctcgcttcaaaaccctaccttccgtcctgttatctgcagagcctccgagtcacccaccgttccacctaagaagcgttcctctaacaacagaaaccctaaaaacaacagcaaaaagaacagtaagagtaactctgtcactgttgattccaactccatttccaattcttctcttccgcctcctcttcccacgtcactgcccaaaccacccacgggattcgtcgtagacgaacgcggtaaagttctatctgctttcagagaccgactcgccactctagttgatccggcgaataaccttcc

SEQ ID NO: 9639 - DNA, 300 bp, Glycine max
  Clone ID: LIB3092-039-Q1-K1-E8
gtttttccttcttcttctctaatacggagactggaattgccctctcttcttcactccaacctcaaacaagcacgctttccgttttcgtcgttctcgcttcaaaaccctaccttccgtcctgttatctgcagagccttcgagtcacccaccgttccacctaagaagcgttcctctaacaacagaaaccctaaaaacatcagcaaaaagaacagtaagagttactctgtcactgttgattccaactccatttccaattcttctcttccgcctcctcttccacgtcactggccaaaccaccca

SEQ ID NO: 9640 - DNA, 427 bp, Glycine max
  Clone ID: LIB3092-039-Q1-K1-E9
tccttgccttggcaaatccgatgtagaaggcatttttgatcccccttactacgagtggtttcagttcaacaaggaatttacagagtacaccaactttgacgagtgccttcagtacattgaggaatgcatgatcaagtacggacctattgatgggcttcttggtttctcacagggatcaatattatcggctgcgctgccgggtcttcaggagaagggcgtggcactcacgaaggttccgaaagtgaaattcctaataatagtaggaggggcaaagtttaagtcaccttcagtgatggacaaagcatattcttcttccattagctgtccctccctccactttataggagagacagattttttgaacaagtatggggctgaactactagaatcctgtgttgaacccgtggtgattcaccaccccaaagga

SEQ ID NO: 9641 - DNA, 305 bp, Glycine max
  Clone ID: LIB3092-039-Q1-K1-F10
aagatggcgcgagtgatcacaggggagtggtacacggaggctgtgctattatgcgccaaggccggtgcgtcatgcgtggaggaggcggctaacccaatacgaatggtgtttggcgtgtaagcagaagcggatcggatgatcgttgagtgccggcgtgcgatgaagtttgctaggttcgtgagcaaggatggaaagagttaccaaaactgggaatatatgaatgataagtatgagatattttctcacaatcttaagttattcggtactacaacatgaaacgttgggcctatactttgtctgttaat

SEQ ID NO: 9642 - DNA, 426 bp, Glycine max
  unsure at all n locations
  Clone ID: LIB3092-039-Q1-K1-F2
aaagacaagctttcttaatttggcgtcgcagactggcaagacttgaggaaaatgagaatcttgtcctaaccccgtttgagaaaaatcttgatatttggagacaactctggcgggttgttgagcgcagtgatttgctcgttatggttgttgattcccgagatccactattctatcgctgtcctgatcttgaggcatatgcacgagaggtggatgaccataaacgcacattgctcttggttaataaggcagatcttttacccgcttctgtcaggtttaaactttttgtatatggtttattgttatattccgttaaatcaacactcttggttttccatccagctaatattcttatcatttgtcttctcccctgccctttnttcttgcagagagaaatgggtagagtatttttgtgctcataatattcta

SEQ ID NO: 9643 - DNA, 350 bp, Glycine max
  Clone ID: LIB3092-039-Q1-K1-F3
atgacaagctttcttaatttggcggggcagacgggcaagacttgaggaaaatgaaaatcttgtcctaaccccgtttgagaaaaatcttgatatttggagacaactctggcgggttgttgagcgcagtgatttgctcgttatggttgttgattcccgagatccactattctatcgctgtcctgatcttgaggcatatgcacgagaagtggatgaccattaacgcacattgcttttggttaataaggcaaatcttttacccgcttctgtcaggtttaaactttttgtatatggattattggtatatttccgtaaatcaacacttttggttttccattcaactaatattctta

SEQ ID NO: 9644 - DNA, 464 bp, Glycine max
  unsure at all n locations
  Clone ID: LIB3092-039-Q1-K1-D6
ctngnnnccttcctcgctgcccctnncnncncnntttggtgttgggatccaagaagacgtggagaagcttctagaagattataatcttaacgtggcgaatgttcgtgaccttcgctccttcgctgcggagaggcttggcgaccttgagctgaaacgggccgggctcaagtctttgggcctccgcgtgctgggcctggaagttgccaagcccaagcgggtcaccaggagtaggtgggacaatccctggctcactgcccagcaggttcagtatgcagccgttgatgcctttctctcttacgagattgatcgccgtttgagttcttataattaattcatgccttttgtttttttttccttttctcacttgtcttgtgtaggagtatttggtaattttgtgaattgtaacacttggtgttgcttgctatgttaccattcgaatgcttaatttgatttttctgaaattt

SEQ ID NO: 9645 - DNA, 404 bp, Glycine max
  Clone ID: LIB3092-039-Q1-K1-A8
ttcggctgtggctccgccattgcttcttcctccgtcgctactgagtgggtgaagggaaggcaaatggaggaagttctgactataaaaaatactgaaattgcaaagcatctttcacttccaccagttaagctccactgcagcatgcttgctgaagatgctatcaaagcggccgttaaagactatgaagctaagcgtgctaaggcaactgctagcggagaggcagcaacagaagagaagcctgccactgcatgatttctttcatatatagaaagaatgatgacgaaaacaaccgtgtgtttgtttgtttattcttaatcagattcttatcgaagagcaccttcacttgagactttgggttggacttagctggagagtattcacattctgtgaactaaatatttgaa

SEQ ID NO: 9646 - DNA, 432 bp, Glycine max
  unsure at all n locations
  Clone ID: LIB3092-039-Q1-K1-B12
agcatatgttgatgacacaccacgtgaacaaatgcaaaaagagagaatggatggcatagattctaaatgcagaaataatagtgtagaggagaatctaaaattgtggaaggaaatgattgcaggaacagagaggggcttgcagtgttgtgtccgtggcaagttggatatgcaggacccaaacaaatcacttagagatcctgtttattatcgttgcaatccaatgccccatcatagaattggatccaagtataaagtgtatccaacttatgattttgcttgtccatatgttgattctatagaaggaatcacgcatgcccttcgatctagtgaataccatgatcgcaatgcccagtattactggattcaagaggacatgggtcttagaaaagttcttatctacgaatttagccggntgaatatggtctacactct

SEQ ID NO: 9647 - DNA, 407 bp, Glycine max
  Clone ID: LIB3092-039-Q1-K1-B2
attgagcagctgcagcccacagcgttcccctctgattgaaaactcagtctcctctgcctgcttcatccttccttcctttcttcattcactggcacccttccgagtcaagcataagatcaaagggagaccctttcttttccttgtctccccctgcatgcaaccatgaagattttcaatccctccaaatgctttctccagaacgtggtgtgtccttccgacaccctcctcatcattaaaaggatgaagcccttcgatctgggtctctcccacctccaccaattccaattcagatcctacaattgaaaaagaatacaacaatccctagaccacgttagcacccacaccgcttgcttcactaccacaccccagccccgacatggaccggcgcacgggcagcacccgtaaca

SEQ ID NO: 9648 - DNA, 423 bp, Glycine max
  Clone ID: LIB3092-039-Q1-K1-B3
taaaaatccaatctgtgttgttcagcgcagcacgccaaatcaaagcgcgtgagaaaagcagaaatggcggcggctacggcgatttctcagctaggctgtttttccgccgtccaccgcagctcacacctccggcgccgctcgtttctgttcccttcccctcgctccaagttatcggttgttatgagtctggagaggcatgacacggatactgctgggtctgataccaaaaatacactaagttatgcagttgatgtgtcaaagctacatgttgaagaaaagaagaactcatattcaacaaaagatggccatgatgctgaaaaaatagggtttggagaggcaacacaggaaagtgtcgatcaaccgaaaaggactgcaaagattcatgacttctgtttaggcattccctttggtggatttgtttta

SEQ ID NO: 9649 - DNA, 413 bp, Glycine max
  unsure at all n locations
  Clone ID: LIB3092-039-Q1-K1-C10
aaaacattgttcctggtattaaagtcgacaagggtttggtgccccttgcaggttccaacgacgagtcatggtgccaaggtttggatggtctaacctctcgctcagctgcatactacgagcaaggtgcccgtttcgccaaatggcgtactgttgtgagcatccccaacggtccctctgctctggcagttaaggaagcagcctggggtctggctcgctatgctgcaattgctcaggacaatgggttggtcccaattgtggagccagagatcttgcttgatggggagcatggtattgatagaacttttgaagtagcccaaaaggtctgggcagaggttttcttctaccttgctgagaacaatgtcctttttgagggtattctccttaagcctagcatggntacacctggagccgag

SEQ ID NO: 9650 - DNA, 420 bp, Glycine max
  Clone ID: LIB3092-039-Q1-K1-C11
ctcttatccgtgccgttgaatctcgccgtccggctgctgctgttagtcgacggagctctcctactattcaaaacagaagctatgaaatcgttcaatataaatggaaccactctttctgttgcactctacactgacgtaacaaattcaaaagaactcttggaaagtatgcaagccgggacattggagccagaagttgcattcctcaatgctttacttattccagatattttccctgttctagcagctgcacacaaaacacttgtagccaagtctcgagactctttgaccacacgcactcttcattcagagcttggttacaactactcagggtctaagcatattactgaatctttgaaaagatgcggcatctctgacagcacaactttgatccttgctgctcgatttgatgctagtcctgat

SEQ ID NO: 9651 - DNA, 388 bp, Glycine max
  unsure at all n locations
  Clone ID: LIB3092-039-Q1-K1-C3
ttgcactcgctgtttcagcttcatcacccttcttttgcatcatttatatctcttgagaaatggcacaagaaacctttctattcacatctgaatctgtaaacgagggtcaccccgacaagctgtgcgaccagatctctgatgcagtacttgatgcgtgccttgaacaggaccctgacagcaaggttgcctgtgagacatgcaccaagaccaacatggtcatggtcttcggagagatcacaaccaaggccaacgtagactatgaaaagattgtccgcgacacatgccgcgaaattggattcatctctgatgatgttggtcttgatgctgacaaatgcaaggtgttggtcaacattgagcaacagagcccggatatcngcccaggtgtgca

SEQ ID NO: 9652 - DNA, 295 bp, Glycine max
  Clone ID: LIB3092-039-Q1-K1-C4
cttgctgtttcaacttcaacgcgcttcggggggatcattgatatctcttgaaaaacggcacaagaaacctttctattcacatctgaatctgtaaacgaggggcaccctgacacgctgtgcgaccagatctctgatgcagtacttgatgcgtgccttgaacaggaccctgacagcaaggttgcctgggagacacgcactcagaccaacatggtcatgggcttcggagagatcaacaccaacgccaacgtagaccatgaaaagaatggttcgcgacacattgcccgcgaaggtggat

SEQ ID NO: 9653 - DNA, 361 bp, Glycine max
  unsure at all n locations
  Clone ID: LIB3092-039-Q1-K1-C9
gcttcgacgacctgcctnnncaggnggtcttctgaacaccttcatatccctttttatgtaaataaagctacaagaattgtgatcgtgatgttggtgatggaatccacagcaagaaaaccaacctgcttaaagcatatgtggagtttatttatcttgtagctaatgcagtataggactatatataggtttttatagggtatcctttgtgtgaaactcaagagacctcgttttcaggggattttctgtttgatgtccataaggattatcaattatgttatatatggtctgggatacagtcttgacttacagtttttaacttggttgttttcattgttatggcaatttgattatgatttgagac

SEQ ID NO: 9654 - DNA, 412 bp, Glycine max
  Clone ID: LIB3092-039-Q1-K1-D1
gtggtgcttacattgtgagacaggctgctaagagcattgtggcaagtggacttgccagaaggtgcattgtgcaagtgtcttatgccattggtgtgcctgagcctttgtctgtgtttgttgacacctatggcactgggaagatccatgataaggagattctcaacattgtgaaggaaaactttgatttcaggcctggtatgatctccatcaaccttgatctcaagaggggtggaaataacaggtttttgaagactgctgcctatggacactttggaagagaagaccctgacttcacatgggaagtggtcaaacccctcaagtgggagaaggcctaagtaattcattccactgctctatgctggaagttttttgagcgttgcccttataatatgtctaatatccataactttcc

SEQ ID NO: 9655 - DNA, 378 bp, Glycine max
  Clone ID: LIB3092-039-Q1-K1-D10
cactcgcttattcttttctttccatacacatgcagacaataagttcgaacaagttcaggactggcatggacttctttcaccgcgcgaaggcggtgcgcctccgcagccaccacgacaagtacctcctcgcggaggacgacgaggattcggtgacgcaggaccgcaaaggctcctcgaaaagcgcgcggtggacggtagaatacgtggctgaatacgataacataattcgcctgaagagctgttacggcaagtacctcaccgcctccaaccaccgcttcctcttgggcatgaccggccaccaggtcctccagacgcttccttcgaggctagactcttctgttgagtgggagcccgtcaaggaaggagggcgcgtgaagc

SEQ ID NO: 9656 - DNA, 360 bp, Glycine max
  Clone ID: LIB3092-039-Q1-K1-D11
ttattcttttctttccatgggcatgcggacaatatgttcgaacaagttcaggactggcatggacttctttcaccgcgcgaaggcggagcgccttcgcagccaccacgacaagtaccttctcgcggaggacgactaggattcggtgacacatgaccgcaaaggctgctcgaaaagcgcgcggtggacggtagaatacttggctgaatactataacataattcgcctgaagagctcgtacggtaagtaccttaccgtctgcaaccactcgattcttattgggcatgaaccggccaccatgtttcttctgacacttaccttcgagggctagactatttttgtttgagggggagccccgtcatg

SEQ ID NO: 9657 - DNA, 339 bp, Glycine max
  unsure at all n locations
  Clone ID: LIB3092-039-Q1-K1-D12
cccgcccggccccncggncggncngnaactgttcgcataatattcatcagaccatctgtccggcctggggcaatcaggacttccaaactacaaaccgtggccttcgtggtggccacggcggtgctactacgatccctcgcgcgctagtacttacacgctgaacgtctacactgacttcgatgcatactgatgcaactccgactatctgattatggttcgaactgactatgagaataaatgactgtcacggtctgacacccaatcttactgttcaccggcgtgcaactttatctcaaacctaacgcggcccctgatacaaaacgactgcgcgccaccctg

SEQ ID NO: 9658 - DNA, 386 bp, Glycine max
  unsure at all n locations
  Clone ID: LIB3092-039-Q1-K1-D2
cgccaaagangctctggnatagcangccaannngaaaagcagcgtgaagaccgaggattgtccctccgatggacttgctgagttcgctctcgttggccgctccaacgtcggaaaatcctcgctcctcaactccctcgtgcgccgcaagaagctcgccttaacttcgaagaaacctggcaaaacgcaatgtataaaccattttcggattaataatagctggtacctggttgatttgcctggatatgggtatgcatctgcaccgcatgaacttaggatggattgggaaaaattcaccaaaaactattttcttaaccgctcaacgttagtttcagtattccttctaatagatgctagcattcctgctaaacaaattgatctcgactatg

SEQ ID NO: 9659 - DNA, 410 bp, Glycine max
  Clone ID: LIB3092-039-Q1-K1-D3
tctcttactttctcagcctttttcgattacccatttggttatttcgccctaatggctcttgctccatccaaagtttccaccttttctggtttttctcccaaacccagtgttgggggtgctcagaaaaacccaacttgctctgtttctctgagctttttgaatgagaaacttggaagcagaaaccttagggtttgtgcctcaacggtgcctctcactggggtgatttttgaaccgtttgaggaggttaagaagagcgagcttgctgttccaactgctccccaagtctcgttggctcgtcagaactacgctgatgagtgtgaatctgcgattaacgagcagataaatgtggaatacaatgcttcctacgtgtaccactccttgtttgcatactttgacagggacaacgtggc

SEQ ID NO: 9660 - DNA, 376 bp, Glycine max
  unsure at all n locations
  Clone ID: LIB3092-039-Q1-K1-A7
tctctctncccnnngccnttaaacgaaaaaaaaaagaagagcaattttccctcaccaaagaagaagaagcaaacaatggccgatcaacttaccgatgaacagatctccgagttcaaggaagccttcagcttgttcgacaaggacggcgatggttgcatcacaaccaaggagcttggaactgttatgcgttcattggggcaaaacccaactgaggcagagctccaggacatgatcaatgaagtggatgctgatgggaatggtaccattgacttccctgagttcctaaatctcatggccaggaagatgaaggacactgattctgaggaggagctgaaagaggcattccgggttttcgacaaggaccagaatgggttca

SEQ ID NO: 9661 - DNA, 341 bp, Glycine max
  Clone ID: LIB3092-038-Q1-K1-G7
gcgattttggtgatctcttaacatatagaacactaccctgaacatagtaaagaagccagtgctaggatttgttagtgaagcaatggctcaaaccatgttgctcatgtctagtgtctctagcagttattccgtggatttgaagaaagaccttttcctccaattgcagagtcaaagtttaaggcctaagttctctcagctctcattcaacccacttccatcatcaacttcttccttttcttcaccctgtacattcacaactctggccctcttcaaatctaagaccaaagccgctcctgctaagactaaggttacaaagccaaagcaaaaggttgaagaatggg

SEQ ID NO: 9662 - DNA, 340 bp, Glycine max
  Clone ID: LIB3092-038-Q1-K1-G8
ctctttctctgtctagaattctcagatttgcggggcgagatgatgcagcagccaggacccggcatggcaccttccaccatgggccagcagccgccgcaacagtaccagcagcctccgccgtagcagcagcaaccctacgtcatgatgccgtcgcaggcccaggccccgcaggccatgtgggccccctccgtacagcctccgcctcagcagcagcctgtcagcgccgacgaggtccgaaccctctggatcggggatctgcagtactggatggacgagaactatctctatacctgctttgctcacacctgcgaggttacatcggttaaagtaattcgaaaca

SEQ ID NO: 9663 - DNA, 181 bp, Glycine max
  Clone ID: LIB3092-038-Q1-K1-G9
ctctctctctccaagagctcgggttcttcttcttaactcgcataaaatgaagatcctgcggggcgacacacttcttacattgaccaagttcccaagacctgttaaggcttactgcaccagatgatgaaagctaactccacagatgatagaatattcacgggatctacatgactcccattat

SEQ ID NO: 9664 - DNA, 231 bp, Glycine max
  Clone ID: LIB3092-038-Q1-K1-H1
acttttgtttactgagatcctggcattggtggtttaacgccattccactaatttgttttcaagtccctcaagagttagtcatggtcctgtgttaatttgttaccactgtaatatcatatgaaatctacaatgaaatattagtatttgtggagtctgtaatcatgataggaatccgtttgttttggaagaattgaacatctgttacagccgccaccatacggttctaacact

SEQ ID NO: 9665 - DNA, 355 bp, Glycine max
  Clone ID: LIB3092-038-Q1-K1-H10
ggaatttgagggagttggagttgcgggagagtgaggtggacgacatttgtgggcattggctgagccattttcctgattcatacacatcgttggtttcccttaacatttcttgcttaagcaatgaggtgaatttgtctgccctagagcgccttgttagtaggtgtcccaacctgcagactctccgcctcaaccgtgctgtgccgctagacaggcttgccaaccttcttcgcggagctcctcaattggttgagttaggcacgggaacctacacgactgagatgcgaccggaggtcttcacaaacctggcggaggcattttctgggtgcaagcaattgaagggcttgtctggattttg

SEQ ID NO: 9666 - DNA, 251 bp, Glycine max
  Clone ID: LIB3092-038-Q1-K1-H11
gccacatggatggctgataaagaacccagctgctggcctggtacctggacaactgctgcaccggaacattccaggggtgatcatgccagtatcatacaggtaatgttacaacccccaagtgatgaaccactgactggcaaaacatcagattcaaatgccttggatttcagtgaagttgatattcgtcttactatgcttgggaatggttctcgggaaaaaaaacccggttttgaccccaccaaaagggccgg

SEQ ID NO: 9667 - DNA, 343 bp, Glycine max
  Clone ID: LIB3092-038-Q1-K1-H2
tccacccattcgttatttcccactcttatcaatttcatttattccgacccagttttttttgtcttcttttcagttcctgaaattgggtcaattaggatttcggagaggcccattggaggcgccgttaatttcaatttatctcaaagacggagcttggtaaagcccgttaacgccgaacctccacgcaaggattccattgttcctctcgcagcaacaaccatcgttgcttctgcttctgagacgaaagaggaagattttgaacagatagccagtgatctcgacaatgcttcacctcttgaaatcatggatagagccctcgacaaattcagcaacgacatagcta

SEQ ID NO: 9668 - DNA, 340 bp, Glycine max
  Clone ID: LIB3092-038-Q1-K1-H4
gacacaccttcagcagcagcagccatggttctcaaaaccgaactatgccgattcagcggtgccaagatctacccagggaaaggcatcagatttgttcgtggtgattctcaggttttcctgtttgctaactcgaaatgtaagaggtattttcacaacaggttgaagccatcaaagctcacctggactgcaatgtacagaaagcaacacaagaaggacattgctcaagaagctgtgaagaaaagaagacgtgctgccaaaaagccttactccaggtccattgtcggtgccactttggaagttatccagaaaaagagagctgagaagccagaagttcgagatg

SEQ ID NO: 9669 - DNA, 339 bp, Glycine max
  Clone ID: LIB3092-038-Q1-K1-H5
tcgtttttttgtgtgtgtcgaacgagggctcagcttaatgtttgttccttttttctcaatcgttttccctcacggcacattcttcttcttcttcttcttccaaaaaacaggaacatggatcctccgattaagaaaaagacattgtctcgtgctagcttgagtcctcagaggaaagacatgtgcatagttttttcccttgtgaggtataatgaattctgggagcctgtttgccaggcttgtaatgtggttatgttggagtctatacgtgcacacctagctgctccggagcataactgggtaatggtaaaactgaaagctaatgctgctggatcaacctga

SEQ ID NO: 9670 - DNA, 353 bp, Glycine max
  Clone ID: LIB3092-038-Q1-K1-H9
cggtcttggaccgattacctcggcctgtccgtcggcgggacgctctccaatgccggcgtcagcggccaggccttccgctacggcccgcaaaccgccaacgtaacggaattggaggtggtgagcggcaaaggcgaaaccttagtctgttccgaatcacaaaattcggaactcttcttcgccaccctgggaggattaggccagttcggcatcataactcgcgctcgagtcccggttcaacaagccccggacatggtgagatggataagggtggtgtacacagaatttggcgacttcactcgagacgcagagtggctggtgactctccgagagggtgatggttttgattacgtgga

SEQ ID NO: 9671 - DNA, 345 bp, Glycine max
  unsure at all n locations
  Clone ID: LIB3092-039-Q1-K1-A1
cggccgcgtgggcctgtnnnnncaaanngnnnnnagctgtgtaaaaaaaaaaaaaaaaaaagggaaaaaaaaaaaaaaaaaaaaaaaaaaaaaaaaaaaaaaaaaaaaaaaaaaaaaaaaaaaaaaaaaaaaaaaaaaaaaaaaaaaaaaaaaaaaaaaaaaaaaaaaaaaaaaaaaggggggggccgttttaaaggaccaaagtttacttccccgtgcttgcaaagtaatagtttttttttggggccccctaaattaaattcctgggccggggtttaaaaacggggggacgggaaaaaccttggggttaccaaattaaatcgctttgaaaaaaatccccttttc

SEQ ID NO: 9672 - DNA, 332 bp, Glycine max
  Clone ID: LIB3092-039-Q1-K1-A10
cttgtatgagactataacaaaatcaaagtttgaggtgccatcgactgaggagcctatacatgaccgaattacacgaaatgttgcatctgcactgtcatccctaaagtagcctgggaaattagggccgtgctgtaattctgtattttaatctttgtataaactatatcaaaaacttaaattaatggagaacttctccaagcaattttttatttttccaaagtataacataaagcagaaaggcaaaacaacagattcagaaatttgacaccttgtccttgtgattccttcttttttttttttttttttaagaataaagagctgtttctggaagc

SEQ ID NO: 9673 - DNA, 421 bp, Glycine max
  Clone ID: LIB3092-039-Q1-K1-A11
aataccctgcactgcatggtcataaagctgaggattcacatggaaacttgatgccacccccacctgcaccccaaactcaatatcagagtccttgttcaagagagcttatgtcaaaacatgtatcagcaaaaacttgtgaggctgtgaaaccaaaagatggtgactgtaagctatttggcttctcacttatcagtggccctatcgtaccagagccttctttatcacaaagaaatgtgagtgagcctgctggtcagatgcatcttacagcacaccaacaaagaacatctgaaaatgatgagaagtcagatcactcaaagggatcaagacctgtagatgatctagttgttgatgaccatgacagaccattacagacttctcagtcgcatactaaagacgttcacgccaaacctctcagtggttc

SEQ ID NO: 9674 - DNA, 428 bp, Glycine max
  Clone ID: LIB3092-039-Q1-K1-A12
ggggactttgctctgtattgatggtacatttgcgacaccattgaaccagaaggcccttgcccttggcgctgatctgattctgcactccttaacaaaatacatgggtggacatcatgatgcccttggtggttgcataagtggttcaactaaggtggtttcgcaaattcggactttgcaccatgttttgggtggtacacttaacccgaatgctgcatacctattcatcagaggcatgaaaacgctgcatctccgtgtacagcagcagaattcaacaggaatgaggatggccgaacttttagaggcacatcccaaggtgaagcgggtctactatccaagcttgccgagtcatcctgaacatgagcttgccaagaggcagatgactggtttcggtggtgttgtcagttttgagattgatggagatctacata

SEQ ID NO: 9675 - DNA, 275 bp, Glycine max
  Clone ID: LIB3092-039-Q1-K1-A2
ataaaaaaaaaaaaaaaaaaaatggggaacggggaaaattataaaaaactaaaccacaaaacaaattactcaataaacaaatctaataaataaatagaaaccttcaacttgttcaacaaggacgagtgatgattacatcatagcgccggcccttttaaaatatcaaactttcattgccccaaaacccaactgaatgctttttttatggacaccctaaatgaaatttattctgctgggaattataccattgacttccctgaaatcctaaatttcac

SEQ ID NO: 9676 - DNA, 405 bp, Glycine max
  unsure at all n locations
  Clone ID: LIB3092-039-Q1-K1-A5
aaacctatagctgatgatgtagatgttaaagcaattgctcgtggtaccccagggtttaatggagcagatcttgcgaatttggtaaatgttgctgccattaaagctgcagttgaaggtgcagagaaagtaacagctgcacaattggagtttgcaaaagacagaatagttatgggtactgagcggaaaacaatgtttatatctgaagagtcaaagaagcttactgcttatcatgagagcggtcatgcaattgttgcccttaacaccgatggtgcgtatccaattcacaaggcaacaatcatgccacgtggatctgctttaggaatggtcactcagcttccctcaagtgacgagacatcaatangcaagaaacagttgttagctcgccttgatgtttgtatgggagga

SEQ ID NO: 9677 - DNA, 400 bp, Glycine max
  unsure at all n locations
  Clone ID: LIB3092-039-Q1-K1-A6
cgtattacgactctggatcagagggatacatcagaggattcgctccaactcctatcgaataaggtattatctgtcaatttacattggaaagggttaggatattcaattttacataattaaagataaaatcaacgatagctatagttttaaaattaaccatcgatttagttgcaactggaacacaggtttctttcaatgaaataatattaatatcaatttaataagctggtaatgtaaaatactgctaatgttaatatgaagtttggatggtcttattggcagaagatgctaggtggtgttcatcaatattctgaaaggtaaaacgatnttggtttttaatgataatataaccatgaatctaacatcagatattgaacgctacacatcaaaaataaatcga

SEQ ID NO: 9678 - DNA, 340 bp, Glycine max
  Clone ID: LIB3092-038-Q1-K1-G6
tcgcccacgcgttcgctaattcacacccaaagagaaaagaaaaaaaatacaacagtggtacgtgatgccaccgaagttcgatccctcgcaggtggtggacgtgttcgtccgagtcaccggcggcgaggtcggcgcggcgagttctctcgccccgaagatcggtcccttgggactctccccaaagaagatcggagaggatattgcgaaggaaaccgcgaatgactggaagggcctccgcgtgacggtgaagctaaccgtgcagaaccggcaggcgaaagtgactgtggtgccatccgccggcgcgctggtcatcaaggcgctgaaggaacccgaaagggac

SEQ ID NO: 9679 - DNA, 126 bp, Glycine max
  Clone ID: LIB3092-038-Q1-K1-E11
acgcccactcgtcctagcactatatatgcattatgtatctggtcgatttgcattatctggggggggatcatattcctagatatatagctaattatgatttcatgagttatatagggaacattggtt

SEQ ID NO: 9680 - DNA, 462 bp, Glycine max
  unsure at all n locations
  Clone ID: LIB3092-038-Q1-K1-E12
cccacgcgtccgcaaaaggactgaacgaaaaaaccttagggttcctctgttcttcttcgccgcccaaaaaattttctggctcagagaaattcaaccgttctcgccattgccgaagctccaactcctcgcatttccaactcttcacccaaaaccctttttgttggaacagagtttcagagagagacccttcacaacatggcaaaaacgaggccaggcagaaaagacttggattcctacaccatcagaggcaccaacaagatcgtaagagctggggactgtgtgctgatgcgcccctctgatacgagcaagccaccgtacgtggcgcgcgtggagaagatcgaacaggatagtaggaacaacgtgaaggtgcgtgtgaggtggtattataggccctgagagtctattggaggacgcangcagttccatggagcaaaggaacttgttttggctgaccattatgat

SEQ ID NO: 9681 - DNA, 328 bp, Glycine max
  unsure at all n locations
  Clone ID: LIB3092-038-Q1-K1-E2
atagtattggatttcttttcttcttaaacgaaactgagattctcggatggcgttccttcagtaggcccccagatccgtgttgccctatttcggagatgaagaaccagaggaagaagaagagaccgaagctgcagaagaagcttgagaagaacaaaggcgttgttagctgctgctgatgtngttgccgagaacgaaaacgaaagcgaagaagaaaagagaaaacgcagcattttggaggcactggttgaggccttctccttgtctttagtcagggaagcttccttggcctataacattggncggcggtgaatgccgacaagggcttcgg

SEQ ID NO: 9682 - DNA, 308 bp, Glycine max
  Clone ID: LIB3092-038-Q1-K1-E4
aatgtgaaagtgttggaacggtagttgattggaaccctgcaaagatccttcctttgcggttttatttcttgataagaagaaggctctttgtatttgttgattttgaagaaggaaaataggaatgaagaaattgatgaggctattgattttttatctgcaattgttggaactttttgtgagttcatttgttcatatgctttatgggttttacatatatagctccgctgtggctggggatctctcacaggctctcaatgaatattttttcaaggttaataatgtgaatgttgaaatcagagaggaaattt

SEQ ID NO: 9683 - DNA, 347 bp, Glycine max
  unsure at all n locations
  Clone ID: LIB3092-038-Q1-K1-E5
agtgtgcgttaatgtgtccggccatataattntttttatttgatataatgtccgggtatcatccacaagattgaggagaccctccatgtgggagggctacaagaaagaggagcacaaaggagaacactgtggtgagcacaaaggtgaacacagaggagtaacaccatggtgagcacaaaggtgaacactaaggagaacaagaccatggggagcacaaggaggtacttgtggataagatcaaggacaagatccatggtgatggccatgacaagggtgagaaaaagaagatgaaggacaagaagaatgaggagcatggacatgaccatcatggttatagcagcagcagt

SEQ ID NO: 9684 - DNA, 259 bp, Glycine max
  Clone ID: LIB3092-038-Q1-K1-E9
cccacacatgccttatctgtagctgcatctacacctgcgcaaactttcactaccgatggcgggaatatcgtcatcaaaagataccgacccaagcatgacttacctgactatctcagacacgggtcgtaatgaacatcccatcaagactggtctaaagcatctcactgatttaaattcaaaccatctatccgcctactcttctgcagacacaccaacgcctataagacgtgatcaaacaatcaaagatatatatcaatgt

SEQ ID NO: 9685 - DNA, 365 bp, Glycine max
  Clone ID: LIB3092-038-Q1-K1-F10
tccactcgtccgcactcttccatagattttgtgtacatgcgcagacactgtgcctatagtcgcggtatgatcaagtcatgtctgcgcctcagatgtccctccttactttaatgtgccaaaatctagtatcgagttcttttaattgccgaacctacatgcatatacgtttccttcctcaacagtatgcacttttcatgggttaccatttcatgccaagaagctctcctcctatgaatgcgttcagatatccatcactagcaattcaacatagtcaatcattgattgtaccattcattcatcgcatcagacctattttttgaacatctaatatagatcatgctcatagcatcctatccagttctttc

SEQ ID NO: 9686 - DNA, 412 bp, Glycine max
  Clone ID: LIB3092-038-Q1-K1-F11
caatgcctcctttggctccaagtgaagagcttcaattgggtctcatatacttccttggtccaattcccaaatcacgaatcccactttctctgcaggacttgggagcactagccatcaaggctaatgcagctcttgctgctgcaacacctaattatagctaccctatcttaaaacccaattcacaaaaaaagttccgtacgcaccctactctttctaacgtttctctggtgtattcccattagattttgaagatgggtttaaaggttgaatgtgtgatattttcacccatgttgtaaaagctgtggatgatggtgaagtcaagggatctaactcatttgattgagtaaaatgccatgagtatataaactccctgcactatattcgatttgtaccgattaaaaaaaaaaaggac

SEQ ID NO: 9687 - DNA, 291 bp, Glycine max
  Clone ID: LIB3092-038-Q1-K1-F12
gacatggccacggccgtgtcaaattcatccgatgctccaactgcggcaaatgctgccccaaggacaaggccatcaagaggtttcttgtgaggaacattgttgaacaggctgcagtcagagatgtgcaggaagcctgtgtctatgaacaatacacgcttccgaaactatatgtgaagatgcagtactgtgtttcctgtgctatccattctcatgttgtgagggttcgatcccgcactgataggaagaagcgtgagccttcacagcgattcatcaagcgcaaggatgatgcac

SEQ ID NO: 9688 - DNA, 372 bp, Glycine max
  Clone ID: LIB3092-038-Q1-K1-F2
cgcctgttaatttttttaaaatggatggtaggctagaggacactgatgagcaatctaaatggatatttgttcttagcaccacaagggccttgtaagtggggagaaaacaaaagggtacgtttcaacactcaagctttctttctggcggtgcaaccacagcagctggcagattagtgtcccattgaggtgcccttaaggctatttggtcatatagtggatactaccaccccacagaagagaacttcaaaatatttataagctttcttgaggagcacaatgtagatctcaccaatgtaaagtatatgtgctttagatgatgataatccaatacttattgggacctaaattttttttcctaaaaatttttttttt

SEQ ID NO: 9689 - DNA, 343 bp, Glycine max
  Clone ID: LIB3092-038-Q1-K1-F3
acgatttgttggagtttcagcctgtggaggaattttaccgtttaagaggaaaattattggagtttaacctgcctggatgaatcccggagtcttgtcctaagttgctacatgctcttaatcttgatgattatgaggacaaacgatctgctgcagcataacgatataataatgtatcataacagtaagtatttcattctttgcgtgcatatattgcatgcttggcaattttgcaggacagagagccaaagaaagggaacttccctgctagtattattttggaccaataatgatatttgtaagtgttgtaatctgataagaggataagactggtagtgttgcgttt

SEQ ID NO: 9690 - DNA, 321 bp, Glycine max
  unsure at all n locations
  Clone ID: LIB3092-038-Q1-K1-F5
agtgcatcagcagnccctttgtagaatccacagcaagacaacttgcactagataatcttgagctaagggagagaaatcgagcacttggaatctttgctgttattgtcgcatacaaggatcctattaggagctgtaccggttgtgaaaagtataatagactactatgggcaattgttgcactagacaacccatctatgaatgtgcaggaaatggtgatgctgtcaactagtgttttaagtatcaagtggacaataagagggtaaccaaaatctgtgataggaggagatctgataattagagttaattccaaatttactcttt

SEQ ID NO: 9691 - DNA, 250 bp, Glycine max
  Clone ID: LIB3092-038-Q1-K1-F9
cccacgcgtccggggaggacaaataccaggcgtttatgcgcggagacagtgagaagaacatgaaatggagatatggtgctcctacaaattatgacgttgtcaacaaattatttgatgaatgcagaaccaaggtatggcctacgggatcacttgaagaaaaagtgcacactttagtgaagaattgggagatggaaatgatccacatggaggatttcaaggattacagatcagtggacccagagaaatacac

SEQ ID NO: 9692 - DNA, 133 bp, Glycine max
  unsure at all n locations
  Clone ID: LIB3092-038-Q1-K1-G1
ctaccactgtaatatcatatgaaaactacaatgaaacaccagcatctgaggagagtgcaatcaagatacgaatccagctgaaagcggacgaatagaagatccgatacagccgccaccaaacagnactaacact

SEQ ID NO: 9693 - DNA, 251 bp, Glycine max
  Clone ID: LIB3092-038-Q1-K1-G10
acgaggcgtacaaacagccatgcgatcacaatctcaaccacacgacaatcgaggccaggcttctaagatacgtaggtcatcaccatacatagcgaatgatgacacgggggcaacatggaatagagtaatggaatctacaatgttcaagaatcgacctatggaccatatgctagatgctatattgacttgaaccaatagactgtcaagaactcacggatagagtgaaccttgccaagaaacgcctagctgca

SEQ ID NO: 9694 - DNA, 276 bp, Glycine max
  Clone ID: LIB3092-038-Q1-K1-G11
gttggaggcaaggcatcttgtcgtaggaacttctctttggatggtgttctatccgatgcttttggacagcctgtagataaggagaatgaggtttttgcttcacttttgtatgccgacacgggggcaccagtggagaatacagccgatgatgaagcaccccttttagctagttatgatggaatagaattttcctcttgtgaaagaccaagtaagcttttgctgggacgtgcttcatttaagctcaaaatatctcagctttcatccaagtgtgacaac

SEQ ID NO: 9695 - DNA, 326 bp, Glycine max
  Clone ID: LIB3092-038-Q1-K1-G12
gttggaggcaaggcatcttgtcgtaggaacttctctatggatgttgttctatccgatgctggtggacagcctgtagataaggagaagaaggttttgcttcacttttggatgccgaccccggggcaccaatggagaatacaagccatgattaaacaccccttttagctagttatgatggaataaaattttcctcttgtgaaaaacccaataactttttctgggaccgtgcttcaattaaagctaaaaaaacttaagttttaatccaatgtgaccaccaggtggttcttaatagcttttggggttccaaacttggaaattaatccttt

SEQ ID NO: 9696 - DNA, 260 bp, Glycine max
  unsure at all n locations
  Clone ID: LIB3092-038-Q1-K1-G3
ccaccgcgtctccaaaagctccgccagcacccccaccgcacaccgacccacttcaatcaccaccaacggagtccaagtgctataaatctccgacngcagcngaaacggcctagaaaaaaagaccatcacccccgaccataaaaaggaactcagaggaaaatnctgtcccaacagcctctccaacatcatcaaagaccacttccaaaacggntcccaaaaaagcgnntgcagcatcaacaacccctttgacccatgggttg

SEQ ID NO: 9697 - DNA, 340 bp, Glycine max
  Clone ID: LIB3092-038-Q1-K1-G5
gcgttttgctttagcttggcaaaaaactactaagcagatgcctccacgtcaccctcgccaccaccgaattagtttaccaccgcgtcttcaagtcctccgccgccacccccaccgccaccgttcccacttcaatcaccaccaacggaatccaagtgctatacttctccgacggcttcggaaccggcctagacaacaagaccatcacccccgaccaatacatggaactcataggaaaatttggtcccatcagcctctccaacatcatcaaagaccacttccttaacggttcccaaaaactcgtttgcatcatcaacaacccctttgtcccatgggttgcaga

SEQ ID NO: 9698 - DNA, 346 bp, Glycine max
  unsure at all n locations
  Clone ID: LIB3092-038-Q1-K1-B7
tcgattttaattaatgcaaaactggaatttatacagatatgtacaacagtataaggcttcatagtgtactacaaagaattagatgtaacagtcacatataacctatacaaactctaaagaatcaaagaatgatctgctgtgcaatgttttttagcctgttctgatgaaaatctacattgcctcacaaaacatacagatttcgtgtatttaaggaataacgttagtacacttgtagggataggcgtgcttgacattgtggctcttaaaagatgatgctcttaagagctgttgtttccgtggaaaatgacacctcaagcaattcgcaagggatcaaaatcnatatttt

SEQ ID NO: 9699 - DNA, 228 bp, Glycine max
  Clone ID: LIB3092-038-Q1-K1-B8
tcgattaaaattttgctaccgaggctgcagacctcttgactgagatagcattggcaaagggaagtagagataacaccagtgtcattgtagttgagctaagaggaacagtaacaactgattgaggcctcgtttctgtcaaaacatgtatttttatttttattttcttctctaattcttgccttgctgctttggactaatatacactcaggttgtgctcttctcattgcc

SEQ ID NO: 9700 - DNA, 415 bp, Glycine max
  Clone ID: LIB3092-038-Q1-K1-B9
gcacagattacgaacacgaagaagacgaagtttaagaacgatagtaatggaaatcatagcccggattgacagcactcgttaccaggggtgcctatggaatcggcaaaggtcttacactaactcttgcacacaacggtgccttctatcacgatacgggatttctctgaagaaaagggaagacaagctgcaagtactcgtctagaaaattaactcccattttcattctaagttaagatgcttcgctggcatattggtcaaatgtgatgcgagtcatgcatggtatctagctgctgcatctgacaagcattttgggacatatggaagactagacatttgtattaacagtgcagggattagtagatctgtaccattccgcgatgatcaaactgatgtcacccgaacattgaaatacact

SEQ ID NO: 9701 - DNA, 336 bp, Glycine max
  Clone ID: LIB3092-038-Q1-K1-C10
gtcaaacatacggactcacattcacttactttttatatgatcacactttacaaaagggctggcatcattttgatagcatgcgagactctgcattatatatgacattacatgatgactgctaattcaagattttggatctgaactcaaaaaggacacaccgtttcatagttattaagactcacttccatatctagcacatcttaatgtatacatttgatgatacttcccaatactattaatatatcactgtcagccttcctactaacgattgcacatatactgattatcattttcaatatcttactaaacgtaatgtccctaaaagcataatttttt

SEQ ID NO: 9702 - DNA, 302 bp, Glycine max
  Clone ID: LIB3092-038-Q1-K1-C11
gtcaaacatacggcctcacattcgtttacttataatatgatcacacttaacaaacagggagggctgctactgacaccatgcgggactcatgtctacacgacaacatatgttctgaatatcaagtgcttccatggctcatacccttatatatgctcctctcatatctttctatttcctcttacttctggatatccaccatctaaaggtgccattgacatgataattctcaataagtctttcatagccgattattacttcctctaattgatgtcctcatgagctaaaaactctatcctcaattt

SEQ ID NO: 9703 - DNA, 284 bp, Glycine max
  Clone ID: LIB3092-038-Q1-K1-C12
gctaagcttacggcctctcattcatttaccttttatatgatcacacttcacacccttgaatgactgcttcttacaccatgcgttactcctttctacacgacaacatatgttttgaagaacaaggacttccatggttcataaccttatatatgctcctcctggctctttctttctccgctgacatctgaatatccaggatctcatggtcacattgctttttgagttttcaacaagtgtttactcgccgattgttattttacccttattatatttccccttttgct

SEQ ID NO: 9704 - DNA, 293 bp, Glycine max
  Clone ID: LIB3092-038-Q1-K1-C5
aatgtgatgcagtataactaagacaggcagagctggctatgacaatcatattgatactaattcataggtcgtgaagtatgaaatgctgctacagtacctagcatattcggccttttgctggctgagcggaatcctataggaagcttgagacttgaacaaagatggtgacttcaatggtttatacctgaaagtgatctactgcaagttggtagatttaaggtctgtcaagcgttgctgtactcaaattgcctatttaatacatcatggtaaaagttggagagtgtcatgaaaaa

SEQ ID NO: 9705 - DNA, 333 bp, Glycine max
  Clone ID: LIB3092-038-Q1-K1-C7
tttaagtatccggagcgattgcctgaagcaacaattggtggagctccatagaatttgatgcagtaaaactaaaacaggcagagctggctataacaataatattgatactaatttcttggtcgtgaagtatgaaatcctgctacagtacctagcatattcggtcttttgctggctgggttgaattctatcggtagcttgagacttgaacaaaagcagtacttcaatggtttatacctgaaattttcttagtgtaagttggtagatttaggttctgtcaaattttgttttcctcatattgcctatctaatgtatcatggtaaaccttggagagtg

SEQ ID NO: 9706 - DNA, 288 bp, Glycine max
  Clone ID: LIB3092-038-Q1-K1-C9
gttaaacatatggcctcacattcttttacttataatatgatcacacttaacaatcatgaagggccgctacatacaccatgtggtactcatgtctacacgataacataggttttgaagtgcaagttcttgcatggatcatcatcttatatatgatcctctgatgacttcctataacgtctcacttgtggatatgcaccatctaaatgtatcattgagatcatagttcacagtaagtttttcatatacgattaatactgtttataatggatgtgacctagagctataaac

SEQ ID NO: 9707 - DNA, 319 bp, Glycine max
  Clone ID: LIB3092-038-Q1-K1-D1
gtgggcttcgcttatcgtctttgtctctcacacttcgttttcagcttcacctcgcataagaaagagtgtaaaaagaaacgaagatgaacatgaacgaagagagtgttgaaggaagcgcgaggaggatccaagtgcgcttcgtgacaaagttaggcgagccgtacaaagttccgaccaccgccatcgctatccccgccgacctcggtcgattcggcctctcctcactcgtgaacgcactccttcaatccaatgacgctgatcatgagctggagccgtttgattttttgatcgatggcgagttcgttcggatgtcgctgga

SEQ ID NO: 9708 - DNA, 511 bp, Glycine max
  unsure at all n locations
  Clone ID: LIB3092-038-Q1-K1-D10
gcacgtactcggtctcgtgaattcctcgtggtcgaccccactgcgtctcgctacagtcttgcctgctacgcctctccctctcgtctcaaaagatcgtatctcttcggattttagggttggtgttttagctgctgcgcttcgttcccccccttctcataaacaaccgcgttttctcttctgcttcgtatctattctttgcttttggttttggttgattcaaggccttcacagcattcgttgcggcattttaatcgatttatccaagcaggactgaatgaactaatggagtctaaaggtgggaaaaagaagtctagtagtagtagtcgtaaatcattgatctacgaagctcccctcagatacagcattgaagacgttagaccaaacggtggaatcaagaaattcagatctgctgcttactccaactgcgctcgcaaaccttcctgatatccatgcagattgatagttcattgcatgcaaccataagtttattaggtttnttcttcttggtttc

SEQ ID NO: 9709 - DNA, 357 bp, Glycine max
  Clone ID: LIB3092-038-Q1-K1-D11
actacaacacgtccattatcaaagaatatcacctttcaccttatagactaaccatcattggggcgcagaccattcactacttttaatcgtcagcaccacatcaactcacaaacacttctcaaagttaatattcagctaaatatgtggcttctttctacaatgcccattaatcttcttcttcttcttatataccataattcatgcaatttcaacgcctcgtgaatgctccctattaaaccaaattgtagtacaatcgatgtcaagtaccgtaagaatttatggaaacagactattaccaagatcttaacagcatgtactaacaccaccatacgactgtaacaggatttatcacattta

SEQ ID NO: 9710 - DNA, 450 bp, Glycine max
  Clone ID: LIB3092-038-Q1-K1-D12
cccacgcgtccgggaagctgaaacagtgaaaaacagcaacaacgaccaccctgtctttgttttttgtttgttgagttgaaactttagagaaagtgaatagtgatatggaggcaaagggtgtgcggttcttagcgtatcaatcaatattttcgagcgttggatctggggacttcgatggggtgaagaaactggtggaggaagtgaagaaggaagaagggtcatcgctctctgatgtgatgtctcttcagaacgatgctggagagactgcgctatacatcgctgcagagaataatctgcaagagatgttcagcttcttgctcagcatctgtcactttgaggtcgtcaagattcgctccaaggctgatatgaacgcctttcatgttgctgccaagcgtggcaatctaagttttttttttttatttttcatggaataagttcttcttacggatg

SEQ ID NO: 9711 - DNA, 151 bp, Glycine max
  Clone ID: LIB3092-038-Q1-K1-D2
tcgggtgaataatgtatagggttcctgagagagatgaatgtgatgtacaggatgtagatggctggtagtggcagtgtgtgtccctttgcgcgacttgtaatcattttttatggtggctgttttattttaattaaaagtaatctcatctttt

SEQ ID NO: 9712 - DNA, 291 bp, Glycine max
  unsure at all n locations
  Clone ID: LIB3092-038-Q1-K1-B6
aagatggagggcgcagaagcagcaaagttcattccacaagagaatcggaagggtccaaaacgacgcgcagcgattcggtctccatggagtcaaaggncgcatcgttgaggctcaccctcttaaatctagactccaatcaacagggagaatggatgaagcgatagagaggcaatgcaaagttaacctgtacggaagtgcttttcccaggaaggaggagcttgacaggcaaatcctgtccaggttagagcggccaaactggaccaattccttctgcaatgctgggttttggaa

SEQ ID NO: 9713 - DNA, 343 bp, Glycine max
  unsure at all n locations
  Clone ID: LIB3092-038-Q1-K1-D8
tcgtgtgttagtaagctcatcctagagttttaaaaatgtcagcagcctccttcatggctctctgttccccatccttggctggcaaggccgtgatagctgggcccatcagcccccgaagtcgggagggtcagcatgaggaagaccgttaccaagcaggccttttccggaagcccatggtacggcccagaccgtgttaagtacttgggcccattctctggcgagcccccgtcctacctcactggcgagagcccaggtgactacggctgggacactgctgggctttcggccgacccagattccttcgccggaaaccgtgagctcgaattgatccactnccaggtgg

SEQ ID NO: 9714 - DNA, 351 bp, Glycine max
  Clone ID: LIB3092-038-Q1-K1-D9
cccacgcgtccgggatcttatcatatcatatttcaaggccgattctgatgattcattgtcggaaggaaatgcacgttctattaatgtcatcaacattttaactggcaagtgtcttgcaacgataacagcaagtcatggcttacccatggtgaatgaatgcagttgcagcgatgacaattgttcaagtagtgcttgcaattcagggaaactattgcgttcctccataattaggagcacagatgcgtaatccttggaagacattactgctcttttctacgatgaattgcgcatccagatctatacctgcaataagctcattctggatcatgtctgatctaactaatgcactgt

SEQ ID NO: 9715 - DNA, 250 bp, Glycine max
  Clone ID: LIB3092-038-Q1-K1-E1
tacttcgcatgctctccttatagtttttggaaattgaaatataccaaagccctgagatttttcccatatttctcgtgatagttcttctggctcacaagccaataaatgcatccacaaccattaatttcaacaccaattgtacaaattcactgtctagcgaatagtgatccaccttcatttcccagttccaagaatctaaaccttactctaatcagttctcaggatgcccatttgcatcatcattcacaag

SEQ ID NO: 9716 - DNA, 403 bp, Glycine max
  unsure at all n locations
  Clone ID: LIB3092-037-Q1-K1-H12
cttggtggttgcattgaatcggagagggtaggtaggtgggaagacgtgtcttgttttgtagctttccccttcgctctctctctctttcccggcgcatgtgccggattagacgccaactgcttccataattcacctcctccaaccaaccaacacaagatttccctctggattggatggaagaagcatgtgaatttcgaagttgggctgaattgattcctgatgcgctcggggtaatcttcaccaatctttctcttcaggagagggtaacagtgatccccagggtgtgcaaatcatgggctaatgcagtaactggaccttactgctggcaagagatagacatcaaggattggagcaaccgatgccagcccgaccaactcgatcggctacttgagatngctatcac

SEQ ID NO: 9717 - DNA, 443 bp, Glycine max
  Clone ID: LIB3092-037-Q1-K1-H2
gcggtgaagctgagttggagtcgctgttggaggagtaagcgatggatgccaagtggacgctagagcctgtggtggcacgaagaatcgaaggaatgtggctgggggtgcgggactttgaaagaacttacagaagtgaaggcattggaattacttacttttatactggggttagcgccgctacactagtgcccattctcaattaccgaaacaacaggagtggcagcactagttcaatctccaaagccctgttgacagcttcaatcggtggctacataccatctgcaattgtggtgttacgggtttatgaattctatggtaggtaataggaagaatcagaatggagtttgctgtgttgattgagtgaatatttagtgatggcttccaaaggaaatcatatctaggcatgtgtggagaatcaaagacagacattaaactgtgaagaa

SEQ ID NO: 9718 - DNA, 209 bp, Glycine max
  Clone ID: LIB3092-037-Q1-K1-H4
gaggatataactttctcagtgatagggggagataaattaggtgaggaatattgagtatatggagggactaatttgttaggatacggtgatgtattgatatggtactgacataaacatcatcgatggaaatgccagcttgcaccccgatcaggcactcctcgtcgccttcatcgccggcggcgacggcgactacgaccggattgtgggtg

SEQ ID NO: 9719 - DNA, 337 bp, Glycine max
  unsure at all n locations
  Clone ID: LIB3092-037-Q1-K1-H6
gaggatataacttttcagtgatagggggagagaaattaggtgaggtatattgaatataggaggggacgaatttgttaggattcgttgttatattgttatggaatggaaaaaaacaggtttgatggaaaagcatgtggcatgtggcatgtggcatgtggtatgtggtttagtgcgtctggcgagcatgtgaaagctgatccactctcgcaaaattggctgactgccacctctttcttatattattatgacccaccaagcatcatgctgttttgtgcatcatgcatggcctnccatgtgaatgtctgcttcactttcacatatgtaatatcctcactat

SEQ ID NO: 9720 - DNA, 195 bp, Glycine max
  unsure at all n locations
  Clone ID: LIB3092-037-Q1-K1-H8
cacaagttgaaaattgcggctctcgaggccgtcaacanataccatgcaccctacaattggtgcccctacggcggtccccttttagactgccaatgtgatgtctttaaaagctcctacctggaataccacaatttgaaacccagcttgctctccgtcctaaccatcctcgtcgccttcatacgcctctgcaagggc

SEQ ID NO: 9721 - DNA, 173 bp, Glycine max
  Clone ID: LIB3092-038-Q1-K1-A1
gtaattcaattattatatgtatgtaccatgccattgtatttttgtatgcttactactactactactaccactacaaacacttgttgcttcatttttcattctaaaacttgtactgagaaacagaaccttcaattttctctgccttctcattgtgcaataaatttcttaccttg

SEQ ID NO: 9722 - DNA, 442 bp, Glycine max
  Clone ID: LIB3092-038-Q1-K1-A11
aaaaaattagaaaacaatatagatacgatcttttatcctataattttatcaattatgcagataagaaagactcatatatttatggatatagatccctatttcaagtaaaaaaaaaccaagtgatttcttctaattacaacacgtataaaaaagaattattggatatcatagataatctctttatcaagaattatatatcggaagatgcgattctagatatggaaaaaaatatgtatagaaagtgttttgattggatgggaatctctatagagatactctatagcgccatatatcatacccagaattggggctctttaaaaaatgtgagatattatatgacgcatataggggtaactcgcaggttataccaatcaaatcactttttttttcttataatgtaaatcaaaatgttagtgaaaataaaaagcacattactagaagg

SEQ ID NO: 9723 - DNA, 362 bp, Glycine max
  Clone ID: LIB3092-038-Q1-K1-A12
ccagaatcaaaataagaaaaacagagtaattttgcatcgtcgtcacacatggagatctccggcaccgttctccgtcaggtcagctacgtctccggctatgggacccacacgcggtcccgcggcctggctcctcgttttggggtgaggatggggatgggttctggtttctgtgacgaggggcatttgcggtattaccaggacaccaaaaaggttctcaccccaaagaagaagttgaagctgctcaagggtttctgcaaattagggcttgcatcggatcccgagaaactcgccatgttctatgatcttcaacaaaacctcacctcggatgctggagatgtattactgagagagttagaagcagc

SEQ ID NO: 9724 - DNA, 319 bp, Glycine max
  unsure at all n locations
  Clone ID: LIB3092-038-Q1-K1-A4
cattgttgacacatttanacttaaggatgaacccgcgttggatatatagctgtttgttaccttcatgaataggtttatgaagaatttgacttccaagttcgatgcagagcaacaggagttatttaagtagcacatttagggagcaactatatacttgctctctaatattgaagatttccaattttttgtttgtgtgagcatgggtgatgatgcatgcttgatctttgcctactacaaggacggcgctgctgatctgacattcctgtacttttcatatgccttaaaggaggtcaagtgctgagtgacttaatgtaacccc

SEQ ID NO: 9725 - DNA, 338 bp, Glycine max
  Clone ID: LIB3092-038-Q1-K1-A8
tcgatgacgcgtgggcggacgcgtggggttcggaacaatgttctgggacctcggaagtagacgtacaacaagaggagacctgttgaatgctctaggttcaatgtattctgctgttctcttccttggaatacaaaatgcttcctctgtacagccagtggtagcagttgaaagaactgtcttttatagagaaaaagctgccggaatgtattctgccttaccctatgcatttgcacaggttctggtagagataccatatatcttcgctcaagctgtgacatacggtttaattgtttatgccatgatcggatttgactggactgcagagaaattcttttggt

SEQ ID NO: 9726 - DNA, 183 bp, Glycine max
  unsure at all n locations
  Clone ID: LIB3092-038-Q1-K1-B1
gtaccatgccatagaagaaaagnatactnactactactactactaacactacaaacacttgttgcttcaaatttcattctaaaaattgtactgagaaacagatacatcaatnaaataagccttctcagtgngcantataaaaattaccnttgaaaaaaaaaaaaaaaaaagtccttcccctag

SEQ ID NO: 9727 - DNA, 305 bp, Glycine max
  Clone ID: LIB3092-038-Q1-K1-B10
ccgcatttgggttatctcgtgcactgtatctacttcaacagcagcaaggtgctgatggccatggttcaacaactgacagggaggtgagagttgcgagattgcatcgccaaacggttcgtgtctatggaaatcgtgtcctggattctgctgcacaagttattgagatgtattctagccaaaaagctgtacttgaagtagaatatttcggtgaagctggcactggtctgagtcccacccttgagttttatacaattctaagtcatgatttgcaaaatgttggactgctaatgttgagatcttattct

SEQ ID NO: 9728 - DNA, 184 bp, Glycine max
  Clone ID: LIB3092-038-Q1-K1-B11
ccacagctgaccaatatgatgcactatatgtttttcaacgatcagtcatgaacatcatggcccggtgttcaaccactcggtgccaggcgagcctttgcaatcggcaaagccctaacgctagctcttgtacacaacgaagtctttatcacgcatcgaaatttctctgatgaaaactaacacacac

SEQ ID NO: 9729 - DNA, 429 bp, Glycine max
  unsure at all n locations
  Clone ID: LIB3092-038-Q1-K1-B12
ctcgatcactctcacgcgctcctatattcgctcctccaccgtcgctctctcgaacaaccacggcaccatcttcatcacatggcaaacgcagcatctggtatggcagtccatgatgactgcaagttgaggtttttggagctgaaggcaaaaaggacacaccgtttcatagtttttaagattgaggagcagcagaagcaggtcattgtggagaagcttggtgagcctgcccagggctatgaagatttcactgccagccttcctgctgacgagtgccgttatgcttgttatgattttgagtatctgactgaagggaatgtccctaaaaagcagatttttttcattgcgtggtcccctgacacatcaagggtgangagcangatgatttatgcaagctccanagacagattcaagaaaggagctgatggaatt

SEQ ID NO: 9730 - DNA, 341 bp, Glycine max
  Clone ID: LIB3092-038-Q1-K1-B2
taactaagattttttagaataatcaaaaagaatattaaattcaaataaattttagatagaaaaaagacttaaaaaggaggatttgaaatgcgagatctaaaaacatatctttccgtggcaccagtagtaagtactctatggttcgggtctttggcgggtctcttgatagagatcaatcgtttttttccagattcattgatattccctttttttttcattctagttattgacacggaaaggggtgaagaagattatagatccaattaagtattaaatatatgtaattaatatgtaattaatctcctcttctttatttcgtcttttatttcttctttttttta

SEQ ID NO: 9731 - DNA, 282 bp, Glycine max
  Clone ID: LIB3092-038-Q1-K1-B3
agcaacgaatacaatgggttatcttatggcaggatgggactctctgatcttagatcctgaatcagctagaattgagaggaatcgatcactcagcaaatgagaaattgatgcttactggcgagcaaagaaggagacaaagttagaacacctgagagctatttacaaactatctgagactattcagacccgaaaatgcgaggattcagagaattctcataagtcaagtactgtgactttggccagcataaaggaatccttaggcatggacgttgaccagaaaag

SEQ ID NO: 9732 - DNA, 291 bp, Glycine max
  Clone ID: LIB3092-038-Q1-K1-B5
cataggcaagctccagaatttggagaacttggatataagagacataggggtgtctgagatgccagaggagattcgtaagcttactaagctacgtcagcttctgtattattataagggtttaattcaagggaaagatattggagagatgacatccctacaagagatacctaaagtgattatagatgatgatggagtggtcattggagaggtatgaaagctaaagcagttaagggaactgttggtggtaaaagttaggggagaacacgaaaagactttgagttccgtaataaa

SEQ ID NO: 9733 - DNA, 433 bp, Glycine max
  Clone ID: LIB3092-037-Q1-K1-H11
ggaagctttgttgtatagttacaagtctgcagccagtgggttctcagctaagcttactccggagcaggttgaacagatttcaaagctaccaggtgttcttcaagttgttcctagcaggacatatcagctccatggaccaaataacctgcagtagagaatgttcacctaaagttgtatcggttaaaccgttatctatgccatgtataaactaaactagtgtggctctagacttgtgccaataagaacatggaattaatatataataatacattactaatatttgtgctatatgtttatcaatgtgtcatgtattcaaagtggcaccaatggaccctgtgttgtgcttgtgcatattatcctgtaaaaccattgagaacttgttttgatgctttgagatgtaaatcctagtcaccgaggttgtgaccattaactt

SEQ ID NO: 9734 - DNA, 331 bp, Glycine max
  unsure at all n locations
  Clone ID: LIB3092-037-Q1-K1-F8
actaactaacatcactcaacccagataacctagttcttgacatcacataccaattcgtataaatgtataactacaacaactacctctcctccactaacctccccacacattatatctcccaccatttctacctctccatatccaacacctacataaactacttcttctccccaaaacccttctacaacaacaacacttgcttcatcacaccatacaacatcatcacctgcacctccactagnctctaactctcgcaagacttcatctcaatccaatccaccaactgttttaactcctatactaaacattatcttatcacgcttcttattct

SEQ ID NO: 9735 - DNA, 447 bp, Glycine max
  Clone ID: LIB3092-037-Q1-K1-F9
cttcaacatttttagcttcttctctttctcaaatccccctatcttcaaaatttcaaggttatcactctaaagacagattgttttcttaaatgactgtggctatggctgtttggagtgctggtcttcacttcagtgctgctacgaagcctcatagtagcttgaggcctttggagaaaatcatttgcactgcccctttcttcaaggcctcatctgggtttgctgctactaagccattctgcatccttaacacaacaagattgtcatattctggaactacaattatccctcgagcagcacctgttactgatgtggaggacgggaatcatggtgagactgataccattccaactcccgtagttataattgaccaagactctgatcctgatgctaccgaggtggagataactttaggtgatcggcttggaacacttcttgacacaatgaatg

SEQ ID NO: 9736 - DNA, 229 bp, Glycine max
  Clone ID: LIB3092-037-Q1-K1-G1
ccaaaacaatcaaatccatttattccacacccttctacatccctcttggttttgcgctatcaaccttcctacattttcccataaactctcacactatccattcccataccattcagtcatctcttctttcattataccattatgcatctatcctacctatcctatactcttattcagctccttaatgatacattcatactttatccatacttacctttcacttctaacc

SEQ ID NO: 9737 - DNA, 338 bp, Glycine max
  Clone ID: LIB3092-037-Q1-K1-G10
attcacctgagctttttgtgaggattccaaagcatggcttcccttgcagcatccactgctgctgcttaccttggcatgtcagaaatgcttggaaaccccatcaacctcagtggtgccacaaggccagctccatctgcctctagccctgcctccttcaagactgtggctcttttctccaaaaagaaggctgcacctccaaaaaaagctgcagctgctgctcctgccaatgattagcttgccaagtggtatagtcctgacagaatgatcttcttgcctgaaggtctcttggaccgatctgagatcccatagtacttgaccggagaagttcccggagacta

SEQ ID NO: 9738 - DNA, 460 bp, Glycine max
  Clone ID: LIB3092-037-Q1-K1-G11
cccacgcgtccggtcttaaaagacaactcggggaccagtgaagttaaaatcatttgtcttgatttccccatatctgacaaacaagaaacaatagaatggaatggaaatgccttcaaggagatgaaaaaccttaaagcacttattatcagaaacggtattttatcccaaggtcccaattatctaccagaaagtttgagaatattggaatggcacagacatccttcccattgtttaccgtctgattttgatacaacgaatcttgccatacgcgacttggaatagttccatcccgtcattggggtgtggtggcatatccaagaagttgatgtatctaactatctaagggttttggatagctgatgcatctggtctctcaaatttgaaggaattttcatttgaatattgtgagaatttaattatagttcagagtcaattggttttcttgataaactttaaatat

SEQ ID NO: 9739 - DNA, 440 bp, Glycine max
  Clone ID: LIB3092-037-Q1-K1-G12
cccacgcgtccggcgacggggtattgtaagtggcagagtggccttgctgccacgatgcactgagattcagcccttgtcgctttgattcgtctgcatcgatcttgaagtctgcaaccgccggacaccgtcgatctacaaccgtcggacgtcgacgtcgttgcggctctgtgttcgagcattcaatttcattgctttcacatattggctatcaaggatactcagataaactttcttgctaacttttatgcaggaagttcaaaaggacatgatttccatcaatacagcctccatattgggttgaaaattgagcaaattctgtttgagtgtacaaaacccagccttgttgggtttcaagcattaatacagcatctacattccttttatttcttctatcactcccaaattctggcattggaaaagagaaacttagctttaaagaa

SEQ ID NO: 9740 - DNA, 335 bp, Glycine max
  Clone ID: LIB3092-037-Q1-K1-G2
acgcacacgcgtgcgatccatagacatggccaccgtcacttctgcagccgttgctattccctcatgtactgggctcaaggcaagcgcatgcaaagtgagtgccgcagttaaagtctcagctccccaagccacaaggttgggcatcaaagctttgctgaaagacgttggagtcgctgttgtggccactgtcgcgagtgcagtgctggctagcaacgccatggccattgaagagttgctgggtggagatgaccgttctctggctttcgatcccaacaatttctccgtggcctctggggagaagatcgtgttcaagaacaacgcaggtttcccccaca

SEQ ID NO: 9741 - DNA, 442 bp, Glycine max
  Clone ID: LIB3092-037-Q1-K1-G3
acggcctattgagatgtggcaaaagatggtggaggaattgtcacaaggtcattctatacttgatggtaatattgaattacttgcatgcttccaaaagctcttgcatgttttggaagataatcccaacaacaaggagtgcttcatggacttggggttatttcctgaagaccaaagaattcctcttcctgttcttattgatatatgggcagtgttatatggatttgatgatgacggcatagaagcaatggacatcataaataaattagactccatgaatctggttaatgtcttagtagcaaggaaaaattcaagtgactcagacaattactactacaataaccactacgtcatgctccatgatcttctaagagagcttgcgatctatcaaaacaacctggaaccaattggaaagagaaaaagactgattaatgacataaatgaa

SEQ ID NO: 9742 - DNA, 300 bp, Glycine max
  Clone ID: LIB3092-037-Q1-K1-G4
cgaccgactcgtccgatctaacttatatcaaatcacatttctggttgttcgtcatggctccattaactgcggcgaggcctattctgtcactgtcgttattgcttttgctaccgtcttttcttccgatcgccgtcgcttacagacccggctacatcgttcccatgagccgcatgggtcaataccactcctcgctaaccgtgtgtcatgacctcattggccgtcactgacctatattcgcattgaatcgctatgtgttgatgcccatacccaagctcacgggttacactggtgcggatgctt

SEQ ID NO: 9743 - DNA, 438 bp, Glycine max
  Clone ID: LIB3092-037-Q1-K1-G5
ggccaaatcaatcaaattctttgagttgaacacaggggccaagattccttctcttgggttagggacttggcaagctgaacctggtgttgtagctgaagctctcaccacagccattcaggttggatacaggcatattgactgtgctagtgcgtataagaatcaagcagagattggttctgctcttaagaagctttttgatgatggtgtggtgaagcgtgaggacttatggatcacttccaaactctggtgttcagatcatgcaccagaagatgtgccaaaagcattggataaaacattacaggaattgcaacttgactatcttgacctctatctgatccactggccagtccgcatgaaaagtggaacatttggactcaataaagaatatcttgagcaaccagacattcccaatacatggagagcaatggaggcactcta

SEQ ID NO: 9744 - DNA, 298 bp, Glycine max
  Clone ID: LIB3092-037-Q1-K1-G6
agcttatctttatcaaagcagattcctggtcgtccctttagacacaatgaatgtgaaagatggataccagcagcctatccctattatggagcatcattttcaatgatggtgggtttcttcatcttcactgcagttcatctatacagcaagtagatgtaaacctttgctttaagatactgtagtttgtagtgcggggttgaacttattttgagatcgaaaattttgatttggcaatgatactaactgacgtttctaatttattatatatgcattactttttccctttttccccctcgtt

SEQ ID NO: 9745 - DNA, 278 bp, Glycine max
  unsure at all n locations
  Clone ID: LIB3092-037-Q1-K1-G7
acgagcttatctaaacaaaatcagattcctgaacacaccttccaacacaccgaatcgggaatatggataccagcagcctatacctattatggaacatcattctcaaacatcatccatttattcatcatccctgcatatcatctatacaacaactatatataaaccttcactttaagatactgcacttaataatccatcgtataacttatttttatatcnagaatactgattagttacttatactcactgacgttcaatacataatatatatgcattac

SEQ ID NO: 9746 - DNA, 331 bp, Glycine max
  unsure at all n locations
  Clone ID: LIB3092-037-Q1-K1-G8
ctgaagctgagttggagtcacagttgttgttggtagccatggatgcagtagctgcggcgaagccgcttctgtcactgtcgtttttgcttttgctaccgtcttttcttccgatcgccgtcgcttacagacccggcgacatcgttcccatgagccgcatgggtcaataccactcctcgcgaaccgtgtggcatgacctcattggccgtcacttgcccatcttcgcagtgaatcgcgatgtgtngatgcccatacccaagcccacgggttatactggtgctgatgcttataaaatatcgttcaagttggcaggtaaaagttttaatcccgtggc

SEQ ID NO: 9747 - DNA, 464 bp, Glycine max
  unsure at all n locations
  Clone ID: LIB3092-037-Q1-K1-G9
ctattatattctctcactctcttactctttcactctacttctctctcctattgcgggtggggtttaggtttttctttcaccgtctccgttccttcaatcttcttattctctttcatctctgatggagacgttgcgggtttagttctaaggggtggttctggccttgggtttttggaacgtacggtgtcgttttggggttgggaaaacaaattctgagagatggcaaccacgaacccttttgatttgttgggtgacgacgctgaggacccttctcagctcatcgccgccgagcaactcaaggcggcggctgcggcctcggcggccaccgcggctcccaagaaggcgcctgctcagcagaacaagccggctcagctccctaccaagccgncttctncggctcaggctgtgagggatgccagaaacgagccagttcgtggaagccgtggaagtggacgaggtggggg

SEQ ID NO: 9748 - DNA, 476 bp, Glycine max
  unsure at all n locations
  Clone ID: LIB3092-037-Q1-K1-H1
aagagtttgtggaatctagtgagagagagcagaggaaaaggggaagaaaaatgttgagtgcgacggcgatcggcgcgttattgggtttgggaacccagatgtactccaatgctctccgcaaactcccctacatgcgccatccgtgggagcacgtggtcggaatggggttgggcgcggtgtttgtgaaccagcttctgaaatgggaggcccaagtggagcaagacctcgacaagatgctcgaaaaggccaaggccgccaacgaaagacgttatatagatggagatgatgattaatgcatgtcttcatggattgtggcagttggtgaaaataatcatgaaatatgttgaacttgttggctttgttttctgatttgatgatgttatgtttgtaaggctgttaaaactntgtcgtgctaatcagcctattttttgcacaagtttttgcaagcagtgaaatttgtgtagatgataatgttc

SEQ ID NO: 9749 - DNA, 370 bp, Glycine max
  Clone ID: LIB3092-037-Q1-K1-H10
ggaagatcacaaaggtggttcttacaccagctaagtctggacaggaaaagaacagagttggctttgtacattttgcagagaggtcaaatgctatgaaagcactgaaaaacactgaaagatatgaattagaaggtcaacttttacaatgctctctggcaaagccacaggctgatcaaaagtctggaggatcaaacacacagaagccaggaccaggattgcttccaagctatccaccacatgttggttatggtttggttggaggtgcctatggtggacttggtgcacgatatgctgctccaggtcttgcacagcccatgctatatggaggaagtcaaaactcctcatgaatggccatcatgcctatgctttt

SEQ ID NO: 9750 - DNA, 452 bp, Glycine max
  Clone ID: LIB3092-037-Q1-K1-F7
aaagaacaccactcgtcccagaaaacctagtacttgacatcggtggccaattcgtgtgggtggattgcgacaacaactacgtctcctccacttaccgccccgcacggtgtggctccgcccagtgctccctcgccagatccgacagctgcggaaactgcttctccgccccaaaacccggctgcaacaacaacacgtgcggcgtcacgccagacaacaccgtcaccggcaccgtcaccagcggcgagctcgcgcaagacgtcgtctccctccaatccaccaacggtttcaaccctatacagaacgccaccgtttcgcgcttcttattctcctgctctccaaccttcttactccaaggcctcgccaccggtgtcagcggcatggccgtgctcggcagaactagaattggtctgccctcgcagctcgcttacgctttcagctttcggagaaaattc

SEQ ID NO: 9751 - DNA, 452 bp, Glycine max
  Clone ID: LIB3092-037-Q1-K1-D11
cggacgcgtgggcggacgcgtgggcggacgcgtgggctcccctcacctctctctccgaaatccccaaattgcctgtgaatgctagaaaccctaggcacgttcgatttgatgctctcccatttgcaatcaagggcgagcgcattcggttcttgcacgcaaggctggtactaccgctgcatcggcctcgatccctgaattcatcattctttctcgcaccatctttttctattccgattcgatttgttgttgttgttgttgttgatgtgtttttgtttccttccttgacgaatcatcacgatgttgatgagcaagcagaagaagagccagatccagaacgcgaagaggttgttgataagcatcaatgtgctggggagcgcggggcccattagatttgtggtaaacgaagaggagcttgtggcggcggtgatagaccaccgcctcaagtcctacgc

SEQ ID NO: 9752 - DNA, 467 bp, Glycine max
  Clone ID: LIB3092-037-Q1-K1-D12
gccaataataaagattaaaacttaaaagttaaaaatgattgtcctaagttgaaagtcgaaacacagtctatgacttgcaactaaaagacaaaagttgctaaagtaaaaacaaaaatacaatacattgtcgtttagggttaggccggttagggctgtgattctgatcatctcttttctctgaacagctagatgcaagtgcagccatgagtggaacagaagttaggatagcagtgcagcgtgacttgcccactccgcttaagccaggcataatggccctttgaggagcagcagggtgccgcaactccttaggcctaacagatcctacgcaataatcgtgtaatttttcactagattacaattcaggtctgattcatgcaattcaagcgccgaaacgattagctcactgattcatatcacaagctgctcaaaccgtatcatatcacagatcgtgcaatactgataactac

SEQ ID NO: 9753 - DNA, 376 bp, Glycine max
  unsure at all n locations
  Clone ID: LIB3092-037-Q1-K1-D2
cggacgcgtgggctgctacaaaagtctcccttccaatgatcatctgaaattacataggatttgtanggtcatcaagaactcttcagcatcacaaaagggtattggtcttttcttctctgtcttcctttaccaaccccaaacatttcttttgtgttaaatttactgattctactcagcaatcagcaatcagcaatcagcaatcagcaatcagcatcattactttttcttgtagccatgtcaatttgttttctgtttcaaaaaccaatatgtctttctctntttctagtttttttcttatattcctgaagtaggtaatttgcagttttggtctattttcccaaggatttataatcaaaaaggcagggacagacacaca

SEQ ID NO: 9754 - DNA, 260 bp, Glycine max
  unsure at all n locations
  Clone ID: LIB3092-037-Q1-K1-D3
gtctcccttttaatgatcatctgaaattacatatgattggtanaatcgtcaagaactcttcaccatcacaaaacggtattgttcttttcttctctgtcttcctttaccaaccccaaacatttcttttgtgttaaatttactgattctactcatcaatcagcaatcagcaatcagcaatcagcaatcagcatcattactattcctatgagccatattaatttgttttctgtttcaaaaaccattttatttntctctttttc

SEQ ID NO: 9755 - DNA, 329 bp, Glycine max
  Clone ID: LIB3092-037-Q1-K1-D4
cccacgcgtccgccgcctttggcattgcaagcgctctctttctttgcttttccgtccccctgtcaatttcttcaacgctgcaactatccatggcaaaccgctggctcagacccgaggtgtatccactgttcgctgcggttggtgccgctgttgggatctgtggattccaattggttcgtaatatctgcatcaaccctgaagtcagggtgaacaatgtcggaagaaaggcatgagtgttgtagaactttgctgaggtaatagaatttgctgagcatttcctgagtaattatatgctcaacataactattgagattatgccctccatcaac

SEQ ID NO: 9756 - DNA, 330 bp, Glycine max
  Clone ID: LIB3092-037-Q1-K1-D8
cccacgcgtccgccgcctttcgcattgcaagcgctctctttctttgcttttcctgccccctgtcagtttcttcaacgctgcaactatccatggcaaaccgctggctcagacccgaggtgtatccactgttcgctgcggttggtgccgctgttgggatctgtggattccaattggttcgtaatatctgcatcaaccctgaagtcagggtgaacaatgatggaataaaggcaggaatgttggataactttgctgagggagatgaagttgctgagcatttcctgaggaattatgttctcaacttggctccttagattatgccctccatcaaca

SEQ ID NO: 9757 - DNA, 462 bp, Glycine max
  Clone ID: LIB3092-037-Q1-K1-D9
cccacgcgtccggttgagtcattctcacaaagacaatctgcagttatatatgcaactgcaattactataaatgatctctcgaacagtagaaaaaaaatcagccagagggctgtagtaaagaagaaaggagtttggtggaagcaattttggttgctccttaaaagagcatggatgcaggcttcccgtgatgcaccaacaaacaaagttcgggcaaggatgtcaattgcatcggcaattatctttgggtcagtattttggagaatgggaaattctcagacttcaatacaagacagaatgggattacttcaggttactgcaataaacacagctatggctgctctcacaaagactgttggtgtgtttccaaaggaacgggcaattgtagatagagaacgtgctaaaggctcctattccttgggcccctatctgttctcaaaattgttggctgagattcccattgga

SEQ ID NO: 9758 - DNA, 391 bp, Glycine max
  Clone ID: LIB3092-037-Q1-K1-E1
cgagcataaaggactcgtgtgttatctcagaagtactgcgatgcatccatgttagtctcttgggtgtgcgacaatacccggaggataggccaaccatgacttcagtaattcaaatgttagggagtgagatggatatggttgagccaaaagaacctggtttctttccaaggagaattttgaaagaaggaaatctatgcacaaatctaaaccaagtgacttcaatcgatgaattatccattacgtcattaagtggtcgatgaaaatgcagtatatgattatgtttggcaagtcgcttagattgtctatgatctgtttttactagttttaaagtaatgttttattaaatactaacttctaattgttatgtgcttatattttattacactaaatt

SEQ ID NO: 9759 - DNA, 129 bp, Glycine max
  Clone ID: LIB3092-037-Q1-K1-E10
tgtctctttaaatttttgtgatactcatatagtatatatgtatctaaatcaaatcttgtattctttaaacatgaaaaactgaacagcttgtaattgtttgacagtttcatctaatgccttcacagtttt

SEQ ID NO: 9760 - DNA, 130 bp, Glycine max
  Clone ID: LIB3092-037-Q1-K1-E11
agatctctctaaatgcccatgatcctcatatactctctccgtatctaaatcaaatctggtatggtttaaacatgaggaactgaacagcttgtaatcgtttgacagtttcatctaatgccttcacattttt

SEQ ID NO: 9761 - DNA, 449 bp, Glycine max
  Clone ID: LIB3092-037-Q1-K1-E12
ggcgcttccttgttctttcaatcggtgtggtactagttttacttgtcactcggcttgccaacaaggaggctctagactgcaacctttactctggatggtgcacctcaaagaaccgcttctactcttcagcacatcctaataacccgattaagaaaccatcatcattttccacatatcatcacaaccaacaccatgatgaatctgagattcctgaacaccctcttgaccctctaaccatccaagagttcaacaaggtccgcaccatcctatccaaccaccccctcttcaagtcctcatccacctacactctcaactcagttgtccttgaagagccagacaaaaagctagtcctcaaatggaaaaagggtgatccacccttgcctaggaaggcttccgtggttgcatatgtgaaaggagactctcatgtgctcactgtggacctcgaaacc

SEQ ID NO: 9762 - DNA, 166 bp, Glycine max
  Clone ID: LIB3092-037-Q1-K1-E3
acgcccacgcgtccgcttcttctatgggttggcttagtctgttcataacttccgtggctttctggtccatcttagttatattctcaccctatacactggggtcaaaatcaaccacactttccacctacctcaaactctctcacctcctctacttcttcaccatctt

SEQ ID NO: 9763 - DNA, 382 bp, Glycine max
  Clone ID: LIB3092-037-Q1-K1-E4
gattaatatgatgtcatgtgtgtctctccaatcttttatccaaattaagtactaaacaagtgctgtattgattagtttctagttctgatctccatgatacatgattcttgctttaaattttatgtctgcatgtaatgttatgttatgtttgaattaaagtatgtattttgctttattatttaattgaattattgtgctatgtttgtgaaataaagcactgaatttacatttagtgaagtaaaaaaggggggtgaattcagaatggaagccctaattggagaagagtggtggataacaagaagattttactgagtaggctgggctgacaagttcaaatattggattaggtatgcattacccaattctacttcatattcctact

SEQ ID NO: 9764 - DNA, 430 bp, Glycine max
  Clone ID: LIB3092-037-Q1-K1-E5
cccacgcgtccgcttcttctatgggttggcttagtcggttcataactgccgtgggtttctgagccatcggagtgatattctcaccggagacactggggtcaaaatcaaccacactttccacctacctcaaactcgctcacctcctctgcttctccaccgccttcggcgccgctctgtgggtaacattcatcggcggcatcatcatgtttaaaaatctgccgcggcatcagtttgggaacctgcaaagcaagatgtttccggcgtatttctcgatggtgggtgtctgctgcgccgtattggtggcttcctttggctaccttcacccgtggaaaacttgctgcccactgagagataccaacttgggtttttgctctcttcctttgggttcaatcttaccaacttggttgtctttacacccatgaccattgag

SEQ ID NO: 9765 - DNA, 184 bp, Glycine max
  Clone ID: LIB3092-037-Q1-K1-E8
ttctagttctgatctccattatacatgattcttgctttaaattttatgtctgcctgtaatgttatgttatgtttgaattaaagtatgtatttttcttcattatttaaatgaattattattctatttttgtgaaataaagcacttaatatacatctagtgaagtataaaatgtgggtgaattcat

SEQ ID NO: 9766 - DNA, 418 bp, Glycine max
  Clone ID: LIB3092-037-Q1-K1-E9
gaaaaagaaaaaagcgatcatagttccacttctgccttatccagcttagggtttcggggctgtaccctatctttgacgtatcgaaaccttaaatttacgatcaggtctgagcaatctgcttggtagaacctttggtcttagtgagtcaagttttatgtctgaattagacgatcaaattcctactgccttcgatccttttgctgatgcaaatgctgatgactcgggtgctgtgtcaaaggagtatgtgcatattcgtgtacagcatccaaatggtaggaaaagcctgacaaccgttcatggattgaaaaaggaattcagctataacaagatacttatcgacgtcaataaagagtactgtcgcaatggaacagttgctcaggacccataactacgacaggttattcaacttcacgtgatc

SEQ ID NO: 9767 - DNA, 193 bp, Glycine max
  Clone ID: LIB3092-037-Q1-K1-F1
cgtacgggttatcaagattaattgccaaccataatgcttttttggtcaacacttatccactccatctgaactctggtgttcttaaaaacttacccgttcgtgtactgatacttccccttttcataaacttcttgcttgtctcttacctagtctcccttaacgaaaagctctacaccaacgtcaactatttctt

SEQ ID NO: 9768 - DNA, 124 bp, Glycine max
  Clone ID: LIB3092-037-Q1-K1-F10
ctcatgcatacttagctgcaaatcaactccttttcttgctatgaacctactaccacgggattgtctctaaaaccagaatccttctctatatgaacgtcattaaagctctcatcactcacatatc

SEQ ID NO: 9769 - DNA, 173 bp, Glycine max
  Clone ID: LIB3092-037-Q1-K1-F12
cggccgacccacactccgcttaaccattacaaaacacttctgcactcttttactaccacgcccacatatcaacgcttgattctacacatagtgttctcacatatctacctcaatacctcaatgctcacctatccttcatccaccaacacattcatcacatcaaccctctctaa

SEQ ID NO: 9770 - DNA, 148 bp, Glycine max
  Clone ID: LIB3092-037-Q1-K1-D10
cccactcgtccggaatcctaattcactgttttacattatcgaccttcatcatcaattgtaaggtttttaatcaagttctatcaatatacaaaacatattatcctttaaacacaaatacagtacattacctattattgctaaacccatt

SEQ ID NO: 9771 - DNA, 144 bp, Glycine max
  Clone ID: LIB3092-037-Q1-K1-F2
accacacatcctaattcaacgattttagggttttaaaatataccaacaaaccggcttatttggaaaatttgtaaatcggttcttacttcttcaatcttctatattaatacagtaagtatacatattatatatagatcaattatc

SEQ ID NO: 9772 - DNA, 194 bp, Glycine max
  Clone ID: LIB3092-037-Q1-K1-F4
ctacggattcgtaaaatcatgcctcctaaagtacggacattatatattcatgcttgaatgatcataacgggactatagtggtgcacaatgtgtatgcactacaaatgtacaattgatataataatttgaggccttttagcttttctgtaaaggatggctattctgttaatatatttatctgacgtatactgatt

SEQ ID NO: 9773 - DNA, 408 bp, Glycine max
  Clone ID: LIB3092-037-Q1-K1-A9
acgcgtacgccagaatcaagatatgaagaacagagtaattttgcatcgtcgagacacatggagatggacggcaccgcactacgtgaggtcagctacatatccggctatgggacccacacgcggtccagcagactggctcctcgatttggggtgaggatcgggatggattctggatactgtgaccaggggcattagcagaattaccaggacaccaaaaaggttatcaccccaaagaagatgttgaagctggtcaagggttgctgcaaattagggctaagcatcggatcccgagaaactcgccatgttctatgatcttcaacaagacctgacctaggatgctggagatgtactactgagacagttagaagcaccaagagcaaaggataatgaagtgaagaataaaaggaa

SEQ ID NO: 9774 - DNA, 431 bp, Glycine max
  Clone ID: LIB3092-037-Q1-K1-B1
accggtccggacgacccgggcctacgctcttgcggctagggttttagcgcagcttcttctagatttaaggaagatgggtaaggaaaaggttcacatcagtattgtggtcattggccatgtcgactctgggaaatccactaccactggtcacctgatttacaagcttggaggcattgacaagcgtgttattgagaggtttgagaaggaagctgctgagatgaacaagaggtctttcaagtatgcctgggtgctggacaaacttaaggctgagcgtgaaagaggaatcaccattgatattgctttgtggaagtttgaaacaacaaagtattattgcacagttattgatgcgcctggacatacggatatcattaagaatatgattactgggacatcccaagctgactgtgctgatcttatcattgattcgacca

SEQ ID NO: 9775 - DNA, 380 bp, Glycine max
  Clone ID: LIB3092-037-Q1-K1-B10
ctggaagccttatgggaaattttaatgcggcgaagggaaattccggcatgtttaagggttctgcctccgtcgccggcggcgcagagaagccttcgacggcgcctgagatcgtggtggaacctatcaaagacatctcgggtaccatcacattggcagggtctaagtgtctggccaatcgaattttgcttcatgctgctctctctgagggaacaactgatatagacaacttgctggacagcgaggatattcattacatgcttggtgcattaaggacccttggactgcatgatgaagacgatcaaacttccaaaccagccattgttgaaagccgtgggggattggttcccactatttaagaaatttaagattgaatcgaatta

SEQ ID NO: 9776 - DNA, 456 bp, Glycine max
  Clone ID: LIB3092-037-Q1-K1-B11
ctggaagccttatgggaacttttaatgcggctaaggcaaattccggcatgtttaagggtcgggcctccgtcgccgccggcgcagagaacccttctacggcgcctgagatcgtgttggaacctatcaaagacatctcgggtaccatcacattgccagggtctaagtctctgtccaatcgaattttgcttctatgctgctctctctgagggaacaactgatatagacaacttgctggacagcgaggatattcattacatgcttggtgcattaaggacccttggactgcatgaggaagacgatcaaactgccaaacaagcaattgtggaaggctgtgggggattgtatcccactattcaagaatctaacgatgaaatcaatttattacttgtaaatgctgttactgcgatgcgtcctttgacagcatctgaagatgctgcaagtggaaatgcatgctac

SEQ ID NO: 9777 - DNA, 460 bp, Glycine max
  unsure at all n locations
  Clone ID: LIB3092-037-Q1-K1-B12
ccaagattgacaggcgatctggtaaggagcttgagaaggagcccaaatttttgaagaatggtgatgcaggtatggttaagatgattccaaccaagcccatggtggttgaaactttctctgagtatcctccccttggtcgttttgctgtgagggacatgcgtcaaactgtggctgtcggagtcatcaagagtgttgagaagaaagaccccaccggagccaaggtcaccaaggccgctgccaagaagaagtgattgcatttgggcaattttgctagcacatgtgatcatcatcgtggttactcctttatagtagttttatccttgcagagtcttaggtgttttgtttaagttatatttttaagtttctgccgatctcatgtagccgtaactttcaaaactaggttcttgatcggcggtggtcaattctcattgctgntatgttttgatgagtactgcttttt

SEQ ID NO: 9778 - DNA, 284 bp, Glycine max
  Clone ID: LIB3092-037-Q1-K1-B2
cccacgcgtccgcccacgcgtccgtccaattccactcccaccgaccaaaacgcgcaacacggggtaattaaaacgacaccgaaactaatgggcgtcttcagcgaaaacccgaatccggacccggttgtgatccgccaggtttgggcttcaaatctcgaatccgaattccaactcatccgcgaactcatcgaccactatccttttatctcgatggacacagaattacccggtgttgttttccgaccacacctggaccccacaaaaccctacaatcaccggaacaa

SEQ ID NO: 9779 - DNA, 292 bp, Glycine max
  Clone ID: LIB3092-037-Q1-K1-B3
tccgacggacacgcgtccatccacgcatccgaccaattctactcgcattgaccaaaacgcgcaacacgtggtaattgggactacaccgaaactaatgggcgtcttcagcgaaaacccgaatccttaccctgttgtgatcctccaggtttgggcttcaaatctcgaatccgaattccaactcatccgcgaactcattgactcttatccttttatctcgatggacacttaatatcccctgcgttgtttttcgaccacatctggaccccacaaatttttatatccacctcaacaa

SEQ ID NO: 9780 - DNA, 208 bp, Glycine max
  Clone ID: LIB3092-037-Q1-K1-B4
acacatatctcgtatctcaatttgagttttttgtttaagatagagagagaatcactggtacatttgataaaatttgcaactaagaaatctttaaacaattagttttcagtttcttcataacaacgctttctctttcacttatccttttcaccatcaatatcatacccattcatcgctctattttacctcattaccacatactctcttt

SEQ ID NO: 9781 - DNA, 470 bp, Glycine max
  Clone ID: LIB3092-037-Q1-K1-B5
catatctcgtatctcaatttcagtgtgttttttaagagagagagagaatcacgtttacatggctctgaatttgcaactaaaaaatgttgaaacaattggttttcagtttcttcataacaacgctttctctttcacttatccttttcaccatcaatatcatacccatgcctcgctctcttttccctcaccaccacaaactcgctttcgccctccgacaaccgtcttctccgccctgacggcggagcagatcgccgtgccgccggtgaggatggtggctgtggttggcaacggagctgccagccctctcaagtccgcatcttgggaacaagtcatgcttcacactgcaaagagattgaaatgggttgatgaaaggtatgaacttcttgtatttacagatgaatgtattatatctaatggaccgatgaccatgaaactgcagagagaattactgaatgctgatatattggtta

SEQ ID NO: 9782 - DNA, 145 bp, Glycine max
  Clone ID: LIB3092-037-Q1-K1-B6
aaacctttaaacaatataccctcatttttatcataacaacactttctctttcacttatccttttcaccatcaatatcatacccatacttcactctcttttcactcactaccacaaactctctttcaccctataacaaccgtattc

SEQ ID NO: 9783 - DNA, 447 bp, Glycine max
  Clone ID: LIB3092-037-Q1-K1-B9
cccacgcgtccgcccacgcgtccgcacggactcgagctgttcggagcaggtggtatcgccggaattcgcgagcgaggtgcaaagcgagcccaagtggaacgagtgggagaaaagcctcgaatttccatttaattacgtggatgccactctcaacaacagcttcatggcccaattccagggcaataatcagatgttgtcgccgctgcaggacatgttcatgtactggcccaacaagtccttttgagcacatcatgatggttttaaattacgatccgcaattgctcttaagattttctgactcaccatgcgaccacaatcgtaatttaaaaccatgtcacataaaatccacgcgcgccgcccattcgcatttgcacggtagcacgagactcaaggtccatgagtgtgcctgtgcgaccacacacatacgattattgatcaagttagctt

SEQ ID NO: 9784 - DNA, 462 bp, Glycine max
  Clone ID: LIB3092-037-Q1-K1-C11
cccacgcgtccggtgaaatcaggcactggagagcaaagagcttgtggtgtgagaagtggccaaaaagctgtccataaaggctcttctgtaggagaagaagtacaaatcactccaaagtccttgaaacacactattcaatctgcactttctgagaaatcagattctcggaagaaaaccaagtcggagaaggacaacagagcttccatgcataacttaactgtaccaccaccagcaaaagtaagctgggttctgtctggttccggggggttctggagccctttccttgatgattccattgtaccagaacctgaaaagatgaaatggtccaaagcatttgtactatcaatccatgatgatggagatattaatggacttaatagctgagctttgcagggttcacaatggagatgactggaaatcttggttctatcacagggttgcacctcgaaacaacttgggaaa

SEQ ID NO: 9785 - DNA, 465 bp, Glycine max
  Clone ID: LIB3092-037-Q1-K1-C12
cttcaaaccccaaactctcattcttcaacggaaagcccgtcacatattcttcccgcgtcgcgcccaccaccaaattatcctcatccaaacaaggcacaatttccatgtccctaaccccacccccctacgacctccagtccttcaaattccagcccatcaaagaatccatcgtgtcacgggaaatgacgcgccgctacatgaccgacatgataacctacgccgacaccgacgtcgtaatcgtcggagccggttcggccgggctctcctgcgcgtacgagctcagcaagaaccccgccgtgagcgtggccatagtcgagcagtcagtgagccccggcggcggcgcgtggctcggcgggcagctcttctccgcgatggtggtccgcaagccggcgcacctcttcctcgacgagctcggcgtggcgtacgacgagcaagaggactacgttgtcataaagcacgcggctt

SEQ ID NO: 9786 - DNA, 388 bp, Glycine max
  Clone ID: LIB3092-037-Q1-K1-C4
attctctctgtgtatttccctacctctcccttcaagatgcagatcttcgtcaagaccctcacgggcaagagcatcacccttgaggtggaaagctctgacaccatcgacaacgtcaaggccaagatccaggacaaggaaggaatccccccggaccagcaacgtctcattttcgccggaaagcaacttgaggacggccgtacccttgctgactacaacattcagaatgagagtactcttcacctcgtcctccgtctccgtggtggcatgcagatcttcgttaagacactcaccggcaagaccataaccctggaagtgaaagcttcgacaccatcgataacgtcaaggccaagatccaggacaaggagggtatccccccggaccagcaacg

SEQ ID NO: 9787 - DNA, 244 bp, Glycine max
  Clone ID: LIB3092-037-Q1-K1-C8
gtgggtcttgcgaactgttggaatcccaagttcattaatggctttaatcctgaggtcttaggctattatgattatgatttgccacacacgcagaagggcataaaatattgacgacttgatctactactggtggagaatgatggataacaacacagctgcttacacttagagagcaactaatgatatgatcattgctgcacactggatcatgaacatatgactttgtgatatcactaatattgac

SEQ ID NO: 9788 - DNA, 314 bp, Glycine max
  Clone ID: LIB3092-037-Q1-K1-C9
gccaaacatacggcctcacattcttttacctataatatgaccacacttcacaaaccgcaagggctgctacacacaccatgcgtaactcatctctacctgataacatatgttctgaaatacaatttcttccatgtatcatacccttatatatgctcctctcagctcttcctattacctcttacttatggatctttaccatctcaatctaccaattccatcacaattctcaatacttctttcatacccgattactccttcctctaatagatttccccaatagctaacaactagatctccaatttactaatcttata

SEQ ID NO: 9789 - DNA, 398 bp, Glycine max
  Clone ID: LIB3092-037-Q1-K1-D1
gtttccaactttacattttcccaccaaccctcctctccattcctcaaaacaatcgttaatgtcttctccattgtgaactctgatattctccaagtacacaacacaaacacacatcaatttatagcacccgatttctcttttccccctcaaattcagctccattttgttacagattcaaataataagccaagcagccacaccatgatctcgtcaatgaaatgcacagcctcatctctcacaatgttctgctttctcaaacagaaagcttcccattgcaaggcctcaactcgtgacattaccaaccattaacaacgttgaacaaaacatgggtccctctcaagtgtgttcacagaagcctctctacctttcatccaccgagaacttggcattggtgagga

SEQ ID NO: 9790 - DNA, 465 bp, Glycine max
  Clone ID: LIB3092-037-Q1-K1-A7
cccacgcgtccgcttcaggccattccaggtaagcacaaccaaagcaacacccgaaatggctgcagcttctgttcccatggcgttgtcactgagctctgttaccaacaacaacaagccttcatccgaagccttcttcaggccactacccctacgccaaccaaagaggaccctcttcaccacgaaggcagtgtcaaactccaagcctcaaatcaatgcatctttgaaggagaaggcagttgccggactcacagcagcttctgtgacagcatctatggtggttccggaggtggctcatgctgctggatatgagttctccccttccctaaagaacttgctactcagcatctttgctggtggggttgttctagcagtcatatttggagccgttattgaggtttccaactttgatccggttaagagaacttaaaacatgcatgctccaatgcttatcattttctctctctc

SEQ ID NO: 9791 - DNA, 459 bp, Glycine max
  unsure at all n locations
  Clone ID: LIB3092-036-Q1-K1-H10
cccacgcgtncgcccacgcgtccggcgtctntgccagcttgcgcactgtcttccctctatggacagctattctggccatcctactctatcccttctctttggcattggtgtacgttctttgattatgtatttggttggtcgtagaccaaaaaatgattcagatattcgtgctgtatggctcttacccttgttggggtgtatggtttttgtttgtagtctttgtgtgagactatgttgttggtgacttaaatttatggtggaattgacatcgattgagaacgtttcangggttacagttttgagtcttttgactattccgctcattgtgagcagcaccgattaaaactatgttgcgaagctggtgattacaccaccgnatgtgattgttttctcatcattcaaaaatcagaaacatgttattccattttataagtcccttacaatgattgttatcgcact

SEQ ID NO: 9792 - DNA, 320 bp, Glycine max
  unsure at all n locations
  Clone ID: LIB3092-036-Q1-K1-H11
acggtttgtttggtttaaagagaagaaaacgttggtcggagaacattaccggaaagagaatctgtgttgattccagaaatgtctagcatcgcttcctcacaccaaagcttcctcaccaacgcccttattccactaacgcacaacccaaagttcaggaccactgttactttcccttcttcactcaaaactgtctcttgcagttccccacaacatgaacagcaacaatctccaaggaagaagaatgagaacaagttagcaaagttggcaatagttgcacttgctgctggtgtgttaacacttgngtcagttcatgatgcatc

SEQ ID NO: 9793 - DNA, 360 bp, Glycine max
  unsure at all n locations
  Clone ID: LIB3092-036-Q1-K1-H2
tgagaggtccacaaaccttgactggtacaagggtccaactctgcttgatgcacttgaccagattagtgagcccaagaggccctctgacaagcccctcangcttccccttcaggatgtgtacaagattggaggtattggaactgtgccagtgggacgtgttgagaccggtgtcttgaagcctggaatggtggtgacttttgcaccaactggactgacaactgaagtcaagtctgtggagatgcaccatgaatctcttacagaggcacatcctggtgacaatgtgggattcaatgttaagaatgttgctgttaaggatttgaagcgtggttatgttgcctcaaactcaaaggatgaccctgc

SEQ ID NO: 9794 - DNA, 437 bp, Glycine max
  Clone ID: LIB3092-036-Q1-K1-H4
cggcgtcttttccagcttgcgcactgtcttccctctatcgcccggtattctggccatcctactctatcccttctctttggcattggtgtacgttcttgattatttatttggttggtcgtaaaccaaaaaatgattcaaatattcgtgctgtatggctcttacccttgttggggtgtatggtttttgtttgtagtctttgtgtgagactatgttgttggtgacttaaatttattgtggaattgacatctaatgaaaacgtttcacgggttacagatttgagtcttttgactattccgctcattgtgagccgcacccatttaaactatttttcgaaacttgtgattacaccaccgcatgtgattgttttctaataattcagaaatcagaaacatgttatttcattttattaaatcccctacaattaatttattccacct

SEQ ID NO: 9795 - DNA, 347 bp, Glycine max
  Clone ID: LIB3092-036-Q1-K1-H5
acgtttggtgaatcgaatataccctctacctcgtactctattgctggtacctcaagaaggaagaccatgaagcccgccttgtccactgaagctcctaaacctggacatgggcaaggaagtaataaaattggcccttcaagtagctggatttcatctgtgcagcgcatatcttctgccaaatgaataaccaatatggtttgattctgatcaagaagattccctgtatgcattccgcaaatccgtggtatttgcttgcttcaactgtacaggtcaagaattttcaaatgatctatccagggagactgccaattgctgcaaggttgataaatttcaaagctcatcttctg

SEQ ID NO: 9796 - DNA, 382 bp, Glycine max
  unsure at all n locations
  Clone ID: LIB3092-036-Q1-K1-H6
accgaatcggagtttcgggctagacgtacgcgtacgctttattaaaggatatcacctggcaacaacccctgccacagtaatcgttgtgttccgaaagaaggagacctatgaacgtggatctggaatcattggcagaggcaacttctggggccataggatcactgatcagcaccactattctctacccacttgacacctgcaagaccaagtaccaggctgaggctcgttcctcangtcgaataaaatacaggaatctcactgatgtattattggaggcaatatctaaccgtcaggtgctttcactttaccagggccttggaacaaagaatcttcaatccttcatttcacaatttgtctacttctatggatacagctattttaa

SEQ ID NO: 9797 - DNA, 349 bp, Glycine max
  Clone ID: LIB3092-036-Q1-K1-H8
gagatatggtgcatattcctggtccaaagaggtctaatttaagtttggataaacttataatggaagcgatcacttgcttgaaggagaatggtggttctaataagacagctattgcagctttcatagaggaccaatattgggcactgccaggcttaaaaagtatgttgtctgcaaaattaaagtttttgacagcaagtggaaaactgatcaaggtaaatcgcaagtatagaattgcacctatagcagcatattctgacagaagaagaaactcatccgtgttatatttggaagggaggcagaaagcctctatgaaaattgacagggatgagaccaacatccttactagatc

SEQ ID NO: 9798 - DNA, 295 bp, Glycine max
  Clone ID: LIB3092-036-Q1-K1-H9
cttcctttttttctaacaaaagcttcaataaacggggacgggaccctatcactagctactcccaaaccattttttttcataatacatatttccctcaatttatatagaactcaatacaaatatttccaagaaaatttaatgtacaatattcaacttcttcttaaatccaacccaattcacaacaaatctccattgtttattcacaatgaaaagcccatatcacagtctattctgactgtagaatacattcatcaaacatttaataacaaccccatctttccttctgattcttacc

SEQ ID NO: 9799 - DNA, 488 bp, Glycine max
  Clone ID: LIB3092-037-Q1-K1-A1
cccacgcgtccggactagttgcaacatctgagtgctcaaaactccttttccctttttcaaatgtgacggacctctttattccattctatttatgcaattaacttgatacttctctgggataatgtcaaactttcacttttcgcagcaaatttgaagtacaaattttctttatttttcattatccatctattgaactctccacaatcaactctgcacaattatgttggttataatatttttgaatcttaaaatcaatatactatgcatgtggattaattctccctttgttctatagctagctcagatttccgaaatgtacaatcccccattcttgatcctagtctgataatgtccattctttttcgcctaagctttgactattcggctagcattcttatgagtaaagatgtctggtttagtttgagtttattctggccgttgatttttaatggatataatttgataggttgataatggtctgctctgaa

SEQ ID NO: 9800 - DNA, 457 bp, Glycine max
  Clone ID: LIB3092-037-Q1-K1-A10
gcagaatcaaaatacgaaaaacagagttattttgcatcgacgtcacacatggagatcgccgggaccgttctccgtgaggtcagctacgtctccggctatgggacccacacgcggtcccgcggactggctcctcgttttggggtgaggatggggatgggttctggtttctgtgacgaggggcatttgcggtattaccaggacaccaaaaaggttctcaccccaaagaagaagttgaagctgctcaagggtttctgcaaattagggcttgcatcggatcccgagaaactcgccatgttctatgatcttcaacaaaacctcacctcggatgctggagatgtattactgagagagttagaagcagcaagagcaaaggagaatgaagtgatgaataaaaggaaacaagaaaataaagccaaactcaaagctgccaagatgaattgtgaatcttcttaatctt

SEQ ID NO: 9801 - DNA, 365 bp, Glycine max
  unsure at all n locations
  Clone ID: LIB3092-037-Q1-K1-A11
gtttaagaggtggcatgcagattttcgtcaagactttgacgggaaagaccatcaccttggaggtggagagttcagataccatagacaatgtgaaagccaagattcaagataaggagggtatccccccagaccagcagaggcttatctttgctggtaaacagcttgaagatggacgaacccttgcagattataacatccagaaggaatctaccctgcacttggttttgaggcttcgtggtggcatgcaaatctttgttaagactttgaccggaaaaacaataactttagaagttgaaagttctgataccatcgataacgtgaaggcaaagatacaggacanagaggggattccaccagaccagcag

SEQ ID NO: 9802 - DNA, 382 bp, Glycine max
  Clone ID: LIB3092-037-Q1-K1-A12
gactgatgaagaatttgctagagaaacgattgctggtgttaatccaaatgtcattaggattcttgaggagttcccaccacgtagcaagctagattctcaagcctacggtgatcatacctctataataacaaaacaacacttggagcctaacttgggtgggctcaccgatgagcaagctatccagagcaagaagttgttcatcttagatcaccatgactatctcattccatatttgaggaaaataaatgcaactaccacagagacttacgctacaagaaccatatttatcttgaaaagtgatggaaccttgacgccattggccattgagttaagtaagccgcatcctcagggtgaaggatatggtcctgatagcgaagtctac

SEQ ID NO: 9803 - DNA, 372 bp, Glycine max
  Clone ID: LIB3092-037-Q1-K1-A2
cggacgcgtgggaaacactaggcgcattgcgcaccctctccgctcccataatatctgacgaagcaccgccaaaaggtgtgttaagtgtgaatccctttccctctctactcttcactttccatttccatttttttctggttttctttctccatggcctccgccgccgccgtcgccgccgaagacgacgctgtcaacggcttcactcggtcggagatgtactcggaaaaccttgccggcactgtcgacgcctacgaccgacacgtgttcctatgctacaagagctacgtgtcctggccggcacgcatcgaggcatccgacgccgatcccttccccaagcgcgtcgtcgtcaacttcaaagcccgcaagaacgac

SEQ ID NO: 9804 - DNA, 294 bp, Glycine max
  Clone ID: LIB3092-037-Q1-K1-A3
acgacccagcgtacgccacgcgtgctacgagagaagctgctcctttttatactagtgctgtaagatgaaactgagatcggtggacatgtgcacaaagagcccaacaacacttgtaagtagaaacagattaacaccaatacctcatcgtactgttccgtcatcaaggcttgcgtctaaggacacaattggcttgatacattctgaagactgcatcacacatgtcgtgaatttgatgaataaagagtatgcaatctactactacatactacggtctactataagtgagctgaatat

SEQ ID NO: 9805 - DNA, 453 bp, Glycine max
  Clone ID: LIB3092-037-Q1-K1-A4
cccacgcgtccggttcttcttcgtcgttatcttcttcttttgttgtttgtgtgtttgttttttctctcacctgaaaatgtcttgctgcggtggtaactgtggttgcggaagcgcctgcaagtgcggcaacggctgcggaggctgcaagatgtacccagacttgagctacaccgagtcaaccaccaccgagaccttggtcatgggagtggcaccagttaaggcttaattcgagaagtgctgaaatgggtgttcccgctgagaacgatggctgcaaatgtggagctaactgcacctgcaacccctgcacttgcaagtgaggtgttggagagctaaagcttcaagcataaatggcccttataaataatgataaaaactatatgtaggttcaaaacttcaaaattatgtagtatggattatgttgcactctggggtttagagcttaacaaacaccct

SEQ ID NO: 9806 - DNA, 220 bp, Glycine max
  Clone ID: LIB3092-037-Q1-K1-A5
acgcgtacgattacgcttaccatcactgacattttacattctttcggtgacagacacgagctgctgcagggggagctttacaacggtatcgtcaaacagacgcgtgtcctgctcgacgatcacttctggcacatccactacatacgattccaaaacaacgatccagatcttcacatcgcgttcgaacccgtgcacagaggtgactgacctatagttcctg

SEQ ID NO: 9807 - DNA, 387 bp, Glycine max
  unsure at all n locations
  Clone ID: LIB3092-036-Q1-K1-H1
acgcccacgcgtccgaaaaaaagcatcaagaaggaagcttggtggaccatatcccatatcacagggggggataaacagcagattcaagctgtgattgaagctaatctaattgctcctttggtcaatctgcttcaaaatgctgagtttgatatcaagaaagaagctgcttgggctatctcaaatgctacatccggtggttctcatgaacaaatcaagttcctagtaagccaagggtgtattaagcccttgtgtgatcttctcatctgtcctgatcctagaattgttacagtttgtctggaaggccttgaaaacatcttgaaggtgggagaagctgataaaaacatangaaatactggtgatgtgaatctatatgcccaaatgattgat

SEQ ID NO: 9808 - DNA, 354 bp, Glycine max
  unsure at all n locations
  Clone ID: LIB3092-036-Q1-K1-F10
acagaaattctctggngcttagatcccacttcatggtgtcacaatatgcgtaacagtgctaggagaaatcttcctttttttgatcttggtagcttcccaactcactcccaagaccaatggatcaactcctgtgaggggagagacagtggccaagttgaaggtggcaatcaatggtttcggacgcattggtagaaacttccttcgctgctggcacggccgaaaagactcaccccttgaagtcgttgttgtcaacgacagtggtggtgtcaagaaatgcttcgcacctgcttgaaatatgattctattgctgggaaccctttaaaggcagatggtgaaaatactaagacaaatgaa

SEQ ID NO: 9809 - DNA, 404 bp, Glycine max
  unsure at all n locations
  Clone ID: LIB3092-036-Q1-K1-F11
cttgtgattatccttgcaacacacattgtcttgtcggcanaatcttgcaccaacaacacacagccgtggcaggctcaaacattctntctcactctccttcccttcccaaaacctacagccactccttaaaccaaaacgcgttatcccaaaagcttttttttctgcccctcaaattcaaagccaccacaaaaccacgtgctctcagagcggttctctcgcagaacgctgtcaaaacctcggtggaggacacaaagaacgctcattttcagcactgtttcaccaaatccgaagatgggtatctgtactgtgagggcctcaaggtgcatgacatcatggaatctgttgagagaagacctttctatttgtacagcaggccccagataactaggaatgttgaaacctac

SEQ ID NO: 9810 - DNA, 379 bp, Glycine max
  Clone ID: LIB3092-036-Q1-K1-F12
acgctctctccgcctgctcgggcctatccctccgcgtgatccagcccgacgcctcctgcaaatgggaggcggttaacccgggctacgcggcctgcctcgaaaacacgcgcaaggacttaatcgtagccactatagcatcgtctcttattggttgcttcatcatgggcacgttcgcgaacctccctttgggcctcgcaccgggcatgggttcaaacgctattttgcttacaccgtcgtgggcttccacggctctggcaacgtctcctaccaaagcgccctcgccgcagtcttcatcgaaggagcaatcttcctcctcgtctccgcaatcgggcttcgcgccaagctcgccaaactcgttcccaagcccgtcagaataagc

SEQ ID NO: 9811 - DNA, 328 bp, Glycine max
  Clone ID: LIB3092-036-Q1-K1-F2
cgaggaatacagcttgctttctagctaacatgggctggctgggtacgagtacgactcaacgtgtgtgtctttcgtgaaaggcaagacactgaagcttcaaatttcaacattctcctgttcgtgtcatcgattgggaatattgcggtgctggcaatgctaactttgtgtttctgactcattgtacttaattaatttctagctagccactctgtcatgactttgttttccttttccaccgattttccagcggctgggagcttaatatttgcgggaatggaatggaacatctctggcgtgttgacttttcacgcggaggctggcgtcaagt

SEQ ID NO: 9812 - DNA, 430 bp, Glycine max
  Clone ID: LIB3092-036-Q1-K1-F3
caaaagattgaatatttggccctggaccaaccattttggaagtcaagggccttccaccaaatgattgggaaggtcaaaccccacccactattggctaacttcaaggggtttcaactaaaatgggcccaccagccacactttgatgcgagcccttgagggtggaacaatattgatcaattgctttgatggttttgatgcttcaattccctttggaaggtacaaaatgagcggcattggcagggagaaaggtatctacaggctaacaattaccttgaagtgaaacttgggtttcaccagtgaagaacctgcatggtgtgattgtgaatgctcaactgtataccgaatctacgtgctatcattttttcgtgagcatggctgcataatatgtgtgtctaaataaactgatagtactgacatatacagtgattat

SEQ ID NO: 9813 - DNA, 412 bp, Glycine max
  Clone ID: LIB3092-036-Q1-K1-F6
ctgagaggaagagagagggagattctttgtttgctaccttctctcggaaaaatggttacggtcaggtttcaccagtaccaggtggttgggagggctcttcccacggaagcagatcagcaccccaagatctaccgaatgaagctctgggccaccaacgaggttcgcgccaagtccaagttctggtattttctgaggaaactgaaaaaggtgaagaagagcaatggccaagtgcttgccatcaacgagatttttgagaagaacccaaccaaaattaagaactatggtatatggttgcggtatcagagtaggactggttaccacaacatgtacaaggagtaccgtgacaccactctaaacggtgcagttgaggcaatgtacaatgaaaatgcttctcgtcacaaggtcaggagcc

SEQ ID NO: 9814 - DNA, 273 bp, Glycine max
  Clone ID: LIB3092-036-Q1-K1-F7
attggtccaacatagcccagcctaaaatttaagtagcagaagctagcactagctagttaggtttaatttctgtcttgtaattgagacaatttatgaaataaccgcacaattgattcatgatgaagaagagagtagcaagcaccagcaatgagtcctctaaacttgatcgcaaaaccattgaaaggaaccgcagaactcacatgaaatccctctgccatcaactttcttctcttatttcctccaatctcaaaccagtcaaactcaagttgatgc

SEQ ID NO: 9815 - DNA, 412 bp, Glycine max
  Clone ID: LIB3092-036-Q1-K1-F9
ctgcactctcaatggtttacgtatctggagctccagtaatgtttgtgggctgcggacagtgctatactgacctcaagaaactcaacgtcaagtcaattgcgaagactctccttaaatgagggaacaacataaacctgtcatgaatgtttctgtttgatgagtaacttgattatccccgtagatccccattacatcgtaagacaacattgacgcaatttggtttgtttaatttatattgtgaaaaatcctggaagtttcctctctcaaaaccagattcactcagccattgggccaactctcaccgatttaaaatcggcgacactctcatatttaaatacgaaaagagaacagagtcagtgcacgaaatgaatgagacggattatgaaaggtgcaacacggtggggaaatacca

SEQ ID NO: 9816 - DNA, 347 bp, Glycine max
  Clone ID: LIB3092-036-Q1-K1-G10
ttttgccacgcttaagatcacccaagagagaacctaagacacacaacacaacacaaacacgcagagttagaggagaaatcatcatggcatcagcagcatctgggtttgtgttgtcacttaatgttgcagctgccaccacaaactcaagggtggtcatgttcaacacaaagaacaacgcttctaagcttgttgtaagggcttcagatgagcctgcagcggcggcacccgccaccgtcacacccccagctgaagctgaagctaaaccaaagccaccacctattggccccaagagaggtgctaaggtgaagattcttaggaaggaatcttactggtacaaaagcactggt

SEQ ID NO: 9817 - DNA, 380 bp, Glycine max
  unsure at all n locations
  Clone ID: LIB3092-036-Q1-K1-G11
gagatgtacatcatggtaaaatatgagcccggaaatgatggctaacatgggtgaaacaatttgggtgttaaagctntcaccagaaaaaagctgcaaaagctcagcaggccatgtcatccttatcaccggagagcttggataaaatgatgctttgggcagacaggattcaaagagggagttgaatctgcgagaaagacaaagaactggctgctagggaaacctggcatgatctttgctatattaatgctcattttggctgtcattcttcaccggttaggcttcattggtggctagagtaaggggcaaacattatgagattccttgggcattcaaactcangcataaccttcttgtgtgatgagaatatgagatgattgaat

SEQ ID NO: 9818 - DNA, 406 bp, Glycine max
  Clone ID: LIB3092-036-Q1-K1-G12
cccacgcgtccgaatttcgcctctttctttctcaactcccttagattctctccatcgggtggtcaaaaatgcggatgagctgcaatggatgtcgagttctcagaaaaggttgcagtgaaaattgcagcatcagaccctgtttacaatggatcaaaagcccagaatctcaagccaatgctactgtgtttcttgccaagttctacggccgtgctggtctaatgaacctggttaacgcaggccccgaacatcttcgtccagcgatctttcgttcgttgttgtacgaggcatgcggtcggatattgaacccgatttacgggtctgtcgggttgttatggtccgggagctggcagctatgtcaagccgccgtggaaacgtcttgaaggcgcaccgatacgccgatcacgtc

SEQ ID NO: 9819 - DNA, 450 bp, Glycine max
  Clone ID: LIB3092-036-Q1-K1-G5
agccacgcttaatatcaccctaaaaagttctcttttcacacaacacaacacaaaccctgtgtgtgtttatataaatcatcatcgcatcaacaacatcttggtttgtgttgtcacttaattttacaccctccaccacaaactcaaaggttgtcatgttcaacacaaaaaacaacacttctatgctttttgtaatgtcttcatattaaccttcttcgtgatcacccatcaccgtcacatccctatcttaatcttaaacttaaccaaaatcaccacctatttgccccaaaataagtgctaaagttaaaattcttaataatgaattttactcgtacaaatccacttttttcaatttttgcttttttatcaagacccaaaacactctcttcccttttttggttctattcacaaaatcaatctattccaatttattaaccaacaacttttcttttt

SEQ ID NO: 9820 - DNA, 330 bp, Glycine max
  Clone ID: LIB3092-036-Q1-K1-G7
cggacgcgtgggttttgcaacttggtttccaattgcgtgcacccatgtcctctttgctctccttatcactctctgcgccctccctccacgattcttccttcctccatggaacaaagctctttcccttttctcgaagagtggcaccacgccgcttcaactcttcctctgccaagtgctccctcgaccacatccccaaacagttcagaaaggaaaatctcaaagatggattgatggaaaactacaagaatgcacctcaatctctatatggcctttctccttcacaaatggacatgttcatgacagaggatatcctatccgtcagcaatctga

SEQ ID NO: 9821 - DNA, 136 bp, Glycine max
  Clone ID: LIB3092-036-Q1-K1-G8
aaaaataaaaaaaccgagctggcccgacacaaccgaaaaaaaataaataaaaaaaattattttattttatccaatacacaaaaaacacaacgcgacgcgcttatatatataaaatcaccccccccccccccaaact

SEQ ID NO: 9822 - DNA, 302 bp, Glycine max
  Clone ID: LIB3092-036-Q1-K1-G9
cccacgcgtccgcccacgcgtccggtcgaaaattggtggattaacttttgatgaggtggcgggagagactttgtctttctgggtgaaggcattctctgaagatacagctaaaaggttggaaaattttggatttatacagttcagaccaggaggggagtatcatgcaaataacccagaaatgtcaaagttgctccacaaagctgttcgtcagaaaagtcaaagtgccttttcagtttatcagcaatatttggctaatcgacctgtgaatgttctccgtgatcttcttgaattcaaaagtgatc

SEQ ID NO: 9823 - DNA, 331 bp, Glycine max
  Clone ID: LIB3092-036-Q1-K1-C6
ccctcgcttgacgattcaagattcgggatttaggcgcttcccgtttcttcgattctgccctcccaagaaaaacccagatctcgtgattgattattcatcatggccactgttgctagtcccgcggatcaagcaactgatttgctgcagaagctatcgttggaaactcagcccaagcccttggagattcctgagccaaccaagaaggccactgggaatcagtatggatcagttgattcaagaaatgctgcgaatggccgatcccatcgtatgatcggtctgtaccccagtgtgcaggatttattgatctactatgtgttacctccaaatggta

SEQ ID NO: 9824 - DNA, 471 bp, Glycine max
  Clone ID: LIB3092-036-Q1-K1-C9
ctaggtttcaaaattgggattcggatgtatgggccttactggagcgtacaatgaccctctgcaagaacaggatggcatatctgttatcaagtatgcgttcagtaagggaatcacattttttgatactgcggatgtttatggagccaatgctaatgaacttttggttggaaaggctttgaagcagctgcccagagaaaagattcagatagccacaaaatttggtattgcttcacgaggttttcctgatatgaagatcaagggttcgcctgaatatgtgcgatcatgctgtgaagctagcttgaagcgtcttgatgttgaatacattgatctctattatcagcacagagtggacacatctgtacctatagaggaaacagtgggtgaacttaagaaattggtcgaagagggtaaagtcaaatatattggattatctgaagccagcccagatacaataaggagagcacacgcaat

SEQ ID NO: 9825 - DNA, 450 bp, Glycine max
  Clone ID: LIB3092-036-Q1-K1-D1
cgctgttcctacaatcattccaaatgtgcccttccggtcgcaccctcctcccttgctccggctccgatttccgaccggcattcgacgtcctcgatgccgaccgcgacggcaaaatcagccgcgacgacctccgcgccttctacgccggagtcggcggcggaggagatgacgtgatcggggcaatgatgacagtggctgacaccaataaggacgggttcgtggagtacgaggagttcgagcgcgtggtctcggcggagagaaagcccgtggggtactgtggggccatggaggacgtgttcagggtcatggacaaggacggcgacggcaagctcagccaccatgatctgaagacttacatggcctgcgctggttttccggccaccgacaacgacatcaacgccatgatccgattcggcggcggcgaccaaaacggcggcgttacgttcgatg

SEQ ID NO: 9826 - DNA, 478 bp, Glycine max
  Clone ID: LIB3092-036-Q1-K1-D12
cacattcgtgcaaggaaaacccttccttccagttccagcagctcccactaaaaatgttcggggagtggttcagtgcggtgtgtggtgcaggaagaaggagatacacccgcaattccacgaggaagcgaaggtgtactgcaacggggagctggtgctgacgacaggtgggacccagaaggagtacgtggtcgacgtgtggtcggggaaccaccctttctacctcggaagccggtcggcgtctatggtcagcgacgaccaggtcgagaagttccgcaagaagttcggagagctaaaagagatcatggagattcctgttctcaagggagagattgttatcccctcaagacgcaagggcgtttccaaaggaggcaagaaaaaataatttattcgattcaaacatgattgtcttttttcttcttcttaatttcaattcctgtaatgtaatatgataaaacgctttaagcctgtgctatggata

SEQ ID NO: 9827 - DNA, 340 bp, Glycine max
  Clone ID: LIB3092-036-Q1-K1-D2
cccacgcgtccgctttaagatattatgtcgcgctcttgccgtcgctgctctcgctggtgggcctcccgttttgaactcaccgatccaagttcactttcatctacaactactctgatacaccgtgaagccaacggcggccaagacttgtacggcattagtccttgtggcgtttcagctttaggagttatcaattatgggtgagtttacaattcagattagcaacgaccttgttaatcaacttgttgatgatgcggtcccgaagaaaaaaaccagaaagactagacggaaagtggcaagagagactgaaaagccccaatctaatgaaactataaagcctgat

SEQ ID NO: 9828 - DNA, 445 bp, Glycine max
  unsure at all n locations
  Clone ID: LIB3092-036-Q1-K1-D3
tggctttctttattctctccttcctcttccttcttcttgtttcatctgccactgcttgtgatcgctgcttgtatcaatccaaggcttcctatttctccaaagcttctgctctttcatctggggcatgtgggtatggctctttggcactagacataagtggtggacaccttgcagctggtgtggattctctcttcaaaaatggagcaggttgtggtgcctgctttcagataagatgcaagaacccaactctatgtagcaaagaaggtaccaaagtggtattgactgatcttaatcacaacaatcaaactgattttgtgctaagcagcagagcctttgcgggcatggctcanaagggtatgggccaacaaatactgaagcttggcattgctgaaattgaatacaagagagtaccttgtgattacaaaaatcagaatttggccgttcg

SEQ ID NO: 9829 - DNA, 250 bp, Glycine max
  unsure at all n locations
  Clone ID: LIB3092-036-Q1-K1-D4
aaaaaaaccgnggcgacccacccatacgaacaaanaaaatttttttaccagtttttcattttatttacaaaaatataaaactcgttggttctcaacaaattaaattggatctatcctcttcacttcaaaaaccatacctcttattacaaactaaacacattcacgtcacatatttaatattgatttctcaagttctctatgctctaacacacctttcacttctttatatatatttacaaaattttaatcc

SEQ ID NO: 9830 - DNA, 235 bp, Glycine max
  Clone ID: LIB3092-036-Q1-K1-D6
gagagagaggtcatgatcgacgatatcgggacagatatagagacaaatatagaaggcatcgctatgattacgatggtcatgacgagctttgatgggataaaacgtccttctcaattatctggttgacaaatttcaagattgttatgaattatagttacattgatagtccatctcatgttactttccaagggaaactttttaattttaaataaaagtggtttatttgtcgcattcc

SEQ ID NO: 9831 - DNA, 484 bp, Glycine max
  unsure at all n locations
  Clone ID: LIB3092-036-Q1-K1-D8
ggcgcgcgcacgcgtccgcccacgcgtccgctttaagatattatgtcgcgctcttgccgtcgctgctctcgctggggggcctcccgttttgaactcaccgatccaagttcactttcatctacaactactctgatacaccgtgaagccaacggcggccaagacttgtacggcattagtccttgtggcgtttcagctttaggagttatcaattatgggtgagtttacaattcagattagcaacgaccttgttaatcaacttgttgatgatgcggtcccgaagaaaaaaaccagaaagactagacggaaggtggcaagagagactgaaaagccccaatctaatgaaactataaagcctgatagtgcagttactccagggtggcctgtgcagtccnctttatttctacctgcaacattgcctgtacaaccggtccattcaaagttagaaggtattcaatctgtgctttaagaaagtgagagggttttg

SEQ ID NO: 9832 - DNA, 310 bp, Glycine max
  Clone ID: LIB3092-036-Q1-K1-E1
accggacttggcattacattgaaaaaaaaaacctttttacttttcaattatcaaaatggctgcggggggtgtcacaggagcggggctaaccctaaggatagggttggcaatacctctttcctttccaaccccctttggaaccgttacaatggccgtatccttcgaccccaagaacggcaacaaactcactcttaccaaaaccgaggaagcttttcttgctgccaaggagctgatgcttggaagggtcaactccccaatttaggccttcaaaaccgtgggtggacaaccaattgtgattgattcaatcaaa

SEQ ID NO: 9833 - DNA, 286 bp, Glycine max
  Clone ID: LIB3092-036-Q1-K1-E10
ccgcgtttggatctccgttaaacaaaaccattaaaatgtagcgagagaaaaacaaggccgcgaaagaaaatcagttaatttactaattttatttttttatggctttccacgaccatctccagcacgaaatagcgttccagcgtttcacggaggagcaagagttgaccgagaacagagacatgcagcagaggctcccacctccgacatggctcaacaacgttaacgcgcgtcaacagaatttcctcgacaccgagaagagcgtggatcggaacaaccgaagcgagag

SEQ ID NO: 9834 - DNA, 258 bp, Glycine max
  Clone ID: LIB3092-036-Q1-K1-E12
atccccatcatttttatatccttatttttacctaaacttttcttacaaactctctgttccatatcttcatgtgccgcacctcccttcctcattctcttacactttcaaaacctttcttcctctcttctctccttctcttacaagccccattttaaaaccaacctttctttctatcctcttcttttcaaacccttccaatttcttcacataaaaccccaaatcaatacttttccttcccttttctcccttttttcttca

SEQ ID NO: 9835 - DNA, 403 bp, Glycine max
  unsure at all n locations
  Clone ID: LIB3092-036-Q1-K1-E2
cggctntgcatttcatttgagagagagagcgtcttacctttccattatcaaaatggctgttgcggctatcacaggagcgaggctaaccctagggatagggttggcgatacctctttcctctcccacgcgctctcgaaccgtcgcaatggccgtatccgtcgaccccaagaccgacaacaaactcactcttaccaagtccgaggaagctttcgctgctgccaaggagctgatgcttggaggtgtcaactccncagttcgtgccttcaaatccgtgggtggtcaaccaattgtgattgattcagtcaaagggtctcgtatgtgggacatcgacggcaatgagtacattgactacgtcggttcttggggtcccgcaatcattggtcacgctgatgatcaagtgctt

SEQ ID NO: 9836 - DNA, 422 bp, Glycine max
  Clone ID: LIB3092-036-Q1-K1-E4
acgcgtttggatctccgttaaacaaaaccattaaaatgtagcgagagaaaaacagggccgcggaagaaaatcagttaatttactaattttatttttttatggctttccacgaccatctccagcacgaaatagcgttccagcgtttcacggaggagcaagagttgaccgagaacagagacatgcagcagaggctcccaccttcgacatggctcaacaacgttaacgcgcgtcaacagaatttcctcgacaccgagaagagcgtggatcggaacaaccgaagcgagagcaattgcgaatccgaggatttgagggaatacaaagcggacattctaggtcaccctctctacgatcaactgttgtcggcgcacgtctcgtgcctcagaatcgccacgcccgtggaccagctttctaagatcgatgcg

SEQ ID NO: 9837 - DNA, 404 bp, Glycine max
  unsure at all n locations
  Clone ID: LIB3092-036-Q1-K1-E6
tcttatccccatcatttttatatccggataggtaacctaagcttttcttccagagactctgaaccatggcttcatgtaccgcacctccctccctcatgctcgtccactctcaagacctttctccctctcttcgctccttctctcacaggcccatttctagaaccaccttctctctctatcctctccttttgaagccctccaaatggctccacatagagcccaaatccaggacttgccatgccctcgtcgccgctttgtctgcagaggtccaagtgcccgaaactttcgacgacacggaggaggacgacggtgctgatggcttcaccgncaccaacaccgtncccaccaccaagcctaagaaagggcaggccgcattgcctctcaagagggacaggacgagatct

SEQ ID NO: 9838 - DNA, 317 bp, Glycine max
  Clone ID: LIB3092-036-Q1-K1-E7
cccacgcgtccgtgaacctctcaggttttagaagctcagctaagcacaatagagagtttaattaggccattaacatatcatatgggtgtgactaagcctcatgtgcttatgctgttgatcatcatggttgtctcaattgcagagaaaccatcagtaatagaaggaagggctctttccttgatatctggtcaagggtactcaaagatttttgcaacgcttggacttgtatgcaagtgttgtgatggggttggaggtgcctgcactagtacatggacagaatcttgcaataactcgcagtgtttaccttggaatcacac

SEQ ID NO: 9839 - DNA, 375 bp, Glycine max
  Clone ID: LIB3092-036-Q1-K1-C5
atagggttcatttgtgtgtgttgtgttggcagtcaaatgttggagagagcagaggtttgcggctgcgtaagtgtaaccctaatcctaataagctgaaggttatgggggggtttggaggttgttctggagtggcagtgggtgtgagagaaagaaaaggaattggaagggttagggttcgggttcgggcgagttcttcgtcggacgaggcagtgagtgcgcagtcaaaagtgactcagaaagtattctttgacgtcagtattggaaatccagttgggaagcttgtgggacgtattgtgattggactgtacggcgacgatgtcccccaaacggccgagaacttccgtgccctttgtactggaaagaagggctttgcta

SEQ ID NO: 9840 - DNA, 382 bp, Glycine max
  unsure at all n locations
  Clone ID: LIB3092-036-Q1-K1-A10
ttatcctaantcttgtgtttattttgctgcaatggcttcaaatcaggcgccggggaccatttagggagctactgcaaacccatttgtgtgcaaggttcatattgccctcaaattgaaaggagttcaatacaaatatgtcgaagaaaatttgaagaacaagagtgaactgcttctcaaatccaacccagttcacaagaaggttccagtgtttattcacaatgagaagcccataacagagtctcttgtgattgtttaatacattgatgagacatggaagaacaaccccatctttccttcttatccttaccaaaaaaccttggcttctttcttgtccaaattcattgattataaagtttttggtgctgcattgaaattcgtttta

SEQ ID NO: 9841 - DNA, 329 bp, Glycine max
  Clone ID: LIB3092-036-Q1-K1-A11
gaagataacaaagtgattgtgcagcattggacctcagttccagtggactttgccgacatactagatttggatagtcttggtttcaatgttaaggctggttaccagggtgatactttcaagcttcgtgtacctttccctcgacgtgctgaagatagaaaggatgtgaagactctcattgttgagatgcttcaagctgctaggcctaaagttgattgatcacgccattgatcaatgatgaacagcacctgccagtcatcctggggagaggacaaaatgtatacgtcaaaaaagtaaatgcagttataatttccaaagataaagatgacaaa

SEQ ID NO: 9842 - DNA, 372 bp, Glycine max
  Clone ID: LIB3092-036-Q1-K1-A12
cccacgcgtccgttctcaggcaaagtagcttccctgctggccatttctctaacaacatctgctttcagaacgggtatgatactatgaaaggtgttggaaactatagtggggtcaatggcaatgatggtgaacttagtctatctatgaacagaatgaagaatcaaataagcttctcatcaataagtccttcttcttccttgggagtgctatcaccaacttccaaaataggcacggagggtattagggtaactagcactgaggatgggaggcagggagggagcaatggtgatgctcgatattttggccctggattctcctatgcttcttggaatgagccttcacaccacaaaagacagcgaagtagtaatgatg

SEQ ID NO: 9843 - DNA, 365 bp, Glycine max
  Clone ID: LIB3092-036-Q1-K1-A2
acgcccacgcgtacggattatcctaagtctttgggaatagtgctgcaatggcttcaagtcaggaggaggtgacccttttgggagctactggaagcccatttgtgtgcagggttcatattgccctcaagttgaagggagttcaatacaaatatgtcgaagaaaatttgaggaacaagagtgaactgcttctcaaatccaacccagttcacaagaaggttccagtgtttattcacaatgagaagcccatagcagagtctcttgtgattgttgaatacattgatgagacatggaagaacaaccccatcttgccttctgatccttaccaaagagccttggctcgtttctggtccaaattcattgatgat

SEQ ID NO: 9844 - DNA, 358 bp, Glycine max
  Clone ID: LIB3092-036-Q1-K1-A3
cctacggcctcatgttgggtatggggagtgccgtggagacgctatgcggacaagcattcggagctcaaaagtacgggatgttaggagtctacatgcagcggtcaacgattcttctctcactagccggcgtagtgttgaccgtgatatacgtattcagcgaaccgatgctaatattcctcggggaatcaccgagaatcgcgtcggcggcagcactctttgtgtacgggttgatcccacagatattcgcatacgcggcgaacttcccgatccagaagtttctccaagcgcagagcatagtggcaccgagcgcgtacatatcagcggcgacgctggtggtccacctggggatgagttgggt

SEQ ID NO: 9845 - DNA, 344 bp, Glycine max
  Clone ID: LIB3092-036-Q1-K1-A5
acggccttgttgtaaaatgtccctttcaactggttgcctggtatgtcttgacctctgtacacggcagtgtggttcttttgacgggtaacatgaaaaacgcgggggttgaaattgatgctctatccatatgtctcaacatcaatggatgggaaatgatgatatcccttggtttcatggctgcagcaagtgttcgagtagcaaatgaacttggaagaggaagtgccaaagcttcaaaagttctctattattgtgtcagtgctcacatcattggccatcggattccttctggttatattcttcttattttttagagaaagacttgcatatatatttacctcaaataa

SEQ ID NO: 9846 - DNA, 243 bp, Glycine max
  unsure at all n locations
  Clone ID: LIB3092-036-Q1-K1-A7
cgcgtacgcccacgcgtncggtacttatgcagaatggagggctggtttgctgcaaattctgaggcgaggtgactgaaaggatgggaccaggtagctcctatattgaaagaaataatttgtaaagtcgtctcatagccaggtgcatgagtcttcaacatgcagccttctatgatccataaccatgaggtgctgctccctgggggcatggacttatggtccgcggttacttgcctgttataaata

SEQ ID NO: 9847 - DNA, 334 bp, Glycine max
  Clone ID: LIB3092-036-Q1-K1-A9
gagtgccgtggagacgctatgcggacaagcattcggagctcaaaagtacgggatgttaggagtctacatgcagcggtcaacgattcttctctcactagccggcgtagtgttgaccgtgatatacgtattcagcgaaccgatgctaatattcctcggggaatcaccgagaatcgcgtcggcggcagcactctttgtgtacgggttgatcccacagatattcgcatacgcggcgaacttcccgatccagaagtttctccaagcgcagagcatagtggcaccgagcgcgtacatatcagcggcgacgctggtggtccacctggggatgagttgggtg

SEQ ID NO: 9848 - DNA, 348 bp, Glycine max
  Clone ID: LIB3092-036-Q1-K1-B10
cccacgcgtccgacagctggggacacccatcttggaggtgaggattttgataacaggatggtcaaccactttgttcaggaatttaagagaaagaacaagaaagatatcagtggcaaccccagagcacttaggaggttgaggactgcctgtgagagggcaaagagaactctatcttcaactgcccaaaccaccattgaaattgattctctctatgaaggaattgatttctactccaccattactcgtgctagatttgaggagctcaatatggatctcttccgcaagtgcatggaaccagttgagaagtgtttaagagatgctaagatggacaagaggactgtccatgat

SEQ ID NO: 9849 - DNA, 245 bp, Glycine max
  Clone ID: LIB3092-036-Q1-K1-B11
cccacgcgttcggaaaacggagacggcgtacaaagctccaacagctacatataccagtgctggcagaatctttgattctaagtcgactccgcaatacaccgattgtctcacacgtttagaagaatttaatcatgatcagaatgaatgtctacaacattctggtggttacaagatgtgcaagaaaatagagagggctgcactgttggaacgaaataaacaccgatccttattctagtgaaatctta

SEQ ID NO: 9850 - DNA, 378 bp, Glycine max
  Clone ID: LIB3092-036-Q1-K1-B12
cgcatcttgttcctccgctcaacaactataataacatctttctctctccgaacagatcacactatggccacctcaagcgccaaatcagtccatgatttcaccgttaaagatgccaagggaaatgatattaatcttggtgactacaaaggaaaggtccttatcattgtcaatgttgcctcacaatgtggcttgactaattcaaattacactgagctcagtcagttgtatgagaaatacaaacagaaaggtctggaaattctggcatttccatgcaatcagtttggggcacaggagcctggatctaatgaacagatacaagagtttgtttgtactcgcttcaaggctgagtttcccgttttgacaaggttgatgtgaatg

SEQ ID NO: 9851 - DNA, 461 bp, Glycine max
  unsure at all n locations
  Clone ID: LIB3092-036-Q1-K1-B3
cccacgcgtccggcaaaagggtgaagactgtgagaatgaacaacttgagaggagtgggatgacagaggaatttgaccaacctgttacttctgtggagccttgctgtttgtctgacagtactcaaagcagcaagagaaaaaggagctccccacaattaactcatgatcatggacctgctattaaaattcgacttcctttgaggaagcatagagaacctgaagaaacgaaatccaaatctaaattacaattggggtcttcttctggaagtgtgggggcaattgcagattccttcactaaaactacccttgcaagtgatcctcagtcacaatgtctcaggattacagagccaaaacgggttcttggaaactctgattctagacatggcaaagctatgctgaattcagttcatggagatgctgtggtcactaaaaataatctngtaagtgatcgtcagtcacaac

SEQ ID NO: 9852 - DNA, 374 bp, Glycine max
  unsure at all n locations
  Clone ID: LIB3092-036-Q1-K1-B7
ttaattaaataattaaaatgggtttttaatttaaagagaaaaaaaaaataaaaaaanntcgtaagtggtttaaattaaaaaatatatttaaaaaaaaaataaaatataaaaaaataaatataaaatatataaatataaaaattaattattaaaattataataatatattaaataaaaatttttttttttaattaaaataaaaaaaaaaataaaattattatatattttttatataatataaaaaaaaataataataaatataaaataataataaaaaaaatataaaatataaaaatatttatattattatattaaaataaaaaattttttataataaaataataataaaaaataaataaatatataaaataaaa

SEQ ID NO: 9853 - DNA, 318 bp, Glycine max
  Clone ID: LIB3092-036-Q1-K1-C1
ctttattttcttcctctatctcaactgtgttcgtgtgtatgcttttgagttcagggacagactcaaggagctgaaagacaagaagaaacttggatttgaatcagccaagatttgagttacacgtaattgcaaagatgagtgttatgtatagtcctgttctcaattactcagatgtggagtatcagctatggaaaaaccaagacatggattcaagtattggacatccacaacaacactgtcaccaatccaattctggactattgaggtactgttctgctccaagctcaatgctggcagcctttatgcaacaccattcat

SEQ ID NO: 9854 - DNA, 353 bp, Glycine max
  unsure at all n locations
  Clone ID: LIB3092-036-Q1-K1-C10
gccactgtcactcttctctcctttctgcttccccgattctctatttttgcggtgctgccactgtcactcttctctcctttctgcttccccgattctctatttttgcgcgtaatcggtggcttagagatttgaaaagttttcatttctaattgagcaaacacaatgagtgaccatgtcggtccacctatttatgaatataatgatgaagtcatcattgatgaatttttccttgatgagtcagatatcctccatgaactttccatggacgatgaagatcttcctgatgcggatgatgattttgaaaccaaacatgttgaaaaggttgatgatgccatngacacattcaaaagtca

SEQ ID NO: 9855 - DNA, 390 bp, Glycine max
  Clone ID: LIB3092-036-Q1-K1-C12
aacaaataaaggttttagaccattgcttcagtttagtgacgaagatattaaacagattgtctcaacaaatttggttggatctatcctctgcactcgagaagccatgcgtgttatgagaaaccaagccattgcaggtcacatatttaatatggatggtgcgggttctggaggctctagcacacctttgactgctgtatatggttctacaaagtgtggccttaggcaacttcaaggatcactattaaaggagtgcaagcgatccaaagtaggtgtccatactgcatctccaggcatggttcttacagatctgcttttaagtggctcaactgtccaaaacaggcagatgtttaacatcatctgtgagcttcccgaaactgttgctagaacact

SEQ ID NO: 9856 - DNA, 346 bp, Glycine max
  unsure at all n locations
  Clone ID: LIB3092-036-Q1-K1-C2
cttagctagtttttaccaatggctgctgcggttagtgctgcagtctcttttccatccaccaagtctacctctctcccaagcaggacctccatcattaccccagagagagttgtattcaagaaggcttcattgcaatacagagatgtttgtagcagtggaagggtagtttccatcagagctcaagtcaccactgaggctccagccaaggttgaaaaagagtccaagaaacaagatgaaagtgtggttgtgaacaagttcaaacccaagaccccttacgttggtagatgcctgctcaacacaaagatcactggggatgatgctccaggagaanactggcacatggtct

SEQ ID NO: 9857 - DNA, 319 bp, Glycine max
  Clone ID: LIB3092-036-Q1-K1-C4
tgcttgtattctgatgaaaaaaaacggtcaatatcaatattggttggacctttgttttagtaatttagctctgagaaatgttgctaaataatagtagcaattgtttctctaacactattagctgaaatttattaaaattcattcattttagtaagttttatttttccatatgactacggatggttgtaggttcagactttattttgataattgatatttcgatttgagtttgagagcgtgagagattacgatggcatggcgttcttttcaagaaattttgcgagattcgtattttgtcatgctgattcgattagatatg

SEQ ID NO: 9858 - DNA, 344 bp, Glycine max
  unsure at all n locations
  Clone ID: LIB3092-036-Q1-K1-A1
ccacgcgtncaccatggcgtctaactctgcttccgctctttacttccttttatgcctatcgcccatcactttgcttctttctgcgtttcgtgctcaagctcaatctcatgctccagctcccactttcaagtactgtgaaaagaatgcagactatgctgtgaaggtgagtggagtggaaatattgcctgaccccgtggagagaggagtgccattcacctttaagatcccagcttatactcctgaaccaattcaaagcggggacttgttatatgaaatttcttatgctggaatagaagcacaacctgctacatttctccatgatctctgtgaggaagcaccatgcc

SEQ ID NO: 9859 - DNA, 461 bp, Glycine max
  unsure at all n locations
  Clone ID: LIB3092-035-Q1-K1-G4
tgcgatttttatttggatcagggtgtctgtggctcagtggtatttcgggttcaatcgcttacaattggtctcgacccattatgaaaactagtgttaaaatccatcacgcagggttgggttcttataatttcttatcttttcgaatactgtttttgacctaanttaattatctggatttgcatgcaatttctgcaatccctgttgctttgatgttttgtttatgatttgctactancggttgtttcatcgaggcctttcattgtgatgtgatcccaatttcacctctccacgaagttaatattggcaatcacctangaaattgaaatgcagatccatttatttcgacctctagatggcaattgtgaaaagttaattattggttggcatttacaancataaattattggagttntgatgaacaatactgtaaatgtttgtggtataatgggctttggtttttg

SEQ ID NO: 9860 - DNA, 340 bp, Glycine max
  Clone ID: LIB3092-035-Q1-K1-G5
acgcctacgcgtacgcacactatttctcactccttctaatgggatcagcacgcaattttggcatggcgattgaattgctgaacactgattcactacttaatgatgtagaaaagatttttgcttcaagtcctccatattcaatggagctttagaagccaaagcacatgctgaaagagcatgagcaaacacttgttgacgccattgcaaggattgcatatgcatctgatggcgaaagtgatggataacagccgttcttgcagcatggtcaattaatggaaaggggattagagcacaggaaccaactgcatgttcgaggaaatctgtctttagagcttaaatc

SEQ ID NO: 9861 - DNA, 471 bp, Glycine max
  unsure at all n locations
  Clone ID: LIB3092-035-Q1-K1-G6
ttttcctttcactttgttgtttgtttgttatcttgacttttgaaacctcagactgagaatggaacgtggggttattgataatatcatcaataggcttctccaagtgagaggcagaccagggaagcaggtgcaactttctgaggctgagatcaagcagctttgtcttgtctccagggatatatttatgaggcagcccaacctcttggaactcgaggcaccaattaagatatgtggagatatccacggtcaatattccgaccttctgcgactttttgagtatggtggattgcctcctcgttataactacttatttttaggggactatgttgatcgtgggaagcaaagtttggagacaatatgtctccttctgtcttataaaataaaatatcccaacaactttttccttctgaggggaaaccatgaatgtgcttctataaaccgcatttacggattntatgatgagtgtaaacg

SEQ ID NO: 9862 - DNA, 459 bp, Glycine max
  Clone ID: LIB3092-035-Q1-K1-G7
gaagagctcaggaaacagctgcctaatcacaacttccgaactggaagtgattgtgatgttatggcacacctgtacgaggaacatggagaagactttggggacatgctggatggtatcttctcattcgttctactggacacccgtgacaacagctttatagtggctcgggatgctattggagtcacttacttgtacattggatggaggttagatggctctgattggatttcatcagaaatgaaaggcctgaatgatgattgtgaacactttgagtgttttccacctggtcacttgtactctagcatagaaagaaggttccgcatatggtacaatcctacttggatctctgaggctattacatctgccccttatgatcctctcgttttaagacacgcctttgagcatgcagtcataaaaaggttgatgactgatgtgccttatggtagtctactctatgga

SEQ ID NO: 9863 - DNA, 346 bp, Glycine max
  Clone ID: LIB3092-035-Q1-K1-G8
acgcgctacttttattcggatcaaggtgtctgtggctcaatggtatttcgggttcaatcgcttacggttggtctctacccaatatgaaaactagtgttaagatcattcacgcaagggttggttcttataatttcttatcttttcgaatactgattttgacctaatttaattatctggatttgcatgcaatttctgcaatccctgttgctttgatgtttcgtttatgatttgctactacgggttgcttcatcgaggccttttattgagatgtgatcccaatttcacctgttcactaagttaatattggcaatcacctacgaaattgaaatgcagatccctttatttc

SEQ ID NO: 9864 - DNA, 342 bp, Glycine max
  unsure at all n locations
  Clone ID: LIB3092-035-Q1-K1-H1
gaaggaaggaaggaagagtgagcgtgaaagatgccttcggcgaggctttcagggtcaccaaggctcgacgttgctattgacatgggcaatccatttctcaatctcactgttgatggtttccttaagatcggagctgtcgcagccacgcgatcagctgctgaagatacttatcatattatccgaaacgggaatatctcaagtcatgatttcgagaaaacgttgaagaagatgtgtaaagaaggtgtatattggggaactttagctggtgtttatcttggaatggaatatggngtagagagggatccgtgcaccagagattggaagaatgccatgattgggggt

SEQ ID NO: 9865 - DNA, 211 bp, Glycine max
  Clone ID: LIB3092-035-Q1-K1-H11
acatacactaatgtacaacccccaatataaccactactgcaaacatcagattcaaatgccttgattcatgaattgataactcttctatgctaggtatgttctcgtgaaaaaaacccgctatatacaacaaaaagccgggccataatgcccttgtcgaccataccataatttcaaggccttcatactaatctgactggacactacaatataa

SEQ ID NO: 9866 - DNA, 411 bp, Glycine max
  Clone ID: LIB3092-035-Q1-K1-H12
cccacgcgtccgcccacgcgtccgcccacgcgttcgcccacgcgtccgcggacgcgtgggttcagatttgtcagtatgtaatgccctgattactgtgcacagcaaatgtggtggaattgttgattctgagttagtttttggacaaatttcccatccggaccttgtttcatggaacactatcattgctgcatttgcacagcatggtctgtatgacaaagcacgctcctactttgaccagatggtgacagtcagtgttcaacctgatggcataacttttctgagtttactatctgcgtgttgtcgtgctgggaaggttaatgagagcatgaatctatttagtttgatggttgataattatggtattccaccaaggtctgagcactatgcttgcttaattgacgtgatgagtcg

SEQ ID NO: 9867 - DNA, 455 bp, Glycine max
  Clone ID: LIB3092-035-Q1-K1-H2
cccacgcgtccggccgaaacaacccacccaaccctaattcaactgttccgatctgatcactgggagtaaaaattctaaatgagccgggcacaggatgcaaaccgatcattcttcccttttggaaatacttttacgatgatatcaccgaaaggcccaaaaatttcttcacagctgatgataatattacatgcttttgaagcaactttggaagagaggctgaaaaagcttattcccaagagcaaggatgagatcctcagcttgtcttggatgactttggccatgcaggcactttgtgagagtcataatgacattaaaaccctcataacagagcttgagcttcctgtacatgattgggatgagaaatggatagatgtgtacttggatattagcgtgaagttactagatatatgtattgcatctagctctgaattatgacgcctggaccatggccatct

SEQ ID NO: 9868 - DNA, 336 bp, Glycine max
  Clone ID: LIB3092-035-Q1-K1-H3
gccacgcgtacggccgaaacaacccacccaaccctaattcaactgttccgatctgatcactgggagtaagaattctaaatgagccgggcacaagatgcaaaccgatcattcttcccttttggaaatccttttacgatgatatcaccgcaaggcccaaaaatttcttcacagctgatgttaatattacatgcttttgaagcaactttggaagagaggctgaaaaagcttattcccaagagcaaggatgagatcctcagcttgtcttggatgactttggccatgcaagcactatgtgagagtcataatgccattaaaaccctgataacagacctggac

SEQ ID NO: 9869 - DNA, 257 bp, Glycine max
  Clone ID: LIB3092-035-Q1-K1-H4
acgccacgcgtacggccgaaacaacccacccaaccctaattcaactgttccgatctgatcactgggagtgggaagcttaaatgagccgcgcacaatatgcaaaccgatcattcttcccttttggaaatacttttacgatgatatcaccgaaaggcccatatgtttcttcacagctgttgataatattacatgcttttgaagcaactttggaagagaggctgataaagcttatttccaatagcatggatcatatcctc

SEQ ID NO: 9870 - DNA, 469 bp, Glycine max
  unsure at all n locations
  Clone ID: LIB3092-035-Q1-K1-H5
agaaatcttctgtaaaacaagagtctgctggtgccttggcggaggagctgaagcgggtgagtgcagaaaacaagaagttaaccgaaatgctcacagagatgtgtgagaattacaacactttgcgaggcaatttgatggaatacatgaggaagaatccggataaggagcacagctcatcaaagaaaaggaagtctgaaagcaacaacaatagtattccaatgggagtcaacggaacctctgaaagcagctcaactgatgaagaatcctgcaagaaacaaaaggaagacatcaagactaaaatttcaagagtttatatgaggacagaagcatctgataaaagccttatgtgaaagatggatatcaatggaggaaatatggacaaaaggtgaccagggataacccttctccaagagcatatttcaagtgctctnttgctccaagctgcccggtcaaaaagaaggtgcaaaga

SEQ ID NO: 9871 - DNA, 447 bp, Glycine max
  Clone ID: LIB3092-035-Q1-K1-H6
cttcactccaaaaatactactaaagagatgagttttgcaggttttctttctcttcaatcaatgtctgctacctgcggcttcttcttcttctccttcacccttctcttctccttcttctccttcctcgtcttcatctccaggatgaagccctggtgtaactgcgatctttgcaagagctacttgacggtgagttggctgaaaaagctccccaatctctgcgactggtacactcatctcttgcgtaaatccccaaccggcaccatccacgttcacgtgctggggaacaccatcacctcgaatccccacaacgtggagcacattctcaagacgaatttccaaaactaccccaagggcttcatccctgttaataaatacagaaagaaacagaacaagagaaacgtttataggtgcctaaaaaaaaaagtgctctcttgctccaagctgccc

SEQ ID NO: 9872 - DNA, 264 bp, Glycine max
  Clone ID: LIB3092-035-Q1-K1-H7
ctcacgcgtacgcgtactcgtgggcagactagacatacactacctagctcgctctggagattggcacatacacgacgattactattatcatcatctactttctagcttatcgttcaagagttgtgatcaagaatgtgtacaacaagccgcgcttgtacttggacacgtgcggctgatgtcggagcggtgaatgccttgaatgaccaaggcatatgtctgtgagtacagcacgaagagatcagcacaacttcatgctggacataa

SEQ ID NO: 9873 - DNA, 185 bp, Glycine max
  Clone ID: LIB3092-035-Q1-K1-H8
cttaagtgtaaaaatactactaaacagacgagtcatgcacgacctatctctctcgaatcagtgtcagctacctgcggcttcttattatactcacttacccttatcttatccttcaagtacttgcatcaattcatgtgcaggacaaacccctcgtgtcactgacatcttcgccagagctactagac

SEQ ID NO: 9874 - DNA, 343 bp, Glycine max
  Clone ID: LIB3092-035-Q1-K1-H9
gctggaggcaaggcatcttgtcgtaggtacttctctttggatgtggatctatccgatgcttgtggacagactgtagataaggagaatgaggtttttgcttgactgttgaatgcctacacgggggcaccagtggataatacagccgatgatgaagcaccccttttagctagttatgatggaatagaattttgcttttgtgaaagaccaagtaagcttttgctgggacttgcttcatttaagctcaatatatctcaactttcatccaagtgtgacaacaggttgttactcatcagctcttgtgttccaaaactaggaaagtatgcttttcttgaggcatattccc

SEQ ID NO: 9875 - DNA, 341 bp, Glycine max
  Clone ID: LIB3092-035-Q1-K1-G3
cccacgcgtccgcccacgcgtccgatttcttccacctcaaaatggtattggaaggcgagttttggatgacattgagttgctgaacactgattcactagttaaggaggtagaaaggatttttgcttcaagtcctccagattcaatggagcttgagaaggcaaagcaaatgctgaaagagcatgagcaagcacttgttgaccccattgcaaggattgcagatgcatctgatggtgaaagtgatggagaacagccgttcttgcagcatggtcaattaatggaaaggggatgagagcacaggaaccaactgcatgttggaggaatctgtcttggagctgaagtct

SEQ ID NO: 9876 - DNA, 339 bp, Glycine max
  Clone ID: LIB3092-035-Q1-K1-F1
attcacctgagcttttagtgaggattccaaagcatggctttccttgcagcatccactgctgctgcttcccttggcatgtcagaaatgcttggaaaccccatcaacctcagtggtgccacaaggccagctgcatctgcctgtagccctgcctgcttcaagactgcggctcttttctccaaaaagaaggctgcacctccaaaaaaagctgcagctgctgctactgccaatgatgagcttgccaagtggtatggtcctgacagaaggatcttcttgcctgaaggtctcttggaccgatctgagatcccagagtacttgaccggagaagtcacctgagactat

SEQ ID NO: 9877 - DNA, 410 bp, Glycine max
  Clone ID: LIB3092-035-Q1-K1-F10
gggtatgggaatgggtgcaccttccttgccttccatttacaacccgatgcaattgccaaaagtgccacatgatcaagccatgtctgtgcctcagatgccaaaccagaatttaatgtgccaaaatcaagttttgggtgcctttaattaccaaacccacatgcaaaacccttgccttccagaacaatatgcaccttacatgggttaccattttatgcgaagtgcctctcagcctatgaatgtgttcagatatggttcccaagcagtgcaacatagtcaaacaatgattgcaccaggcaataatagcagcggacccatgagtggaacagctaatattgatgatgctgttagtggcaaagcaagttctttcacctttaactgaatagtggatagcaataccttaaaattaccca

SEQ ID NO: 9878 - DNA, 194 bp, Glycine max
  Clone ID: LIB3092-035-Q1-K1-F11
actcagagcgacccgtccgtccacacgtctgcacctgacaaagacttttctcttcatgcgcgaagcctgcgacaagagcgtgacatgaacatatcgtgcgcctgcctattatgacgatctcaacacactatttgatgaatgcagataccaatgtctggttcttcaacatcactatatgcaaaagcccatacttt

SEQ ID NO: 9879 - DNA, 380 bp, Glycine max
  Clone ID: LIB3092-035-Q1-K1-F12
attttcacactcaaccctttcttcatccttttatctcgtctctgccaaaacgatgccgtttgctctggagaataacggaggagttacgatcggacggtcctccttcgcttactgcgtcgcgatctgcgatcgtgattttccggaggatgattccgactccagctccgactcctccatcggaaggaacagcatctcgtcggaagattcctccgaccgggaagacgccgtcgaagttgaggttcagagttccttcaaaggccctttggataccatcaatgatctagaggaagatttacccgtcaagaaaggcatatctaagttctatagcggcaaatccaagtccttcacaagcttagcagatgctgcaactgcaagttcta

SEQ ID NO: 9880 - DNA, 435 bp, Glycine max
  Clone ID: LIB3092-035-Q1-K1-F2
gggagagtggttacctggcttggcctcccaaacttacctcaatggcactcttcctggtgacaatggatttgaccctctgggactagctgaggacccagagaacttgaggtggtacgttcaagccgagcttgtgaatggacgttgggccatgttgggtgttgcaggaatgctacttcctgaggttttcaccaagattggaatcatcaatgcccctcaatggtatgatgctgggaaatcggagtactttgcttcatcgtcgaccctctttgtgatcgagttcatcttggtccactacgtcgagatccggagatggcaggacatcaagaaccctggctctgtcaaccaagaccccatcttcaagcaatacagcttgccccaacatgagtgtggataccctggtagtgtgtttaaccccttgaactttgcacctacttt

SEQ ID NO: 9881 - DNA, 147 bp, Glycine max
  Clone ID: LIB3092-035-Q1-K1-F3
ttcctctttgacaagtgagtcctaaaatctgagctgtcacattcactactagtcagatgcatgtgacagctcagattttaggattcctctttgacaagtgagtcccatgtaattaaaatttgaataataaatatgaataatgttgat

SEQ ID NO: 9882 - DNA, 448 bp, Glycine max
  Clone ID: LIB3092-035-Q1-K1-F5
attcacctgagctttttgtgaggattccaaagcatggcttcccttgcagcatccactgctgctgcttcccttggcatgtcagaaatgcttggaaaccccatcaacctcagtggtgccacaaggccagctccatctgcctctagccctgcctccttcaagactgtggctcttttctccaaaaagaaggctgcacctccaaaaaaagctgcagctgctgctcctgccaatgatgagcttgccaagtggtatggtcctgacagaaggatcttcttgcctgagggtctctcggaccgatctgagatcccagagtacttgaccggagaagtccccggagactatggttatgacccatttggtcttagcaagaaaccagaagatttttccaaatatcaggcatttgaattgattcacgccagatgggcaaatgcttgtgctgctgggatcatca

SEQ ID NO: 9883 - DNA, 465 bp, Glycine max
  Clone ID: LIB3092-035-Q1-K1-F6
agaacaagtagttgagaactaagaaggagaagcaaatggcttcctcaatgatctcttgcccagctgttaccactgtcaaccgtgccggtgccggcatggttgctccattcactggcctcaagtccatggctggcttcctcaccagaaagaccaacaatgacattacctccattgctagcaacggtggaagagtgcaatgcatgcaggtgtggtcaccagttggcaagaagaagtctgagactctttcctacctgccagaccttgatgatgcacaattggcaaaggaagtagaataccttcttaggaagggatggattccttgcttggaattcgagctggagcacggattcgtgtaccgtgagcacaacaggtcaccaggatactacgatggacgctactggaccatgtggaagctgcctatgtttggttgcactgatgcttctcatgtgttgaaggagcttcaag

SEQ ID NO: 9884 - DNA, 416 bp, Glycine max
  Clone ID: LIB3092-035-Q1-K1-F7
tccacgcgtacgaacatactatcgcagctaaaccctggaattaatcacggaattatagtgacggttggttatgttagaacagaaaaaaagagaaaaaaaaattatgggatgcgatggcgtgaggaaactaagattcctatgcattcatgggatccgaacaagcgtagaattattgaatacacagttacataaatggcatcaatcggttctagacaacctatatctagtatatgtggatgctacttttccttgccttggcaaattcgatgtagaaggcatttttgatccagcttactacgagtgaattaagttcaacatggaatgtacagagtacaccaactttgacgagtgcctttagtacattgaagaatgcatgatcaaatactgacctattgattagcttattgggttctcac

SEQ ID NO: 9885 - DNA, 308 bp, Glycine max
  Clone ID: LIB3092-035-Q1-K1-F9
gttttgcctctggtcttcgtccgccacagttgatctgtctcgaacctttgtgaccaaggttgagaaacgctcactggtgggctatgagtttgagatatggcagtgaggtcttggttgctttagtgcttctgccacacatggcttctgctgcttcaattgtgaagaacctaccgggttacaagggtgatcttccattcaaacttgaaactgggtacataggagttggagaagaagaagaggtgcatatatttcacttatttgtggagtctcagagaaatccattcattgatccactgataattcggttt

SEQ ID NO: 9886 - DNA, 452 bp, Glycine max
  Clone ID: LIB3092-035-Q1-K1-G1
acggaggtttctgagaatacagaccaaaggcaagtatccttagaccaagatcagagctcaatgctgaaagtgatttgtaatcaaagagatcgatttaggacccgcttgcgagagacagaagaggaaataaggcagttgaaggagaagattggggtattaacagtggaactggaaaagagcaaagctgataatgtcaaactatatgggaagattcgttatgtacaagactataatcatgagaaagtgatttctaggggttctaaaaagtatgctgaagatcttgaaagtggtttcgcgtcagatgttgaatctaaatacaagaagatatatgaagatgatattaatccttttgcttgattctcaaaaaaggaaagggatcaaagatacaaggagttgggattcaaggacagaattacacttaacagtggacgttttcttcttggcaacaagta

SEQ ID NO: 9887 - DNA, 400 bp, Glycine max
  Clone ID: LIB3092-035-Q1-K1-G10
ccaggatgtaggttttctgtacaacagagacttggaacatacttctacaagggtataatgtatggtgctgttggatttgcatgtggtattataggccaaggcattgcaaatatgatcatgactgcaaagcggagcataaagaaatcagaagaggacatacctgtgccacctcttgtgaagagtgctgctctttggggcgtctttctagccgtttcttccaacacgcgataccaagtcgtcaatggactggaacgtttggttgaagcttcaccaatggcaaagcaggttcccccagttgctctggctttcacagttggtgtgcgttttgccaacaatgtgtatggtggcatgcaatttgttgactgggctaagtggaagtgtgtgcaataactcctttatc

SEQ ID NO: 9888 - DNA, 384 bp, Glycine max
  Clone ID: LIB3092-035-Q1-K1-G11
cccacgcgtccggatccatcagcttgggaggataagaagtgccctggtgaatctcgtttccccgctcaggtacgagtgataactaggaaaacttgtgaaccactggaggaagattccttcaggccaatccttcaccactatgatggtcccaagttccgtcttgagctgaatgtgcccgaggcgttgtctcttctggatatttttgcagaacaagacaccttcaatgacactttcgaggctttgccggcataaaaggagattaatagcaaataatgcaacaagaatatcactcacagagacaatagataattagaggtttcggttggtttgaaagttatattaagtatggacttaagaagagagtccgaaagacaaaacaaaatg

SEQ ID NO: 9889 - DNA, 302 bp, Glycine max
  Clone ID: LIB3092-035-Q1-K1-G12
gtaacgcgtacggatccatcaccacggcaagtttcgacgtgctctgacgaatctctaatgcaggcgtgtttacgactgagatctgggattacttgccaaccactggcacaagagagcatcactgcaaagctcgtaccattatgatagtacaataggccatcttgagctcaatatgcccgatgcatgatctcttctgcacatttttgtataacaagtcaccttcactgacactcatgaggctaaggcagcataacctgagattaatagcttaccattcatcaagaatattactcacagagaca

SEQ ID NO: 9890 - DNA, 479 bp, Glycine max
  Clone ID: LIB3092-035-Q1-K1-G2
cccacgcgtccgaatttctgccagcctcaaaaaaagacttgctctgcctctgccactctctgaggtaggactacactgccatggctgcctcagtctccactgttggagctgtcaacggagctccactgagcttgaacagctctggagctggagcttcagttcccagttcagccttctttggcaccagcttgaagaaggttattgcctcaagggtccctaacgtcaagatttcttctggaagtttcaaaatcgttgccgcggaaaaagagattgatgagaaacaacagacagacaaggacagatggaaaggtcttgcctatgatgtttcagacgaccagcaagacatcacaagagggaagcggtttggttgattccctcttccaagctccacaggatactggaactcactatgcaatcatgagctcttatgagtaccttagcactggacttaaacagtacaacttggataacaacatgga

SEQ ID NO: 9891 - DNA, 404 bp, Glycine max
  unsure at all n locations
  Clone ID: LIB3092-035-Q1-K1-E9
gttctacacaaggccaaataggagtgacatccacctctcagcagaggaagaagccaccatagaggcaaagaccagagactactttgatggggttgcaccacaacgccacacaaagcctcaacgaagtgagtattcagctcaatatgtggatgctttctccaatgcccatcactcttcttcttcttcttctataccagaattcatgcaattccaacgcctcgagaatgatccccaagagaagaaattggagtacaatggaagtcaagtaccggaagaatttgtggaaacagagtattaccaagatctcaacagcgtggacaaacaccaccatacgacgggaacaggatttatcaaagtagagaaaaatgganatgactttcacatagaaccagataatgacactg

SEQ ID NO: 9892 - DNA, 465 bp, Glycine max
  unsure at all n locations
  Clone ID: LIB3092-035-Q1-K1-D5
gtttgctggaaatggagtccaagtctcacctgttactccatctgctgatgttactgcttacttcagctctgagcattcgagcagctcgattgattattctgacctcggatggggtgaacaagtccccaagacacccgagatctcatccatgctttctgctgctcctttggacggtgaatctcagtttgtgcagggtgctgctgatcagaatcagaagaagaacaacctgctggatatggcatctgtgcaagatgattctgcaaaaactctttctgaggagcttgcagacattgaatcccagctgaagttctttgagaccccttcttttcttgatgaagcctgagctgatgctgcattggcgtctttgctcagtgaagatgcatctcaggatgctgctggaaaccctatgaacctttggagcttcgacgacctgccttncatggcangagtcttctgaacaccttt

SEQ ID NO: 9893 - DNA, 470 bp, Glycine max
  Clone ID: LIB3092-035-Q1-K1-D6
gccagctgtaaatggagtccatgtctcacctgttactccatctgctgatgttactgctgacggcagctctgagcattcgagcagctagatagattattctgacctcggatggggtgaacaagtccccaagacacccgagatctcatccatgctttctgctgctcctttggacggtgaatctcagttcgagcatggtgctgctgatcataatcagaagaagaacaacctgctggatatggcatctgcgcaagatgattctgcataaactctttctgaggagcttgcagacattgaatcccagctgaagttctttgagaccccttcttttcttgatgaagcctgagctgatgctgcattggcgtctttgctcagtgaagatgcatctcaggatgctgctggaaacgctatgaacctttggagcttcaacgacctgcctatcatggcaggagtcttctgaacaccttcatatc

SEQ ID NO: 9894 - DNA, 292 bp, Glycine max
  Clone ID: LIB3092-035-Q1-K1-D7
cccacgcgtccgaccactcgttcgttctacctacttcttctccttttgtgcaacttagctcgcggtggataaaaatgaggataaagaacatttctcctctgatgaaaatgtaagaacaataggtttggaggaacctaatccaatggaatttgacagcgaagtatcatcatcagcgtcttatagtcctattcctgaatctactattgatgcagaacatgctgaagattctgatactgcagaatgctttgataatcatgcactagtagctttagttccagctttcgagcaaaat

SEQ ID NO: 9895 - DNA, 472 bp, Glycine max
  Clone ID: LIB3092-035-Q1-K1-D8
gtttcacttcagccttatccggtttagggtttcggtttttgacccaacctttgacgtatcgaaaccttaagtttcggatcaggtctgagcaatctggttggtagaacctttggtcttagagagtcaagttttatgtctgaattagacgatcaaattcctactgccttcgatccttttgctgatgcaaatgctgatgactcgggtgctgggtcaaaggagtatgtgcatattcgcgttcagcagcgaaatggaaggaaaagcctgacaaccgttcagggattgaaaaaagaattcagctataacaagatactaaaggatgttagaaaggagtctggtgccatggaaccagtggtcaaggaccagaacctggacaggttattcaacttcaaagtgatcagaagaagaatgtttctaccttcctggtccaagctggtatcgtgaagaaggagcatatcaagattcatggtttctg

SEQ ID NO: 9896 - DNA, 386 bp, Glycine max
  unsure at all n locations
  Clone ID: LIB3092-035-Q1-K1-D9
atcaactgacttgagtggtcatctggactttcatcaattttcaaagttgaaaaatctaaatgacctcgaactttctcacaatagttttctctctattaactttgatagtattgctgactatttcttatcccccaaccttgaatacttaaatttatcttcctgtaatattaatagtttccctaaattcatagcaccacttcaaaatcttatccgactagatgtttctcataacaacattcgtggaagcattccccagtggtttcatgagaagctcttgcactcctggaataacattactcatattgatctcagtttcaacaaattgcaaggagatctnccaattccacccaatggcattagatccttttagtctcaataatgagctg

SEQ ID NO: 9897 - DNA, 459 bp, Glycine max
  Clone ID: LIB3092-035-Q1-K1-E1
cccacgcgtccggctacgaagggctatatagcataaacatttgagtcttcattgcacaatggcgacctcttccattaacgggtggtgcctctcttccatctccccagccaaaacctctctcaagaaggccacattaggcccttctgtcttcgcaaccgttagcactccttcttctccttcttcttcttcttcttcttccttcccttctctcattcaagacaggcctgtctttgctgcccctgcccccatcatcaccccaactgtgagagaggatatggcaaaggaatacgagcaagctattgaagaactccagaaattgttgagggagaagagtgaactcaaagccacagctgctgagaaagtggagcagataacagcttctctgggaacatcatcatctgatggcatcccatcatcagaagcctcagacaggatcaaagcttggttcattcacttcaa

SEQ ID NO: 9898 - DNA, 442 bp, Glycine max
  Clone ID: LIB3092-035-Q1-K1-E10
gctacttactactatagtgtctgattcacaggccagagggcaaagattttgagcacaatggcctcgacacaatgctttttgcaccaccacgccctcaccactccagctagagcttcaacacagcgcctagttgtgagcaccaaaccaaaccacattgtttgcaaggcagcacagaagcaggttactgtccaagagggtgaggacactactactggccttgtctctcgcaggttggccctcactgtgctcattggtgctgctgctgttggctctaaggtggcacctgctgatgcagcctatggagaagctgccaatgtgtttggaaaaccaaagacaaacacagacttcctttcatacaatgggaatggattcaaactctcaattccctcaaagtggaacccaagcaaagaggttgagtacccaggtcaggttcttagatatg

SEQ ID NO: 9899 - DNA, 404 bp, Glycine max
  unsure at all n locations
  Clone ID: LIB3092-035-Q1-K1-E11
ggacaagatttcgtcatggacctttcttccaaaagaaaatggggaagatatacaagtattgagatatgagcatggccagaaatatgacccgcattatgattacttcactgataaagttaacattgctcggggtggacatcgcatcgcgactgttctcatgtatctcactgatgtagccaaaggcggtgaaactgtcttcccttctgcagaggaacctccacgtcgcagaggtgctgaaacaagcagtgatctttctgaatgtgccaagaaaggaatagcagttgttctcttcatcttacctggcattgcatttgcgtagtgaaaccacgtagaggggacgcacttcttttcttcagtcttcacacaaatgctaccccaaacactagcagtctncatgctggatg

SEQ ID NO: 9900 - DNA, 357 bp, Glycine max
  unsure at all n locations
  Clone ID: LIB3092-035-Q1-K1-E12
attttcacactcaaccctttcttcatccttttatctcgtctctgccaaaacgatgccgtttgctctggagaataacggaggagttacgatcggacggtcctccttcgcttactgcgtcgcgatctgcgatcgtgattttccggaggatgattccgactccagctccgactcctccatcggaaggaacagcatctcgtctgaagattcctncgacccgggaagacgccgtcgaagttgatgttcagagttacttcaaaggccctttggataccatcaatgatctagaggaagatttacccgtcaagaaaggcatatctaagttctatagcggcaaaatccaagtccttcacaaagctt

SEQ ID NO: 9901 - DNA, 468 bp, Glycine max
  Clone ID: LIB3092-035-Q1-K1-E2
acgagagcgagagcgtgatagagagataatgcgttcttatggcttaaccgtaccgataggcgacgaccgcttctgcgtgcccaccgtatctcaggtgttctttaggcccaacaggcccattaaccgaatcgcgtttcccaaggccaccctcaagaacgacggcttcgtggtggacctgagcttctacgaccttctgggaataccggaatccggttcggtaaccgagatcaagaacgcctacaagcaactcgaccgaaagtaccacccggacatgttgccttcgggtccggtcgaggagttcacaaagaggtttattcaggtgcaggaggcctacgaaaccctgtctgatcctttcagaagagctatgtaccacaaggacattgccaagggcattaacttggccttcaacgcctcgaaacgctataattaccacgatcaggtagttgaacaaaaaattgaatggaaagc

SEQ ID NO: 9902 - DNA, 393 bp, Glycine max
  unsure at all n locations
  Clone ID: LIB3092-035-Q1-K1-E3
gctacctcaacgtccccaacactgtgttcctgttcttcttcttcgatggcggcaacctcaacgtcactggcttctcaactctacattggcctgcgccgcccatgcctcaagcttgattctttcaattctcaatctttctctgtcttcgaccccaatcttcgcctatccctctctcctcccagaccctcacgcgccatcgtcgccatggcaggcaccggcaagttctttgttggcggcaactggaagtgtaacggaacaaaagactccatcagtaagcttgttgctgacttgaacagtgcaaaattggagcctgatgttgatgttgctgtcgcacctccctttctgtacattgatcaagttgaaaactcactcactgagaggattganatatct

SEQ ID NO: 9903 - DNA, 427 bp, Glycine max
  Clone ID: LIB3092-035-Q1-K1-E4
acccaggcgtacgcatacgagagcgacagtgtcatcgagagattatgcgttcttatggcttaaccgtaccgtgaggcgacgaccgcttctgcgtgcccaccgtctctcacctgttctttaggcccaacaggcccattaaccgaatctcgtttcccaaggccaccctcaagaacgaccgcttccttctggacctgagcttctacaaccttcttggaatacctgaatccggctcgctaactgagatcaagaactcctacaaactactaccccgaaagtaccacccggacgtatctccttcgggtctgttccaggagtacacaaagaggtttattcacgtgcacgaggcctacgaaaccctgtcttaacctttcacaatagctattgactacaaggacattttcaagggcattaactttaccttcaacgc

SEQ ID NO: 9904 - DNA, 304 bp, Glycine max
  Clone ID: LIB3092-035-Q1-K1-E6
agagcgagagtgtgatagagagataatgcgttcttatggcttaaccgtaccgggaagcgaccaccgcttctgcgtgcccaccgtatctcaggtgttctttaggcccaacaggcccattaaccgaatcgcgtttcccaaggccaccctcaagaacgacggcttcgtggtggacctgagcttctacgaccttctgggaataccggaatccggttcggtaacggagatcaagaacgcctacaagcaactcgcccgaaagtaccacccggacgtgtcgccttcgggtcgggtcgaggagtacacaaag

SEQ ID NO: 9905 - DNA, 374 bp, Glycine max
  Clone ID: LIB3092-035-Q1-K1-E7
cttctatccctttcccattctctccctctctgccccttgctcttcaaccctaaccctaactctaattccctgttcgtcctcttgacttccccctctctcgtacccttctccatctacctacggcttcatgacctcgagggagaagttggacgtggcgcggcagctcgccaagctgggcgttgacatcatcgaggccggcttgcccgccgcctccatggacgactgtaaggtcgtgaaaatgatcgtccaagggtcggaaatgccgttgacgacggctacgtccccgccatctgcggactctcccgctgcaacgagaaggacatttgaactgcctgggaagccggtaagtacgccaagaagcccaggattcacac

SEQ ID NO: 9906 - DNA, 454 bp, Glycine max
  Clone ID: LIB3092-035-Q1-K1-E8
atagcatccgtgtgacatacagtcaatgtatgccaatggctctacaaccctaacccgagctgtaagcccctgtgcgccctcttgacttccccctctctcgaaccctaatacatctacctacgccttcatgacctcgagggacaagctggacaacgaccggcatgtcgccaagctgggctttgacatcatcgaggcactgcttcacgccgcctccatgaactactgcaagatcgtgaaaatgatcgtccaagggtaggccctgccggacacgacggctacggtcccgctatctgcggactctcccactgcaacgagatcgacatttgaactgcctgcgaggccgataagtactccaagaggtccaggattcacacccatatcgccagcaacgcccttcacatggagtacacgttgagaatgtccaaagacaaagtcgtcaacattacccgcaata

SEQ ID NO: 9907 - DNA, 249 bp, Glycine max
  Clone ID: LIB3092-035-Q1-K1-D3
acgcgatcgatcgcactgatcgagatgctggggattaccatgaatgtttccgctcgtgccaaagccgacggggccaactacgacttgggtccctcccaagatgactctgtcctcaaacacaggctactaacgctcaccacacccaccaattgtgaccctccctttaataatctctataacaagttcaccacattcgtccccgaagcctccaaatactaatacctctactaccactactgtgactatctc

SEQ ID NO: 9908 - DNA, 329 bp, Glycine max
  Clone ID: LIB3092-035-Q1-K1-B8
tttccgtcacctgttgtattaattgtattttgcctttatcggttgccctctctttaagtgctggctcctattttatgtgttctctctctcgttttttgaatacgaacattaaacaaccgtgaagaagcagttaaagcaaactgcgaaacgctgaacatttgaagcaaattaaaaaaaataaaagacaagaaatcatcgatgctgtggacattgtgtttgacttctaagaagaatggaaactgtgtgtttaaaatctgggatggttcccacgatctctattagtgggtcgctggatgcacgtgccaatccttctcaggtgagcacggtgg

SEQ ID NO: 9909 - DNA, 429 bp, Glycine max
  Clone ID: LIB3092-035-Q1-K1-B9
ccaattttcaccccccaactttgaggatgctagtccacaaaatggtcaaacaaatcctagtggcttaaatacttcaaggggtacaaaacggaagagaaatgtggttgagttagttgaagatcaatatgagcgaatgaatgaaagtatcatgacaattgctgaagctttgaaagagggaaattctgtttctaaggagctgcaccaagttgcagagcgtcaagttgaagttgctaaaagacaagttgcagtcattgaaaaacaagttgaaattgctgaaaaacaacttactgtgatacaacaaactcgtcctcgtcattattcagaatctgatgtatgggatcttttagaggaattaagagtcacagatccatttcgcatgaaggtttataaccatttatgtgataatgagcacaaaaaacgtaagctttt

SEQ ID NO: 9910 - DNA, 327 bp, Glycine max
  Clone ID: LIB3092-035-Q1-K1-C1
acgtttcggtcacctgttttattgatttattttgtctttctcggttgccctctctttaagtgctggctcctattatatgtggtctctctctcgttttttgaagacgaacattaaacaaccgtgaagaagcagttaaagcaaactgcgaaacgctgaacatttgaagcaaattaaaaaaaataaaagagaagaaatcatcgttgttgtggacattgtgtttgttttctaagaagaatggaaactgtgtgtttaaaatctgggatggttcccacgatctctattaatgggtcgctggatgcacgtgccaatccttctcaagtgagcact

SEQ ID NO: 9911 - DNA, 471 bp, Glycine max
  unsure at all n locations
  Clone ID: LIB3092-035-Q1-K1-C10
ctcgatcactctcacgcgctcctatattcgctcctccaccgtcgctctctcgaacagcgcacggcaccatcttcatcacatggcaaacgcagcatctggtatggcagtccatgatgactgcaagttgaggtttttggagctgaaggcaaaaaggacacaccgtttcatagtttttaagattgaggagcagcagaagcaggtcattgtggagaagcttggtgagcctgcccagggctatgaagatttcactgccagccttcctgctgacgagtgccgttatgctgtttatgattttgagtatctgactgaagggaatgtccctaaaagcagaatttttttcattgcgtggtcccctgacacatcaagggtgaggagcangatgatttatgcaagctccaaagacagattcaagagggagctggatggaattcaagtagagttgcaagcaactgatcctactgagatgggtct

SEQ ID NO: 9912 - DNA, 297 bp, Glycine max
  Clone ID: LIB3092-035-Q1-K1-C11
acgctgggagcaaacagtacgacttcttgaagcatgatttggaatcggctaacaggatcaagacgactgctttctaactgcaagggcacaggcccatgtacactaccagccatgaaaatatgaatgctgctttaacaggaaagatgcttgagcacttggaacctccgttagtaattaacaatgtgacactttccctatgctgtcatagatcatatgattctacaaaatttgtccaatgaacaacttcacttgtggatttaacgactgtcacaatacatgctacaaaacttgttatac

SEQ ID NO: 9913 - DNA, 367 bp, Glycine max
  unsure at all n locations
  Clone ID: LIB3092-035-Q1-K1-C4
acgnccacgcgtccgtatgctttgagacccttaatcctatccacaagagcactgtttctgatgatgaagatgatattgagtttgtgggttcaaggaccaccaatcctaccacttgtaatggttcaggcacctctcaaatctttgacattatagggcattttgctcagcccaatcccggtgcagtcctgccaaagacaccaattgtttgcaagccatcagaaaatgccattgaactggccatcaagatagccaaccttaacccacaaagaaactttgttctttgaggacaatacccgcaacatacaaactggaaaacatgtggggctttacactgtgctggttggtccatcacaaaaattttaagggg

SEQ ID NO: 9914 - DNA, 402 bp, Glycine max
  Clone ID: LIB3092-035-Q1-K1-C5
cttcaaaccccaaactctcattcttcatcggatagcccgtcacatattcttaccacggcgctgccaccaccaaattatgctcattcaaacaaggcacaattaccatgtacttaaccctacccaactaccacctccagtccttcaaattccagcccatcaaagaatccatcgagtcacgggaaatgacacgccattacatgacctacatgataacctactccgacaccgacatcataatcgtcgtatcctgttcatccgggctctcctgcacgtactatctcagcaagaacctcgacgtgagcgtcgccatagtcgatcagacagtgagccccatctgcagcacgtatctatgatgacagctcttctactcgacggtggtcctcatgcctgcgcacctcttac

SEQ ID NO: 9915 - DNA, 388 bp, Glycine max
  Clone ID: LIB3092-035-Q1-K1-C6
cggacgcgtgggtggcagggggctttcactagttaatggagttttgcatgtttcagggttgggccctgctttaatagaaagaaaaaaaaaaaacagtaataaaagaggaaaaattggatagtctcttttgatttgaagctggtgtgtaattatgtaatagacccaccaagtgctacatttgtaaccttttgtagcacccactgaacatagtaattgcagagtttggtgggaattgtacataattgcagtggttggaacttcttggaagacccttcctcttatataattttagtctgtttcagtgttcagaggaatgtggtgattaaggatgagtcttagtttaagactttacatcaattaatgataataaggaaatgctactttttac

SEQ ID NO: 9916 - DNA, 431 bp, Glycine max
  Clone ID: LIB3092-035-Q1-K1-C7
ctctcattctgggaaaatgatcattagcactgagtggggtgctttctcaaatggtctcccttgaaccaagttcgataggggaatggatgctgatagcatcaatccgggcgagcagatctttgaaaagacaatctcggcaatgtatctaggtgatattgatagacgagtgctgctggaaatggctgaagagggtggcccgtttggaatatctgtcccgcagacactatctacaccattcatactcgggacctcatatctatgtgccatgcaataggactgatctggcgaagtacatgcacgagggtctatgctatacgatgaatcatggtgtgaatacaattgaagcggaagataaacagctgtagatgcttgtgagactattgtaaagcgaggcggcagcttagctggtgcaggaatagaggggatactac

SEQ ID NO: 9917 - DNA, 468 bp, Glycine max
  Clone ID: LIB3092-035-Q1-K1-C8
ctaaaaccatctcaactaagggcatgctagctgtatacaatgctttatctgaagatgagaaaagggaatttgagaaggcttatagtgcttcttattatccttgcatggaaattctgtatgagtgctatgaggatgtagccagtggtagtgagattcgcagtgttgttctggctgggcgtcgcttttatgagaaagagggtctacctgcttttcccatgggtaacattgatcaaacccgcatgtggaaggttggtgagcgtgtccgatctacaagagcagccggtgatcaaggcccattatatcctttcacttgttgtggtctttgggcattgattattgcccaaattgagatccttaagaagaaagggcattcctacttggaaatcattaatgagagtgtcatcgaagcaattgactctttgaatcctttcatgcatgctcgtggtgtttctttcatggttgataact

SEQ ID NO: 9918 - DNA, 424 bp, Glycine max
  Clone ID: LIB3092-035-Q1-K1-C9
ctgggagcaaacagtacgacttcttgaagcatgatttggaatcggttaacaggagcaagactccttttgtggtggtgcaagggcacaggcccatgtacactaccagccatgaaaatagggatgctgctttaagaggaaagatgcttgagcacttggaacctctgttggtgaataacaatgtgacacttgccctttggggtcatgttcatagatacgagagattttgtccactgaataacttcacttgtggtgttaatgcgggtcacaatgcaggggacaaaaaaggatatactgttcacattgtgatcggcatggcagggcaagactggcaacctgtctgggaaccaaggccagaccatcccgatgatccaatctttccacagccaaaatggtctctgtaccgcggaggcgagtttgggtacac

SEQ ID NO: 9919 - DNA, 426 bp, Glycine max
  Clone ID: LIB3092-035-Q1-K1-D1
cgattgattgcagtgatcgagatgctggggaagacgaggaaggtttcggcgcgtggcgaagccgtggcggcgaactacgccttcggtccctccgaagatgacgtaatcatcaaacacaggcttctcacgcgcaccaccaccaccaggggtgaccctcccttgaagaagcttcagaagaagttcaccacgttcgtctccgaagtcgacaaagacgaagacatcaactacaacgactgcgagaagctggctagagcgtttctgcaggagctgacgacattcgaaattccgcttctgaagagcaaggcgattgtggaggcgaacgttagggagaaggagaacttcaacgagttgaaggaggaaatgaatcgccagatcctgctggcgcagtccgacattgaggatctcaagaagcagcttgaggagagc

SEQ ID NO: 9920 - DNA, 372 bp, Glycine max
  Clone ID: LIB3092-035-Q1-K1-D10
cttttggggggttgtgaatttgtgtcttcttggctcccaacccacacgcaacgcaaccatagaatggaatgaatgaaggcaaagcttatacttataaaagagagatagaaattggttgtgaaaaacagaagcactttgtttctaagtaaaaggaatcttcagctgccatgtttcatcgctggagcaattctcatcaacaggatcagggaagcagcgagctttatgctgaatccaagattaaagagctgaagggtgttatcggacccttatctggacgcagtttgacgtattgcactgatgcatgttttaagagatatttggaagctcgaaactggaacgtagacaagtccaagaagatgttggaggagacac

SEQ ID NO: 9921 - DNA, 405 bp, Glycine max
  Clone ID: LIB3092-035-Q1-K1-D11
caagtttgagaactaagaaggagaagcaaatggcttcctcaatgatctcttccccagctgttaccactgtcaaccgtgccggtgccggcatggttgctccattcactggcctcaagtccatggctggcttccccaccaggaagaccaacaatgacattacctccattgctagcaacggtggaagagtgcaatgcatgcaggtgtggccaccagttggcaagaagaagtttgagactctttcctacctgccagaccttgatgatgcacaattggcaaaggaagtagaataccttcttaggaagggatggattccttgcttggaattcgagttggagcacggattcgtgtaccgtgagcacaacatgtcaccaggatactacgatggacgctactggaccatgtgga

SEQ ID NO: 9922 - DNA, 282 bp, Glycine max
  Clone ID: LIB3092-035-Q1-K1-D12
attgtcacactcctccgtttgttcatcctatgatctcgtctctgacataacgacgacctttgctcgggataaaacggccgagccacgatcggacggtccttcattgttactgcgtccatgatctgcgatcgcaattttccgtacgacgattacgactccatcttcgactgctacatcggaaggaacaccatctcgccggaagattcctccgaccgggaagacaccgtcgaaactgatgttcacagttccttcaaaggcccttcgcataccatcaatgatcta

SEQ ID NO: 9923 - DNA, 281 bp, Glycine max
  unsure at all n locations
  Clone ID: LIB3092-035-Q1-K1-D2
cgatcgcttgcagtgaccgagatgctgcggatgacgaggacagtatcagcgcgtgtcgaaggggaggcgacgaactacgccttcggtccctgcccacatgacctactcatcaaacacaggcttctcacgcgcaccaccaccaccaggggtgaccctcccttgaagaagcttcacaagaagttcaccacgttcgcatccgaagtcgacaaacactaagacatcaactacaacgactgcgagaagctggctagagcgtttctgcangagctgacgacattcga

SEQ ID NO: 9924 - DNA, 427 bp, Glycine max
  Clone ID: LIB3092-035-Q1-K1-B7
tttcggtcacctgttgtatttatttattttgcctttttcggttgccctctctttaaatgctgcctcctattttttgtgttctctctctcgttttttgaagacgaacattaaacaaccgtgaagaagcagttaaagcaaactgcgaaacgctgaacatttgaagcaaattaaaaaaaataaaagagaagaaatcatcgatgctgtggacattgtgtttgttttctaagaagaatggaaactgtgtgtttaaaatctgggatggttcccacgatctctattagtgggtcgctggatgcacgtgccaatccttctcaagtgagcacggtggggcgcgccgacggggataaaccgacgcaaaggtcggtgttttcgaggttttccttttggtaccctttggaatctctctggcctcgggggaacaacagca

SEQ ID NO: 9925 - DNA, 62 bp, Glycine max
  Clone ID: LIB3092-035-Q1-K1-A12
gctcgtacgtccacgcttactctaacgcatccaacctcatttacgcatacatgcaaattctt

SEQ ID NO: 9926 - DNA, 373 bp, Glycine max
  Clone ID: LIB3092-035-Q1-K1-A2
atcaagactggtctgccctatatctatcacagcaaggccagcaacccatttgtgaacttgaggaaagagtacaaaggcatattctggcaagaagacattatcccgttcttccagagcattgttcttcctaaagaagctaccactgttcagaagtgctacattgagcttgccaagcaagtcaaggaaaagctttccaaggtagatccttactttgacaagttggcagatgccatggtcacttggattgaagcttgggatgagcttaaccctggcggagcatcagtggccaatggcaaagcgtgaatcggttttgggtaaactgattaccagccccggacttggaaaaggaaccatttatataccggattttttt

SEQ ID NO: 9927 - DNA, 266 bp, Glycine max
  Clone ID: LIB3092-035-Q1-K1-A3
acgatcaagactggtctgccctatatctatcacatttaggtcttcaacccatttttgaactctaggaagaggtcaaaagcatgttctcccacgaagacattatcccgttcttccatagcattgttctttctaaagaagctaccactgttcataagtgctacattgagcttgccaagcatgtcaacgaaaagctttccaaggtacatccttactttgacaagttgtcagatgccatggtcacttggattgaagctagtgatgagctt

SEQ ID NO: 9928 - DNA, 266 bp, Glycine max
  Clone ID: LIB3092-035-Q1-K1-A4
gccacgcgtccgggagcttactaagtgcctaaccgatcaaaggaatgcttgcaaagaggcccgagacaacattgaagatgcttataaccttatcatgaaactggtcactgaaagagagattttaggtacaaaaggtctgaattttcaagaggaattggcttctgccaagggtgagatatcgcgcttgaagagtcgaatcaatgcttcagaagttgctgctaacaatgaccacagtgcagacagatggatgtgaaaacaaggtcaat

SEQ ID NO: 9929 - DNA, 424 bp, Glycine max
  unsure at all n locations
  Clone ID: LIB3092-035-Q1-K1-A5
gtttaagaggtggcatgcagattttcttcaagactttgacgggaaagaccatcaccgtgtaggtggagagttcagataccatagacaatgtgaaagccaagattcaagataaggagggtatccccccagaccagcacaggcttatctttgctggtaaacagcttgaagatggacgaacccttgcagattataacatccagaangaatctaccctgcacttggttttgaggcttcgtggtggcatgcaaatctttgttaagactttgaccggacaaacaataactttagaagttgaaagttctgataccatcgataacgtgaaggcaaagatacaggacaaagaggggattccaccagaccagcagaggcttatctttgctgggaagcatctggaagatggtcgtactcttgctgattataatat

SEQ ID NO: 9930 - DNA, 467 bp, Glycine max
  Clone ID: LIB3092-035-Q1-K1-A6
cccacgcgtccgcccacgcgtccgaaatggccaaatcaatcaaattctttgagttgaacacaggggccaagattccttctcttgggttagggacttggcaagctgaacctggtgttgtagctgaagctctcaccacagccattcaggttggatacaggcatattgactgtgctagtgcgtataagaatcaagcagagattggttctgctcttaagaagctttttgatgatggtgtggtgaagcgtgaggacttatggatcacttccaaactctggtgttcagatcatgcaccagaagatgtgccaaaagcattggataaaacattacaggaattgcaacttgactatcttgacctctatctgatccactggccagtccgcatgaaaagtggaacatttggactcaataaagaatatcttgagcaaccagacattcccaatacatggagagcaatggaggcactctat

SEQ ID NO: 9931 - DNA, 409 bp, Glycine max
  Clone ID: LIB3092-035-Q1-K1-A7
acgcccacgcgtccgcccacgcgtccgatttggctttatcaatcaaattctttgagttgggcacgggtgccaatattacttctcttggcttagggacttggcaagctgaacctggtgttgtagctgaagctctcaccacagccattcaggttggatacaggcatattgactgtgctagtgcgtataagaatcaagcagagattggttctgctcttaagaagctttttgatgatggtgtggtgaagcgtgaggacttatggatcacttccaaactctggtgttcagatcatgcaccataagatgtgccaaaagcattggataaaacattacaggaattgcaacttgactatcttgacctctatctgatccactggccaatccgcattaaaagtggaacatttggacttaa

SEQ ID NO: 9932 - DNA, 469 bp, Glycine max
  Clone ID: LIB3092-035-Q1-K1-A8
attacccttaccatcactgtcaccgcacattccttcggtgacagacgcgagcttctgcggaggcagcttcacaacggtatcggcaaacagacgcgtgtcctcctcggtgttcccttcgggcacatccacgacgtacgattccaaaacaacggtccagatcttccgatcgcgttcgaacccgtgcaccgaggtgactgacctatagttcctgagcctatggtcgccctcgacgatggtgaagccgatgacatgtctgacgtcgtcgagcaggtcaagcctctcagagcttgcggcaaccggtagccccgagatgacctggacgttgtgcgtggaccccacggcgagctggaagccctaattgacgtggcagctctttatgaagtgcttgtgagcctgcgggttgtccaagcatcgcacgacggtccacaccgtgtgcagaggcacgtggatacgctgaactaggagggaa

SEQ ID NO: 9933 - DNA, 360 bp, Glycine max
  Clone ID: LIB3092-035-Q1-K1-B10
ccaaactcaagttcaccaaaagcaaccacaacaagcacttctcttatttcctaccacaccctattacagattcacaagcgcagacacttcaaatggctctggaagctcttcaatcacccagaactgccactccatcgtttagtccctttgaagaaaccaacctcagttacttggagacaccgtggaccaaaggaaagcgttctaagcgtagccgcatggagcagcaactgcaacactcttcatgcaccgaaggagaataacctggtctctggcttatcatgctcggttaagggcgcgcccgccgtgttcccggcggcaagcctgctttcttcgacaacaatttcgcgccggttcccggcg

SEQ ID NO: 9934 - DNA, 478 bp, Glycine max
  Clone ID: LIB3092-035-Q1-K1-B11
ccaaactcaagttcaccacttgcaagctgctctggcacatcacggacatactaccacacacgagtggagtactacaagcgctgccactcgagatagctctgtaagcgcgtcagtcgcccatcactgtcaccgaatgaatgaaagcctcatgacaatcgctgcagctttcaaagagggcacctctgaccataaggaactgcaccaagctgcacagcgtcaagctgcagctgctacactacacattcccctcattgaaaaacatgtcgaaattgctgaacaacatcttactgtgatacaacaaactcgtcctcgtcattattcacaatctgatgtatggcatcttctagaggaatcaagagtcacagatccatttcgcatgaacgttcatgaccatttatgtgataatgagcacagaacacgtaagcttcttggcctaccacctgatatgagaggagaagctctcattcaaatgatgact

SEQ ID NO: 9935 - DNA, 369 bp, Glycine max
  Clone ID: LIB3092-035-Q1-K1-B12
cgtacgctccatcactcttactcgctcctatattcgctcctccaccatcgctctctacatcaaggacgggcatatacaaatcacatggcacacacagcatctggaatggcagtccatgatgactgctacttgaggattttggagctgaatgcaacaaggacacaccttttcatagtttttaacattgacgatcagcataagcacgacattgcggagaatctagcagcacctgcccagggctatgtagatttcactgccagacttcctgctgacgagtgccaatatgctgctcatgatcttcaatctctttctgaacgcaatgtacctacaagcataattcatttcattgcggggtcccctgacacatca

SEQ ID NO: 9936 - DNA, 426 bp, Glycine max
  Clone ID: LIB3092-035-Q1-K1-B2
acggaaacaatggccaatgtttcaattccactcccacgaaacggtttctccaaacccaatgactggacaaaacgcccatgtttcaccccttcagcttcaacactcagaatttcttgctctggagtggctgagtttgatggatctcatcagaaaaaaggaggtttgtttaatttcaatggaatcaagggcgtggcttgtggtattcttgcagcttgtgctgttacttctgctgcatttcctgttactgctgctactcagaggcttcccccattgtcaactgagcccaatcgctgtgagcgtgcatttgttggcaacacaattggtcaggcaaatggtgtatatgataaaccattagatctccggcaatgtgatttcacaaatgaaaaaacccaccttaaggcggaagtccctgtcttctgcactcat

SEQ ID NO: 9937 - DNA, 434 bp, Glycine max
  Clone ID: LIB3092-035-Q1-K1-B3
ggcgaatcgtggaagttccagcgcaagatggcgagtctcgaactcggcagcgtggcgattcggacgtacgcgatggaattagtcaacgaggagatccacgcgcgactgatcccgatcatggaatcaaccgcgcgtggcgaattaaactccgtctgcgttttggatttgcaagatatactacgaagattctcgttcgacaacatatgcaaattctcgttcgggctcgacccgggttgtctcctaccgaatctcccagtctcggacctcgccgtcgcgtttgacctggcctcaaagctctgcgacgaacgcgccatgaacgcgtcgcccgttatttggaaactaaaacgacttcttaacataagatccgagaagaaactgagagaaacaattaacgtcgtaaacgacgtcgcaaaagagatgattcagccgagaag

SEQ ID NO: 9938 - DNA, 289 bp, Glycine max
  Clone ID: LIB3092-035-Q1-K1-B4
gaaacaatggccaatgtttcaattgcactcccacgaaacggtttctccaaacccaatggctcgacaaaacgcccatgtttcaccccttcagcttcaacactcagaatttcttgctctggagtggctgactttgatggatctcatcagaaaaaaggaggtttgtttaatttcaatggaatcaagggcgtggcttgtggtattcttgcagcttgtgctgttacttctgctgcatttcctgttactgctgctactcagaggctttccccattgtcaactgaacccaaatcgc

SEQ ID NO: 9939 - DNA, 398 bp, Glycine max
  Clone ID: LIB3092-035-Q1-K1-B5
gggctacgacctacgcgtgcgtcgaggaagtcagaccgcctgatggcgagtctcgaactgggcagcgtggcgattgggacgtgcgccatggaattggtcaacgaggagatccacgcgcgactgagcccgatcatggtatcaaccgcgcgtggtgaattaaactgcggctgcgttcaggctttgcacgatgtactacgaagattctcgttctgcagcatatgctgattctagttcgggctcggccagcgttgtctcctaccggatctcccaatcgcggacctcgacgtcgcgtttgacactggactcatagctgtgcgacgtacgcgccatgaacgcgtcgtcgcttattcggaagctgaaacgactcctcaacataggatccgagaggaaactgagag

SEQ ID NO: 9940 - DNA, 454 bp, Glycine max
  Clone ID: LIB3092-035-Q1-K1-B6
gaaacaatggccaatgtttcaattccactcccacgaaacggtttctccaaacccaatgactcgacaaaacgcccatgtttcaccccttcagcttcaacactcagaatttcttgctctggagtggctgagtttgatggatctcatcagaaaaaaggaggtttgtttaatttcaatggaatcaagggcgtggcttgtggtattcttgcagcttgtgctgttacttctgctgcatttcctgttactgctgctactcagaggcttcccccattgtcaactgagcccaatcgctgtgagcgtgcatttgttggcaacacaattggtcaggcaaatggtgtatatgataaaccattagatctccggcaatgtgatttcacaaatgagaaaaccaaccttaaggggaagtccctgtctgctgcactcatgtcagatgctaagtttgatggagctgatatga

SEQ ID NO: 9941 - DNA, 249 bp, Glycine max
  Clone ID: LIB3092-034-Q1-K1-F8
tgaagattctccttttcaaatttcaacctttttcccccaaaactaacaaacccctcttctggtcaatcattgcatggctcttcactgattctataataataatttcagattcgtttttcgttttttgttaccatggagttgatttcaggtctaccagaggacgtagcccgagactgtttgattagggttccctatgatcaattcccggcggttgcttcagtctgcaaaggctggagcgcggagattcac

SEQ ID NO: 9942 - DNA, 443 bp, Glycine max
  unsure at all n locations
  Clone ID: LIB3092-034-Q1-K1-G1
gngtttgttcaggctgcaagttttggaggatccaatattgatccaacggcttgngaggacaagaagtgccctggtgaatctcgtttccctgctcaggtatatatcatctcatctccaatcaaattaattttattatatctatgcacaaattatgctaatattaattttataaatttaattaaaatgtactgatgctgtaaaagtaaagttttatattgtccttcaaagtaaagttttatattgtccttcagtcaattgatatatcacatatcaattgaatgatttctgattaaatggcaatattgacggtacatgatgattaaactctaattgtattattacttgattatgttataaacttatgaattttgcatacatgatggttacaggttcaagtgattactaggaaagtttgtgagccactagaagaagattcctttaga

SEQ ID NO: 9943 - DNA, 372 bp, Glycine max
  Clone ID: LIB3092-034-Q1-K1-G10
catcaatctacaccgcaaaagaagtgacattcaagagggtcatgagtgttgtccctaaggtgtggaaaaggttaatgttgacctttctatgtgcctttgctgcttttttcatttacaatatcgtgaccatgttggttatgttcttgtcaatagtcacaatagggataagtagtggtggggttgtggttttggttttgataacggttttgtacttcattgggtttgtgtacctcaccgtggtgtggcagctagcaagtgttgtgaccgtgttggaggactcgtgggggattcgagccatggccaagagcaaggagttgataaaggggaagatggttttatccatattcgtctttttcacccttgtggcttctt

SEQ ID NO: 9944 - DNA, 288 bp, Glycine max
  Clone ID: LIB3092-034-Q1-K1-G12
ctctattcagcattgtttcctatccttcctgccgtacgtctaattatttagtatcatggggaacttcttgtggatgatgctacacttgttgcaaagttgtatactgtacgagattctggtgttatatttgcatttagtctagttgaaattgaggactaaaaaggcttcaatggttgggaaaatttagaactattacccgattgggggaggcaatgaagggaaaaaagatttacacaacgatctctatgcattatgtatattttattggaagaatgaagatttattttt

SEQ ID NO: 9945 - DNA, 456 bp, Glycine max
  Clone ID: LIB3092-034-Q1-K1-G3
cccacgcgtccgcacaacgtcaagccaccaaggacgctggtgtcatttctgggctcaacgtgatgcgaattatcaacgagcctaccgcggctgccattgcttatgggctcgacaaaaaggccactagctctggggagaagaatgttctcatttttgatctcggtggtgggacttttgatgtctctcttctcaccatcgaggagggtattttcgaggtgaaggccactgctggtgatactcacttgggaggtgaagattttgataacagaatggtgaaccattttgttcaggaattcaagaggaagaacaagaaggatattagtggaaatgccagagctctgaggaggttgagaacagcatgtgagcgggcaaagaagactctctcttccactgctcaaaccaccatagagattgattccttgtacgagggtattgacttctacacaaccattaccc

SEQ ID NO: 9946 - DNA, 245 bp, Glycine max
  Clone ID: LIB3092-034-Q1-K1-G4
ctcacgcgtccgcacgacgggaagccaccaacgacgctggtgtcatacgggggctcaacgtgatgcgaataatcaacgagcctaacggggctgacatagcatatgcgctcgacgcaagggccactagctcaggggagacgaatgttctaacttgtgatctccatggagggactccagaagtgtatgtactgaccatgcatgagagtatattcgaagtcaatgccactgctggtgacactcacttg

SEQ ID NO: 9947 - DNA, 399 bp, Glycine max
  Clone ID: LIB3092-034-Q1-K1-G5
ccgggccggcggacgcgcacgctcagagccaccgcggacgctgcaggcaaacttaccctcaatgcggggcgaactatctgcgagcctaccgcggctgccatggcttatgagctcgacacaaaggccactgcctctggggcgacgaatgctctcattttggatctccgtggaggcacttttgatgtctctgttctcaccatagaggagggtatttgcgaagtgaacgccactgctggagatactcactaggcaggcgaagatttctgacaacaggaatggcgaaccattttgatcacgaattcaagatgaagaacagcaaggatatcagaggcaatgccagatctttgaggacgtcgagaacagcatgagagcgatccaatacgactttgtcttccactg

SEQ ID NO: 9948 - DNA, 434 bp, Glycine max
  unsure at all n locations
  Clone ID: LIB3092-034-Q1-K1-G6
cttttattttagggttttgaaatttgtgatctcaccggtggatcgcttccggtctcgtttcaggtatcgagggaaaaatatggcggaagaacacagatgccaggcaccgcgcttctgcgccaacaattgcggtttctttggcagccctgccacgcagaatatgtgctccaagtgctaccgcgatttccagctcaaggagcagcaatcttccaacgccaagatggttctcaatcagtcgctggttccttcaccgccaccggcggtgatttctcagccgtcgtcttcttcttcggccgcggtagatccgtcatcggcggtggttgatgacgcgccacgcgaggcggaagaggttaaggcgccgcagcagaaccggtgtatgacgtgcaggcngcgcctggggctcacagggttcaagtgtcggtgcgggatgatgc

SEQ ID NO: 9949 - DNA, 413 bp, Glycine max
  Clone ID: LIB3092-034-Q1-K1-G8
aacgaacgcacggtcataacagctcatggtccttcggacaaagtggaactcactgatgatgcatatgagttcgctaagattatacgaaagcacaggctacatatcagagaaagagctgatcagtcattgactaatcatgaagaggaattagcctcggttgttgtgaacttgataaaggaaacctggcaccaggataggagtactgctaactagatcttgcaatatcaagccatgtgaattcctactgatgacaatgatcagcctttgacatggatgaacctgactttgctgctctacaacatatttgagctctgatagttgttgcctatgaaagtagtggatcttgcatcatcgtgaaaataacggctaaagcagtatctggaagtgttatttacctgtgatcagatcatgta

SEQ ID NO: 9950 - DNA, 272 bp, Glycine max
  Clone ID: LIB3092-034-Q1-K1-G9
gatgttctcattcttctccaagctgctgctactcttcctttctttcaagttggacagatcggtcaaaaaggtgaatgtcgtgatcaatctaatggaggtgttatccgcaatgttgatcgatggagcattccaaatttgttagaggaacaagaaggtgctacactgcttgtatccgccaagtttaatgtagtatctgcccgtaatatctaccttcagtttcaagagatcacaatccaagatataaatatttgtgaagagcttcaggctttaat

SEQ ID NO: 9951 - DNA, 331 bp, Glycine max
  Clone ID: LIB3092-034-Q1-K1-H1
cttctttgagtttgtatttgaatttcgtcttaccaacatgaactctagttgtaattagaaaagtaacacttatgaaactgcatgtaaattttgttgcttcatctcattttgcatttgaaagttgtcaactttctgacgggctttgcagaagcgggatcaatcggaataaactatggaagaattgcgaacgacctacctacaccggcgaaagtggtggagcttcttaagagtcaagggctgaaccgtgtgaagctctacgacaccgacgccaccgtcttaaccgcgtttgccaactcaagaatgaaagtggtggttgccatgccaaacgagc

SEQ ID NO: 9952 - DNA, 211 bp, Glycine max
  Clone ID: LIB3092-034-Q1-K1-H10
tcgactaatatggcaatgttgataggcattctgacgaatatggcaacccggatcataccggtatcttacttatgtagacaccaaaattgttgcaaactacaatcatgaccctaataatcaacataatattactgttatctatcccgagaaagacacctatagacatcattatggtcgtgaatactacggtcacactcacaatcaacatgat

SEQ ID NO: 9953 - DNA, 384 bp, Glycine max
  Clone ID: LIB3092-034-Q1-K1-H2
ctcactcccaagaccaatggatcaactcctgtgaggggagagacagtggccaagttgaaagtggcaatcaatggtttcggacgcattggtagaaacttccttcgctgctggcacggccgaaaagactcaccccttgaagtcgttgttgtcaacgacagtggtggtgtcaagaatgcttcgcacctgctgaaatatgattctatgctgggaacctttaaggcagatgtgaaaatactagacaatgaaaccatcactgttgatggtaagtccatcaaggttgtttcaagcagggaccctcttaagcttccatgggctgagcttggaattgacattgttattgaaggaacgggagtgtttgtggatggccctggggctggcaaacac

SEQ ID NO: 9954 - DNA, 382 bp, Glycine max
  Clone ID: LIB3092-034-Q1-K1-H3
ctaatttctcgaaaggtagggttttgcagagcctcgtcctcctctcacggtttcttcttttggtcttctcacctttggtcttccactgctctaatctaagatgggcaagtcaagcaagaaatcagctctcaaggtcgacgctgttccagctgtggttccgccatccaagtctgccaagaagggaggcaagagacaagctcaagatgaaattgagaagcaattgagtgccaaaaaacagaagataaatgaggttgctcagaaacaaaaggaggcaaaggtgcaaaagaaggaaagtagttcagatgattcttcttcagaatctgaagatgagaaacctgtacccaaatctgctgttctttcaaaatgataccttttagaatgg

SEQ ID NO: 9955 - DNA, 441 bp, Glycine max
  Clone ID: LIB3092-034-Q1-K1-H4
tgctcgtactcggatccgaagcgtccggctcgaccatgtcattgcccatcgtgctggctattgatgatgcccagaagcatacgatcggggataacaaaagggttgctcttttcgattccaagggagaccctgttgcaattctcaatgatgttgagatttataagcatcctaaagaagaaagaatagcccgaacttggggaaccactgcccctggcctaccctatgttgaacaaactataaccaatgctggaaattggttgattgggggtgacctagaggtcattgaaccacatccagtacaatgatggacttgatcattttcggctgtctacagcagaactccgtgcagagttcacaaggcgcaatgcagatgctgtgtttgccttccagctccggaatcctgttcacaatggccacgctttgctaatgactgacacccgt

SEQ ID NO: 9956 - DNA, 350 bp, Glycine max
  Clone ID: LIB3092-034-Q1-K1-H8
tcttgtgctgatatccttgctgtagcagcaagagactcggttgtagctcttggtggacctacttggactgtgcaattgggtagaagagactcaaccactgcaagtttaagttctgctaactcagacttgcctgctcccacttcaagtttaagtgcccttatcagttctttctccaacaaaggtttttcatctaaagaactggttgctctttcaggatcgcacacaattgggcaagctcaatgttcaagtttcagaacaaggatttacaacgacaccaacatagattcctcttttgcaaaatcattgcaaggaaattgccctagcacaggtggtggcagcacattggcccc

SEQ ID NO: 9957 - DNA, 349 bp, Glycine max
  Clone ID: LIB3092-035-Q1-K1-A1
aaaacgcgcaacacgttgtaattaatacgacactcgaactaatgggcgtcttcagcgaaaaccgcgaatccgaccccggtgtgatccgccaggtttgggcttcaaatctcgaatcccaatttcaacttattccggaacctatcgaccactatccttttatctcgatggacacagaattccccggtggtggtttccgaccacacctggaccccacaaaaccctacaaccaccgcaacaacaatcgcaaccggcacttcgaccactaccggcttctcaagtccaacgtcgacgcttttaaacctaatccaggtcggcctaattttaaccaaagccgccggaaactttccca

SEQ ID NO: 9958 - DNA, 240 bp, Glycine max
  Clone ID: LIB3092-034-Q1-K1-F7
tcgctgagtccgactcgacagtgatcgttcttcctttattccacgtgcacggtttgatcgcggggctcctgagttcgctcggcaccgtatctgatggtggcgctgccggcggctgctagattctccgcctcgtcattctggaacgacatgataaaatacagcgccacttggtacacactggttcctacaatacaccagatcatactggaccgtcactcgaacagccccgaaccggtttac

SEQ ID NO: 9959 - DNA, 444 bp, Glycine max
  Clone ID: LIB3092-034-Q1-K1-D4
cccacgcgtccgggagctttttgatgagatgttgatgaggaaggttagtcccaatgtggttacatacagctgtttgatgcagggtcttggcaagaccgggcggtgactcaaggcttctgagatgttgaaggacacgatggatgagaacagaggacgaggctaaggtgttggatttgatggtgcaggagggggaggagccgggtactttgacatacaatgttgttgtgaatgggctttgtaaggaggatcgggtggatgatgcacttagggttgtggaaatgatggcgaagaaggggaagaaacccgatgtggttacgtataatacgttattgaaagggctgtgtggagctgctaaaattgatgaggcgatggaactttggaagctgttgttgaatgagaagttccatgtgaagctggatgtcttcacgtttaataatttaattc

SEQ ID NO: 9960 - DNA, 443 bp, Glycine max
  Clone ID: LIB3092-034-Q1-K1-D5
gaagaagcgatttgaacaagaaggcatctctgtggaaagcccagctgtgacttcatgtggaacgggcgtaactgcttgcattcttgcattgggtcttcatcgtcttggaaagtctgatgttgcagtttatgatggatcttggactgaatggggagcacaatctgatacacttgttgacacttcatgaattcaatacagctaaatttgcatgccaccagaaagtatctgcaagtgaaggggctgtatccatttgtcaaacattttgaagacaccaatttttctatgctttactgtttgtttgttgttctggtttagttgtggttgagattcttgagaatcgcaaatatgttccatgtcaaatgttactaatattaaatcctatcatgtggcttataaaaataatgatagggttgttaaaaaatgtctcatagaaatgggaaatg

SEQ ID NO: 9961 - DNA, 399 bp, Glycine max
  Clone ID: LIB3092-034-Q1-K1-D6
atttgagtatatctgttatagtttatttactactgaaagatggattcgaagaggaagatagcattacttatcttcggtctgctggccatgctccttttcatctcctcagaggtggcagccagagaactgaaagaggtcactggtgctggcttgtctggtggccgtggcgtaaactttggtggctttggtggcattggtggtggccctggcttccgctttggcttcaataatggcttccccctcttcttccctggattccccagcttccgtggattccccggcttccctggattctccggcggccctggattccccggcactggattccccggcactggattccccggcactggattccccggcactggattccccgcatcttccctggctttgggtgtg

SEQ ID NO: 9962 - DNA, 206 bp, Glycine max
  Clone ID: LIB3092-034-Q1-K1-D7
ataagagcgtctctactataatctatctacttttattacacctactctgatagatcactggtatcatttatcttctcgatactgtcaatgctgtggttctacctctcataggtacattattcacatctcaattacgcaactacatcattcaataccattccacgtaacacacactgtttcatacaatacaccaaatcatactgaac

SEQ ID NO: 9963 - DNA, 457 bp, Glycine max
  Clone ID: LIB3092-034-Q1-K1-E1
tttagatcttacttttgtccaactttttgaaagattttatactttgaagttccattaagaaagagtaaattgagaatcccattaaggaattcctcactctcttgctaataataatataaagtgtttaatgtaaaaagcatgttaaagagttttccattctcgatcaatcagaatttataataggtaagaattgtaaggtactagtagttcttattcttataggaagttaacaacttaccatatatgacaattgtaaatgcatatactattttctctaatgtaaatgtggtaaaaacattatagctgcatgatggcttctatttctttgtctacatcttttcaaaccttacaatgaccttttttttttgttgaaattctccagtacactataacttgtaccagttttccttttccatgtctagaattccttggtcaaatttggcaactttcgtttttc

SEQ ID NO: 9964 - DNA, 379 bp, Glycine max
  Clone ID: LIB3092-034-Q1-K1-E12
aagataacaatttgttgggcaaatttgaactttctggcattcctcctgcccccaggggtgttcctcagattactgtgtgctttgacattgatgccaatggtattttgaacgtctctgccgaagataagaccactggccagaaaaataagatcactatcaccaatgacaagggtagactgtcaaaggaagatatcgagaagatggttcaagaggctgagaagtacaaatctgaggatgaagagcacaaaaagaaggttgaggccaagaatgctttggaaaactatgcatacaacatgaggaacactgtgaaagatgacaaaattggtgagaaacttgatcctactgacaagaagaagattgaggacgcaattgagcaagc

SEQ ID NO: 9965 - DNA, 410 bp, Glycine max
  Clone ID: LIB3092-034-Q1-K1-E2
ctctctctcacctcaacaaactcctctgcatgcccccgctcaactcttcaccctctatttcgccaccacgcagcagcgtcggaatttggaccaaacctgtcggaaggccgaggctactggtgcgtgtccgagcggtcacgagcgacgacgagtgggggccggagaaggaggaggcgtacggcggcggcgtagcggtggaggagaaaccgacgaagtcggagacggagacggagaagctgaagaaggccttggtggattcgttttatggcaccgatcgtggactgaaagcaacgagcgaaacgagagcggagatcgttgaactcatcacacagctcgaggccaagaaccctaaccctgttcccaccgacgccttgactcttctcaacggaaaatggattctcgcgtataca

SEQ ID NO: 9966 - DNA, 357 bp, Glycine max
  Clone ID: LIB3092-034-Q1-K1-E4
aaagaagcgatatgaacatgacggcatctgtgttgaaagccgacctgtgacttgatgctgagcgcatataactgcgtgcattcgtgcattgagacctcatagtcttgcaaagactgacgttgcactgtacgacggatccagcactgtatgctgagcacactctgatacacttgacgacacttcacgagtgcaatacagctaaatttgcatgccaccaaaaagcatatcgacgtgaaggggctgtattcatatgccaaacatcttgaagacaccaatatgactatgctttactgtttgttcgttgaactcgattagttgggcttgagattcttgagaatccgatatatgttccatgtc

SEQ ID NO: 9967 - DNA, 191 bp, Glycine max
  Clone ID: LIB3092-034-Q1-K1-E6
tcttaagcgtctttcttcccttattttcctaagagtcaaatatttcatttttgttgcttacttttgagttgatttagtatcaaaccaaattgagatattcatacagcatgtaaatctgtgagttgttgcaagtcgggacaacagtttgagacttatgtgggaattcatatcaagtggtttagttctggacg

SEQ ID NO: 9968 - DNA, 444 bp, Glycine max
  Clone ID: LIB3092-034-Q1-K1-E7
ctgagtccgactcgacggtgatcgttcttcctttattccacgtgcacggtttgatcgcggggctcctgagttcgctcggcaccggggcggcggtggcgctgccggcggcggggagattctccgcctcgtcattctggaaggacatgattaaatacagcgccacgtggtacacagcggttcctacaatacaccagatcatactggaccgccactcgaacagccccgaaccggtttacccgcgcctccggttcattcgaagctgcagcgcgtcgctcgcaccggctattctgggtaaacttgaggaggccttcggtgcgccagtgctggaggcttacgcgatgacggaagcgtcgcatttgatggcttcgaaccctttgccgcaagatgggccccacaaggccgggtcggttgggaaacccgtgggtcaagaaatggttatattgg

SEQ ID NO: 9969 - DNA, 322 bp, Glycine max
  Clone ID: LIB3092-034-Q1-K1-E8
cccacgcgtccggctgttcaagagcaggaacttcagccattatgagcttcgtttgtactagcgctactgcttaatggtttgatgattagtgtggctggcatattcgagtccatcaatgcaagagcaatatacacaatcatatagacatacaaccgatcaagattttgggttctaagaaatcgagttggttggcatgatataatgaaaccctcatagatgtatattaagaattctttagaagttggatcatttgcaaacgcaattttggtttgggggtattgcaatataacagtgaacccaaaagggggtagctttaaggtgg

SEQ ID NO: 9970 - DNA, 343 bp, Glycine max
  Clone ID: LIB3092-034-Q1-K1-F1
tgaagggtgaacacgtatctcagaagtgttatgtgatatgtatgatgtgtgaatcttgaaataatatcttaagggcaagaagttattagttaaaattattagaggtagttttatgaatgggtcataataataaatgctagctatatgtaccactatggaataagattgggtcataataataaagctagcttgctagctatatgtactatacgtaactatggaataagacccatactagtgctataggggcttgctatatgtatgtgtttcatctgcaaattaagagctgagacgcttgccatgcaaggcagacaactattatatatattatgttatgtgtttg

SEQ ID NO: 9971 - DNA, 453 bp, Glycine max
  Clone ID: LIB3092-034-Q1-K1-F10
ctctctctctctctctcttcgttcttttggagtgtgtgtgcacccattgatgacaagcaacgcccattgcatggaagcctaagaggaggagaagacgaagaggacaagggtaactgaatcgccgcttctgcagcttcgttctttcgtttttgtttcatctttttagcttcagagggtaaataaaaaatggaggttttggtgggtcccgctttcaccatcgacgttccctcgtctccgccgcagcatgccggttccgatgatcggatctttcttaacgtgtcacccgaagaaggtgatgggtcgaactttcgtatttcgggcccacccaagttcttcgccggcggcgagtcggagagttcgtcgtcgatcggaacccctgatgacagcgacaacgaggaggaggaagaagtgcagagcccagttaagatacgaactgggttgggttctttggat

SEQ ID NO: 9972 - DNA, 257 bp, Glycine max
  unsure at all n locations
  Clone ID: LIB3092-034-Q1-K1-F12
cacgcgttcggcagactctacacacctncccatacttcatactccatacccttttcaagggtgaattaatcccttcttggtttgtcccctaaacaccaaaccctttcagctgtcaagaatttctccggattatactaatcaaattaaatatcatcatacattaaaaaatcattcagcgcatttaaaccatcgtgccccaacccatttgtactatactactatgtaaccattacaattacaatgtgattcttttttac

SEQ ID NO: 9973 - DNA, 215 bp, Glycine max
  Clone ID: LIB3092-034-Q1-K1-F2
actaggcgtccgtacatagtaaagccactaatgtcaatcgtgtcatttgtgaacttgctgcgatcatattaatcagggaacttaactaggatgacctcgcatatcggctcgtcagaaccgctcatagctcttgacataacaatgctctaacatcagatctctatgatgggccttacgtatgacgccaagctgaccatccagatggcatatgctta

SEQ ID NO: 9974 - DNA, 453 bp, Glycine max
  Clone ID: LIB3092-034-Q1-K1-F3
cccacgcgtccgcacaacgtcaagccaccaaggacgctggtgtcatttctgggctcaacgtgatgcgaattatcaacgagcctaccgcggctgccattgcttatgggctcgacaaaaaggccactagctctggggagaagaatgttctcatttttgatctcggtggtgggacttttgatgtctctcttctcaccatcgaggagggtattttcgaggtgaaggccactgctggtgatactcacttgggaggtgaagattttgataacagaatggtgaaccattttgttcaggaattcaagaggaagaacaagaaggatattagtggaaatgccagagctctgaggaggttgagaacagcatgtgagcgggcaaagaggactctctcttccactgctcaaaccaccatagagattgattccttgtacgagggtattgacttctacacaaccatta

SEQ ID NO: 9975 - DNA, 396 bp, Glycine max
  Clone ID: LIB3092-034-Q1-K1-F4
accaggcgtccgcacaccgtaaagccaccatttacgctggtgccatttgtggtctaaacgaggatcctaatcatcagcgagcctaccgcatgctgacatagctaatggactcgacaaaacggccactagctctggggagaacaatgctctgacttttgatctccgtggaggaactgtcgaagtctctctctctcaccatccaggagggtaaatactaggtcaaggccactgctcatgatactcactcgcgaagcgactattttgacaacagaatggataaccattatgatcatgaattcatgaggaaaaacatgatcgaaattagtggaaatgccagagctccgatgaggttgagaacagcatgtgagccgccaaagaagactctttctttcactg

SEQ ID NO: 9976 - DNA, 453 bp, Glycine max
  Clone ID: LIB3092-034-Q1-K1-D3
acttggcaaccatccctatcaccggcactggtatcaaccctgctcgtagtcttggtgctgctatcatcttcaacaaggaccttggttgggatgatcactggatcttctgggtgggacctttcattggtgctgcacttgcagcactctaccaccaggtcgtaatcagggccattcccttcaagtccaagtgattcaatcaaaccgttcatgcttaatcaagttgggaacaacaaaaaaaatcaaaacaatgtttctgggtttcggtttcatttcatcaagatgatctgtttatctttttttttttaattttaatttaaagtctttgtattttgtatgtaaagatgtaaaattatgattattaggtggtgcatgtgttgcgtcatgggccaatgttatcctctgcttttaagttggaagaggcccagctcacgtgtgatgtacggctgtgattgt

SEQ ID NO: 9977 - DNA, 441 bp, Glycine max
  Clone ID: LIB3092-034-Q1-K1-B5
cataaaccccctccagagaacaagaatcaaagaatggcaactatgactggtgtgagcctttcaagccccagggttttcttcaacgcatcaccctcaccgcaaaacacgtacgccgtaaagttcgcagttccactcagccaagggatgcgacttggtagtgtcaggttgggtcgggtgatgaggatccgacccgttcgcgcagctccagagcgcatttcggagaaggtggaggagagcataaagaacgcgcaggaggcgtgcgccggcgacccgacgagcggcgagtgcgtggcggcgtgggacgaggtggaggagctgagcgcggcggcgagccacgccaaatacaagcaaaaggaaaaggactccgacccgctcgagacctactgcaaggacaatccggagaccattgagtgcaaaactttcgaagactgagaaagcgct

SEQ ID NO: 9978 - DNA, 447 bp, Glycine max
  unsure at all n locations
  Clone ID: LIB3092-034-Q1-K1-B6
acgcccttagcagaatggagactaatccccgcacgatccgcagcctagtctcgaagctgagcgtccgtttccgaagccgcccgcgtcgacgccctctcccaactccgcctcatgtccaaacagtcccccgaaacccgccccctcatcgccgacgccggcgcaatccccttcgtcgcagaaaccctctattgctcttcgcaccccccccaagaaaacgccgctgccacactcctgaacctcagcatcacccaaaaggagcccctcatgtcgacacgtggcgtcctcgacgccatcgctcacgtgatctctcaccacaacaccaccttctcccccgcggcggtccagtccgncgncgncaccattcacagcctnctctcctccgtggactcctaccgncccgtcgtcgggtccaagcgcgagattgtctacttcctcatcgacattctt

SEQ ID NO: 9979 - DNA, 436 bp, Glycine max
  Clone ID: LIB3092-034-Q1-K1-B7
acgcccttagcagaatggagactaatccccgtacgatccgcagcctagtctcgaagctgaggtccgtttccgaagccggccgcgtcgacgccctctcccaactccgcctcatgtccaaacagtcccccgaaacccgccccctcatcgccgacgccggcgcaatccccttcgtcgcagaaaccctctattgctcttcgcaccccccccaagaaaacgccgctgccacactcctgaacctcagcatcacccaaaaggagcccctcatgtcgacacgtggcgtcctcgacgccatcgctcacgtgatctctcaccacaacaccaccttctcccccgcggcggtccagtccgacgtcgccaccatccacagcctcctctactacgtggactcctaccgccccgtctgccggtccaagcgcgagactggctactcccttat

SEQ ID NO: 9980 - DNA, 407 bp, Glycine max
  Clone ID: LIB3092-034-Q1-K1-B8
cccacgcgtccgcccacgcgtgggcggacgcgtggggtgaagtttgtttattctgagaaggaagagagaatagaacgccatggatgagatattgaacaaggtggggtcttactggttcttcaagaagggcagcaagggatttaactctggcggcgatgatatcaacttactgtgaaccagtattgaagggggaacccaatgggtggtcaacaaggttaaagggaagatgccaaaggcgttaacacgaatgctataaggagtatgagactatccatatgaatctttcctctcgatgcgacacactacgaatttaacgcaaagacacgagagctcgtggtgtacacttctcaagtgtgtgaggttggctacacggattcgtcagagctgcgtgtctccaccagcgtgag

SEQ ID NO: 9981 - DNA, 313 bp, Glycine max
  unsure at all n locations
  Clone ID: LIB3092-034-Q1-K1-B9
gtaccttcggagaccttaccctcgggatgacttgcactgccgaaacaaacggttcccctgagacatcgtgtcactctgcaacaaccatggagttgtttcccacgatcatcacgcaacggaacccaactactgtggatttcctatctccccagactgcttatcctcaccactcagaggttccaatcatggttaaatcaagtgcttttaagtctatggagaaggagcctaaagctgctcagttgacgatcttttatgctgggcaagttgttgtgtttgatgattntcctgctgaaaaaatggaggagataacgtc

SEQ ID NO: 9982 - DNA, 458 bp, Glycine max
  Clone ID: LIB3092-034-Q1-K1-C1
cccacgcgtccgcccacgcgtccgcccacgcgtccgcccacgcgtccgcggacgcgtgggttcacctcacaacttcatcaaaccaaaaaacacaacaaaagaaagaaagaaagaaacaaagagttccttgctttgtagtaagatatatcatcaaaaatggttttgtcttggactagaagaaacgttttccgccgtgcaaagaaggagaaggaacaaagtcaactattagaagttgaggttgtgattcccaaccactttcgctgtccggtgagtttggagctgatgacagatccggtgactttatcaaccggcattacctacgaccgtgtgagcatcgagaagtggatcgagggagaaaacagaacctgccccgtcaccaaccaggtgctgacaaccttcgacctcatccccaaccatgccattcgcatgatgattcaggattggtgcgtccaaaacag

SEQ ID NO: 9983 - DNA, 159 bp, Glycine max
  Clone ID: LIB3092-034-Q1-K1-C10
atcaggcctactctttgtctatttgaccaatttcaaacccagaacacagaataaaaatggggtgtgatgtgaaccataagctgctgataagaattaaggatgacgaataagaagaagatttagagttatcattgtccaataggctgtggaatgatatca

SEQ ID NO: 9984 - DNA, 320 bp, Glycine max
  Clone ID: LIB3092-034-Q1-K1-C11
cccacgcgtccgctttctctctttgaccaatcccaaacccaaaacaaaaaataaaaatggagggggatctgaagcagaagctgttgagaagaagaaaggaagaggaagaagaagaagaagaagagttatcattggccaagagggtgtggaatgagagcaaggttatgtggatagtggcggcaccagccatattcacaaggttttccacctttggaatcagtgttataagccaagcttttgttggccatattggttctaaggaattggccgcttatgctctcgttttcaccgttctcattaggttcggcaatggtgttctg

SEQ ID NO: 9985 - DNA, 312 bp, Glycine max
  Clone ID: LIB3092-034-Q1-K1-C2
actaggccaccgttcttagcaccggcactggcttacaccatgctcaaagtcaaggagctggtatcatttataacctgggccacaggatgagatgatcacatgactcttctggcaggctccttacattggtgctagacttgcatctctctaactacatggctccatcagggccagtcactataggtacaagagacttaatgcaaccgttcacgcttaatactatctggtacaacatatgagatgatatcaaagtttatgctgatcggggtcataggatcgagatgatctgattatggatttctggccagaata

SEQ ID NO: 9986 - DNA, 356 bp, Glycine max
  Clone ID: LIB3092-034-Q1-K1-C4
cccacgcgtccgagcgtggccatagtcgagcagtcagtgagccccggcggcggcgcgtggctcggcgggcagctcttctccgcgatggtggtccgcaagccggcgcacctcttcctcgacgagctcggcgtggcgtacgacgagcaagaggactacgttgtcataaagcacgcggctttgttcacgtccaccatcatgagcaggctcctcgcgaggcccaacgtgaagctcttcaacgcggtggcggcggaggacttgatcgtgaaggaagggagggttgccggggttgtgaccaattgggctctggtttcgatgaaccatgacacgcagtcatgcatggaccccaacgtgatgga

SEQ ID NO: 9987 - DNA, 324 bp, Glycine max
  unsure at all n locations
  Clone ID: LIB3092-034-Q1-K1-C5
cggctnggccgccgtcgcttatcacgcggcacctgttttcaacgcctgctgcggggtcttcgatgctgcgtagtcattttcaaccttgggccttcgggtgtagatgatcacatggatctgtctgggtggagacctttcattggtagctgcgacttgcagcacgtctaccacgcagtgtcgccatgatgggacagttcccttcaagtctcaagtgctttaatccataccgttcatgcctaatccagttgggaacaacataaaagatctgaacaatgtttctggagttcgggttcattgcatttagatgatctgattatgtttttt

SEQ ID NO: 9988 - DNA, 445 bp, Glycine max
  Clone ID: LIB3092-034-Q1-K1-C6
caactaacgatttcttttgtgctgagtttgacggtgaatcagaggcaggcgtacgtatacgtgtagtagggtgattgagagatggacgctcccctgctgctggtgaacggcgagggggcggcgctggtggcggagaatggtgactacgtggcggtgagggagctgaaggaggtgaagaaggtgttttggattgagaccaagagagtgtgggagattgcgatgcccatcgttttcaacatatggtgtcagttcggtgtcaactccgtcaccagcatgttcgttggacacctcggcgacattcagctctctgctatctctctcattaactccgtcattggcacttttgcctttggtttcatgcttgggatggggagtgcaactgagacactctgtggacaagctttcggagctgggcaggttaatatgcttggtgtttatatgcaac

SEQ ID NO: 9989 - DNA, 459 bp, Glycine max
  Clone ID: LIB3092-034-Q1-K1-D1
gctagcaccacattcacctgaggcttccaaagcaatggcttcccttgcagcatccactgctgctgcttcccttggcatgtcagaaatgcttggaaaccccatcaacttcagtggtgccacaaggccagctccatctgcttctagtcctgcctccttcaagactgtggctcttttctccaaaaagaaggctacaccaacacctccaaaaaaagctgctgctgctgctcctgccaatgatgagcttgccaagtggtatggtcctgacagaaggatcttcttgcctgagggtctcttggaccgatccgaaatcccagagtacttgaccggagaagtccctggagactatggttatgacccatttggtcttagcaagaagccagaagactttgccaaatatcaggcatttgagttgattcatgccagatgggcaatgcttggtgctgctggattcatcattcc

SEQ ID NO: 9990 - DNA, 366 bp, Glycine max
  Clone ID: LIB3092-034-Q1-K1-D10
cccacgcgtccgatcaaactgaagacgctggtcacaataagtgaataaagctcagatcgagtttcatcagagtcacaataatgaagcaagaagtggttccaaggtcactagcaccaccaccaccaccaccacctcctccacttccaaaattcagggtcttctcaagaccaagagcagaagagagtgtcacaaaccgagaaatcgccaagttttggaggcaaaagaggatcgtggaggaggaccacctccttgctgctatcaaggctgtggctagactccgtgcacgcactctcacggagcaagagtacgagaagttcgagttgtctctgaagaccgataataatgactacgatgaaaccgagaaag

SEQ ID NO: 9991 - DNA, 350 bp, Glycine max
  Clone ID: LIB3092-034-Q1-K1-D12
ggaaattggagctggataactattatatggaaaattacatcagagagaatataaaccaagttgtcatggtttggacgttgaatgatgcctttctcttgaccatagaagatagttgctctacctctaccatgatgttaaatcaagttcggaaagttcatggagaagagaacttgaaaattttgttgttagagtctctacttggttgttttgaagcagaggagagtctgatgccaagtgcaaagtgtgagatcaaggaacaatgcagggaacttgacttgggttcggaatgaggagacctacatgagcatgaaatatttgaagactggataactgcagaagaacaaacattc

SEQ ID NO: 9992 - DNA, 440 bp, Glycine max
  Clone ID: LIB3092-034-Q1-K1-D2
acttggcaaccatccctatcaccggcactggtatcaaccctgctcgtagtcttggtgctgctatcatcttcaacaaggaccttggttgggatgatcactggatcttctgggtgggacctttcattggtgctgcacttgcagcactctaccaccaggtcgtaatcagggccattcccttcaagtccaagtgattcaatcaaaccgttcatgcttaatcaagttgggaacaacaaaaaaaatcaaaacaatgtttctgggtttcggtttcatttcatcaagatgatctgtttatctttttttttttaattttaatttaaagtctttgtattttgtatgtaaagatgtaaaattatgattattaggtggtgcatgtgttgcgtcatgggccaatgttatcctctgcttttaagttggaagaggcccagctcacgtgtgatgta

SEQ ID NO: 9993 - DNA, 434 bp, Glycine max
  Clone ID: LIB3092-034-Q1-K1-B3
gtcaggtcgaagttctctgtttcttttccttctcacaacaatgggaagttgaaaaaaaaggggcccatcataaactgggacacatgaagagagatcacattacgggtttgccaaactaaagaaaaaagttggagtttttgatatggctcaatagctggttccatttgaaagtgttagtagtggtatttgatccttcgtgcaagcaaaaacaacagtgactatctgatataagttttgagaggttatcaaatttcatgctgagggtggtttgaggaatgagagcagaagataatggatttctggccagaatttcttgcaagcagttcgggaagagagtttgtagcatgtggctttggaggcattgctggtataattttaggttattcacttgacacttttcgcatcagatttcagaacctcgaaaaatggctctg

SEQ ID NO: 9994 - DNA, 414 bp, Glycine max
  Clone ID: LIB3092-033-Q1-K1-H11
cccacgcgtccgcccacgcgtccgtgtttttccgctcaacaactataataacatctgtgggtctccgaacagatcacactatggccacctcaagcgccaaatcagtccatgatttcaccgttaaagatgccaagggaaatgatattaatcttggtgactacaaaggaaaggtccttatcattgtcaatgttgcctcacaatgtggcttgactaattcaaattacactgagctcagtcagttgtatgagaaatacaaacagaaaggtctggaaattctggcatttacatgcaatcagtttggcgcacaggagcctggatctaatgaacagatacaagagtttcgttgtactcgcttcaaggctgagtttcccgtttttgacaacgttgatgtgaatggtgacaaagctgctacac

SEQ ID NO: 9995 - DNA, 370 bp, Glycine max
  Clone ID: LIB3092-033-Q1-K1-H12
ggctgactgaatccctctcaaacttgcatttaacatttatttgctcttatacaaaagcgtgcaagtgagtagttcactgcaagctcaacatattgaatccagttccagggaagaactccatacaattattctttaatagaaaaattgactgtgacttatctatggactacacgattcttaaattctacgatgatctcaaaccgtcacagaggaccttcaacttttcttttcttcaacctgtcaaatatcatccgtctcaacgccttttcgacaacacagccatcgatttcgagttccaatccacccatgacgccggcacggtgcctcccaaaccgacggctcctgtcagaactaccgcggtccatttact

SEQ ID NO: 9996 - DNA, 376 bp, Glycine max
  Clone ID: LIB3092-033-Q1-K1-H3
ctaattccaaattcacccataaaaatactttcttttgctcaccagccatatattatgatggggggagatgagaatattcaagcatcatcaaagggaaaatatgttgaaagcttcaactgctcggaggcaccaaggaagaaaagcaagaagatagaaaacaagaggaggtttagtgatgaacagataagatcactagaatgcatatttgagtcagagtcaaagcttgagccaaggaagaagatgcaactggctagagatcttggcctgcagcctcgccaagtggctatatggttccaaaacagaagggcaaggtggaaatcaaaacgaatagagcaagagtaccgaaaactcaaagatgaatatgacaatttaacat

SEQ ID NO: 9997 - DNA, 303 bp, Glycine max
  unsure at all n locations
  Clone ID: LIB3092-033-Q1-K1-H8
ggaaaacccggcccgaccgcacgcgtccgggcgaancnaaacgctgtcgttgcggctttttcggcgttggtgctactcactacgagggggggggttgatgctcaggagaactcttacgtgaagacgctggtgaagtacaagcacgggaagaagtgctgcaacaaaagatgggaatgtaagggctggtcaatttactgttgtaacctcaccattaccgcttttttacacatctaccagttcgagaatctgttctccaagcggaactcgccggtggcgcacgcggtcggattttgggactaccac

SEQ ID NO: 9998 - DNA, 399 bp, Glycine max
  Clone ID: LIB3092-033-Q1-K1-H9
ggcgaagcgaaacgctgtcgttgcggcactcgcggcgttggtgctactcgcggcgaggggggcggtggatgctcaggagaactcggacgtgaagacgctggtgaagtacaagcacgggaagaagtactgcgacaaaggatgggaatgtaagggctggtcaatttactgttgtaacctcaccattaccgattatttccagacctaccagttcgagaatctgttctccaagcggaactcgccggtggcgcacgcggtcggattttgggactaccactccttcatcgccgccgccgcgctttttgagccggaagggtgcggcaccaccgggaacaagacgatgcatatgatggagatcgccgtcttttttggacaccttggcagcaagaacttttgtggtta

SEQ ID NO: 9999 - DNA, 455 bp, Glycine max
  Clone ID: LIB3092-034-Q1-K1-A1
gttcttttgttctatagttatgtttcttttgtctatatgatatataatcactgtattcatatagttctgtctgaagagaagagttatgatatattaaatataataagtggtttttttcttcttcatttccacgttccatcaaatgaatatgctctttacagtacagccaagtcatcataacgtatgttggggagttcttatagtactaggatggatctgaagtttgtgttgttcaagatctgtgtggtttttttttttcattgttgtttgcttaagatatatttgctttactaaagtaatttttctctttgcgtgtaggattaataattagctcatagtttttttggaagagttgtgaaaatgggacttgtggagctttttggggtggcatctatgcccgtgatcaaagtactactaatcactgctgttggcttgcttcttgcactggacaacgt

SEQ ID NO: 10000 - DNA, 326 bp, Glycine max
  Clone ID: LIB3092-034-Q1-K1-A11
aagatgttgaagaagaaaatgcagaaaagagctcagttgcaattgattcaatccttattggaagtggagaaagaagttggaaaagttttggacgtcctaggattattgtcctctaaatcttatgccgaggttctgcatcagttaaaagataaggcattgaacagagcaggtctgacagaagatgaagtgctacatctgatagaagaacgaactcaagctaggattaataaggatttcgccaaaagtgataagatgagggctgatttggctaccaagggcattgcccttatggatgtgggcaacgaaataattttggagaccatgca

SEQ ID NO: 10001 - DNA, 458 bp, Glycine max
  unsure at all n locations
  Clone ID: LIB3092-034-Q1-K1-A2
acgacaccttgtacccctccagcaccggaattgacaagtgcgtcaagaaaaacatccaactctttctcatccagaaatgcggattctcagaatccaaagccttgacccaacgagttgagctcttcaaaacctacggaagcacccttgccggcttaagagtcagtaataataacaccactacacaattccgatcactaatttctaacacgccaataacataatcatctcaacttggttcactttgcaggcacaaggcctcgatatcactgcagaggactaccacggtttcgtgcacggaaggctaccttacgactccatcgacactgatcatcagttacggaacctnctcttgagcatcaaacaaagaaaaattgtttttactaattctgacaggattcacgcgatgagggcgctggataggcttggggtcaaagactgtttcgagcaaatcatatgct

SEQ ID NO: 10002 - DNA, 436 bp, Glycine max
  Clone ID: LIB3092-034-Q1-K1-A5
cttgaatgtctctgccgaagataaaaccactggccagaaaaataagatcactatcaccaatgacaagggtagattgtcaaaggaagatattgagaagatggttcaagaggctgagaagtacaagtctgaggatgaagagcacaagaagaaggttgaggccaaaaacgctttggaaaactatgcatacaacatgaggaacaccgtgaaggatgacaagattggtgagaaacttgacccggctgacaagaagaagattgaggatgcaattgagcaagcaatccagtggttagacagcaaccagcttgcagaagcagatgagtttgaggacaaaatgaaggaattggaaagcatctgcaatccaatcattgccaagatgtaccaaagtggtgcttgtccaaacgtgggtggtgcttgtgcagcagaggatgagtatgct

SEQ ID NO: 10003 - DNA, 447 bp, Glycine max
  Clone ID: LIB3092-034-Q1-K1-A6
tggtttttgagcagaagcagttaaaagagaaagggattcagcgaagatgacatcggttggtgtggcaccaacttcgggtttgagagaagccagtgggcatggagcagcaggtgttgatagattgccagaggagatgaacgatatgaaaattagggatgatagagaaatggaagccacagttgttgatggcaatggaacggagacaggacatatcattgtgactaccattgggggtagaaatggtcagcccaagcagactataagctacatggcagagcgtgttgtagggcatggatcatttggagttgtcttccaggctaagtgcttggaaactggtgaaactgtggctatcaaaaaggttcttcaagacaagaggtacaagaaccgggagctgcaaacaatgcgccttcttgaccacccaaatgtcgttgctttgaagcactgttt

SEQ ID NO: 10004 - DNA, 337 bp, Glycine max
  Clone ID: LIB3092-034-Q1-K1-A7
acgtggtttttgagcagaagcagttaaaagagattgggattcagcgaagatgacatcggttggtgtggcaccaacttcggggttgagagaagccactgggcatggagcagcatgtgttgatagattgccagacgagatgaacgatatgaaaattacggatgatagagaaatggaagccacagttgttgatggcaatggaacggagacaggacatatcattgtgactaccattgggggtagaaatggtcagcccacgctgactataaactacatggcacagcgcgttgtacggcatggatcatttttagttgtcttccagtctatgtgcatgtaatct

SEQ ID NO: 10005 - DNA, 436 bp, Glycine max
  Clone ID: LIB3092-034-Q1-K1-B1
aaccaaactcgccaaaactagggttttgcattgatggcactgtgcaaccgcgtcagatcgggaatctctctcttcaccaaatccacgttccttacttcccagcgatccagtctccaacgatccctcgttgcccctttcatttccctcgcctccagaaattacgccaacgtgccggggcaaaaggaaaccaaagttaaggtccctctggctttgtttggaggttcaggaaactatgcctctgctttgtatattgcatctgtgaaagccaatgcagtggaaaaggttgagactgagcttctgcaatttgttgaggcagtaaagaatagtcccatattttcacagtttataagggacttgtctgtggctaaggatgttagagtgaaagttatccaggatatttgtggggaagccaagttttcggatgttacaaagaact

SEQ ID NO: 10006 - DNA, 271 bp, Glycine max
  Clone ID: LIB3092-034-Q1-K1-B10
ccaaaacgttaaggtgcccccacaaacacaactaccacctttgctaataaaaaatatctccggttttccattttcattttgaatttcctttcatcttctatatggtattgccattgctacacaaacaatacaaaacaccaccctttaaccgtttgcaacggttgctttgaacgaagggagcagtaacggctatgttataatttctgagtttgtgttgtagaaagaagttacgttctgagaggcccagatggattttacttcggtcttgacg

SEQ ID NO: 10007 - DNA, 266 bp, Glycine max
  Clone ID: LIB3092-034-Q1-K1-B12
atggatccgggtatggtgggagaaagcaagaatctgaatatggatccgggtatggtggcaggaaggaggaaccagaatatggatccggatatggtggaaggaaggaggaatctgaatatggatcaggatatggaggaaggaagcaagaatcagaatatggatccgggtatggtggaagaaaggaggagagtgaatattgatccgggtattgagggaggagtgagtattaggagaaacctagctattggaggagcaactattagagc

SEQ ID NO: 10008 - DNA, 475 bp, Glycine max
  Clone ID: LIB3092-034-Q1-K1-B2
tcgactacgcgtccgacaggtcgaagttaatcgaggcttttgcatttaacaccattggcaactctcaaaaaaacggggaccattataaacacgaacacatgaatagagagcacattacgattcagccaaactcaatacataagttccagtttcagatatgtctcaatacctgattacattagaaagcgctagcagaggtgattcgatccttcatgcaagcaaaaacaacagtgactatctgatataattttcgagaggttatcaaatttcatgctgaagatcctttgcggaatgagagcataagataatgcatttctggccagaatatgttgcaagcaatacggcaagagagttactagcaattagctacttaagcattgctagtattatttcaggttatccacttgacactcttcgcattagattacagaactcgaataatgcctctgacttcacaattcttaaacaaatggag

SEQ ID NO: 10009 - DNA, 397 bp, Glycine max
  Clone ID: LIB3092-033-Q1-K1-H10
cccacgcgtccgcccacgcgtccgcccattcgtccgagcagattcaaggaacatgctgtggaaaactgccaagcccacccatattctctcaaaactttcaaccatgaactgaacaacaacaacaacaacaacagggccacccgtacagacccacctccaaagagatcatttttattaccaattttccgatttcacagagaaaattctttgtgggcatctcttcaaaaatgtcaagcttccccaacacggtggcggaaggccgcaggtccggcaaggcaccggaaaaatccaccttttctcagacttgcagcctcttgagccagttcttgaaggagaaacgtgcttctgctgattccacccttggaattggtggaaaaatggaacctaaagcgaatac

SEQ ID NO: 10010 - DNA, 400 bp, Glycine max
  Clone ID: LIB3092-033-Q1-K1-E8
gcgtccgacaaatcgaaatcgttctctcctcactgagcactcactctatcacttcaactctgcatttgagaatctcaattggggtgttttgctgccatatatttcaatagaaaaaggggatttgcgtgcaaacttcgtcatggaggtattcaaaagggccataatacagcctgggccaccggaaagttttgctttgaggacggttcaagaagtaattaagcctcagaaacaaacaaaattggcccaagatgagaaccagttcctagaaaatattctacgtatgttgcttcaggagtttgtgtcagcagcggtacagtttggggagaaaatcatgcaatttggccaatcaattgattctagtgaaactacccaaggccacattccccgccttcttgatatt

SEQ ID NO: 10011 - DNA, 383 bp, Glycine max
  Clone ID: LIB3092-033-Q1-K1-F4
cacagagcacatttcaagatgagaagcatgtggaatttgactgttgcatgaaaccagaggagacacaagcatgtgctatgtacaaaatttgcagttgcaagtgttgtggagagaaggcagatgacacagactgtttggtttgtgattcatgtgaagagatataccatgtgtcctgtattgagcctgcagtgaaagaaataatacctcacaaaagctggtattgagccaattgtactgctaatgtgattgaatctctccatgagaattgtgtgctatgtgaaaggttaaatgatgcaaagaccctggatgatgtaattggtgatggaagctttcctacaattgaagaaacacaaaatgaatttgaagagaattcaaattgcacc

SEQ ID NO: 10012 - DNA, 365 bp, Glycine max
  unsure at all n locations
  Clone ID: LIB3092-033-Q1-K1-F7
cccggaagagtggttttttcacagaggaaactcttgaattccagcggaagattctggagagggctggccttggtgaaagcacttactttccagaggctgttctcaatgatcctcccaacccttcaatgaaagaggcaagaaaagaggctgaggctgttatgtttggtgcaattgatgagctgtttgctaagacttctgtgaagcctaaggacattggaattctgattgtgaattgcagcctcttttgccccacgccatcgctttcggcaatgattatcaatcattataaacttagagggaacataaagagtctcaaccttggtgggatgggatgcagtgcangtctcatttcgattgatcttgct

SEQ ID NO: 10013 - DNA, 415 bp, Glycine max
  Clone ID: LIB3092-033-Q1-K1-F8
cccacgcgtccgcagaagttgaagataaactttccaaagaaggctttgatagagctgtggacaagagaaagatgataaacctgaggactccaataactcattgtctagtgaagacagcaacagcaacgataaagatgggtccattgatgaggaaaggtcatcaccaattgcacatgctgttaaggttgagcatgacactgacactggaaacaggttgaaggaaaataaaaaccctgaagcatttacagaaggctcacgcatggacggcttggcttgtgagagtaatgaaacgcgtccgggtaaggatgaaggacaagcagatacacacacaatcagttgttcaatgcataaagaagttgacaatgctgtcatggctgataagacaccaaatggcgttccatctaggacacacata

SEQ ID NO: 10014 - DNA, 342 bp, Glycine max
  Clone ID: LIB3092-033-Q1-K1-F9
cttctccattggttcttcatctgcatgcacacacttgcatagttttggaaaccaagaatgtttgaagggtagcatcaacaagaagttctggaaatggagatcaccaatgtcagcgagtatgaagctattgcaaagcagaagttgccaaagatggtgtttgactactacgcatctggtgcagaggaccagtggactctgcaggagaacagaaatgccttttccagaattttgtttcggccacgtattcttattgatgtgagcaagatagacatcacaactactgtcctgggcttcaaaatatccatgccaatcatgcttgccccaacagccatgcagaaaatg

SEQ ID NO: 10015 - DNA, 358 bp, Glycine max
  Clone ID: LIB3092-033-Q1-K1-G10
ggttactcaaatgaagcaggagcatgacatgaggcaagcaagcctcatagctgaacacggcgaacagctaaagcgtacccaactgcaagctgaaaatgaattgagagagaaaacaatgtttatgaggaatgatcatgaagctcagatcaaagcattgaggtgtgaacttgaagatgagtgtcggaagctggaagaggagttgcatcttcaaaaaatacaaagaagacaggcaaagggctttgttgcatttgcagtggaaagtgatgagtgacaagcctaaagaggaccaagaagtgaattcaaaacaggccacgaggttgttacatatgaaagtccgcgaccgatgatggggattcat

SEQ ID NO: 10016 - DNA, 389 bp, Glycine max
  unsure at all n locations
  Clone ID: LIB3092-033-Q1-K1-G11
gggacctaccccttcacctcccttggcttcatctcctatgccaggagaatctgagaagggtattccttgtgtttcatcaatatcaaatgctgcaaatattggacatcaacaaacagggggtgcaatagcaccagctcaatcccttgccattgagactcctgngatatcagcctctcctttattggcagaattcagtgctcctgatggtgcgcatggtaatgctttagctgccacttctgggaagtcaactgttacagagcagcctcttgaacgcctaattaatgcggtgaaatcaatgtcaagtaaagcattaagtgctgcagtcatggatattggttcagttgtcagcatgaatgatagaattgcacgatcagctccaggtaatggat

SEQ ID NO: 10017 - DNA, 426 bp, Glycine max
  Clone ID: LIB3092-033-Q1-K1-G12
ggttgactggttgttttttaaaattgcatgaaacatttatttgttcttatagaaaaagtgacaagtaagtcttcactgcaagtagaagatattggatccagttccagggttgaactccatacgattattttttaatagaaaaattgactgtgacgtagctgtggaggacacgattggtaaattctacgatgatctcagaccgccacagaggaccttcaacttttcttttcttcaacctgtcaaatttcctcgttctcaacgccttttcgtcgtcagagccagcgatttggagttcgaagccaccgttgtcgccggcaaggtgccgcccaaaccggcggctcctgtcggaactccggtggtcccttcacttccacttcaccggcgtcctcgccggaaccggaaagtcgctgcgcttcggtcggcttt

SEQ ID NO: 10018 - DNA, 420 bp, Glycine max
  Clone ID: LIB3092-033-Q1-K1-G2
cagaattctcattgcttctatcatggaggagtacaataaggctgcatgggaggagcttatggatagagttgagcaaactggagttgatgcatttgaaataaatttctcatgtcctcacggtatgccagaacgcaaaatgggtgctgctgatgggcaagattgtgctcttctggaagaggtttgtggatggataaacgctaaagccacaattcctgtttgggctaagatgactcccaacataactgatatttcacagccagcaaggattgctctaagttcaggatgtgagggagtatctgccataaatacaatcatgagcgtcatgggaatcaacctcaatacattacgtcccgagccttgcgttgaggggtacttaacttctgggggttattctgcaaaggcagttcattccataacact

SEQ ID NO: 10019 - DNA, 425 bp, Glycine max
  Clone ID: LIB3092-033-Q1-K1-G3
gttcttttgtctgttcctgttgttcagagtctaacggcggttagttggattgatgagggggttgtgaggaaaattaggggaacttctttttcaacaagagtgtctgttcagtttgaatatggcatgattaaagctgcccgtggaatcatcaatccgctggtttctgatgtgcacattttctctgatcacagatcaggtcctgaggctggaaactctcctggatatgggatttctctggttgcggaaactacgtctggttgtttcatttctgtagacactgctgtttctcaagtgagggatgacgatacttctggccttgcagatgatgcgaaacgagacttaatgccgccagatgatattggtgtggggattgctagtgctttactaggggagatagctcaaagtggagtggtagattcaacaca

SEQ ID NO: 10020 - DNA, 385 bp, Glycine max
  unsure at all n locations
  Clone ID: LIB3092-033-Q1-K1-G4
cnacgcgtccgattggtggtaatggcagcgtcactacaagcagcagctactttcatgcggcccaccaagttgagcaggagcaacactttgcagcaaaagtctactcagtccatttccaaggcttttggtttggaacctgttggagctaaaaaggtcacatgctcccttcaggctgatcttaaggacttggctcacaagtgtgttgatgctaccaaaattgcaggattcgcccttgccacctctgccctcgttgtctctggggcaagtgctgaaggtgttccaaagaggctaaccttcgacgaaatccagagcaagacctacttggaagtgaaggggacaggaacagcaaaccagtgcccaacaattgatggtggattggactcat

SEQ ID NO: 10021 - DNA, 386 bp, Glycine max
  unsure at all n locations
  Clone ID: LIB3092-033-Q1-K1-G7
ggaatctgccccgaatagagagcttccccaccctcagcgtggtgcccgtgaaagggaacgtctacaggtatcttcatactgtattattttgttgcttgcttttgattaatgagtgctcattttatctacctgtgatataggctgttaaccaacttggtgatgctaatgaggttctgaatgaacgtgctgtggttgtcatggctcgcatgagtaataagcttacaggacgggatttttcaacttgttcttcagtatcaaacaactcccctcagcatgctgtggaccatagcagtttaatttctggagacactcgtgaagttgatcatgctttatctgtgaagttgcaagttcaaaagttaataatccaagcttnctcgcatgaaaat

SEQ ID NO: 10022 - DNA, 425 bp, Glycine max
  Clone ID: LIB3092-033-Q1-K1-G8
caaccactctggtgtggtgcagctgcacaacgtggaggacgtgcagaagctcatagaggagcacaagctggatcacaagctcatcgtgctcgatgtgggtctcaaacattgtgggccctgcgttaaggtttatcctacagtggttaagctctcgaggcagatggactcggtggtgttcgctcggatgaacggggacgagaacgagagctgcatgcagttcttgaaggacatggaagtcatccaggtccctacctttctcttcatcagagatggcaacattgaaggcaggtacgtcggttctggcaaaggggagctcattggggaaattctcaggtaccaaggtgttcgtgtcacttattaattttcttactacacatacttatttctacttctattaagttcagctcaacaaacacatgtttact

SEQ ID NO: 10023 - DNA, 424 bp, Glycine max
  Clone ID: LIB3092-033-Q1-K1-H1
gggagtgacgccaaaccaccatgttgctgccattgtggctgctgcattttatgcaatttggaatctcttctcaggatttatcgtcgtaagacctaaaatgcccgtgtggtggagatggtactattgggcatgtcctgtggcttggaccttgtatggattgattgcatctcagtttggagatataactgaaagaatgccgggtgaagataacaagatggtgaaagaattcatagaagactattttggtttcaaacatgacttcgttggaatttgtgctgttgtggttgctggcatcgccgttgcctttgcattaatctttggtgctgcaatcaagacctttaacttccaaaagagatagatggatagattgaactctttctccaacgtcaaagattctttatattttctccctttttcttttttt

SEQ ID NO: 10024 - DNA, 427 bp, Glycine max
  Clone ID: LIB3092-033-Q1-K1-E7
ctttggtcgaaaaatctggctcggacattgcagtttaaggcactcctacaagcaaaagaggatttaaaggaagtggataaagaaattacaggtggtgaactagctgatgcaacaaacatgagtattattcaagtaaggaaagctatagaggttggtcgagctgcgagaaacaaactcataaagcacaatctccggcttgtattgttcgtgatcaacaaatattttcaagattttgcaagtggcccgaggtttcaagatctttgtcaggcaggagttaagggacttatcacagcaattgatcgttttgagccaaaaagaagacttcagctatctacatacagtttattttggataagacattctatcgttcgttccataaccctctcaagcttcacacgtgttccttttggacttgaaagggttagag

SEQ ID NO: 10025 - DNA, 242 bp, Glycine max
  unsure at all n locations
  Clone ID: LIB3092-033-Q1-K1-D1
gacccacgcgaccgacgaaacaaaccaaggctgaaaacaacaatgtttacaacgcgaagcatnactaccctcggtcgattttcaaacgaataccgcccacccaatcctacaacttggaatctaaccatctccaaaacaatctcaagggactacacctcaactctgttagcctcacgtaaaacaacaccatgaacaatccctatctcacgatgcactctgacaaaacctaaaacaatgcctat

SEQ ID NO: 10026 - DNA, 423 bp, Glycine max
  Clone ID: LIB3092-033-Q1-K1-D10
cccacgcgtccggaggagaagaagaagaaaattatggagagaaaggaagctcctttgaagggggagcagaagctggaagctgctgctgaagctaaagagaggaagctgaaggttgcaaagcatacaaaaagatctggctctgatagtgacagcgattatgacagtgatgatgagagtagaaagacaagtaaaagatctcacaggaagcacagaaagcattctcactacgactctggtgaccatgagaaaaggaaagaaaaaagttccaaacggaaaacaaagaaatggtcctctgaatctagtgattatagtagtgatgactctgagagtagctttgaggaggagagaagaagaaagaagaagcaaagcaagaagctgagagatcggggttcaagatcagattctagcaactatgattctact

SEQ ID NO: 10027 - DNA, 416 bp, Glycine max
  Clone ID: LIB3092-033-Q1-K1-D11
aggccatataatttttttttatttgaaataatgtccgggatcatccacaagattgaggagaccctccatgtgggagggcacaagaaagaggagcacaaaggagaacaccatggtgagcacaaaggtgaacacaaaggagaacaccatggtgagcacaaaggtgaacacaaaggagaacaacaccatggggagcacaaggagggacttgtggataagatcaaggacaagatccatggtgatggccatgacaagggtgagaaaaagaagaagaaggacaagaagaagaaggagcatggacatgaccatcatggtcatagcagcagcagtgacagtgattagatcttatatgttaagcaggtgtacggtacgatggtagtgaggagccagaatccctcttcctgctttatgatataata

SEQ ID NO: 10028 - DNA, 398 bp, Glycine max
  Clone ID: LIB3092-033-Q1-K1-D12
ctcgtggataagatccgaaggctgaagattaagtaccggaacgtcctcaacaagattgggtccggtaaggaattctccttcaagagcgctcacgatcaagccaccttcgaaatctcgcgcaagatctggagcaacgtgactccagtcggcgacaattcattggacgacgacgaaatcaaccctagccgtagccccaaccctaaccttaattttagccctgtaattcttaagaatgaaacgattttcaggaattccacggagaagaaaacaccgaaacgctctcggcctcgatcggcggtgaaaatcgagccaaatgacggatccgcgtcgaacagaaatcataattgttttagcaatactacacctactgctactgctgctgctactaacactactgc

SEQ ID NO: 10029 - DNA, 384 bp, Glycine max
  Clone ID: LIB3092-033-Q1-K1-D2
cccacgcgtccggcaagcgcttctcctctttgtgttctggctatgcttcttggcaagagtgagatcggacgaggattgcgtgtacacggtgtacgttcggacgggttcgatcatcaagggaggcaccgattcagtaattggtctgaagctatacgacaagtccggctacggcatatacatcaccaacctcgaggcatggggcgggttaatggatccgggtcacaactactacgagcggggcaacctctacatattcagtggtagaggcccttgcttggaagcacccgtttgcgaggccaacctaacttctgacgggtcggtgccccatcacggctggtacgttaattacgtcgaggtcaccaccactggggtccacgcgccttg

SEQ ID NO: 10030 - DNA, 413 bp, Glycine max
  Clone ID: LIB3092-033-Q1-K1-D3
cgcacgaatatcttgttgtttggagcgattcgagaaaaactctgtaaacatgttggttgaccaggacctccttacaggtgatgagcttctctctgactccttccgttacaaggaaattgagaatggaatgctgtgggaagttgaggggaagtgggttgttaaaggagcagttgatgtagacattggtgcaaacccttctgctgagggtggaggagaagatgagggagttgatgatgcagctgttaaggttgttgacattgttgacacattcagacttcaggagcaacccgcattcgataagaagcagtttgttaccttcatgaagaggtttatcaagaatttgactcccaagctcgatgcagagcaacaggagttgtttaagaagcacatcgagggagcaactaaatacctgc

SEQ ID NO: 10031 - DNA, 388 bp, Glycine max
  Clone ID: LIB3092-033-Q1-K1-D4
cagcaatcaatctcacatccatcgccaatgaagcggaagaaatggtcggaactggaagagcgaaccctcctctccaaatactccgagctcctccattcaggaatcctcgccaagctcaaaacgcgcgagaagaagttcaagccggtggcggagcacgtgaacgcgctgcaccacctccgcgacccagcctcgttccccttcaagtggtcgtggcgcgacgtctcgataaaggtgcagaacatgcgccaccagtacctcggcgtcaagcagaagatccgcctctcccttcaccacttcaattggaaggacggtaacaatcattgggagaattttcttaaatacaaagaagtcttgggcgatgtgcaattgttggaatccccaaaaccta

SEQ ID NO: 10032 - DNA, 392 bp, Glycine max
  Clone ID: LIB3092-033-Q1-K1-D6
cccacgcgtccgcagacttcaattttctgctgaaaaccttgtcgctgtgatgcaatctgatggttttgagtatcttaaggaaaattgtcccttgctgcaatcagaactgctaaagactgtggcaggatgcgaggaggaatttagtggagaaggaaagtgtcgaagtgtgtgggcccaattttctgatggtggtgacaccaatgataggagtgtaagacaacaaacctgggaaaatggtgttgaaagaagtcaaagcttatgggttcacctttctgatggtgttaacaacaatgataggagtccagggcaagaaacctgacaagggattctgctgggacaagttaaacgtgtcattggtacaagaccaacctgcagggattaatccattgcat

SEQ ID NO: 10033 - DNA, 388 bp, Glycine max
  Clone ID: LIB3092-033-Q1-K1-D7
atttgtactttaccttattttacgggccattacctatacaccgctgcggagtttttcccgatcaaagacagctaccacagatagttgagcagtcaaattccaattcctgaaaaccatggagtatgaaatgctttgcagctgaaggctttcacaagtacttttactctatttttttaggcatactcatgcttggtaatttgtagaagaaattatgctgagggcagtggtaccttgttggttgtcatacttcaacaaaacaagtcaattatgtatttgtatttctgtcaaaattcgatgcataatgcaactgttagcatgccttggatattgagaaaatgtaatgagataccttttaaaactaaagatgttcacacaaatagtttccctt

SEQ ID NO: 10034 - DNA, 372 bp, Glycine max
  Clone ID: LIB3092-033-Q1-K1-D8
gagagaaacaaagctcatggctggtttgcatagatctgaggtgtctttcaggagacaggggtgcatcagggcttgtttgggacgacaagttattatcaggggaattgaacaagaacgaagacccaaagggtgctcatggtggtgaccttaaccttaaccttaacgttagaacaacaccacccatccagagaagtcgctccaacggcggctaccgcaccggaaaagtctcgccggcgatcgagcctccctctcccaagctctctgcttgcggcttctgcagcgccttcggaaaaacaggggaaaagggtcgtcgcgcaaagccccgtgcaaagcatcgatcaaagtaggttttttctggtcgccggagatgct

SEQ ID NO: 10035 - DNA, 397 bp, Glycine max
  unsure at all n locations
  Clone ID: LIB3092-033-Q1-K1-E10
gggagagtaaaccaagctgcagttcagtctgtaacctatatcaaattgggtcagttcagagcatcagcgccaacgctgtttccacctgagtatgtacaagaattccaaaattgttttgatagagctcctcctgttccttttgaggaaattgaatctatattgcgcaaggaattaggaaagccattagaaagtgtttatgaatacattgacccaacacccattgcttctgcgtctatagcacaggttcatggagcaaggctaaaaggctctagggaggatgtggttataaaggtcttaaaacccggaatagaagacatattagtggcagatcttaattntgtttatgttgttgctaggatattggagttcttgagtcctgaaataagccgaacatcac

SEQ ID NO: 10036 - DNA, 383 bp, Glycine max
  Clone ID: LIB3092-033-Q1-K1-E12
aaaaaaatactactaaagagatgagtttttcaggttttctttctcttcaatcaatgtcggctacctgcggcttcttcttcttctccttcacccttctcttctccttcttctccttcctcgtcttcatctccaggatgaagccctggtgtaactgcgatctttgcaagagctacttgacggtgagttggctgaaaaagttccccaatctctgcgactggtacactcatctcttgcgtaaatccccaaccggcaccatccacgttcacgtgctggggaacaccatcacctcgaatccccacaacgtggagcacattctcaagacgaatttccaaaactaccccaagggaaaacccttctccaccatcctcggcgatcttttggga

SEQ ID NO: 10037 - DNA, 416 bp, Glycine max
  Clone ID: LIB3092-033-Q1-K1-E2
cccacgcgtccgctcaacccacttaccagtttttccaaattttcattctttttccctttgcatgagttgatgcatctttttcaagctaattaagcttgaattagctggtggggttttttaaattcgtcgataaaaattacagtgttctgctattttttttttcttcttcttgtgtttttgtttgcagattcaggaactggtgtgtgagatttcttcaactcggggtttcattgacataaatgcaaacaatcttgaattcgaaggcagtaagtgattacttaaatccctgaaagacatgcagtcagccttgtttctgctgaaatgaagaacttgcagagctcggaagaattacagtcgtcgactcaagcttctcatgagcccaagagtgaacaacccaacaatcacacaactgatgc

SEQ ID NO: 10038 - DNA, 380 bp, Glycine max
  Clone ID: LIB3092-033-Q1-K1-E3
cgtccttacactgttgtactgtttgatgatattgagaaagcccatcctgatgtgttcaggatgatgcttcagatcctggaagatggaagactaacagacagtaagggcagaacagtggatttcaagaacacacttcttataatgacatcaaatgttggaagcagtgtgattgagaaaggaggccgcaaaattggatttgatctggattacgatgagaaggatagcagttataacagaatcaagagcctggtaactgaggagctaaaacaatacttcaggccagaatttttgaatagattggatgaaatgattgtcttcaggcagctcacaaaactggaggtgaaagagattgctgacataatgctcaaagaagtgtttga

SEQ ID NO: 10039 - DNA, 382 bp, Glycine max
  Clone ID: LIB3092-033-Q1-K1-E4
gttcatttcttataacaactctcatattaatccactgttgaatgaaaaccttgggaataggagaaggccttgcaaacattctaagaagaaacatgatctctttgaatgtctccctgacgatctccttgtccttattctttctaagctcagctccaccgcttcttctccttctgatttcatcaacatcatcttaacatgcaagaggttaaaccggttaggcctgcaccgtcttgtgttatccaaagctgcctctaaactattcgccataaaaccgaaaaattggtcggaatatgctcactcttttctcaaacactgcgctaacgccggtaacgtggatgcctgttacactctcggaatgatccgattttactgtttgaaaaat

SEQ ID NO: 10040 - DNA, 411 bp, Glycine max
  Clone ID: LIB3092-033-Q1-K1-C9
cagactcacaagacaagaacaacctctttcctatttacattttggttccgcttcattctcggacaactaatcagaactgctctcaaggatccctcgttttttccctttcttttctgcgtttaattttacgtcccatgctcgaagcttaaaccaattttattaattggtgtttgtttcagagatttccttagttagggttttattcatcgggttcattaattttctcaattattgcgattattattcgaaatttgaagttaagcatatatattcatggcttcgagttttgaccggtgggaaaaggatcctttctttaacgctgccgaagaagttcaggaatctgcagacaggatggaatctacatataagacatggttacatgcaacaaaagatgcattcagcatgtggaac

SEQ ID NO: 10041 - DNA, 348 bp, Glycine max
  Clone ID: LIB3092-033-Q1-K1-B1
cccacgcgtccggcaagatggatttggtttcagagaaagagcatgaagctgcatttgcgggggcctcactctccctctctctccccaccattttccccttcgtccaacccaagaatatcccatcaaccacccttcaaccaaccaagctcaaagtcccaacccaagcctcatccctcacacacctttctctctccaccaccactcctcctccttccaaaacctccttcaaatccaccgtcttcgccaaccccctccacgcccctctctccctcgctccccaccgcccccgcgaccctttcaacgccgccgcccttcgccgcgccgccgtcgtttggttccgcaacgacc

SEQ ID NO: 10042 - DNA, 414 bp, Glycine max
  Clone ID: LIB3092-033-Q1-K1-B10
agaagagtcctgattccaaacgaaaaaatttaaacttgattgaaaaggatctttctgatgattgaagaatgggacaaaaggattgatcgcgaaaaagatttcttgttcttattagaagatcgtgattggatccacatatgtttggtaaaaagaaagaaaaatattcttctttgagaataataaaaaaggaaagtgttcaattggaacatgaaaacgtgacagaattggtcctagttactcttcggaacggaatagaagaaggggagagattctcgaaccgaactaggaaacggatccaatgacttcaaaagaattgaacgaggagccatatgaagtgaaaatctcatgtacggttctgtagagtggcagtaagggtgacttatctgtcaacttttccactattacacccaaaaa

SEQ ID NO: 10043 - DNA, 372 bp, Glycine max
  Clone ID: LIB3092-033-Q1-K1-B11
caccaaagtacttgtgagtgtatacccaatacaaactaagatcaacatggactactacagccgcgtttcagaagttgagagggaacctatcatggagtattccacaccacgaccaatgatgggcaactaccaccaccctaatgctcaccgtgtcctcaacgagaagattgtttatgaggaggatgtgattggaggatcccgccacaaccacatgcatcaccaccaccctgagactcatgagagagtcaaggtggtggagtatgaacaagttcctgagaggcgcgttgtctatgaagagaaagttgcttatgacaacgatcgttactactctccaaggtattgaaattggacaaatggaaaaacacctataac

SEQ ID NO: 10044 - DNA, 392 bp, Glycine max
  Clone ID: LIB3092-033-Q1-K1-B12
gagagaaacaaagctcatggctggtttgttaagatctgaggtgtctttcaggagacaggggtcatcagggcttgtttgggacgacaagttattatcaggggaattgaacaagaacgaagacccaaagggtgctcatggtggtgaccttaaccttaaccttaacgttagaacaacaccacccatccagagaagtcgctccaacggcggctaccgcaccggaaaagtctcgccggcgatcgagcctccctctcccaagctctctgcttgcggcttctgcagcgccttcggaaaaacaggggaaaagggtcgtcgcgcaaagccccgtgcaaagcatcgatcaaggtaggttttttctggtcgccggagatgctcttcaacttgtcatgtttcta

SEQ ID NO: 10045 - DNA, 205 bp, Glycine max
  unsure at all n locations
  Clone ID: LIB3092-033-Q1-K1-B2
caatataataaatnctatcttgcatcaaaaggatctttcttattcgtngaatatatcaacaaaaagattgatctctaaaaaaattacttcatcttattaaaaaatcgttattgtatacacattttattatcaaaaacatatataaaacttcttcttttaaaataataaaaaacgaaattattcaatttaaacatacaaactctac

SEQ ID NO: 10046 - DNA, 377 bp, Glycine max
  Clone ID: LIB3092-033-Q1-K1-B4
atttttctcactgtctctccagagaacttgatagagagatggcagctgcaacatctggtgctgtgttaaatgggttgggatcttccttcttgagtggaggaaacaggagccaaacccttctggcctctgctattggaggcaaagttggtgctgctgttactgttaatcccagaagactcattgtggtagctgctgctgcaccaaagaagtcatggctccctggtgttagaggtggtggcaatctcgtcgacccagaatggcttgatggatcgctaccaggtgactatggttttgatccactaggccttgggaaggacccagcattcctcaaatggtacagagaagctgaactcattcatgggaggtgggcaatggct

SEQ ID NO: 10047 - DNA, 408 bp, Glycine max
  Clone ID: LIB3092-033-Q1-K1-B7
agaagagtcctgattccaaacgaaaaaatttttacttgattgaaaaggatctttctgatgggtgaagaatgggacaaaaggattgatcgcaaaaaagatttcttgttcttattagaagatcgtgattggatccacatatgtttggtaaaaagaaagaaaaatattcttctttgagaataataaaaaaggaaagtgttcaattggaacatgaaaacgtgacagaattggtcctagttactcttcggaacggaatataagaaggggagagattctcgaaccgaactaggaaacggatccaatgacttcaaaagaattgaacgaggagccatatgaagtgaaaatctcatgtacagttctgtacagtggcagtaaaggtgacttatctcgcaacttgccactattacaccc

SEQ ID NO: 10048 - DNA, 386 bp, Glycine max
  Clone ID: LIB3092-033-Q1-K1-B8
caacgctgtttcctttctgtttcttttcttcttccttccgacgagatctacaacgttgggggtgtttagatcttgaatagtgttttggtgttcggtgagatggaagaaaggaagcaatcacgttatgtgaagttgactaaagatcagacacctctcgaagacattacccctggcgaactcaaccagccaattcaggttcctcagttggacgttcgcaagtgccctgaatgtagacagccgctacctgaaagctatgctcctcctgcagatgaaccttggatgactgggatctttggatgtgctgaagacagagaaagctgcttgaccggactgttttgtccttgtgtattatttgggcgcaatgtagaaagattgaaggaagacac

SEQ ID NO: 10049 - DNA, 385 bp, Glycine max
  Clone ID: LIB3092-033-Q1-K1-B9
gtcccattggaagagtcggaagcggaggggttgggagaggaagaaggaacatgtcacgcggtagagatgggcgttgttgttgttggtgtgcccacccatccccaatccaaacactcttctcttagtaccctaatctacttattattatcacaacccttccatcttcttcttcttcaatccatgccggtcaacgccagctggtgctgagggtcaatcgaggtcttcctttctcaatggggagcgggagcagaagctactcggccaaccccgccgactacaagcttctagaagaagtcggttacggcgccagcgccaccgtgtaccgtgcaatctacctcccttacaacgaagaggtcgccgtgaagtgcctggatctggatcgctg

SEQ ID NO: 10050 - DNA, 365 bp, Glycine max
  Clone ID: LIB3092-033-Q1-K1-C1
ctttagtcctttgtctccgttccgtcgtttaccctacctttggatctgcgtttggcctgcaggttttgaagtccgaaggacgaacaacaagagattcctgacagcgtaatcatgtttggtgtcctaaggcgaagggttgcttctggcagcccgtctccttggttgctaggtcagtcagctcagaaaatccggtctggcccatcagtttctgctagagcttcttccattgtggaaaaagagattgtatttcgttcaggcggatgtggatttgtccagaacttcagtcatataactcctggaagctggattaattcaaagcctatgagggtggtcattcatccagaggcaactgttcgaacttgggg

SEQ ID NO: 10051 - DNA, 375 bp, Glycine max
  Clone ID: LIB3092-033-Q1-K1-C10
cgcacgtatactttgctctgctacatactcaaacttcccctctctcttcgctctcgcctggtccttcacaaagcaacctgatcgagcaattccagcattcactccgctagcgtctttcactcacaaaacttgaaacggatcgtgagactcctaaaccagaagtcgaagtttgcgtgtagaaatggacggcacgtttgacgatgaatctgaaccggccgttacaatcggcgagtacctcgaggaagttgaggaacgggaactggaagctgatttagttttggggggtgatgatggcaaggagtgtacctataacaaaagttatatgaaaaggcaggctattttctcttgcctcacctgcactccaaatgggaatgc

SEQ ID NO: 10052 - DNA, 417 bp, Glycine max
  Clone ID: LIB3092-033-Q1-K1-C2
aaagattttatccaattgaaattttaaaaatgactgggataaacttaagaattcaatggtggaaattgaataagtaaacaatttaattggattggtcgaatggtatcaaaaaaatggagtactaactcccatttcttatttattattgaattaaccgatcaacttgctttgttatcgaacatttctttttgatttcaaaaattttccggaaaaaatttgaatctatttttatatgcgaatcaatcctactacttctcgtcctgaggactctgcgcttgaaaaaaaaaaatctgggacgaatcgcccacataattggaccggtactaaatgtagcttattccccaagtaagatgcctaatatttacaacgctctgatagttaagggtcgagatactgttggtcaacaaattaatgtga

SEQ ID NO: 10053 - DNA, 337 bp, Glycine max
  Clone ID: LIB3092-033-Q1-K1-C4
gtacgttccacgcgccgtcctcatggatctggagcccggcaccatggactccgtcagatgcgggcccctacggccagatcttccgccccgacaacttcgtctttggccagtccggcgccggcaacaactgggccaaaggtcactacaccgaaggcgccgagctcatcgactccgtcctcgacgtcgtacgcaaagaagccgagaattgcgactgcttgcaagggtttcaagtgtgccattcgcttggtggaggaacgggttccggcatggggacgcttctgatctcgaagattcgggaggagtatccggatcggatgatgttgactttttccgtgtt

SEQ ID NO: 10054 - DNA, 370 bp, Glycine max
  Clone ID: LIB3092-033-Q1-K1-C5
gcgatggcaatggcgcttcgcaggctttcatcttcaattgacaagcctctgcgccctctcgtcaatgccggttccctctactacaagtcgtctttgcctgatgaagctgtttacgacaaggagcgacccggagttacatggccgaagcagttgaatgctccacttgaggtcgtggatcctgagattgctgatattattgagcttgagaaagctaggcaatggaaggggctagaattgataccgtcagagaatttcacctctgtgtctgtgatgcaagcggttggatcggttatgaccaacaaatacagtgaggggtaccctggtgcaagatattatggtggaaatgagtatattgacatggctgaaacac

SEQ ID NO: 10055 - DNA, 187 bp, Glycine max
  unsure at all n locations
  Clone ID: LIB3092-033-Q1-K1-C6
cccttcccaatctatcttctacaanccacaagccactccaccctctcgtcaatttcaaaaccctttacgtacaacccacatcttccttattaatctatttaccacaagcaacaacccttacatacattatcaaaccaatttaattctccactttaactccatcatccttatattacctatattatct

SEQ ID NO: 10056 - DNA, 400 bp, Glycine max
  Clone ID: LIB3092-033-Q1-K1-C7
tgcatatgttgcatttgtactttaccttatttcacgggccattacctatacaccgtggcggagtttaacccgatcaaagacagctaccacagagagttgagcagtcaaattccaattcctgaaaaccatggagtaggaaatgctttgcagctgaaggctttcacaagtacttttcctcgatttttttaggcatactcatgcttgttaatttgtagaagaaattatgctgagggcagtggtaccttgttggttgtcatacttcaacaaaacaagtcaattatgtatttgtatttctgtcaaaattcgatgcataatgcagctgttagcatgccttggatattgagataatgtagtgagataccttttaaaactaatgatgttcaaacagatagttcccctt

SEQ ID NO: 10057 - DNA, 422 bp, Glycine max
  unsure at all n locations
  Clone ID: LIB3092-033-Q1-K1-A7
cccacgcgtccgattcaattacaccacgcttctaaattctgagaatgaatatcgtaagatcgaagcaataaccttttttcctctgccgccactggtttcgatcccacacccacaaccctccatccttcgaatgctcttgcgttttccttaaactgcctcattccgaagccatacacacataacggtttttctaggtgctagcaatgtcgactcctgctaggaagaggctcatgagagatttcaagaggctgcaacaagaccctcctgcaggaatcagtggcgcccctcaggataacaacatcatgctgtggaatgctgtcatatttgggtgagctgaattgaaattggataaagataaaactgttctgcttacttgaataatatagntactttgttttttattttattttttttccacactt

SEQ ID NO: 10058 - DNA, 375 bp, Glycine max
  Clone ID: LIB3092-032-Q1-K1-H1
atggaagatatactgacccagctgaagaaggaaatggcggcttcacataaccgcaagcttgtccaacctcctgaaggtactcactattagtgtccaagatcacactgatattggatcatattgcatttgcagtatgcaatatatagtatgtatactctggatccttctaaattcaagaacatactggggaatgctcgaaagagcttcatctttacctccatagagtttttgtgcaatacattgtcaactttggtgaaaggatgctctctgattggtcctaaataattgaaggcactcttaaaagagccgtcttttcttaataaaaaaaaaaaaaaaaaaaaagggccgcagaaaaatgaaggcccttgtttcttt

SEQ ID NO: 10059 - DNA, 385 bp, Glycine max
  unsure at all n locations
  Clone ID: LIB3092-032-Q1-K1-H10
cccacgcgtccgggagcgtggaacctctctctctctctctctctctctgcggaaaccggaagatctcanttctctgatcagatccatccgacgtcgtttcagtgataatggctccgttcagcggcgatgagacggcaccgtttttcggcttccttggagccgcagcttgcctcggcttctcctgtatgggagctgcctatggcacagcgaagagtggcgttggcgtggcttcgatgggtgtgattagaccagagctggtgatgaagtctattgtccctgttgatatggctggagttttgggtatttatggccttattattgctggtattatcaggacttgcattaattccaaggccaaatcttattacctctttgatgggtatgc

SEQ ID NO: 10060 - DNA, 429 bp, Glycine max
  unsure at all n locations
  Clone ID: LIB3092-032-Q1-K1-H11
caagatgttgggagtgtttgtgggacttttgctgctggtggggttggctgcctctgccaaggttgatgaactcttgcagcccagttgggctatggaccatttcatccatgaaggagaacttctcaaactcaaacttgataactattctggtgctggatttggatctaagagcaaatatatgtttgggaaagtgaccatccagctcaagcttgtggagggtgactctgctggaactgtcactgctttctatatgtcatcagacggcccaactcacaacgaatttgatttcgagtttttgggcaacaccactggtgaaccttactcagtccaaaccaacgtgtatgtgaatggcgttggcaacatggagcaaagactcaacctctggttcgaccccaccaaggacttccacacctactncatcttctggaa

SEQ ID NO: 10061 - DNA, 196 bp, Glycine max
  unsure at all n locations
  Clone ID: LIB3092-032-Q1-K1-H12
cgggtcagcctgtntgtttcacttatgaggtcaccttttaggaaaagtgccttcaagtggccatggaaatgggatgctaacttgaagatggagggagctaaagtgcattggttttcaatccttaattcgctaatggggatcacttttcttgctggcattgttcttgtgatcttcctaaggactgtttggagggatc

SEQ ID NO: 10062 - DNA, 390 bp, Glycine max
  Clone ID: LIB3092-032-Q1-K1-H3
ctcacgcgttccgtgagcgctgaagttaaatttcatatcaaacaaaacaaccacaacgctagtgtaacaaactatcaaacgtataattaaacaaacgttagagtaccataaacataatcataccaacaaaacgcataccatccaattatacactttcaaatactttcaaatttatattggcaaaccccacccccctacgacctccagtccttcaaattccagcccatcaaagaatccatcgtgtcacgggaaatgacacgccgctacatgaccgacatgataacctacgccgacaccgacgtcgtaatcgtcagagccggttcggccgggctctcctgcgcgtacgagctcatcaagaaccccgtcttgagcgtggccatagtctagcag

SEQ ID NO: 10063 - DNA, 394 bp, Glycine max
  Clone ID: LIB3092-032-Q1-K1-H4
gtgatgggacatggccttcacagcctacattttttaattgctatgcgaggtttatgtctacgttaaaattggtggaagaatggtgtactcaacatgctcaatgaatcctatttagaatgaagctgtggttgctgaggttttgcggaggtgtggagggtctgtcaaacttgttgatgtttctagtgagctttcacaacttattcgtcagccaggtctcaagagatggaagatatatgacaagggcacttggttggtctcttataaagatgttcctaagtatcgtagacgtgtaattctttccagtatgtttgcttctggcagaggtcatcatgatctcgttgatagtagttgtagtgttgacccagagggctttactaatggtattaacggaaat

SEQ ID NO: 10064 - DNA, 346 bp, Glycine max
  Clone ID: LIB3092-032-Q1-K1-H5
aattcgggggcgaccacgcgtccgatggaagatatactgacccagctgattaatttaatggcggcttcacataaccgcaggcttggccaacctcctgaaggtactcactattaatgtccaagatcacactgatattggatcatattgcatttgcagtatgcaatatatagtatgtatactctggatccttctaaattcaagaacatactggggaatgctcgaatgagctacatctttacctccatagagtcctgttgcaatacattgacaactttgttgaacggatgctctctgattggacctaaatattgaaagcaactcttaatgtagcgatcattttcttatt

SEQ ID NO: 10065 - DNA, 356 bp, Glycine max
  Clone ID: LIB3092-032-Q1-K1-H6
gttcgatttaagagtgaggttgtggcttgtggagttgtatatgctgctgctcgcaggttcgaagtacgccttcctgagaacccaccatggtggaaggcatttgatggggagaagtctgggattgatgaagtatgcagggttctggctcacctttatagccttccaaaggcacaatatataccagtctgcaaggatggggactttacattctccaacaaatcatcggaatcaaagtctcaatcaacacccaaagatgttccgcaaaatagtcccccagctgatactgacaactcagtgccaaagggaactcaaggagaagctaatattgaatccaatggtagcaagggtgcaattgt

SEQ ID NO: 10066 - DNA, 299 bp, Glycine max
  unsure at all n locations
  Clone ID: LIB3092-032-Q1-K1-H7
gtctgggaatcgatgaaattatgccagggtatctggctcaacctttatagcccttccaacaggcaccaatatatacccagtctgcaaggatggggactntacattctccaacaaatcatcggaatcaaagtctcaatcaacacccaaagatgttccgcaaaatagtcccccagctgatactgacaactcagtgccaaagggaactcaaggagaagctaatattgaatccaatggtagcaagggtgcaaattgtaaggtagccattgataagctgaaagattctaaaaagtctgatgatg

SEQ ID NO: 10067 - DNA, 407 bp, Glycine max
  unsure at all n locations
  Clone ID: LIB3092-032-Q1-K1-H8
caagattttgaaggttgcagtgtaccctggaaatgtcttggccttgcacatgtctaaaccacaaggatttaagtactctagtggacagtatatttttgttaattgcccagatgtctctccttttcaatggcatcctttctctattacatcagccccaggagatgattatgtaagcgttcacattaggactttgggtgattggacatcacaactgaaagctgtttttgctaaggcatgtcaaccagcaagtggtgaccagagtggtcttctacgagctgatatgttacaaggcaacaacataccaaggatgccaaagctcgtgatcgatggtccttattgagctncagcacaagactacagaaactacgaagtaatccttctcgtgggactaggaattggtgccaccc

SEQ ID NO: 10068 - DNA, 420 bp, Glycine max
  Clone ID: LIB3092-032-Q1-K1-H9
ctctgtcttcctaacacggaacactggtttttaacccttgttgtggttaggtcttcacattgcgaatttgggaattcatgggtcagggaactccgggcggcatgaaccggcagggcgaccggaagccggacggcggcgacaagaaggagaagaagttcgagccggcggcgccgccagcacgcgtggggcggaaacagcggaagcagaagggcccggaggcggcggcgcggctgccgacggtgactccggtgacgaagtgcaagctgcggctgctgaagctggagcggatcaaggactacctactgatggaggaagagttcgtggcgaatcaggagcgactcaagccgcaggaggagaaggccgaggaagacagatccaaggtcgacgatctccgaggcttctccatgagcgtcggaaatc

SEQ ID NO: 10069 - DNA, 421 bp, Glycine max
  Clone ID: LIB3092-033-Q1-K1-A1
cccacgcgtccgattcaattacaccacgcttctaaattctgagaatgaatatcgtaagatggaagcaataaccttttttcctctgccgccactggtttcgatcccacacccacaaccctccatccttcgaatgctcttgcgttttccttaaactgcctcattccgaagccatacacacataacggtttttctaggtgctagcaatgtcgactcctgctaggaagaggctcatgagagatttcaagaggctgcaacaagaccctcctgcaagaatcagtggcgcccctcaggataacaacatcatgctgtggaatgctgtcatatttgggtgagctgaattgaaattggataaaaataaaacctgtctgcttacttgaattaatatagtacttttgtttttattttatttttttttcacact

SEQ ID NO: 10070 - DNA, 365 bp, Glycine max
  Clone ID: LIB3092-033-Q1-K1-A10
gcagatatggcatactctcaacttcaaaatgtggaaactagcctgcagatcaaggcttgtgctgaacagttctatgatgttttttgcaacaagccacacactattgccaacatttcaccagaaaatattcagtcagttgaagttcataaaagtgaatggggcaaagaaggatcaatcgtctcctggaactatttacatgaaggaacagtttgtgtagccaaacaagtgcttgaaggcatagaccaggaaaataacaaaatgacaatgaaagtcataaaaggtgacgtgcttggactttacaagaacttcaagtctaatttgcaagttacttcaaaaagaaaaggcaacgtaatgcttttggcaat

SEQ ID NO: 10071 - DNA, 417 bp, Glycine max
  Clone ID: LIB3092-033-Q1-K1-A11
cggacgcgtgggcggacgcgtgggttttgtatggtgctgatatgaaagtttcattgatggacaagggatccagtggttcgatgcggtcgagtaataataagaacgggaagaagaaaaaggagaaacctgaattggctgttcttgatcatcctggtcttggaagggttccaaagggtttagaaggagagcaagttgcggcagggtggccaacttggttttcttctgttgctggtgaagctgtccaagggtggataccgcggaaggcggatacttttgagaggtttcataaaattggccaaggaacctacagtactgtgtataaggctcgtgatttgactgaccaaaagatcgttgcgttgaagagggtacgctttgataattgtgatgctgagagtgtcaagtttatggcaagggaaa

SEQ ID NO: 10072 - DNA, 417 bp, Glycine max
  Clone ID: LIB3092-033-Q1-K1-A12
cccacgcgtccgggaaaaagttccatttttagagttcttagaggactatggccaattgcgagtggaagactctctagaccatctgaagttgtggatgaagaggatggatctggttgtggcatcttctatgttcctcaacggccatatacatgtttgggaaccctaagggatcaaattatatatcccctttcctgtgaggaagcagaggttaaagtactgaagatgtatggaaaaggtaaatatcttgggtgggagaaataaggcaggccttagaaatgcgtaaaaatgaagtttctgatcataaattaacataagcaagttggtaaatccacttagattctctattgaccaataattttggattattaccatggttaaagtgagtaatttgaagtctagatgcaatgaactactctt

SEQ ID NO: 10073 - DNA, 326 bp, Glycine max
  Clone ID: LIB3092-033-Q1-K1-A2
aaaaaagaaaattattttattttttgtttctgtatctgggtcttggaaatgtgataatagtttaattggctcgtcactctttaaaataatgagtattattgttattgataagtgtagtcaatggggacgtataatgatgggtgtttctgcattatcaacataaagaaggactaataatattttttaacttatggtttttctggcgatttgaattaaagtgagtatttttctgttgggggttgattagtttattctggtatctgtgtgggatttccaggcatttacagcaggtggcggatttgactttgctggtgaaaggtgtcagc

SEQ ID NO: 10074 - DNA, 198 bp, Glycine max
  Clone ID: LIB3092-033-Q1-K1-A3
atttcccccctcaggcttagtgattagtgtacgtccgtgtggttgaacagtgtaaaatggagtgtggttttatctcactgtgcaccttttaataagctttttttatattttcccttgttgatttttgataaggatcttggttttaccctcccttgtgttgtggtattggaaactcatgcaattgtcttgacttgcgat

SEQ ID NO: 10075 - DNA, 439 bp, Glycine max
  Clone ID: LIB3092-032-Q1-K1-G9
cttttggattaagtactgattttctctcttaatccaccatgtcgaatagccaaaatccgaagtacgatggtagctcatttctcattgacataaccaccactgtgaattacaccatcagcacagccaaaaaaagatggcgttttgcttatactgctatttattctagaagggtcatgctttccttggccaaagaaatcatatctaagagaaatacaaacactcatccttactctaaactattccaaactcaatctaccggttccggaagcactcttgatatcattgagccactaattccccaacatggtaccaataatcattattctttggttcctgatgttgacaaagccagacttgctagcatggtaaaggacaaaaacttggaagcctttgttgagtttggaagagttgaaggtgttgcaaatactctaggaaccat

SEQ ID NO: 10076 - DNA, 460 bp, Glycine max
  unsure at all n locations
  Clone ID: LIB3092-032-Q1-K1-F11
cccacgcgtccggtgagaggagagagaaagtagctgatcctccatggcctccaccaaggaaggcgaaaactttgtctacaccgccaagctcgccgaacaagccgaacgctatgaagaaatggtggaagcaatgaagaatgtggcgaagctgaacgtggaattgacggtcgaggagcggaaccttctgtcggtagggtacaagaacgtggtgggtgctcgtagggcttcgtggaggattctatcgtcgattgaacagaaagaagaagctaaagggaacgatgtgagtgtgaagaggataaaggagtataggcagaaggtggagtctgagttgtccaatatctgcagtgatatcatgactggtattgatgaacaccttattccctctagctctgctggtgaacctagtgtctttttctacaaaatgaanggggactattaccggtacctngcggagttcaag

SEQ ID NO: 10077 - DNA, 332 bp, Glycine max
  Clone ID: LIB3092-032-Q1-K1-F2
atcctcagagcttgccgttttcatctaaacctttcggacatctgattctgtggagtcattttcattattacggctgccaaaatgtccacctcatcggaatattctgcattttccggcccccgcccggccaagtcaccggccgacaagtccactttctttcatactcgtagtctatttagccaatacatcaaggaaaaaagtgccttctgagaccttaccctcgggatgactcgcacccccgatacttacagatcccctgagacatcatgtcactctgcaacaaccatggagttgtttcccaccatcatcaagcaacggaacccaactactgt

SEQ ID NO: 10078 - DNA, 251 bp, Glycine max
  Clone ID: LIB3092-032-Q1-K1-F3
cacttgaccagattagtgagcccaataggccctctgacaagcccctcaggcttccccttcaggatgtgtacaagattggaggtattggaactgtgccagtgggacgtgttgagaccggtgtcttgaagcctggaatggtggtgacttttgcaccaactggactgacaactgaagtcaagtctgtggagatgcaccatgaatctcttacagaggcacattctggtgacaatgtgggattcaatgttaagaat

SEQ ID NO: 10079 - DNA, 396 bp, Glycine max
  unsure at all n locations
  Clone ID: LIB3092-032-Q1-K1-F4
cgacgaggccctcgcacgtgttcaggaggcctggcacgtgctctcccaccctgaacgccggggccgccacgaccgcgagcaaaacgcaaacgcaaaccctaggaggacgacgacgtcgttttggaccgcgtgcccctactgctggaacctcttcgagtacgagaaaaggtacgaggattgcgcgctgttgtgccaagtctgcgggaaggccttgcagggcgtgcctgtgaagccgncaaccaagacgggcgactccgtcgtggagggtgaggagctccggcagtactactcgtgtgaagcgagtgtgccattgatgtattacgaggtttaaggtaacaatggtttgggttgaccaaatattgcacaatttggttacatttctgatgatgattatga

SEQ ID NO: 10080 - DNA, 360 bp, Glycine max
  Clone ID: LIB3092-032-Q1-K1-F5
acttaacagaacgtgcactcaatgtctcaagaagtcctgcaattcgtgcattacgtgctcagaccgataaaagggactatgccattcaaatgaaaagtgtactagaaagcactccaaacctttctattcgagaggctatggtcacagatattttactagggaagaatgataacgtggaaggtgtttgtacattctttggaatgaaattctatgctccgtctgttattctcaccacaaggacttttatgagtggtaaaatttgggtcggtagaacttctatgcctgcaagaaaagcttgccagtctgcttcacttggattaacagaaaacttacaacgactttggtttgaaaacttatcgt

SEQ ID NO: 10081 - DNA, 369 bp, Glycine max
  unsure at all n locations
  Clone ID: LIB3092-032-Q1-K1-F6
ttagcttcttgcatcctcagagcnngccgtttacatttattgctttcggatttctgaatcggtagagtcattttcatttttacggctgccacaatgtgcagctcatcggaatattcggcattcttcggcccccgcccggccaagtcgccgctctacaagtccactttctctcatacttgtagtctattgagccaatacatctcggaaaaatgtgccttcagagaccttactctcgggatgactcgcacccccgatacttacggcttccctgagacatcatgtcactctgcaacaaccatggagtagtttaccaccatcatcaagcaacggaacccaactactgtggatttcctatcttcccagagtgct

SEQ ID NO: 10082 - DNA, 432 bp, Glycine max
  Clone ID: LIB3092-032-Q1-K1-F7
gacccacgcgtgcgctttggaccagcataacgagcccatttcgcttttaggcaagcaactcaagcacagggtcaagcatttatccaaaattggaggtataggaactgttccaacatgacatgttcataccggtatctagaagcctggaatgctcgtgacttttgcaccaactggactgacaactgaagtcaagactgtggagatgcaccatgaatctcttacagaggcacatcctggtgacaatgtgggattcaatgttaagaatgttgctgttaaggatttgaagcgttgttatgttgcctcaaactcaaatgatgaccctgcataggaggctgctaactttacagcccaagtcatcatcatgaaccaccctgttcacatcggaaatgcttatacccctgtcctctactgcaacacttctaacattgattt

SEQ ID NO: 10083 - DNA, 362 bp, Glycine max
  unsure at all n locations
  Clone ID: LIB3092-032-Q1-K1-F8
cccacgcgtccggtttcctacaattgctctcttcccaaatcgccaccaaaacaaaataaaagcaatagtaataaagaaaattacttatagatttttgtgatacgcctgcagttgttgttctcagtctaagatcaccgtcgaggtcttccccattcaatcaaagcacaaaaatggaggtgactgttttcactcctgcactggaaggaattaagcttgtaaaatcagagcaaggagaaattttgacccagcctttcttggatgcttgcaagcatatacttcctgttatagataagtttggagctgctatggcccttgttaaatctgacattggtggtaacatatcgagnatggaatctaagtac

SEQ ID NO: 10084 - DNA, 469 bp, Glycine max
  Clone ID: LIB3092-032-Q1-K1-F9
atttcgtcaattccaacaacaccacaatgggtagaagaccggcgaggtgttaccggcagatgaggaacaaaccgtacccgaaatcccgtttctgccgcggcgtgccggagccgaagatccgaatctacgacgtgggaatgaagaagaaaggcgtggacgagttcccgttctgcgtgcacctggtctcgtgggagaaggagaacgtctccagcgaggctttggaggcggcgcgcatcgcatgcaacaagtacatggccaagttcgccggaaaagatgccttccacctgcgcgtgagggtgcatcccttccacgtgctccgcatcaacaagatgctatcgtgcgccggggccgacaggctccagaccggcatgaggggcgcctttgggaagccgcaggggacgtgcgctagggttaacattggtcaggtgctgctctcggtgaggtgtaaggatgctaacagtcaccatgc

SEQ ID NO: 10085 - DNA, 64 bp, Glycine max
  Clone ID: LIB3092-032-Q1-K1-G1
ctttagttcttcataaggtggtcctaatatggctaggttaagaacttaataacaggatcaggca

SEQ ID NO: 10086 - DNA, 302 bp, Glycine max
  Clone ID: LIB3092-032-Q1-K1-G10
ggaacccaaggaaaaatgtcagatcatatccttaaatggggagaaaaacaaagctattggtgctataaaaagattgaactcaacagttccagtttgggaaggaaattctgcacactttgttaagaataaacatctgattatttcacagaatcttgtgcactctcctgctttagatccactttacatggtgcgagaaagcctaaaatctgcaaggctgagccttctgggattcaaaaatagatcagaccaaggcataggtgatatctgcttttgagacttttctactatgagtagaactcaca

SEQ ID NO: 10087 - DNA, 349 bp, Glycine max
  Clone ID: LIB3092-032-Q1-K1-G11
ctcacgcatggaaaaacgtcagatcatattctataacggagtgaaaaacaaagctatcgatggtatattttgattgagctgggagtgacagttccgcaaggaaatatctgcacacttgtctcagaataaacatgttactatttcacatattctggtgcactatcctgctttagatccaatttacatggtgcgagaatgccttataatctacaggctgaacctactgggactctagaatatatcaaaccagggcatacttgatatctgatactaagactatcatactatcactaaaactcacatctgcattcctttcaatttactaattcattcgagaaactacattgac

SEQ ID NO: 10088 - DNA, 276 bp, Glycine max
  Clone ID: LIB3092-032-Q1-K1-G2
actcacgcgtccccttcaattcacaacaaagtggaccttatatttttcggtttagaacttaataacaggaacaggcattgaactggcattaaatgtattattgaattatgcatacgataggtgcattccggaattaatcacctgcgtatactcttgactctgttgatgaccttatatggtgttagctgctttaaccccggctctccaagtgactaataaagtctgacaaatccatggagtgaatgagacatagaatatcttcgatgcttgcaagca

SEQ ID NO: 10089 - DNA, 389 bp, Glycine max
  Clone ID: LIB3092-032-Q1-K1-G4
attttatccaattgaaattttaaaaatgactgggataaacttaagaattcaattattgaaattgaataagtaaacaatttaattggattggtcgaatggtatcaaaaaaatggagtactaactcccatttcttatttattattgaattaaccgatcaacttgctttgttatcgaacatttctttttgatttcaaaaattttccggaaaaaatttgaatctatttttatatgcgaatcaatcctactacttctggtcctgaggtttctgcgcttgaaaaaaaaaatctgggacgtatcgcccaaataattggtccggtactagatgtagcttttcccccagggtagatgcctaatatttacaacgctctgatagttaaaggtcgagatac

SEQ ID NO: 10090 - DNA, 395 bp, Glycine max
  unsure at all n locations
  Clone ID: LIB3092-032-Q1-K1-G5
tttgaaattcttaaaaccctaactggtccgaaccattggagccaccgtgcaatagttcctggtctcgctctctccctcaacacaccattgattttggtttcagctttatttggaagagggttgtaacgctgacgtgaaatttttctgaagacaaagatgcaggcttgtacaacgatgagttctttgcagcaacaacctatttggaccaaagggttaaatttccctgcaaaagggtatggcagcaataacgggtttctacctcaggtgaggttctgcaatattaagccatccaaagcttctcatgttgaagcaaggttagtcactgggaagccgtcatctgtgcctttctttgggcctgaaaatggangcgacgggaagtagctttctggactatg

SEQ ID NO: 10091 - DNA, 267 bp, Glycine max
  Clone ID: LIB3092-032-Q1-K1-G6
cccacgcgtccgattcacaacacactgaatcatatagaaagcattatcacaaattgttcgagtcattgatcttctcttctctttttcccccataaagattattccatcgcatggtaggttcctgcaactacgtacatgcaaatggaaaacatagtgtgtgtagcacagcgcattaatatggggacaagaatcacttttcagttggaagaaaggtataatttacagcacggaatgtctggggcgggtggagctatacgtgtggagaga

SEQ ID NO: 10092 - DNA, 334 bp, Glycine max
  Clone ID: LIB3092-032-Q1-K1-G7
acgcctacgcttcctaaaaacctaactgtgccgtttaattttagcccacgtccaataatcccgagcatgggtttcttcctcaaggtactcacgatcatggtttaagcttcacttgtaacatggtcataacgcattactcaggaagctgtatgaagtctgtgtagtatgcatccacatagatgcatgaacatgctccactatctatgagcaacctaggtctaaacttccatacagaattgattctctacaatgaacaggtttgtacgctaggtgctgtcttacaatacctatacatcgaaagcttctcatatagaagctggcttcgtcaattaaa

SEQ ID NO: 10093 - DNA, 464 bp, Glycine max
  Clone ID: LIB3092-032-Q1-K1-F10
cactgataacacaaagcacaaagcaaagctcatccttgagttaaaaaatggcagcagcttcgtccatggctctctcatccccatccttggctggcaaggccgtgaagctgggcccatcagccccagaagtgggaagggtgagcatgaggaagaccgtcaccaagcaggtctcctcaggaagcccatggtacggcccagaccgagtcaagtacttgggcccattctctggcgagcccccgtcctacctaaccggtgagttcccaggcgactacggctgggacactgctgggctttccgcagacccagaaaccttcgccaagaaccgtgaactcgaagtgatccactccaagtgggccatgctcggagccttgggctgcgtcttcccggagttgctgtcccgcaacggggtgaagttcggagaagccgtgtggttcaaggccgggtcccagatcttcagcgagggt

SEQ ID NO: 10094 - DNA, 345 bp, Glycine max
  unsure at all n locations
  Clone ID: LIB3092-032-Q1-K1-D12
cccacgcgtccgagccactcgagaaaagcagcatagtgagatactacgtatactacgtagtggtacacatttcatttgcctcttgtagtagccatggttttccaaacaaacattaatcctcacttcgtattgtttcctctcatggctcaaggccacatgatccccatgatggacattgcaagactattggcacggcgtggtgtgattggttccatattcaccaccccaaaaaatgcatcacgattcaattctgntctttctcgtgatgtttcatcaggccttccaatccggctagtacaactncattttccattcaaaagaagcaagactaccctgaaggtgtga

SEQ ID NO: 10095 - DNA, 281 bp, Glycine max
  Clone ID: LIB3092-032-Q1-K1-D2
caaatattgaggaaaggtggtctgaaagaagaaaatattattgtttttatgtatgatgacagtgcattcaatggggaaaacccaaggcctggagtcatcattaacaaaccagatggaggtgatgtttataaaggagttccaaaggattacaccggcgaagatgttactgttgataacttttttgctgctttacttggaaataagtcagcactgactggtggcagtgggaaggttgtggacagtggtcctgatgatcatatatttgtatactatactgacca

SEQ ID NO: 10096 - DNA, 94 bp, Glycine max
  Clone ID: LIB3092-032-Q1-K1-D3
tcggtctctgaattacccgggctcgatcccacgtcgtacacggtgtctaccctgaattccctctgttataatcgtagtatgtcagttagctgat

SEQ ID NO: 10097 - DNA, 364 bp, Glycine max
  unsure at all n locations
  Clone ID: LIB3092-032-Q1-K1-D4
ctngtccgctttaatagttacccatagttttgtcatctgttgttaccttaactctacatatggggctgcttcaacgaatgacgtctcgtcttcatcagtcatctggcttggcgcaagctatcgaagcttgccgccctccaccccatgagcttggtgttggaagggttagcatgaggaaaacagcctccaagactgtttcctcaggaagcccatggtacggcccagaccgtgtcaagtacttgggcccattctctggtgagcccccatcctatctcactggtgaattcccaggtgactatggttgggacactgctgggctttctgctgacccataaacttttgccaaaaaccgtgaactgaaagt

SEQ ID NO: 10098 - DNA, 372 bp, Glycine max
  unsure at all n locations
  Clone ID: LIB3092-032-Q1-K1-D5
gacaacccccctttgacgtggaagcagcgcttgcagatctgcatcggcgccgcgcgtggactgcatgacctccacaccggcgcgaagcacacgatcatccaccgcgacgtgaaaactaccaacattttgttggatgataagtgggtggccaaggtttcggacttcgggctttcgagaatcgggcccacgggcaacgccaaggcccacgtcagcaccgttgtgaaaggcagcattgngtatttggacccggagtattataaacgacagcgtttaactgagatatctgacgtgtattcctttggagtgngtgctgttgagttactctgcgctcgttcgnctctgatcagaactgcggagaagaacaggtgtcgc

SEQ ID NO: 10099 - DNA, 336 bp, Glycine max
  Clone ID: LIB3092-032-Q1-K1-D6
gcaaaacaatgaaagtacaattcaccaagcgtccctatgcacaaccttatggtgtatatacatggttaacggatattaaagacacctctaaagaaggatatagttttgaagagatatgcatcaagaaagaagcgtttgagggagaagagaagttttgtgcaaaatccttgggaacagtaattggttttgccatttcaaagctgggaaagaacattcaagtactttcaagttcctttgtcaataagcaagagcaatacactgtggaaggagtgcagaatcttggagacaaagcagtgatgtgtcatgggctaaatttcagaactgcagtattttact

SEQ ID NO: 10100 - DNA, 146 bp, Glycine max
  Clone ID: LIB3092-032-Q1-K1-D7
ccaacacactcaacctccacacaaccaaactttcctatctcaaacctctttatctctatacagacaataatctgatactataatcactcaatctcatatcaatttactaattcaataccttaatccatcacatatactctactata

SEQ ID NO: 10101 - DNA, 316 bp, Glycine max
  Clone ID: LIB3092-032-Q1-K1-D8
cggtcgaccacgcgtccgcaacactctcaagcttcacactaccaaactttgctatttaaattcgcatgatctatacaaggtcatgtctcttactatcttcatcaactcagatagatatctaatgaataccctatactctcatatctctatgtatctgttttacattacttagcataccatcttccaacgtcagtgcttagctgaattaaacatatttctccatatcacattcctgtcttcatcctttttaatattcctgttctagttcactttcaatgtttcagcgttctttcttttcgacactcattgatcatat

SEQ ID NO: 10102 - DNA, 469 bp, Glycine max
  Clone ID: LIB3092-032-Q1-K1-D9
cccacgcgtccgttcctccgcacttagcatatggccctgaacctgcagggtgcttctcagggtactgcaatatacccgccaatgccactcttctgtatgatattaattttgttgaggtttattcggggaacagatcaaagtgaagtcagtcaaaactggtcagatacatatatacatatgaaccacagatggatgggtttagagcaatgaaatggacattttgctagagaatatggatcaacttgtttggcagaatcttcttcctgattacaactacctcaagttactgttcctggctagtggagttgtacatgattgacctggatatcccttttgagagtaatgagcaatccttactggtgatatatattaagataattcatgtggatctgtgcacatgacatgcgaacagtttgtgcatctttaagtgtaaatgaattttcaatactgctcttaatgataaaaattg

SEQ ID NO: 10103 - DNA, 86 bp, Glycine max
  Clone ID: LIB3092-032-Q1-K1-E1
attgcaccgacattgcaacttattttttattctttccagctgcgatccaaacagaacaagctgtctcgtgactgagataacaacgt

SEQ ID NO: 10104 - DNA, 430 bp, Glycine max
  Clone ID: LIB3092-032-Q1-K1-E11
tgatcattcaccacatttcatttacacaaatcatcaatggcctctcttgtatcctcaagtgttcttttacacctctttctcataatttccgcgctccatttgggcgcagcagcaagaattctgagtgaaaaggaccaacaacaacaattgcagttccaataccacaaaggccctcttctcagtggcaaaatctccgtcaatctcatctggtacggtaacttcaagccttcccagcgagccatcatctccgatttcatcacctccctttcatctcacaaatccacagcccaaccatccgtcgccacgtggtggaaaggtacccaaaaatactaccaactcataaagtcatcaccaaaactcaccctcactctcggtacccaaatcctcgacgagaactactccctaggaaaatcactcaccaacgacaaca

SEQ ID NO: 10105 - DNA, 386 bp, Glycine max
  unsure at all n locations
  Clone ID: LIB3092-032-Q1-K1-E12
cgcatctttgtcttggtcaacaccaaaaatatctgttgctctctactctgcttagggttcgagcttccaacccaacacttatcgttctcatgcatcaagggaaaatgaggcctattttctgtggaaattttgaatatgatgcccggcagtcagagctggagcggctatgtagacgatatgggaaggttgatagggtggatatgaagtctggattatcctggcatatccatttactcgcaagccaatgggtgggcttttcagaaatccattttctgcctgtgatgcacatcttcttcttttaatgaagaattgntcaatttgatctgcaatggcacacctgttccacgtattcatccgtcacatttgcctttcaattcttgtgcctt

SEQ ID NO: 10106 - DNA, 195 bp, Glycine max
  Clone ID: LIB3092-032-Q1-K1-E2
cccacgcgtccgggtgtctgctgatggtgttgttatctttgcaggttatccaggtgaacagggaactagaggtgaagaagcggccaaatttggtcggccaaccaaattgtgcaggttatcttgggggataaggttcttagctcagtctagtttagatgtatatgaaactgcttgaaagaagtttgaacaggcttc

SEQ ID NO: 10107 - DNA, 241 bp, Glycine max
  Clone ID: LIB3092-032-Q1-K1-E3
caattgactactacagatatggtgttactattagtggcctgtatatggtcatgggtgttgcgggtgtaaaccagttagcggatattcaaattgatatcagaactgacgatgcatcatgatacatctgcatcaattgtccttgtaacaagttcatcatattgactacagttagccacaaaaggtatgctgctttatgtagaagcttgaactaaaccacatcttaatctattggatgcttcaa

SEQ ID NO: 10108 - DNA, 402 bp, Glycine max
  unsure at all n locations
  Clone ID: LIB3092-032-Q1-K1-E5
tttacttgtcaggcggagcgggaattgcagccctggattgccaaggatgatgattcaggtcagaagatgtggagaatcaatcagcggattgtaaaattgattgtggaacttatgaggaatcatgagactgcagaatcattggtaattgtggcaagttcatcagatttactactgcgagccacagatgggatgctggttgatggagaagcttgcactttaccacagctggagctattggaagcaacagctagagcagttcagccagtgctcgagtttggagaatctggattggctgtggcagatggcctttcaaaccttttaaagtgtcgcctctcagctacaattagatgtctttctcatccaagtgcacatgtncgagctctgagtatatcagttcttcgt

SEQ ID NO: 10109 - DNA, 321 bp, Glycine max
  Clone ID: LIB3092-032-Q1-K1-E6
cccacgcgtccgcccacgcgtccgcctgcttccgcggcttgccacgtggtacaaatccaaggacgtagcgcagaggatccttctctcagttgaatgccaaatgaggaggtgttcctacacgctgggtttgggtgagccgaacctagcgggcaaaccgagcctgctctacgacctcgtgtgtaagccgaacgagatccacgcgctgaagacgacgccgtacgatgagcgcgtagagaatcacgagaaccacgcgttgcacgcgacgcaccagatcgccgagtcgtggatccacgcgtcgcggaaggttctagagaggatcgc

SEQ ID NO: 10110 - DNA, 391 bp, Glycine max
  unsure at all n locations
  Clone ID: LIB3092-032-Q1-K1-E7
cccacgcgtccgcccacgcgtccgatagaatcgtcgattttctctgtctctgactctagggggtcatgattttcttctgtagatccatctatctagcttcggagctgcaaatggacgtcgcagtcactgccttacggtcaccgctgatcatcctccgaagaccggtcaacgagtctgcctcagctcggttcggttccacttttgggttttccagaaagcaacggttcagttcagtatgtatccccaaacacaagcacaagcaaggtcgtagaagagggtttgtagttagagcttctgcatcctcatctacggagtctgatgatgccaagattgctcctcttcagtttggatcctcaattgggcagntcctttctcagatgttgaaagatca

SEQ ID NO: 10111 - DNA, 296 bp, Glycine max
  Clone ID: LIB3092-032-Q1-K1-E8
ttagctccttccatcctcagagcttgccgtttacaacgattcctttcggttgtctgtttctgtggagtcattttcatttttacggctaccagaatgtccagctcatcggaatattcggcattttccggcccccgcccggacaagtcgtcggccgagaagtccactttctctcagacttgtagtctattgagccaatacatcaaggaaaaaggtgccttcggagaccttaccctcgggatgactcgcacccccgatacttacggttcccctgaaacatcgtgtcactctgcaacaac

SEQ ID NO: 10112 - DNA, 253 bp, Glycine max
  Clone ID: LIB3092-032-Q1-K1-D11
ctcctcaatttaatcaatcctttttggtggaatagagctccactcaggatcgatagcatgtgtagctgattgtgcatttgctaatcatgctcatctcagtcttctctattcttctgcatctggatgattaaaattaggtttacaattaagttctggcgaagtttctatagcatacaaaagcaaagagaaactttgtttcgaaaagtgcaactctattgagtattgagtattgacaatacaatatctccttgtc

SEQ ID NO: 10113 - DNA, 311 bp, Glycine max
  Clone ID: LIB3092-032-Q1-K1-F1
cccacgcgtactgattagtaccacttatatttataaatagaataactgaatatcgggtagcgcaaaataaagatttaaccaaatgcaattcatatgaaaaaagccaattaattctttacaaagaacaacaagtaaacgcattataaaaaaaaattagaaaacaatatagatacgatcttttatcctataattttatcaattatgcagataagaaagactcatatatttatggatatagatccctatttcaaggtaaataaaaccaagtgatttcttctaattacaacacgtataaaaaagaattattggat

SEQ ID NO: 10114 - DNA, 359 bp, Glycine max
  Clone ID: LIB3092-032-Q1-K1-B12
cccacgcgtccggaaacattctaaaacaaaggacccagttttacatttttttttgttcctgagttccaatggctcttcaggctgcttccttggtttctgcttctttttctattgctaaagagggaaagtctggtgtatctctcagggacaccacaatgtttggtgtttcattgtcggatactctcaaatctgacttcagctctccctcatcgacttgcaaaagggaattccaacaaaaatttggccctttgagggttcagtcagtggcaacaacaactccaggagtcaccaaggcttcaccagaaggcaagaaaactttgaggaaaggcagtgttattatcactggggcttcctctgga

SEQ ID NO: 10115 - DNA, 354 bp, Glycine max
  Clone ID: LIB3092-032-Q1-K1-B2
ggttcataacacactgtggttggaactctactatagaagcaatatgtgctggggtgccaatgcttacatggccactatttgcagatcagtttttgaatgaaagtctagtggtgcatgtactaaaagttggattgaaggttggggtggaaattccacttacatggggtaaggaagtggaaattgctgtgcaagtgaagaagaaagatgttgaaagggcaatagcaaagttgatggatgagacaagcgaaagtgaagaaagaagaataagggtgagagagcttgctgagatggctaacagagccgtaaagaaaggggcttcatcatattctaatgtgaccttgcttatccaggata

SEQ ID NO: 10116 - DNA, 255 bp, Glycine max
  Clone ID: LIB3092-032-Q1-K1-B5
actaagcgttcgtaacccactgatcatggatttccattatcgatacgatctgcacctacttggctcagcttacatagccactagagacatatcatcttctgaattaaagcctaatgatccatactactacaaaattccttagatacacgtattctaatttacttaacgtactctaatgcagtcaataatgccttacatgccaataacatcaatgatgacacggcaactgcaaaatatatggattagacaatcata

SEQ ID NO: 10117 - DNA, 285 bp, Glycine max
  Clone ID: LIB3092-032-Q1-K1-B6
ctacgcgtacgcgtgggttgcaacaaaggactatattctagtttttttagaaagaatcacatgttgaggaatgggttatatgtggcaactgccgagctggagtatcgaaacaagaacattggcagacattcatgaaagcgaaagccaagttgaggaattgaatcactacgtgctattccttggatttttgcatggacacaaaccaagattcatttgccagtgtggcttggctttgggtcaacatttaagcatgtagttgagaaagatcccaaaaaattcctaaat

SEQ ID NO: 10118 - DNA, 443 bp, Glycine max
  unsure at all n locations
  Clone ID: LIB3092-032-Q1-K1-B7
cccacgcgtccggaaacaatggccaatgtttcaattccactcccacgaaacggtttctccaagcccaggtactcgacaaaacgcccatgtttcaccccttcagcttcaacactcagaatttcttgctctggagtggctgagtttgatggatctcatcagaaaaaaggaggtttgtttaatttcaatggaatcaagggcgtggcttgtggtattcttgcagcttgtgctgntacttctgctgcatttcctgttactgctgctactcagaggcttcccccattgtcaactgagcccaatcgctgtgagcgtgcatttgttggcaacacaattggtcaagcaaatggtgtatatgataaaccattagatctccggcaatgtgatttcacaaatgagaaaaccaaccttaaagggaagtccctgtctgctgcactcatgtcagatgc

SEQ ID NO: 10119 - DNA, 298 bp, Glycine max
  Clone ID: LIB3092-032-Q1-K1-B8
cccacgcgtccggcacgctaacacagagtgttacagtcacctgtgttcgtcacagtcacagagaatggttccaatcaattcccgtcaattatagattctttgacgctgctcggaactctctatcatcacccaactccgcgatctgcaaatggaaaagaaaggccaattataaccgtcatagttctggaatggggaccttcaccactcgcgcgttggcgcagccgtttcagaacgcctgcgaactcatctgactccgtcgagacatttatcttcgattgtgacggagatatatggaaag

SEQ ID NO: 10120 - DNA, 408 bp, Glycine max
  unsure at all n locations
  Clone ID: LIB3092-032-Q1-K1-B9
gcacgaatatcttgttgtttggagcgatccgagaaaaactctgtaaacatgttggtttaccgggacctccttacaggtgatgagcttctctctgactccttccgttacaagggaattgagaatggaatgctgtgggaagtttaagggaaatgggttgttaaaagagcagttgatgtagacattggtgcaaacccttctgctgagggtggaagagaagatgaaggagttgatgatgcagctgttaaggttgttgacattgttgacacattcagacttcangagcaacccgcattcgataagaagcagtttgttaccttcatgaagaggtttatcaagaatttgacttccaagctcgatgcagagcaacaggagtttgttaggaagcacatcgagggagcaactaaatac

SEQ ID NO: 10121 - DNA, 280 bp, Glycine max
  Clone ID: LIB3092-032-Q1-K1-C1
attcgagggacgactgacgccatcggtaacttaatcactacgtcctccatttgggctttttctgcacaaatccaaagtctagaactggggctatttgaatccatcctagcgttgcctccgaccatatatcctaccctatttatatagctgcacacaccaaatattataggataatcggagttgcactgacgtggagaaacattgacggcggatcatcccgacgattgccacagcctgcgggcaatcgacggcatacagtgcatttaagacggaaaggggg

SEQ ID NO: 10122 - DNA, 420 bp, Glycine max
  Clone ID: LIB3092-032-Q1-K1-C10
atcaaatctaggctttgatggaactgtacaagagcctcgaaagggaatcagaagtggtcaggtacctggtagcaaatgcatcccttttgcacagttgttagatagttcacagacattgttaccagcagatgagttgaagaagcgatttgaacaagaaggcatctctctggaaagcccagctgggacttcatgtggaacaagcgtaactgcttgcattcttgcattgggtcttcatcgtcttagaaagtctgatgttgcaagttatgatggatcttggactgaatggggagcacaatccaatacaccttgtgacactttatgaattcaatacagcttaaattgcatgccaccaaaaagtatctgcaagtgaaggggcttgtttcatttgtcaaacattttgaacacaccaatttttggatg

SEQ ID NO: 10123 - DNA, 394 bp, Glycine max
  Clone ID: LIB3092-032-Q1-K1-C12
gaagcattagcactaggagcagcaacaactagtctcagctgaaatggcctcttcagtgatggcatctgtggccctcaaacctgcccctttcactgttgagaagtcctcagtgagaggccttccctctctctcaaggaactcttcttcattcagagttgtggccagtggtggcaagatgatcaagactgacaagccttatggaattaatggtggcatggctatgaaggaaggagttgctgcatctggcaagaaaggaaagggaaagggtgtctaccagtttgtcgactaatacggtgctaatgtcgatggctacagtactatctacgacaccaacgactggtctacaaccggtgatgtctacgctggcagtactactggtctggctatctgggct

SEQ ID NO: 10124 - DNA, 238 bp, Glycine max
  unsure at all n locations
  Clone ID: LIB3092-032-Q1-K1-C2
ctcctcttctcttcttttccaaaaacaatgaatctcattagcaccatcaaccccaaaaacctgaaactaagccccaaacgcttctttcgtaaaaaggaaccatctttagtctcacgctccgacccgncttctttcggatccggatcctcttccggtgactcttccaccgcaaatcacaaacctttcgccggtaaccaaacttcgaccagcgttcttccggacgtcttccgcgagtggt

SEQ ID NO: 10125 - DNA, 295 bp, Glycine max
  Clone ID: LIB3092-032-Q1-K1-C3
agtgcttagatttccctacgaccatatattataccatctatacatatcttcacatacttaatactatataatcatgggtgttgaactaacgttgaagatcacgagggccgaacttgaggcctttcgacagagccttatggcagacatcggcatccagcggcgtacagacgatgatgggaggagaacccacaagattggttgctactatgaacatgatgatggaaagggtaccttaatctgtgtcacttgtggagtttcctacttaggtcttaccttggtcaaccatctattgctc

SEQ ID NO: 10126 - DNA, 446 bp, Glycine max
  unsure at all n locations
  Clone ID: LIB3092-032-Q1-K1-C5
tccatcttcaacttcaacacttaaactccttttagtttcaataatccacaccccaaaccccggatctgtccctatttattttcatcttagttttccctaggaccatatattataccatatttatatatcttcacatacttaataatatataataatgggtgttgtacggacgtgggagagcaggagggcggagctggaggcctttcgccggagcctggtggcagccgccggcatccagcggcggaaagacgatgagggggggagaacccacaagtttgtttcctcctatgaacatgatgatggaaagggtaccttaatctgtgtcacttgtggagtttcctactttggtctngccttggtcaaccatctctggctcttaggttactctcttcgagtcaccgttgacaacccagaggacatagagaagctgagggaaatggagaggc

SEQ ID NO: 10127 - DNA, 296 bp, Glycine max
  Clone ID: LIB3092-032-Q1-K1-C6
agattctaaagaaatataactaatattctttagaatattcacaatgaatattaaattcaaaggaactgtagatagagaaaagactgaaaaaggaggatttgaaatgcgagatctaaaaacatatctatccgtggcacctgtagtaagtactctatggttcggagctctggcgggtctagttgatagagatcaatcgtggttgtccagatgcatagatatctccgtatctttcattctaagtattgacacgtagagtagtgaagaagatcatagatccatttaagggtcaaatatat

SEQ ID NO: 10128 - DNA, 295 bp, Glycine max
  Clone ID: LIB3092-032-Q1-K1-C7
agattgtaaagaaatataactaatattccttttaataatcaaaaagaatattaaattcaaatgaattgtagatagagaaaagacttaaaaaggaggatttgaaatgcgagatctaaaaacatatgtttacgtggcaccagtagtaagtactctatggttcggggctctggcaggactcttgatagagatcaatcgtgcttgtccagatgcattgatatgtccctatttttcattctagagattgacaccgaaaggggtgaagaagattatagatccaattaagtgttaaatatat

SEQ ID NO: 10129 - DNA, 347 bp, Glycine max
  Clone ID: LIB3092-032-Q1-K1-C8
cttgtttgcaaggcacagaagcaagaggatattgatgtcagcccaatctctcgccggttagctctaaccgtgctcattggtgctgctgctgttggctccaaagtccaacctgctgatgcagcttatggggaagctgccaatgtgtttggaaagccaaagacagacacagatttcctgccatacaatggagatggattcaaactatcgattccctcaaagtggaacccaagcaaagaggttgagtacacaggtcaggttgttagatatgaggataactttgattcaaccaccaacgtggttgtcaccatcactccgactgataagaagtctatcactgactatggttc

SEQ ID NO: 10130 - DNA, 319 bp, Glycine max
  unsure at all n locations
  Clone ID: LIB3092-032-Q1-K1-C9
cccacgcgtccggaagaaaccctagccactctcccggcgtcacgatgcagatcttcgtgagaccctaacgggtaaaacgatcacgttggaggtggagtcttcggacaccatcgacaacgtgaaggccaagatccaggacaaggaaggcatccctccggaccagcagcgcctcatcttcgccgggaagcagctggaggacggccgcaccctcgccgactacaacatccagaaggagtccacgcttcacctcgtcctccgncttcgtggcggcgccaagaagcgcaagaagaagacctacaccaagcccaagaagatcaag

SEQ ID NO: 10131 - DNA, 293 bp, Glycine max
  Clone ID: LIB3092-032-Q1-K1-D1
cgcacaacccccgtttgacgtgtaagcagcgctttcatatctgcatcggcgcctcgcgtgaagggcatggtctccacaccagcgcgaatgagactatcattcaccgcgacgtgaaaactaccaacattttgttggatgataagtgggtggccaatgtttctgacttcgggctttcgagaatcgggcccacgggcaactccaaagcccacgtcagcaccttttttaaaggcagcattgggtatttggacccggagtattataaacgacagcgtttaacttagaaatcttacgtg

SEQ ID NO: 10132 - DNA, 141 bp, Glycine max
  Clone ID: LIB3092-032-Q1-K1-D10
tataccgcgcgaggccactcaccattctgataaacatggctccatatcctaattaccacacacctcaaatattagcaccatatatattgtacggaccacatctatactacatccatgcatttgaaaatgcagatcacacca

SEQ ID NO: 10133 - DNA, 276 bp, Glycine max
  Clone ID: LIB3092-032-Q1-K1-B11
cgaccgactcataccatatgactaacaacaaattttctaacatttctgcatcaataccaatacaattccgttgatagagatttttaaaacagtgtttcgcccatcaaagtcttgtttccaccaccaccaccaccaccacaacaacaacaacatgcttttttcactaggcttggaaaaagtaacttttttcacgatcttatcaacacaacgtttattcattgcctctgcatacttccacctaaaacctatgttttctcctttaccctaaacactttc

SEQ ID NO: 10134 - DNA, 255 bp, Glycine max
  Clone ID: LIB3092-031-Q1-K1-F12
ggaataggagcagataatcagaaaacaatggccgtagcaataggaagaagcttctgcatgcagcccggctctttattcaacaacaagagcttggatagaggttcaccagcttgaagattatcggggctttggggatggtgctgctgccactccacgttatatgcaaacttgtgttgggcgcaacagcgacctacatggctcccaggacttgatcccccacctcatcttgatggaactcttgctggagattttggg

SEQ ID NO: 10135 - DNA, 338 bp, Glycine max
  Clone ID: LIB3092-031-Q1-K1-F9
acgcgcacgttagcacaaactatcatgggcacggcaactgcagctgccacctcgcccttcatggcggggcgtctcctggaggctcactccggagcggcgcgagtgcaccccccattcggcttcggcaagaaaaaggctgccgccccaatgaaagcctccaggggatcgggccgagacaccgacagacccctttggtatccggacgccaaaccgcccgaatacctcaacgggagtctcgcccgagactacggattcgatccgatcgggctatggaaaccccaggagtacctgcacttctagctggactccctagaccagaaccttgcgaaaaacgtggc

SEQ ID NO: 10136 - DNA, 124 bp, Glycine max
  Clone ID: LIB3092-031-Q1-K1-G10
ctttcatagatctggtgcgtagaggctcagatctacggtaccgaagtgtgtgattcatgttcgtcttgcttttggaatctggttcgtacaaagtcgttcggtcttgcatattgcattgctcttg

SEQ ID NO: 10137 - DNA, 424 bp, Glycine max
  Clone ID: LIB3092-031-Q1-K1-G11
gtcccatagagttgttttggcaccgctgaccagacagaggtcttacgacaacgtcccacggccccatgccatcctctactactcccagagaacttccaacggaggccttctcattactgaagccactggcgtctctgacacggctcaaggctatccgcaaacccctggcatatggactaaagaccatgttcaagcttggaaacccattgtcgatgccgtccacgccaaaggcggtgttttcttctgtcagatttggcacgttggaagagtttcagattcagtttatcagccaaatggacaagcacccatatcttctacggacaagccactcacaccccaaattcgaaggaatggcattgatcaagtacaatttaccccttcaaggggattaaagaccgatgaaattccgcatattggaaatgac

SEQ ID NO: 10138 - DNA, 246 bp, Glycine max
  Clone ID: LIB3092-031-Q1-K1-G12
tcggattagtaccacaaaaatggagaaattgaattactgaatatcgcatagctcaaaataaaggttgaaccaaatgccattcatattaaaaaaggcgatgtattgtttaccaagaaccacaagtctacgcatttaaaaaaaaaagttgaaaacaatttagattccatcttttatcctataaacttatcaaatatgcagattagaaagaactatatatttatggatatagatccctattttaaggtg

SEQ ID NO: 10139 - DNA, 236 bp, Glycine max
  Clone ID: LIB3092-031-Q1-K1-G9
tcggagatagttgacagaaggagaaattctggtttctctgaggcaggaccatctaacagtaaagcccctgcttaaaatactgctggtagttcatcatcgagcaatgttgttgttggattagttggatatcctaacgttgggaaaagttcaactattaatgctctggttggtcaaaaacgcactggtgacacctctaccccagggaaaacaaagcactttcagacatttattatctc

SEQ ID NO: 10140 - DNA, 154 bp, Glycine max
  Clone ID: LIB3092-031-Q1-K1-H10
tcggccacgcgttcgcttaactagcattaaaatcacgtttggaattctgcggggtcttttcccagcctttattatacggacatattcattcacccacccttttacttcccattaaaatggtcacctttacttaataaatttattggattggaaa

SEQ ID NO: 10141 - DNA, 284 bp, Glycine max
  Clone ID: LIB3092-031-Q1-K1-H11
cccacacttacaattaccttcacaccagtctcacttaacaactgacaaactcttacaaagaatcgctgccaacacattgatcattccttctacttcagcctaacaacctctcctttcttcatcaaataccacatttatcacccctattcccttttctaactttaatgtcatccataccatttacaatggactatctcttacagacactaccactacaatccatcctaaaccccctgatctttaattgctaacaccttactacttattaattccaaccttatcac

SEQ ID NO: 10142 - DNA, 75 bp, Glycine max
  Clone ID: LIB3092-031-Q1-K1-H12
ctagaaactgaggacttagctcgtaaatatttatgcctgaattctgcgtgacatgtggtgctgggttcatatgca

SEQ ID NO: 10143 - DNA, 331 bp, Glycine max
  Clone ID: LIB3092-031-Q1-K1-H9
caaatgttgcaaagcaatctatgccatgatagcagcagccagggaacaagtgtttcttttgaaacctgcaaggagcaatactttactctagaatcatgcccagcacccactacttgtttcgtggattgtgatgattctccttcctatgccagtgtatcatctaaaaggactccattttctccacagggttctcagtcatgctattcagatcaccagcagtcctctgacaacacctacggttcgccaataagcggcttgtccagtgttgatgacgggcatgaactgaagcacaagcttagagaactggagatttcaattgtggggcctgaac

SEQ ID NO: 10144 - DNA, 376 bp, Glycine max
  unsure at all n locations
  Clone ID: LIB3092-032-Q1-K1-A1
ctaattgcttaaacctaattctcatatctttatcgntcgattcttctcctcctaaagatgcagatcttcgtgaaaactttgaccggtaagaccatcacccttgaggtggagtcctcctacaccatcgatctctatgaaagctaatagtcaatgactggctagtatatcatcctattagtagagactgatctcctgggctatacagtttgacgttggttacactcaaggcgtctacttcttacagcgctttctcaccttcaaggtctctctcagatttaaacgtggaacgcatcacattgccatgcacacccatgactcgcaaggtacagtgacagctgctgtgacccctgttgaaaatggcacttctgacaagcag

SEQ ID NO: 10145 - DNA, 198 bp, Glycine max
  Clone ID: LIB3092-032-Q1-K1-A10
atttcccccctcaggcttagtgattagtgaacgtccgtgtggttgaacagtgtaaaatagggtgtggttttatctcactgtgcaccttttaataagctttttttatattttcccttgttgatttttgttaaggatcttggttttaccctcccttgtgttgtggtattggaaactcatgcaattgtcttgacttgtgat

SEQ ID NO: 10146 - DNA, 383 bp, Glycine max
  Clone ID: LIB3092-032-Q1-K1-A2
gtgatgggacatggccttcacagcctacaagtcttaattgctatgcgaggtttatggctacgtaaaattggtggaagaatggtgtactcaacatgctcaatgaatcctatttagaatgaagctgtggatgctgaagttttgcggaggtgtcgagggtctgtcaaacttggcgatgtttctagtgagctttcacaacttattcgtcagccaggtctcaagagatggaagatatatgacaagggcacttggttggtctcttataaagatgttcctaagtatcgtacaagtgtaattctttccagtatgtttccttctggcagaggtcatcatgatcttggtgatagtagttgtagtgttgacccaaaaggcattactaatggtat

SEQ ID NO: 10147 - DNA, 351 bp, Glycine max
  Clone ID: LIB3092-032-Q1-K1-A3
ggccatataatttttttttatttgaaataatgttcgggatcatccacaagattgaggagacgcttcatgtgggagggcacaagaaagaggagcacaatggagaacaccatggttagcacaaaggtgaacacataggagaacaccatggtgagcacaaaggtgaacacaaaggagaacaacaccatggggagcacaaagagggacttgtggataagatcaaggacaagatccatggtgattgccatgacaagggtgagaaaaagaagaagaatgacaagaagaataatgagcatggacatgaccatcatggtcatagcattaacagtgacagtgattagatcttatatgtta

SEQ ID NO: 10148 - DNA, 358 bp, Glycine max
  Clone ID: LIB3092-032-Q1-K1-A4
ggccatataattttttagtatttgaaataattttcgggatcatccacaagattgaggagacgctccatgtgggatggcacaagaaagaggagcacaatggagaacaccatggttagcactaaggtgaacacaaaggagaacaccatggtgagcacaaaggtgaacacaaaggacaacaacaccatggggagcacaatgagggacttttggataagatcaaggacaagatccatggtgatggccatgacaagggtgagaaaatgaagaagaaggacaagaagaagaatgagcatggacatgaccatcatgggcatagcagcagcagtgaaagtgattagatcttatatgataagcaagt

SEQ ID NO: 10149 - DNA, 342 bp, Glycine max
  Clone ID: LIB3092-032-Q1-K1-A6
accaacacaagatgtttctccacattgtgttcctccttttccttctctcatccacttcccatgccactgtccaagacttctgtgtggcagacctcaaaggtgcagacacccctgcaggctacccctgcaagccacctgctaatgtcacttcagatgactttgtgtacactggcttagctgaagctgcaaatgtcacaaacataatcaatgctgctgtgaccccagcttttgttgctcaattcccaggtctcaatggccttgaactatctgcagcaaggttggaccttggtcctagtggtgttatcccactccacactcatccaggtgccaatgaactactca

SEQ ID NO: 10150 - DNA, 379 bp, Glycine max
  Clone ID: LIB3092-032-Q1-K1-A7
gcgggttgataacacactgtggttggatctctactatagaagcaatatgtgctgcggtgccaatgcttacgacttctgtgtgggcagctctaataggtgcatgacacccctgcaggcgtatctccgcaagcgcacctgctaatgtcactgcagatgactcagtgtacactggcttagctgaagctgctgatgtcacagacataatcaatgctgctgtgaccccagcttctgatgctcaatttccaactctcaatggccttgaactatctgcaacaaggatagaccttggtcctaggggtgtcatcccactccacaatgatccaggatgcctatgaactactcattgtgctataaggtcacatacttgctggattcatat

SEQ ID NO: 10151 - DNA, 357 bp, Glycine max
  unsure at all n locations
  Clone ID: LIB3092-032-Q1-K1-A8
cggacgcgtgggttgcaacaaaggagtatcgctctgttgttttcaaagaacctcgttttgttgaatatgtcagatgtgcaactcctgagttggagtatggaagaatgaacattggcagtcgtccatcaaagcgaaagccaagtggaggaattgaatcactacgtgctattccttggatttttgcatggacacaaacgaggtttcatttgccagtgtggcttggttttgggtcagcatttaagcatgtagttgagaaagatccgaagaatctccaaatgcttcaggacatgtacaatcaatggcctntcttcagggtcaccctggacttggttgagatggtgtttgctaagggagacc

SEQ ID NO: 10152 - DNA, 460 bp, Glycine max
  Clone ID: LIB3092-031-Q1-K1-F11
attgccccagatcacaaaccacattaaaaaaagactcccacgttctcttctctctccgtgtctcgctctctctcttcatttctcattgactctctctttctctctctctctgcacagtgccaatggcggatccaatcgcgaaggctctgatcgcgtttgcgctcttagcttcccttttgctgtgcttgcaagcttcctccgatgtccccttcatcgtcgctcacaaaaaggcctccctcaacagactcaagtccggcgccgaaagggtctccgtcaccatcgacatctacaaccaaggaacctcgactgcctatgaatgtagcttatcagacgatagctggccaaatgatgcttttgatgtaatcaggggtagcacaatcaaatcatgggaaaagcttgattcttgtggcatcatttcttacacatttgaacttgaggcaaaaatcaagggagtattttc

SEQ ID NO: 10153 - DNA, 317 bp, Glycine max
  Clone ID: LIB3092-032-Q1-K1-A9
taccacgcgtccgaccacacttcctcccactctttctctcactcgtaccagaaaaaataactcacagatagcattaacaaaggcttctcaacataagctagatcgaactatttctaccattattcgtttttgaaacattacgcaatctttgtcagcattttaacgtcttatcctgtttaaaaattaatcaaatgaattaacagattacaacattcttctctatcattctggattatattaacagtcacttcaatacctgacgaactaccgatatcttaataactcatctactcaagaattatcatcatcaaactctc

SEQ ID NO: 10154 - DNA, 266 bp, Glycine max
  Clone ID: LIB3092-032-Q1-K1-B1
ggttcataacacactgtggttggaactctacaatagaagcaatatgtgctggggtgccaatgcttacgtggccactatttgcagatcagtttttgaatgaaagtctagtggtgcatgtactaaaagttggattgaaggttggggtggaaattccacttacatggggtaaggaagtggaaattggtgtgcaagtgaagaagaaagatgttgaaagggcaatagcaaagttgatggatgagacaagcgaaagtgaaaaaagaagaaaa

SEQ ID NO: 10155 - DNA, 127 bp, Glycine max
  Clone ID: LIB3092-032-Q1-K1-B10
actacacgaatatcttattacttacatctatctcttaaaaactctgtaaacatatattatttaccagacacctttttacacatgatgaccatctctataactacttaccatacaactaaatttataa

SEQ ID NO: 10156 - DNA, 356 bp, Glycine max
  Clone ID: LIB3092-030-Q1-K1-H4
gtcgcccagcgtcgttttgtctggtggcaggcttgaggtggaacctccctcaatttggatgccctggaccaagtgtcgaacccgtggcacgtgtcattctcggatgccagagccctccaaaacactgccttgaagacatggggaggccggccagagaacgtgaaagcagcacaagatgcactcgcattccgtgccaagtacaactcactcgctcagctttggaagtacactggttagggtggatccgagaagcaagaagaattgtcgtcaaagctactcctactaagatgtatgcagtgaatatgatacttgtaggcagcacaccagcagtacagtagtgttgacggacgatgaat

SEQ ID NO: 10157 - DNA, 228 bp, Glycine max
  Clone ID: LIB3092-030-Q1-K1-H5
aaagtccccgacttcgtcgacaccttctacaatctagtcacagacatctaccagtgggggtggggccagtccttccacttcaccccctctctatcttctgcaccggagccctcctcgccggcggactatactgggtcgtgtgcgttctgggccccgtccagcacaagggccaaacgccccaccgatctttccggcggctgcatctacgccgagaaagttcaagacaac

SEQ ID NO: 10158 - DNA, 328 bp, Glycine max
  Clone ID: LIB3092-030-Q1-K1-H8
ccaatcttttgaagacatatattaccagtttaccacagtccacagtgctaatgtgctacatgttagtatggcacccctctttgtgctttgctagcagtatttatcagtggtaaacatgagcagacatttgtgactaattttattctcaagattgaagatagcatagcatggcttttggggagtttatgcattgaccgagaaaattgttcattaattcctaatcttctgatggcgaacttgtatttcctctaatattggaagtcaaatttaaccaattaattggggattatgttgaaaaataaagtatgcttgttcgggtttgcttctt

SEQ ID NO: 10159 - DNA, 458 bp, Glycine max
  unsure at all n locations
  Clone ID: LIB3092-030-Q1-K1-H9
agttagatgattgggtgctttgccgtatttacttcacgaagggcacgatcgagaagttccaagcaagcagcgatgttgttgttagccgaaaaatggaatcatcggagatcgaagacaggaagccggagattctgaaaagcggaggaggttgtcttctgccgacggttccgccgccgcaagcgaaggcggcggtgaagacggattacatgtacttcgacccgtcggattcaatcccgaagctgcacactgactcgagctgttcggagcacgtggtatcgccggaattcgcgagcgaggtgcagagcgagccaaagtggaaggagtgggagaaaagcctcgagtttccgtttaattacgtggatgccactctgaacaacagcaacagcttcacgacgcattttcagggccataatcagatgatgtcgccgctgcaggacatngtcatgtactggcccaac

SEQ ID NO: 10160 - DNA, 401 bp, Glycine max
  Clone ID: LIB3092-031-Q1-K1-A10
cccacgcgtccgattcccttcacaccattctcacaaaacaactttcaaactctgagaaagaatggctgccaacacattgatgagtactgctatctcagccttcccatctctcctttcttcctcaaaatccagatttgccaccgcagttcctctttctagctttggtgtcaccaatgcctcttcttctcgcttttctatgagtgctgactggatgccaggccagcctagacctccttaccttgatggttcagcacctggtgactttggattcgaccctcttcgtcttggggaaagtccagagaatcttgggaggttcaaaaaggccgaactcattcactggaaattggccattcctgctggtccaaggattttgggttcaaaagcattgggcttaagccact

SEQ ID NO: 10161 - DNA, 264 bp, Glycine max
  Clone ID: LIB3092-031-Q1-K1-A11
acgcgtacgagattgcgcaacacagagtatcttagatggtgcggtacatcacagtggtgtggtgcgcggaggcggcgctactgcacgcctgtgatggcacatactgggaggaggatgcggctaacccgattcaaatggcggcatcacgtggaggaggaggaggaccgctaaattgggcagttccggcgcgcgcaggagtgcgctaggtgcatgagcacgttctagatgagttaccgcagctaggaaaacatgatggagaagtac

SEQ ID NO: 10162 - DNA, 374 bp, Glycine max
  Clone ID: LIB3092-031-Q1-K1-A12
tctctcaccaaattcttattagaacgaaaaaagaaaagaaaagaaaaaagagcgattttggcctgaccaaagaagaaccaaaacaatggcggatcaactcaccgatgaacagatctccgagttcaaggaagccttcagcttgttcgataaggacggcgatggttgcatcacaaccaaggagcttggaactgttatgcgttcattggggcaaaacccaactgaggcagaactccaggacatgatcaatgaagtggatgctgatgggaatggtaccattgacttccctgagttcctaaacctcatggctaggaagatgaaagacactgattctgaagaagagctgaaagaagcattccgggttttcgacaaggatc

SEQ ID NO: 10163 - DNA, 347 bp, Glycine max
  Clone ID: LIB3092-031-Q1-K1-A9
acgctgcttcatatagccaaactcttcactctgcttctgcttctttggaaagcacttaaccagactctctgtttcagcttcctctgttttttgggtacgaacagagtttctctgattatgacgatggccatataggcgattgaactgttgaaagggtgcagatcacaagaagaaataatggaagtgcttgctgcggtggctcctgatttggtggatgtgatcgatgatgtgtacaccttgcaagtgattccactgaatggtgccatgaccaatgaaggttttcagataaactggccaacctaaaatgggggtgcgatcataaacgttatggttcgattatattggga

SEQ ID NO: 10164 - DNA, 392 bp, Glycine max
  Clone ID: LIB3092-031-Q1-K1-B11
cccacgcgtccgagattccgcaacagagagtagaaaagatggcgcggttgatcacagtggtgtggtgcgcggtggcggtgctactgtgcgccgaggcgggcgcgtcgtgggtggaggaggcggcgaacccgatacgaatggtggcgttggtggaggccgaggtggctcgggtgatatggcagtgtcggagcgcgctgaagtttgctaggttcatgagcaggttcgggaagagttaccgaagcgaggaagagatgaaggagaggtacgagatattctcgcaaaacctgaggttcatccgctcccacaacaagaaccgtttgccctacactctgtctgataatcattttgctgattggacttgggaggagttcacaagacacagactaggcgct

SEQ ID NO: 10165 - DNA, 337 bp, Glycine max
  Clone ID: LIB3092-031-Q1-K1-B12
aacttctgctacttcctactccaaccgcacttctgctccgcaattatcatgggcaaggtggagagcggaatcaacggatttggaagaattggccgtttggtagccagagtggctctgcagagagacgatgttgaactcgttgccgttaacgaccctttcatcaccaccgattacatgacatacatgtttaaatacgacagtgttcatggacactggaagcatcacgatgtcaccgttaaggacgagaagacccttctcttcggtgacaagccagtcactatttttggacacagaaacccttgagagatcccatgggggtcaactggagctgacatca

SEQ ID NO: 10166 - DNA, 419 bp, Glycine max
  Clone ID: LIB3092-031-Q1-K1-C11
ctagattcagccacagttggaaaaaaaaattaaaaagttgttcgagatggcacgtgctaggcaaactgctcgtaagtccacaggaggaaaggcacctaggaagcagctcgcaaccaaggctgcacgtaagtctgcaccaactactggtggtgtgaaaaagccacatcgttatcgtcctggtaccgttgctcttcgtgagattaggaaataccagaagagtaccgagcttttgatcaggaagctccccttccagaggctggttcgtgaaattgctcaggacttcaagactgatctgcgtttccagagccatgctgtgcttgcattgcaagaagctgctgaagcataccttgttggactctttgaggatactaatctgtgtgccattcacgctaagcgtgtaactattatgcccaaagata

SEQ ID NO: 10167 - DNA, 128 bp, Glycine max
  Clone ID: LIB3092-031-Q1-K1-C12
gtaaagtctaaggccactggttctcccctttcgactgttccgggctacgatctatccggtgtagctgttaaagttggcactcaagtgaaggaccttaaagtgcatgatgaaacctatggtgatcgtaa

SEQ ID NO: 10168 - DNA, 319 bp, Glycine max
  Clone ID: LIB3092-031-Q1-K1-D10
cttatttccaacccttctcattatttgtttcttctctgttgactcaaaaacaatgctatgtctatcactcttaccattaatcaatcatctccctccgatcttaatttcttccatataacgagagagagagagagaattaattagttttcctgcaacttcaacttttgttattgccaaccggcggcggaccaagtcggtgggtctagataactctggccactcgatgaaaaaaccggatctggcgttttccatgaacgagagtacggttactgggaaccatttaggagaagaagatgatgacagagaaaacagcgacgag

SEQ ID NO: 10169 - DNA, 430 bp, Glycine max
  Clone ID: LIB3092-031-Q1-K1-D11
ggccaaccacctatcagatttcccttcaaactcatcaagggaattaaagatgaatgtggttatccggggttttgtctatattgtactcaaaaacatgagactatgcttgctctctcctacgtaaaactccaagtcagttacataaactacgaaaatcatgaaattgtgttgaatgacccggaaaattgccttccgcacaagtttctgcaaatcaacgattctcttattcatccttacaaatttgacgatgaagctaaaaccagtaagctgagctccttcaactgttcttgagttgaacatgaacacctgggaaactaccaccagtcactgtcagactcacaagacatgatctcctcgccgatttataggtacgatcttgatgactcagagctcagcttggacctaacatcctgtaccaaaatgttcgata

SEQ ID NO: 10170 - DNA, 133 bp, Glycine max
  unsure at all n locations
  Clone ID: LIB3092-031-Q1-K1-D12
cgagtgttgaagataacacgaaacanaaaccatcatttagttgccatccatctgccaccggggtccactcccaacaccgattccggcacggcgccgtcaccgcgccccaccatcacgctcccttcgcgcccct

SEQ ID NO: 10171 - DNA, 348 bp, Glycine max
  Clone ID: LIB3092-031-Q1-K1-D9
acgcttacttccaacccttctgattataatgggtcttgtctgttagctcaagaacacgggtgcagctatcactctgaccatgaatcactcatctccctgcgctcttaactattgccatattactggagacagagagagagttaattatcacacctgcaactacgccttttgttattgtcaaccgacggtggccctattcaatggatgtagacaactctggccactcgatgaatagaccggatctggcgattaccattgactacagtgcagtgaccgggaaccctataggatacgaagatgaagtcagagaaagcagcgacgagtctagatacggagctattgacgtaa

SEQ ID NO: 10172 - DNA, 282 bp, Glycine max
  unsure at all n locations
  Clone ID: LIB3092-031-Q1-K1-E10
tttcatactacatgatgatatgctcgagctttattcttaaccattcccaaacggctggcgagtggacaatttatgcttggattcacagcaattgcaattcattatcagacagtgatcaacttcgtcctgtttcaataccagatatgcatccagccagtgcaggaattactgaaggtttttccatgtgtggaggtgactntgttgaagtttacagtgattcaagccaagttggtgcatgggatgcagttgtaactnggttctttatcgatacagctcataata

SEQ ID NO: 10173 - DNA, 175 bp, Glycine max
  Clone ID: LIB3092-030-Q1-K1-H12
cgaccagcctactagagtgaattataatggcttttcatggataattcaccttggattaccacgtccttggacttcatcattaatcgccatagggttcacgaaaaacttcccaaaaagcaggtgttaaacaatttttactcattggattgggaggtgtagaaatcttctgtaaaac

SEQ ID NO: 10174 - DNA, 95 bp, Glycine max
  Clone ID: LIB3092-031-Q1-K1-E11
tcgctgtatcaacttacctctgcctattcgcactattctttcatgcacttcatctcaacatattctgtgcttccgttagctatgtttttaccaat

SEQ ID NO: 10175 - DNA, 288 bp, Glycine max
  unsure at all n locations
  Clone ID: LIB3092-031-Q1-K1-E12
caacttcaagaacacaaccactcaaaagggttgaaagagagaaaagggtttaaaaagtagtgaagtgatcaatgtctacagaagaagagagtgcggtgaaagagcctttggatctcattaagctcaacctcgacgagcgtatctatgtcaaactccgttccgacagacagcttcgtgggcaacttcacgcttatgatcagcatcttaatatgattcttagcgatgttgaagaaatcattactacagtggaaatcgatgatgagacatacgaagaaatngtgaggacta

SEQ ID NO: 10176 - DNA, 235 bp, Glycine max
  Clone ID: LIB3092-031-Q1-K1-F10
cagaaattcattcagttttctggttgcggttggccaccttccattatacttgagggagagtctccaatggcacaagctaccttataggctgaaattgcggctgcctatgatacgaattctggcatttgctgcatctgaatatctctgaaactttgtaagtcaacatggctttacagaacatcggtgctgcaaacagtgatgatgccttctacaggtataagatgcctacgatgat

SEQ ID NO: 10177 - DNA, 379 bp, Glycine max
  unsure at all n locations
  Clone ID: LIB3092-030-Q1-K1-E10
tccagggtctaactttactgtttaacctcctgttttaaaaaatccagggttgttccatgctgtggcttcctctctctgaacccaaacaggcccttcaggcaaatggaaaaggcttctctgaattctctggcctncgcagctcatcaggcttccttcccttttctagaaaatcttcagaggatttccattctgtcattgccttccagacctatgcagttggaagcagtggaagatacaagaagggtgtgacagaagcaaaactgaaggttgccataaacggatttggaaagattggaaagaacttcttgaggtgctggcacggtcgcaaagactcccctcttgatgtcattgccatcaacgacaccggtggcgtgaaaca

SEQ ID NO: 10178 - DNA, 62 bp, Glycine max
  Clone ID: LIB3092-030-Q1-K1-E11
tccggcatggctcctgcttagttccatggctcattttttctaaaaccctaacgcaaatcaca

SEQ ID NO: 10179 - DNA, 74 bp, Glycine max
  Clone ID: LIB3092-030-Q1-K1-E12
tctgagccaaccttccggtttttgtccttctaacttcaatctttcaatttttttttaaaccaaagccaatttgg

SEQ ID NO: 10180 - DNA, 134 bp, Glycine max
  Clone ID: LIB3092-030-Q1-K1-E2
agttagatgatgagctgctatgccgtatttacaacatgaagggcacgatcgataagttccaagcaagcagcgatgctgatgctagccgataaatggaatcatcggagatcgaagacaggaagccggagattctg

SEQ ID NO: 10181 - DNA, 233 bp, Glycine max
  Clone ID: LIB3092-030-Q1-K1-E4
cccacgcgtccgaagaagctcaatcaagctcaagaccaccaacaattgatcaagagtttgaggagtacttttctatgcttatgctctaggacagtttaccgataaaggagcatgcatagttgtatatataatgctgaaaacggctgttgtatgtattgtacgaagatttagtagtattctgatgactttataacatcttcagtaggtgtaatatgatatttcttcttatggcc

SEQ ID NO: 10182 - DNA, 122 bp, Glycine max
  Clone ID: LIB3092-030-Q1-K1-E6
cccacgcgtccggttgtggtgtttcatttgtgaaactaacaacaacacaaggccatcatcatggcagctgcttccccaatggcaagccaactcaagtccaccttcactaggactcttgtagc

SEQ ID NO: 10183 - DNA, 98 bp, Glycine max
  Clone ID: LIB3092-030-Q1-K1-F1
ttcttttttgatactcatcaatcctttctattttttttccttcaatcttctttaagagaaggtttttcttcacctaaagcttcctttcccaccacccc

SEQ ID NO: 10184 - DNA, 442 bp, Glycine max
  Clone ID: LIB3092-030-Q1-K1-F10
aaatgacaacacatagcacaaagcataaggtttcccaaaaactaaggttactggtgtcaaagtccatgctaaattaggtggtggaaatgaaccaaccaagaacggaggcaagaagaaattcataacaagagaggaagaaccacaacagtattggcagacagcaggagaaagagaaggagagaatcccatgaagactcctcttccttacataatcatatttggtatgtcaactccttttgtaatcttggccattgcttttgcaaatggttggattaaggtgcctgttcgatgagacaacactttacttctcattctcaaacttcaccagagaaattctttactttttcacatatgttatggctcgttttaatgaacaaagttcacttatgaatgtcggattgaagaaagcataaatgaggtttcttggttcaagaatagcacg

SEQ ID NO: 10185 - DNA, 160 bp, Glycine max
  Clone ID: LIB3092-030-Q1-K1-F12
aattcccgtctgcgccggcgtcttccccttgttttccaggaatttaaaattggaactttaccagttaccatgttttaattgccacacggttaatttttctctttatgaagaaccatggacaaaattcccggttctttaccaacctgcctagtaacctgct

SEQ ID NO: 10186 - DNA, 125 bp, Glycine max
  Clone ID: LIB3092-030-Q1-K1-F6
gccttcattggtttccgttgggccttcctttgcaattccagttgttgccatttttaccccgggttccggccaaaaaaatggtccaggaggtggtttcttaatgggaaggaattgtagggtgaaaa

SEQ ID NO: 10187 - DNA, 221 bp, Glycine max
  Clone ID: LIB3092-030-Q1-K1-F8
gtccagtagcgtccatcgtagtatcctggtggaagctgcctatgtttggttgcactgatgcgtctcaggtgttgaaggagcttcaagaggctaagactgcataccccaacggcttcatccgtatcatcggattcgacaacgttcgccaagtgcagtgcatcagcttcatcgcctacaagcccccaagcttctaagtgtgaaaaatttgcaaagcatttgta

SEQ ID NO: 10188 - DNA, 189 bp, Glycine max
  Clone ID: LIB3092-030-Q1-K1-G1
cgcgtatcggccttcattgcttctcatcaatccctcccatttttttcccttcaatccgtttctatggcaggtgtcgcttacatcaaggcttccttttccgacaccccatttctctgttccaaacccagaacctatattcttccatccctagccagacctcgcataggaagctcctttttatccttttct

SEQ ID NO: 10189 - DNA, 145 bp, Glycine max
  Clone ID: LIB3092-030-Q1-K1-G10
acgcttccattcaaccaaagccttgtgtttgaccacaggtgtccaagattccttaattcgggtctattgctgcggcaagctgaacctgctgttcaagttcaagctttgaccgcaacctttcacacttgttccaggcttatcgact

SEQ ID NO: 10190 - DNA, 448 bp, Glycine max
  Clone ID: LIB3092-030-Q1-K1-G11
cccacgcgtccgcggacgcgtgggtgcagttcaagtagtgattcctcatcgtcaagtgattgggattcggggagttcctcaaggagtgattctgaagcagacaacgggctttcgtagtagccagtgagtttttggaactaatggtatcatgtgggtggggtaggcgcggatgaagaaaatgtttgctttcattggattccttagagggcgttggtcgaatacatggagaagagagattgtgaccgttgtttgttggttcgttttgggagtagaggcggaccacctgctccaggatttgtggtgtgacatagatatagttgtacaaattatttcgggaaccgaagaaaacaatttgtaggccagaaagtagtggacttaaatgttgtgaaaattctaagatagaatcgctaaagattaggaatagaaccgggagaaatagtgttttttg

SEQ ID NO: 10191 - DNA, 183 bp, Glycine max
  Clone ID: LIB3092-030-Q1-K1-G12
tccgtttaagcccattttggaagttcaaaattaatcttctaaatggaagggattttgaagttgtccgatttattacattgtccagttgcacctgctacattaaccaaagttgatttaccctcatatcctgtgtatacttcaagtatttttttcatatgggttgggcatacatcattcattgct

SEQ ID NO: 10192 - DNA, 367 bp, Glycine max
  Clone ID: LIB3092-030-Q1-K1-G2
ggcttacattgatctgggaatgctgactttgtagggacattcgggcgaattctgtagccgatgttgaaccttggctgatcattgccatgccacggacttgaaagctgatagcctaaaatttgctgctcaaaatctagcagctgtcatgagatcagacggatctgagcgtatgaaacaaaaaggtccatggctacaatcagagatactgcagacaattgctgtgcgtgaggatgaaggttccagtgcagagctaaaatctcagagagtctggggccaactcttagatggtcgtgacacgaatggtacaacggtcaggcagacaatctgatatatgcttgcacactggtatctctatggctatgactct

SEQ ID NO: 10193 - DNA, 380 bp, Glycine max
  Clone ID: LIB3092-030-Q1-K1-G3
acgcgaaaaggcggaagttcagacaattgacatgatgcgggtgtgaggcaatgttctgtgctcatgttcacactgttactggtcagtggtatgtcacactgttaaattttgatcacaaacatgagatgctggatgcaaaacagctgttattgctacctgcccgtaggaagatgacaacaactgatataactaacattcagaattttcaaaaagtaaggattcgcccttgacatatgtatggcgcgtttgcaaacaactatgggatttaaaaatgtccgagtttttagaaaagagattcataatcaagttggaagacacaaatgaaaacgcaagcctgttttgcaaggggctttcaagtcccaaaagggtttgggcaaaaa

SEQ ID NO: 10194 - DNA, 205 bp, Glycine max
  Clone ID: LIB3092-030-Q1-K1-G5
ctcatgtgcacgctgttactggtcagtggtatgtcacaacgttaaattttgatcacaaacatgacatgctggatgcaaagcgtccgttattgctacctgcccgttggaagatgacatcaactcatataattaaaattcagaattttcaaaaagtaaagattcgcccttcacatatgtatggtgcgtttgcaaacactaatggata

SEQ ID NO: 10195 - DNA, 389 bp, Glycine max
  Clone ID: LIB3092-030-Q1-K1-E1
ggttgctgctcttgatggtcagagtttggacggaaggccaattagggtgagtgttgccgaggacaggccaaggcgtggttccttttgagcgttatctcatgtagttccccatgtcagctgctggagttatcttgcatttttttaatagctgaggatatactatagtgtcaatttttgttcaaaggaaaatcctttcttggggcaccaatttcagattagatttacgtattttggtgttattagttttatgcccctgatgaaaattaaagtttgtaattccggactcctggaaatggagaaaaggtttactttggtggtggccttttctttgggctaattggtaataattattgaatggaaaaagggggaaggaaagtcttgcgcgactt

SEQ ID NO: 10196 - DNA, 180 bp, Glycine max
  Clone ID: LIB3092-030-Q1-K1-G7
gggaccaactctccttgaggctcttgaccaaatcaatgagcccaagaggccctcagacaagggactcaagcttccattgcaggatgtctacaaaattggtggtattggtaccgtgccagtgggacgtgttgagactggtgtcgtgaaacccggtatggtggtgacttttggtcccaattg

SEQ ID NO: 10197 - DNA, 467 bp, Glycine max
  Clone ID: LIB3092-030-Q1-K1-G9
cgaccatattgcttccaatttgggcttctcaccctcttagggtttgcatcagattcccctagttcttgcttgattttgcgctttcgctagattttcttcaaaatgactcaagatctagagatgaaggatcgctcaacgccttccaactccgtttcttcgcctgctccatctactctgcagcatttgaaggagatagcgtctcttatcgagaccggttcgtactcgaaggaagttcgtagaattgctcgcgctgttcgccttacaattgcgttgaggcggaaattgacagcatccgctatctcttcttttctcgatcatgttctcactcctggctctgaagttcacgccaaattgtctgcgtatcttcccaaggatgatgatcatgagatggaagtggacgctgcaacatctgcgattcaaaccccagccaaacacttgttgcccgagctagaaatctactggtacct

SEQ ID NO: 10198 - DNA, 407 bp, Glycine max
  unsure at all n locations
  Clone ID: LIB3092-030-Q1-K1-H10
gggccaggcgtccggaaaaatgatgggcatggatttgacggggagtaaatggcttgggttggggggggcggtttggatacaagcaatctccggcaacaactacactttctcgaattactcggacgctctgaaatccctcatgagcctaacccaaatcgagctcaacaatctgtccgtggccaatgatgttggcaagggctttgggcttctggctgggctggcctcagacaaattcccgacttgggccattctcctaattgggtccctncagggncttatcggctatggcgtncagtggctcgtcgtcagccagagaatccaaccccttccatactggcagatgtgcgtattcctctgcattggtggcaacagcactacctggatgaacaccgnncgtctagtcacat

SEQ ID NO: 10199 - DNA, 319 bp, Glycine max
  Clone ID: LIB3092-030-Q1-K1-H11
tcgccgtgatctctctagggtcccttctactggctatgcacacaccactgtaccttgttctcacggaaaccttcaactaggaatcgatcgagagtgtcttgtgttgctagtgcaagaggctgcaatatagatagatacgttcgtgcgtacctaggaagggttcgtacgctgtaatacacaagacacgacgccgatttgcactctgatcttatcttcgatcatgatggcgcacatgaagggtgttaccgtggggatcacatgttgctgcgttcttaagcctttcgcttttgttatgtgggtttcccccttcacctttcga

SEQ ID NO: 10200 - DNA, 119 bp, Glycine max
  Clone ID: LIB3092-030-Q1-K1-C1
ctacatatctgactcatctacaactttgtacataaacctatacagaccttaccgaaaagaacttgagacatgaatacaccactaatgctacacaagtaccttttcaaaaattattgatg

SEQ ID NO: 10201 - DNA, 456 bp, Glycine max
  unsure at all n locations
  Clone ID: LIB3092-030-Q1-K1-C12
gagagtcggtaaaagattaagggtctaattgtgacatggtgtaaccaacttgaattgctggctgaccaagccactggctgctttgtgactcattgtggctggaattccaccctcgaaagtcttagcctcggcgttccggtggtgtgtttgccacagtgggctgaccagttgcctgatgctaaatttttggatgaaatctgggaggttggtgtgtggcctaaggaggatgagaaaggaattgtgaggaagcaagaatttgtccagagtttgaaggatgtgatggagggtcaaagaagccaagagattagaaggaatgccaataaatggaagaagttggctagggaagcagttggtgaaggaggcagctctgataagcacattaatcaatttgtggatcatttgatgaatgcagatnaaaaatggaagtttgaatgtatactgagtgcctatgctcat

SEQ ID NO: 10202 - DNA, 430 bp, Glycine max
  Clone ID: LIB3092-030-Q1-K1-C2
gcaaggaatgaacattgaacgaatcaacactttctgcacagaactcaagctcaacactgactggagaaccaggttaatagaggtccaaggacccacttgactttaaggtttgaaccgactgactacaatgcactgctcacttacaaatttcttatacaatccatgattgtgctacacctttttgctgctccccttacttcttgcactaccattacatgctctaaacatttttcccatgacaaccactttgtgcgatcttcaacggctccgcggatatccctgaaccatgtcagaacaaggatattcttatgtagtgctagaaatcgacagaaggatttgaatggtccggacttcaatatagacattgctaaaaaagatcaagagcttgacgatgatggtgaccatgggttttccgctcacggaatgtatg

SEQ ID NO: 10203 - DNA, 213 bp, Glycine max
  Clone ID: LIB3092-030-Q1-K1-C3
gagagtcggtaaaagataagggtctaattgtgacatggtgtaaccaacttgaattgctggctcaccaagccactggctgctttgggactcattgtggctggaattccaccctcgaaagtcttagcctcggcgttccggtggtgtgtttgccacagtgggctgaccagttgcctgatgctaaatttttggatgaaatctgggaggttggtgtgt

SEQ ID NO: 10204 - DNA, 259 bp, Glycine max
  unsure at all n locations
  Clone ID: LIB3092-030-Q1-K1-C4
tttctgagtttcttctatcctctctccgccatggttctctccaaaaccggcttcgaatccgacgtctctgtncactcaaccttcgcttctcgctatgtcagaacttcgcttccaggttcaagatggcggaggagtcgataccgaagaggcagcataccagatcatanacgacgagttgatgttggatgggaacccaaggttgaatttggcatcatttgtgacgactnggatggagccagagtgtgataaactcatcatg

SEQ ID NO: 10205 - DNA, 451 bp, Glycine max
  Clone ID: LIB3092-030-Q1-K1-C5
ggaacctaattgaggctgctgagcaagagtatgagaaagaaaagctgaatgagagaattgctaaattgtctggtggtgtggctgtgatacaggttggcgcacaaactgagacagagctcaaggaaaagaaattgagagttgaagacgctcttaatgctacaaaggcagctgtagaggaaggtattgttgttggtggtggttgcactcttctgagacttgcatcaaaggtggatgcaatcaaggatagccttgataatgatgaagaaaaagttggagctgatattgtgaaaagagctcttagttaccctttgaaattaattgccaagaatgctggtgtcaatggtagtgttgtcagtgagaaggtattgtccagtgacaatccaagatatggatataatgctgccactggtaaatatgaagatttgatgtctgctgggatcattgatccaac

SEQ ID NO: 10206 - DNA, 381 bp, Glycine max
  Clone ID: LIB3092-030-Q1-K1-C6
gcaaaagttcatcttgaagcagctgaacgtgaagagcagcaagtacggcagagacaagaacttgctcgtcaggttgcatttgctgaggaagcccgtcgaaaggctgaagagcaaaggaaatttcagatggaaaggagaaaacaagaggatgaactaaagcgagtgcaacaacaggaggaacattttaggcgtgttaaggagcaatggaagagcagcagtcattcaaaacggagagaaagatcagatgatgaagagggaggagggactggtgagaagaagagaaaaaaaggtggaaagcggagaaagaaggataagcactcaaaatcgcgctatgacacagaggaacccgaaaatgatatgatggatgaacaaggaaatgga

SEQ ID NO: 10207 - DNA, 235 bp, Glycine max
  Clone ID: LIB3092-030-Q1-K1-C7
cagaagccatggtcgtaaatctctctccctcttcacctttacattcaagttccataatcagagtggcaaattcaaagtcacccatttcagaaccatggttgaggctcaaaacccactttccaaaaccgctcctttccccttcttttgcctgcccaagtgtgaacttcacttgcaagaagcaatttttgcatggtaacaacaggaacgtgttggatttcaggacttggtctattgc

SEQ ID NO: 10208 - DNA, 307 bp, Glycine max
  Clone ID: LIB3092-030-Q1-K1-C8
cttggaatttgaaaccctggtgtggctagtgacatggcacacaccttctctacgtggaacgagtgaacggggctataaataatacctaacgcctacaggcctctctcgtgagccctcacagagaaagcattggggagtagaagtagaagcttcactttactcttgtcaagtcttaatggtgcataaaaaatttggctctaattttggtattttctttctctctcctctttgtgcattttaatagcaactcttaatttccaatgtccaagatgttgggagtgtttgtgggacttttgctgttggtggg

SEQ ID NO: 10209 - DNA, 324 bp, Glycine max
  unsure at all n locations
  Clone ID: LIB3092-030-Q1-K1-C9
aaccctatccacttctccgcatcacgattcaaatcttcgtgaagaccctttcaaataaaacgatcacatttgaaattgaatcttcggacaccatctacaactttaaagccaaaatccaagacaaagaaagcatccctcccgaccaacaactcctcatcttctccgggaaacaactttaagactgcctcaccctctcctactacaacatccaaaaagagtccacgcttcaccttgtcctccgncttcgtttcggctccaataatctcaagaaaaaaacctacaccaaacccaataaaatcaaacacaaacacaaaaaagtcaaac

SEQ ID NO: 10210 - DNA, 376 bp, Glycine max
  unsure at all n locations
  Clone ID: LIB3092-030-Q1-K1-D1
gacaaaagcaaaaggaaagaatatcaacaaggtaaagtagattccttactagacatggcgttgaaggacacattctacatatctcatggatcaccaactttgtccatagatgaatccattcaggccaggaagttccttcagtcatggaagaaggacgtgtttcctcaaagaccctcttcaattcttgtcatctctggtcattgggaaaccgcagttcccacggtcaacgtcgttgactccatcaacgacaccatctacgatttctatggctttcccaaacaaatgtaccagcttaaatatcctgcacctggagcttcacaattggcaagganggtgaaggaactactcaagaaatctggtttcagccatgttgatg

SEQ ID NO: 10211 - DNA, 295 bp, Glycine max
  unsure at all n locations
  Clone ID: LIB3092-030-Q1-K1-D10
nncgccacgccgtccgattttcccctttccctaagtcaaggggatccatggttcttcttcccaggtgttctaaaaaagcaaaatggggaacatttgatgcattggtgctggatatgtggggggtcctactatggcagtcattgcacttaagtgcccattcattgaagtcgctgctggtgatatctctaaatcccgcattgtagcctgtaacagcgaccagcttcctatctatgaacctggccttgatggtgttgtgaagcaatgccggggaaagacctcttcttcagcactgatg

SEQ ID NO: 10212 - DNA, 367 bp, Glycine max
  Clone ID: LIB3092-030-Q1-K1-D11
gtttttgggcttctaacttctatgttccaattttccttcaacccaaagccaaattggaccggcctttcaaacccagtgatggatttcaggtaacagagttcaattgaaattccaaacatggattgggttcgaggagacgccctcgggctaggaagcttcgctaccgatagtttagcaattccgactacaaatccgtatcactttccgtctgtaaccgcccttaagttcgcggaggctcaaacctcgtgcttgctaaaaaacgagaaacacatgctggatcgcctaagttcgtcatctacgaggataattcgctgcttctgagactactgcagttttaagaactgcattaattactacaatctgttac

SEQ ID NO: 10213 - DNA, 428 bp, Glycine max
  Clone ID: LIB3092-030-Q1-K1-D12
agcacaatgaaaagaattctactaataaattttttcttcgtaaaccaatggcagacccattaggggataccatcttcagtgtgaggaaggagaccattcggataaactggcctgaatatcctaattaccacgccccaaaagtatttgcaccatttatattggacgggcgacatctatactacgttaatgcatttgaaaatgcagctagcaccatggagacaagtgctgtggcagctgagaatattgcccgactcatactgtcaagatatattggccaagtaattgtgcattcatctaatatgtctgcaagttctcaaagagagggtactcatttagatatgtgagacagtgatcgcaagatattgttagtttggatgataggagatattatataaattgcatctgaattctgaaaatttggaaaatca

SEQ ID NO: 10214 - DNA, 371 bp, Glycine max
  Clone ID: LIB3092-030-Q1-K1-D4
gggccgagccacacgtccggccacgcgtccgctgtgctccatctttttcttattatgctcatttggatcctactgagtctgggcttacttcaagacctttactatagaaactgtctaaggaacttcgatggcgattgggtcttcttctattcaacctggatattatccgtgagtatggaacaagaaatcacttttacgtcattgacataaactacttccctggatatggcaaaatgccagaatatgaacatatatttacagacttcctgttgagcttgtggcacgtgaagtacaagaaaaaatatgctaaaataactgtttccagcccttttatttatttcccccacatgacgtaagccccctttcctctc

SEQ ID NO: 10215 - DNA, 235 bp, Glycine max
  unsure at all n locations
  Clone ID: LIB3092-030-Q1-K1-D5
ntccgccacgcgttcgcagagcatggctcctctcacattctcctttcttcttcatccttatcggttacatttcttcatcatcagggtaaaacatctcccacttctcttctttgagtttgtatttgaatttcgtcttaccaacatgaactctagttgtaattagaaaataacacttatgaaactgcatgtaaattttgttgcttcatctcattttgcatttgaaagttgtcaactt

SEQ ID NO: 10216 - DNA, 367 bp, Glycine max
  unsure at all n locations
  Clone ID: LIB3092-030-Q1-K1-D6
ntccgccacgcgtccgttgtgctgcagcttctgcagatgatgctgattgggatcctactgttgctgagcttcctccaagacctttcctagagaaactggctaaggaacttcgatggcgattgggtcttcgtctattcaacctggatattatccgtgagtatggaacaagaaatcacttttacgtcattgacataaactacttccctggatatggcaaaatgccagaatatgaacatatatttacagacttcctgttgagcttggggcaggggaagtacaagaaaaaataggctaaaataactgtttccagcccttttatttatgtcccccacatgacgtaagcccccttgctctcagtttgagctca

SEQ ID NO: 10217 - DNA, 298 bp, Glycine max
  Clone ID: LIB3092-030-Q1-K1-D7
gcaaaacttcatcttggagcaactgaacgtgtatagcaccaagttcggtacagacaagaacgagctcgtcaggtagcatttgctgaggaagcccgtctaaaggactaagatgccaagaaattttatatggaatggagataactagaagatgaacttatgcgagttcaacatcatgttgaacattttacgcgttttaatgaaccatggtatagcaacatgcatttaaatccgagtatattgacagaatatctataaggaatagggaacttgaaatacaaaaaaaaaaaaggttgaaaaa

SEQ ID NO: 10218 - DNA, 322 bp, Glycine max
  Clone ID: LIB3092-030-Q1-K1-D9
cccacgcgttcggctagccacaatgcagatattcgtgaaaaccctaacggggaagacgataggggtataggtagagtcatcggacacaatcgacaatgtgaaggcgaagatccaggacaaggagggcatcccgccggaccagcagcgcctgatcttcgccggtaagcagctggaggacggccgcaccctcgccgactacaacatccagaaggagtccacgcttcacctcgtcctccggcttcgcggcggcgccaagaagcgcaagaagaagacctacaccaagcccaagaagatcaagcacaagcacaagaaagtcaagctc

SEQ ID NO: 10219 - DNA, 348 bp, Glycine max
  Clone ID: LIB3092-029-Q1-K1-G9
cagacctctgatcctctcgccgccgcctgcctaatgccgccgtcgccgccgccgagcatggacacttgtcgcgagtgcaacatcgcaagatgcctgggatgcaactttttcccggaggagaaaaagaagcagaagagggccaagaagaagtacagaagcgtgaggcagaggccctggggaaagtgggccgcggagattcgtgaccctcgtcgtgctgcccgggtctggctcggcacgttcggaaccgccgaagatgccgcccgggcctacgacaaggccgcgattgagttccgcggcccacgggccaagctcaatttccccttggtggacgagtcgctcactttgcag

SEQ ID NO: 10220 - DNA, 425 bp, Glycine max
  unsure at all n locations
  Clone ID: LIB3092-029-Q1-K1-H11
cccacgcgtccgattctccatacacacaacaaattagacactaccttgttcggacattccacggacacaaaataactattagcaatttggcatcatcaagaatgagttcaacaagccgtgcttggacttggaccgtggcagcaagtgttggagtggtggaggccttgaaggatcagggtatctgcaggtggaacagcgtgatgagatcagcacaacaacatgctaaacataatatgaggtctttgtctcagaccaagaagctttcttctcaaccatctgctatggcttcagccaaattgaaagatgagaaagctaagaagtcagaagagtctttgagaaccgntatgtatttgagttgctggggtcccaactaaacaaagatgcatagatatgcaattctcgaattctttttcttcttcttggaa

SEQ ID NO: 10221 - DNA, 104 bp, Glycine max
  Clone ID: LIB3092-030-Q1-K1-A10
tattttcccttgtcgatttttgctaacgatcttgtgcttaccctccgctgtgttacggtattagaaactcatgcaattgtcttgacttgtgataaaaacaaaac

SEQ ID NO: 10222 - DNA, 434 bp, Glycine max
  Clone ID: LIB3092-030-Q1-K1-A11
cgtccgccaacgcgtccgcccacgctatcgcccacgcgtccgggagaaagtggctggcaaattgcattagctaaggctgctcaacataggctagatcgaggtgtttggaccagtgtgcgttttggggacatgaggcgatctttgtcggcatgtgaacgtcttatcctgttgaaaaatgatgcaaatgagttaagagattacagcattcttctctatcattgtggattatatgaacagtcactggaatacctgacgaagtaccgagatctgaagaactcatctacgcaagaattatcatcatcaaactctcttagcagcctggaggaagatgccgtggataacctgatgatgcgcttgaatcttgtactgatggagcaagggtggagtcggtcatcttatgccaagaattttctgggtaataattcttgaccatg

SEQ ID NO: 10223 - DNA, 433 bp, Glycine max
  Clone ID: LIB3092-030-Q1-K1-A12
acgccacgcgtccgccacgcctcggccaagccttcggccaagccttccggaagaaagtgctcggaaattgcattacctaaggctgctcaacataggctagatcgaggtgtttggaccagttgtgcgtttggggacatgaggcgatctttgtcggcatgtgaacgtcttatcctgttgaaaaatgatgcaaatgagttaagagattacagcattcttctctatcattgtggattatatgaacagtcactggaatacctgacgaagtaccgagatctgaagaactcatctacgcaagaattatcatcatcaaactctcttagcaacctggaggaagatgccgtggataacctgatgatgcgcttgaatcttgtactgattgagcaagggtggagttcggcatcttatgccaaagaatttccttggtaataattct

SEQ ID NO: 10224 - DNA, 151 bp, Glycine max
  Clone ID: LIB3092-030-Q1-K1-A2
gagactcaatctctatctctctctttctttgccctctctttctccatctataaatgtcagagttacgctgccagatgatgcagcagccaggacccggcatggcaccttccaccatgggccatcaaacgccgcaacagtaccaacatgctcc

SEQ ID NO: 10225 - DNA, 74 bp, Glycine max
  Clone ID: LIB3092-030-Q1-K1-A3
ttttcttttcattatcatgaatcattcattgcaattttttaatttttaccttcttaatgttcctgttatgtttt

SEQ ID NO: 10226 - DNA, 322 bp, Glycine max
  Clone ID: LIB3092-030-Q1-K1-A4
cccacgcgtccggaatatcaaattggtctcttgtcttcctcctcatctctacactactccacggagagcccagcctgtcaagcccaagcccaagcccaagcccaagcccgttcataaaatcctgctgcagcagcacccagtacccagccctatgcgtctgatccctatccgtctacgcctgcagcattcaacaggaccctcaccaactggttcagacagcagtctccctctgcctgaactgaacccaagcaaccaaaaccttggggggtaacggcaccaaatttttgggccggaaacccgaaaagccggttggactaaagga

SEQ ID NO: 10227 - DNA, 56 bp, Glycine max
  unsure at all n locations
  Clone ID: LIB3092-030-Q1-K1-A5
tcgtctcgtaatcaactcnntagctgttgcnnaaatttctaccctatttnnttcaa

SEQ ID NO: 10228 - DNA, 290 bp, Glycine max
  Clone ID: LIB3092-030-Q1-K1-A6
tcgagactcaatctctatctgtctctttctttgccctctctttctctctttagaaagctcaggtttgcggggcgagatgatgcagcaggcacgacccggcatgggaccttccaccatgggccaacaaccgccgcaacagtaccagcaggctccgccgcagtatcagcaaccctacgcaatgatgccgacgaaggtccaggccccgcaggcaatgtgggccccttctgccaaaactcggcctaagaaaaaacccccctggcccatcaaggcccaaaccctttggaccggga

SEQ ID NO: 10229 - DNA, 133 bp, Glycine max
  Clone ID: LIB3092-030-Q1-K1-A7
aaaaatgataatgatcaataagcgcttttttctttttcatttatcatgatatcatttcattgtcaattttttaattttttaccttctttatggtcctgttattgtttttgtaagttatttgtattgggtgggt

SEQ ID NO: 10230 - DNA, 111 bp, Glycine max
  Clone ID: LIB3092-030-Q1-K1-A8
gatcagcctcctaaaacaatggcttctttcaatctgtcttattcttcctcaccagacgtctcgggtactctggcgagcaaacatgctaaatcattcattgatgcgcctgtt

SEQ ID NO: 10231 - DNA, 216 bp, Glycine max
  Clone ID: LIB3092-030-Q1-K1-A9
gctaggccttccaaaacacctgcttcctcatttctttcttatccttcctcacaaagcctctggtgggctctatcaaccaaggatgctcaacatttccttgatccacctttattgcgcatgaatcctaaattttacactaagcacacttcttttgggagaaatcaagctatactgatcactgatgaatctgatctactttcctattacaacctccat

SEQ ID NO: 10232 - DNA, 455 bp, Glycine max
  Clone ID: LIB3092-030-Q1-K1-B1
acgggcagatttcgtcagtgaagaacagattggttagatttaagaagcctttggcttgtttgcggatagggtgatgggtgcattactgtggaagaattggccactgttattcggtcattggatcagaaccccacagaagaagagctccaagacatgataaacgaggtcgatacagatggcaatggaaccattgaatttgttgagtttttgaacttaatggccaagaaaatgaaggaaactgatgcagaggaagatctcaaagaggctttcaaggtgtttgacaaggatcaaaatggctacatttcagcaagtgagttgaggcacattatgatcaatctgggtgaaaaactaactgatgaagaggtggagcagatgattaaagacgctgttttggatggtgatggtcaagttggctattatgagtttgtcaagatgatgatgatttttggatgaaa

SEQ ID NO: 10233 - DNA, 207 bp, Glycine max
  Clone ID: LIB3092-030-Q1-K1-B11
gcacgaatatcttgttgtttggagcgatcctttaaaaactatgacaacattgattcctaccgtgatcattgctagagcggtgttgcttgcagtggactcgtggtggcaccagcaccaccaccaccacatcatcaacaacgtggatttttcgttaggcttggagaaggcgacgtgtttcacgatcttatcaagacattgtttattcgt

SEQ ID NO: 10234 - DNA, 151 bp, Glycine max
  Clone ID: LIB3092-029-Q1-K1-G4
cgttattttcttggcacatacttcttaacttgaaagaccttaactaaagggggtggtttaaattgggcccaccgggtttggtacctttttgaattttattggaagacatggattggtcatcatggattaacactttcttggatctcaacat

SEQ ID NO: 10235 - DNA, 294 bp, Glycine max
  Clone ID: LIB3092-030-Q1-K1-B2
ggaaaaatggcacctttcgtttccctctctttgttgcttctctttctcaaccaccccctcctggcccgctcaaccaaccctgaagctagcaagcagacttaagcttggccttaatagttttgatttgatccaaataatttgcgtagggaacgctctgcatgctttgagaagcaggctttctgatcccaacaatatgttgcagagttgggacccaacactggttaatccctgtacttggtttcatgttacctgtgactccaacaatcatgtgattcgcttagacttgggcaactc

SEQ ID NO: 10236 - DNA, 354 bp, Glycine max
  Clone ID: LIB3092-030-Q1-K1-B3
ggcagatgtcctgagtgaagaacaaattggtgagatcaaagaagcctttggctggtttgacaaagatggagatgggtgcattactgtggaagaattggccactgttattcggtcattggatcagaaccccacagaagaagagctccaagacatgataaacgaggtcgatacagatggcaatggaaccattgaatttgttgagtttttgaacttaatggccaagaaaatgaaggaaactgatgcagaggaagatctcaaagaggctttcaagggtgtttgacaggatcaaaatggctacatttcagcaagtgagttgaggcacgttatgatcaatctgggtgaaaaactaactga

SEQ ID NO: 10237 - DNA, 368 bp, Glycine max
  Clone ID: LIB3092-030-Q1-K1-B4
ccgctttcctccagacattctcgaaaatcattgaaaacccagaaagcctgacattgtagtcatgctgtacttccaacataaaattatctccaccactggatcacgactcgataatgtttgtttagaagctatttgactcaatgccgaacattttgtgatttttttccctcaactttcattggtttatcttttatgagctatcctgaggaccaatgatagattttttgacagggagaaacagctttaaaattgtttacagtgagggatgttctaaacggcaattattttgagaatctacatgtaagcaataagcggttttaacttttaaatgttggatttttcagtaaaaaattactttttactccttg

SEQ ID NO: 10238 - DNA, 187 bp, Glycine max
  Clone ID: LIB3092-030-Q1-K1-B7
cctacgcgcacatgtcctgagtgaagaacagattgcttatatttaagaagcctttggcttgtttgacaaggatgtagatttttgcattactgtggaagaattggccactgttattcggtcattggatcataaccccacagaagaagagctccaagacatgattaacgaggtccatacacatggcaat

SEQ ID NO: 10239 - DNA, 330 bp, Glycine max
  Clone ID: LIB3092-030-Q1-K1-B8
gaaaggaaggaagaaagaaagaaacaacactgactgaacagaactcaagctcaacactgtctgtggaaccaggttaatagaggtccaaggccaaacttgcctttaaggtttgaaccgactgactacaatacactcctcacttacaaatttcttatacaatccatgattgtgttacacctttttgcttgctcccttacttcttgcactaccattacatgctccaaacatttttcccatgacaaccactttgtgccatcttcaacggttccgcggctatccctgagccatgtcagaacaaggatattcttatgtagtgctagaaatcgacag

SEQ ID NO: 10240 - DNA, 452 bp, Glycine max
  unsure at all n locations
  Clone ID: LIB3092-029-Q1-K1-D12
cacgcgtacgctctccccaacatggccgacganggcgtccttttgctgcaaggatctttcaacgaacacattggtgcttttagaaggttaggggtgcaaggcgtggagattcgaaagccagagcagcttaacacaattagttccctcattatccctggtggagaaagcaccaccatggctaagctcgccgagtatcacaacctgtttcctgctttgcgagagtttggacaaatgggaaagcctgtttggggaacctgtgcagggcttatattcttggcaaataaagctttatgacaaaagacttggggtcaatatttgggtggcggacttgattgtacaatgcatagaaattttctttggcagtcagatttaaagctttgaagcaaaactttcaatgcctgagctttgttttcaacgaaatgaggtcctgaaacattttgtggaattttatt

SEQ ID NO: 10241 - DNA, 251 bp, Glycine max
  Clone ID: LIB3092-029-Q1-K1-D2
atgatcatggaagcttttagggtgaaaggcaaatgcccaaaatcttatctttactcttaaacgggcgtcccttattcaagttaaaaccaaattacatgtgtttttggccaataacaccaaaaaaaatgtttgtgactttaaagtcaaaagtagttgggtggaaccatcctgcggtggttattctggtgaatctaacaacattgttggccaaatgcataaaaagcacaccggtcaaaatattttgattggga

SEQ ID NO: 10242 - DNA, 483 bp, Glycine max
  Clone ID: LIB3092-029-Q1-K1-D5
ccgctaattaacccttttctccccagcattcaatttctattagtatccaaaccttgattgcgttcttggattttcttgtgggtagggggtttctcctctctttctctgcagtttgatggatcgggaaggaggatccaacgccggatcttgctactactccgttctcgggattcgtagggatgcctccttctctgatattcgcactgcctaccgcaaactcgctatgaggtggcacccggacaagtgggctctgaatcccgcaaccgccggcgaagccaagcgccggtttcagcaaatccaagaagcctactcagttctctccgatcagtctaaaaagtcaatgtacgatgcggggctctacgatcctttggaagaagaagaccaagatttttgtgacttcatgcaagagatgatctcgatgatgaacaatgtgaaagacgagggggacagtttggaggacctacaaaggatgttcgtggatat

SEQ ID NO: 10243 - DNA, 479 bp, Glycine max
  unsure at all n locations
  Clone ID: LIB3092-029-Q1-K1-D6
aagagaagcattagcaaaagcaagaagaactagtctaagcagaaatggcctcttcagtgatggcatctgtggccctcaaacctgcccctttcactgttgagaagtcctcagttagaggccttccctccctctcaaggaactcctcttcattcagagttgtggccagtggtggcaagaagatcaagactgacaagccttatggaattaatggtggcatggctttgagggaaggagttgatgcatctggcaggaaaggaaagggaaagggcgtttaccagtttgtagacaaataccgggctaatgtcgatggttacagtcctatctacgacaccaaggactggtctccaaccggtgatgtctacgctggcggtacgactggcttggctatctgggctgtgactctacttggtcttcttgctggtggtgcacttcttgtctacaacacaagtgctttggcgcaataaactttgcanatcgat

SEQ ID NO: 10244 - DNA, 113 bp, Glycine max
  Clone ID: LIB3092-029-Q1-K1-D9
ttaaacgggggtgccttatccaacttaagaccaaattacatgtgtttttggccaataacaccaaagaagatgttggtgactttaaagtcaaaaatagtttggttggaaccatc

SEQ ID NO: 10245 - DNA, 402 bp, Glycine max
  Clone ID: LIB3092-029-Q1-K1-E11
cccacgcgtccgcccacgcgtccgccttacttctcactctctttccaaaacactccctttctggttccccttacccttcttctgtgtgtgatgatgtagatagagaataaaaagagaccagtgtgcagtgagaaagaggttggtcacttcttgtgtggctttgttttgttctttgtgttggaatttgttgatgggtgaagagggagaagaggtgtcaagagataaggaacagcaacacatgggagtttatggaaatgagtggttgtttagtagtttctgtgcaaattggcgccgtttaagacaccagaattcctgttctatgcctccttttgagtgaaaaaaaaaaaacatcaaaacaaaaacttgttctctctcagcttttcatcttccgatcttaatata

SEQ ID NO: 10246 - DNA, 453 bp, Glycine max
  unsure at all n locations
  Clone ID: LIB3092-029-Q1-K1-E6
gacaattacggaacctgtattgatgtctggtcagtacggtgcatttttgctgagattcttggtagaaagccaggcttccctgggactgagtgtctcaaccagctgaaactaattataaacgttcttggaagccagcatgaatctcatcttgagtttattgataatgcaaaagcaaggaggtttatcaaatcactgccctatactaggggcagacacttctctcagctatacccacaagcagatccattagccataaatttgttgcaaaaaatgcttgtgttcgatccaaccaagaaaattactgtcttgtaagctctccaacacccgtatatggctagcctatatgatccaaagtgcgaccctnctgctcangttcccatcagtctcgacatagatgaacattggggagaaccgatgattatggaaatgttttggaatgagatgctacattat

SEQ ID NO: 10247 - DNA, 442 bp, Glycine max
  Clone ID: LIB3092-029-Q1-K1-F1
acgcccacgcgttcgaagacgcgggtttgcaagcattgaaattaggatttggatggcatggccttccttgctctcccatagacactgatcgatgacatgcatgacgacaccaccgtcttgctgctcagcttcacggacgcagttcgcctattcaaacccctcctcctcctcctcctacttccccgttccctttcaccttcagcaacccgcaaccactcactacgctgcgccctacgtcgccgccccctccgtgcaaatccccgctcctccagtcgtcggccccgttgcgcccgcccctgtacccggcgtatactccgccgtgccgcaatatcaagcacagcagttatttgagagggatgcgcagataataacgccggaggctctcgagaatgtcaaggcagcgattgcagcagcgacgtggagcacaaaaccgatgccaaaa

SEQ ID NO: 10248 - DNA, 427 bp, Glycine max
  unsure at all n locations
  Clone ID: LIB3092-029-Q1-K1-F10
cccacgcgtccggggagaaagacaccactgcttggtttgaagaacttcgtgttgatatgaatgtggttaaaaacatatcaatggagatacttgatttttatgaaagcaatagaatgttcactgatgagagaatcaatgctgctcttcagaagctgagcctgagaccctagaacttactggnagatgactcaacgctgaatatgtggaatgaagttaatgctatggtgatttgtctgaatgatttttctgggtcaatgacatgttttacggtagaacactatctaaatgtatccaaaagtaagggcacgtaatattgggggtcaattcaaagtgtcctattaaagagcaaaaggaggatgaaaaaaggtgattctcggtgaggaccagatagactcccacctgattcatagaatcttttgtttttatc

SEQ ID NO: 10249 - DNA, 461 bp, Glycine max
  Clone ID: LIB3092-029-Q1-K1-F11
cggacgcgtgggcggacgcgtggggaacaagtagttgagaactaagaaggagaagcaaatggcttcctcaatgatctcttccccagctgttaccactgtcaaccgtgccggtgccggcatggttgctccattcactggcctcaagtccatggctggcttccccaccaggaagaccaacaatgacattacctccattgctagcaacggtggaagagtgcaatgcatgcaaggtgtggccaccagttggcaagaagaagtttgagactctttcctacctgccagaccttgatgatgcacaattggcaaaggaagtagaataccttcttaggaagggatggattccttgcttggaattcgagttggagcacggtttcgtgtaccgtgagcacaacaggtcaccaagatactacgatggacgctacttgaccatgtggaagctgcctatgtttggtgcactgatg

SEQ ID NO: 10250 - DNA, 373 bp, Glycine max
  unsure at all n locations
  Clone ID: LIB3092-029-Q1-K1-F2
tctctctctcaagtctcaaactaaatttggtagttcaactctctctatttctactttcttctgtagtcacttccaacacttattcaatttttatctttcttttgctctttgtgcattataatcttctcttgtcattacaacccccccgttactcaaatcagaaactctcatttgaagctaacaaacaacaaagatcaacggatctatctaccttcagtcatggtgttttctttcaaccaacgcttctgggtttcttcttcgcttctcctcctcgcggacctctctggttcttctctcactcccactttcctttctgacanccgtttcgattctcaaccagcgcataccggtcggaaccttcttcaggctaaaa

SEQ ID NO: 10251 - DNA, 249 bp, Glycine max
  unsure at all n locations
  Clone ID: LIB3092-029-Q1-K1-F7
taccggnccggannnnnnnnnngggngcgcgtacccgctcaacttggaacccacaggtttgagggtttaaaaatgggaattcgatggattggccttgcttgaaccgacaatgacccttttcaaaaacaaggttggatatttggtattcaagattccgtcaagaagggaattacattttttggtactggcggtggttattggggccatggttattgacttttgggttggaaagctttgaaacaactggcc

SEQ ID NO: 10252 - DNA, 385 bp, Glycine max
  unsure at all n locations
  Clone ID: LIB3092-029-Q1-K1-G1
cacttattcaattctttggaatccccaacgcattgttttttctgtggatggcacccctataagagaattcaagaatttagaatcaattggagttccttttccgaagaggcaaccgatgaggatatactcaagcctatggaacgctgatgattgggccacaaggggtggacgcatcaaaaccgattggtccaaagctcctttcactgcatcctacagaaacttcaacgctaacgcttgtgtttggaacagaggaaaatccacatgcaaatcaaattcaccatcctctaatgcatggctatcacaagagctggattccactgctcagcaaaggctgagctgggtgcaaaaagnttacatgatttacaattattgctccgacaaaaac

SEQ ID NO: 10253 - DNA, 396 bp, Glycine max
  Clone ID: LIB3092-029-Q1-K1-G11
ccagatgatgcttttgttgtttatcaaggtcaccatggtgacaagagtgtttatcgagcaaattttattttgccagcagcagcattcagtgagaaggaaggaacctatgaaaataccgacggatgcacgcaacaaacattgcctgcagttccaacagttggtgactccagagatgattggaagataattcgagctctatctgaggtggcaggagtgcctttgccctatgatacaattggggccgttcgtgcccgaatcagtactgtagccccaaaccttgtgaacatggatgagagagaaccggccacattgccatcttcactcagaccaaccttctctgagaaggtggacaccaccccattcgggactgtaagtgagaatttctatatgactgat

SEQ ID NO: 10254 - DNA, 252 bp, Glycine max
  unsure at all n locations
  Clone ID: LIB3092-029-Q1-K1-D1
cacgcgtncgattgaatcttcgctatccttctttttttctacttgcactcgaatattcactgtggcagatggggggggttttctaaaaatctgtgccaggccatttgggatgatggtcaggattgcacttgctgaaaagggtatcaaatatgattccaaagaagaggacttgcataacaagacccctgtgctcctcaaaatgaaccctgttcacaagaaaatacctgctctcatccacaatggacaacccat

SEQ ID NO: 10255 - DNA, 300 bp, Glycine max
  Clone ID: LIB3092-029-Q1-K1-G12
cccacgcgtccgcaaaggcccacgattcctcactcttcttccatagcctgcggccttcactctcatctcctggtctccagtgagatgaaccctagctccaattggtcccattagttacctctttcctgcatctcatatatcccattctttctcattcacacagcatcatgggcgtcaaaggttttgttgaaggaggcatcgcttccatcatcgcaagatgttccacacacccacttgatctcatcaaggtccgcatgcagctccagggtgaaaacaatttgcccaaaccggttcaaaatc

SEQ ID NO: 10256 - DNA, 96 bp, Glycine max
  Clone ID: LIB3092-029-Q1-K1-G2
attgcaaacacgaacaagtaattgaaactcctacagttgaatcagaaacactgcacgcctacgctattgccttataatacttgttccacgcttttt

SEQ ID NO: 10257 - DNA, 212 bp, Glycine max
  Clone ID: LIB3092-029-Q1-K1-A3
atctccaaattccaatgcttattcttacttattatttcagattaaatcactagtgttgttactcgggtacgctcttgattgtccactcttaaacactaaatgtatctatctgcctaatacataagatagggcagactcacaacaaaccaaaataaaaccctttccaaagaaagaccttgttaagcaatcagcgcattacagagagaggctta

SEQ ID NO: 10258 - DNA, 376 bp, Glycine max
  Clone ID: LIB3092-029-Q1-K1-A4
ggagatgatgattttgagcagagttctcaaaagtgtaaatcaggaggggatgaatatgatgaagatgaacctgatgccaaaagatggaaaattgaaggtgaaaatgagggtatgtctgcccctggaagtagaacagtaagagaacctagagttgtagttcagacaaccagtgacattgatatcctagatgatgggtatagatggagaaaatacgggcagaaagtagtgaagggcaatccaaatccaaggagttactacaagtgtacacacccaggatgtccagtgaggaagcatgtggaaagagcttcacatgacctaagggctgtgatcacaacctatgaggggaagcacaaccatgatgttccttgcactcgtg

SEQ ID NO: 10259 - DNA, 167 bp, Glycine max
  Clone ID: LIB3092-029-Q1-K1-A7
aatcttcttctattcttatactgatcactgacacacactcaccctgaaatgttgaaaatgctgggacacgctataaacttcgtggagaccgcaaggtcacaccgcatctgcttgtactgctgactcctttaagaacatgcttattttttccaaatggacaactacac

SEQ ID NO: 10260 - DNA, 136 bp, Glycine max
  Clone ID: LIB3092-029-Q1-K1-A8
cgcaagcaaaaagaaagaatcccaggcgaggagaaagatggaggggaaggagcaggatgtgtggttgggagcgaacaagttccccgagagacagccgattgggacggcggcgcaaagccaagacgacggcgaggac

SEQ ID NO: 10261 - DNA, 363 bp, Glycine max
  unsure at all n locations
  Clone ID: LIB3092-029-Q1-K1-A9
ccatgatccggttcggcggcggcgaccaaaacggcggcgttacgttcgatggtttgcttcgtgtattggcgcttgaatgttccgccgctaattaaattaattaacccccccccccccnannnnnnnntnnnntnttggncccnntcnttttcttaatttaaccaatggatgaccttgtttatctgcgcagcacatagagagaggcttatggaaggagtacctcacccaataccaagaactgtcgaagatgatgttaccaattttaatggccgacgctctggtttgattaatgccctcactactgacgttgaaaagatttaccaggactgcgatctccaaaaggagaatttgggaatatatggg

SEQ ID NO: 10262 - DNA, 393 bp, Glycine max
  Clone ID: LIB3092-029-Q1-K1-B10
cccacgcgtccggccaaatcaatcaaattctttgagttgaacacaggggccaagattccttctcttgggttagggacttggcaagctgaacctggtgttgtagctgaagctctcaccacagccattcaggttggatacaggcatattgactgtgctagtgcgtataagaatcaagcagagattggttctgctcttaagaagctttttgatgatggtgtggtgaagccgggaggacttatggatcacttccaaactctggtgttcagatcatgcaccagaagatgtgccaaaagcattggataaaacattacaggaattgcaacttgactatcttgacctctatctgatccactggccagtccgcatgaaaagtggaacatttggactcattaa

SEQ ID NO: 10263 - DNA, 209 bp, Glycine max
  Clone ID: LIB3092-029-Q1-K1-B11
aaaaaaggaaaaaaaaaaaattttaaaaaaaattgttataaaaaaaaaaaaatcgctaaaaaaattgtataattttttaaaattcaatatatattctcaaacattattattttttcttaataatttattatcttattttattaataaatttcaattttttattcttatatttctcttaattatttatttatatattattttaaattatt

SEQ ID NO: 10264 - DNA, 424 bp, Glycine max
  unsure at all n locations
  Clone ID: LIB3092-029-Q1-K1-B12
ggcaaattgtcccggatgccctcctgaaatttggcacacatgtaaagaaaaaagagtccaacgttatgggggcacttcaaggaaattcctgttgatgctccaaagtctcaaaagaaaacatttgacgactctgatgaagactaagtgctggctacttgtgtttatttttggctgaagaaatatatgaattcggtcatttcttactctttttggccgagttatttattactttaagaggtaataaaaaaagttagttataaatagaattagtgacgtcttttcatgttgtagcatgcacccatctgngctttcttttgtttttggcttcactttgagatgataattttgtattcacacatatttttagctgtctagaattgtcttataagttacaatttccaaggtttgacattttaaattttta

SEQ ID NO: 10265 - DNA, 155 bp, Glycine max
  Clone ID: LIB3092-029-Q1-K1-B2
ctaattttgtatgcatatttgcaatactgttgtataagatacaacattatgaatgtatatacggactgtatgggacaaagactataattcttgagtcctcaattgaattatccgatcacttctttgtattaaaactgttcgtatttttttcctct

SEQ ID NO: 10266 - DNA, 351 bp, Glycine max
  unsure at all n locations
  Clone ID: LIB3092-029-Q1-K1-B3
cccacgcgtncgaccacgcgtncgntggtttttaattcaacgttttatgccagcgtcatcagcgtatgaaataggggcggaggattataaagaacaaaggaaaaaaaagggtcctcattctaacactcaaacacatacaggctaactgcctggatgctttatctctaaacaaacattggaagcttcgtaaccaaaaacattccctatcattttctatgcgcacttgtaattacaaaaaaaatgccattggtgaattctacacccgttgcacggaattaattacacgcgttgaatacaccccagagactgtccttacatacactaaaaggtcagtcgatactggatcacaac

SEQ ID NO: 10267 - DNA, 385 bp, Glycine max
  unsure at all n locations
  Clone ID: LIB3092-029-Q1-K1-B6
aattcctnttnatcctccaaaatctcaaaaaaaaacattttactactctnattaanactaaatgctgcctacttgtgtttattttttcctgaagaaatatatcaattctgtcatttcttactcttttttcccgagttatttattactttaacacgtaataaaaaacgttagttataaatacattattcaatcttttcatgttgtagcatgcacccatctttgctttcttttgttttttcttaactttaaatgataattttttattccacattttttatctttctagaattttcttataatttacaatttccacggtttgacattttaaaatttttaatttattaattaattaatttactattttcaaaaaatacaactatcattc

SEQ ID NO: 10268 - DNA, 125 bp, Glycine max
  Clone ID: LIB3092-029-Q1-K1-B7
ctaattttgtatgcatatctgcaatacttttgcataagatacagcattaggaatctatctacgctctttatgggacagagactatgtttcttgagtcctcaattaaataattcgatcactttttt

SEQ ID NO: 10269 - DNA, 429 bp, Glycine max
  unsure at all n locations
  Clone ID: LIB3092-029-Q1-K1-B8
cccacgcgtccgcccacgcgtncgctgttttttaattcaaggttttatgccagtgacaataggattgaaaattgaaatggtattttttaagtttcaaaataaaaatttgtgtaattgttataacatttttaaacatgtattttaactgttcgtatttttttcctctaaagaaacatgggagcctttggtttgagaaaacattctttttcattttctatttgcacttttaattacaaaaaaaatgtcaattgttttctaaacaaacaataaacaagataaaaaaatcatgttagatatgacttctagatagttattatatattctaattagtaatttgtgattggatcacgacataaaaattctttaactgtcaatgcaaacattatttactctttttgtaattagaatagaaaacttttaaatgaaccc

SEQ ID NO: 10270 - DNA, 471 bp, Glycine max
  unsure at all n locations
  Clone ID: LIB3092-029-Q1-K1-C1
gaagcggggnaaaaatnnccattgaaggacaacttccacaatcatcatcagagaatggnanacggtcggaggattatggacaanaaggcaaaaaaaagggtcctcatcctcttgctcaagctggaactggctctttccctggaggcttcattgggaaacataggttgcaagcagccataaccaacctcaataaccaaattagtattttgcaggaagagttgaaaaaagttgaaacaattggtgaatcctccaccgtttgcaaggatttaatttcaagcgttgaatccactccagatcctctccttccattcactaaaagttcggtcgatgcgggttgggatcgatggttcggaggtgcccaccactctcgaaatcacaaacgttggatttagatattnntgtttgcatttatttatattttttggntactatgaacatttaatttaaaatttacctgcttgtgatggaaac

SEQ ID NO: 10271 - DNA, 366 bp, Glycine max
  unsure at all n locations
  Clone ID: LIB3092-029-Q1-K1-C10
gtttgctgaagaaagcgcgcgagatctctgtgctgtgcgatgctgatgtggctctcatcgtgtgctccaccaaaggcaagcttttggactactccaaccaaccttgtacggaaagaattcttgaacggtatgagaggtattcgtatgcggagaggcaacttgttggagatgatcaaccaccaaatgaaaactgggttatagaacatgaaaagctcaaggctagggtggaggtactacagagaaatcaaaggaattttatgggagaagatctggacagcttaaatcttaaaggacttcagagtttggagcaacaactngattccgctctcaaacacattagatcacgaaagacccaagccatgaatg

SEQ ID NO: 10272 - DNA, 406 bp, Glycine max
  Clone ID: LIB3092-029-Q1-K1-C12
cgtccgcttcaggtctctcatttctcttcttcactgagaaaaatccttcttcttgcatgctcctcgtttgtatctaaacgcgcgaaagagtagattataagggggtaagtgagaaagagagtaaaaacaaaattaaaacatgactatggaagagggcagggtcgagaacgaggactacacacaagatggtactgtcaacattaaagggaaacctattcttagatccaaaagtggtggttggaaagcttgctcctttgttgttgtatatgaagtattcgaaagaatggcttattatgggatatcatcaaatttgatcctttatcttacaacaaagcttcaccaaggcacagtatcctctgcaaacaatgtcaccaattgggttggcaccatttggatgacacccata

SEQ ID NO: 10273 - DNA, 458 bp, Glycine max
  Clone ID: LIB3092-029-Q1-K1-C3
gcgggagtattatccaaacatcatcacaacacggacttatgatgagcgtcttcaaacccttgagtttgttcgtgatgcacggatcaatgtttgttctggaggaattatagggcttggagaagcagaggaggatcgtgtaggtttgttacatacattgtcaacacttcccacccatccagagagtgttcctattaatgcacttgttgctgtaaagggaacccctcttgaggatcagaagcctgttgaaatatgggagatgattcgcatgatagcaactgcacgtatcgtaatgccaaaagcaatggtcaggttatcagctggcagagttcgattctccatgcctgagcaagcattgtgctttcttgctggtgcaaattctatattcactggtgaaaagcttctcactactcctaacaatgattttgatgctgatcaactcatgtttaaagttcttggac

SEQ ID NO: 10274 - DNA, 132 bp, Glycine max
  Clone ID: LIB3092-029-Q1-K1-C4
gtgcaataaaatgcttactactactactaccactacaacacttgttgcttcatttttcttttaaacttgtactgagaaacagaaccatcaattttctctgccttctcattgtgcaataaaattcttaccttg

SEQ ID NO: 10275 - DNA, 245 bp, Glycine max
  unsure at all n locations
  Clone ID: LIB3092-029-Q1-K1-A2
accgggncggaanacgcggttcgacgagggtgtccaagcaagggcttaccttgcagcatccactgctgatgcttcccttggaatgtgggaaatgctgggaaaccccatcaacttcaggggagccacaaggccaactacatctgcttctaatcctgcctacttcaagactgtggctcttttctccaaaaagaacgctacaccaacacctgcaaaaaaagctgctgctgctgctcctgccaatgatg

SEQ ID NO: 10276 - DNA, 469 bp, Glycine max
  Clone ID: LIB3092-028-Q1-K1-F7
cccacgcgtccgtgagaggaagagagagggagattctttgtttgctaccttctctcggaaaaatggttacgttcaggtttcaccagtaccaggtggttgggagggctcttcccacggaagcagatcagcaccccaagatctaccgaatgaagctctgggccaccaacgaggttcgcgccaagtccaagttctggtattttctgaggaaactgaaaaaggtgaagaagagcaatggccaagtgcttgccatcaacgagatttttgagaagaacccaaccaaaattaagaactatggtatatggttgcggtatcagagtaggactggttaccacaacatgtacaaggagtaccgtgacaccactctaaacggtgcagttgaggcaatgtacaatgaaatggcttctcgtcacagggtcaggagcccttgcatccaaattatcaagactgcgaccatcccagctaagctttg

SEQ ID NO: 10277 - DNA, 331 bp, Glycine max
  Clone ID: LIB3092-028-Q1-K1-F8
gttactttcagccccgatcttggtttctcatatggtatgagagttgtaaattgcagcattattgcggcttgatcgcctgccagccacatatattgagtgctaggtgaactggccttggagttcgagtgggcctaacatggacagaagaggaggctaacgatttagtgttccttttggggatggatggatggcttattattttttccttccatttctgttatattttacattatagatttttggagaaatcatatcaactcattatggttgttcatctttgtaaaacttgcaaaattgtttagttgaaaacaccacgtgttactgttcattc

SEQ ID NO: 10278 - DNA, 268 bp, Glycine max
  Clone ID: LIB3092-028-Q1-K1-F9
ctcgtccttcttttttctatcttcttatttacttgtgggtgtggttgatttttatctcacctgaaacatactaactgctgtgttaactgtatttgcagaaactcctgcaacttctgcaacgactgcggatgctgccatatgtacccatacttgaactacaccgaatcaaccaccaccgataccttgttcatgggagttgcaccagttaaagctcaattctaaagtgctaaaatgggtgttccctcttacaactataactgcaaatgtg

SEQ ID NO: 10279 - DNA, 246 bp, Glycine max
  Clone ID: LIB3092-028-Q1-K1-G1
tcgcccacgcgttcgcaaaaatggacaccaagccctccacacattcgctttctcgaaggctcaactgggcttggcccaaatgcattcttttctttaaaccacaacaacttctttaaccggctctttagctataggtccttcttcttcaaagattctgtactatatacctcaagggaagaagagaaaggcctaattaaacaactttcaatggggtaatcatattgcaagggttatggggcatttttc

SEQ ID NO: 10280 - DNA, 441 bp, Glycine max
  unsure at all n locations
  Clone ID: LIB3092-028-Q1-K1-G11
ccacgccttccgatttacagactcacctttaagaaaagattgtttatggagggaacaaaatgccaacacttaaaaatcatctacacttcctacctaattttataaccaccaacacacaacttgtttgtgagagaaaaatgatctgtcacctacgcaaaaatcatgcgagtttgagctgccactccaaatattacagatagcagaaagtacagatttgaagcagtttcgagctgctgatgaattttctgatgaggaggcatccccatgaagatttttttgtctttgctgaagaagtaatggnctcttttttccatccttttccgtttaaagcaaaactggggaggggtttggtgcagagatgtgcctcgtttccattatacagcatcctagtttgtgtttattaataggaaacacggatatatacttgtaatgctactacta

SEQ ID NO: 10281 - DNA, 285 bp, Glycine max
  unsure at all n locations
  Clone ID: LIB3092-028-Q1-K1-G12
cccacgcgtncgggtgttagtcttggtgtagtgtagctagggagggatatatatctgagtaagagggcatcaaagcttgaattgcccccaagcttcaaatttcatccaacggacgaagagctggtgttgcactatctctgccgcaaatgcgcgtcgcagccaatcgccgttcccatcatcgccgaaatcgacctctacaaatacgacccctgggacttacccggattggctacttatggagagaaagaagtggtacttcttttcaccacgggaccggaaataccc

SEQ ID NO: 10282 - DNA, 431 bp, Glycine max
  Clone ID: LIB3092-028-Q1-K1-G2
aaaacctcgaagatttagggtttcgcattgctacttcgcaagattttcaagaacacgtgccagtctggatttctttccattttgtacagccttggataggagtaaacctttgcagatatgggacaaagaagttgtgaatgcccatgttaaacgaccacaggatgaagacatacaatccaatgtactggaaataattggatcaaatattcagtccacatacattacatgcccagctgacccagctgcaacacttggtataaaacttccattcttggttttgattgtcaagaatctaaagaagtatttcacatttgagattcaagttttggatgataagaatgtcagacgacgatttcaagcctcaaattttcaagtgtgctgtcactcgggtaaagccctacattgcactatgccactgagaatgatgaggg

SEQ ID NO: 10283 - DNA, 362 bp, Glycine max
  Clone ID: LIB3092-028-Q1-K1-G4
tcggccacgcgttcggtttgaaacagagctggatatgaattcaagtttattaggaagattggtgatgatgtgttcgacaagattaataaagctgaagcaagtatatatgttgcggatcacccgggtggattacacttagaagtggaaaaaataaggaaacttttggaggctggatctagtgatgctatctccatgatagggatccacggaatgggcggggtaggaaaatcaacacttgctcgagcagtttataatttgcatactgatcattttgatgattcgtgtttcctacaaaacgtgagagaagaatcaaacagacacgggttaaaacgcctacaaagcattcttctttcacaaatact

SEQ ID NO: 10284 - DNA, 120 bp, Glycine max
  Clone ID: LIB3092-028-Q1-K1-G6
atcacgttaaattttaattgcatttttttccttaaataaaaaaacctaccaatggcttccggaaaggggagaaaaaaaccccggggaaaaaaacccgccagaaaggcccccccgggaaaa

SEQ ID NO: 10285 - DNA, 482 bp, Glycine max
  Clone ID: LIB3092-028-Q1-K1-G7
cccacgcgtccgaaaaacaataaacaattttttatgtatcaaaccataggtctttcggttatgcttttgaattaatgaaagacctatggtttgatacataaatacccagaaaaaattcatgttaataagaaaaatttttataaatatattacaagaacaagagatcaaaaaataacagaaaaaaaagaaaaagataattctgatttacttgttcctgaaaacattttatccgctagacgtcgtagagaattgagaattctaatttgtttaaatccaaataatataaatagaagacaaattaatatctatatctatctatatagatagatatagatacataacataaataaagacacgcattatggtatggcattgatactaattcactgatatataccttagataaaaaaagaatccacaaaattatgttttttttaagtataccattttttatggtgaatctataaaaaaagtctccttta

SEQ ID NO: 10286 - DNA, 165 bp, Glycine max
  Clone ID: LIB3092-028-Q1-K1-G9
tcgggctcgtcacttcttgctcttagcccttctcctcttcgccgccgtgggcaccgccgcgatgggggtgggcgcgttctacgccgacgacattcttattcgtcaggtggtgccagatgtttgcgaaacccaaaaggaggacaaccttcttaacgccgagcacca

SEQ ID NO: 10287 - DNA, 248 bp, Glycine max
  Clone ID: LIB3092-028-Q1-K1-H10
aaatatcatcgtgcttttttacgaggtccgcacacaccaccttcctctcttggtcgctttccgccaaattccagtcaaagttggtggtgccaaacatccaagaaagggtgctattttgaaaccagggaagagacatgacaaacatgccatcactttatatgacctttgtctgaaactccatttgattatttcattactgataacgaaagtatcaacaaaatacataacagttcatagcatagcaaagc

SEQ ID NO: 10288 - DNA, 298 bp, Glycine max
  Clone ID: LIB3092-028-Q1-K1-H2
tcatccaaattttctgcatcaagtatcacatgcaacttatgagcctttgatttattttagcatatagcaatcaactttgcttcatcaacttctgtccaaaatcaatcaccaaatttaatcctctccctatttatataagtccacccactttatataccaaattgaaatattccttactcaaatttatcagaaagctatgatcattgtgaatttctgcaccctttccctaccatttttgaaaggtttactatactaaaccataatctatttcaccttctgatttgttagtcgctcaaat

SEQ ID NO: 10289 - DNA, 178 bp, Glycine max
  Clone ID: LIB3092-028-Q1-K1-H3
tctctctctctctctggtgagagctgaaatcactctgatggagcacaataaggagaaaaatgctccttggttatcagtgccacaaattggggactgggatcaaaaaggacaaatgccggactactcgctagatttctctaaaattcgggaaacgaggaagcaaaacaagacaaatatt

SEQ ID NO: 10290 - DNA, 421 bp, Glycine max
  Clone ID: LIB3092-028-Q1-K1-H8
gtttctgtaaccatggcatccaccactctatcccctacaaccccttctcagctatgctcagggaaaagtgggattttcagttcctcacaggcacttcttgtgaagccagtgaagaggcagatgatggggaagagcaagggattgagaattgcatgccaagccaccagcatttccgctgatagagtccctgacatgggcaaaagacagctcatgaatcttcttcttcttggtgccatttcactccccactgctggaatgcttattccctacacctacttctttgtccctccaggttcaggttcttcagctggcggtactgttgccaaggatgccgttggaaatgatgtaattgccgagaattggctcaaggcacatggacctggtgaccgaacccttgcacaaggattgaagggagatccta

SEQ ID NO: 10291 - DNA, 119 bp, Glycine max
  Clone ID: LIB3092-028-Q1-K1-H9
gcttaaagcagcaccactaacattgaggccatagtcccatatatcttctagctttatcatgcgttcagttccaaggggtcatattattgaatcatttgacttataaacattattccttc

SEQ ID NO: 10292 - DNA, 447 bp, Glycine max
  Clone ID: LIB3092-029-Q1-K1-A1
tccaatcaacggctattccttgtatgattcactgctcacacacacgctgaaagggggaaagaagaggggctagattcacaacatgaggagagagacaactaacaacgcatctgcttgtgctgatagagcaactaatgacatgctcattggtcctgactgggcaatcaacataaagatgtgtgatatcattaatatggaccctgggcaagcaaaagatgctttgaaaatactcaagaagcgtttggccagtaaaaatccaaaaatacagcttctggctctttttgtattggagactcttaataagaattgtggtgaaagtgtatttcaacaaatcattgagcgggatatcttacatgaaatggtttagatagtgaaaaaaaatccggatttaaatgtgagggaaaagatactgatattaattgatacatggcaagaaacttttggggg

SEQ ID NO: 10293 - DNA, 437 bp, Glycine max
  unsure at all n locations
  Clone ID: LIB3092-029-Q1-K1-A11
ctgaagcaagcgtttgtggctgccgcgatcaagttcccgagcgcgttgtttgggatgttctgcatattctcggttctgattatcctcgactccaccgtgcccgccgccgccacggcgttcgtgagcttcttcgagcccgcgtttatgttcatacagagatggctccctctgttctatgttccctctctcgttgtcttgcctcttgctgcaaaagatattcccgctgcctctggagccaaaattggcctcattttagttggaggatggctggctacactctgtgttgctggttacacggctatcgcagttagaaaagctgtgaaaacagaattggtagatgctgagcctatgggaaagcctgctccattttcttctcttgaagtgtggacttggactgctgnntctcctatatccnnttgatctgcattatttaccct

SEQ ID NO: 10294 - DNA, 326 bp, Glycine max
  Clone ID: LIB3092-029-Q1-K1-A12
cccacgcgtccgcccacgcgtccgcggtcctaaaaaatagttcacaatccctatccctcctgtgttgttatatatagacacaaacgtaagaccttttgtttcttacttgtaataattcttataacacaacacaacccatggccaccacctccgcattcctcctccttcccctactactgctgctccacctcgccatcgccgctcacggcatcggcatcaactacggcacgctcggggacaaccttccaccgaccgcggcggtggcgaacttgctgaagacgaagacgaccatcgaccgcgtgaaatctacgacgtgaacccggaca

SEQ ID NO: 10295 - DNA, 218 bp, Glycine max
  Clone ID: LIB3092-028-Q1-K1-F3
tcttcttcttttggtggggtgtgtgtgttttttctctcacctgaaaatgtcttgctgcggtggtaactgtggttgcggaagcgccttcaagtgcggcaacagctgcggaggctgcaagatgtacccagacttgagctacaccgagtcaaccaccaccgagaccttggtcatgggagtggcaccagttaaagctcaattcgagagtgctgaaatgggtg

SEQ ID NO: 10296 - DNA, 341 bp, Glycine max
  unsure at all n locations
  Clone ID: LIB3092-028-Q1-K1-C8
gggcgaaaaacacatacacttttttctgcatctctcctacactttctttttcttatccncccaaacccacccccgcatatgttaatttttaattccccccaacccaaaaacaataacttttttcttcctcaatccacccaccctcttctctctctctatttctcaacacacacaagcactcctttttataaaacccctaccttatatcaaattttaattttacatctatatttccctaatcaaaaccatgatatctcattccccatcttttttttcaataacaaaaataatcatattttttcttctacatcattctacaaaattttttctccatctatccc

SEQ ID NO: 10297 - DNA, 455 bp, Glycine max
  Clone ID: LIB3092-028-Q1-K1-D10
cccacgcgtccgtcttaatggaaaagatctcaccccggtttggtaaagttacttgtggagagagttgtagtcttgcgcaatcctcaacaccctaggcactttatgaccaaacgtgtggttggattggagggtgatagcgttacatacatttccaatcctgagacctatgaatatgagggtgatagttttacacacatttcctctcctgataacggtgataagtctaagacgattgtggtgccaaagggtgccgtttgggttgagggagataacaagtataacagcaatgattcaagaaaatttggtcctgttccttatgaccttattgatggcaagatgttctggaagataacgccacttaaaaaatttggacctttctggaataaatgatctgaagcaaagaattctgtcatggaagctacaatcttttgcagcatggctttgttgtatgttta

SEQ ID NO: 10298 - DNA, 57 bp, Glycine max
  unsure at all n locations
  Clone ID: LIB3092-028-Q1-K1-D12
ttattatanaattaactaaagtacgaatgttataatttgttggggggagagatatat

SEQ ID NO: 10299 - DNA, 237 bp, Glycine max
  unsure at all n locations
  Clone ID: LIB3092-028-Q1-K1-D2
nncgccacgcgttcgcaaagtcaacctaccaaaactatctgggttagtggcatctaagacttcttgagtggctggagatcaaaaagaaaatccagttccctcgaggccttgggaaacaattggaggtcaaatatctttggaggcaactaatggatcagagtcaagaagaaggcatgatacccaacaccattcttagagaattgatcccaggaaaattgaaaatggaaaagtttcaac

SEQ ID NO: 10300 - DNA, 483 bp, Glycine max
  unsure at all n locations
  Clone ID: LIB3092-028-Q1-K1-D3
cacgcgtncgcaaagtcaacctaccaaaactatcttttttagtggcatctaagacttcttgattgtgtggaaatcaaaaagaaaatccagttccctcgaggcctcgggaaacaattgaagtacaaatatctttggagtcaactaatggatcagagtcaagaagaaggcatgataccaaacaccattctcagagaattgatcccaggaaaattgaaaatggaaaagtttcaactgaaaccttaattcaggatgggcatggatccatgggaaacaatatctaccacctctctggtccgttactggtttcttcaaacaacatagatcagatgctcaaagagcgtgatcgaaagatccaagaatattcaagacgagcaagattgtacaagtctggtgagatagctcatgcaaagcanaattaggatgattcatagtcaattacaattttttttccaattacgcagctagttacattntttaatgacc

SEQ ID NO: 10301 - DNA, 367 bp, Glycine max
  unsure at all n locations
  Clone ID: LIB3092-028-Q1-K1-D4
cacgcatncgtattaatggaaattatttctttccggtttggtaaagntacttggggggatgttgtaatcttaaacaatcctcaacaccctaggcactttatgaccaaacttgtagtcaaattttatggtgatacccttacatacatttccaatcctaaaacctattaatattaacgccatatttatacaacacatttccttttcttattaacgggaataattttaaaacaattttgttcccaaaggttcccatttggtttaaggaaaataccaattttaccaccattattcaaaaaaaatttgtccttttccttattaccttattgattgcaaaattttcttgaagataaccccactttaaaaattt

SEQ ID NO: 10302 - DNA, 434 bp, Glycine max
  unsure at all n locations
  Clone ID: LIB3092-028-Q1-K1-D7
aaaatttccattccaatcataattttctcaatttcccnncanaaaatttctcctcgtgatgttgtaatattcaacagcaacagctccatcttcttctttaacaatcattactttgacctcatggtctacttccaatgtttaataatttgctataacaagacctatctttctctttttccaactatatatatacaattacattaattttttttctcatctttttataacatcttaaaagtctctattcaaagccatttcccttactattcataccccatatactactactcatataatcttatatcaacaacatattcacatttcctccatttttcacatttaataacttttaaaaattccaccttttaaatatagacaaatcttatcactcttgacttccttcatatatatcttttcaaatagatcgtacttta

SEQ ID NO: 10303 - DNA, 471 bp, Glycine max
  Clone ID: LIB3092-028-Q1-K1-E10
cccacgcgtccggttatcagtctttgatgctgcagagaaatacaagagtgaggggcatgatgggattatcttggctggtgctgagtatgggagtggaagctctcgtgattgggctgcaaaggggccaatgctactgggcgtgaaagctgtcatagcaaaaagttttgaaaggattcaccgaagtaatttggtgggaatgggtatcattccattgtgttttaagcccggggatgatgctgattctcttggattaactggccatgaacgttacaccattgatctaccaagcaatgtgaatgaaatacgacccggccaagatgtcacagtggtgacagatgccgggaaatcatttgtatctacactgagatttgatacagaggttgaactagcttacttcaaccatggaggcatcttacaatatgtcatcaaaaacatggtcaatgctaaacattgaatcagatataaaccaag

SEQ ID NO: 10304 - DNA, 433 bp, Glycine max
  Clone ID: LIB3092-028-Q1-K1-E12
ggccaggcaagccccactcaaccaccacacctctcctcgttcacgctacccctttctgctcgtcttctacctttcaagttttaaaagtataaagatggcagagacattcctatttacctcagagtcggtgaacgagggacaccctgacaagctctgcgaccaaatctccgatgctgtcctcgacgcttgcctcgagcaggacccagacagcaaagttgcctgcgaaacatgcaccaaaaccaacttggtcatggtcttcggagaaatcacgaccaaggccaacgttgactacgagaagatagtgcgtgacacctgcaggaacatcggcttcgtctcaaatgatgtgggactggatgccgacaactgcaaggtcctcgtcaacattgagcagcagagccctgatattgctcagggtgtacacggccaccttacc

SEQ ID NO: 10305 - DNA, 251 bp, Glycine max
  Clone ID: LIB3092-028-Q1-K1-E2
cccacgcttccatccacgcgttcggtcaaaatcatcatgagccgctacgacagccggtgccggtacccatcttactatcgtgatcggaagaatgattctgggctaggtgcacctacagggtttggtggttctgtacaacactcttcatcaaacaggagggattatgatgattgtgggtcaccaaagaggaacctcagtttggatggtttacctcattttgagaaaaacttctacattgagtcaccatctgt

SEQ ID NO: 10306 - DNA, 477 bp, Glycine max
  Clone ID: LIB3092-028-Q1-K1-E7
cccacgcgtccgcccacgcgtccggtcaaaagcatcatgagccgctacgacagccgctccggggacccagcttcctatcgtgatcggaggagtgattctgggctaggtgcacctacagggtttggtggttctgtacaacactcttcatcaaacaggagggattatgatgatggtgggtcaccaaagaggaacctcagtttggatggtttacctcattttgagaaaaacttctacattgagtcaccagctgtaagggcaatgacagatgctgaagttaatgagtatcggcagcagagggaaataactgttgaagggcgagatatcccgaaacctgtcaagacctttcacgatgctggttttccagaatatgtactgcaagaaattacaaaagctggctttactgaacctacacccattcaatctcaaggttggcccatggctttgaaggggcgtgatctgataggaattgcagaaaca

SEQ ID NO: 10307 - DNA, 467 bp, Glycine max
  Clone ID: LIB3092-028-Q1-K1-E8
gtcgtttttaaatttgcgatctaactcctgaaatcgcacaattctacgatgcttggtgctggatcagactgagataagattggagtagaaaacgtatgatggtcgatccctctgttcactttctctttcgtgaaaatcgcaggaagataactgctgaagactgaagtacctgaaggctgaggtggtgttttcatggcttccgacacggccaaaggactctcaatcgaagaggcaaccgtttatgatctccaacttgcttttcggacaaaacaactaacctctagggaagtcgttgacttctacctcaaacaaatagaaacgcaaaacccagttctgaaaggggtgttggagttgaacccagatgcactatcacaagctgataaagctgaccatgagagaaagactaaggcaccggggtctctttcaccactgcatggaatacccattttgattaaggacaacattgc

SEQ ID NO: 10308 - DNA, 483 bp, Glycine max
  Clone ID: LIB3092-028-Q1-K1-E9
caagtagttgagaactaagaaggagaagcaaatggcttcctcaatgatctcttcccgcagctgggaccactgtcaaccgtgccggtgccggcatggttgctccattcactggcctcaagtccatggctggcttccccaccagaaagaccaacaatgacattacctccattgctagcaacggtggaagagtgcaatgcatgcaggtgtggccaccagttggcaagaagaagtttgagactctttcctacctgccagaccttgatgatgcacaattggcaaaggaagtagaataccttcttaggaagggatggattccttgcttggaattcgagttggagcacggtttcgtgtaccgtgagcacaacaggtcaccaggatactacgatggacgctactggaccatgtggaagctgcctatgtttggttgcactgatgcttctcaggtgttgaaggagcttcaagaggctaagactgcatacccca

SEQ ID NO: 10309 - DNA, 439 bp, Glycine max
  Clone ID: LIB3092-028-Q1-K1-F1
cgttgggcccatgtattgggggacccgctttcaacttcagaattcaataacttttggggccttagtattgaaaataatggcctaccacaactttttaacatcccaagaatcattccaacaaccaaaccacccggaccaaaaaaagatccaagttcaacaaaacgggtcgacccggtgggggatcattggatcccagcccacaacaaaaaaatggacacattctcctttcacctaactaagctccaggtgaactactttgcagcacaaattttgggtccaaagtcttgaccaaacccctctttttgaatccctatgtgccatgatttggcgttgcatggccccggttcgatcaggatccgaacccaaaaccgtgaccgtgtgtagaaccgacccgtataagaggtcaaatgatatcattggtaataaccaagtgatatgc

SEQ ID NO: 10310 - DNA, 110 bp, Glycine max
  Clone ID: LIB3092-028-Q1-K1-F10
aacaccactaacattgaggccagagtcccatatatcttctaactttatcatgccgtcagttgcaaaatttcatattattgaatcatttaacttataaacattattccttc

SEQ ID NO: 10311 - DNA, 282 bp, Glycine max
  Clone ID: LIB3092-028-Q1-K1-F12
tcaaagagccgaattacctgaaagcttcatggggtttcctgaatttggctgtcaaaaaacccagggggtgctcttggaatggttgtagtgctattgagtttgtttgtgttgttgcttggattggatagccatttgagtgaggggtctggattacttcctcttggcttgtttttataatcttggtaaagatggttctgcatagctggatttccagctctcatattcttgttaatttcttgctgctgcttggttgtggcataacctacgggactgacactgata

SEQ ID NO: 10312 - DNA, 326 bp, Glycine max
  Clone ID: LIB3092-028-Q1-K1-F2
aagagtcccaccctaaaagatttcctgaaacccaccactataggggatatttattatacgttggatttgagagaaatcttctctttcgaagagagaagcgcaccaccggggtctctcatcaaagattacttatcaaactacggctacattgaatcctctgggccattgagcaattcgatggaccaagaaacaataatatcagccatttagacctaccagcaatattttagtttgcaacccaccggcgaactaaacaacgagactctttagcaaatgtcgttcctaccatgtggcgtccccgacattaacattgactacaactttac

SEQ ID NO: 10313 - DNA, 474 bp, Glycine max
  Clone ID: LIB3092-028-Q1-K1-C7
ctgcatctctcctacactttctttctcttatcttcccaaacccaccaggaaagaatcaattttttaattccccagaaggaaaaaacaggaacttttttctccctcaatccacccaccctcttctctctctctatttctcaacacacacaagcactcctcttcataaagccgtgaccttaggtggaattggaattggagatctagatgtgcctaatcagaagcatgagatcgcagtcgcagcgtgtggtgcaggaacaagaagaagcagagtgtgtcggcgacagcatgcgacagagttgttgggccaacatgccccaagagcttctccgagaggtcctcttcagaatcgaggcctccgaggacgcgtggccgccgcggaaaagcgttgtcgcctgcgccggcgtttgccgcagctggagacaaatcaccatagacattgtcaaaacacccgaactctccttcaagatcaccttt

SEQ ID NO: 10314 - DNA, 462 bp, Glycine max
  Clone ID: LIB3092-027-Q1-K1-H10
cggacgcgtgggttctcctctcatacttaatttgtttccctccattgtaacgtttgttttatgcaacactaagtgcggtttgtgtgtaacaacactaatctccctctcaaaagagacttatcaaatgagagtactgtcacagaataagagttaatcttggttatatggtaacacatgattattcttaactccgtccgtacccatgaatcttacctaatgaataatcagatattaattgcccatatatttattttatggagacaacttctataaatcatcttgtttgtataagagctactaccagtacaaacccggggctacccgctgagtttaagcatatgaataagcggggagaaggaccatacggtcggtgactttgtactctagtgaagtgagacccataagccccagttggcaatttatgttgtaattactatttagttgcaattagctgtaatcacc

SEQ ID NO: 10315 - DNA, 429 bp, Glycine max
  Clone ID: LIB3092-027-Q1-K1-H12
cggacgcgtgggcgctgatcatggaacacagttccctagtactcaacctggcttcagcaaaggatctcagagacttgaatatattctcaaagatggatgtatatgctgtgctttcactctccggcgatcaaaagaccaagactcccgtccacagaaacggcggcaccaacccaacatggaattttccggtcaagttcacttttgatgaatcggtggcgcggcagaaccgtttggccctcgaaatcaagatccgctccgagcgcgccctcgccaccgataaagacatcggccaagtccacgttcctctcatggaactcctcaagcaacctggcgacggtaaatccttccagcacgttagttaccaggtcagaaaaccctccggcaaacccaagggagccctcaatttctcctacaaatttggcgatgaat

SEQ ID NO: 10316 - DNA, 267 bp, Glycine max
  unsure at all n locations
  Clone ID: LIB3092-027-Q1-K1-H4
tctcctctcatacttaattttgttttcttcattggaaccnttgntttatgcaacacgaatttctgtttgtgtgtaacaacactaatnctcctctcaaaagagacttatcaaatgagagtactgtcacacaataagagttaatcttggttatatggtaacacattattattcttaacttcgtccgtacccatgaatcttacctaatgaataatcacatattaattgcccatatatttattttatggagacaacttctataaatcatct

SEQ ID NO: 10317 - DNA, 169 bp, Glycine max
  Clone ID: LIB3092-027-Q1-K1-H5
tgtaacaacactaatcttcctctcaaaatagactcttcaaatgagaatactgccacaaaatcagacccaatctcggttatatcgtaacacaataatatttttaactccagcccaacccatgaatattacctaatgaataatcacatattaacctcccatatattaattt

SEQ ID NO: 10318 - DNA, 432 bp, Glycine max
  Clone ID: LIB3092-027-Q1-K1-H6
cggacgcgtgggcgctgatcatggaacacagaaccctataactcaacctggcttcagcaaaggatctcgaagacttgaatatattctcaaagatggatgtatatgctgtgctttcactctccggcgatcaaaagaccaagactcccgtccacagaaacggcggcaccaacccaacatggaattttccggtcaagttcacttttgatgaatcggtggcgcggcagaaccgtttggccctcgaaatcaagatccgctccgagcgcgccctcgccaccgataaggacatcggccaggtccacgttcctctcatggaactcctcaagcaacctggcgacggtaaatccttccagcacgttagttaccaagtcagaaaaccctccggcaaacccaagggagccctcaatttctcctacaaatttggcgatgaattcg

SEQ ID NO: 10319 - DNA, 423 bp, Glycine max
  Clone ID: LIB3092-027-Q1-K1-H8
gccacaccacaatacaccacacagttccctcacttctctccttttgaccattcaaccttcgcctttgcctccttttcgtgactgagatggctggaggtgttattcagcagatattggggaggaaactacaccctcggtttactaactctcccttgttgtcacccatcgtagcccaaaaagatgatgctggctcttctggcagtcaatccttaaaagcacttgcattaattggagctgggttatcaagccctttcagtttttcaacaatggcagcagctgatgaagctgaacatgggctggcatgttcaagctattcgtggcctcacaaaagaattcttagttcatatgatcatgcctcgattcgtcggggtcatcaaagttatacacaagtctgtgcttcctgccactctatgtctttgatat

SEQ ID NO: 10320 - DNA, 302 bp, Glycine max
  Clone ID: LIB3092-028-Q1-K1-A10
aaaataactatcagcaatcattgaaactgaaaaattacttttttttttctgtttacattttgttgtttcggctccttatctaaaatagacggccccacaaacatatttttccaaatcatttaaaaagtcattcattacaaattcttcttcatattggctttcttgtacaaagaaatatctttataataaaccattccaacacttttatacaacttcttattaacatctactgcattaatttccccttacaaaaatttcaaccatcctcaacttaatcaaacactctctgtcaaacacataat

SEQ ID NO: 10321 - DNA, 450 bp, Glycine max
  unsure at all n locations
  Clone ID: LIB3092-028-Q1-K1-A11
cccacgcgtccggtcaggtcaatcctcaattctatgcatttaggtggattactctcctgctgagtcaggaattcaattttgctgacagccttcacatttgggacactcttttaagcgatccagatggtcctcaggagactcttcttcgggtatgctgtgcaatgctggttctcgttcgtaagcgcctccttgcgggtgatttcacttctaatctcaagttgctgcaaaattatcccaccacaaacattagtcatttgctctatgttgccaacaagtttcgtgtacagtcagtctaatgttgcattttgctcttctatctctagtttctctttcaaattcaatgcctgtaaatgacttttaagtgtgagactcacagcaatgccggtttatttattttgttttacttataattngtacgtattttttcttgggtggtggngtcaatgtgag

SEQ ID NO: 10322 - DNA, 415 bp, Glycine max
  Clone ID: LIB3092-028-Q1-K1-A12
cccacgcgtccgcccacgcgtccgcagaatcaaaggtgggtggggttggaggctatctcttgggttggctggtatcccagcagttctgctaactttgggagccttgttcgtggtggacacccccaacagtttgattgaacgtggccgcttggaagaaggaaaaacagtgcttaaaaagattcgtggcactgacaacattgaacttgagttccaggaattgcttgaggccagtcgtgtggctaaagaggtcaagcatccattcaggaatcttctcaagcgcaagaaccgaccccaacttgtcatttccgttgccctacagatattccagcaattcacaggcatcaacgcaatcatgttttatgccccggtgctgttcaacacgttaggattcaagaacgatgcatccctgtattct

SEQ ID NO: 10323 - DNA, 369 bp, Glycine max
  unsure at all n locations
  Clone ID: LIB3092-028-Q1-K1-A2
gcggaagaagaaacttaatcgatcatcacttcacttcactaatacatcatggcagacgagacccagaacactttatatatttaaggaattaggtattgcatggttatggtaaaaaattttaaacttgtattccaatactaataactatgtattgtaagtttttaacttttacgattactattttaaaaagtcttatcaatgggtgattctaattggttggntgtagtgtaaagattttataccaacagcgcataactattaaacttgtatcatttaatccattggctttatggatcactgctgtgaggttatatttatganaataagtcagaatcaagttgagtgttaattgtgaattcttgatgttac

SEQ ID NO: 10324 - DNA, 445 bp, Glycine max
  Clone ID: LIB3092-028-Q1-K1-A4
aaaatatcgttcggtaatcattgaaactgaaaaatgacgggttgttttctgtgtacattttgcttgatcgactcccaacctgaaatagatgtccccacaaacatattttgccaaatcatttagaaggtcatgcatgacaaatccttcttcatattggcttgcttgttgaaagaaagaccttgatagtagatcattgaagtactgttggccaacttcctctggactcctactgcattgatggcagtttaggaaattttcagccatccacaactgaattaaacactccctgtcaaacacataatccttggggaataaagcacagtaagcaaagcatgtcttgagatggggaggaaggtggtgatagctcaatgctaaagcaggaacaatatcactgttctttaattcccatatttcgcttttcaacacgctttcccattcccaggct

SEQ ID NO: 10325 - DNA, 118 bp, Glycine max
  Clone ID: LIB3092-028-Q1-K1-A5
caagatattaccatcactggtgctagcaccttgccttcagatgaggtggagagaatggtaaacgaagctgggaaattttcgaaggaagacaaagagaagagggatgctattgacacaa

SEQ ID NO: 10326 - DNA, 287 bp, Glycine max
  Clone ID: LIB3092-028-Q1-K1-A7
gtatgagagctctgaggttgaggtccaagatcgtggtgtttttgactttctcggtaagaaaaaggatgaagaagacaagcctcatcctcaggaggaggtcatcgccaccgagtttcaaaaagtcactgtctcagaccaaggagagaacaagcacagcctcttagaaaagcttcaccgatctgacagcagctctagctcttcaagtgaggaggaaggagaagatggagagaaaaggaagaagaagaagaaggaaaagaaagggctgaaagagaagatcgaggagaaaa

SEQ ID NO: 10327 - DNA, 460 bp, Glycine max
  Clone ID: LIB3092-028-Q1-K1-B11
ccctgctgatgctacaagaaatctgtctcagcaaaatctaaatgcccttgttaaggttcttcgtggtctacttggtggtagtgcagatcttgcctcttccaacatgaccttattgaaatcgtatggggatttccaaaagaatactcccgaagagcgcaatgttaggtttggtgttagagaacatggaatgggagcaatctgtaacggtattgctcttcatagccccggattcattccatactgtgcaactttctttgtcttcactgactatatgagagctgccataaggatttctgcactgtgtgaagctggagttatttatgtgatgactcatgattcgattggacttggagaggatggaccaactcatcagccaatagagcatttggcaagcttcagggcaatgccaaacactttgatgcttcgtccagctgatggtaatgaaactgctggatcatac

SEQ ID NO: 10328 - DNA, 133 bp, Glycine max
  Clone ID: LIB3092-028-Q1-K1-B5
gcggccacactagacactacaatcattatcaagttccaattgggttattttttgtcatttaaaaaggaaatcaaagccagagtttctttgtagaagacttgtacacaaagatgagttcaagcagaacttgggc

SEQ ID NO: 10329 - DNA, 149 bp, Glycine max
  Clone ID: LIB3092-028-Q1-K1-B7
aattccattcactcacccactttttacaactttatgacttgtaaaacctttacattacccaactaaacaacctttcaacacataccactttctccatctttcctaataacaaaaaaacccatacccttctccctttccaacaatttcac

SEQ ID NO: 10330 - DNA, 452 bp, Glycine max
  Clone ID: LIB3092-028-Q1-K1-B8
gcccatagcagagtctcttgtgattgttgaatacattgatgagacatggaagaacggccccgtcttaccttctgatccttaccaaagagccttggctcgtttctggtccaaattcattgatgataagattgtgggtgctgtatcaaaatctgttttcacggttgatgagaaagagcgtgagaagaatgttgaagaaacatatgaggctcttcagtttcttgagaatgagctgaaggacaagaagttttttggaggagaggaatttgggttggtagatattgctgctgtcttcatagcattttggatcccaatttttcaggaaatagcagggttgcagttattcaccagtgagaaatttcctatactctacaaatggagccaagaattccttaaccacccttttgtgcacgaagtccttcctcctagagacccactttttgcctacttcaaag

SEQ ID NO: 10331 - DNA, 431 bp, Glycine max
  Clone ID: LIB3092-028-Q1-K1-C11
ggcgccaccggcaccacccaagtcaagtcagggtcaggtgatgaataatgcaaggattcactgcttttccattctcctcgctctccaatacggtgctcaacctttgatctccaaacgcttcatcagacgtgaagttattgtgacttcatctgttttgacttgtgagcttgcaaaggttatatgtgcagtgttttttatggcaaaagatggtagtctgaggaaattgtataaagagtggactttggttggtgcgttgactgcatcaggacttcctgcagctatatatgcattgcaaaatagtttgctgcaaatttcttacaagaatcttgattcactcacattctcaatgctgaatcagaccaaaatatttttcaccgcgctctttgcatatttcatattgaggcaaaaacaatcgattgagcaaattggag

SEQ ID NO: 10332 - DNA, 429 bp, Glycine max
  unsure at all n locations
  Clone ID: LIB3092-027-Q1-K1-G6
acggaccgccccacgcgtgcganaaatctcgcttcacctcgcctctctcggctctcgactcgtcctcaactacaccgtccaactgggcccatgccgactcagtcgcggcacatatcaacgccggttccgccaccacgacaccgtgcgccgttgtggtccaagccgacgtgtccgatccggctcaggtgaagtcgctcttcgactcggccgagcgcgccttcgactcgccgatccacatccttgtcaactcggcgggcgtgatcgacggcacgtatccctccgtcgccgacaccaccgtggagtccttcgaccgcactttcgcggtgaacgcgcgtggcgccttcgcgtgcgccatggaggccgcgaaccgcctcaagcgcggcggcggagggcggatcattctactgacgacatcgcatgtggtggcgc

SEQ ID NO: 10333 - DNA, 403 bp, Glycine max
  Clone ID: LIB3092-027-Q1-K1-E4
caacctctaacctacctctttttcttctctctcaacaacttcaccttcttcctcctcgatcatgtctcacttcaagggcaagtaccatgatgagcttatcgccaatgctgcgtacattggcactcctggaaagggtattcttgctgctgatgagtcaacagggacaattggcaagcgtttggccagcatcagtgtagagaacattgaatccaacaggcgagctcttagggagctgcttttcactgctcctggtgttcttcaatatctcagtggtgtcatcctctttgaggaaaccctctaccagagcacagctgcaggcaagccctttgtgaatgtcttgaaagaagctggtgtgcttcctggcatcaaggttgacaagggcacagtcgaacttgctggaact

SEQ ID NO: 10334 - DNA, 224 bp, Glycine max
  Clone ID: LIB3092-027-Q1-K1-E5
cggcgtacgagttccggaattgcccgcacgcgtcccgcctccgtcgaacttagcttactcatgacttcaagaggtggaaactcgcctgctgatcaaggcttctgctggacagttctatagacgttcttagcacaaggctctctctatgtgcaacacttcaccagacaatattaaatctgccactggttatgtaggaagctggtctcctcatggtactatcttat

SEQ ID NO: 10335 - DNA, 207 bp, Glycine max
  Clone ID: LIB3092-027-Q1-K1-E6
catcttttgagctcagtttaaagatgcttatatgagtttaaaatgctggtattgcaattcaggatggcgaggaatgttttaagaccttctgatcaacctgcttttttcaagtaccatgcctccttcaacccttataaatcttccacttgatgtgttggaagcaattctccccataataattgcttaaaaattaccaaaaaaaattca

SEQ ID NO: 10336 - DNA, 403 bp, Glycine max
  Clone ID: LIB3092-027-Q1-K1-E7
ctgtaaacaagttatcaagatcaatgatgatcacaagagcacgcttatgaaccgtgtggttgcatcaatgttcaacacagtctcaaacaaaaagattgctattctgggatttgccttcaagaaagacactggtgacactagggagacccctgccattgatgtatgccaggggctacttggtgataaggccaacctgagcatatacgatccacaagtaactgaggaccaaattcagagggatctatcaatgaacaagtttgattgggatcatcctatccacttgcagcccacaagtcctactactgtgaaaaaagtcagtgttgtttgggatgcctatgaagcaacaaaggatgcacatggcctttgcattctaaccgagtgggatgagttcaagactctcgac

SEQ ID NO: 10337 - DNA, 415 bp, Glycine max
  Clone ID: LIB3092-027-Q1-K1-E9
ctggcatatcccccaccctatgatggcgtctctctgacatgctcctccatggaaatcaaggccgttttgcgttgatagtacttcaattaggctaggtttattgttgatgttccctagtgttttggtgaataaagaaagggaatggtgttagatgtttatgagttatatcgtgtgttggtgtgctgtttttttttttatgatttatgatttttaattgttttttttttatttttttttatttattttattttattttatttattttatttttttgttaattatatattttagttttttttttttattttttatatttattatgtgttatatttatattttttaattttattttttattttatattagttgaaattttatattttttttttttttaattttttttttttattatttt

SEQ ID NO: 10338 - DNA, 452 bp, Glycine max
  unsure at all n locations
  Clone ID: LIB3092-027-Q1-K1-F1
gaaatcccctatccacacaactggtggtgatgagattatccaccttgtgaggtgggttcattcggttgtgcgcgaggagtggacagctgaagtgtttgacttggagctgatgagatatcctaacatagaagaagagatggtggaaatgttgcagatagccatgtcatgtgtggttaggatgcctgatcagaggcctaagatgtctgaagttgtgaagatgattgaaaatgtgaggcagactgatgcacagactcactcatcatctgggaaccaagcagaacaacttaaattttctcaacgtgacaatggtaactctccttccactccctcctacttccagagaggaagtgaatgaaagaacctttgtttgtgatttgagtgcatcttgtcaatgtttaactccaagttctgaacaagagcgtggntattattattatcattattattttttc

SEQ ID NO: 10339 - DNA, 454 bp, Glycine max
  Clone ID: LIB3092-027-Q1-K1-F10
gaccggcccaggcgtccattaaggtcaaaaaaaattgggacttttctattttggcaacaaaccttgactagcagggctagaggaattttcaaaaaaacatggcacattttgcacccaaagatgatatttcaactaccaacgctctgcctatgaactgcagtggcattctgaactctctactccggagatgtgataataaggtgtattttgcacgcacttctgatgatcttctagtacattttatgaggcagacttcaattaaagagggtggctcaacttcctttattgctcctaaaacaaatcatggtgctgatgcatctcaatgaccttctgatgcaagggcaccatactttgctagaccttcaaaaaatatttctacctattattactcacaaccatttatttcatttctcgggagcagggctctgatttaaagacactttatcctcctaca

SEQ ID NO: 10340 - DNA, 388 bp, Glycine max
  Clone ID: LIB3092-027-Q1-K1-F11
tttttagctcaaatttttgtgaagcatttttattggtagaaatggagagtgagtccgtgaagcgcataattcacatgattgctgctcactttgcacccaatgatgatatttcaactaccaacgttctgcctatgaactgcagtggcagtctgaactctgtactccggagatgtgataataaggtgtattttgcacgccaagcttctgcttctcttggttattttatgaggcagacttcaattgaagagggtggctcaacttcctttattgctcctaaaacaaatcatggtgctgctgcatctgaatgtccttctgatgcaagggcaccatgtcttgctagacctgcaagggaagaatcagccttcacaaattcggtgatccaaccaat

SEQ ID NO: 10341 - DNA, 251 bp, Glycine max
  Clone ID: LIB3092-027-Q1-K1-F2
ataaaattaagaaattttcatggtaaccattcgtgcagatgaaattagtaaaattatgcgtgaacgcattgagcaatataatacggaagtaaaaattgtaaatacgggtaccgtacttcaagtaggcgacggtattgctcgtatttatggtcttgatgaagtaatggcgggtgaattagtggaatttgaagagggtactataggcattgctttgaatttggaatccaaaaatgttggtgttgtattaatgg

SEQ ID NO: 10342 - DNA, 294 bp, Glycine max
  Clone ID: LIB3092-027-Q1-K1-F3
ataaaattaagaaattttcatggtaaccattcgtgcagatgaaattagtaaaattatccgtgaacgcattgagcaatataatacggaagtaaaaattgtaaatacgggtaccgtacttcaagtaggcgacggtattgctcgtatttatggtcttgatgaagtaatggcgggtgaattagtggaatttgaagagggtactataggcattgctttgaatttggaatccaaaaatggtggtgttgtattaatgggtgatggtttgatgatacaagaaggaagttcagtaaaagcaac

SEQ ID NO: 10343 - DNA, 398 bp, Glycine max
  unsure at all n locations
  Clone ID: LIB3092-027-Q1-K1-F6
ctttccaatcaagtgggataaagcttggaactttcaaatctgtaaatgagtccttgactagagttgctgtttatatttctttaatagcattgtattgtcttggaggaagcaaggttaaggcgggtgagctctctgttgaaccatggcatnctttattggattatacttcactntaacattcgctgttcaaggattgggtaacacttttggagatcttcgtggaacttttgctgcttgtgagaagatcaactcttgtttatctggagctcaagttgatgatgcccttgcctatggcttaaaaagaaaactgagacaaaaaacactggatgatgaaaactattaattgatcctatcaaatatttctactgagaataaccaaaaacattatttgcattaca

SEQ ID NO: 10344 - DNA, 373 bp, Glycine max
  unsure at all n locations
  Clone ID: LIB3092-027-Q1-K1-F7
ntccgtttncctttgcctcaataatatctctctatcttgaccccttttggggacctcaactngttacgtaattactctactctcccctttctagcttctgtgttcttcttcttcggttctctcttcatggggtgctgcttaagtgccaggatcaaagctgtgagccctccacgcaatggtttgagttcaaaggatggttacaaggaagaagatggcttaagcagcaaggcctcaacttcctctgtttcttcaactccgcggacggagggagagatcttgaagtcctcaaacatgaagagcttcaacttcagtgagctaaaaactgctacaagaaactttcgtccagatagtgtggtgggtgaaggccggtttg

SEQ ID NO: 10345 - DNA, 229 bp, Glycine max
  Clone ID: LIB3092-027-Q1-K1-G1
cttcaactcatatagcagatcaggatgtgacgaaaccatgtgatgtagccttatgcaatacttgaaatgattgctcccatggacaggggggaaatattgggctaaagcatttatatcaatcattaagtgatggcaatggcggcataaaagggtgcataaaggaagcacttattcattatcctaaacattatcataccactacaggtattgaaacttttaaaattgacaa

SEQ ID NO: 10346 - DNA, 391 bp, Glycine max
  Clone ID: LIB3092-027-Q1-K1-G11
agaaatcgcgcttcacctcgcctcactcggcgcgcgactcgtcgtcaactacacctgcaactgggcccaagccgactcagtcgcggcgcatatcaacgccggttccgccaccacgacaccgcgcgccgtcgtggtccaagccgacgtgtccgatccggctcaagtgaagtcgctcttcgactcggccgagcgcgccttcgactcgccgatccacatgcttgtcaactcggcgggcgtgatcgacggcacgtatccctccgtcgccgacaccaccgtggagtccttcgaccgcactttcgcggtgaacgcgcgtggcgccttcgcgtgcgccagggaagccgcgaaccgcctcaagcgcggcggcgggaggcggatcattctactgacgaca

SEQ ID NO: 10347 - DNA, 278 bp, Glycine max
  unsure at all n locations
  Clone ID: LIB3092-027-Q1-K1-G12
aaattctcctttcatacttaatttttttctttccattgnaacgnannntttatgcaacacgtatttcttgtttgtgtgtaacaacactaatctccctcttaaaagagacttattaaattatagtactgtcacaaaataagagttaatcttggttatatggtaacacatgattattcttaactccgtccgtacccatgaatcttacctaattaataatcagatattaattgcccatatatttattttatggtagacaacttctataaatcatcttgttt

SEQ ID NO: 10348 - DNA, 198 bp, Glycine max
  Clone ID: LIB3092-027-Q1-K1-G2
gcggttgtcactgtgcctgcttacttcaacgactcacaacgtcaaaccaccaagggcgctggggtcatttctgggctcaaccggatgccaattatcaaccaaccttccgggggttgcattggttatgggcttgacaaaaaaggcacttactttggggagaaaaatggtctcaattttgaacctgggggggggaacttt

SEQ ID NO: 10349 - DNA, 305 bp, Glycine max
  Clone ID: LIB3092-027-Q1-K1-G4
tgattatactctctatgaatctcgtgcaataatcagatactttgcagagaagtataaagaccaagggacagacttgttgggaaagacaatagaagaaaaaggtctagtggaacaatggcttgaagtagaagctcataactttcacccaccactctacaatttggttattaatgttctgtttgccccattaacgggtgctccttctgaccaaaaagtgatagaagagagtgataaaaagattgagaaggtgctggatgtttatgaggagaggctgtcaaagagcaagtacttggctggtgactttt

SEQ ID NO: 10350 - DNA, 265 bp, Glycine max
  unsure at all n locations
  Clone ID: LIB3092-027-Q1-K1-G5
cccacgcgtncggtggtaaatgagtggttcttgagcagaagcagttaaaagagaaagggatgcagcgaagatgacatcggttggtgtggcaccaacttcgggtttgagagaagccagcgggcatggagcagcaggtgttgatagattgccagaggagatgaacgatatgaaaattagggttgatagataaatggaaggcacagttgttgatggcaatggaacggagacaggacatatcattgtgactaccattgggggtagaaat

SEQ ID NO: 10351 - DNA, 301 bp, Glycine max
  Clone ID: LIB3092-027-Q1-K1-E11
gggtgacccagcgtccggccatctctgagctcagttaaagaggcttataggagttgaagatgctggtattgcaattcaggatgacaggaatgttttaagacgttctgatcagtctgctttctcaaggtacaatgcagccttaaaccctaagaaatctcccactggatgtgttggaagcaattctcctcataataatagcttagaagttacaaagaaagattcatctcacgatattcaatctcattctagcggcaatgctcctaaccaaaactcaaatggtgctagcaataacattgatatg

SEQ ID NO: 10352 - DNA, 444 bp, Glycine max
  Clone ID: LIB3092-022-Q1-K1-H9
tgaaaaggttaaagaccagagcattgcaaaaactgaacagtacaagagaaaacaacatggccttgagtcaaaggaggagaagaaagaacggaaggctgctgtgaaggaggaacgacgtgaggcacgtcgcaataaaaaagaaatgaaagagctttataaatgtgaagcacatcgggcacagagagctgctgctgtgtctggtccttcttccattcatcttttgtaagttaacaattacaagtactggtttgtcactcgtgtttgtgtgtctgctattctgcctctgtgacaagcttgtgaggttctatgataatgccttcgtacatcattacaaagttttgccacttaaaacattgtgcatggcagttgtgagtctttttgcctaagcaagaatgtgcttagagagtttttttggtactggaaagaaagcttttgttggttttc

SEQ ID NO: 10353 - DNA, 84 bp, Glycine max
  Clone ID: LIB3092-027-Q1-K1-A1
gcgagataaccaatttctttggttcattcttttccactttctaccacaaatacttttgggggattaagcaactttacacaaaat

SEQ ID NO: 10354 - DNA, 458 bp, Glycine max
  Clone ID: LIB3092-027-Q1-K1-A11
cccacgcgtccgcggacgcgtgggggatcaatattatcggctgcgctgccgggtcttcaggagaagggcgtggcactcacgaaggttccgaaagtgaaattcctaataatagtaggaggggcaaagtttaggtcaccttcagtgatggacaaagcatattcttcttccattagctgtccctccctccactttataggagagacagattttttgaacaagtatggggctgaactactagaatcctgtgttgaacccgtggtgattcaccaccccaaaggacacacaataccaagattagatgataagagcttgaagaccatgatggatttcatcgaaagaattaagaaagatgtctcaaaataagaaacgagtttagacaaccagccagtgcttcaaaaggatttttgaaatatttattcattttaacataaattaataacattgctatttgtattctt

SEQ ID NO: 10355 - DNA, 380 bp, Glycine max
  Clone ID: LIB3092-027-Q1-K1-A2
gtccggaatcgaccgacgcgtccggtgtacctcccagcctcgaatcgcgtgcggcagtggctctttctggacctggtctcggcagcgttcttgggcctggtattcctcttcttcctgctcgtcttcacgccggcgggagactccctcgccgccttcggccgccagacgctactcctctccgcctcctccgcggatccgcgcctgcgcctgcgcgtgtcggcggccatcgaggaggcggggcagcggcagcctcccgtgatcgaggcctgccccgccgacaccgccgccgaccacatgccgtgcgaggatccgcggctcaacagccagctcagcagggagatgaattactaccgcgagaggcactgcccaccgctcgagac

SEQ ID NO: 10356 - DNA, 367 bp, Glycine max
  unsure at all n locations
  Clone ID: LIB3092-027-Q1-K1-A6
cttccgccaccccttccggggaaagccattaaattcaaagagaggggttcctggtccggattttttggattggagaattcaatcctcaatttttttttattttttcccccattcccaaaagggcaaattcttatccttcacgtattggggtcctctctttttccttttcggtctccatccatccaattcttttcccatggctacgatcggacacaacaatctcaatgccaaattggttcttctcggggacatgggtgctgggaaatccagcctcgttttgcgctttgtcaagggtcaatttctcgaatttcaggaatcaacaataggggcagcgttcttttcacagancgctgcagtaaatgatgcg

SEQ ID NO: 10357 - DNA, 377 bp, Glycine max
  Clone ID: LIB3092-027-Q1-K1-B3
aaacactcataacacaaagcacaaagcaaagctcatccttgagttaaaaaatggcagcagcttgttccatggctctctcatccccatccttggctggcaaggccgtgaagctgggcccatcagccccagaagtgggaagggtgagcatgaggaagaccgtcaccaagcatgtctcctcatgaagcccatggtacggcccagaccgagtcaagtacttgggcccattctctggcgagcccccgtcctacctaaccggtgagttcccaggcgactactgctgggacactgctgggctttccgcatacccataaaccttcgccaagaaccgtgaactcgaagtgatccactccaggtgggccatgctcggagccttgggc

SEQ ID NO: 10358 - DNA, 171 bp, Glycine max
  Clone ID: LIB3092-027-Q1-K1-B8
gttgaaacctcccagcgatgaacctcttttaggaagtgctgatgatacaaggctcattgacctgactgatgttgatatccgtcttccccttcttgtttatgtttctcgagagaagcgtccaggctatgatcacaacaaaaaaaccggggccatgaatgccttggttcgagc

SEQ ID NO: 10359 - DNA, 404 bp, Glycine max
  Clone ID: LIB3092-027-Q1-K1-B9
tcgcccacgcgttcgcccacgcgtccgcggacgcgtgggttggaatatcatgcacagcttggtcggcgccagcttcgattcagggacatggctagagatattttaggacctggatgggcaagatactatgtaggtcctcttcaatttgccatatgctttggcacagtgattggtggtcctttagtgggaggaaagaagcctaagttcatttaccagctctacaacccaaaaggatcaatgaagctttatcaatttattattatatggggggtcataacactgcttttggctcaacttccatcctttcactcccttgagcaacgtaacatgatttctctgattcttaagggggtggatgccacatgtggtacgatcgggtctatatacatttgtcattccaaaaa

SEQ ID NO: 10360 - DNA, 443 bp, Glycine max
  unsure at all n locations
  Clone ID: LIB3092-027-Q1-K1-C4
atctatattctttccctgggggcctcagaatccttaacagaacaagttgcagggatggcctccactctctctatatcctcttcatccacccttgttgatgccaagcctccaactccaagacaatgcgtcacccttcccactcttccccctccaccttttcactctcagactcgtccttggaagaccactgctttctgtcgtaggcttgctcgcaattttatggcaatggccaccacaagagaggcagccgcagcagaagttgccgccacaactgacctctctattgccgagacgccagagattgtgaagactattcaagaagcttgggacaaagttgaagataaatatgcagtgagttcactggcagttgctggtgtggttgcattggtgggctcagctgggatgatctcagcaatngataggcttcctttaattcctgggct

SEQ ID NO: 10361 - DNA, 463 bp, Glycine max
  Clone ID: LIB3092-027-Q1-K1-C6
aacaacacatagcagaggatagatagtttgttcgttgcgttgccatgtcggcgtcggagattgttcgggaactggattcgctgaaggacgaaaagaccataattgagcagaaaatctctgcgcttgaagctcaactcagagagattaatctccaaaacgacgccgcaccacccaacggattgacgcatgacatgattcacagatacagtcgccaccttgtgcttccttcctttggtgttcaagggcaggcaaatctgttgaagtcttcaattttagttgtgggagctggagggttgggtgctcctgcattgttatactttgcagcttctggtgttgggcgcttgggagttattgatcatgacgtggttgagctgaataatatgcaccgacaggttatccacacggaagcatatgttggtaagccgaaagtgaaatctgctgctgcttgctgtcgctcgatcaa

SEQ ID NO: 10362 - DNA, 249 bp, Glycine max
  Clone ID: LIB3092-027-Q1-K1-D12
ttccattttcagcttatcgccaatgcttcctacattggcactcctggaaagggtattcttgctgctgatgagtcaacagggacaattggcaagcgtttggccatcatcagtgtaaagaacattgaatccaacaggctatctcttagggagctgcttttcactgctcctggtgtacttcaatatctaagtggtgtcattctttttgaggaaaccctttaccataacacaggtgcaggcaatccctttgtg

SEQ ID NO: 10363 - DNA, 335 bp, Glycine max
  Clone ID: LIB3092-027-Q1-K1-D3
cagaaattgattgaactcacacaaaaaacgttttcccgctgtcttgtttgtctttcctttcattttccaagaaaaagtacaatttttgagagtgaaaaactgctgtctcattgcctatctaagcaccattaacagaaagaaccttccataagttccatttcttttgctggcaaagacttcaacttttcatcattctgggtaaccctttaggctttagtttcatgcaattaatgtttcattaaaaatattttggttattgtttcaacctttatatatatatatatatatatatatatatatatatatatatatattccccccaaggagtagatcta

SEQ ID NO: 10364 - DNA, 438 bp, Glycine max
  Clone ID: LIB3092-027-Q1-K1-D4
ctagttttgttttgggaacatcatcacattacattagattggtggtaatggcagcgtcactacaagcagcagctactttcatgcaacccaccaagttgagcaggagcaacactttgcagcaaaagtctactcagtccatttccaaggcttttggtttggaacctgttggagctaaaaaggtcacatgctcccttcaggctgatcttaaggacttggctcacaagtgtgttgatgctaccaaaattgcaggattcgcccttgccacctctgccctcgttgtctctggggcaagtgctgaaggtgttccaaagaggctaaccttcgacgaaatccagagcaagacctacttggaagtgaaggggacaggaacagcaaaccagtgcccaacaattgatggtggattggactcatttgccttcaagccggggaaatacaatg

SEQ ID NO: 10365 - DNA, 403 bp, Glycine max
  Clone ID: LIB3092-027-Q1-K1-E1
tggagatatctctttacaagataagttagtgatttatgacaacgagaaacagcagattggatgggcctctgccaattgtgatagatcttccaattcataaataaatcaatgtaatttttttctttagctgagactgtagatagggatttctctcaaggaaatcttagcaaaccggtgccctgcaacttatgatgttatagattatcaatgagttgttaggcaaggagggttaggacttaggatgtaaaatggctggaatagtatatatgatttactatacatatttcatttactataactttgtttcttcttttttgttgcccaaactataattttgttttccacaggctacaatatacgcatttacaaatgaaacatcggctgaaaaggttgatgtttctgt

SEQ ID NO: 10366 - DNA, 358 bp, Glycine max
  Clone ID: LIB3092-027-Q1-K1-E10
cccacgcgtccggcaccactctctctttgttctttctcggttcagtgtctctctttgacggtggtgctgtcagcattgacctcagcttgagcagtaaaacatcatcagcactactacggtaccatggctgtgctgcaatctttcgtttcggtccacccagattctcacttccccatacagaacctcccttacggagtcttcaagccccaatccgcttcgcctcctcgtcccggcgtcgccatcggcgacttcgtcctcgacctctccgaaatatcttccgctggtctcttcgacggtcctctcctcaaaaactccgatgcttttctccagcctaatctaaataaagttggatcacttg

SEQ ID NO: 10367 - DNA, 428 bp, Glycine max
  unsure at all n locations
  Clone ID: LIB3092-022-Q1-K1-H8
cccacgcgtccgaaacatctcagagatccctgatctcattgatgagtacaggaaggtgatgaaggattttgctttgaggttagagaaactagcagagcagctgttggacttgttgtgtgagaatcttggcctagagaaagggtacctcaagaaggctttctatggatcaagaggaccaacttttggcaccaaggttgccaactaccctccatgccccaacccagacctagtgaagggtcttcgtccccacaccgatgccggtgggattgtccttctcttccaggatgacaaggtcagtggcctacagcttctcaaagatggccagtgggttgatgtgcccncaatgcgccactccattgttgtaacattggtgatcagcttgaggttatcaccaatggtaagtacaggagtgtggagcaccgtgtgat

SEQ ID NO: 10368 - DNA, 349 bp, Glycine max
  Clone ID: LIB3092-022-Q1-K1-F5
cctgaatgggtctggacctggggtttcagctcccagttcatccttctttgggagcagcttgaagaaggttattggctcaagggtccccaacacaaagatttcctctggaagcttcaagattgttgctgtagaagagaagaaagagattgaagagacccagcagaccgacaaggacagatggaagggtcttgcctatgatatctcagacgaccaacaggacatcacaagaggaaagggtttggttgactcccttttccaagctccacaggatgctggaactcactatgctgtcatgagctcctacgagtaccttagcactggacttcgccagtacttggacaacaacatg

SEQ ID NO: 10369 - DNA, 416 bp, Glycine max
  unsure at all n locations
  Clone ID: LIB3092-022-Q1-K1-F6
tcctagggnnnnnnnnaaaaattatgggcattgaatcgacggggagtaaatgggtttngggggtggctgcagtgtggatacaagcaatctccggcaacaactaaactttntngaattactcggacgctctgaaatccctcatgagcctaacccaaatcgagcttaacaatctgtccgtggccaaggatgttggcaaggcttttgggcttctggctgggctggcctcagacaaattcccgacttgggccattctcctcattgggtccctccaaggccttatcggctatggcgtccagtggctcgtcgtcagccagagaatccaacccctcccatactggcagatgtgcgtattcctctgcattggtggcaacagcactacctggatgaacaccgccgttctagtcacatgcatccgc

SEQ ID NO: 10370 - DNA, 440 bp, Glycine max
  Clone ID: LIB3092-022-Q1-K1-F7
gcctccgaccagagccgtcaatggcggcgtctccacgagaattggagatgtttcgagggagatgtaatagagtgagggcgcaaatggaagaggatgaacagttagcgacgctcatgaggggtcttcgaggccagaatttgagggactcgctcttcgctgaggacgatgttgaacttcgtcttgttgaggtagacgagagtagtgagtttttgccattggtgtatgatcctgccagcatttctgcatattggggaaaacgtccacgcgcggttgcaacgcgcattgtgcagttgctatcagttgcaggaggttttctttctcgcattgccggggatgtgattaacaagaaggttaaagagaatgaagttgctagggccattgagttacgtgaaattgtgacatctatgggtccagcgtacataaaactcgggcaagcattg

SEQ ID NO: 10371 - DNA, 440 bp, Glycine max
  Clone ID: LIB3092-022-Q1-K1-F8
cttcttctctactcctgtacaaacaccaacgcacaaaactttacaacatttgcatgatctgacggaccaatcatcctcttcatctctcttcgcacgcacaacaacagagaccggaccccaccttcccacagccaccatggtcgaaaccagacgcggcgcctcttcttccaagtgttctctctcttctccttctgcgcccaacaccaaacgatccaaggtgtccaaggattcctttgtggcggctccggtcaacaaatctggggaaccggagctacggccctctgatctgccagatacggcgtcgttgaaggccgtggatgtttgtgacgcggtgttgcccgataagtctccttctgaaggcgaggctttggtgcctccacggtgtgcaggtgaaactgcggagaaatcgaaggtggctggtcttcccccaaggagcgtga

SEQ ID NO: 10372 - DNA, 472 bp, Glycine max
  unsure at all n locations
  Clone ID: LIB3092-022-Q1-K1-F9
ggaangaccgggccggccgacgcgtccgcttattctctactcctgtacaaacaccaacgctcaaaactttacaacatttncaggagctgccgcaccaatcatactcttcatctctcttcncacgcacaacaacagataccggaccccaccttcccacagccaccatggtcgaaaccagacgcggcgcctcttcttccaagtgttctctctcttctccttctgcgcccaacaccaaacgatccaaggtgtccaaggattcctttgtggcggctccggtcaacaaatctggggaaccggagctacggccctctgatctgccagatacagcgtcgttgaatgccgtggatgtttgtgacgccgtgttgcccgataagtctccttctgaaggcgaggctttggtgcctccacggtgtgcaggtgaaactgcagagaaatcgaacgtggctggtcttcccccaaagagcgtgaaaaa

SEQ ID NO: 10373 - DNA, 349 bp, Glycine max
  Clone ID: LIB3092-022-Q1-K1-G10
gcgtccgggcattcaagcagggagaggcttacttgagaggagataatgcagcctctgaggggcagatatgagaatcatctgatgctgattaaattgacctttacttcttcaaaaaatttgcttttgagtgaccttgttttatgggttgtgacattgtggggcatgtggtggttgtgactagaaaaacttttaagttagtaaagacttggcaagactgtgtaactaatccatgtagaaaatagggtttatgtaaatgaatggtgcggatgataatgctcataaaggttgcttcctccttttatatgcatataatataataatattgctcagtgctctttattgtgacgac

SEQ ID NO: 10374 - DNA, 434 bp, Glycine max
  Clone ID: LIB3092-022-Q1-K1-G12
cccacgcgtccgagttcctgtcaagcaggctgatggacacactgggagcacttgctcttgctactgaacctccaaatgatgatttaatgaaacgttcacctgttggaaggaagggaaatttcatcagcaatgtcatgtggaggaacatcttaggacaatcattgtatcagtttatggtgatatggtttcttcagtcaagaggaaaatcaatctttttacttgagggccccaattcagatctagtcttaaacacgcttattttcaactcatttgtcttctgtcaggttttcaatgagataaattcacgtgaaatggagaaaataaacgtttttaaaggcatattggataactatgttttcgtgggtgtcatcagtgctactgttttcttccaaatcataatagttgagtacttgggaacctttgcaaacacaaca

SEQ ID NO: 10375 - DNA, 377 bp, Glycine max
  unsure at all n locations
  Clone ID: LIB3092-022-Q1-K1-G5
aggacgcgtggacggacgcgtgggcagacccgtgctcaaacgttgttgtacgagataagattgctgtagcgctgattgctaacacctgcagagtacaatggcctgtgtatcaacatctttgctcaagtcttcacttgttgttgacagactgagtgggtgaaaggacaaacccttagccaaccttttgcagtagttgtgagaagcaaccccaccaccccatcaggtctgaccatcagagctgggtactatgctgatgagctcgttaagaccacngatacacgggcttcaccagggaggggtatttggcgcatgcatgagtgcaatgctacctgtgggagagcgttggctttaattgggctatagaacactggagctta

SEQ ID NO: 10376 - DNA, 411 bp, Glycine max
  unsure at all n locations
  Clone ID: LIB3092-022-Q1-K1-H11
cgtgcggtacaagcctctactatactgcttcaccttcttctctagataattcantgctgaaacatggggtcanctagtctctctgtaaccaaaccagcccttcaagcaaatgggaaaggcttctctgaattctctggcctccgaagctcatcaggcttccttcccttttctagaaaatcttcacaggatttccattctgtcattgccttccagacctatgcagttggaagcagtggaggatacaagaagggtgtgacagaagcaaaactgaaggttgccataaacgggtttggaaggattggaaggaacttcttgaggtgctggcacggtcgcaaagactcccctcttgatgtcattgccatcaacgacaccggcggcgtgaaacaagcctctcaccttcttaaatacgat

SEQ ID NO: 10377 - DNA, 449 bp, Glycine max
  Clone ID: LIB3092-022-Q1-K1-H12
gcagagaccgaaatacttcgagatggcccgtacaaagcaaactgctcgtaagtcaactggaggaaaagctcccaggaagcagcttgcaaccaaggctgcacgtaagtctgcaccaacaactggtggtgtgaagaagcctcatcgttatcgccctggaactgttgctcttcgtgagattaggaaataccagaagagcactgagctcctaatcaggaagcttcctttccagaggttggttcgtgaaattgcccaggatttcaagactgatctgcgtttccagagccatgctgtgcttgcattgcaagaggctgctgaggcataccttgttgggctctttgaggacactaacttgtgtgccattcacgccaagcgtgtgactattatgcccaaggatattcagctggcaagaaggattcgtggtgagcgtgcttgagttggtgcgttctgtg

SEQ ID NO: 10378 - DNA, 447 bp, Glycine max
  Clone ID: LIB3092-022-Q1-K1-H4
aatttgaaagccccacgctcttcacctcgttactctccgatcagggttgcaatcgtggagcctgacacttcaactgtggactacaactctgcgttctcagtgtttccagcggaagcatgcgaaactgttggaggggaagcctgcatggcagaaatgtaccctgaagtgaagctacagccagaagctaagacaccacgagttgttacagagaacgttgagagagagtatcttgaatacgatgatcctaaaacggtatttagaggagaggcttgtgatgatcttggaggaactttttgtgagaccgagtatcagaagggtgtctactagagaaaaaagaaaaccctttttattgccatggctactgcgtttttaatgtctaccagtaatgattgtagtggtgaatgtacataggtataggctatggatctcagtttatattgagtttca

SEQ ID NO: 10379 - DNA, 248 bp, Glycine max
  unsure at all n locations
  Clone ID: LIB3092-022-Q1-K1-H6
ctcgccttttacaaatatggcatcacgcgccantatgggcaatctcacttgctccgcnccatatattaattcccctcattttcgctcacaacttaagctttccagcaactcctctttgcacaagccactcatgcgcgacaagactgtgctggtaaccgccggagccggttacatctgcacccacaccgttcttcatctctagctcggaggttgcagaaccgtcgtcgtcgacaatctcgacaattcct

SEQ ID NO: 10380 - DNA, 427 bp, Glycine max
  unsure at all n locations
  Clone ID: LIB3092-022-Q1-K1-H7
gcttacaagtatgtttcggagctatggcgcaggaagcagtctgatgttatgagagtcttgcagcgggtgaggtgctgggagtaccgccagcaaccttctattgtccgtttgacaaggtctactcgcccagacaaggctcgccgattgggtttcaaggctaagcatggttatgtgatttaccgagttcgtgtacgaaggggtggccggaagagaccagttacataaggtattgtatatggtaagcccaccaaccaaggtgttactcaactgaaatttcagcgcatcangaggtctgttgccgaggagcgagctggaaggaagttgggtggcctcaaggctctcaattcatactgngtgaatgaggactcgacttacaaatattgtgaggtcattctggtggatgttgcccacagcgcttgtagaaatg

SEQ ID NO: 10381 - DNA, 438 bp, Glycine max
  Clone ID: LIB3092-022-Q1-K1-F4
ccaacccttccgcccacccgtccgacaggtggttgagacctaaaaaggaaaagcaaatggctggctaaaggatcttttccccagttgttaccactgtcaaccgtgccggggccggcatggttgttccattaactggcctcaagtccatggttggtttccccaccagaaagaccaacaatgacattaccctccattgctagcaacggtggaaagagtgcaatgcatgcaggtgtggccaccagttggcaagaagaagtttgagactctttcctacctgccagaccttgatgatgcacaattggcaaaagaagtagaataccttcttaggaaaggatggattccttgcttggaattcgagttggagcacggtttcgtgtaccgtgagcacaacaggtcaccaggatactacgatggacgctactggaccatgtggaagct

SEQ ID NO: 10382 - DNA, 432 bp, Glycine max
  unsure at all n locations
  Clone ID: LIB3092-022-Q1-K1-D7
aacactatagcctacaacatgtggtatgtaaacccctcactcttatcactacactaggtgcccatacaatgtcgaccaaattaaggtgtttcgtgaattcacaagcgatgactcattcctaaaccaagttatccctgaaaacatcaccgaattccaagtgactctgtccctcgctagagactacgatggcaacaactcaaccaacggaaagttcattccttactgggacactgaaaaggtcactcccgaagtgataaaaaaattcaagaaaaaatacgaacccaccgcactgagggttaaggttcttgtcagcattggaaacaaaaacanacaatntcctttcaccattggctcggactcgaacagcgaagcatgggtctccgaggccactgcttcgctgaagagcatcattaaaacctacaaccttgatgg

SEQ ID NO: 10383 - DNA, 442 bp, Glycine max
  Clone ID: LIB3092-022-Q1-K1-D9
gtccctaaccccacccccctacgacctccagtccttcaaattccagcccatcaaagaatccagcgtgtcacgggaaatgacgcgccgctacatgaccgacatgataacctacgccgacaccgacgtcgtaatcgtcggagccggttcggccgggctctcctgcgcgtacgagctcagcaagaaccccgccgtgagcgtggccatagtcgagcagtcagtgagccccggcggcggcgcgtggctcggcgggcagctcttctccgcgatggtggtccgcaagccggcgcacctcttcctcgacgagctcggcgtggcgtacgacgagcaagaggactacgttgtcataaagcacgcggctttgttcacgtccaccatcatgagcaggctcctcgcgaggcccaacgtgaagctcttcaacgcggtggcggcggaggacttgatc

SEQ ID NO: 10384 - DNA, 218 bp, Glycine max
  Clone ID: LIB3092-022-Q1-K1-E1
tccccaattggtatttccccaccggccagaaacctatggggcttaaggggatccacctgagaaccaggcaccaaggtgcactgtccactcatttcaacacattattgaccatggttggccatggccccgacctgagttggagggttggctggaaaaaactccagccgaagtaaatgcttattggtctaacccaagggaatatactaatgcaaggaaaa

SEQ ID NO: 10385 - DNA, 423 bp, Glycine max
  unsure at all n locations
  Clone ID: LIB3092-022-Q1-K1-E10
tttcttaacaaatgttttttggttttcacanaccgaaatacttcgcgccggcccgcacaattcaaacgcgctcataactcaactanattaaaatctccacataagcatcttgcaaccaattctgcacgtaattctgcaccaacaactgatggtgtgaacaatccttatctatatctccctgtaacttttgctcttcttgagattattaaataccacaagagcactgatctcctaatcaccaatcttcctttccacacgtttcttcctcaaattgcccaaaattttaagactgatcttcttttccaaatccatgctatactttcattgcaatacgcttcttaagcatatcttgttttcctcttttatgacactaactttgtttccattcaccccaaacgttttactattattcccaatgatatt

SEQ ID NO: 10386 - DNA, 446 bp, Glycine max
  Clone ID: LIB3092-022-Q1-K1-E11
ccgaaagcaacagcagcagcagcagagttataaggttccacagcgtcatcaagtgttcgtgggtgaagccaagggcaaaaagggaatgatgtctcgtcaatttcagcgcaatgctcctcctcctttacccaagattgaagacgatggcaatcccaaattcgtcatcttcattcgcatggccaatgtatacctttggtaccctcttagtatcgtatcaggcggcaccactgctaaaataatggttgcagctaaagataattttctcggcaagtatatctacaaagacactcttgatagaaatctcgctgctgttatctacagagatgagaaggaggtacagaaatctgcattcaaacagtaccgtgtattgcgaacagctactgatttcagatacggctacaaacttgttgagaatggcaatataagagctgcactttctaccactg

SEQ ID NO: 10387 - DNA, 471 bp, Glycine max
  unsure at all n locations
  Clone ID: LIB3092-022-Q1-K1-E12
gaagacccgggccgaccgcgcgtncgnaaagatagnatttgagaaaaccactgngaagacagctgggaatnngncacaggggccaccagcggaggtgcctcggattcccgatgcattgaggcctccatctaatacgggaagcggtgaatttgaagttacatatcttgactcggatactcgcatcacaagaggagacagaggcgagctaagggtctttgtgattgcttgagttcctggtgaatgcaactatgcactatgcattttctctgttggacttaaaaaaaaaaggtttcaacaccttgtgccatcattttgtttagttttttcctcctgatggtatttgttctaagttcttcaatattgtaaacatgatggaattaaactctactatatagttccaaggaagcagggtactttttgtttaagtgtaacatatttcttttttaaggaataattgcttacagatcatta

SEQ ID NO: 10388 - DNA, 185 bp, Glycine max
  Clone ID: LIB3092-022-Q1-K1-E3
gtttggattctacccaccttggattccctggtaaaaggcctggccaattccaatttggttggtttttgccttttagaattccaataggttaaatgaggtgggttttttaattggagagaaccctcgattggatttttggaaattccgattcaggtttgaccggggggtatacaaaacaacttttt

SEQ ID NO: 10389 - DNA, 279 bp, Glycine max
  unsure at all n locations
  Clone ID: LIB3092-022-Q1-K1-E5
tggggtgctattctagctaacttgtacgctaggaaggcggacatcatcttaagaggatactctggttggaattcaaggcgggctttggaggttttggatgaaattttccccaaggatgcttatgtgcaaccatcattggtaattgtgtattttggtggcaatgattctattgatcctcacccatctggccttggtcctcatgtaccccttgaagaatatgttgaaaacatgaggaaaatngctaatcatcttaagagcctctcggaccatattcgcatt

SEQ ID NO: 10390 - DNA, 395 bp, Glycine max
  Clone ID: LIB3092-022-Q1-K1-E6
aaaaaatggtttatttaattggtccttccaaaggatcgattaaaataaaaagggtactggaggggcaatgggttaattaatctctagggagtatatatataaatatggagagcctgcaagaaagagtgtttatgttgatgaatgaacaatattattattccaattccaatgtatcagatcagctgcatatgcatcatcatcgctctgtgtctgtggagaatctaaacctatggtgggaaaacaacaccgactccgatgactcagccgagcgaattttgtattgggaatctcagatctcactgcttcaggaaattttggagcggtaccatttaagtgggtcaaaattgagacttgaggttggtcgaatcattaaagaggtcaaagcttctgatttt

SEQ ID NO: 10391 - DNA, 441 bp, Glycine max
  Clone ID: LIB3092-022-Q1-K1-E7
gccgaggtcaggaggagcactagctaagttcacaatttcaaaatggctagggggcgaaagaagcatttgaaaaggctcaatgctcctaagcattggatgcttgacaaactgggtggtgcatttgcgcctaaaccctcatctggaccacacaaatcgagggagtgcctccccctcattcttattctgcgaaaccggctgaagtatgctctgacataccgtgaagtcattgctattctgatgcagcgccatgttcttgttgatggcaaagtcaggactgacaagacttaccctgctggtttcatggatgttgtttcaatcccaaaaacaaatgagaacttccgcctgctctatgacactaaaggccgattccgtcttcattccatcagggatgatgaggcaaagttcaagctctgcaaggttaggtcagtacagtttggccag

SEQ ID NO: 10392 - DNA, 441 bp, Glycine max
  unsure at all n locations
  Clone ID: LIB3092-022-Q1-K1-E9
cttcccttctccaacatgccaaacgacagcgttctgagtcttttcttcttcgttaccctcttgacatgccttctctctgctaattcccacgatgaccatattttcctaccgagtcaactccatgacgatgactcagtgagttgcactgctaccgacccaaaccttaactacaagccggtgatcggaatcctgacccaccccggcgacggtgcctctggccggctcagcaacgccaccggggtttcttacatcgccgcctcctacgttaaattcgtggagtccggtggtgctagagttattccccttatctacaatgagtcacctgagaaccttaacaagaagctcgatttggtcaatggagtgctcttcactggtgggtgggctgtttctggtccatatttggatactctnggaaacatntttaagaaagctttagagaaa

SEQ ID NO: 10393 - DNA, 445 bp, Glycine max
  Clone ID: LIB3092-022-Q1-K1-F11
tcctaatcctaatagaagaaaaatgatgggcattgaatcgacggggagtaaatggcttgggttggtggcggcggtgtggatacaagcaatctccggcaacaactacactttctcgaattactcggacgctctgaaatccctcatgagcctaacccaaatcgagctcaacaatctgtccgtggccaaggatgttggcaaggcttttgggcttctggctgggctggcctcagacaaattcccgacttgggccattctcctcattgggtccctccaaggccttatcggctatggcgtccagtggctcgtcgtcagccagagaatccaacccctcccatactggcagatgtgcgtattcctctgcattggtggcaacagcactacctggatgaacaccgccgttctagtcacatgcatccgcaacttccgccgcaacagaggccccgtt

SEQ ID NO: 10394 - DNA, 404 bp, Glycine max
  Clone ID: LIB3092-022-Q1-K1-F12
gaaaaaatggcgggcaggaccatgctccgttcttcgattttggtggaacccttccaatggcaggctcttcattttagtaacagacccgttagggcttgtccgtttcgccgtggcaaggagtgaccctccgttgctccagcaatgagacgccgtcgtttcaggacgatcaaggtccacctcaagaagccgtgttgaaggccatttccgaggtatctaaagcagaaaggagggttggccaaactacgaacatggttattggaggcaccgtgtcggatgattctactaatgaatggctcactttggaccagaaggtgaactcatacccaactgttcggggattcactgcaataggaactggaggggaggacttcgttcaagccatggttgttgctgggaatccgtaa

SEQ ID NO: 10395 - DNA, 299 bp, Glycine max
  Clone ID: LIB3092-022-Q1-K1-F2
catgccactagtgtcacttatgtagccaccaaaagtgttggtggctacaatgatgacgctaataagcaacatgatattactggtgtctatcccgagaaagacaccggtagacatcattttggtcgtggttacgacggtgacactaacaagcaacatgatgctactggtgtttatcccggaatagacattggtagagatcatgggactaccggtgtttatggcctaaacaccgacagacatcatggaacttctggggtgaatcccgggatagacacccataaccaacaacatgggactac

SEQ ID NO: 10396 - DNA, 445 bp, Glycine max
  Clone ID: LIB3092-022-Q1-K1-D5
gtttgtaaattgcaaatgggtttggggaatttttaaggagatcacccccaagccctttcttcgtgaacaagcattattaccatggtgcttcccatttttaattccacatttgcttttgattaaccccagaacccattattaccttgggggggcatttttttttgttgccctttctttaccaatggcttcactttcactcacaatcaccaaaatggcccgtgtgcaaagccctcgtggaagaagaaaagctggttcccttgtatgggagaagaaagtcgtcgactgatccaagatcaaaatctattccgggcgataacatcccgcatcgtccggctggtcaaaggcctgaaactgctcctccacctgaaacaaatcattttcatcaacatgggtttggatttatgggtggcttggggggatttgcgccaccgccgatggcaacaac

SEQ ID NO: 10397 - DNA, 394 bp, Glycine max
  Clone ID: LIB3092-022-Q1-K1-A5
ggtgcattaaaagaatttgaaattaataacctgggttgcaaaacctttggtttaatagtgtcctgtaaccttttaaggggaggttgcaaaaaaaagttttggaccaagatcactccaatctccatttggcttctccagaaaagcctcctttcttgttaaggcagttgttaccccccttgtcaagcaaggatcagacagacctttgtggtttgcatcaaagcaaagtctttcttacttggatggcagccttccgggtgactatggatttgaccctctgggactttcagaccctgaaggaacaggagggttcattgagccgaaatggctagcatatggtgagataatcaatggtcgttatgcaatgttgggtgcagttggtgcaatagcacctgaa

SEQ ID NO: 10398 - DNA, 123 bp, Glycine max
  unsure at all n locations
  Clone ID: LIB3092-022-Q1-K1-A8
acaaagaaacaatggaccccctttctgtnttgtgtgggcctcttgttcaaggaggccacccggcattttacccttctgggtaaccatcaatcctattcaatggggttatgaattattcaatgt

SEQ ID NO: 10399 - DNA, 441 bp, Glycine max
  Clone ID: LIB3092-022-Q1-K1-A9
gcgattgcattcagttcgactttgatagcgaggaggcattgatggaccgggagctggacctcgccaactatgtgaaggcggtggcggaggaggagatcgtagttccggtggatcgaaccgccgagtgagttttcaaccggtaaaaccgcccgatcggcgatccagagctccaccgcctggaacgccacctcgaactggtcgcacggaatggcctcgcagttcggataggccttgccggcagcggcttcagagtacgcgccgggaacgccttggtacgcgacgcggagcttggagccgtgcatcggggccggcgagaggtcggagatcgtgagcggcttcggcgggagcggcttgttgttggcctctgctaggtttccaattggaacgagttggaagtcgctgacggcggctttgtgaccgttgacggcggcgatgtggtcg

SEQ ID NO: 10400 - DNA, 328 bp, Glycine max
  unsure at all n locations
  Clone ID: LIB3092-022-Q1-K1-B10
cccacgcgttcgnggacgcgtgtttttacgcttttgccgacacgtgaattctagggggtttggctaattcatatctgtactatttttcaatngtttttttaaatgttgaattccgttgctttgttgatggacttgcttgggtcaccggcaacgatgccctcaagaaatccttttcaatctacggcgacatcgttgaatcgaaggttatcaactaccgtgagactggaaggttcataggattcagatttatgaccttcacctcaaagcaatcaatgaaagatgcgatcgcattaatgaacggtccaaaccttgacggtcctaacatcac

SEQ ID NO: 10401 - DNA, 338 bp, Glycine max
  unsure at all n locations
  Clone ID: LIB3092-022-Q1-K1-B11
cgagaacaaaaaaaaaaaaaaaaaaaaaatccgcgattcgctcttctcttggaaaagtgaaaaccagaagtacgaacgaaagagaagagcgatttagaagtgagagaagatggggttgtcgttcacgaagctgttcagcaggttgtttgcgaagaaggaaatgaggattctgatggtaggtctcgatgctgctggtaagacaaccatcttgtacaagctcaagcttggagaaatcgtcaccactatccccaccatcggatntaatgttgagactgtggagtacaagaacatcagcttcactgtgtgggatgttggntggcaggacaagatccgccact

SEQ ID NO: 10402 - DNA, 453 bp, Glycine max
  unsure at all n locations
  Clone ID: LIB3092-022-Q1-K1-B12
cgtccgctaataaccaacncatcgcttcggattatctagatctaaagaactagtcaaaacaaaaaaaaacgaagaaaggatatattatagcaactgaactattgttaagcataaaagaacaaaaatcttatttagttgtaaagcaataaaaatatacagataaatgaagaggtgaaagaaagagagaaaaaaaatcaatgatatacaattctaatatataaaggtctatggcttatctaataaaaggtaatgtaataaaacatcaatctaaatcaattcatatctatttatatatgaattaatttataacgtaaacaaattaagagctctgaatcaataaaaactcataatattgattcacgaaaaaacaaatcaatattcgaaaaacaaaaacattattaattttaatatattacaaaggctacattgttgaattcagacctaaccattaat

SEQ ID NO: 10403 - DNA, 232 bp, Glycine max
  Clone ID: LIB3092-022-Q1-K1-B6
cttccgcttcttgttattctatggcaagcccaaacaagttcatcttggcttaaacttttttttcattcgaggggctttgtggctctttaacaattcaacttctgtcatgttagaagccacttaggttaacttgtaccgtccttctatcttaaaagaccccctaatcaggcgtttcaccaacttaccgttatcccttaaattgaaacctttttaaccccagtacattccctcc

SEQ ID NO: 10404 - DNA, 331 bp, Glycine max
  Clone ID: LIB3092-022-Q1-K1-B8
aagacattgtcactaaaaggaggatactatgactttgttaagggatcttttgagctctggggccttcagtttggccttgcatcctctttctccgttaaagatgtggccaccattctgcattggaagctataggggccatgcttagaggtcgtgtgtatctgcaatgaagaggcctagccaccttcatcaccatatgatatttataaaaatatatatatatgaaactatgaactgcgtttatgcatgtcggaaaatcttcttttgataagagtttggaaatcctcttgtaacaaaattttcattattcaaccttgatctttatatagcccgc

SEQ ID NO: 10405 - DNA, 334 bp, Glycine max
  Clone ID: LIB3092-022-Q1-K1-B9
acaaagacattgtcactaaaaggaggttactatgactttgttaacggatcttttgcggtctggtggcttcagtttggccttgcatcctctttctccgttaaagatgtggccaccattctgcattggaagctataggggccatgcttagaggtcgtgtgtatctgcaatgaagaggcctagccaccttcatcaccatatgatatttataaaaatatatatatatgaaactatgaactgcgtttatgcatgtcggaaaatcttcttttgataagagtttggaaatcctcttgtaacaaaattttcattattcaaccttgatctttatatagcccgc

SEQ ID NO: 10406 - DNA, 143 bp, Glycine max
  Clone ID: LIB3092-022-Q1-K1-C10
ctccaatgtcggcgttgaaattgatggctcgttgggggattctgacagtctcaaagagtctggctcaaagaaaagggttaggtctgagtcatgtgcttgcttctggctccaaggcatgtcgggagaagttgagaagggatagt

SEQ ID NO: 10407 - DNA, 126 bp, Glycine max
  Clone ID: LIB3092-022-Q1-K1-C11
ccgttttcggagagtattatcggtttgatgcgacttcatttgtcatggtaatgaggagagaggcaaaagtacgtatttatgtgaagccagatcaaaatgccgaaaacaaaggtgtattttgttaca

SEQ ID NO: 10408 - DNA, 329 bp, Glycine max
  unsure at all n locations
  Clone ID: LIB3092-022-Q1-K1-C12
acaacatatcanaatgctcaaattatctttcttgcaacaactaatcctccttcaaaacttgatgaagcaatactttcgcttcttcctcaagcctttgaaattgtaattccacaccaaaaggagaggtctgaaatatttaaaattatcttaaactattacaatattcaacacaacataaacttttgtcatatacatgttttttctgaaggttacactggttcacatctatttgatctttgcaagaaacctgcctattttcctattacacaactactggatgaagagaataaaagaaaacaatctcatccccctatacctttgtcccattt

SEQ ID NO: 10409 - DNA, 377 bp, Glycine max
  Clone ID: LIB3092-022-Q1-K1-C2
ttaaggtggccacccaacatgcttgggaccagaacccactgaccttccttcgtcaggttgtggctttgtgccaagctccattcttacttgaggatcctaatgtgggactgctattccctgttgatgcagttgcaggagctaaacactatctttaattgacctcgggcggtttaggcgcatatagtgactcccgcgagcttccaggagtgaggaaggaagtggctgacttcatactcaggcgtgatggatatccaactgatccagaactcatatatctcactgatggtgcccacaggggggagatgcagatattaaatactatcatcagaggtcaagacgatgggatttaggttctagtgccacaatacccactctac

SEQ ID NO: 10410 - DNA, 438 bp, Glycine max
  Clone ID: LIB3092-022-Q1-K1-C3
gccttccggcgccaaccggaccaaccaaggtaaggtcagggtcaggggatgattatggcagggattaactggttttccgttttcctggttctccattacggggctcaaccttggacctccaaacccttaatcaaacgggaagttatggggacttcatctgtttggactggtgagctggcaaaggttatatgtgcagggtttttaatggcaaaagatggtagtctgaggaaatggtataaagagtggcttttggttggtgcgttgactgcatcaggacttcctgcagctatatatgcattgcaaaatagtttgctgcaaatttcttacaagaatcttgattcactcacattctcaatgctgaatcagaccaaaatatttttcaccgcgctctttgcatatttcatattgaggcaaaaacaatcgattgagcaaattgga

SEQ ID NO: 10411 - DNA, 207 bp, Glycine max
  Clone ID: LIB3092-022-Q1-K1-C4
aagaacaaaaatcttattttggtgtgaagcgattaaaatattccgattaatggagagggggaaggaagggccgaaaaaaatccatggttttgaattcttatatggaaagggctatggggtatcttattaaagggagggggataaagcattaatcttaatcaattcatatctatttatatatgaattaggtttttacggaaacaaatt

SEQ ID NO: 10412 - DNA, 438 bp, Glycine max
  Clone ID: LIB3092-022-Q1-K1-D10
cccacgcgtccggaagaattggattcgaaaatcgtagcgtagcgttggtgcgattgaacgatgcgatgggaagaggaaaattcaagagcaagcccactggtcgccgccagttctccaccccggaagatatgcttgctggaacctctaaccgtcctcgaacttttagacagaaagaagctgagcatgaagaggaagaacccgaggaagtatctggagatgaatctggagaagaatctgaagaagaaacttctaagaaaaaaggaacacaaggggttattgagattgaaaatcccaacttagtaaagccaaagaccttgaaagctagagatgttgatgttggaaaaacaacagaactttcaaggcgtgaaagggaggagatagagaaacagagagcccatgagcgctatatgaggctgcaagagcaaggaaaaacagaac

SEQ ID NO: 10413 - DNA, 444 bp, Glycine max
  Clone ID: LIB3092-022-Q1-K1-D11
cccacgcgtccggaggattccaattcatggcttcccttgcagcatccactgctcgtgcttccgttggcatgtcagaaatgcttggaaaccccatcaacctcagtggtgccacaaggccagctccatctgcctctagccctgcctccttcaagactgtggctcttttctccaaaaagaaggctgcacctccaaaaaaagctgcagctgctgctcctgccaatgatgagcttgccaagtggtatggtcctgacagaaggatcttcttgcctgagggtctcttggaccgatctgagatcccagagtacttgaccggagaagtccccggagactatggttatgacccatttggtcttagcaagaagccagaagatttttccaaatatcaggcatttgaattgattcacgccagatgggcaatgcttggtgctgctggattcatcattc

SEQ ID NO: 10414 - DNA, 441 bp, Glycine max
  Clone ID: LIB3092-022-Q1-K1-D12
caaaattccgacacacgtggcacttcaccaaccgctgatctcagcaggaacaacggcagcgagggcagaagctacagcgaggcaagcctgcttccgcggcttgccacgtggtacaaatccaaggacgtagcgcagaggatccttctctcagttgaatgccaaatgaggaggtgttcctacacgctgggtttgggtgagccgaacctagcgggcaaaccgagcctgctctacgacctcgtgtgtaagccgaacgagatccacgcgctgaagacgacgccgtacgatgagcgcgtagagaatcacgagaaccacgcgttgcacgcgacgcaccagatcgccgagtcgtggatccacgcgtcgcggaaggttctagagaggatcgcagacgcggtgctctccagaaccttcgagaaggcggctgaggactgctacgccgtggaa

SEQ ID NO: 10415 - DNA, 402 bp, Glycine max
  Clone ID: LIB3092-022-Q1-K1-A3
actttgatagtttgattagctctaataaggttaaggacgagagagagaaagagaaataagaagaaaaacacaagatgggttattggaagtctaaggttcttcccaagatcaagaaggttttcgagaagaatagcaccaagaaagctgctgctgctgaggccaccaagtcctttgatgagtcaaaggaggaatacaacaaagcctttgaagaaaagaagactgaacttcaaaccaaagttgttgaaatatatgaggcttcatcaactgaaatcaagagtttggttaaagaacccaaggaagctggtttgaagaagaactccacagaagtccagaagttcctagaagagctggttaaaattgatttccctggatcaaaggcggcatctgaagcatcttcaaagt

SEQ ID NO: 10416 - DNA, 430 bp, Glycine max
  unsure at all n locations
  Clone ID: LIB3092-021-Q1-K1-G3
cccacgcgtccgcccacgcgtccgggggatcacttctttgacatgtcaaggtttgattccttgcaggcacgaaagtggatattcttcacaaccagagaggctcacgagatttgattccataagtagtagcagcaaggattttggttacaataatgataaattcacaaggtttgattccataagtagcagcaaggattttggctacaataatgataaattcacaaggtttgactccataagtagcagcaaggattttggctacaatcctgagacgctcacaaggtttgattccatgagtagcagcactgatttgggcttcggtcgacagggacatgcaaggtttgactcaattagtagcaccaaggacttcggtcacagtggtccgntctcttttgatgactctgatccattcggctcctcttgccctttt

SEQ ID NO: 10417 - DNA, 444 bp, Glycine max
  unsure at all n locations
  Clone ID: LIB3092-021-Q1-K1-G5
cccacgcgtccgatccatgatgtccagcgcattcacactcctgacgccgcgccacgtggcagggatcggagcgggcgccgtctttctattggcagctcgggagctccggcgagaagggcatcgcgtggtggttttcgagaaaggggaggaagtgggtggcatgtgggtgtacagtccggaggtggattcggatccgctgggtttggaggcgaagcggagattagtccactcgagcctctacgattcgctccgaacgaatctgtctcgggagagcatgagtttccgagattaccctttcangacgaaggaggggaaagggagggattctcgaaggttcccgggtcacagagaggtgttactgtacttgcaggatttcgctgctgaatttgaaatcggagaaatggtgaaggttggaacggaaggttttggttgctggaatggatc

SEQ ID NO: 10418 - DNA, 316 bp, Glycine max
  Clone ID: LIB3092-021-Q1-K1-G6
gaagcaacttcattcttctctctctctgaaacgcaacttcattagccaattaattggcttcgcaaaatgtcggggaagagaaagaggaagttgaaattgttaagcgatgcaatcacagataatagaagaacagttgctgaggtgaaaagtgaaaatttggagatgcaatcctgggctgatctccctgctgaactcttagaatcgatcttgtcccgattgatcctagcggataacatccgtgcttctgctgtttgcaggagatggcattctgttgccagtgatgtacgtgtagtaaaccaatcaccatggcttatgt

SEQ ID NO: 10419 - DNA, 329 bp, Glycine max
  Clone ID: LIB3092-021-Q1-K1-H10
gttaagaatctgaatatgagtctaaaccggtctaagaccgagcggcaatcgtcacctgctcggaccgctgaatcgggcgagaaatcgcgctacagctcgactcactcggcgcgcgactcgtcgtcaactacacctgcaactcggcccaagccgactcagtcgcggcgcatatcaacgtcggatccgtcaccacgacaccgatcgccggcgtggtccaagccgacgtgaccgatcacggctcaggtgaagtcgctcttcgactctgacgagcgcgccttcgactcgccgatacacatgcgttgcaactctgcgaacgtgatcgacagcac

SEQ ID NO: 10420 - DNA, 444 bp, Glycine max
  Clone ID: LIB3092-021-Q1-K1-H11
cgcgattctgagcgcgttggactccaagctggtcggattgttgggccaggtctcgtccgaagaggacttcagcggcaaacttgggcagtccacggttctaagaatcgcttccggactcggattcaagcgcgtcgccttgcttggcctcggcgcctccgcgttcaccacattcgcgttcaagtccctcggcgaggccgatgccgctgccgtcaagtccgcccaggccggccacgtcgacgtcgcgcttgcctcttccgacgcactctacaccgagtctaagcctaaaacagcgtccgcaatcacatctgggactttgctgggaacttatgaggatatacaggtcaagtcagagtcgaagaaatcagtgcttaattctgtggatattatcgggcttggaactggacctgaattggagaagaaactaagtatgcagctgacatttct

SEQ ID NO: 10421 - DNA, 414 bp, Glycine max
  unsure at all n locations
  Clone ID: LIB3092-021-Q1-K1-H12
ccggcttcctaatcaatttggccccaattccaaatccccattccctagccctaaccctaaaaccgaatcttctcatgaaacctcccacgccacactcctccgtatcagaatcaggttcgattccctaaccctccacaaatcgctttcttctctttgcagtttctccatggagggctctgcagaggatttcggagcccccgagtcatgggaggtcgctgatttggacgagtccatgaaccgcttgaacctcatgctctcttccaacaacgattctaagcaacctcaccaacgtgtcgccgatgatgacgatgctatgccgnctnctattccgnctncttcgtccagtggcgacgaggtttccgatgacgtcatcaatcaggttgatcaggtccttcgcgaagctattcaaaaccc

SEQ ID NO: 10422 - DNA, 288 bp, Glycine max
  Clone ID: LIB3092-021-Q1-K1-H2
atttttcacaccaccaacacaagatgtttctccacattgtgttcctccttttccttctctcagccacttcccatgccactgtccaagacttctgtgtggcagacctcaaaggtgcagacacccctgcaggctacccctgcaagccacctgctaatgtcacttcagatgactttgtgtacactggcttagctgaagctgcaaatgtcacaaacataatcaatgctgctgtgaccccagcttttgttgctcaattcccaggtctcaatggccttgaactatctgcagcaa

SEQ ID NO: 10423 - DNA, 368 bp, Glycine max
  Clone ID: LIB3092-021-Q1-K1-H3
ctctctccccgccaggttcagagacttttccgattcctggaagaagagaagagaaaacctaaatcacagatccatggcggaagaacaccgatgtgaacctcccgaaggtcaccgactttgcgtcaacaactgcggttttttcggagcaccgccacgatgaacctctgcttcaaatgctacagcgcgatccgtttgaaggagcaagaagaagcgtcgacgaaatccacaatcgaaaccgcgctctcttctgcctcctcggcgaaaccgtcgtcgtccacgtcacctccgccgtcggcggtcgatgtgctcatggaatctccaccgccgtctgcggcggaggttgaggttgctgtcacggtcacggtcgc

SEQ ID NO: 10424 - DNA, 269 bp, Glycine max
  Clone ID: LIB3092-021-Q1-K1-H4
cccacgcgtacgaaacactctctgtccttgacagacagctgttccaaacccaacatcattcagcggctcccaccattccatttcctctttctttctcccacctctctcatatcttcagatccatcactctctttgcacaaaaaaaaggctttgatatttggaaatgtctgaagtgagaaacaaagtggatttcatccagttgcttggacctgacatgtcaatcaagattctcacccatttggatgacccttgtgatcttattccggttt

SEQ ID NO: 10425 - DNA, 460 bp, Glycine max
  unsure at all n locations
  Clone ID: LIB3092-021-Q1-K1-H5
gggccggcccacgcgtacggcaaacaagttcctcatgaagcagccgtttttctgtccaaaaaagagcgacgtggtccacgctcttttaagcattatgaaggtctcatttcctcatgatgaacacatcccccaagcagcngnagcagcaactggagaatatatattattaaaaggtatctgtagaggacactcaacctgaacctgcagctaaacaaaggaacaattacctgaagaaggtatgtgaatagaaagacatggtcagcttaagaaacaagtccgttggaatgttggattggaaaagttgagcacctgggctagaaagaacttggtgataagtgacctgtatatcttggaaagaaaaatcttcttcccctacaggcacctgcttatagcaatgtttgccgatcacatagttttcactctgtgaaaatcgacattgtcaggcacacaggtaacatgc

SEQ ID NO: 10426 - DNA, 160 bp, Glycine max
  Clone ID: LIB3092-021-Q1-K1-H6
gacattcatagaaatagctatactaaaatttaagggagaatcatcactagaggatgtagcagggagccaaattgaattggctgaatattattacaacctctgtcatatcttaacatacatcactctatttgcaaaaaaaaaaagctgttatatttggaaa

SEQ ID NO: 10427 - DNA, 375 bp, Glycine max
  unsure at all n locations
  Clone ID: LIB3092-021-Q1-K1-H8
cccacgcgtncgaaacactctctgtccttgacagacagctgttccaaacccaacatcattcacccgctcccaccattccatttcctctttctttctcccacctctctcatatcttcagatccatcactctctttgcagaaaaaaaaagctttgatatttggaaatgtctgaagtgagaaacaaagtggatttcatccagttgcttggacctgacatgtcaatcaagattctcacccatttggatgacccttgtgatcttattcgggtttcttctagttccagttcttggcaccgatttgttattgaacatgggctttgcaagcaacctttgcttgaaaatgtttcctgaaatatcttgtgttgctcatataattg

SEQ ID NO: 10428 - DNA, 395 bp, Glycine max
  Clone ID: LIB3092-021-Q1-K1-H9
ctcttgctcaccgattgctagaatggaatttctatgctcagtcatctcttttaccattctcggctctcttgctcttgcaggagagagccatgtccatgcatcgctacctgaggaagattattgggaagctgtttggccaaacactcccattcccactgcactgcgagagcttctaaagcctctccctgcaggtgttgaaatcgatgaactccctaagcaaattgatgatacacagtacccaaaaacattcttctataaagaagaccttcatccaggcaaaacaatgaaagtacaattcaccaagcgtgcctatgcacaaccttatggtgtatatacatggttaacggatattaaagacacctctaaagaaggatataagtctgaagagatatgca

SEQ ID NO: 10429 - DNA, 383 bp, Glycine max
  Clone ID: LIB3092-022-Q1-K1-A1
tccggaaaaaggttatggcaaaggttgtttttcaaaataactggaacaggggggggggtttcaaaatggtaaatggattctagttcctctttgggggatacgtttctggtttctggtcaatgtcccatgtttcggtaggatttgttttcatggtctacgggtcccagaaatgttccacagctattcttcatagaacactgaccccgtagttacccaagtgcccaggagacaaaggagttgatggacgttttactaagaatgtcccgaaaaaagaaaagaaaagaaaaagaaatagtgattgttcatccatgtaatcatatacagtgattggttctgactattagttaatcattggctgcctacccgaattttacacaaggact

SEQ ID NO: 10430 - DNA, 430 bp, Glycine max
  Clone ID: LIB3092-022-Q1-K1-A10
cccacgcgtccgctctcccttttcttccttcgtagatcgaaagggaatcttcttggatggccgccaagcggattctgaaggagcttaaggacctccagaaagaccctccaacctcttgcagcgccggtcctgtagcggaagatatgtttcattggcaagcgactataatgggtccccctgatagcccttatgctgggggtgtttttctagttactattcattttcctccggattatccattcaagccacccaaggttgcatttaggactaaagttttccacccaaatatcaacagcaatggtagtatttgtcttgatatcttaaaggagcagtggagccccgccttgacaatatctaaggttatgactgtactgaactttttaacactaatcttcattgggtgcaatacagcaacaaataacaattcata

SEQ ID NO: 10431 - DNA, 315 bp, Glycine max
  unsure at all n locations
  Clone ID: LIB3092-022-Q1-K1-A11
tgaatgaatatcacaatctgcttcattgcttactaccgctgaaagcataagggcgcttatgganaacgattctaggtaacaacgatattaatttaataacacgatatccaacatgcaatgcttgctttgagcaaaggcaaacttttaactaagaaagtcttgcttaagtattgaatgaccaagttaagcacaatgctcactatttactgagcattcgtacagatcatcacaccattgggttatctctcgcacttgctcaatcattgacatcagggttccatgctggcagctattatgctataaatcctattgatg

SEQ ID NO: 10432 - DNA, 417 bp, Glycine max
  Clone ID: LIB3092-022-Q1-K1-A12
cagggttaagcggtgagatttgcgaatctgataaatggcggattcttctcgggaggagaacgtttacatggcgaaattggcggaccaggccgagcgttacgaggagatggttgagttcatggagaaggttgcaaagactgtggaggttgaggagttgacggtggaggagaggaatctcctctctgtggcttacaagaacgtgattggtgcgaggagggcttcgtggaggatcatatcctccattgagcagaaggaggagagcaggggcaatgaggaccacgtggccattataaaggagtacaggggcaaaattgaggctgaactcagcaagatctgtgatgggattttgaacctccttgagtccaacctcattcctttcgctgcatctcccgagagcaaagtcttttacttaaaatg

SEQ ID NO: 10433 - DNA, 80 bp, Glycine max
  Clone ID: LIB3092-022-Q1-K1-A2
cggggccaaccaagccttccgccaacgcttacgaagaaacaatggaccccctttctgtcttgtgcaccggagcccttctc

SEQ ID NO: 10434 - DNA, 314 bp, Glycine max
  Clone ID: LIB3092-021-Q1-K1-G2
cggacgcgtgggcggacgcgtgggtttctgcgcgaattttgctagaaaccgttagtgggtgtccgcaaaatactagattttcgattcgtttggtgaacggatttttaggtgtgattattacgttttttttttgttcaacaagctatggaggtttcggtgattggaagctcacaagcgaagctgggcgcgtctgaattggcttctagggaagttggattttgtaatctgaagaacaatttaagggttttgaatgatagagttagttttggtaggaataatatacggtgggagaaggctgggattagtttcacttt

SEQ ID NO: 10435 - DNA, 414 bp, Glycine max
  Clone ID: LIB3092-021-Q1-K1-E5
ttcacattttagaagaataccccctcttttgctgcatcagaggagttgtaaattaagagcatggctgcacaagctcttgtatcatcatcttctcttaccttctcagcggaggctgcaagacaaagtcttggaccaagatcactccaatctccatttggcttctccagaaaagcctcctttcttgttaaggcagctgctaccccccctgtcaagcaaggatcagacagacctttgtggtttgcatcaaagcaaagtctttcttacttggatggcagccttccgggtgactatggatttgaccctctgggactttcagaccctgaaggaacaggagggttcattgagccgaaatggctagcatatggtgagataatcaatggtcgttatgcaatgttgggtgcagttggtgcaata

SEQ ID NO: 10436 - DNA, 405 bp, Glycine max
  Clone ID: LIB3092-021-Q1-K1-E6
caagtgtttctgtaaccatggcatccaccactctatcccctacaaccccttctcagctgtgctcaggaaaaagtgggattttcagttcctcacaggcacttcttgtgaagccagtgaagaggcagatgatggggaagagcaagggattgagaattgcatgccaagccaccagcatttccgctgatagagtccctgacatgggcaaaagacagctcatgaatcttcttcttcttggtgccatttcactccccactgctggaatgcttattccctacacctacttctttgtccctccaggttcaggttcttcagctggcggtactgttgccaaagatgccgttggaaatgatgtaattgccgaagattggctcaaggcacatggacctggtgaccgaacccttacac

SEQ ID NO: 10437 - DNA, 388 bp, Glycine max
  Clone ID: LIB3092-021-Q1-K1-E7
cccacgcgtacgtccacgcgtccgtaaaaaacttccattaccaccaaacaactcccctgggcggtaccattataagaaggagtcagaccttgtcgttccaacccataaactaagtttgctgaatagagcctgtgttatcaaagatcggcaacaacaaatagcctccgatggttcagcatcaaatccatggaaactctgcacagtacatcaagtacaggaactaaaagccattattaaagtgattccctcgtggtctacagggatcatgatgtaagataacattgcaggctcatttggatcgctgcatgctaagtccctggacagacacatgacctcacactttcaagtgccacctggctcttttagtgtagtcatggaacttacaata

SEQ ID NO: 10438 - DNA, 417 bp, Glycine max
  Clone ID: LIB3092-021-Q1-K1-E9
agaaattggtcgaagagggtaaagtcaaatatattggattatctgaagccagcccagatacgataaggagagcacacgcaattcatcccatcacagctgtgcaaatagagtggtctttgtggactcgtgacattgaagaagagatagtccctctctgcaggttagttcaagttcatggcactgcagctcttcttgaaaggagggaaaagaaagtggtttagttgttgttggctgtatttttgtgttaatgcgacttcaattttttaatgcttatattggtttcagggaacttggtattggaattgtaccatatagtcctcttggtcgtggcttttttggcggcaaaggagttgtggaaaatgtgcctacaaatagctccctgaaagcacattcacgctttcaagccgagaacttaga

SEQ ID NO: 10439 - DNA, 149 bp, Glycine max
  Clone ID: LIB3092-021-Q1-K1-F10
gcatagccagtgacacttggggttaggccaaatcatggtcaggctggtagagttagctaacgagcgcctgcatcaaacggatgtgaagaaccatatatagggcgtacaataataggtactgaaaatgctgggctatgatatacatatga

SEQ ID NO: 10440 - DNA, 187 bp, Glycine max
  Clone ID: LIB3092-021-Q1-K1-F11
cgttgattcaattcaattgtggtcctgccggtgccttatctgactcgacgatgtcatcaacgtgtgcaggcgaatccaggaggtacatcactataccaagaggacgtcataatttgactacgcaaaacaagcctgagatttacgaagccattgcgctatgttatactgattgctcatagtctattga

SEQ ID NO: 10441 - DNA, 190 bp, Glycine max
  Clone ID: LIB3092-021-Q1-K1-F12
gcttaaccaatctcaattgtggtcatgccagatcattgtctggctcgtcgatttagtcaacgtatggctgcatcaacaggaggtgcagcaccatatctagagcgcacaataattgagcctggcaatacaagcgctatgatatacgtatccaaaggccaaggttcatatgctagttcttatggatctattt

SEQ ID NO: 10442 - DNA, 401 bp, Glycine max
  Clone ID: LIB3092-021-Q1-K1-F2
attagcaggagattcatgcctgacaaagggtcttttgaatatgatgcgttagctaagaaccgtgagaaggagtttttgaagactattactggcaagaaagagaccctcattgaccttacaattatagaaattttatcaaggcacgcatctgatgagttctaccttgggcagagagatggcggtgactactggacttctgatgccgggccattagaggcctttaagaagtttggaaagaatcttgaagagattgaaaagaagcttatagagaagaacaataatgagacattgagaaaccgctatgggccggctaaaatgccttacactttgctctatacttctagtgaggagggattgactttcaaaggaatgtccaacagtatctttatctaaggactcta

SEQ ID NO: 10443 - DNA, 433 bp, Glycine max
  Clone ID: LIB3092-021-Q1-K1-F3
ctttccaacaattagcaaaacatttgttaaacgatggaagtaatgtgtggtgccaaagttggcaatatggtccataaggccaagccttatgtgttaactgtggggttgcaatttgggatggctgggacatacctcttcaccatggccagtttgaaccatggaatgagccgtttggtgttcattgtgtatcgcaatgccattgctgcattggcccttgctccctttgccttgatctttgaaaggaaagttagaccaaagatgacatggactgtcttcatacagatattagtacttggatttcttgagccagtggttgaccaaggattcactttcttggggatgcaatacacttcagcttcctttgcatccgctgttatgaatgccgtgccctctgtaacctttgtgcttgcagtaattttcaggttagagcata

SEQ ID NO: 10444 - DNA, 369 bp, Glycine max
  unsure at all n locations
  Clone ID: LIB3092-021-Q1-K1-F6
cccacgcgtccgggaacagcagagaaacatatttagaagtaaagaagatcatggcttgcggtggcaaccttggctgctgttcaaccagctacgatcaatggccttgctggaagttccctctctggaactaagctctctttcaagccctctcgccacagtgtcaaatccaagaacttcangagtggtgccgtggtagcaaagtatggtgacaagagtgtgtactttgatttggaggatctgggcaacactacagggcagtgggacttgtatggctcaaatgcacctttaccctacaaccctttttagagcaagttcttcgagacaatttgctgctccattcacaaagaaggggattgttactcaagtttc

SEQ ID NO: 10445 - DNA, 442 bp, Glycine max
  Clone ID: LIB3092-021-Q1-K1-F7
cgaacccatcatctcaatctgcttcttcactctaatcgaatcgaaccacccttcaaatggcgcatcaaaatcgaagcttatacatatacatacaccacgcgtgaatccaacggtgatgatgaccgggaagcaaggtttcttctctctgcgaggctcactcctcttcctcgcagtcctcacacttttatctttcacctacctttccctcaaatactccaccccaacaccccaggtaccaaatttctcatttttctccaaaccccatttcgaaatttctcatttttcgccgttttcaagattacccttttgctctaggttaccaacctctcggtcgagaaactcaacgacgcgccgggaaccgagaaggaagaagaaggaagaggagaagaagaagaggttccggacacgttccactcgccgcgcgtattcaagctgaactatg

SEQ ID NO: 10446 - DNA, 239 bp, Glycine max
  unsure at all n locations
  Clone ID: LIB3092-021-Q1-K1-F8
aacacccacncntccncccactcctncngtcttctacccactgaagtcnaacccctattttcgccgtctctaattacttctcaagttcttcttcaacaagcactgtttgcccccaaactaaatttcccttcttcttctcgtaacgtcgcgttaatttctaaggttccttccaccccaatttcatagcgttgcactcccctcattgctaagcctagtttcctagttaaaacttacaccaa

SEQ ID NO: 10447 - DNA, 404 bp, Glycine max
  Clone ID: LIB3092-021-Q1-K1-F9
ttccaaaaccctaatccttcgtcttccaaggagatggctgattctcccctcgcaaggaactggaggtcaccttccccatggaaagctcagtcgagatcgagatctacgtcaaggtcgagatctaggtcgaggtctaggcctagacaaaggccatgatcgcgttctagaagtcgtggcaggtcaaggtcaccaattcgtggaaggtcaaggtcaccaattcatggaaggtctgaacctacaaatcctggtgacacactttatgtaactggtctatcttcgagggtcaccgaaagagacctagaggagcatttctccaaggaaggaaaggtttcttcatgttttcttgcggtggagccccgtacacggatttctcgtggttttgcttttgttacaatggaatctgc

SEQ ID NO: 10448 - DNA, 431 bp, Glycine max
  Clone ID: LIB3092-021-Q1-K1-G1
gctttgtgaaacataaagttaaagcagggcatattgcagagggagcaaaccgaatatttcaaaacttgttctactttttattatcactgttgcatttatttcagatatttagtatttgcctacaagtttgttctttagtttaaacacagacaagacgactctttatggcggctataaccaatttgaacttttcttccttgtgtaaaaaaaggttttgtgtgcgtttgtgcgtgttggagttggctttttgaagtgggtgcatgctgaagttatatgtgtatgtgaaagatgaagaacaatagagataaagaaaagggtaacgacgttgaccagagttacagacagcatcacacgttgtcaatgccaatgatgttttctggtttgaacagaaagaaggagatgtcagccatgatctcttgtttgacacatgt

SEQ ID NO: 10449 - DNA, 418 bp, Glycine max
  Clone ID: LIB3092-021-Q1-K1-G10
ggtgttagttcatcttcacttttcttcaacaccatctttctctttctttttatttttatatgtgtgtcaattgttcgattcttttggtgttccagggagatcgattgataccgtcccgttgattttccaattcgacgaataagggtatcacatctcttaatcaaccatgtttacccgaatttttggtaaacctaaaccggaagtcaatactctaaccgctttagacgagttaaatgacaaacttgaaatgttagagaaaaaggagaaagtactcctaaaaaaggctgcagcagaagttgaaaaagccaaagaattcactagggcaaagaataaaagggcggcaatacaatgtttgaagaagaagaggctatatgaacagcaaatagagcaaactggcaattccaagtgcgtattcatg

SEQ ID NO: 10450 - DNA, 414 bp, Glycine max
  Clone ID: LIB3092-021-Q1-K1-G11
cccacgcgtccggaaacttaatcgatcatcacttcacttcactaatacatcatggcagacgagacccagaacaagtatgagagctctgaggttgaggtccaggatcgtggtgtttttgactttctcggtaagaaaaaggatgaagaagacaagcctcatcctcaggaggaggtcatcgccaccgagtttcaaaaagtcactgtctcagaccaaggagagaacaagcacagcctcttagaaaagcttcaccgatctgacagcagctctagctctgtaagcttcttttcctttattttctttgcatgcataaacattatatatatataacttggtcatccttgaaggaataactttatattaacttggcttttttttttaatatttattttataatttaaaccaaacttaatttta

SEQ ID NO: 10451 - DNA, 388 bp, Glycine max
  Clone ID: LIB3092-021-Q1-K1-G12
cccacgcgtccggaaacttaatcgatcatcacttcacttcactaatacatcatggcagacgggacggagaacaagtatgagagctctgaggttgaggtccaggatcgtggtgtttttgactttctcggtaagaaaaaggatgaagaagacaagcctcatcctcaggaggaggtcatcgacaccgagtttcaaaaagtcactgtctcagaccaaggagagaacatgcacagcctcttagaaaagcttcaccgatctgacagcagctctagctctgtaagcttcttttcctttattttctttgcattgcataaacattatatatatataacttggtcattcttgaaggaaataccttatattaaacttggcttttttttttaatatttat

SEQ ID NO: 10452 - DNA, 331 bp, Glycine max
  unsure at all n locations
  Clone ID: LIB3092-021-Q1-K1-E3
aaaaaaaaaccgacccacgcgtacaaacacgcattcnatatatttatacactcatttatttttaaaaaaaacacatacccaaatcccgccgttttataacaactaccaacatccataatataatctacttcaacaagaaatttcattataaatttcatccccattcaaacacaactcactactaaactcccactaaaaatctaacattatctacaaccaatcttctacccatcacttaaaaccccgacacaaccccacatttaaatacaaataatttcataacaacccttacctcaacatcaacccccacccccatcacaaattctaccat

SEQ ID NO: 10453 - DNA, 432 bp, Glycine max
  Clone ID: LIB3092-021-Q1-K1-C4
attctcattgtccctgttttttgtttggaggggaaaaaaagatattctttcttctttttgcggaaacccaataaagcgaaatcgcaaagggtgtcttggaaaagggtggtttcattaaaaagcagggatctttgggggggaaagagaagagaataggggcaagctttgttttggggcaatgggagatttggagaagcaagagagggtggaagaggatgcggaaggagagaaggagaggcttttggagggtatggcggttttggattttgacatgctttgttcctctgtggcgttgcaaagttcgcatgggagttgggggaagcttgggggtggggatggtgatgaggagcaacaaagtggggttttgaggatgtgggagggtgaacttctcgattgctttgatgatcgccgcatcgcttttgaatctgcatg

SEQ ID NO: 10454 - DNA, 443 bp, Glycine max
  unsure at all n locations
  Clone ID: LIB3092-021-Q1-K1-C5
acgcccacgcctncnanaaatcccttgttgccttctgacccttaccagagagctcaggctagagggctggctgacttggtggccaataaaattttgatcttggaagaaaaatttggaccttaaagggagaaaaaaaaagaacctgccaaaaaggagttcatagaggcccttaaattattggaggaacagctgggagacaagacttattttggaggagacgatctacgttttgtggatatagcacttattccattcgacacttggttcaagacttttggcagcctcaacatagagagtgagtgccccaagtttgttgcttgggccaagaggtgcctgcagaaagacagtgttgccaagtctcttcctgatcaacacaaggtctatgagttcattatggacataaaaaagaagttcgacattgagtaggttcatgtttgatttta

SEQ ID NO: 10455 - DNA, 466 bp, Glycine max
  Clone ID: LIB3092-021-Q1-K1-C6
ggccggccgacgcgtgcgaaaaagcaaataataaaaatattattttttgtatttagaactgatttgaacgaaaaaagaacggtttatttaaatagaacaaagtgtattataataaacgaaatccgtaaaaaagttcctcgatggtcatacaaatttattgacgaattgtaacaactggaaggaaaaaatgaagcagagaattatcaaattcgttctagaaaagccaaacgtgtattaattttgactaataaatctaaattttttaagaaatacgatacttataatcctacaggaaatactgataacgctgaaaaaaaaaaaaatgaattggctttaatacgttattcccaacaatcagattttcggcgagacataatcaaacgatctatacttgctcaaaggcgtaaaacagttactcggaaaatttttcaaaaaacggtgcattcccctctttttttggataaaa

SEQ ID NO: 10456 - DNA, 387 bp, Glycine max
  Clone ID: LIB3092-021-Q1-K1-C7
cggacgcgtgggcggacgcgtgggcttgaacctcttaccgtgcgcatcttctcaatccagtggcaacttcgtcaccgtgggaccgaaaccaatcgccacaaactcgggatctcagattcgacgcgccaaaccatgttgaaggcgcgtgtctacacagatgtcaatgtccttcgccctaaaaagtattgggattacgagtctctcacccttcaatggggtgatcaagatgattatgaggttgtgcgaaaagtgggcaaggggaaatatagtgaagcttttgaaggcgtaaatgtcaatagcaatgagcgctgtataatcaagattctgaaacctgtcaagaagaagaagattgatagagagataaaaatacttcataatatgtgtgga

SEQ ID NO: 10457 - DNA, 126 bp, Glycine max
  Clone ID: LIB3092-021-Q1-K1-D1
cttttctgtcttaaggctgaaaccggggcatttctgctatacaagcaagagctactttacggggagttgcttatacaagtggccaaatctctaatactggttcactcaccatttgctcaaataccc

SEQ ID NO: 10458 - DNA, 387 bp, Glycine max
  Clone ID: LIB3092-021-Q1-K1-D10
acgctcaaacacacaagccaaacccaaacacaacatcacaaagaaaaaaagagcacaaacagaccgattccaacggttgaatgttttggctgaagacaccccaccgacgttagtcaaataaaacatgtcttgctccgtcgcggtttccaattcgccggtgttctctccttcttcttccctcttctgctcgaagccctccatcatctcttcttcgccggaatccctctcgctctctctctcgcatctcaaaccttccaactcttctacgacgtcgtcttgttcttcaccctctgctgctgcttcttcatcttcttctccttcttctccgtttcggcttcgccttcccaagcctcccaccgtgttctctgcttcttcttctgcttcgtc

SEQ ID NO: 10459 - DNA, 206 bp, Glycine max
  unsure at all n locations
  Clone ID: LIB3092-021-Q1-K1-D11
gactcacgcaccaggcttatctacgacgccatggactgaactgcagccttgcacatatacggagccngctctactggacaggctactctggccagagactgcatatgtgctgctagatgggggctcgcttccagactactgcacaactactccgtttgaagatactgcgcatgtcactggtcaaattacaacatagggcatctcac

SEQ ID NO: 10460 - DNA, 460 bp, Glycine max
  Clone ID: LIB3092-021-Q1-K1-D12
ctgcagatcaatctgatcaaggaacagtaactgttgcttgtcctggaactggggagcaaaggggatatgatttgtgctcagatctcaatgtggatccaccaccatgcattgatgatgataagggaatggaacctttgtctactgatacaaggccaaatgcagaggcacatgttgatgtcaatcgagcttctgaagaaggcaatgtttgtgatggtaattcaatggcttgggaggctcttgatttaaatcctactcgagagttatgccaagaaaattcaacaaacgaagattttgatgaagaatcctttgggagagaaaggcccgttggactattaagtgcaagcttgttgtgaaaaattcttcaggtagttatttacctcattttgggcattattcgattggataatgctctttttgcccgttggcttacttgtatctaaaatatcatagcacctttgtt

SEQ ID NO: 10461 - DNA, 408 bp, Glycine max
  Clone ID: LIB3092-021-Q1-K1-D2
gccagcctcgacctagaccttcaatgattcgcagacaaataaagaactaatgagaccatttgtaataataataaaaatcacatgagataatgagatatgtttttataaataaataaggaacaaaaaagattgacaaattatatttcaaagaaataaacatattttaacccatccttatctgtagtatttaaagagcagtaatgggtttagatgagtttttcgcatacttaaaaatgaaaagaagcactcactcgtgaaccccacgcagtggtcgataatcaaatcttctttctttttcttacgcagtcccaaccttcatggattcttactcacacatgattgcttggggctctggtgaagatggtcagcttggaatcggaagcaacttagagaaagaatgggtttgtc

SEQ ID NO: 10462 - DNA, 205 bp, Glycine max
  Clone ID: LIB3092-021-Q1-K1-D4
tgaaattttaaaaatgactgggataaacttaaaatcaattatgaatgaataagtagcattaatggatggcgatggttaaaaaatgagactactccattttattatttgattaccacacttgttgtttaacatttttttgatttaaaaattttcgaaattgatctatttatatgcaataatctactactttgcctgagtttgcctg

SEQ ID NO: 10463 - DNA, 245 bp, Glycine max
  Clone ID: LIB3092-021-Q1-K1-D5
cccacgcgtccgttactgctgaagatgtgaatgcagcattcagaaaggcagctgagggtccagtgaaaggtgtgttggacgtgtgtgatgttccacttgtgtctatcgacttccgctgctctgatgtttcctctactattggactcctccttgactatggtcatgggagatgacatggttaaggtggttgcttggtatgacaatgaatggggttacagccaaagggtggtggatttggcacacct

SEQ ID NO: 10464 - DNA, 446 bp, Glycine max
  Clone ID: LIB3092-021-Q1-K1-D6
cccacttctactctactcattccacacccaacttacaaaaacccattcttttgctcactcattttcttaacgtagattaatcattatgtgtggcggtgccatcatcgctgacttcataccccgccgtggaggccgccgcctcacggcctccgagctctggccaaactccttcgccaaagacgatgactttgacttggattactcccacatcgctacccaacaaccctccactctcaaaaggtcccaacctcccaaagttagcgagcaggttgagaataagccggtgaagaggcagaggaagaatctctacagagggattcggcagcgtccgtggggcaaatgggccgcggagattcgcgatcctagaaaaggggttcgtgtctggttgggcacctttaacaccgcagaagaagccgcgagagcctacgatcgtgaagctcgaaaaa

SEQ ID NO: 10465 - DNA, 435 bp, Glycine max
  Clone ID: LIB3092-021-Q1-K1-D7
acgttgattctttttcttctatagagacacactgttagagtctcagagcaataaacacccttcgattgctaccactaaaggggacattgtttactattctacgtacggacatgttgagaagttagctgaagagattaaaaagggagctggttccgttgaaggtgtggaagcaaagctatggcaggtacctgaaacactttctgaagaggtccttgggaagatgggtgcacctccaaagagtgatgtaccgattattacacccaacgagctacctgaggctgatggcttattgcttggtttccccacaagatttggactgatggctgctcaattcaaagctttcatggatgcaactggaagcctgtggcgcacacaggcactagctggaaagcctgcaagaatcttttacagcactggttctcaaggaggtggaca

SEQ ID NO: 10466 - DNA, 91 bp, Glycine max
  unsure at all n locations
  Clone ID: LIB3092-021-Q1-K1-D9
ttctttctctcttctctctctgtccgaagatggcttcacgcangttcgtatcttctctgaggcgagtcctccttcgtagatctcaatcaaa

SEQ ID NO: 10467 - DNA, 305 bp, Glycine max
  Clone ID: LIB3092-021-Q1-K1-E1
aataccactcccaccgaccaaaacgcgctttacgttgttatttaaacgtctctgaaactgatgggcgttgtcagcgaaaactcgaatccagacccagatgtgatacatcaggtcagggcttgaaatatggcattctaattacaacttatacgcgaactcatcgtccactatacttgaatgtagatggacacagaatttcccggtgttgattttcgaccacacctggacctcacataaccctacaagcacggatgcaacaatcgtaatcgacacttcgacgactacctgcttgtatagttcaacga

SEQ ID NO: 10468 - DNA, 259 bp, Glycine max
  Clone ID: LIB3092-021-Q1-K1-E11
caagagagtgaccatcatgcccaaggacattcaactcgcacgccgcatccgtggagaacgtgcttaggcttataataatgataatagcatagttgtcgccttttcgttttgcaatacatttcttgtttcttagggttttagtgttattttccagtttgttatgttttgtatagaagatagatatatcaacagcaacagcttcttaccatttgtagtgtgcctaaacggaaatatttgaataattagattcactttggcc

SEQ ID NO: 10469 - DNA, 406 bp, Glycine max
  Clone ID: LIB3092-021-Q1-K1-C3
ctaacaaccacttatcccctttctccttctaacgagtgaggaaaaatggcgcgtaagaagatcagagagtatgactcaaagaggttgttgaaggagcactttaagagactctctggcaaggagttgccgatcaagtctgcacaaattaccgcatcaactgatttcactgagctacaagagaaggaaccctggctttcatcttctaaattggttgttaaacctgacatgttatttggaaagcgtggcaaaagtggtttggttgccttgaatttggattttgcacaagttgtttcatttgtgaaggagcgtcttggaaaagaggttgagatgagtggatgcaaaggacccataacaactttcattgttgaacctttcatcccacacaatgaagagttttaccttaaca

SEQ ID NO: 10470 - DNA, 255 bp, Glycine max
  Clone ID: LIB3092-021-Q1-K1-E12
acggtacaggatgaccataatgcccaatgtcatctatctctgtcgcggcattctactagtatgtgcttaggatcatgctcaggagtatgacctgcatgatgactactgcactgataatgcacacattgctcgttatggacatacgtgtcgtgactgagctcatgtagctcactgatgtagacagatgcgtcgacactagcttctcttgtgcatacgaacctgtacgtctcagaggtgctgaaacaagcagagatc

SEQ ID NO: 10471 - DNA, 308 bp, Glycine max
  Clone ID: LIB3092-021-Q1-K1-E2
cccacgcgttcgatatatttggttattcatttatttttagaaaaagtggtgagccatatggggtttgacgagcacgaggaccaacagcaagaagaggaggtggaggaggaggaaatgggattttcagtggcggcggcggcgagttacaactcgttgggaaactgccgtgtgaggcctaaaattatcggctgtgatggtgttgcagacaccgagaatttcggtcggaaagggacggtgagatacagagaatgtcataagaaccatgccggctgtataggcggtcacgccgatgacggatgctgcaagtt

SEQ ID NO: 10472 - DNA, 284 bp, Glycine max
  Clone ID: LIB3092-021-Q1-K1-A12
attagtgttagggacttcattatcgactctgtatgagttataacatcagatatgcttacggagaagcttttatacaacacgactatcgatcatgtatctcctgaggcttatgatccatcgtaaccaactgcgaaagtgctgtatcctgatctgacaggctttatgtcctttgaagagcatcatcggaaagaagaactagcatgtggaagtatctgacaacaccactcataatgctttcgcgaacgtgaattatgctagtgcaacggatttactcaaggtagaca

SEQ ID NO: 10473 - DNA, 316 bp, Glycine max
  Clone ID: LIB3092-021-Q1-K1-A2
gagaagcacagttcgaaggaactaatagcatgggtcatctagcctcctagggtgctgcctgagccgctaccatcaatggccgtgctgcaagctccctatctggaactaaggtgtctcacaagccctataggctcagtgacaaacgcaaaaacttccagagtggcgccggggtaacaaagattggtgacaacagggggtacttggatcagtgggatcggtgcatcactacatatcggggagacttgaatggatcacatgcacctcaacgctactaacgtcttgataacgagttatgttacacattcgctgctacatg

SEQ ID NO: 10474 - DNA, 330 bp, Glycine max
  Clone ID: LIB3092-021-Q1-K1-A3
cccacgcatacgaaaaaatatatttacacataaatattatcttttttctctacccccatatctctccccgcccctttatacaatacccccctccaaaatcctatctctaactaaactctctcaccatcattaaaaaccattttacaaacaaacaaacttcctcaattctcctacattcacaaacattttttacaacaccaaataccttaatcattaacatctatccaacactacatatcatcaaaacctaaatccatcatatccactacaacccatctaccctcttcataacaaattattctacacatttactactccattcacaaacac

SEQ ID NO: 10475 - DNA, 397 bp, Glycine max
  unsure at all n locations
  Clone ID: LIB3092-021-Q1-K1-A6
atancaacaccaaaaaaaatggcacttgtgagccacgtctgtgtgagatgtgtagccggacgcacttgcccagagtgccgaaattcggcacccttgccagacccaacgcaaaccaaggttctccttccgaagaagaagcctcataaatggtccaccggagtggctcccggagagtacgggggtcctcccaccaccaccaaactgcgtaaatactgaggcggcgatgacgaacaccctttggcctctgatgactatatgtggaacaaggagtttatgggtcgctatcaaaagttgattgatgaacccaatgctcaaacccctcctgcataagaagaggcttcagggtttctaagcttaaatagagtcatgaacctggacaggttgcgaagtgatttga

SEQ ID NO: 10476 - DNA, 399 bp, Glycine max
  Clone ID: LIB3092-021-Q1-K1-A8
ggaacattttgtctcagaagttgggaacagtgagcctgccaaaaggcaacgcaggtggaacactgaaacagttaaaggtccagatgcacaaagcactactcccaggcctgctactacacctagagatgagccaattactttgaaacgcagcttctctaggtctgattcctctgcaactgatgatacacctaaagaacacattgttccaccatcacaaaggtccccaactaattccctcagaattgaccgtttcctccgtccatttaccctaaaagcagtgcaagaacttcttggtaagactgggaatgtcagcagcttctggatggaccaaataaagacccattgctatgttacttactcatctgtggaagaagctattgagacacggaatgctgtata

SEQ ID NO: 10477 - DNA, 338 bp, Glycine max
  Clone ID: LIB3092-021-Q1-K1-B10
cggacgcgtgggacaagatgggcaaattcaatctgtcccatagagttgttttggcaccgctgaccagacagaggtcttacgacaacgtcccacaaccccatgccatcctctactactcccagagaacttccaacggaggccttctcattactgaagccactggcgtctctgacacggctcaaggctatccgcagacccctggcatatggactaaagaccatgttcaagcttggaaacccattgtcgatgccgtccacgccaaaggcggtgttttcttctgtcagatctggcacgttggaagagtttcagattcaagttatcagcccaaatgacaagca

SEQ ID NO: 10478 - DNA, 461 bp, Glycine max
  Clone ID: LIB3092-021-Q1-K1-B11
acgcggacgcgtgggacacgatgggcaaattcaatctggtccatagagttgttgaggcaccgctggccagacagaggtcttacgacaacgtcccacaaccccatgccatcctctactactcccagagaacttccaacggaggccttctcattactgaagccactggcgtctctgacacggctcaaggctatccgcaaacccctggcatatggactaacgaccatgttcaagcttggaaacccattgtcgatgccgtccacgccaaaggcggtgtcttcttctgtcagatctggcacgttggaagagtttcagattcagattatcagccaaatggacaagcacccatatcttctacggacaagccactcacaccccaaattcgaagtaatggcattgatcaagtacaatttaccccttcaaggagattaaagactgatgaaattccgcatatttgaaatgac

SEQ ID NO: 10479 - DNA, 281 bp, Glycine max
  Clone ID: LIB3092-021-Q1-K1-B12
cacacgcttgctacaagatggacacattcattctgtcccataaacttgtcttgtcaccaagggccgggcatacgtcttacgacaacgtcccacaacttcatcccatcctgtaatactaccagatcacatcacaacacatgctcttctcacatactaaatccactgtcttatcttacacggatcaaagctatccttatacctctgccatatcaactaactaccatgatcaacctttcaaacccattcgcgattcctcacaagctactggctgcattaacttc

SEQ ID NO: 10480 - DNA, 281 bp, Glycine max
  Clone ID: LIB3092-021-Q1-K1-B2
cccacgcgtgcgctcacgcgtgcggaggcgatctggcttccagattcgactacatgcgttggtgttccttattagcacaaattcgctcactgaacaacggggttagttaactgttgagattaacaaggcgttcttagtcacacatgaagaatcattgcatttggtgaagctatacatgcgcacttgtgctactgatcgctcacgaccggtcctgctgcctatttggagcaatatcttataatgcgcaggctgtcgcaaacctggcagactcgatagctgtt

SEQ ID NO: 10481 - DNA, 423 bp, Glycine max
  Clone ID: LIB3092-021-Q1-K1-B3
gatcttcgtgatgagccattcaatgagaagtcagatgtttacaggtttggtgtcatctggtgggagctcgcatcattgcatcagccttgaagtgatttgaatccgccacaggttgcggcggctgttgtctttaagggaaaaagacttgagataccacgtgatttaaatcctaaattagcctcaataattgaggcttgttggtccaacaaaccctgaaaacgcccttctttttcaagacttatggattctttcgaaagtattgctgaaatcccctatgctgtaacctggtcgttcaagcatgtcattacttacctgtatggacggaatcattgctgttatttatgcacatactacagggattttagttgtgatgttcaacatgaatacactgtttcactagtaccatacgcacagatgtacatt

SEQ ID NO: 10482 - DNA, 442 bp, Glycine max
  Clone ID: LIB3092-021-Q1-K1-B4
gatgcaggaagaggaacatgcagatggttcaactaggggatcaagaaatgagaatactgaagagtttatccaaaattaatgcatatgaacaagaactaatgactgtgaatgagaagttaagactttcagaagaagaaattactaaacagaagattgagcttaaaaatacagactcttcaatacagaaaatttggaggctggttttgagtcatcactaacgaaaaaacacatcaatgaaggaggggaagcacacaagatgatagaggttgagggaagcattgatggtgtggataaggaattgtttgaccaaaatggtgagatcgagacgcttgcgagggagctaagaattaccaaagaaaatcttaaagcttcggaaatgcaaattacttcactgaaatttgaagccaataaatcatctgaaagaattcagcaattacatgat

SEQ ID NO: 10483 - DNA, 122 bp, Glycine max
  Clone ID: LIB3092-021-Q1-K1-B5
gaaccgcccatacatggaatacgttgagtagtcaagcagattctgattgaagctgttcgtggggtcacattaatcaatggggaatcatttggattaattttttttaacggaaaagttcaagg

SEQ ID NO: 10484 - DNA, 437 bp, Glycine max
  Clone ID: LIB3092-021-Q1-K1-B6
gaagagaggagagggggggagaaggggttgcagagagagagagagagagatgtcatcatctgcagacctggacaggcaaatagagcagttgaagaggtgtgagcctcttaaggagtctgaagtgaaggcgctttgcctcaaagccatggaaatccttgtcgaagagagcaacgttcaaagggtcgacgcccctgtcaccatatgtggtgatattcacggtcagttttatgacatgaaggagcttttcaaagtaggaggggattgccccaaaactaactatttgtttctgggggattttgttgatagagggttttactcggttgaaacgtttctgcttctgctcgctcttaaggtgaggtatccggatcggataacactcattaagggaaaccatgaaagccgtcagatcacccaggtgtatggattctatgatgagt

SEQ ID NO: 10485 - DNA, 384 bp, Glycine max
  unsure at all n locations
  Clone ID: LIB3092-021-Q1-K1-B7
gaaaaaccggccgaccgacgcgtacggacacgcntacaattttcatcatcttcttcttttttgacatcaatcatcaccacttccgccgctttttttgacaagatcgaattgccttttacaaaaattgaacctccaaagaaagaccctctttcccaactgactctacctccttgttaacccttttaccccaccgacaacgaacttctcgttcaacatctgtgccccaaagtcgctagccaccatttctctcttacaatcattacccaaattgacttgtacaaattcaacccaccaaatcttacaattaaaaccaatttcaatgaaaaaaaatagtacttttttagccccaaacacatgaaattccccaaccgtttttcacccaac

SEQ ID NO: 10486 - DNA, 367 bp, Glycine max
  unsure at all n locations
  Clone ID: LIB3092-021-Q1-K1-B8
cggacgcgtgggcggacgcgtgggcggacgcgtgggcggacgcgtggggaaggtatccgccgagaccaacagaggttgatctttgctgggaagcaactggaggatggaaggactcttgctgactacaacattcagaaagagtctactcttcaccttgtcttgcgtcttcgtggtgggttttgagtttgagaatggtctgcaggtcccttgtttggtgtgaactgaagtatgtgaaagtctataatctggtcttttctttttatatgttcctgaactttgtgtatgtgtgcatcccgggtccattagcggaccttgaaaagctatgaatgtgtacaatttgcaatcatgttttaatgaatntagtact

SEQ ID NO: 10487 - DNA, 445 bp, Glycine max
  Clone ID: LIB3092-021-Q1-K1-B9
acgcccaaatacaggcttatcaggaacggccttgacactaaggtagaaaagtcaaggaagcaaatgaaggagagaaagaatagagctaagaagattcgcggagtaaagaagaccaaggcttccgatgctgccaaggctggaaaaaagaaataagttttgagacaccctgttactcctaaggttaaattggttttggtgctttgtaatagttatttttatcttatgctagatttatagaatgagatgtcttggcgcaagtgttgatccttgttttaatttatgttcgatcgcttataacttcagatgttgagtacattgaacaattgagaactcgtgttttattttccttgctttctaataccttgtaagttcgagttgcgtaaattgggcctaaacgcagatgcatttatttgatttatatggaattgctcagagtttagttggt

SEQ ID NO: 10488 - DNA, 205 bp, Glycine max
  Clone ID: LIB3092-021-Q1-K1-C10
gactgactgacaaggcatcaatctcctgaaatgatcataacgggctccttgcacagatatcgagcgaactgaattacgacaactacaaggacaagaacatgacctatctgttgctcgatcggggctcgcataaatacttctggaaaacgaatccattggctgctattacagatggtacaagtcaaagtacgcgttggggaaacac

SEQ ID NO: 10489 - DNA, 366 bp, Glycine max
  Clone ID: LIB3092-021-Q1-K1-C2
gcagacttgagttccttatgatgggaaccgcatgtttcccaactactaatgttgttctcaaacctcaaaacttatctgggaatttctctaccctctgtgataactttcggtgtctgaggttcctcactccgaaaccgccccacctgcgatcctctcactctaagttgggaaatagagtaaagctgacatctttttcgatgtccaaggcaacccatttgaaggtttcacaagctgcactctcatccacggaagaatcactgtcttcatctcctcgggtaataggagaacatgacttgctcattgtgggtcccggggttcttggtcgtttggttgctcagaagtggagtcaggaacttccgggtagtc

SEQ ID NO: 10490 - DNA, 319 bp, Glycine max
  Clone ID: LIB3092-021-Q1-K1-A11
acgcttaagcttactacttgcattaacgactctgtctcagattcaccctcatttatgtctacagagaagccctgagagaacaagactaccactgctgtacctgcttcagcttatgatccagctaatcagctgcaaaggcacaagtggtgggctggccaccaattatgtcatttagaaagagcatcattcacaggaacagctatgaagaataggctgacaacaacccgaagaatgcttatgcgaacgtgaacctggatggtgcaccgtatatacgaaaggtggacataaagttgtacaagagctaccatgaactgacaga

SEQ ID NO: 10491 - DNA, 344 bp, Glycine max
  Clone ID: LIB3092-020-Q1-K1-F5
aggctgcctagatgttcaatggttacaaactaaatggaagagtgttgactgttaataaggcggctccaaaaggagcacagcctgaacgcccaccacgcccaccacgttcctttagttctggtttaagagtctatgttggcaacttgccatgggaagttgacgatgctcggctggagcaaattttcagtgaacatggtaaggctgaggatgctcgggtggtctatgacagagagactggtcgatcacgtggttttggctttgtcacaatgtctagtgagactgatatgaatgatgcaattgctgcccttgatggtcagagtttggacgggagggctatcagagtg

SEQ ID NO: 10492 - DNA, 311 bp, Glycine max
  Clone ID: LIB3092-020-Q1-K1-F6
ggccaccgtggtgaggatcccaacaatctcatgcatccacatccacacgttccgttcccaggcccctcgcactttcgccagaatccgggtcggacccaggtcgtgggctcctattcgggcatcggcagcgagctcggagagaggggagatagtattggagcagaagccgaagaaggatgacaagaagaagctgcagaagggaatcgcagagttttacgacgagtcttctggcttatgggagaacatttggggcgaccacatgcaccatggcttttatgactcggattccactggttcgctttcggatcatc

SEQ ID NO: 10493 - DNA, 167 bp, Glycine max
  Clone ID: LIB3092-020-Q1-K1-F7
ttcaatcttacaataccaattgctccagtatcttgcactaaacaacatggcggacaaagcagtcaccattcaaaccaggaagtttattacaaacatgcttctctccataaagcagctcatccctcatgtccttcatccaaggaaggctaatatttccaacgctgaac

SEQ ID NO: 10494 - DNA, 353 bp, Glycine max
  Clone ID: LIB3092-020-Q1-K1-F8
cccacgcgtccgcccacgcgtccggaccactaatatcatttcagcttaatttactcattcatgaacagaattccctcttgaatttcaaatttcactactttgcttccttagaaagaggaactacaattgatagctagcctccaccaaaacatattttagctgaaacccaccaagaaaaccgagggaaggtaccaaaacacataccaattatggatttgatgtcatccatcttcaattgctttgctccatcttcatcaagtcaagtctctgactatgccaaaggatcatctcaattgaaatctccttcttgagagaaaccaaagagcaaaccaaaatcaaaaggagctccaatc

SEQ ID NO: 10495 - DNA, 466 bp, Glycine max
  Clone ID: LIB3092-020-Q1-K1-G10
gtggtggtgatcataatcccttgggttctgttggaaatgatggagataggcatgcagtggaagaatattacaagaaaatggttaacgaaaatcctgcctatccattgcctaattctttatataacactttccccactcttctgtaacaacccttggccattcccttgtggtggccttccccggttccattatccatccatccaggttttccgcattaggtaccagttttccaactttggcccaaaaccttcccaatttgttgccccccttatacctatatactcccgaatatttcatgcttgaaaatatgagttgtaaccttacctcaagaactttctgctaagcatctttgctggtgggtttgttctagtagccatatttggagccgttattggggtttccaactttgatccggttaagagaacttaaagcccgcatgctccaatgctttttaatttcatatgtc

SEQ ID NO: 10496 - DNA, 208 bp, Glycine max
  Clone ID: LIB3092-020-Q1-K1-G11
gtgatcgtcaacattataacttgagttctggtggaaatgatggagataggcatgcagtgggagaatattacaagagaatgggtaacgaaaatcctggggatccattgcttatgaggaattatgacaatttcgggaatcttctgtaacaaccctgggccattccatggtggtgggattcccaagtgccattatcaaaccatcaaggttt

SEQ ID NO: 10497 - DNA, 255 bp, Glycine max
  unsure at all n locations
  Clone ID: LIB3092-020-Q1-K1-G12
gaccgcacgnnngtccggtggtgggtgaatcatttaatcccnnttgggttctaggatgggaaanntgatggagaatannggcatgnccagtggagagaaatnnattacannagataaatgngtgtaaggggataaatnncctggggaaaatccattgnntttctgaggggaatnntatgctannattttttgggtatcaagtaccannaacaagaaactgtgaagnnggagcagagnnngagtattnnattcccg

SEQ ID NO: 10498 - DNA, 227 bp, Glycine max
  Clone ID: LIB3092-020-Q1-K1-G2
cccactcttccttacttcttttccatagccttcgtccttcactctaatatcctggtctccaggtagatgaaccctagctgcaattggtccctttaatcaattacctcttaattagtaattacttaatcccaattaaccttttaatctcccacacaacaacataattggcgtgaaaaagtttgtctaaagagacatatctttcatcatatgaggatattccacacacc

SEQ ID NO: 10499 - DNA, 455 bp, Glycine max
  Clone ID: LIB3092-020-Q1-K1-G6
gtggtggtgatcataatcccttgggttctggaggaaatgatggagataggcatgcagtgggggaatattacaagaaaatggttaaggaaaatcctggggatccattgtttctgaggaattatgctaattttttgtatcagtacaaacaagactgtgaaggagcagaggagtattattcccgcgccatacttgcagacccggatgacggagaagttctatcacagtatgggaagttagtttgggagctacatcatgaccaagaacgtgcctccagctattttgaaagagcagtccaagcctctcctgaagacagccatgtacaagcagcatatgctagtttcctttgggacacggaggaagacgaggatggtagcaacgaaccacaatgtttgccgccacattctcttcaaggagctatagctactgcaggtgcttgaattggtggtgaagtttgt

SEQ ID NO: 10500 - DNA, 92 bp, Glycine max
  Clone ID: LIB3092-020-Q1-K1-G8
ctttctttattttctccttcctcttccttcttcttgtttcatcttccgctgcttgtgatcgctgcttgcaccaatccaaagcttcctatttc

SEQ ID NO: 10501 - DNA, 156 bp, Glycine max
  Clone ID: LIB3092-020-Q1-K1-H10
cggacgcgtgtgctagggaataaaccaagagatcatatacgtatacgcatgaattcatgagggaatcttcgtcacatctgtctgcaatatcacctattgctctttctccttactgccctatccactctcgacggagtttcattctctacattccta

SEQ ID NO: 10502 - DNA, 306 bp, Glycine max
  Clone ID: LIB3092-020-Q1-K1-H11
gcttattgctgctgctgctgccaagtctactgaaatgaagaagattgtgacccaaactacgggtgatttcatcccgttccgtgtaggcgcttcttctccacatggaatcactaacaatattgctctctcgcagaagagttccatctgcaggctccaagctgaatttccaatagcacgcaagcattcacttcaaagggttcttgaaaagcgtcgtgacaggcttgggagcaaggaaacttatccctccttatcaaccacaaaagtggctgaccacatataaaacaacttgtgtgctgacaatgcacc

SEQ ID NO: 10503 - DNA, 317 bp, Glycine max
  unsure at all n locations
  Clone ID: LIB3092-020-Q1-K1-H12
cccacacgtncatgccccctcctaaacctgtttctccaacagggatgcttattaaacccagggggtttattttgcgccatcttttgcccttttatcctacgttcggaacttattcatttgcctacgccaaaacaatgtgcttaattgccctttttgcagggcccctgccggattgcattaccagttttttaaaaaaatccaccaaaaatccgttgcgattggggatttatatgacaacccccatatcctataccacccttgctccaaccgctccaatagtagaaaacctcctttctttttttttttaaatttttccc

SEQ ID NO: 10504 - DNA, 295 bp, Glycine max
  Clone ID: LIB3092-020-Q1-K1-H3
gctttcttcagagcctgcacttgttccacccttcaacataccactcctcctcttccccaatgctcttatccgtaatctggcactcttcagagaagactttgtaagataaaaagagaaatggccttagaccagtattttgatgaggctgtgccccagttggattccttggaagataaatcgtctctcgaaacatggaaatgtggcagtgacgatattgcagattcggatagaaatgcctctggtggctttgattgcaacatatgcctggagtgtgtgcaagatccagtggtcactc

SEQ ID NO: 10505 - DNA, 329 bp, Glycine max
  Clone ID: LIB3092-020-Q1-K1-H4
ctgacgcgtatgctaaggaataaaccaagatatgatatacgtatacccatgcatgctgaggggagatcttcttcacatctgtctgcaatattcctattggtctttctccttacttgcctatccccttcggatggagtttcattccctacattactgaagcagttcatacagatgctgttgaagagccccaccctaaaagatttcctgaaacccaccactataggggatatttattatacgttgaatttcacagaaatctcctcttccgaagagagaagcgcaccaacggtgtctctcatcaaagattacttatcaaacttcggctacct

SEQ ID NO: 10506 - DNA, 398 bp, Glycine max
  Clone ID: LIB3092-020-Q1-K1-H5
gcaatgtgtatcatcaaatgcatttggagggccagcagaaagtaatgctgcaaactatggtgtggatggaaatgcagcggagagtgatcatgggagcaataatggacaggatggaagcaacaccttgacaatcagaatgataaatatggaaatggcaatgtggctgctgtgagcattggaattggtggcattgataggaaaagctttgggaatggggcagatgaaggacggcttgcattgagagaggctgccttgaccaaatttcgtctaaagagaaaagaaagatgctttgagaagaaggttcgatatcacagcatgaaaaaactagcagaacagcggccacgtattatgggacaatttgtcagacgaatagtgtctgaagggcaagaagaaaaaga

SEQ ID NO: 10507 - DNA, 369 bp, Glycine max
  Clone ID: LIB3092-020-Q1-K1-H6
cccacgcgtccgcgcccccacctgcacctgtgcctccaactgggttgcttatgaagcggtgcgaagttcatttggcgccttcttttgctctctaatctcgcgtttggagcttatctatttgctcgtgcaaaacagtgttgttaaattgccgctatggcggcgccatggcggtatggcataacaggtttttcaaaaaatgccaccaaatagcggtggcgttgcgggtttcatatgacagccgtcatagccttaacgaccgtggcagaacggcagaaatggtggaagactgctttttttgtttttttgaaattttcgcaatgggtcgtgttgggctgacccgacccaaccctaacccgatttttgcatgca

SEQ ID NO: 10508 - DNA, 229 bp, Glycine max
  Clone ID: LIB3092-020-Q1-K1-H9
cccacgcgtccggaggaaatagacttgaacactgacttcatttttgagcaaagatttaagagggcctattctgcaggagacattacttttgaacaactcgtaacatatagcagaaagcttgattatacagagattacaagaaatgatctgcgttgtgcagtatcagtgacactcctttccgaatatatagaccagaaccagaaccatattttgtgcttacagggaagaa

SEQ ID NO: 10509 - DNA, 368 bp, Glycine max
  Clone ID: LIB3092-021-Q1-K1-A1
gcgagaggtacttactcacagatatattttttttttttgtctccatcattttctcgagagctgtcagtttgtgtggttcatctttcttcttctccttccctcccccctctgtaacaccccgcttctctgaatccctttctgttaatcatctgtctttcaagctaagattttcgggtttgtctattaattcaccaagaagcaaacttagaaggatttttcgaaagccaggtgttttcagaaacgagatccaggttttattgtcgaatttcgctagtcaaattaatttcataattatttttttctttgaaaccgccaagagggtattttgatccccaaactaattctctctctctttttattccgggctg

SEQ ID NO: 10510 - DNA, 237 bp, Glycine max
  Clone ID: LIB3092-021-Q1-K1-A10
gctgtggttatcatcttcttcttcctctttcttagatctcttctttctctacgccgcacggggaaaccatggccggaaaaggagagggtcctgctatcggaatcgatctcggaaccacctactcttgcgtcggtgtgtggcaacatgaccgcgttgaaatcatcgccaacgaccaaaggaacagaaccacgccgtcttacgtcggattcactgacaccgagcgtctcatcggtgatg

SEQ ID NO: 10511 - DNA, 400 bp, Glycine max
  Clone ID: LIB3092-020-Q1-K1-F4
cccacgcgtccgctcaagattctaagagagattttgctgctctttgaagaagggtgtttgcttgattttggagatgtcgctgctctcagatctcatcaaccttaacctctcagacactactgagaaggtgatcgcagagtacatatggatcggtggatcaggaatggacctgaggagcaaagcaaggactctcccaggaccagttagcgacccttcaaagcttcccaagtggaactatgatggttccagcacaggccaagctcctggagaagacagtgaagtgattatatacccacaagccattttcagggatccattcagaaggggcaacaatatcttggctatctgggatacttacactccagctggagaacccattcccactaacaagaggcacgat

SEQ ID NO: 10512 - DNA, 330 bp, Glycine max
  unsure at all n locations
  Clone ID: LIB3092-020-Q1-K1-D2
gcagcttttacaacataaaacataagaattgtcttatcatgtactatggatcgtctataccaatccttcgtctcaaactntgattcaagcacaactaactaactaaaggaacatactccacagggatgaaaaccataatgcactcaaagggtttcatcctcaaacactctaaccaacgccatacccacatgtttcgtgacatcattttgcatgcgtctcgcagttatcacactactgaaacacatcttctactcacgaccgactacccactgttacatgcttgtgccgtttatccttcaactccataacgctagtcttaacctctatcat

SEQ ID NO: 10513 - DNA, 331 bp, Glycine max
  Clone ID: LIB3092-020-Q1-K1-D3
aaacccttaaaaaagacacagccattgtttgtttactttccattgattgagcgaaagctgtggtttttctgcgatcattttccattgggtggaaaaaagtctcaacctttagtcaaaagaacaaggatctgaatgagtgagcgatcatgtgtggtggtgcgattatctccgacttcattccaccgggtcccgcccgcggggcgcaacgcgttaccaccgacatcctgtggccaaatttgaagaagcggatctcgaagtcgctgctagacgatgatttcgaggcaaggttcataaaattctatgatgactcggaaatcgaggatgtcgatga

SEQ ID NO: 10514 - DNA, 413 bp, Glycine max
  unsure at all n locations
  Clone ID: LIB3092-020-Q1-K1-D4
ggaaactcanactcagttgatggatactcaactacaactcgatcagaactacctaaactgggagtgacagatattgtggagatagatggtgctaatccatcaggagatttcttgaaaaactcaagtactgttggtcctggtgccaccacaaggaagggctcagtccacgttgaacgacagaattctgaaatttcttactatgctgatgatgaagatgcaaatcgtaaaaagtacacaaaacgaggtccattccaccataagtttcttagagctttacttactttctggtctactgctttacctactctaccagtgactgcaccttcaaggaaagatgcatcatatgcatccgtaacctttgaaggccgtacaaggcatcaaagatcatcaatgatggaccccagaaaaattct

SEQ ID NO: 10515 - DNA, 247 bp, Glycine max
  Clone ID: LIB3092-020-Q1-K1-D5
acgctcaagttcaccataatcaaccacaacatgttttcttcttattccctatcacaccctattagagattcacaagcgcagacgcttcaaatggctctggaagctcttcaatcacccagaactgccactccatcgtttagtccctttgaagaaaccaacctcatttacttggatacaccgtggaccaaaagaaagcgttctaagcgtagccgcatggaacaccaactgcaacactcttcatgcaccg

SEQ ID NO: 10516 - DNA, 296 bp, Glycine max
  Clone ID: LIB3092-020-Q1-K1-D6
acaacgtaacgttgctaattgcttgcactttccatggtcgcttcttttgtttcacattagcgggttttgtttttggcttagttttacacctttcctcatttccgcagtagcaacctgcgaatcaacctctctgagaaaaaaaatggcgtcgaacgggaatggcagcgttgcgaacggtaacgggagcgctaggaacggacttgcgaagattcagacgcaaaataagcatgacgggatttgtcacgacgacagcggtccaacggtgaaggctcagaccattgacgagcttcactcgc

SEQ ID NO: 10517 - DNA, 394 bp, Glycine max
  Clone ID: LIB3092-020-Q1-K1-D8
cccacgcgtccgcgataattaaggcaattcttgtagcctggttgggttacattacagcgtgggtagacatggcaaaatcaatagccagaagcagtgaagcgcattgatcctggtgcatcctcgcacaccctatcttatcattattcaattttgttgtctgaatgaaagggaagaaggggtgaatccgtaggggatgggggcctcgctgtcgaacctgggaagcaacggttcggccgccgctccgggcctcggcgacatcccggagaattgcgtcgctcgcgtctttctccacctcactcctccggagatttgcaacctcgcgcgcctcaaccgcgcctttcgcggcgccgcctccgcggattccgtgtggcagacgaagctggctcgcaactac

SEQ ID NO: 10518 - DNA, 405 bp, Glycine max
  Clone ID: LIB3092-020-Q1-K1-D9
gattagcatcaaagcaagttaacaaaatttgggtgcgtcctggattgacccttttgccccgtgtccctcaccctccactaactcctcctttttggtttttataaagcacattcccaatagaggagggtccctacacaacacaacccttcaatgacgtccatggccactttcttcgcccaaacctccttcccctcccactctctctccaaaaccttcgatacccatttcgcccctgccccgaaagtcaacgtctttgtgaacttcagggcgaagaggcacgttggggtgcgagtttcgaacgcgctgatcgaaccagatggagggaagctcgtggagcttgtggtgacggattttgagagggatttgaagaaggtgaggctctttcgttgccgaggatcaagctct

SEQ ID NO: 10519 - DNA, 407 bp, Glycine max
  Clone ID: LIB3092-020-Q1-K1-E1
ctcgaatttcctcgaatcgcttaatttgtatttgattagttaaaccgcaacgcggaatctcttttctcgaactggctaactctcaggcaagtggttcggacgctgattccagcaacaagcggctggtgctcgcactgtatgacgccctaaactccggcgactccgacgccgtcgtcaagatcgtcgccgccgacctcgagtggtggttccatggtccgccctcacaccagtttttgatgcgcatgctcaccggcgactccgctgccgacaactccttccgcttccttccgcagtccatcgccgccttcggctccaccgtcatcgtcgagggctgcgacaccgcccgcaacattgcctgggtccacgcctgcaccgtcacggatgggataattactcagatcagagag

SEQ ID NO: 10520 - DNA, 332 bp, Glycine max
  Clone ID: LIB3092-020-Q1-K1-E10
ctcgcatccaatcctgtggttattctcttattcatacttctcttctgaataatgcagagagcgttctgtccttttatcggacgcgcttaatccgaccggatctgtctggattagatccatatctacacaccactggtggttttggccggatctttcataaatctgatgcgtagaggcgtaaatctacagcaccgaggtacaacagataatcgatgacaagaactcaaatacatcggccgatccatccgactgcgcttgttatatcaatacagacccctgtattggatcattaatctgctcgtattgtgcgaaataaacgtgttgcctatggg

SEQ ID NO: 10521 - DNA, 341 bp, Glycine max
  Clone ID: LIB3092-020-Q1-K1-E11
gcgtcgttgcttacccgcctgttccatgccttttcctaccaagctaagctaagacagaagcatgtatcttaacccgtgggattcaatcccaaagctgcacactgactcgagctgttcggagcaagtggtatcgcctgaattcgcgagcgaggtgcaaagcagagcccaagtggaacgagtgggagaaaagcctcgaatttccatttaattacgtggatgccactctcaacaacagcttcatggcccaattccagggcaataatcagatgctgtcgccgctgcaagacatgttcatgtactttcccaacatgtcctttttaacacatcatgatggttttaaa

SEQ ID NO: 10522 - DNA, 301 bp, Glycine max
  Clone ID: LIB3092-020-Q1-K1-E12
tgattttttaaattcgctgctctcacatctcatcaaccttaacctctcatactctacttatattgttatctcaatactacatattaatccgtttatcattaatcgaccttattatcaaatcatatactctcccataccatttatctatcccttttaaaccttcccaaaatttaacttattatttttccaccacacgccaatctccttgaaaatacatttaaatttattatttacccactatcccttttcattggatccattcaataatgatcaacaaatttcttttcttatctttttatac

SEQ ID NO: 10523 - DNA, 247 bp, Glycine max
  Clone ID: LIB3092-020-Q1-K1-E2
ctcacgcgtacaataataactgcattttcataaatacaattacttcacaattcttccgtgagacataatccaggaaatgttcaatgaattggtttattatcactgcctgaccgaagtgtatcttgaagccttcacagattgtgctcttaacgatatcgacctgggtgaatatgtttgaactcacgacgattgcatggatgtcatgtcttccaaagggttgagcttactttcagttgatgttgctggt

SEQ ID NO: 10524 - DNA, 339 bp, Glycine max
  Clone ID: LIB3092-020-Q1-K1-E4
gaaaatactccttcatgatttgaatcgcaattgactgaagtgcccgaaatcttaaaggcgggcacaaattgttttgaaaccttgtgcacctactgttgttgcatgtgctgcatccatggctgtacccgtataaacagacaatgtgcaaccgcattggcacaactctgcattggaataggatgcttaggctgcatatcatgctggccaaatatatgctgctctggaaacgaaagctgaaatatcaatactgctgtatgactgctgtgtttgactagatatagaaataactgcatgtagtgttgtcattatggaaatgcacatcgcgcctaatgcggtgat

SEQ ID NO: 10525 - DNA, 463 bp, Glycine max
  unsure at all n locations
  Clone ID: LIB3092-020-Q1-K1-E5
ggaagctgctcttgctcgtttgaaggtttatgaaggaatccctcctccatatgacaagacggggagaatggttgttcctgatgcactcaatgtgttgaggcttcagaagggacacaagtattgtgtgctgtgcaggttgtcatctgaagttggatggagctactatgataccattagggagctggagaagaagagaaaggagaaggcagcggtggtttacgagagaaagaagcaactcaacaaattaagggtgaaagctgagaaggttgctgaagagaagctcggttcccaacttgatgttcttgctcctgttaagtattgagtagtttttggtagtgtttgaaattttttatgccacttataccaaattgaactacctttcaattttgcttgaggttgctttgctattggatcataaattngatatctgatcatcttggaagctgttttttatttaattgtg

SEQ ID NO: 10526 - DNA, 349 bp, Glycine max
  unsure at all n locations
  Clone ID: LIB3092-020-Q1-K1-E6
ctatgcatcaccgttcccagcttcttccgctgccctatctccctcgacgtcatgaaatccggtgtcagcctctgcaccggcgttacctacgaccgttccagcatccaacgctggctcgacaacggcaacaacacctgtcccgccaccatgcaggttctccaaaccactgatttcgttcccaaccgaaccttacagaggctcatccagatctggtctgactcgggcactcaccgagtncgactcgccgactcacctacctncaccgagtcccaatcactcctcttcagggacacatnctcgtcgccatcttcgattgcacactcgcagcgacaatcggtcaactcgctct

SEQ ID NO: 10527 - DNA, 297 bp, Glycine max
  Clone ID: LIB3092-020-Q1-K1-E8
gtcgagctgagaataccagttgctccagtagccggcactaaacaacatggcggacaaggcagtcaccatccgaaccaggaagtttatgacaaacaggcttctctccagaaagcagctcgtggctgatgtccttcatacagggagggctaatgtttccaaggctgaactgaaggagaagctgggaagaatgtatgacgtgaaagacaccaacactgtatttgtcttgaagttccgaactcattctggtggtggcaagtacactgggtttgagctgatctatgattcacttgagaatgc

SEQ ID NO: 10528 - DNA, 129 bp, Glycine max
  Clone ID: LIB3092-020-Q1-K1-F1
accacgcgtccactcaatattcttacagactttatgctgctctctaaaatagctttcgcgtgattttaaaaatgtcggtgctctcaactctcaccatccttaacctcttaaacactacttataaaatta

SEQ ID NO: 10529 - DNA, 310 bp, Glycine max
  unsure at all n locations
  Clone ID: LIB3092-020-Q1-K1-F11
acgggccacccttntgaggatcccaacaatctctttcatccacatccacacgttccgttcccaagcccctctcactttcggcggaatcccactccnacccaagtcgtgggctcctattcgggcatcggcagcgagctcggagagaggggagaaagtattggagcagaagcccaacaaggatgacaagaaaaagctgctgaagggaatcgcaaagttttacgacgagtcttctggcttatgggagaacatttggggcgaccacatgcaccatggcttttatgactcggattccactgtttcgctttcggat

SEQ ID NO: 10530 - DNA, 59 bp, Glycine max
  unsure at all n locations
  Clone ID: LIB3092-020-Q1-K1-F12
gcactcgtaacgntccacctctatcaaaatccccacaaaacttttcctttctcttccac

SEQ ID NO: 10531 - DNA, 446 bp, Glycine max
  Clone ID: LIB3092-020-Q1-K1-D12
acccacgcgtacgcatactctctttctgtctcttatacaatttttttcatacactcatcaaattatacactaacgttgttcttacattgcacacacacaacacaactattaacaatttgacatcatcaaaaatgagttcaactatccacactaaaacttgtaccgtaacagcaattgctggattggttgaggcctcgaaagatcatgctatctgcatgtgaaacatcgtcctcagatcatcacaacaccaatctatacataatacgatgtctttgtcttaaaccaacaaacttttttcttaaccatcttctatcgctttagccaaattgaaagatcaaaaacctaataagtcttaaaagtcttttataaccgcttatattataaatcttttaatccaactaatcaatgattcatatattttcaattttcaatttcctttttttctt

SEQ ID NO: 10532 - DNA, 308 bp, Glycine max
  Clone ID: LIB3092-020-Q1-K1-B4
gcggaatggaggtggatcctagtaagagaccattgatggattatgttcagaagattcagagggatgttaatgctaacatgcgcggtgttcttgtggattggttggtggaagttgcagaagaatacaaacttgtttcggacacgctttatttctctgttgcttatattgataggtttttgtcgttgaatattttgtcgagacagaggttgcaattgctgggggttgcttcaatgctcattgcttcgaaatacgaagagattaagccgcccgaggtggaggatttttgttacattacggataacacatac

SEQ ID NO: 10533 - DNA, 440 bp, Glycine max
  unsure at all n locations
  Clone ID: LIB3092-020-Q1-K1-B5
gcgtacggcggaatgnatgtggatcctagtaagagacctttgatggattatgttcagaagattcagaagtatgtttatgctaacatgcgcggtgttcttgtggattggttggtggaagttgcagaagaatacaaacttgtttcggacacgctttatttctctgttgcttatattgataggtttttgtcgttgaatattttgtcgagacagaggttgcaattgctgggggttgcttcaatgctcattgcttcgaaatacgaagagattaagccgcccgaggtggaggatttttgttacattacggataacacatactctaaagaagaggttgtgaacatggaagctgaaatattgaaagctttgaaatttgaattgggtggtcctacagtgaaaacattcttgaagagattcttcaaagttggtcaagagggtgttgatac

SEQ ID NO: 10534 - DNA, 365 bp, Glycine max
  Clone ID: LIB3092-020-Q1-K1-B6
gctaaaggcactgacacacattctgaagctcatgatgatatatctgctgcacataaattggagctagcagcttgaccacctgtttctcagagcacagatttttggtcctatgaaagatcagaatacccagagtattaaagttgaagacatggaagctccagttttcaaggcatcgcttcattttatatactgggactcgctaccagacatgcaagagcttactgtgttggactcaaaatgggcatcaaccttaatggctaacaatcttctagcatgaactgatcatgatcgcttacataggcttacgctgatgcgcgaagcgagtctctgttacgatgctgctattaatactgagtctacaactc

SEQ ID NO: 10535 - DNA, 328 bp, Glycine max
  Clone ID: LIB3092-020-Q1-K1-B7
cggacgcgtgggcggacgcgtgggtcattccttccctattactctttctctgctaaattagggaaattttctctctttctctaattaattccctttgttatcaaaatggcttgggctattgctgcttgcagtcttggacttcacttgagtgctgacaacaccttgagaccttttgaaaaaaccactatcttgaaggccctctctatctctgatgctactaaaccatgttacatttctcacaaaacaagattatcatcttcatcttcaggaataacaatgatcccacgagcaacaacagttattggtactggggaggatggaaatcaag

SEQ ID NO: 10536 - DNA, 320 bp, Glycine max
  Clone ID: LIB3092-020-Q1-K1-B8
cgggccgaccgacgcgtccgctcactctccttcttccgctcctttcatacttttcatacatctctgacccctatcacatatgaatgttttgactcaaatgctcgcccttctcaactttaacaaacttatacaaatctatgcatactatcaagatatgacctcaccttatttctgacaaccacatgtgaataatgtttataacacactatgtaaaataccgctgaacatctcaaactacttaacaccaatacaattaccaaataacaagattacatactttaaggtgaataataactttaaaaccacatacaacttcggct

SEQ ID NO: 10537 - DNA, 309 bp, Glycine max
  unsure at all n locations
  Clone ID: LIB3092-020-Q1-K1-C1
aaaagttcttagtgccaaggtttcacgggtccttggtacctcaaaatccagtggatatggtgttgttacttttccgtcagaagaggatgtanaagctgcaatctcatcattcaacaattctttgttagaaggccaaacaatccgtgtgaacaaggcatagagaattagcaattttgcagagcatgtttgaccacgtgtagtctagccggaacaatgtatactttgtgaggttgaaaccactaacaaatttccttgtctcttgtatagcataaacctaatcattttaagttgataaggttctaccaaaaa

SEQ ID NO: 10538 - DNA, 355 bp, Glycine max
  Clone ID: LIB3092-020-Q1-K1-C10
cccacgcgtccgctaggtttttctctcaaaatttcgaatccccgattttctctcaattcgggtctgccattcatcgtaacctatattattacatagttatattatctctctgcgtatctttcagcaattttctattttctcctctcatggcttcagattccaaaaaagatttccctgcttatgacatacctggaacagaatagagtcaaacatccactgatgagacttcatctaaagattctacagcagaacatagagcgacatcttctttcggacctagacctggacctgctgggcatgcaagcaacccttttgatctctcagcaatgtctgagctgctcaatgatccaagtat

SEQ ID NO: 10539 - DNA, 425 bp, Glycine max
  Clone ID: LIB3092-020-Q1-K1-C11
cccacgcgtccgctttacacttcgcctcactctcttttatttcgttcctctattcgctacgtcgtcgttagggtcgtcttcggatcggtggaacttgactgcgccggcgtgaattccgacgctgcgagtggcaccgaattgcgatagcggtgacgaatatgaaggttttcgttaagactctcaaaggcactcacttcgaaatcgaagtgacgccgcaagacacggtttctgaagtgaagaaaaatatagaaactgttcagggtgcagatgtctatcctgctgcacagcaaatgctaattcatcaagggaaagttcttagggatgcttctaccttggaggagaataaagtagttgaaaatactttcattgtaattatgctatcaaaagagtagagcccatccggtgaaggatctactacttcaact

SEQ ID NO: 10540 - DNA, 261 bp, Glycine max
  Clone ID: LIB3092-020-Q1-K1-C12
cgaccgacgcgtacgataacctcaaacataacccactcattctcttttccctccccatctctccatcctatccttgtcttttcttacattcaagccaaacatcctccaaatcaccatatccacatattgaaaaccacaattcaccaaattcctgcacccaccacaataaccaccccatcccctcttgatccacacaacatttacattccctccattcttcacattcaaaaaccatcttctactcacaacccactacttact

SEQ ID NO: 10541 - DNA, 322 bp, Glycine max
  Clone ID: LIB3092-020-Q1-K1-C2
ctttgaaagccatgaattaaatgaacgtgatggtaaaaggccacttctaactggagatttacgagttatcctaaaggaaggggtaggaacctttggtgatcttactttcaccgacaattctagctggataagaagcacaaaattccggctcggtgttaaggtggctcctggttattgtgaggagattcgtattcgtgaaggaaagactgaagccttcgctgttaaagatcatagaagagaattgtacaagaaacactacccacctgctttgcatgatgaaattttcagatttgatcggatagctaaagatggtgcacttcac

SEQ ID NO: 10542 - DNA, 386 bp, Glycine max
  Clone ID: LIB3092-020-Q1-K1-C4
gcaaggcacacggtaaatctttccaacgtgatctcgtatccgccaagatgggaataaacgagactatgatgagtgctggcgtgtactatagcatagatacatgatatctatgcgtacctttcagcaattttctattttctgctgtaaaggctacagattccaaaaaggatttcgctgctgatgacaaagctggagacagatgagagtcaaacatccgatgatgagactgcatctaaagattctacagcagaacatagagcgacagctactatcggacctagacctggacctgctgggcatgcatgcaaccctgttgatctctcagcaatgtctgagctgctcaatgatccaagtatcaacgaactggctgaacagataagcaaaga

SEQ ID NO: 10543 - DNA, 421 bp, Glycine max
  Clone ID: LIB3092-020-Q1-K1-C5
gcaagggacacggaaaatctttccaatgtgagcttgtctttgccaagatgggaatcaaccgggtcatgatgagtgctggagagttggaaagtggaaatgcatgagagccagcaaaactgatcaggcagagataccgtgatgctgcagacatgatcaagaagggaaagatgtgcgctctcttcatcaacgatcttgatgcaagagctggtcgtcttggtggaaccacacaatacactgtgaacaaccagatggtgaatgccactctcatgaacattgctgataaccccaccaatgtgcaactttcacgtatgtacaacatggtaaagaacccccgtgttcccatcattgtcaccggtaacgatttctcaacactctatgcacctctcatccgtgatgggcgtattgagaagttctactgggc

SEQ ID NO: 10544 - DNA, 420 bp, Glycine max
  Clone ID: LIB3092-020-Q1-K1-C6
ggaaggccgaggatggtcgccgatttcgcgaggccggtggggcgtgtccgagcggtgacgagcgacgactagtggggcccggagaaggaggaggaggcatacggcggaggagtggcggtggaggagaaaccgacggagacggaaacggagaagctgaagaaggctttggtggattcgttttatggcacggatcttggactgaaagcaacgagtgaaacgagagcagagatcgttgaactcatcactcagctagaggccaagaaccctaaccctgctcccactgacgccttgactctcctcaacggaaaatggattctcgcgtatacgtcctttgcaggtttattcccattgttgtcaagtggaacactaccattggtcaaggtagaggaaatatctcagactattgacacgctgaatttt

SEQ ID NO: 10545 - DNA, 311 bp, Glycine max
  Clone ID: LIB3092-020-Q1-K1-C7
cccactcaccctttaaatctttccaccattatctttaatcccccaacttccctcacatccagactatttttaatactaaccaaccccaacacataaatacattatatccatcaaaacctatcagccatatattcctttatcctctaaacattatcaataacaaaaagattttcgctctcttaaacaacaacctaacacattaccttcatacatccacttatccaacctcatctaaatatactaccacataacaaataccaccctcttctacattacctataacctcacctattttccattcacacaacttt

SEQ ID NO: 10546 - DNA, 165 bp, Glycine max
  unsure at all n locations
  Clone ID: LIB3092-020-Q1-K1-C8
aaaacccgggccgaccgacgcgtacgctcacaaataccaatcattctcccaacttattttttctctcaacnctcccaatttaacatagaccctatttttaccaccgcaacaccatcaaccaccttttcctttatacttacacgcctactaaaagcccactccttt

SEQ ID NO: 10547 - DNA, 227 bp, Glycine max
  unsure at all n locations
  Clone ID: LIB3092-020-Q1-K1-C9
taccaatagttctcccaactctatctttctctcaaccnncccaatttatcaaagaccctttttaaacaccggaaccccatcaacctcctcttccttcatctagacccacctactagattcccactccttatctcttcaaatacactcccaattctaattattcactaacaaatcctccacaccccaataaactttacatcaattcttctctaactcccatacacccc

SEQ ID NO: 10548 - DNA, 133 bp, Glycine max
  Clone ID: LIB3092-020-Q1-K1-D10
gcgtccgataacctcaaacataacccatccatccttatctccatcccaatcacaccacccaatcctagagtcttttttaattcaggcaaaccaacccccaaatccacctatacatttctataaaaccccaatt

SEQ ID NO: 10549 - DNA, 235 bp, Glycine max
  Clone ID: LIB3092-020-Q1-K1-D11
acaacggtaacgttggctaatggcttgaccttttcatggtccggttcttttggttcacattagcgttgtttgtttttggcttagttttacacctttcctcatttccgcagtagcaacctgcgaatcaacctctctgagaaaaaaaatggcgtcgaacgggaatggcagcgttgcgaacggtaacgggagcgctaggaacggacttgcgaagattcagacgcagaagaagcatgac

SEQ ID NO: 10550 - DNA, 389 bp, Glycine max
  Clone ID: LIB3092-020-Q1-K1-B3
gtgacgatgctgggagtggtgaaggcccgattggtcggcgccacgcgcggccacgcgctcctgaagaagaagagcgacgcgctcacggtgcagttccgccagatcctgaagaagatcgtctccacaaaagaatccatgggcgacatcatgaaaacgtcgtcgttcgcgcttaccgaggccaagtacgtcgccggcgacaacatcaagcacgtcgtcctcgagaatgtgaaagaggcctccctccgcgtccgctcgcgccaggagaatgtcgcccgcgtgaagctcccgaagttcgactacaccggcgacgccgacgccacgaaaaacgacctcaccggactcgcacgcggcgggcagcatgtgcagcagtgccgcgccgcgtacataaa

SEQ ID NO: 10551 - DNA, 406 bp, Glycine max
  Clone ID: LIB3092-019-Q1-K1-H12
aaatgacagaagcaacttctaatgtatatgtagctttgtcatctatgggagaggaacaatctgtaaagataagacaaactgatgatgtttcaaaggaatctgagaccaatgactcatcaattgtcagaggaaataaagattcagtcattgcaaatgggtcaatcagtgttaagtcttcttcggccgtggctgaacttcaagttcctagttctatacccagcccgagtgatccggatgatgctgtactggctcccaagaaggtcgcaatgaatggtttcttacaaagtgatggtggaaaggagctggaggatcctatatccccaaattcatgtactctagtggttgttcaaaaacatcagcttacaactgatgatgtaagggcaattcatgatgttaatgacctaac

SEQ ID NO: 10552 - DNA, 353 bp, Glycine max
  Clone ID: LIB3092-019-Q1-K1-H2
gttgtgatggtctgcactttcgtgtcttcctttgcatggtcttggggtcctcttgggtggcttatccccagtgagactttcccattggagactcgttccgctggtcagagtgtcaccgtttgtgttaacctgctcttcaccttcgtcattgcacaagccttcctctctatgctctgccacttcaagtttggtatcttcttgttcttctctggctgggtcctcgtcatgtctgtcttcgtgcttttcctgttgcccgagactaagaatgtccccatcgaagagatgaccgagagagtgtggaagcagcattgggtctgggaagaggttatcgatgatgccgcggatgagaaaag

SEQ ID NO: 10553 - DNA, 346 bp, Glycine max
  Clone ID: LIB3092-019-Q1-K1-H3
gttgtgatggtctgcactttcgtgtcttcctttgcatggtcttggggtcctcttgggtggcggatccccagtgagactttcccattggagactcgttccgctggtcagagtgtcaccgtttgtgttaacctgctcttcaccttcgtcattgcacaagccttcctctctatgctctgccacttcaagattggtatcttcttgttcttctctggctgggtcctcgtcatgtctgtcttcgtgcttttcctgttgcccgagactaagaatgtccccatcgaagagatgaccgagagagtgtggaagcagcattggttctggaagaggtttatcgatgatgccgcggatg

SEQ ID NO: 10554 - DNA, 346 bp, Glycine max
  Clone ID: LIB3092-019-Q1-K1-H4
gctgtgatggtctgcactttcgtgtcttcctttgcatggtcttggggtcctcttgggtgggttatccccagtgagactttcccattgcacactcgttccgctggtcagagtgtcaccgtttgtgttaacctgctcttcaccttcgacattgcacaagccttcctctctatgctctgccacttcaagtttggcatcttcttgttcttctctggctgggtcctcgtcatgtctgtcttcgtgcttttcctgttgcccgagactaaaagtgtccccatcgtagagatgaccgagagagtgtggaaccagcattggttttggaagaagtttatcgatgatgccgcggatg

SEQ ID NO: 10555 - DNA, 322 bp, Glycine max
  Clone ID: LIB3092-019-Q1-K1-H5
ttacaaaatcccctcatattatctctctgtctcttaaaccatcatgtcctccaccgcgcctgccgtcctgcccatgtccaacccccaaaccaccgcgggaaccaccggtgcaggcggcggcgccatcgaggcttcggccaacaacccggccttccgcgctttcatcaacaacctcttcaactccctccgccacggactcgaccagcgccgcccctggtcggagctcgcggaccgctcagcgttctcgaaacccgagtccttgtccgaagccaccctccgtgttcgcaaaaacttctcctacttgcgcgtcaactactacgct

SEQ ID NO: 10556 - DNA, 414 bp, Glycine max
  unsure at all n locations
  Clone ID: LIB3092-019-Q1-K1-H7
ctttgttcactcttcttctcttgcggctagggttttagcgcagcttcttctagatttagggaagatgggtaaggaaaaggttcacatcagtattgtggtcattggccatgtcgactctgggaaatccactaccactggtcacctgatttacaagcttggaggcattgacaagcgtgttattgagaggtttgagaaggaagctgctgagatgaacaagaggtctttcaagtatgcctgggtgctggacaaacttaaggctgagcgtgaaagacgaatcaccattgatattgctttgtggaagtttgaaacaacaaagtattattgcacagttattgatgcgcctggacataaggatttcattaagaatatgattactgggacatcccaagctgactgtgctgntcttatcattga

SEQ ID NO: 10557 - DNA, 346 bp, Glycine max
  Clone ID: LIB3092-019-Q1-K1-H8
cccacgcgtccggaagagatgagggagaggtacgagatattctcgcaaaacctcaggggcaggcgctcccacaacaagaaccgcttgccctacactctctctgttaatcattttgctgattggacttgggaggagttcaaaagacacagactaggcgctgcccaaaattgctctgccactcttaacggcaaccacaagctcactgatgctgttcttcctcccacgaaagactggaggaaagaaggaatagtgagtgatgttaaagatcaaggcagctgcggatcatgctggacattcagcacaactggggctttagaagcagcctatgcacaagcatttgggaaga

SEQ ID NO: 10558 - DNA, 313 bp, Glycine max
  Clone ID: LIB3092-020-Q1-K1-A10
cacagagagaggggtttgggattggagggattgacgctgcgtctcttcctcttctctttgggtccatccctcattcctaatcctccaatccaaccacctcagcctcacactcacatatacacatatctgaacgcgtatcgtccctcctatggcttcaaagcgcatcctcaaggagctcaaggacttgcagaaagacccaccaacttcttgcagcgctggtccagtagctgaggacatgttccattggcaagcaacaataatgggtcctgctgatagtccttatgctggaggtgtattcctagtcactattcac

SEQ ID NO: 10559 - DNA, 409 bp, Glycine max
  Clone ID: LIB3092-020-Q1-K1-A2
gccagtcttgctgaacagaaaaaaagagaaataaaaattatgggaagcgatggcgtgaggaagccaagattcctatgccttcatgggttccgaacaagcggagaaatattgaaaacacagttacataagtggcctcaatcggttctagacaacctcgatctagtatttgtggatgctccttttccttgccttggcaaatccgatgtagaaggcatttttgatcccccttactacgagtggtttcagttcaacaaggaatttacagagtacaccaactttgacgagtgccttcagtacattgaggaatgcatgatcaagtacggacctattgatgggcttcttggtttctcacagggatcaatattatcggctgcgctgccgggtcttcaggagaagggcgtggcactca

SEQ ID NO: 10560 - DNA, 99 bp, Glycine max
  Clone ID: LIB3092-020-Q1-K1-A3
gctatacatccgggggggatgaaaagagcctttttatttgaggtaactgattgcttcagtgagatgcattcctggagggatgaaatacaaacgagaaat

SEQ ID NO: 10561 - DNA, 211 bp, Glycine max
  Clone ID: LIB3092-020-Q1-K1-A4
cccacgcgtacggcggctctcagaaaagccgtgttctttgtaatcgctcaatgcttcaccttgtccgcatatgctgcaaggtttgaaatcacaaaccgatgcacatacactgtctgggctgcgtctgtgcctgttggcggtggcgttcaattaaacccgggccaatcatggtccgtggacgttcctgcaagaacgaaaagggcccgcgttt

SEQ ID NO: 10562 - DNA, 160 bp, Glycine max
  Clone ID: LIB3092-020-Q1-K1-A5
cccacgcgtacagcgggtctcaaaaaagcccttttctatataatcactcaatgcttcaccttgtgcccttatgctgcaaggtttgcaatcacaaacctatgcacatacactggctggtctacgtctgtgcctgttggcgatagccttcaattaaacccgg

SEQ ID NO: 10563 - DNA, 394 bp, Glycine max
  Clone ID: LIB3092-020-Q1-K1-A6
ctggaatgaaggctttggatatgaatgctgcagaggatgctattgtgaggctcacgagggagattgtgcccggcatgattgtcaccggcatggatgtggcagaaattgatggctccccaaggatgggtccgacgtttggggcgatgatgatatcatggcagaaggcggctcatttggcgttgaaggcgttggggaggaacaatgcaattgatggaacgtgtggagttggaaaggaagaaccccagcttaatttcgcttctgcaaacactgaggaaattgttgatgcttaaacttactttcaaattagctagatatatagcttttcttttcttttcttttctgttggtccctacttaattatgattttaattttggaataaatgaacaacatgtg

SEQ ID NO: 10564 - DNA, 283 bp, Glycine max
  Clone ID: LIB3092-020-Q1-K1-A8
tccacatcaaccgatagctttcttaatacacaattcttaaattaaaatacaacaaaactcaccaaaaaaacaataagattttcatctccctattcaacgtacaattacacataccacctcaattcttattccaaaccactattaaaaaaaaagactttatcctcttatttaattagtacaatcttcaaccattcacctttcccttcataaaacaaataatttctacaacaaactatcactttaaattcctatactttttacataccacgaaaaataatcatac

SEQ ID NO: 10565 - DNA, 342 bp, Glycine max
  Clone ID: LIB3092-020-Q1-K1-A9
cccacgcgtccgcatgaatgccagcggtctcttttgcagggtgctgacgactggttaagactgcatcaagtcagtcatccagattttcagtttttcagccgttgatgatgttaaggtgactgtaatgttattatactttggccatttatgaatagtacctaagtatttgccagtgcctcctatggttcatttcttagatgccagacttgatgaagttggagttaataacctaattaattgactgaaggaaaatgaaaattggagaaaagatgtttagcactgtccttggtaattttctgcactgttttcttccgtaagaagtgaaagaaatcagacaagtat

SEQ ID NO: 10566 - DNA, 143 bp, Glycine max
  Clone ID: LIB3092-020-Q1-K1-B1
cccacgcgtccggacatagtaaaaatgtttcctcataatgtatgtttattagaatcagaactggttcctgtctattgcggttgtctgtggaacttgaaatttattactaaaagaaactaattcatgagttgctcttcattggg

SEQ ID NO: 10567 - DNA, 368 bp, Glycine max
  Clone ID: LIB3092-020-Q1-K1-B10
ttgatcctaataaaaaaccttttattgattattttcaaaaaaatcaaaggggaatttattctaacatgcggcgccttcttgtggattggttggtggaagttgcaaaaaaatacaaacttgtttcggacacgctttatttctctggtgcttatattgataggtttttgtcgttgaatattttgtcgagacagaggttgcaattgctgggggttgcttcaatgctcattgcttcgaaatacgaagagattaaaccgcccgaggtggaggaattttgttacattaccgataacacatactctaaggaaaaagttgtgaacattggaggcttaaatattgaaggcttttaaattttaattgggtggtcctac

SEQ ID NO: 10568 - DNA, 358 bp, Glycine max
  Clone ID: LIB3092-020-Q1-K1-B11
tacccactacacattctatatcacagcttttaacattactccccttaccttgtttcaaagatggtttttaaagatagggctgcccacccctctccttcctccaattctacctctcttccaatcaatacctccctcattgccccatatagagttgtgttcaataatgcttcattgcaaaacacatatgtttctatcagtttacatatattttccatcatatctcaagtcaccactgatgcaccatccaatgttgaaaaacacttcaacaaacatcattataactttgttcctaacaattttaaacccaagaccccttacattgtatattcctactcaacacaaaaatcactttgtatta

SEQ ID NO: 10569 - DNA, 435 bp, Glycine max
  unsure at all n locations
  Clone ID: LIB3092-020-Q1-K1-B12
tcatggtaccgtatccaggacactatactcaaatgcatctgaagctgaaggaatatacagggctctccataaattgggtattgactggagcttcattggttcccaacttgaacttgaaggagtggactcgtttaagaagagctttgacagcctcctggattctctgcaagagaaggcaaactctcttaagttgatcagccactgaagtttgaacgtcatggttagtaatgcagtgctgtgtatgatcgcatctatggattaataaaaggcagcggctgtgcattttgtgctgctgcaaatgtgcttaatggagtcatttatttagacgatagcgatacaatgtacatgggaaaaatcggccgcttcaagttaagcgttttggttctctcccactattcaatggttgggcgtttatggttcaaaatcttacattnt

SEQ ID NO: 10570 - DNA, 310 bp, Glycine max
  Clone ID: LIB3092-019-Q1-K1-H11
gtccttattggtgtccaatgcaatagcatgcacgtatacagccatgtctgtacttcttggggtaagaaacagaagtacaagcaaattcttgaggtcattgatccgctggatcgacacattcatagaggctttgctatttatacggaactgggctcgtgacgcactctgtatcacttactacaaaggaaactctcatgtgaattggaacacggtgtgcactgactttgggaaatgttgtgatcaaacggctgcttcgactgatgtgtcactgattggatcattatcattactattgctcgtggttattcct

SEQ ID NO: 10571 - DNA, 340 bp, Glycine max
  Clone ID: LIB3092-019-Q1-K1-F11
ggttattgttattaatttctgtgagaagtgcacaatttgtttccatggatccaaccgtagggaagcctggcgttctcagaaacgttctggttcggttactcctcttcggcgttttcatcgtcgtcgtacggttcgcttacgtcatcaccctcgccggtgagtcctgcaccgtcggcgacttctgcttcttctctccgtcgatcaacctcgcaatcgccggcaccagatcaggcgccctcgcagcgcgcggaggagccgccgggccgccggagcgctatgccagcaaggactggatcaacggcgtccggttctactcgtcggctttccaggacatgatctc

SEQ ID NO: 10572 - DNA, 264 bp, Glycine max
  Clone ID: LIB3092-019-Q1-K1-F12
tcccaattcccgttcgacccactcgtgcgagttattgatatttattactgaacaaagtacacactctgatttcatcgatccaaccgaatcgaagcctcagtttctctgaaacgtgctggctcacttactactgttcgacgctttcatcaacatcgaacggaccccttacgtcatcatcctcacctgccagtccttcaccgtcctcatcttctacttcttcatctcctagatcaaccttccaatcgcctgcaccagatcaaacac

SEQ ID NO: 10573 - DNA, 278 bp, Glycine max
  unsure at all n locations
  Clone ID: LIB3092-019-Q1-K1-F2
gccaacggctccaaccccttcgcttcgtggggtcaattcgtggattttcctctccctccttgcatctccggcttcttccccggcttggaattcggattcggattcggatcatccgtgaacacacgtgtggactggagggagactcccagagcgcacgtgtggaagctggtgctntccggcttctccaacgaggacgtgcttgttgagctccaagacgagagggtgctccaagtcagcgtggagagcggcaacttcgtcacgaggtttaaggtccccga

SEQ ID NO: 10574 - DNA, 394 bp, Glycine max
  Clone ID: LIB3092-019-Q1-K1-F4
gccaacggctccaaccccttcgcttcgtggggtcaattcgtggattttcctctccctcctggcatctccggcttcttccccggcttggaattcggattcggattcggatcatccgtgaacacacgtgtggactggagggagactcccagagcgcacgtgtggaagctggtgcttcccggcttctccaacgaggacgtgctggttgagctccaagacgagagggtgctccaagtcagcgtggagagcggcaacttcgtcacgaggtttaaggtccccgacaacggtaacctagaacaactcaaagccaacatgcgtcacggggttctcgttgtcactgttcccaagtttcatcaacccactactactgcccctgccaataagaatgtcaaggaag

SEQ ID NO: 10575 - DNA, 227 bp, Glycine max
  Clone ID: LIB3092-019-Q1-K1-F5
aaaaaggggcgcgacacacgcgtgcgcaacgcttccacccattcaatccaaacatttaaaacttaaaaattaacatcactacgcccgttttcctataatttcccgggtcagaaaacacaactcgatttagatcacctcgcaacacacctttgaacatcacagcttactccccgaccgcacaaaaggcaactggttccaacctacttctctaacaataaccttctaga

SEQ ID NO: 10576 - DNA, 389 bp, Glycine max
  Clone ID: LIB3092-019-Q1-K1-F6
cccacgcgtccggttttcctagttacagatggaacagttgaagatgagagacaaatttgggctatggtaaagaatcgaatgatcaatggagagtcaatatgccctcgaatttacacttttggcattggttcattctgcaatcattatttcttgcgaatgcttgcaatgattggtaggggccaatatgatgctgcattggatgtagatttgattgaacctcgaatgctgacattgtttgacaaagcttcatctctcattcttgcaaatatcaaaatggacacattggatgatcttgatgaccttgaagtataccctcctcatattcccgatctttcatcagagggtccattgattttatctggaagatacaggggaaattttcccaaaac

SEQ ID NO: 10577 - DNA, 387 bp, Glycine max
  Clone ID: LIB3092-019-Q1-K1-F9
ccgacgcgtccgcccacgcgtccgtggagtttcaagggttaccggaaggttgcattgctaggatactctctggcactacgccagctgacgtgtgtaggttttccgtcgtatcaaagattttccgttcggccgctgaatcggacgctgtgtggaaacgttttctgccttgcgattaccattccatcatttcccagtctacttcgcctctcaactatccttccaagaacgagctctatctcgctctctcggatcgccctatcatcatcgatcagggtaaaaagagctttcaattggagaaaaagagtgcgaagaagtgttacatgcttgctgctagagctctcagcattatttggggtgacactgagcaatactggaactggacaaccg

SEQ ID NO: 10578 - DNA, 118 bp, Glycine max
  Clone ID: LIB3092-019-Q1-K1-G1
cttttcttcctgaatgaggggacatttatgctatcaaatcaaaactgataaaattgtaacgtgtatatttttaaccgaagtacagttaaaaattcagagtgatatatagtacattcac

SEQ ID NO: 10579 - DNA, 203 bp, Glycine max
  Clone ID: LIB3092-019-Q1-K1-G10
tcccccaaatccatcatacacacaatatctctcctcacatccatcaactaacctacttcctaacaactcctcttgttcatcctctctttttcctcatattctccaacttcttcaacattcaacccactctcttcctcattgactcaccctaaccttcccacacattccttccttcaacctttctttcccacttcaacctcaca

SEQ ID NO: 10580 - DNA, 171 bp, Glycine max
  Clone ID: LIB3092-019-Q1-K1-G11
ttctaagattgctttgtttgagttaaacgcttcaaactcaaatacgtgtgcattacaacggctaacccctcaccatgctcttcttctctctcattcatacccctccttttttatttgtattctcagctttgttagattccgtttctggtttttcccaattccatagtactc

SEQ ID NO: 10581 - DNA, 392 bp, Glycine max
  Clone ID: LIB3092-019-Q1-K1-G12
gccacgcgtccggaaaagaatggaggccatttgttccaagcaccttatgacatcccttgtgataattcttgcgttctagtttgaccttatcacagggtgccaagaaaggcagtgacagtgaaaggccataccaagaagcgagcacggtgttcattagaacatcttgcagctccacgacctatccaagactctgctacagctccttagtgaagcatgcagacttgatccaaacaaaccgtgtggttctgacaggcacagccctgaatgtgacccttgcgtctgccaagtcgacctcggcaatgatgtcgacgctggcaaagaggcaaggcctgaagccaagagaggttgcagcgatgaaggactgtgtggaggagttggctgactctgttgat

SEQ ID NO: 10582 - DNA, 280 bp, Glycine max
  Clone ID: LIB3092-019-Q1-K1-G2
cccacgcgtccgctttattccactgaatagaacatgagcatataaatggataccctttatggtatctatctttatattatctataaagggtaaagatatccgatgtgaatctatttgtttagttttctatcggtatgtatataggtgaataatccaacatgcctttttgtgaagtaaaaaaactaccctcgatccatgcctcaaaagggttgataataagtaaaaaaaatcaatgaattcatgataaaacccttcttgcgttttttattataaatttttt

SEQ ID NO: 10583 - DNA, 283 bp, Glycine max
  Clone ID: LIB3092-019-Q1-K1-G3
ctcacgcatccgaatcattccacttaaaagtttacaaacatatacttatataccctttacctgttcttttttaaccttatctctcactaaaaaacatatccaattataatccattcactcaatatactatcggtatctatatagggcgaatcatccaacatacccaatcttaaattcacatacctaccacctattcattcttctatatggtcacctatatacaaaaaatatcacttcattcaacatcaaacccacttcaaaaccctatcattacccaacttaa

SEQ ID NO: 10584 - DNA, 366 bp, Glycine max
  Clone ID: LIB3092-019-Q1-K1-G4
cggcggtgctcacgacggggcgagagttgtctaaccctccatccgacggcatcaccaatcggggattctccaaccacagcgatcatcttttggtgtcctcatgggacaagagcgtgcgcttgtatgatgcgagtgccaatgtgttgagaggagagtttatgcacgctggccccgtcctcgattgctgcttccacgacgattcctccggcttcagtgccgccgccgacaacactgttagacggcttgtcttcagctctaataaagaggatattctgggaaggcatgatgcacccgttcggtgcattgagtattcatatgctgcagggcaaattgatcactgggtagtgggacaaaaacctaaaatgt

SEQ ID NO: 10585 - DNA, 319 bp, Glycine max
  Clone ID: LIB3092-019-Q1-K1-G6
cccacgcgtccggaaaaacagtgtttcatttcaattcattcagtcttattattattaggggttggcgattcagagagaaagagaaatgggagaacgaaaaggaatcccaattgctctggggctcttggcgatgctcctcttcttcattgcttcttcctcttcctctcacctcgttcgtgcttccgatgacgccgacgacgcgatcttctacgagtcattcgacgaggattttgacggacggtggattgtgtccgacaaggaggattacaacggtgtctggaagcatgctaagagtgatgggcatgatgattatggactt

SEQ ID NO: 10586 - DNA, 105 bp, Glycine max
  Clone ID: LIB3092-019-Q1-K1-G7
cataataaacgaaatacatcatttcatattgccacaaaaaaaggccttactcacaatgatcactacctttatacaatgcatttgttcaacatcaattctacaaac

SEQ ID NO: 10587 - DNA, 358 bp, Glycine max
  Clone ID: LIB3092-019-Q1-K1-H1
aaagattctaaagaaatataactaatattctttagaataatcaaaaagaatattaaattcaagtaaattttagatagaaaaaagacttaaaaaggaggatttgaaatgcgagatctaaaaacatatctttccgtggcaccagtagtaagtactctatggttcggggctttggcgggtctcttgatagagatcaatcgtttttttccagatgcattgatattcccttttttttcattctagttattgacacggaaaggggtgaagaagattatagatccaattaagtattaaatatatgtaattaatatgtaattaatctcctcttctttatttcggcttttatttcttctttttttta

SEQ ID NO: 10588 - DNA, 377 bp, Glycine max
  Clone ID: LIB3092-019-Q1-K1-F10
ttcccgttcgacccactcatccgtgcactcacacatcctaccatccacaaaatcttcttctcgatttcaccatactaactcctggaacctcactgacacttttcatatgagagcggtcaaaacccccctactcttattctaaaaccaaatcttctcaaccaacatctctaactaacatatccccatccaccctacttcctttctacccatcataaattaattattcacattaccttacactacctcaccaacagttccaatatcaaaacacactgaaacttcttacaaatcccaaactctaccattttatcacccaactatctccactaccccatcctctacccattaatctaatagaacacttcaaaattcatcac

SEQ ID NO: 10589 - DNA, 406 bp, Glycine max
  Clone ID: LIB3092-019-Q1-K1-H10
cggtcgaccacgcgtgcgaccctacttctacttccctttgtctaaaccttatcccttatcctcccaaaaccaaaccgtgtctacctgcgcagcttctctcgcactcccaaccctcactctccgaactcgacaacctctctgttctccccaatgcttctcctcgtccctctccctcacccctaactccaaacccatttccatttccgccgttttcctcaaaacaacgctgtcgtcgtcgtcgccgttgtcgctgtcgtctcgcttcgttccccatgtctctgtgttggagcaggaggaggacaccttcggcgacggagacggccccagcttctcccgcgaccttaagctctctgtcgggaatctccccttcagtgtcgacagtgcgcggctcgcggagctcttcgag

SEQ ID NO: 10590 - DNA, 243 bp, Glycine max
  Clone ID: LIB3092-019-Q1-K1-D2
cccacgcgtccaaaaaacacttctttcaaattttaaacagccttaaccttctctgcccccacgtcgtcccattggcacccacaaacagtctctaccatattaccatctttcctaccaaatagacagccccgcgctcctaacctaaatactctccgattagcgtttcaaccgtggagcccgacacttcaactgtcgactacaactctgcgttctcactgtatcctgcaaaagcatgccaaactg

SEQ ID NO: 10591 - DNA, 331 bp, Glycine max
  Clone ID: LIB3092-019-Q1-K1-D4
cccacgcgtccgggagacgccctcgggcgaggaagcttcgctaccgatagtttagcgattcggagtacaaatccgaatcagtttccgtctctaaccgccgttaagtccgcggaggctcaaacctcgtgctggctaagaaacgagaaacacgtgctggatcgcctaggttcgtcggctccgaggataattcgctgcttcggagacgactgcagtttctagaacggcgttgagtactacaatctgttcctcgaatacgccgccggcgggagccttgccgatgaattgaagaatcacgatggccagatttccgagaatgaggctcgggaataca

SEQ ID NO: 10592 - DNA, 247 bp, Glycine max
  Clone ID: LIB3092-019-Q1-K1-D5
ggaaaaccaacaccacactttgattttcataaagagaatttttaaattcttttatcatacttcgtatttttttttccaactgtaacgtatgtagttgagggaaagtttctagttatatatagtttgttgcggtttttttctttggtactacagctaagtagataagcagctagctgcattcaattagagttttatacatgtataaaaaaattcatttttatataaatgaaatggttacgttgttaac

SEQ ID NO: 10593 - DNA, 275 bp, Glycine max
  unsure at all n locations
  Clone ID: LIB3092-019-Q1-K1-D6
ccgtccgcagctcgtcaaaacttcgctttcatgcagnctcaagaaagattcttccaagatgcccttcttcaccgatgtcagtantctttgtgtctcggtnggggatcaagaatataaattcactaaggttcataatagctacgatgccagttggggaaaccccatgaactatatgagaggctacggggtcccagtagataactcgttctttgcaggggaagcaacgagtatgagctatccaagatctgtccatggggcattctccactggaatga

SEQ ID NO: 10594 - DNA, 411 bp, Glycine max
  Clone ID: LIB3092-019-Q1-K1-D7
gattttgcgttgcatacatcccacacacaacacattcacaacacaacatttgatttctctgtgttgtcatcctcaaaatccacaatctttcctccttaatatctccgaccccaacaaaaagaaacaagcaagccatggattcccagatccatggcttgtcctcgtaaagtcaacccctttaccagtcaaacttaaccccccttctctccccctctgaaaccgcaggaagaagatcaaatcgaagaaggcttaaaaaaaatgaagggttcgaacaaccggatcttcacggtggcgctggtggcggcgtggtactcctcaaacattggggtgcttctcctgaacaagtacttgctcagcaactacggcttcaagtacccaatcttcctcaccatgtgccacatgacggcgtgc

SEQ ID NO: 10595 - DNA, 322 bp, Glycine max
  Clone ID: LIB3092-019-Q1-K1-D8
tccagttgcagacttgacttccttatgatgtgaaccgcatgtctcccaactactaatgggggtctcaaacctcaaaacttatctgggaatttctctaccctctgtgataactttcggtgtctgaggttcctcactccgaaaccgacccacctgcgatcctctcactctaagttgggaaatagagtaaagctgacatctttttcgatgtccaaggcaacccatttgaaggtttcacaagctgcactctcatccacggaagaatcactgccttcatcttctcgggtaataagagaacatgacttgctcattgagggtcccgggg

SEQ ID NO: 10596 - DNA, 422 bp, Glycine max
  Clone ID: LIB3092-019-Q1-K1-E1
cccacgcgtccggttgtcaaagggttgtgtgacggtgaattgggtagaagaagatgagaggggtgaagagagcagtatttgtaggcagagccctaagaagcaattccaacaccgccgtgtacggtgttggtgccacccttcatcgagatcgaatggctccccatggctgcttaaccccatcaaatccaaatccttctgtttctgttactgggtttagatacctttctgcttctgctgctgccacgtctcttgcccaagacgctcagaccaaggccttcaaacccaaggaacttgtcctctttcagtaccaggcctgtccattctgcaacaaggttgcagcgtttctggactattatgatattccattcaaagtggttgaggtgaatcccataaacaagaaggagatcaaatggtccgactac

SEQ ID NO: 10597 - DNA, 230 bp, Glycine max
  Clone ID: LIB3092-019-Q1-K1-E11
cccacgcgtccggcggtcaacaatcaaggcttcatgaaccccatcaacaccgtcttcgatgcgaagaggttgattggtcgtagattcaatgattcctctgatcagagctatctcaaattgtggcctctcaaggtcattcctggtgctgctgacaagccaatgatcgtggttaactacaatggtgaagagaagcaatttgccgcataagaaatctcttacatggtgctcat

SEQ ID NO: 10598 - DNA, 197 bp, Glycine max
  Clone ID: LIB3092-019-Q1-K1-E12
tcatgcgagaacataaatgcacaagcactcaaatcaacatgatctgttatgtaactatccaactctaggatacaaatgccaacattaaaatcactgttatctatattactctaatcatgactagacaactctcattttacgcatcttaatcactacccagcatatcataggatcatacagacctttttctacccatc

SEQ ID NO: 10599 - DNA, 340 bp, Glycine max
  Clone ID: LIB3092-019-Q1-K1-E2
cacagacgatcaagagcttcattgtcgtgaggctgaaaatgatccagaagactgtccaacgggctgttcacggccttgtgaaaatgtgtgccctgctaatgcaataacacaccaagggaaatctacttcaggcatttcacataacacatgaagcaccatgagtactgatggatggagtcataacagaacgatgctatggctgtggtcgctggcttacagtccgcccctactataaaatatgagaggtatcatatgtaagagatgctattacaactgctgatctcatcaagagaaatgatgttgatgctatggagatgcatactattggaagacagagtac

SEQ ID NO: 10600 - DNA, 377 bp, Glycine max
  unsure at all n locations
  Clone ID: LIB3092-019-Q1-K1-E3
ntccggggaattgctgaagattgaaggctgcaaagaaaggatgaccgcatactttaacacggtggggtggactgcgaatgccctaacaggtgaacacgaaagaaaagaattcatagcttcactccacagacaaaagacagaactatttatggcccttatagagaaaaaactgctgcctcttcgtccaggtgttgcaaagattatcgatcaggcttttgctcaacgagttcaagttgcaggttgcagcactttcaacgagaaggcagtctctgcaatagtatcattcttgctgggacctgagagagcttaaaaaatcaagatatttgcatgagactgggttccccgtaaaaagcctgatcctgccatctacctattag

SEQ ID NO: 10601 - DNA, 473 bp, Glycine max
  Clone ID: LIB3092-019-Q1-K1-E5
agcaaaagcaagaagaactagtctaagcagaaatggcctcttcagtgatggcatctgtgggcctcaaacctgcccctttcactgttgagaagtcctcagttagaggccttccctccctctcaaggaactcctcttcattcagagttgtggccagtggtggcaagaagatcaagactgacaagccttatggaattaatggtggcatggctttgaaggaaggagttgatgcatctggcaggaaaggaaagggaaagggcgtttaccagtttgtagacaaatacggtgctaatgtcgatggttacagtcctatctacgacaccaaggactggtctccaaccggtgatgtctacgctggcggtacgactggcttggctatctgggctgtgactctacttggtcttcttgctggtggtgcacttcttgtctacaacacaagtgctttggcgcaataaacttttcaaatcgatgtttta

SEQ ID NO: 10602 - DNA, 399 bp, Glycine max
  Clone ID: LIB3092-019-Q1-K1-E8
atcgcttaccacaccacaccatatggctgttactgtggccatgttacctcgttggtcgggggttcttctttttctgtttgtcttgtgtagctcaggagcaaaggttgtcgccattgatgtacatgcagcaaagcgtctcatccagaccggttccatttatcttgatgttaggacggtggaagagttcaagaaagggcatgtggatgcagttaatgtccttaacattccatacatgttgaatacacccaagggcaaggtaaagaatccagactttctgaaggaggtttcatcagcttgcaacaaagaagatcatctcattttgggttgtcaaagtggggtgagatctctgtatgcaactgctgatcttttgtctgaaagttttaagaatgtgaaagacat

SEQ ID NO: 10603 - DNA, 312 bp, Glycine max
  Clone ID: LIB3092-019-Q1-K1-E9
gaagaaaacataatcttctttacaatgtcaatgacttacttgaaaaagttttcatttctagtttcgttttgcttttcatcctgcatgtccacttgtccactgcacaagtaaatcttaacgctggtgttggcactagcaatgacaatggggtcgtggttgttgaacttggtgatgacacagacacgtctcaagaagctgtcgttagtgttgaggtcaacgtcgacaatgacaatggcacatctaatgaagctggtgttgaagctgatgtcacaattactgttaacgttgagcctgacactgaagtacctgatg

SEQ ID NO: 10604 - DNA, 366 bp, Glycine max
  unsure at all n locations
  Clone ID: LIB3092-019-Q1-K1-F1
gccaacggctccaaccccttcgcttcgtggggtcaattcgaggattttcctctccctacttgcatctccggcttcttccccggcttggaattcggattcggattcggatcatccgtgaacacacgtgtggactggagggagactcccagagcgcacgtgtggaagctggtgcttcccggcttctccaacgaggacgtgctggttgagctccaagacgagagggtgctccaagtcagcgtggagagcggcaacttcgtcacgaggtttaaggtccccgacaacggtaacctanaacaactcaaagccaacatgcgtcacggngttctcgttgtcactggtcccaagtttcatcaacccactactact

SEQ ID NO: 10605 - DNA, 448 bp, Glycine max
  Clone ID: LIB3092-019-Q1-K1-D12
cagaaacgaagatgggtggttccgttttcactcacttcctcgttctcccctcctcttctagtccttctctttccactctcttcccatccaaattccccaccagacccatcaatgaatcttttcccttcacccttacctgcaaccaattcccttccaaactcactacttcgcggccttcccaattctcagctcctcctagttactcatgctctgtaaaaaagataaaagcttcgggaagtcagcaaacaggatccattcgacatggagacaaccttgatgcaatgaatagcaggagtttgctgcagaagtttcagaggaaaatgccaacggtattccttttcaacaagcaatctatgatgagtgactttacaaccaaagatattgatgacagggaaagatcatccaaatgggtttcagcattcctctttggacaaactatatcagtgat

SEQ ID NO: 10606 - DNA, 391 bp, Glycine max
  unsure at all n locations
  Clone ID: LIB3092-019-Q1-K1-B4
cagaattcatactttgaaatcaacacaagctatgggtgaggctatgaaaggcgtgacaaaggcgcatggggcaaatgaataggcagatgaacttgccatcattgcagaaaatcatgcaagaatttgagagacagaatgagaagatggaattgacatctgagatgatgggagatgcaatagatgatgctttggaaggagaagaagatgaagaggaaactgaagacctagttaaccaagttcttgatgagattggcattgacattaaccaagagcttgtaaatgcaccatcatcagctgttgctgccccggctgcaaagacanaggtaccacaagttgaaacgactgtgaatgatgatggagggatagatagtgatttacaggcaaggttaga

SEQ ID NO: 10607 - DNA, 333 bp, Glycine max
  Clone ID: LIB3092-019-Q1-K1-B5
cccacgcgtccgcccacgcgtccggggaaactctactaatttgccttcaccccaatcagtcgggagttccattcgcaggctgcaagatgaatttccactggctcgaaggcaatcacttcaaagatttcttgagaagagaagaaacaggtacagtactagcaacctttcctctttagtgctgtctctaatcagtttggaatttccaatattgtatttgatatcatgaatcactctctttaatgtatgtcaaaatttattggaactataaatcatgaatggaattcataaagtcaggagtcacatccacataattttgtgatctctaacaaattt

SEQ ID NO: 10608 - DNA, 268 bp, Glycine max
  Clone ID: LIB3092-019-Q1-K1-B6
ggtcgcacaagtttacggtggccttgtttacatggactttagcaaggaaaacatgaatgagctgggccatggagtttatgtaccagtggatttgagtctcctccctcctctgtatctcatctatgcggaaaatcctagtgattctggcaaggttcatagtaaagtacggcagaggtggcttgatggtgatgagttcattgtgtcttccatgcttgaaattgctaatatcgcccaagaaggaaagactgcattagaagaaaaggactac

SEQ ID NO: 10609 - DNA, 356 bp, Glycine max
  unsure at all n locations
  Clone ID: LIB3092-019-Q1-K1-B7
agtcgcacaagtttacggtggccttgtttatatggactttagcaaggaaaacatgaatcagctggtccatggagtttatgtaccantcnatttgaatctcctccctcctctgtatctcatctatgcggaaaatcctagtgattctggcacggttcatagtaaagtaccgcagaagtggcttgatggtgatgagttcattgtgtcttccatgcttgaaattgctaatatcgcccaagaaggaaagactgcattagaagaaaacgactactccaaatttgcagctctcatgaatcgaaattttgacctgcgaaggttaatgtttggaaatgatgccctcggtgatttgaacctaaaaa

SEQ ID NO: 10610 - DNA, 224 bp, Glycine max
  Clone ID: LIB3092-019-Q1-K1-B8
ggcgcgacacacgcgtccgaatacacatccttccactcatacaagtcttttgctaggttatgctaaacttctacaggggcgtttcaaaactataggtgaattcacatcccaccatctctaagagctcagctgaactatccgaaacaaaaggaactgatttggaatacatatgtaatagaactacgagcaaagccaaatgttattccccggattcatcatatgat

SEQ ID NO: 10611 - DNA, 244 bp, Glycine max
  Clone ID: LIB3092-019-Q1-K1-C1
gaaacatattacatacacaagttatataacttatatataacagtgtgtgcatatatgacagatgtcgatatactactcgtattacatccaaatatcatatatctctgataactgctgatgtacaaacaccaaatttacttggaagttctcatataatatataacccacgtcggatgcaaataatctttctggtgcacccgaaagccacggaggaatcctgggccctgatgacatgaatagccca

SEQ ID NO: 10612 - DNA, 454 bp, Glycine max
  Clone ID: LIB3092-019-Q1-K1-C10
acgcccacgcgtccgcccacgcgtccgcggacgcgtgggagaagagtcaatatgctgtcagaggtgaattataccttcgagcttctgaacttcagaaagagggcaaaaagattatctttactaatgttggcaacccgcatgcattgggacagaaaccactgagcttccctcgccaggttgttgctttgtgccaagctccattcctacttgatgatcctaatgttggactgctattccctgctgatgcaattgcaagagctaaacactatctttcattgacctcgggtggtttaggtgcttatagtgactcccgtggccttccatgagtgaggaaggaagttgctgagttcatactcaggcgtgatggttatccaactgatccagagctcatatatctcactgatggtgcaagcaaaggagtgatgcagatattaaatactatcattaagggtca

SEQ ID NO: 10613 - DNA, 382 bp, Glycine max
  Clone ID: LIB3092-019-Q1-K1-C12
acgcccacgcgtccgctcactcactaagctaaacaatttcatcaagcctgccatggcttcctctgatgctttctctgccattgcagctgctgccatctgcacaccaagttcccagaagaatggatcactcttgggaagcacaaaagcttcttttcttactgggaggaaactgaaggtgaacagttttacagcaccagttggagcacgatccagcactacagtgtgtgcagctgctgagcctgataggcctctgtggttcccaggcagcacccctactgcatggctagatggcaatttgccaggagattttggctttgatcccctaggtcttggatctgatcctgagagcctgacatggaatgtccaagcagagcttgtgcac

SEQ ID NO: 10614 - DNA, 395 bp, Glycine max
  Clone ID: LIB3092-019-Q1-K1-C3
gcgcttggaatggtcaaagcccttggttacattttcactttcctgtggaagctgttcttcacctgggggaagcagcagaccacagagcaaaggtgcaaacagaacaatcagcagaggtgcaagcaggacatacaagggtgcagatcaaggaaaagcccaaaaggagagtcacaagactaaattaccttcgagactatgcttgagggcaggaagggaattgagtagcaatccttatcgtgtgatgctgttgctagagcaggggacaagcttaacggatttgattctgtaatattccttttgcacaaaaagataagaattctgttagtagaggatagtataaataagtatgtaaataagccagaatcataaatgaatgaaaatcgcaaagttccctt

SEQ ID NO: 10615 - DNA, 256 bp, Glycine max
  unsure at all n locations
  Clone ID: LIB3092-019-Q1-K1-C4
aaaaaccggccgaccgacgcgtacgcttacaattntcaaagcccttccttacatttatactttcctgtccaagctgttattcacctgctctattcaaaagaccacatagcaaaccttcaaacacaacaatcaccagaagttcaagcacgacatacatacttacaaatcaaaaaaaatcccaaaaacagattcacacgactaaattaccttcgaaactattcttgagggcacgaaatcaatttaataacaatcctta

SEQ ID NO: 10616 - DNA, 366 bp, Glycine max
  unsure at all n locations
  Clone ID: LIB3092-019-Q1-K1-C5
aaaaaaccnncgcgacccacgcatactctcacacgtcctaccctcatcccaccatttttactccttctgaaacagaaatccaacttcgttgtttttcataaaccctcacaaatcaacaacctactcaattagatataaagccaacttcaaaaccagaagtgcacaacaaaccaaataccaaaccaagattcacatgattaattaacactacaacatatattacactccaaaataccaatccattattcattctaataacatcaacattcttccacaaataatatcaaccttcactgacttcaatttacaacattctacatcatcaacacaataactatcacgatattatcttatagtatgacttac

SEQ ID NO: 10617 - DNA, 348 bp, Glycine max
  Clone ID: LIB3092-019-Q1-K1-C6
cccacgcgtccgcccacgcgtccgcccactcgtccggtttcgggggaagagatccagcgggagtggtgtacgtcaaggctcagaaatcaaaagcctacttcaagagatatcaagtcaagttcaagagaagaagagagggaaaaaccgattaccgtgccaggattcggttgattaatcaggacaagaacaaatataacactccgaaataccgatttgtggttcgctttagcaacaaggacattgttgcacaaataatatctgctagcattgccggcgatttagttcttgctacagcatattcacatgagctgccacgatatggtcttgaagtaggacttaccaaatatg

SEQ ID NO: 10618 - DNA, 444 bp, Glycine max
  Clone ID: LIB3092-019-Q1-K1-C7
gcgtgcggcactcttccacccactcgtccgcccattcttccggcttcggaagaagagatccaccgtgtagggtttacatcacggctcacaaatcaaaagcctacttcaagagatatcaagtcaagttcaagagaagaagagagggaaaaaccgattaccgtgccaggattcgcttgattaatcaggacaagaacaaatataacactccgaaataccgatttgtggttcgctttaacaacaaggacattgttgcacaaataatatctgctagcattgccggcgatttagttcttgctacagcatattcacatgagctgccacgatatggtcttgaagtatgacttacaaattatgcagcagcttattgcactggtctcctgttggcccgaagagtcctcaaaacacttgaaatggatgaggagtattaaagaaatgttgaagcta

SEQ ID NO: 10619 - DNA, 145 bp, Glycine max
  Clone ID: LIB3092-019-Q1-K1-C8
tacccaaaatttaaccatttgccctttttataccaatcagtgtcccactctaaccccctttaaatccgcgaaaactcaaacctctttctttctaataaaccagaaacaccttctctatcccctattttcttcttctcccaaaata

SEQ ID NO: 10620 - DNA, 407 bp, Glycine max
  Clone ID: LIB3092-019-Q1-K1-D1
cccacgcgtccgaaaaagagttctttcaaatttcaaacagccttaaccttcgctgcccccagcgttgtgccattggcacccacaaagagtgtctcccatattaccatctttcctaccaaattgaaagccccgcgctcctcacctagttactctccgattagggttgcaaccgtggagcccgacacttcaactgtctactacaactctgcgttctcagtgtttcctgcaaaagcatgcgaaactgtaagaggggaagcctgcatggcggagatgtaccctgaaacgaagctacagccagaggctaagactccacgagtcgttacagagaacgttgagagagagtatcttgaatactatgatcctaacacgtaagatatataggaatcaattcagatacacttttatta

SEQ ID NO: 10621 - DNA, 294 bp, Glycine max
  Clone ID: LIB3092-019-Q1-K1-D10
gtacccttttatgatctgaaacagaaatgattgatccatcgtcatgcttgaggctaaaacggaccatcttaacaaatcggtggaattgatctatgcaacacgacacacaccccacacatgtgatcttactaactccaatattgtggcctattgaaacacgatttcaagtaggcagatgtctatctttccatgatttgttcacttcccatgatgactacgatcccattacgatatatatacatctaattaatccttttgccatcgtctaggacgcaagccatagtgagaggtcat

SEQ ID NO: 10622 - DNA, 339 bp, Glycine max
  Clone ID: LIB3092-019-Q1-K1-D11
cccacgcgtccgcccacgcgtccggcttgatgactgggttctgtgtcgtatctacaagaagggctcgagtgcgcagaaggcggtgcaaaacggcgtcgttccgagcaacgagcacactcaatacagcaacggttcctcttcctcttcttcgtcacaactcgacgacgttctggaatcgctgccagcgattgatgaacggtgtttcccgatgccacgtgtcaacacgctgcagcaacagcagcacgaggagaaggtcaatgttcagaacttgggtgaaggggggttactggattggaccaacccttcggttctgaattcggtcgctgatttcgtatcggg

SEQ ID NO: 10623 - DNA, 403 bp, Glycine max
  unsure at all n locations
  Clone ID: LIB3092-019-Q1-K1-B2
cgcccacagcgttcgcggacgccgtgggagtnccgtgacacaagcttatccacctactttcatttgagcgacgtcttctcagtccaaaacagcttctcgttttctcatctgaaaaatgaggagcatctttgtccttctccttgttctgggtttgtttaagtatgcatttgctgaagaagggttttgctctgctccttcggaatcgaaatcaaagcctctttattggaaagtggataaccccactctctcacctattcaccttcaagatttgcctggattcacacgcagtgtttataagagtaatcatgctttggtatcaccagaaagtcatgtttttggcccattgcctgattggatcgacacgtcaggcgcatatttaatttcaccagaaatgggttcacac

SEQ ID NO: 10624 - DNA, 374 bp, Glycine max
  unsure at all n locations
  Clone ID: LIB3092-018-Q1-K1-H2
ttttattaaattaaaatccattggtttcatggctacctacttaaacaatggttggggtataaagtgagtgaccccacacacaaatatantggatccctttaaaacccctgcccattttcttttcaagttgttgaacctttttttaatgaaataagggcgcacataattcgaattacgctatctccattctcataatattcacactctcgacactctaattcaaaaaaatttttgctttacattataaatgccctcaataaatattgtattctttactgtcacatttttgaaccaacaattaagactgttggagaaaaaactgaatgccctcataacctgcttcctatgagaaaggccttcaattccacttttat

SEQ ID NO: 10625 - DNA, 448 bp, Glycine max
  Clone ID: LIB3092-018-Q1-K1-H5
cacacacaagcattagcactaggagcagcaacaactagtctcaactgaaatggcctgttcagggatggcatatggggccctcaaacctgcccctttcactgttgagaagtcctcagtgagaggccttccctctctctcaaggaactcttcttcattcagagttgtggccattggcaagaagatcacgactgacaaaccttatcgaattaatggtggcatggcttagacggatggaactgatgcatctggcaggaaaggaaagggaaagggtgtttaccagtttgtagacaaatacggtgctaatgtagatggctacagtcctatctacgacaccaacgactggtctccaaccggtgatgtctacgctggcggaacgactggctaggctatctgggctgtgactctacttggtcttttagctggtggtgcacttcttgtctacaacaca

SEQ ID NO: 10626 - DNA, 350 bp, Glycine max
  Clone ID: LIB3092-018-Q1-K1-H6
atcaaacattcataatcccttactaatctatcttttatatacacctgaaatggactggttagggatgacttttggggccctcaaaactacccatttcactgtactgaactcctatatgaaaagcctatcatctctctgaagatgacacttctaaattcagatacagcggtcagtgacaagaagatcaagactgacaaaccttatggaaataatggctgactggcttttacgtacgaaactgttgcatttgtctggaaaggaatagaaaaagttgattaccagtttgtttacaaatacgggactaataaaaacgggtacagacctatctacaacacctaggactagattcc

SEQ ID NO: 10627 - DNA, 263 bp, Glycine max
  Clone ID: LIB3092-018-Q1-K1-H7
acgttaaaacaagcataaacagtaggagcataagcaatggcgctgaacaagccaagaaccaggagggggaaccttgatggggctaggggcataggcttgtattgaacgtaacacatgaactacaagacgggtatctgggccatcaaggacaaaaacggtgatgttttgggacgctactatcacaaacataaattggaggacctggaccagaatacggccaatttctatcaatggaacgaaattaagaatttgctagacaacaa

SEQ ID NO: 10628 - DNA, 464 bp, Glycine max
  Clone ID: LIB3092-018-Q1-K1-H8
gcaaaacgaggagaagcagaaggagcaaaagcaatggcgccgaacaagccgagaaccacgacggggaaccttgatttggctagggggatcggcatgtattcgaggtcgcagatgtaccacaagaggggcatctgggccatcaaggccaaaaacggtggcgttttgccccgccacgatcccaagcccaagcccgaggccccggcccaaaaaccgaccaagttctaccccgcggacgatgttaagaatctcctcgtcaacaagcacaagcccaaacccgcgaaactgatggctagcattactccaaggactgtgttgatcctgctagctgggaagttcaagggaaagagggttgctttcctgaagcacctcccatctggattgcttcttgttactggtccctttaagatcaatggggttcctcttagaagggtgaaccaatcgtatgtcattggtacatccacaaa

SEQ ID NO: 10629 - DNA, 211 bp, Glycine max
  Clone ID: LIB3092-018-Q1-K1-H9
atacgcctacaacatctctccaacctaacaacacgcatttaactcaagctcgatgagattcttaaggtcaactacagaccatgatactactcctaaatcatcatcctccctagatctcaaacctattcccaacacttcctaattcctatcaacaaacataccatatccatacgaccaacttcatatatatcaccctataatacttacagcc

SEQ ID NO: 10630 - DNA, 424 bp, Glycine max
  Clone ID: LIB3092-019-Q1-K1-A10
aaacacgtcactaatcgtatcaacaattcaccatgcgcttgagctgcaatggatgccgcgggctccgcagagggtgcaccactgagtgccccattcgcatctccctccaatggatcaattcccctaactcccaatccaacgcaaccctcttccttgcaaagttctatggccgccaaggcctcctcaccctcctcaccaacgctccctcacaactacaacaagccgttttaaaatctttgctttacgaagcatgcggtcgaatagtgaacccggttctcggctcgaccgggttgctctccaccgggaattggcatttgtgcgaagccgcggtcaaagccgttcttaatggcgcgccgattgagcaagctcctttggacggcgccacatgcctgcaactcaaggcttgtaatattcgccacgtggc

SEQ ID NO: 10631 - DNA, 383 bp, Glycine max
  Clone ID: LIB3092-019-Q1-K1-A2
acgcggtttctcttgtcacaccaaatggaccgatctgccgccatattttccgacaccgtcaaccggaacggcacggtgacgcagctgtctctgctcgccgacgggaggctgtggtggccggagggcggtcaacgcaatttgagcatcgagaaagaggttctcgggttcaccggcgacggtcccgatataaggctcaaaacaatcgtggaaaccgaagatggatgctgtggcggtgcaagcagagcaaaactagtccgaaacgacgtcgtttttcggccatcgtccgaggaaacgcataagctctggtgccagaagctggggcgaatcatcgattctctcggacgacccaagggctttttggtttttgtaatccattcggggga

SEQ ID NO: 10632 - DNA, 415 bp, Glycine max
  unsure at all n locations
  Clone ID: LIB3092-019-Q1-K1-A3
gctatctcttgggttggctggtatcccagcatttctgctaactttgggagccttgttcgtgggggacacccccaacagtttgattgaacgtggccgcttggaagaaggaaaaacagtgcttaaaaagattcgtggcactgacaacattgaacttgagttccaggaattgcttgaggccagtcgtgtggctaaagaggtcaagcatccattcaggaatcttctcaagcgcaggaaccgaccccaacttgtcatttccgttgccctacagatattccagcaattcacaggcatcaacgcaatcatgttttatgccccggtgctgttcaacacgttaggattcaagaacgatgcatccctgtattctgctgtgataacctgggctgtgaacgtgctctccactgntgtatcgatctac

SEQ ID NO: 10633 - DNA, 403 bp, Glycine max
  unsure at all n locations
  Clone ID: LIB3092-019-Q1-K1-A4
gaatacccgggctcgagccgcacgcgtcacggctatgctnncttgggttggcctggtattcccagcttgttcctgctaacatttggcgagcacttgttcagtgggtggacactccccaacagtgttgagttgaaccgtggcccgcttttggaagaagggaaaaaccagtgctttaannaaagattcgtggcacttgaccaacattgaaccttgagttccaggaattgctttgaggcccagtcgtgtggctaaagaggtcaagcatccattcaggaatcttctcaagcgcaggaaccgaccccaacttgtcatttccgttgccctacagatattccagcaattcacaggcatcaacgcaatcatgttttatgccccggtgctgttcaacacgttaggattcaag

SEQ ID NO: 10634 - DNA, 380 bp, Glycine max
  unsure at all n locations
  Clone ID: LIB3092-019-Q1-K1-A5
cgcgtacggctatctcttttnttnnctggtatcccagcagttcttctaactttgggagccttgttcgnttggacacccccaacaggttggttgaaccttnccgcttggaagaaggaaaaacagtgcttaaaaagattcgtggcactgacaacattgaacttgagttccaggaattgcttgaggccagtcgtgtggctaaagaggtcaagcatccattcaggaatcttctcaagcgcaggaaccgaccccaacttgtcatttccgttgccctacagatattccagcaattcacaggcatcaacgcaatcatgttttatgccccggtgctgttcaacacgttatgattcaagaacgatgcatccctgtattctgctgtgata

SEQ ID NO: 10635 - DNA, 346 bp, Glycine max
  Clone ID: LIB3092-019-Q1-K1-A6
cagctcgacctttacaactttttttttcttttacttcgttacggacttttttttctttgggttttcggaagtttgctgctagaggttgcatatttggggtttcacacgtgcgcaatttgaaggtattattggaggagagagtgtaaatgaagaaaccaacaaccgacgcaattagtatggggaaaaggagcctggagggtggagaagatgaccagcctgaacgaaagaggcctgctcttgccagtgtaattgtggaagctctgaaggtggacagtttgcaaaagctttgctcatggttagaacccattcttcgtagagttgtcaatgaagaaatggagcgtgcttt

SEQ ID NO: 10636 - DNA, 284 bp, Glycine max
  unsure at all n locations
  Clone ID: LIB3092-019-Q1-K1-A8
aaaaaggggcgcccacccttccccacaccttcttaactttntaaaaatttacactcaatacataccctactttancggcacatctcaaacaagatagccttccattttcctttctaacaaataataacattctttctaataacactaattattccaaaattaaaacaaatatttatatcatagactgatctcttcctctacatttgaaaaccaatatctccttccttaatcaatataggctacctaaacccacttttatttttcactatacctattctccctat

SEQ ID NO: 10637 - DNA, 368 bp, Glycine max
  Clone ID: LIB3092-019-Q1-K1-B10
acgaaagattttatccaattgaaattttaaaaatgactgggataaacttaagaaggcaattattggaatttaataagttaacaatttaattggattggtcgaatggtatcaaaaaaatggagtactaactcccatttcttatttattattgaattaaccgatcaacttgctttgttatcgaacatttctttttgatttcaaatatattccggaaaaaatttgaatctatttttatatgcgaatcaatcctactacttctggtcctgaagtttctgctcttgaaaaaaaaaatctgggacgtatcgcccaaaataattggtccggtactagatgtaactttttccccaggtaagattcctaatatttac

SEQ ID NO: 10638 - DNA, 441 bp, Glycine max
  Clone ID: LIB3092-019-Q1-K1-B12
acgctttgcactactactaaactaccatcttgctttccaagcaatcactaaagtgaaagccatgcatggtaaactgcttggtgctgcaagagaacgttgtgaagatcgtgaaaaccgatgggaaagttcttgaatacaaaacacccatcaaagtggaagaggttctgatacaattttctggccatgcagtgtctgaatcactcacagtgctgcggcatcttgagccacacacaaagttgcttagagggcagttatattacctagtgcctctgccaccatcaccaaaaaccaacaagaaggtgaggtttgcggaaccagaagtccaagatgtacataaaagtaacgtggttaggattaaggtggttattagtaagcaacagctgcagaacatgctgcagaatggagggttttcggttagtaagatgttgtctctagttcatg

SEQ ID NO: 10639 - DNA, 364 bp, Glycine max
  Clone ID: LIB3092-018-Q1-K1-H12
gccgctattctactcgcaagcaaatcagaacaagagaagagaatggcaggagcagagggggtaaacagagaacagtacgtgtaccttgcgaagctgtcggagcaggcggagcggtacgaagagatggtggagttcatgcagaaggtggtggtggggtggacgccggcgtcggagctcacggtggaggagcgcaacctcctctcggtggcctacaagaacgtgatcgggtctctgcgtgccgcgtggcgcatcgtgtcctccatcgaacagaaggaggaagggcgcaggaacgacgaccacgtgtccctcgtgaagcactacagatccaaggtcgagaacgagctcacgcaggtctgcgccagca

SEQ ID NO: 10640 - DNA, 448 bp, Glycine max
  Clone ID: LIB3092-018-Q1-K1-F7
gaaatacacggggattgcattcgagtgccttgtgccattggaccgggatgcggttcatgtatggaaaagggcacctattatggcacaggtggtgattgggaccccagggacagtcaataagtttattagcttcaagaaacttgggaccacgaggttgaggatacttgttttctatgatgctgatcaaatgcttgctgatgatggatttagagatgattccctgtggataatgaaagatatagaaaaagagaattctaagtgttaggttcttttgttttctgctacatttaatgacaccatcaagaatatcgtttgaaggacagtcaagatggatcataataaactttttgtaaagaaagaataactatcttgagatgcagcgaaacaatataaagtgtattgtcctgatgaacttgctaagattgatgtggaaaagattacatatttg

SEQ ID NO: 10641 - DNA, 459 bp, Glycine max
  Clone ID: LIB3092-018-Q1-K1-F8
gacatacatagagagagagagcgagtctctaatactatcgaacctaaatgcaatacgtgtgtggcaaacttcactatactattgcacaaatccatattaggaaaaaattatcacattacaaatctatataattctctatactagagaatataaagtttgcagctagtccttttcaatcagctaatcataactttcactaggaacaatatcaagatcactccctcttgctacagaaacttatataaacagtatatgaaatattttaccaaaaaatactttataatacatacaatgacgcattgactaatattgattgaataaaactaagaacggattatcaaaaactttatatactttaacatcacttataacgagattcaacaaaaaaacataaaatctaattctctgactaaattcataatatgtatatgtttagatattacggattctcatttatat

SEQ ID NO: 10642 - DNA, 225 bp, Glycine max
  Clone ID: LIB3092-018-Q1-K1-F9
acgaaaaaagataaatgaatcgcactaaaaaggattatgaagaacggtttctggcttgtgctgcgaattcttctgatccaggacaacaacgttgtcaacgcctacaacaacaaacactgagtcacagacgattgcctcatcggcaacaacgatttggaatcagagtactactttggatcccatgtggccagaatgctctacgatgtgagccaatctgtgagtggc

SEQ ID NO: 10643 - DNA, 306 bp, Glycine max
  Clone ID: LIB3092-018-Q1-K1-G1
ctttgtatggcggaaaatatgaaggaggtggaagttgaagatggatatgtcttgaaagaagagatccggctcacggtgctaaaaacctctctgttcttcgcgggcgatggcttcagcgtctacgattgcaaaggtcaactcgtgttcagagttgactcttatggacccgacactcgcgacatagacgaactcgttctcatggatcctaacggacgttgcctcctcaccgttcgtcgaaagcggccgagtttgcatcaacggtgggaaggtttcaaaggggagagaatggacggtgataaacccatc

SEQ ID NO: 10644 - DNA, 329 bp, Glycine max
  Clone ID: LIB3092-018-Q1-K1-G10
gtttctctctcttagttcaaatttcgaattcggaagcagcaaaactaaagcccaaaaacccgtaccaagatgctcctcggaagccactgttgctacctcggcataatcgccgggctagcagtgttcctcgcaacgacgtcgttcgccgacgcgcaatcctgcaacggcatcctcgtctcatacgcctacaccggcggcctgcggttgccgcccaacgtctccgactcggctaagcagccgtaccggttcgagtcgacggtgacggttctcaacaacggcctcgacgagctcaagtcgtggaaggtcttcgttgggttcgaccacgacga

SEQ ID NO: 10645 - DNA, 325 bp, Glycine max
  Clone ID: LIB3092-018-Q1-K1-G11
gttctaagattgttttgtttgagttaaacgcgacaaactcaaatacgtgtgcattacaacgcctaacccctcaccatcctcttcttctctctcattcatacccctccttttttatttgtattctcagctttgttagattccgtttctggtttttcccaattccatagtactctgttatcgtcgtcatcccttttatagacaaagctgattcacttaggagcctcgagagctatgtctacatcttctcgtgttcttcccactccattggaaaacaagtatatgaaacccccagattcttttcagctttcgccagtcagagatctga

SEQ ID NO: 10646 - DNA, 232 bp, Glycine max
  Clone ID: LIB3092-018-Q1-K1-G12
catgaaacagctccacaagcaaacgagtctgaatcaccggagggaggaagagatgttggggagcagcgagagctcaccctactcccccaaatccatcatgcacaccagatctctccccagatccatcaactacctgcttcgcgagcatgcgcctcttgttcatcctcgtcggcatgctcatcggctccaccttcttcatcatccagcccactctcttccggattggcccaac

SEQ ID NO: 10647 - DNA, 314 bp, Glycine max
  Clone ID: LIB3092-018-Q1-K1-G2
cttccaatttttgttttcttctataatatatttagaagaaaacaaaaattggaagaaggatgggacataatattaataagaagcaaggagctgggggaacttcatgagactaagattccctcacatctttgttctcattattatgggggtgccacattttccaatttttggtttcttctaaatatattatagaaatgtacatggacacggaaattacactattcaaatcagtgtagtgagtgcatgtcttcaagattagcataaattaaagcgtttcttaatagcctagatatgacacaggctatgttgggcga

SEQ ID NO: 10648 - DNA, 391 bp, Glycine max
  Clone ID: LIB3092-018-Q1-K1-G4
gcgggaagaggtggttgatttgcatcaagagcaacttagaacagctcaccacgcatgaaaagtgaggctagggcttcaatctgcagaacaaaggcagaaacaaatggtttctttccttgccaagttgatccaaaaccccgcctttttagcccgccttagacataagaaggagcaaaaggaaatagattctccaagagtggtaaggaagtttgtcaaacagcaccatgaaactggaacaacaacaacagcagaaactctccaagaagggcagatagtgaggtatcaacctgattggagaaatatagccatgtcttctgaaacttcaaaactaaattcagtttccattgaacaatctcctcactacctttcacaaggtttggcaagaaaaatg

SEQ ID NO: 10649 - DNA, 452 bp, Glycine max
  Clone ID: LIB3092-018-Q1-K1-G5
gtagaattcacataaacagggagagctcagctgacctgacaatgattataggagccatgtctgctgctgttatgttggctggaattaacaattgccaaactgttcaaccaattgtagccattgaaagaacagtgttctatctagaaagagctgccggaatgtatgctactttgccttatgccttagcacaggtcttttgtgaagtaccatatgtgtttatccaaactgtttattactcactcatagagtatgctatggtgagctttgaatggaaagtggagaagttcttttggttcttctttgacagcttgttctctgtcttgtacttcacatattatggaatgatgactgtgtccatgacaccaaaccaccaagtggcatcaatctttgcagcagcattctatggactctttaatctcttctctggtttctttatcccaagaccgaaaatt

SEQ ID NO: 10650 - DNA, 324 bp, Glycine max
  Clone ID: LIB3092-018-Q1-K1-G6
cggggcgacccacgcgtacaagaatattcttataaacaggaacagctcagatcaccttacaatgcttataaaagccgtgtctggttctaatatgtgggacggaagcaacaacaaattaactgttcaactaactatttccatcaaaacaacacctttttatcccgacttagatataagaatgtgcgctacgttatcgaatgtcttagcacaggtatgttgtgaagtaaactataccttttaactagctcgacatcaatcactgatactctatactatgagcaatattgaatggtaaacctagatggactaatatatccatttttt

SEQ ID NO: 10651 - DNA, 342 bp, Glycine max
  Clone ID: LIB3092-018-Q1-K1-G7
gaaatacatccaaaaacccttcgagctccttttaccattcaatcattatacaatccatgtatggcaattttatattgttatgactcaacaatttactaactccccaaacaaacttaatcatttcattaacatccttatattaagaaatactaaccagaatatattctacttcaattaagccattaatatacgtttttaggaaaaatacatatatgacttcctaaacttaaaaaaattattcataaagaaaactatacgcttcatacaattgaaatttctgaaacatacattgttctaacatataaaattatttttttgtcagtaaacaccaaatattataaa

SEQ ID NO: 10652 - DNA, 436 bp, Glycine max
  Clone ID: LIB3092-018-Q1-K1-G8
cttcttcgtctcaaatctcttcgatccttcgattcgttccatttcttccaaaatgggggaaggcccaattcgcgttctcgtcactggagctgcaaggcaaattgggtatgctcttgtccctatgattgctaggggagtgatgttgggtcctgaccagcccgtgatcctccacatgcttgacattcctccggcagcagagtcattgaatggggttaaaatggaattggtggatgctgcattccctcttcttaaaggtgttgttgccacaactgatgtggttgatgcatgcactgaggtcaatattgccgtgatggatggtggattcccaagaaaagaaggtatggagaggaaggatgtgatgactaaaaacgtctccatttacaagtcccaggcttctgcccttgaaaagcatgctgctgacaactgcaaggttctt

SEQ ID NO: 10653 - DNA, 382 bp, Glycine max
  Clone ID: LIB3092-018-Q1-K1-G9
cttcgctgctcactgtagcgtagccatggctttcagagttggacgatcgggatgactaaagtcctcttctaacatgggggttgctgaccatagcgtaagcacgttcctggaattgcacaggaagaaagctcatcgctatgtgatttttaaaattgacgataaaaagaaagaggttgttgttgaaaaaactggaagccctgctgagagctatgatgatttcactgcatccttacctgaaaatgattgccgatatgctatctatgactttgattttgtgacatctgaaaactgccaaaagagcaaaatcttttttattgcatggtctccttcaatagcccacattcgccctaaaatgctatatgcaacatccaaagacaagttc

SEQ ID NO: 10654 - DNA, 352 bp, Glycine max
  Clone ID: LIB3092-018-Q1-K1-H1
gcgatcgaagctggttttgatggggttgagatccatggggctcatggctacctgcttgagcaattgatgaaagataaagtgaatgaccgaacagacgaatatggtggatcccttgagaaccgctgccgatttgctttggaagttgttgaaactgttgttaatgagataagggcggacagagttggaattaagctatcggcattcggaaaatattcaaaagctgggagactctaatccaaaaaattggggctttacatgatgaaggccctcaataagtatggtattctttactgtcacatggtggaaccaaaaatgaagactgttggagaaaaaactgaatgccctcatagcc

SEQ ID NO: 10655 - DNA, 409 bp, Glycine max
  unsure at all n locations
  Clone ID: LIB3092-018-Q1-K1-H10
cccacgcgtccgcccacgcgtccggctgccgtgcttgctcaggctaaacttcctacatcagagattgcagcgactataaatgaattcagatcccgccatctttctgagctcactgaactatccgaaacaaatggaacttcttttggatatggatataatagaactacgagcaaagccaaatctcattccccagattcatcagatgatactcaagtctctgaaggtaaactggcgacatgaagattgccccatatatacaaagtggaaggtaaaagaaaacagaaaagtgaaaaattgtatagcagcagagtaaatgttccatcatgatgtacagaaatatatatatctgcataaaaaaaattgattaatcatccttaaaattcagctgangatggtggtcctggtttat

SEQ ID NO: 10656 - DNA, 245 bp, Glycine max
  Clone ID: LIB3092-018-Q1-K1-H11
aatagccgggccgaccgacgcgaacgcacaagttgaaaattgcggctctcgaggccgtcaacaaatcccatgcacgcggcagctatgggcctcttttaaaacggcggtctcgactgccatagtaatgtttttaaaggcttctacatggaatccatcgcgtttaatcccagcttgttcccttttcattcctcccttgtctccttcttcgcctttttccgttttcactacaacctgattgttttttc

SEQ ID NO: 10657 - DNA, 453 bp, Glycine max
  Clone ID: LIB3092-018-Q1-K1-F6
cccacgcgtccgcggacgcgtgggggagcatacacggaagaaactccatggtgcaggggaacgacgatgttatgtgcttagggtttgttgatggaggtgagaatccgaggaaccctattgtgattggagggtatcaattggaggatgtgttggtgcagattgattttgatacttccatggtgggattcagtccttcgcttctgacgaaacatgctacttgctctcatttcaaaccctagttttcggtgaatcgtgatgattatagtttattattatccataccacatagtttttctttagattaagaagagttttgaggagtttaacacgttctgtaataacccttttattttttttttctttcttttttgctctcctgcggtattatctgtataaactgcttaagtggcctatgttaaatggcgatggcattgttgatggcatttttatttg

SEQ ID NO: 10658 - DNA, 454 bp, Glycine max
  Clone ID: LIB3092-018-Q1-K1-D7
attgcagcaaatttggtccagaatggtcctcttgcagttggtatcaatgcagttttggtgcggacatatattggtggcgtctcatgcccatatatctgcggcaagcatttggatcacggggttcttttggtggggtatggttctggtgcttatgctccaattcgttttaaggaaaagccttactggatcataaagaattcatggggggagagctggggagaagagggatattacaagatctgcagaggtcgcaatgtatgtggggtggactcgatggtctcaactgtcgctgctatacatgtttctaacaattaaatataaggatggatgcctaaacgtggtaggggcaccagtatagtatgtatgtaaataatttgcacgatgtaatgttatgaaggaggaaactgctaagcacatgtttatgcttttattctggaattctctatgctagcta

SEQ ID NO: 10659 - DNA, 240 bp, Glycine max
  Clone ID: LIB3092-018-Q1-K1-D8
attatatataatttggtccagaattgttgtttttcaattcaaatcaacacaaaatcgaggcgggcatatatcaatggcgtctgatactcatatatcttcgaccatcatttctatcaccacactctattcatctagtatacatctacaactcacactacataaaggaaataagtcgtatgctacatgcgtcatacataattcatgaccccgagagctgacccaaaaaccgtttatactaaa

SEQ ID NO: 10660 - DNA, 372 bp, Glycine max
  Clone ID: LIB3092-018-Q1-K1-D9
cagagcatggctcctatgacattctccttcttcttcatccttatctcttacgtttcttcatcgtcaggtaaaaacatgggccacttctcttctttgagtttgtatttgaatttcgtcttaccaacatgaactctagttgtaattagaaaataacacttatgaaactgcatgtaaattttgttgcttcatctcattttgcattcgaaagttgtcaactttctgacgggctttgcataagcgggatcaatcggaataaactatggaagaattgcgaacgacctacctacaccggcgaaagtggtggagcttcttaagagtcaggggctgaaccgtgtgaagctctacgacaccgacgccaccgtcttaaccgcg

SEQ ID NO: 10661 - DNA, 117 bp, Glycine max
  Clone ID: LIB3092-018-Q1-K1-E1
acggttgatttctggatctatattgcgtttatggtttgagtagtattattgtgagatcattgtttgtagtacataattgatttctttatattcagattcgtgcttagtttttgtttt

SEQ ID NO: 10662 - DNA, 442 bp, Glycine max
  Clone ID: LIB3092-018-Q1-K1-E10
tgtaaccccagatctttctggtaaggttgatttgtggccaaatgaagatggtaaacttgagcgtgcttcactgacacgaagcatatgagatgattcaaaaccacctggctctcattctcggtaacagagctggagatttaacatcaatagctgaaatcagcaaattcagggtagggcaggtctacgcagcatcagtgatgtatggttattttcttagacgagttgaccaaaggttccagttggagaagacaatgaaagttcttccaaatgcaacagaaaaagagaatagtgctcatcaaactacaatggacaatgcaagacccagtattgaagaggacacttctcaagtgatgtctcatcctgaagtatctacctggcctggtggtgatgtccgtcccggtggatttggctatggtgtaaaggcaaccaggttgcgtaacta

SEQ ID NO: 10663 - DNA, 260 bp, Glycine max
  Clone ID: LIB3092-018-Q1-K1-E12
tttacattcactaactcgcctgctaatgcttcacgctctctttcattccgatcataaatgcagcacttaaacaaatcactggacttatatactcaatcactcacactagcattaaccatttacccattttatttaatacttacattatctttctacactcactacttttttatcactttcattaaataatttaattactacccttactcaatttaaaacaattattattttataaactctcatttctttctatttcctaa

SEQ ID NO: 10664 - DNA, 355 bp, Glycine max
  Clone ID: LIB3092-018-Q1-K1-E2
cttgtttctctcataatctcatcattggtccaacatagcccagcctaaaatttaagtagcaggagctagcactagctagttaggtttaatttctgtcttgtaattgagacaatttatgaaataaccgcacaattgattcatgatgaagaagagagtagcaagcaccagcaatgagtcctctaaacttgatcgcaaaaccattgaaaggaaccgcagaactcacatgaaatccctctgccatcagctttcttctcttattcctcccaatctcaaaccagtcaaacccaagttgatgctagggctgcaagaccagctggatcttgcagcaaggtatataagacaaatgacagagaga

SEQ ID NO: 10665 - DNA, 424 bp, Glycine max
  unsure at all n locations
  Clone ID: LIB3092-018-Q1-K1-E4
ttcatgcttaagtgctaaacgctctttctatctctctccatgtctccgctcatctcattcggggattgataacacaaagcggcaagcaaacaaacctcactttctgtctctctctatctaacaccaacaaacaaacccctcctgtctccaccacctctactttatctctctagggttacggcgcgaactctcactctcgctcctctgctaaccaccattgtaaggttccaatcctcgcgcgaattgcatcacactctgtgatcaaccgagttgtgagtcttctccttcctcagcgattgcttcctcgggctaaaggattgttgtaatcactgacacacacaccaaatgttgctgtnatgtgttgacgtttatacacgggtgagtgaatgatcgtgcttgatgcttgatgataggatctatggac

SEQ ID NO: 10666 - DNA, 392 bp, Glycine max
  Clone ID: LIB3092-018-Q1-K1-E5
cccacgcgtccgatcaaaacaagcatagattttaaggacgatatattgcaggattcggcggtggcaaatacactcccagggcttcaatcaaacaaacactcgcttatcctttactgattgacctagaaagccaacggttgacctgtcaataccatgagaccagaaatgttaacttgttggacacagctacatgagaacatggaatgctggttctcggctacataatgacgaagcaataaatgtttacatgactcatgtgaaacatcttctgtaagcactctctatgcctgcttaataacattatcatgcattgctttcttattctgcgctacaaacacccaactgttggcaactacacaattgcactgcacaaagctctcattatcataaat

SEQ ID NO: 10667 - DNA, 357 bp, Glycine max
  Clone ID: LIB3092-018-Q1-K1-E6
cccacgcttccgatcaaaataagcattttttttaaagactacatattcaagaatccggcggtggcaaaaacaaacgccgggccttaattaaacaaaaactcgcttatcctatactgattcaccaataaagcctccctctgacctatcaatctcatgagaccctaaaatgttaactttatggacacaacaacaccataacaatgaacacctatatttagctatcataatactaaccaatatatcttcacatatttcattaaaaccaacttctgtaacacctatctctacgttattaattacataatcattaattgttttaatatgctgtactatacacaccacacattttgcaaatat

SEQ ID NO: 10668 - DNA, 339 bp, Glycine max
  unsure at all n locations
  Clone ID: LIB3092-018-Q1-K1-F10
ctctcgtcttctacaaaattttctgttcgatctcaaccaaggttgttccttgcaccgccaggagtttcatcttcggaaagcgaaaaacacccgcagagcttctgcgggaaaataagaggatgctggacaaatcaatcagagaaattgagcgcgagcggcaaggcttgcaaacgcaagagaagaaattgattgcggagataaagaaaagtgccaaacagggccagatgaaaagggaatttctacaccccatgattggaggttccaaactctcccatgtttggatcagactatgttcaggaccccagcatctacatattaattgntggagctcttcatatg

SEQ ID NO: 10669 - DNA, 196 bp, Glycine max
  Clone ID: LIB3092-018-Q1-K1-F11
aatttctatatgaattgcacaaattgcgtttattatatccaactcctagcgaatcctttcgttctcataaacatcctggttcagttactactcttctacattttcatcatcaatctactgttctcttacttcattaccctcactcgttaatccttcaccaacatatacttctgcttcttctctctctctatcaacc

SEQ ID NO: 10670 - DNA, 450 bp, Glycine max
  Clone ID: LIB3092-018-Q1-K1-F12
cttcgctgctcactgtagcgtagccatggctttcagagttggaggagcgggaggaggaaaggcctcttctggcatgggtgttgctgagcatagcgtaagcacgttcctggaattgcagaggaagaaagttcatcgctatgtgatttttaaaattgacgagaaaaagaaagaggttgttgttgaaaaaactggaggccctgctgagagctatgatgatttcactgcatccttgcctgaaaatgattgccgatatgctatctttgactttgattttgtgacatctgagaactgccaaaagagcaaaatcttttttattgcatggtctccttcggtagcccgcattcgccctaagatgctatatgcaacatccaaggacaggttcagaagggagctgcagggcatccattatgagattcaagcaacagacccaaccgagatggatcttgaagt

SEQ ID NO: 10671 - DNA, 427 bp, Glycine max
  Clone ID: LIB3092-018-Q1-K1-F2
ctttgagacatggacggacttcttaccacagattccaaagtggttgacaggaacaaagttggtggcaagaaagctcgtcaagcccctcaatattccaaacgttgaggttgggatgttacatgtatgggctggcttttctttcctcctggtgtctctggaaatgggctacatttggaactatcgattgatatcatttgtaggttttggcttacaattaggaaaagtacaagagaaattgaaaaatatcccaacgcgtgtgtattcagaatcctgctctctgatttcccatctcttgtttccttgatctgtatggaattgggaattgtaagtatgatatatttgctttgactgtaccttttacccccaaccaaaatcacatgttttactatattgcacgtttctttataagacctaaattatgtgatct

SEQ ID NO: 10672 - DNA, 334 bp, Glycine max
  Clone ID: LIB3092-018-Q1-K1-F3
gtgattgttgtgactcgttcttcttcgtcgatatcttcttcttttgttgtttgtgagtttgtggtttgtctcacctgaaaatgtcttgctgcggcggtaactatggttgcggaagctcctgcaagtgcggcaacggctgctgaggctgcaagatgtacccagacttgagctacaccgagtcaaccaccaccgagaccttggtcatgggagtggcaccagttaaggctcaattcgagagtgctgaaatgggtgttcccgctgagaacgatggctgcaaatgtggagctaactgcacctgcaactcctgcacttgcaagtgaagtgttggagagct

SEQ ID NO: 10673 - DNA, 455 bp, Glycine max
  Clone ID: LIB3092-018-Q1-K1-F4
cccacgcgtccgccaaaccaaacctctcaagtctcaatggcttctcagcaacacgacgccggggtccgcgaagaagacatggacgacgacgacgacgagtctcaggaggacggagactacgaagaagaagacgacgacgttttggccgacgacgaagaaaacgagccctctccctccacggctcttgccgtcaccgtcgccgtccccggttcctccgtctccaacggcggtgccgctccaatttcgacgcccaccgccaccaccatcgttgtcgcagactcctccgatccgaagcggcggcgcctcgagccagtcgaggagaaaaagccgccgccgacgccggacgactcgcggcggctgtttcagcggctgtggaccgacgaggacgagatcgagctcttgcaagggcttctagactacacctcgcagcgagggatctcgcaccacaacgacac

SEQ ID NO: 10674 - DNA, 410 bp, Glycine max
  Clone ID: LIB3092-018-Q1-K1-F5
atcaagcgtgaattgtctctattccgtctgttcaatttaatggctattccaattatgtctatgtttttgactaaacttctgactgaatatttacataaactatttgtacgcccaacgaaaatagtgcgagatttccaaaagggaaaagctgttggtccagtcactgttcgtgttaaatgtgaagaaacgcgagatggaatcaaggattctacgggtgaactatctggtactacagtggatgctcgaaagctttgttatatattttacgggaagatacatccttatgttattgttactctcgataatcatgttatacgcagcataaagcacaatctaactactgtaattcgacccgcttgaatgccaatttggaatcaagaatttcatatgcttgtgttctaccctaggaa

SEQ ID NO: 10675 - DNA, 400 bp, Glycine max
  Clone ID: LIB3092-018-Q1-K1-D6
tgcacattttagttctgtcccttggcgtaatgatatatgccaatgaacaaaaaagggtgtcggggtgaaaccaaaaatgggtgatgctctgctattttggagcatgaggcctgatgccactctagatccatctagtttacatggcggttgcccagtaattaaaggaaataaatggtcttcaacaaagtggctgcatcttcatgagtacaaggtttgacccatcaactgcatacgattaacgtggtacagggtgagtatttcatcgcattttggattggagaaacacaaggtcaatgcattcatgttcaccttttattctacctagtgatctttccctttgctcatgtgcgccagcattttctttacatgtaaaataaaccatttggtttctctttatcat

SEQ ID NO: 10676 - DNA, 202 bp, Glycine max
  Clone ID: LIB3092-018-Q1-K1-B8
aaaaaccgggtgcacccacgcgtacgataacacaaaataatttaactctggcttttaaatgattcttcaccagaagaacaaggggggtgtgtatatgggtgccgcgggctaaccataccatataatgtgatttcaagcatttgtcatattcctcactagctttcacacacaacatgtttgataatacatgctcgagatattt

SEQ ID NO: 10677 - DNA, 274 bp, Glycine max
  Clone ID: LIB3092-018-Q1-K1-B9
aaacacctcactaatcgtatcaacaattcactatgcgcttgagctgcaatggatgcctcggtctccttacaagatgcaccactgattgccccattcgcatctccctccaatgcatcaattcccctaactcccaatccaacgcatccctcttgcttgcaaagttctatggccgccaatgcctcctcacccttatcaccaacgctcccttacaactacaacaagccgatttaaaatcttcgctttacgaatcatgcggtcgaatagtgaacccttt

SEQ ID NO: 10678 - DNA, 426 bp, Glycine max
  Clone ID: LIB3092-018-Q1-K1-C1
ctgaagaagtagaagagagaattgaggaagctgccgagaaaggagaactgactgaacttgtggtaatggtcatatggaatcgccttgatcttgctcggcgtgatgaagaaaaggatgccattagaagtctggatctgttatacagaagggttgagactgagattttgaaacgagaggctacccctgcgatgagattgctcaatgatcttttgattatgtacgacggctataattttgaagagtggctaaagaaatgtaaaaaggtcatgattgatacgtttcctcgggaggatccattcagtatccttgttccaccaggatttgagtcattcgacatagataagcatcacgggccattgcgaccatcacttgaagtcgataatactcttttgagggtggactttgtaagagaggtggatgaattgc

SEQ ID NO: 10679 - DNA, 171 bp, Glycine max
  Clone ID: LIB3092-018-Q1-K1-C12
tcctcaattcccttctcgacccactcgtcgaccgcatcctacccccacacctccgctcactcatctcattacacaatttcatcaagcctatcatcgctcacttagaaactttaccttccatcgtagctacttccatctgcacaccaaactctcatctcaactaatcattct

SEQ ID NO: 10680 - DNA, 427 bp, Glycine max
  Clone ID: LIB3092-018-Q1-K1-C3
gagctgtaaacagggttttggaaaaaatggaaggtgttgagtcatttgacattgatctgaaggagcagaatgtgacagtgaaaggaaatgtgcagccggacgaagttctgcaagccgtttccaaatccggaaagaagacggcattctgggtggatgaagcacaaccacctgaaaacaagccttctgaaactgcacctgttacctcagctgagaatgataacaaggcttcagaaagtggacctgttgcctcaaaaaacaagcctccagaagctgcacatgttgcctcaactgaccctgaaaccaagccttcagaaactgctgttgaaactgttgcttaacgcatttgtggttctatttttctatgtggaagtaggtctgtttcatatagtatatgatgtgctttgtgcatgtcaactaatatatttgc

SEQ ID NO: 10681 - DNA, 405 bp, Glycine max
  unsure at all n locations
  Clone ID: LIB3092-018-Q1-K1-C4
ctcccatggctttcgcagcagctcctcttatccaggttgtattatacggaaatcccaagtttttgtttttgaggagtactgctcgttgcacggtccacgcctctcgcagaccaccaccccctgggcctggagttgacaccagaatccattgggaaaacgaagatgaaggttggattggagctaccaataccaaacaccaacagacccacaaacccaataacaacatgttacaggctgatgactttcctgatttcctcaccgcttctttaggttctcattacgaattcttgggtgtatcaccagatgcggatgtagaagaaattaaagttgcttatcgggaattgtcaaggagtatcatnccgcacaactttcctgcctctcaaactgcctcaaaaaattcatgaa

SEQ ID NO: 10682 - DNA, 256 bp, Glycine max
  Clone ID: LIB3092-018-Q1-K1-C5
attgtacaaacctaattctcattgcttcatcgtacgattcttctcctcctaattatggagagcttcgataaaactaggaccgctatcaccatcacccttgaggtggagtactccgacaccatctataacgtgaaagctaacattcaagtcaaggacgggatccaacctgaccatcatagacttatctaaacaggttaacagcttgctgatggtctaacccttcaccactacaacattgagacggaatacacttttc

SEQ ID NO: 10683 - DNA, 266 bp, Glycine max
  Clone ID: LIB3092-018-Q1-K1-C6
attgtttaaacctaattctcatttattcatctttcgattcttgtccaaccaaaaatgtggcggtttcataaaactggttcctataacaccatcacccttgacgtgcaaacctccgacacgatctgtaattacaactctatcattttgtgacaaacacacattcccgttttattagtatacacatatctaacacgaacaacacctccaagctaatatcaccattttacaactctatttcttttctgaattcactatccattttttac

SEQ ID NO: 10684 - DNA, 392 bp, Glycine max
  Clone ID: LIB3092-018-Q1-K1-C7
ggggatttgcagaggcgcttgcttatgctaccttgcttattgaaggtaaccatgttggattgagtggtcaggatgttgaaagaggaacttttagtcaccgccatgctgtagttcacgatcagacaacaggagagaaatattgtcccctggacaatgttataatgaaccaagatgaagagatgtttaccgttagcaatagttcactttctgagtttggtgttcttggatttgaattgggttactcaatggaaaatcccaattcattgataatttgggaggctcagtttggtgattttgctaatggtgctcatgtcatatttgacaatgtcttggcttctggtgaggctaagtggctccgtcagactggtctttgtgtgttacttctcatggta

SEQ ID NO: 10685 - DNA, 422 bp, Glycine max
  Clone ID: LIB3092-018-Q1-K1-C8
gttttctacttgaatcttcggtatccttctttttttctccttgaactcgaatattcactatggcagatgaggtggttctgctagatttctggccaagtccatttgggatgagggtcaagattgcacttgctgaaaagggtatcaaatatgagtccaaagaagaggacttgcagaacaagagccctttgctcctcaaaatgaacccggttcacaagaaaatcccggttctcatccacaatggcaaacccatttgtgaatctctcgttgctgttcagtacattgaggaggtctggaatgacagaaatcccttgttgacttctgacccttaccagagagctcaggctagattctgggctgactttgttgacaataagatatttgatcttggaagaaagatttggacatcaaagggagaagaaaaa

SEQ ID NO: 10686 - DNA, 374 bp, Glycine max
  Clone ID: LIB3092-018-Q1-K1-C9
acgaaagattttatccaattgaaattttaaaaatgactgggataaacttaagaattcaattatggaaattgaataagtaaacaatttaattggattggtcgaatggtatcaaaaaaatggagtactaactcccatttcttatttattattgaattaaccgatcaacttgctttgttatcgaacatttctttttgatttcaaaaattttccggaaaaaatttgaatctatttttatatgccaatcaatcctactacttctggtcctgaagtttctgcgcttgaaaaaaaaaatcttggaactattggccaaataattggtccggtactaaaattaacttttcccccaggttaaaagcctaatatttacaacgctt

SEQ ID NO: 10687 - DNA, 427 bp, Glycine max
  Clone ID: LIB3092-018-Q1-K1-D10
gcgccacgcgtccgaactcgttcttcttcttttgttgttctgtgtttgtgtttgttttttctgggacctgaagaggtcttgctgcggtggtgactgtggttgcagaagctcctgcaagtgcggcaacggctgctgaggctgcaagatgtacccagacttgagctacactgagtcaaccaccaccgagaccttggtcatgggagtggcacctgttaaggctcaattcgagggtgctgaaatgggtgtgcccgctgagaacgatggctgcaaatgtggaccaaactgctcctgcaacccctgcacttgcaagtgaggtgttgggagagcaagcttcaagcagaaatagcccttaattaggaataatgataaactattaatgtgtagctaaaaacttatgtattatgtctgggatggtttttgggcactc

SEQ ID NO: 10688 - DNA, 410 bp, Glycine max
  Clone ID: LIB3092-018-Q1-K1-D12
aattcccggtcgactcgacgcgtgcgagaatgttgaggaaggaggagtggaggggaacggatctgctgggtgggactagataaagtggagcaagctggcaagactaagggaagattggatggtggaaatggaatcggcagctgaaaaccctaattacccggcggtggactacaagcgaccttccatcttgtcatttcctcggaggcccgccctcagagttacatccgagttcgatagtgaaagcgcagtcttcttccataagatttcctgcaagttgttggacagccttgccaagttcaagttttcgttcaaccacagcggtaagggcggcgacatctccgaacctcaattcagctttgtctccaagcaccttagcctacactacgacctcgaagaccataatgctctcg

SEQ ID NO: 10689 - DNA, 126 bp, Glycine max
  Clone ID: LIB3092-018-Q1-K1-D2
tttttctcctagaactcaaataaaccgtacggtttatattttatgtgctctaaaaccctccccaaaatcatttcaaatgaataacaatctttcactttctcaaaatattatcaaatatttatccaa

SEQ ID NO: 10690 - DNA, 359 bp, Glycine max
  Clone ID: LIB3092-018-Q1-K1-D3
ctcacttccacaaattcctccaaattctaaccaaacccttcactactccaaattccaaaactgcttcacactccttgttttccctcttctgttgcccgatcttctgcctccaagattttggtatttgggattgatcacctggagttggaaatggttaaaagttatggagtgttctgatttgcaaaagatatcatgttgcggtgcttagagggacttaagcctttatttgcttccatattacgatgttgtgacctggatatatataaccagccaagaggccttgaagatcctgaacttcttgctagagagactgtgttcagtgtaagcgaaataaaagcactttacgagctctttaaaaa

SEQ ID NO: 10691 - DNA, 455 bp, Glycine max
  Clone ID: LIB3092-018-Q1-K1-D5
tgcaaattttagttctgtgccttggtggaatgatttatgccaatgtgcaagaaagggtgtcgcagtgaaaccaaaaatgggtgatgctctgctattttggagcatgaggcctgatgccactctagatccatctagtttacatggcggttgcccagtaattaaaggaaataaatggtcttcaacaaagtggctgcatcttcatgagtacaaggtttgacccatcaactgcataggattaacgtggtacagggtgagtatttcatcgcattttggattggagaaacacaagttcaatgcattcatgttcaccttttattctacctagtgatctttccctttgctcaagtgcgccagcattttcttcacatgtagaataaaccatttggtttctctttctcatggatagataatttggcgttgccaagggaaaaaagagtatgtacagttaatgatcc

SEQ ID NO: 10692 - DNA, 292 bp, Glycine max
  Clone ID: LIB3092-018-Q1-K1-B7
atcacacaacacagtctttttctgaccctgacatgattattcaccactttaacaaggggggtgtgtatatggctacattggactatccataccccataccggaaactcaagcttttgccatattctcgactagttatcacacacaactggctagatgatacctgctagagatatttctcaagaaaaatatgaataaatgttctattgatatctggaaggagccaaaacattcaaaaaggcattagtatccacatcgaaagaatgacacattctctcgtcagggcacattttt

SEQ ID NO: 10693 - DNA, 190 bp, Glycine max
  Clone ID: LIB3092-017-Q1-K1-H4
gcgcagacacgtaaacagacgcctgtagaattattatcctgaatctttccactcatattggaagccttttctttctaaagctgatgctcctaatctcagtctttcatctctcctatcctactaggatacacaaccagctggtacagcacccatcacagatactccattccctcaacgaaaatacttttat

SEQ ID NO: 10694 - DNA, 375 bp, Glycine max
  Clone ID: LIB3092-017-Q1-K1-H7
tttaaaaaaaggccgtgggttttttcgagaaaggccactctgtaagaccaattctttctgaggctggggctcctaatttcagtctttcagctttcctttgctgctaggagactcaaccagctggttcaggaccagtcacagttactccattaccacaacggtcctcttctatacggcaaaatcgccgtgaacctaatctggtatggtcacttcaaaccatcccaaaaggccatcatcaccgatttcgttacctcactgtcatccccatcgtctcagagcagccagccatctgttgccacgtggtggaaaaccacggagaaatactaccacctgagtcccaaaacaagaaagctgcttcttctctttctctatcac

SEQ ID NO: 10695 - DNA, 213 bp, Glycine max
  Clone ID: LIB3092-017-Q1-K1-H9
aaacttttatttgcaaaaccatgtatatattggggttatgtatcattgggtttagcaaaaggtctattgctggttagcatcttggttgtattattctgaaatctgaggttatcatatcttctcaatatttagaataaaatttccagggaatttgtgatcaaatcaattttccttctgtaggaagaagagctgtatgaaattgacattcctctc

SEQ ID NO: 10696 - DNA, 151 bp, Glycine max
  Clone ID: LIB3092-018-Q1-K1-A1
gtcaaccatcaaaagtaaattgcagatacaacatttcacttgatatacaacatctgcaagatgtggataacaaccggcatttagctggtggtatattgacttgtaagaaggaaaagggtcctgttgaaaaaggccaacctgctgtacctct

SEQ ID NO: 10697 - DNA, 424 bp, Glycine max
  Clone ID: LIB3092-018-Q1-K1-A11
cccacgcgtccggttcttcttcgtcgttatcttcttcttttgttgtttgtgggtttgtttggtctctcacctgaaaatgtcttgctgcggtggtaactgtggttgcggaagcgcctgcaagtgcggcaacggctgctgaggctgcaagatgtacccagacttgagctacaccgagtcaaccaccaccgataccttggtcatgggagtggcaccagttaaggctcaattcgagagtgctgaaatgggtgttaccgctgagaactatggctgcaaatgtggagcttactgcacctgcaacccctgcacttgcaagtgaagtgttgtgaaactaaagcttcaagcataaatggcccttataaatatgattaaaactatatgtttgttctaaaactttcaaattttgatttatgtattattgttgcac

SEQ ID NO: 10698 - DNA, 456 bp, Glycine max
  unsure at all n locations
  Clone ID: LIB3092-018-Q1-K1-A2
gtgattttggagattccaagactgtttctctatgcgtgaaacggctagtgtacacaaatgaaggtggagaaattgtcaagggagtctgctcaaatttcttgtgtgacctgaagccaggagctgaagtaacaataactggacctgttgggaaagaaatgcttatgccaaaagatcctaatgccaccatcatcatgttgggaaccggaaccgggattgccccatttcgctcatttttatggaaaatgttctttgagaaacacgaagattacaagttcaatggtttggcatggctctttttgggtgtccctacaagcagctcattgctatataaggaggaatttgagaagatgcaagagaaatatcctgacaacttcangcttgacttcgctgtgagccgagagcaaacaaacgagaacggagagaagatgtacatccaaacccgaatggctcaatatg

SEQ ID NO: 10699 - DNA, 303 bp, Glycine max
  unsure at all n locations
  Clone ID: LIB3092-018-Q1-K1-A3
ttaaacggctagtatacacaaannctgctcggtaaattgtgcagggagtcctctcaaatttcttatntaacctgaaaccaacatcttatctaacaataactgcacctatttgtaaagaaatgcttatcccaaattattctaatgccaccatcatcatgtttccaaccttaactcctattgccccatttcattcatttttataaaaaatattcttcttcaaacactaatattacaatttcacttatttatcataactcttttttgatgtacctacaaccaccttattactatataatgaaaaat

SEQ ID NO: 10700 - DNA, 434 bp, Glycine max
  Clone ID: LIB3092-018-Q1-K1-A5
cccacgcgtccgcatgtgtcacgtttggccgagttgcaaaaattgttaacaagggaggcacattatgtggtgctagtggggctctgtatacgctgattagctgagacattggctgaggctgcctatactattgcttctaccgacccaagatgagactacagaatggtataaagggaaatggctgttcggattgcttgactcattgattctgcaagccctgcgccctctgtcaagaatatcgcgagcttgaacaccgaggattagacatgattattgggtggcatggaaatgtcgagcaacgaaatcggggagtagccatgactgctacaacagctccatcattcgaaaatggcatgagcgcgagaatagtatgcagttctgtaactaacacaatgtgtctacgacgcttgggttaaacatgaagaataataatg

SEQ ID NO: 10701 - DNA, 329 bp, Glycine max
  Clone ID: LIB3092-018-Q1-K1-A6
gaattaccggtgcgccgacgcgtacgtccagcatccgatacttctccttttgccgtgaacgggatttgtcacaaaacagggtcgggaaattgtgctgggaagcttctcaaatttcttgtgtgacctgacaccagcagctgatgtaacaattactggacctgttcggaaagaaatgcttattccaaaagattctaatgcccccattattatttttcgaaccctaacctggatttccccatttcgctcatttttataaaaaattttctttctgaaacaccaagattacaacttcaatggtttggcatagctctttttggatgttcctacaa

SEQ ID NO: 10702 - DNA, 418 bp, Glycine max
  Clone ID: LIB3092-018-Q1-K1-A7
cccacgcgtccgcaatgaagagggacatatatggtcctactactgtggagattgtgggtttggtctccatccaaaatgtgcattggaaaaggaggacaaagaaggaagcaaagatgatgccaaggaagaaaagtccaaagatgaatgggtttgtgatggagaagtctgcaaaaaagcctaaaagctgcttgtcaagggttttggtgatgaataatctgaatatttggatgaagtattgtgaacgcccttcctagtatgttttatgagttgtgcagaataatctgaatatttggatgaggtattgtgaacgcccttcctagtatgttttgtgagttgtgcagaataatctgaatatttggatgaggtattttgatgttaattatggtctttaatatatatggtataatggtttactctt

SEQ ID NO: 10703 - DNA, 226 bp, Glycine max
  Clone ID: LIB3092-018-Q1-K1-A8
cccacgcgtacgaaaaggaaagggttctatttgtttcaacaactgtaaaaaatacctggacaggattcatggttatagaggctccacataacatgatgctataagacgcagtgacaatttcaaggtataatatgttaccaacaaatcggatagtatacatattatgcttaaaacctataaatacttgtctcaacttattataatatctaatgttaactaaaaaata

SEQ ID NO: 10704 - DNA, 436 bp, Glycine max
  Clone ID: LIB3092-018-Q1-K1-B12
ttttatccaattgaaattctacaaatttctattataaacctaataatgcaattttggaattttataaataacaatttaattctattgttctaatagtatcaaaaaaattgagtactaactcccatttcttatttattattaaattaacctatcaactttcttttttatctaacatgtcttttttatttcaaaaatattccttaaaaaactttaatctatttcaatattctaatcaatcctactacttattttacttacttttcttcactttaaaataaatatcttatacttatcttccaaattaatttttcccatctataatttactttttcctccattaatattcctaatatttttaattatcttatatttattactttatattctttttttctacttattaattttaacttttttatttacttcattttttttt

SEQ ID NO: 10705 - DNA, 457 bp, Glycine max
  Clone ID: LIB3092-018-Q1-K1-B3
ctcatacaaggtcgttttcttggtgagttgactaagcaagtgttttcagatcttgctgccagtgaatatcagatggctgaatatagaatatcaatatatggtaggaagcaaagtgagtgggaccaactagccagttggatagtgaataatgatttgtacagtgagaatgttgtatggttgattcagcttccacggttgtacaatgtgtacaaagaaatgggaattgtgacatcattccagaacatgcttgacaatatttttattccactttttgaggtcactgtcaacccagattcacatcctcagctgcatgttttcctgaaacaggttgttgggttggatttggtggatgatgaaagcaaacctgaaagacggccaacaaaacacatgcctacaccggagcaatggactaatgtattcaatccagcattttcatactatgtctattactggtatg

SEQ ID NO: 10706 - DNA, 455 bp, Glycine max
  Clone ID: LIB3092-018-Q1-K1-B4
cccacgcgtccgcgaatcttttccaatctcccttcgccgatccttcgcgcgttccgccaccaggtccgccgttctcagctccccgcttccggaaaattatgtatagtgttttcttggctgcttcatagtcctccctcccttgccaccggtgaatatttgattggcaatcctgtccttattagtcaagttttagaatacaaagaagcttcaatggccaagaaaccaggaccaagatccagtaaattgtcagtgtacctttacattcctaatataattggatacatccgggttcttttaaactgttttgccttctcccaatgtttatcaaacaaaatcttattctctattctgtattttttaagctttgtatgtgatgctgttgatggctggtgtgcccgcaaatttaatcaagtgtcaacctttggagctgtgctggacatggtaacagacagaat

SEQ ID NO: 10707 - DNA, 401 bp, Glycine max
  unsure at all n locations
  Clone ID: LIB3092-018-Q1-K1-B5
gtgatactgttgcaaaggactatgtacgtggaatggagaaagaagacgggaagaagaggaatgtgcggactcctcaagcaaattcatcatttcagaaactgtttgggcttacacctgaggaatttctcatcaacgatttcacctgtcatttgaaaagaaaaatgcccctgcaaggccggctatttctatcagcaagaataattggatttcatgcaaatttgtatggaaataagacaaaattcttttttctttgggaagatattgaagacattcaggttattcctcctacattctcatcaatggagagtccaataattgtcataactcttcggaagggtagaggtgtagatgcactgcatggtgcataaacacangatgaacaaggcangctgaggtttcat

SEQ ID NO: 10708 - DNA, 441 bp, Glycine max
  Clone ID: LIB3092-017-Q1-K1-H3
ctcacccatttcaaaaaaaggccgttagtgttactattcgtaaaatggccactcttgttctgaccaattctttctcaaactcttgctcctaatttcagtctttcagctttcctttgctgctaggagactcaaccagctggttcaggaccagtcacagttactccattaccacaacggtcctcttctatacggcaaaatcgccgtgaacctaatctggtatggtcacttcaaaccatcccaaaaggccatcatcaccgatttcgttacctcactgtcatccccatcgtctcagagcagccagccatctgttgccacgtggtggaaaaccacggagaagtactaccacctgagtcccaagaacaagaaggctgcttcttctctttctctatcactgggcgatcaagttctcgacgagggtttctcgctggggaagtcacttac

SEQ ID NO: 10709 - DNA, 434 bp, Glycine max
  Clone ID: LIB3092-017-Q1-K1-F4
ggcgatcggatccagctacagcatagagatcaaggaaggaaggaaggaagatgttgggtagtataaggcacaagagtattcgccctgccttctccgcaatcagacacttgtcttctgcagctaaagagattactgtcagggaggctctgaactccgcactcgatgaggaaatgtcagctgatcctaaagtgttcttgatgggtgaagaggttggggaatatcagggtgcatacaagatatccaaggggctgctcgacaagtatggccccgagagggttctcgatactccaatcactgaggctgggtttactgggattggagttggcgctgcttactatggtctaaggcctgttgtggagttcatgacttttaacttctccatgcaggcaatagaacatattattaactctgccgcaaaatcaaactacatgtct

SEQ ID NO: 10710 - DNA, 445 bp, Glycine max
  Clone ID: LIB3092-017-Q1-K1-F5
cccacgcgtccgcggacgcgtgggtgcatctaggaatagtaactgaagaaataactgaaggtgaggatgttccttctggaagctctttgaaacaatcggtggttcaactaaaaaaatctggtgactcctctaagagttacagtacagccaacaatggaattccaaaaacaaagacagacagtttagatgcattgaaaaaagatcctgaagctgtcagatcattccaaaactttatttcaaataccgatcctgccacactggcttctttgaatgctggacaattcaaagatgtgtctccagatatgattaaaactacctctgatatggttagtaaaatgtcacctgaggaacttcaaagaatgcttgacatggcttcttcatttcaaggggataatccaatttttagaggaggttcccctgattcttctttcaaccctggatcaat

SEQ ID NO: 10711 - DNA, 192 bp, Glycine max
  Clone ID: LIB3092-017-Q1-K1-F6
cttgaaggaaactagtagtatttttcaaggtttctcgcgtgacgtgcattttgcgagaaagggttctttggaaaattttccaagaaaacatagtgttctacacttttaactagtcaaccatggagaatgttaaaataagccataagaggtctcaatttttttattaattataggtggataatgttactcttt

SEQ ID NO: 10712 - DNA, 436 bp, Glycine max
  Clone ID: LIB3092-017-Q1-K1-F7
gtagttgagaactaagaaggagaagcaaatggcttcctcaatgatctcttccccagctgtgaccactgtcaaccgtgccggtgccggcatggttgctccattcactggcctcaagtccatggctggcttccccaccaggaagaccaacaatgacattacctccattgctagcaacggtggaagagtgcaatgcatgcaggtgtggccaccagttggcaagaagaagtttgagactctttcctacctgccagaccttgatgatgcacaattggcaaaggaagtagaataccttcttaggaagggatggattccttgcttggaattcgagttggagcacggtttcgtgtaccgtgagcacaacaggtcaccaggatactacgatggacgctactggaccatgtggaagctgcctatgtttggttgcactgatgcttct

SEQ ID NO: 10713 - DNA, 149 bp, Glycine max
  Clone ID: LIB3092-017-Q1-K1-F9
ggcaaaattgcttttatttatctgtgttttaatgtgttgtgtttgtcggaacccctgattgcatttttgttaagcgcagcgagtttcaggactttgctgcgttgtgttgctttggtttattaaatgtcaactttctatttgtagtgttc

SEQ ID NO: 10714 - DNA, 418 bp, Glycine max
  Clone ID: LIB3092-017-Q1-K1-G1
gcgatggggagcatgcatagtgaagtcattagttgcaaggatggctgctacaggaagcacatggatactaagtccttgagatgtacatgagccatactaggatgatagaaactagcttgctataacatagtcatgatgcatggtgatgacaaattgcgtcacatgactgtgaatgggtgaagtcctatgtaacgcacacatggagcatctagctgaagatctgaatgaggaaagcgaagtccaaatattagactatatgattggacaaggaacccaatgggtgaacttgaatcatgatgtaacttaccgacctggaaggccggacatgatgctaatatccggaggaagagacttctatgccgtttaatccaggggaggagggttctgtatatgtgggaaaagggcttatgcacatgca

SEQ ID NO: 10715 - DNA, 271 bp, Glycine max
  unsure at all n locations
  Clone ID: LIB3092-017-Q1-K1-G11
gctaaccgtacgcatagatggacacatatcacatgctcacgacgtgagtaacangcctgcggcttacgactctagcgatgtccataaacaaaagtgcacagccgaggggctgaacactcatgacctcgtcacactagatggtgcacataccactgtgactacaggtggcgcaggcttcaatgacatgatgcacaacttcaacgcgaatggcacatgaccctgccagctacactctatgcttaaagaaactacaatcactatgccctcaaaa

SEQ ID NO: 10716 - DNA, 258 bp, Glycine max
  Clone ID: LIB3092-017-Q1-K1-G12
actcataacctctccacacttgatggtccacataccactgttactacagcttgccaggtctccaataacatattgcacaacttcaccccgaattccacagaccctgccatctacactctattcttaaccaaaatacactcactatgtcctaataaccgaaaccacccaaaactactgccattatgatcggtttaccaaaccaaatttgatatatcatactatacaaatttgaggaattctacacaaattctacacatc

SEQ ID NO: 10717 - DNA, 331 bp, Glycine max
  Clone ID: LIB3092-017-Q1-K1-G2
ggcacattccatgctatgcgtacactgatggttataaacgatgtcagcataaggccagagcacaatttgagaattgcaaatcatgtcataatactgcggatactgtgactgaacatgtggagagaatctcgaagaggaagaacaatgatggtgtggatgtgagggaggatgctatagttaaaaggcaatatgcttgcccttctgtggatagattgacatgacgcatcaggcttggtactggaggttagtctgccgaagctgtatctgatagtcaagagttgacaagtgtggagcgcaatcatttgtcaaacagtgggcaagatgatttgga

SEQ ID NO: 10718 - DNA, 384 bp, Glycine max
  Clone ID: LIB3092-017-Q1-K1-G3
tccgaagcagggtggattgaaaagcacgatcaggagcgatggccgcggcaacgttgtactgggcaaaaccgccttcgtcttttactcccaaaattccgtttccaagagtgagggacagtggaattggaactgtaaagtgtcaagttaaaacccaagtgaaagcgggtatcctgggactgggtctgggtctgttccacttacttaacttcgtcgaacccggttcatgtctccaactgcaattccacgaaccccccaatgccctctctttgcccacatgggccattcacgtgtccagtgtcactgaatggattatagctatggcttcggtgtggcaatacggagaaaaatctggatacccagcttggaaaggcctttcttggggga

SEQ ID NO: 10719 - DNA, 356 bp, Glycine max
  Clone ID: LIB3092-017-Q1-K1-G4
ggcggggataagattaaagattcaacaatgtcctctgcttctgctactcttctcaagtcaggtgctgttcttgacaagtgcgagtgggtcaaaggccagacccttcgccaacctctcgtgagatgtaacccttcctcaacatcagctctcaccatcaaagctgcttcctatgctgacgagctcgtcaaaaccgccaaaacagtggcctcaccggggcgtggtattctggcgatggatgagtcaaatgcaacctgcaggaagcctttggcatctattgggttagagaacacatgagctaatccgcaggcataccgtaccctacttgtgacagtacctggtcttggtgaatacatctc

SEQ ID NO: 10720 - DNA, 351 bp, Glycine max
  Clone ID: LIB3092-017-Q1-K1-G7
atgagatttcagactctggaagaagcagttttcttgaacaattctgtacctcaaggattggagaattcaatctggaccgaaagacctggaactatattcaagtggattgagccacgaggtagtgatagtggtatagtgaatgcaaacatacctaccaatggagctgagattggtggtgcctttggtcaagaaaaggcgaccgttagtgaccatgaggcagcaagtgactcgatgaagcattacatgcggcgttatacatgtaccatgaattatggaagtgaactaccattagctcagggaataaactttggctagaaagctatgcttgcaaatgaaactgcacaaataatg

SEQ ID NO: 10721 - DNA, 452 bp, Glycine max
  Clone ID: LIB3092-017-Q1-K1-G9
atcttatccctctaatcactctagctggtgcaaatttctactatttggcaatggcttctggagatgttgagttccgttgctttgttggtgggcttgcttgggtcaccggcaacgatgccctcgagaaagccttttcaatctacggcgacatcgttgaatcgaaggttatcaacgaccgtgagactggaaggtccagaggattcggatttgtgaccttcgcctcagagcagtcaatgaaagatgcgatcgcaggaatgaacggtcaggaccttgacggtcgtaacatcactgtcaacgaagctcatacccgcgccagccgtggtggtggtggaagcggtggtttcggaagtggtggtggatacaaccgcggtagcggtggatattgtggtggtggtggctgttgcggataccgtggtcgtcgtgaaggtggatacaaccgtaatggtgggggt

SEQ ID NO: 10722 - DNA, 394 bp, Glycine max
  Clone ID: LIB3092-017-Q1-K1-H1
caattggctttcaatgctttcttctcctactttctcaactcactcaagttcacaccttacagaatcaactctctagtccgtgtgaccatttcttcaaccctccttgtgtttcaaaatgagtcatcatcagatgatgacgatgattcagattccacaaaaatctccaagaaaaagtatgtgattggattcatatgcacagttggtgcatctgcagggtatggactatggctttccatcacacagcttgtgttcaagaaggtcataaaaagagaaactttcaaagtgatcttggatatgatattatacccttcccttgtagctacccttgttaccttagtaggactttttgctagtggagaatggagtggtttgaaggatgaaatgaaggggtatg

SEQ ID NO: 10723 - DNA, 385 bp, Glycine max
  Clone ID: LIB3092-017-Q1-K1-H11
gttgagactaacaaggttcagaatagagaaagggagaagttattcgtggccaatcaagaggagtttcacaaagaggcagacaaagcttattggaaaaccattgcagagctcattcctcgtgaggttcccaacattgaaaagaaaagaggcaaaaaggatcaggacaagaagccatcaattacggtcatccaaggcccaaagcctggcaaacccacggatctgtctaggttgcggcaaatactgttaaagctgaagcatacaccaccacctcacatgattcctccaccaccggctcctgctaaagacgccaaagataataaggatggaaaagagaaagcagcatcaaaagcaactggatctgcaacagaaggtgcacctgattcac

SEQ ID NO: 10724 - DNA, 187 bp, Glycine max
  Clone ID: LIB3092-017-Q1-K1-H12
cagacaaagcttattggaaaaccattgcagagctcattcctcgtgaggttcccaacattgaaaagaaaagacgcaaaaaggatcaggacaagaagccatcaattacggtcatccaaagcccaaaacctggcaaacccacggatctgtctaagatgcagcaaatactgataaagataataaatacacc

SEQ ID NO: 10725 - DNA, 392 bp, Glycine max
  Clone ID: LIB3092-017-Q1-K1-H2
cccacgcgtccggacaaaagcaaaaggaaagaatatcaacaaggtaaagtagattccttagtagacatggcgttgaaggacacattctacatatctcatggatcaccaactttgtccatagatgaatccattcaggccaggaagttccttcagtcatggaagaaggacgtgtttcctcaaagaccctcttcaattcttgtcatctctggtcattgggaaaccgcagttcccacggtcaacgtcgttgactccatcaacgacaccatctacgatttctatggcttccccaaacaaatgtaccagcttaaatatcctgcacctggagctccacaattggcaaggagggtgaaagaactactcaagaaatctggtttcagccatgttgatgaaga

SEQ ID NO: 10726 - DNA, 427 bp, Glycine max
  Clone ID: LIB3092-017-Q1-K1-F2
cccacgcgtccgcaagtttgcagtaagcagtttatgagccaaagatgagcatgtatctaatgccagttgtggagtgatgaaggtgtttactgttgctgcatcagttgtaatatcaacttgccatctgagaaattgtggacagacacctatttgcttgttgtcaattttgctggaccatgcaggcctgagagcctacagtaggggttaggcctatactaagtgattaggggtcaagtggtagagattttcttatggtttggacctcttttgcttggtatatactgttgttgcaactattgatcccagcttgtaaaaatcctactgtttacactgtgtaaaatactatgtcaatcaattagaaatcaccacacatggtatttaaatttaaaaaagttaaacctccaaaaaaagggccggcgctctagag

SEQ ID NO: 10727 - DNA, 380 bp, Glycine max
  Clone ID: LIB3092-017-Q1-K1-D3
gaagagtctttcataggacagttaaaattatagcttgcaaaaagggttcactagcaaacggggcaatggcctcaacctcttctgctctcactatatcctcttcttccacccttcttgatggcaaggctccaagacagtcaccagctgcttcccctcaatgtgtgagcctcccccctccccctttgcactctcagaaccgttcatggaagaccactgcttattgtcgcaaggttgctcgaaaagttatggcaatggccacaggagaggcaccagctgaagctaccccaactgaggtgccagagattgtcaagactcttcaagaaactcgggacaaagttgatgataagtatgcagtgagttcacttgccttggttggggtg

SEQ ID NO: 10728 - DNA, 372 bp, Glycine max
  unsure at all n locations
  Clone ID: LIB3092-017-Q1-K1-D4
cggacgcgtgggtttctctcttcgcctggtcttggcatctccgcagcaccaccacccaccgcgctgcttagaccaggtcctctctctctctagagagaaagagaaaaaagaaaaaaaaaaacaactaacattaagcttttaatagtaagacatggctcaacccagttccaacggggatctgaataataaccagcagcagggtcaggttcagcaacaacagcagcagggtcagtgggcggcggcggcgcagccgcatcagtatcagcagcaatggatggctatgcagtacccggccaccgncatggccatgatgcagcaacagatgttgatgtacccgcagcattatatgccctatgctcaccctcattaccc

SEQ ID NO: 10729 - DNA, 251 bp, Glycine max
  Clone ID: LIB3092-017-Q1-K1-D5
taatccacaggggccggtcaaaactagctgaagccattatataagattctagacccacaatatcaagaggaatcaaaattccatattctatcaaactcctgaattccttgcagagtgaacttcaatcaaagatctctttaacccataccgcattcttattggatgcaaggaaaccccatatggccaaaaagctattcaaacattgaaagatgtttatgctcaatgagtccccgaagaaaaaatactgacca

SEQ ID NO: 10730 - DNA, 425 bp, Glycine max
  Clone ID: LIB3092-017-Q1-K1-D7
cttggaagtgggaaggagtcaaatccggttattcatggtgctggacatgttgatcctaaggaggcacttaaccctgggttggtttatgatttggactctaatgactatttggcgttcttgtgttctgttgggtatgatgctaatcagattgcggttttcactagagagcctgctgttgaaagtgtttgtgaagggaaagtggggaggactgggaagttggctagtcccggtgacttgaattacccttctttcgcggtgaagttgggtggggaaggtgatttggttaagtatagacgggttgttacgaatgtgggaagcgaagttgatgttgtttacactgttaaagtgaatgctccacctggtgttggtgttggtgtttcttccagcacgcttgggttcaatggcgaaaacaagacgcaggcctt

SEQ ID NO: 10731 - DNA, 387 bp, Glycine max
  Clone ID: LIB3092-017-Q1-K1-E1
ctaagctcactctttctaagtttcttctatcctctctccgccatggttctctccaaaaccgggtccgaatccgacgtctctgtccactcaaccttcgcttctcgctatgtcagaacttcgcttcccaggttcaagatggcggaggagtcgataccgaaggaggcagcataccagatcataaacgacgagttgatgttggatgggaacccaaggttgaatttggcatcatttgtgacgacttggatggagccagagtgtgataaactcatcatggctgccattaataagaactatgttgacatggacgagtaccctgtcaccactgagctacagaatcgatgtgttaacatgatagctcatcttttcaatgcaccactagaagagact

SEQ ID NO: 10732 - DNA, 455 bp, Glycine max
  Clone ID: LIB3092-017-Q1-K1-E10
cacccccacgaatatttagcattttcgttgcccctttttttttctcggaaatatctttaagaataattttgccgagacagcttgaggcttaggtcattgaatatcaaccatatttcccgtatataaagaaccgttgctcattcttagtggccacagttcacactttctttctttcttattgagtttttgggcttctcacttctctctttctatctttctttcagacaaagccaaataggaacacgctctcaaacgcagtgattgatttttggtaacagagttcaattgaaatttgaaacatggattgggttcgaggagactccctcgggcgaggaagcttcgctaccgttagtttagcgattccgactacaaatccgaatcagtttccgtctctaaccttcgttaagtccgcggaggctcaaacctcgtgctggctaagaaacgagaaacacgtt

SEQ ID NO: 10733 - DNA, 248 bp, Glycine max
  unsure at all n locations
  Clone ID: LIB3092-017-Q1-K1-E11
gccccgccgcnnccgcnncccaccgcncnnncaacaccaacgccangcgccagnangacaaccgcgccgacgaccacagcaccgacatcgancgncactccgaacgctctnnccctagcacngcgcgccgcgacgatatcttctcaagtagttgtagtcgctctctccctaacctcgcactaaccgatatctttaattcttctattttttatgtagtttagttgattcaatcgtggttttaaattgcg

SEQ ID NO: 10734 - DNA, 321 bp, Glycine max
  Clone ID: LIB3092-017-Q1-K1-E2
cctttcgctctcttctctgcaaatgcttcattccaagatggttaggactctgtaggctgatggagacaacactcataccgttggaaagaaggatgctgctggccatgttgcttaatttagttcttgcttcctttgtcttcttgagttttatcagagacgggagtgcagggatcactagctctttcattcggtcagagtggccggcagttgacatcccccttgatcatgaagcatttgcagttccaaagggttataatgcacctcaacaagtgcacatcacgcaaggtgactatgatggaaaagcagtaatcatctcatggg

SEQ ID NO: 10735 - DNA, 378 bp, Glycine max
  Clone ID: LIB3092-017-Q1-K1-E3
ggaaccctcagtgaagaaaacgcctaggtttccgtgggaaatgaagataacgagcaaggcgagaagcgtacggaataggaagcccaacactcgcgtgtggtcattgggcagcacgttgctctcgctcccgtcttcgccggccacgaagaagctgaagacgcgggccgaggcccaggtccagcccgctggagtccagattcagcggcggtgcagtcactgccaggcgcagaagacgccgcagtggaggaccggcccactgggcgccaaaaccctttgcaacgcgtgccgagttcggtacacagtcacgtcggatattttcggagtatagaccggcgtgtactcccaccttctgcagcgatattcactccaatagtcacc

SEQ ID NO: 10736 - DNA, 386 bp, Glycine max
  Clone ID: LIB3092-017-Q1-K1-E4
tggaaagacaattacccttgaggtggagagttctgacaccattgacaatgtcaaggctaagagtcaagacaaagagggtatcccacccgaccaacagagactgatctttgctggaaagcagcttgaggatggccgtacccttgccgattacaacattcagaaagagtccaccctccacctggtgctccgtcttcgtggtggcatgcaaatctttgtcaagaccctcactggaaagaccatcacccttgaggtggagagctctgacactattgacaatgtcaaagctaagattcaagacaaagaaggtatcccaccagaccaacagaggctcatttttgctggaaaacagcttgaggatggccgtacccttgccgattacaacattc

SEQ ID NO: 10737 - DNA, 407 bp, Glycine max
  Clone ID: LIB3092-017-Q1-K1-E5
ggcttctcctcttcttactccttacaagatgggcaaattcaatctgtcccatagagttggggtggcaccgctgaccagacagaggtcttacgacaacgtcccacaaccccatgccatcctctactactcccagagaacttccaacggaggccttctcattactgaagccactggcgtctctgacacggctcaaggctatccgcaaacccctggcatatggactaaagaccatgttcaagcttggaaacccattgtcgatgccgtccacgccaaaggcggtgttttcttctgtcagatttggcacgttggaagagtttcagattcagtttatcagccaaatggacaagcacccatatcttctacggacaagccactcacaccccaaattcgaagtaatggcattgatc

SEQ ID NO: 10738 - DNA, 432 bp, Glycine max
  Clone ID: LIB3092-017-Q1-K1-E6
gagagttcagacttgagagagtgtcgtcgttgattccaattcacgacgcaggagtgaggaggcacaacctccaccggcgaaacctgtaactgtcggcgacgctcaacactcgcactacgccgacagtgatggagagtgcttttgcaagcgcttctgcgattacagaccagaggcaaaagatagagcagtataagcaaatacttgctgccgtcatttcatctaatgacattgttcaggctaggaaattcatagatcacatgttatcagatgatgttccattagtagtgtctcggcagcttttgcagacttttgctcaagagttgggaagattggagcctgagatacaaaaagagattgctcattactcccttgcccaaattcagcctcgtgttgtgtcattcgaagagcaggttttaagtattagagagaaac

SEQ ID NO: 10739 - DNA, 339 bp, Glycine max
  Clone ID: LIB3092-017-Q1-K1-E7
gccagtcgttcgaagctctgcatcatcggttgcgggccgggggcgcacaccgtcagcatagacgcatcgcgcgccgagttgacgccggtcctctgtgaacgctggacggtgaacggcgtctgtcccgggggccagctcaccaccaccaccgacgtccagtacttgtggggatgttccggctgcatgcttagtaccgacctcatggaccggtgccgtcagcagtcggcacgcttcagtgccgaggtagtcacggagaccggcaccgccgtctacctctagcaacgtacgtttagggtgtactccgacttcagcatcgtgaaagccgaatacggggtggtc

SEQ ID NO: 10740 - DNA, 172 bp, Glycine max
  Clone ID: LIB3092-017-Q1-K1-E8
tcttttctataaaacaacttacagatatcccaactctttcccattacaacattcaaaaacagttcttccttcacctgatgcttcatcttcatcatatcattcaaatctttttcaaaacccttactcaaaaaaccattaccctttacgtataaaactcttacactatttacaa

SEQ ID NO: 10741 - DNA, 376 bp, Glycine max
  Clone ID: LIB3092-017-Q1-K1-E9
cccacgcgtccgttttcctctctttcttggttcttttgtttactaagcttagatgcaggggcttaactgtcttaacttttcaagtgtggtttttcaatcagaattagagttttacatcgataataccgataacaaatgtttacgtgaaatgtctaacttagatttccgaagtaaaactctaattttgatcggacaacaatattaaaaaaaacttacaagaactgcttttctcttcccatgaaaaatgactgttactattcttttggggaacgtgcgtgtgtgtgctcgcactcacgtgctcttctattgatgatctggatctcggaatttgaactactgtgtcaagaagtttctgtttttaagctgcggagaaaaa

SEQ ID NO: 10742 - DNA, 453 bp, Glycine max
  Clone ID: LIB3092-017-Q1-K1-F12
cccacgcgtccgcccacgcgtccgccagaatcaaaaaaaaataaaagatgcatgtctccgggtagcttgtattttctggcaattgctgattttaccttggaggtttctgtttgcatttgttcctccatgccaaattgctcatggatggatctccttcatttgctctctgcttttcatctctgggatagcttacgttgtgactaagatcacagatgttataagttgtgtcacagggataaatgcttacgtgatagcatttacagccctagccagtggaacctcatggcctgatctagtggcaagcaaaattgctgcagaacgtcaaaaaactgctgattctgcaattgcaaacatcacttgcagcaattcagtgaatatatatgttggtattggtgttccatggcttattgatactttgtacaacttcatagcatatagagaacctctccgaat

SEQ ID NO: 10743 - DNA, 410 bp, Glycine max
  unsure at all n locations
  Clone ID: LIB3092-017-Q1-K1-D2
cccacgcgtccgtttcaaaatggtcgttcacatattcttaatccctgttctgatcctgagaggcnnctgatgatggaaatttggccccaggctatgaatcaaatgccacgtcacagaagttctcaatggaggactttgaagaattgaaattagagaaagagaaggcagttgttgatctgtcaaagtgtgttgaaaatcttgaaatgacaaagtctcgattactagagacagagcaacatctagctgaagttaaatcacaattggcttctgctcaaagatcaaacagcctggctgagacgcaactaaaatgtatgacagaatcatacaggtcaattgaagcacgcacaaaggagtttgaaactgagcctaatcatctgcgaatgaagacagaaactctggagaatgaactt

SEQ ID NO: 10744 - DNA, 402 bp, Glycine max
  Clone ID: LIB3092-017-Q1-K1-B4
gttgtcttcatatcttccttgtcactgcctttgtgtcgccgccatggccaccgtcaccacgcaggccttcgccgcaattttgcggccatgtacctcgaaatcgaggtttttgaccggctcttccggtaaacttaaccgggaagtgactatgcggccaatggggtgccctccttctgcctctttcaaggttgaagccaagaagggagagtggttacctggcttggcctccccaacttacctcaatggcactcttcctggtgacaatggatttgaccctctggggctagctgaggacccagagaacttgaggtggtacgttcaagccgagcttgtgaatggacgttgggccatgttgggtgttgcaggaatgttgcttcctgaggttttcaccaaagttggaat

SEQ ID NO: 10745 - DNA, 432 bp, Glycine max
  Clone ID: LIB3092-017-Q1-K1-B5
cccacgcgtccggtcatgatggagaatattgaaaaggttctagacaggggtgacaagatgaagcttctggtggacaagactgagaaccttcataaccaggcacaagatttcagaacttctggaaccagaatccgtcgaaaaatgtggctgcaaaacatgaagattaagctgattgtattgggaatattgatagcacttatcctgataatagtcctatctgtatgtcgtgggttcaactgtggaaaataagccattcaccgaggccttttataatgttatttcagccttttatcggaggaaagatactaatctatggcatgagtttgtatgtaatatagatatagatatagtaaaggtcgtatgttggtcactttgttctacttataaatgcttttgaaaatataatttgggctctcaaaaaaaaaataaaaa

SEQ ID NO: 10746 - DNA, 224 bp, Glycine max
  Clone ID: LIB3092-017-Q1-K1-B6
ccttcataaccagccacaagattacacaacttctgcaaccagaatccctctaaaaatgtctctgcaaaacatgaatattattctgattgcatagtaaatattaatagcacttatcctgatcatactcctatctgtatagtcttcaattcaactgtggaacacaatccattcacccaatccttttataatgtaatttcaaccttttatcccatgaaacattctaa

SEQ ID NO: 10747 - DNA, 72 bp, Glycine max
  Clone ID: LIB3092-017-Q1-K1-B7
tttgtatctataggaaataaagaaagatattgggcggtttataatacaaatcttagctagatcaattaagtt

SEQ ID NO: 10748 - DNA, 443 bp, Glycine max
  Clone ID: LIB3092-017-Q1-K1-B8
aaatctcatcaccactaagccacactagacactacaatcattatcaagttccaattggagtattttttgtcatttaaaaagaaaatcaaagcaagagtttctttgaagaagacttgtacacaaagatgagttcaagcagaacttgggctgtggcagccagtgttggagttgtggaggccttgaaggaccagggtctgtgtaggtggaacaatgctttaagatcagcacaatatcaagtgaaaaaccatgtgagatccttgtctcaggcaaacaaggtttcttcttcctcatcttctgctgtggtttctagtagattaaaggaagagggtgcgaagcagtcagaggaatcattgaggacagtcatgtacttaagttgttggggtcccaactagagtcataaggcagttactaaataactaaatatttgatagggaaagttgggg

SEQ ID NO: 10749 - DNA, 308 bp, Glycine max
  Clone ID: LIB3092-017-Q1-K1-B9
agaaagcagctattgtgttattgggtggagtgtgagaatccaaatgtgtgtatctatctagctccctctgcaattatccattttctggggcgcattttagcaacaatggtgcacccaatagcagaagcaaacgaggaaagtccgttcgggaaactaacgccggaagagttctacgcgcatcactcagtgagtcacggttccgagttcgtgacgaaccctaaaagtctcaagctcttcacacagtggtggaccccacttcctccaaaaaccatcattggaaccctcgacgttgtgcacggatacaccgg

SEQ ID NO: 10750 - DNA, 382 bp, Glycine max
  Clone ID: LIB3092-017-Q1-K1-C1
ggctgcttcataatcgaatcgaaaggaagctgcagaatggaggacgtgccgttgccggcgggctttgagcaagcccgcaagatccacaactcagccaccgccaccgcctccgccgccgaccaggtacgctttagtcttctcattctgtcccttttttttttttttgtgttcttcatcgctttgtttttggggttcgggaggttgtgaagaaggggtgcgaggctctgcatagatgcgaggacatggtcaataacctaggtttgttctctcccaacgagaccaaagaagatatcagcaccaccaatctcaagtacattctggtgccattttatcttgcggagttgacagaaaaattagcacaggatgacaggatacatattct

SEQ ID NO: 10751 - DNA, 383 bp, Glycine max
  Clone ID: LIB3092-017-Q1-K1-C10
gacagctcttggctttggagcccctcctactacacttccgcttcaggtacgactgacttcgtctccttctaccttggccttcccactaatccacatatgccaaaacgcaggcgagtcattgatcacaatctgtacaaagagaaaggccaaatcaaggttggacactctctgctctgcacctgtgcaagatcaggaggtccgtgatattactatcagagagcgaagcggctcactagacctattggctggaggtcacggcaagaggatctgatctagcatgccaaagcagtatgaacctctttgaggttaacccattgctctgtataggttctacactttgactcacactgatcaagtcaaataaatgatcgaggtttgtgatc

SEQ ID NO: 10752 - DNA, 372 bp, Glycine max
  Clone ID: LIB3092-017-Q1-K1-C11
ctcacaacttcatcaaaccaaacaacacatctgactacagactgagagaaactgacagtgcgtcgcttcgtattaagatatctcatcaaagactggattctctcgcactataagaaacgtactccgacgtgcaacgaaggagaccgaacaaagcacaactattagaagttgacgcagtcattcccaaccactatctctgaccgataagtcaggagctgatcacacatccggtgactttatcaactgtcattacctactaccgtttgatcatgctgatgtatatcaatgcagaaatcagatcctgacctgtctactaccaatagctgacaaccttcgacctcatccacaaccatgccattcccatgatgattc

SEQ ID NO: 10753 - DNA, 412 bp, Glycine max
  Clone ID: LIB3092-017-Q1-K1-C2
ggttgcatggaaggggctggaggtgaagaacttaaaggctaattctctgtggaacagaacatatgattacacggtgcttgttttagcaagatctttatttacaatattcagtaggatcaacaatgtatttggcattcaagagattatagatattggcaaaaccaagaatcgaagtgctttgaattctgatcatgctaatggcagtcgatcggtttctgaattattgcaaccttcagtccaaccctccagcaaagttcgtgccaggttcgcttcaggacccctcggtgattttgctgctacatctcgtccaaatgctcaagtaaataaagctagcatgtttccttctgatggtgggggctcatccacaaagtcaggcctaatttcagcaaagaacagaagtctcaaatttttc

SEQ ID NO: 10754 - DNA, 384 bp, Glycine max
  Clone ID: LIB3092-017-Q1-K1-C3
gccaaacaaggggtttaaggatgggacacagagtatatatggtgccaacttctcctgcaagaggtctccgtggttggcaatgggatgcctctcccctcgcacgatgtatgaagaactaaagaagactaccagcagagccatttctgcttcggcggacaagaacgatggtggtaatggctcgtccagaaacggtacaaattggttgatgtttgagttgctatggagggacttctttaggtttataacaaaaaaatacagttctgcaaagaaacagctggaagctgctccggtcactgcatgtgctggagcatatgcttaagctggaagttctagtgggcattaaagagtttggttcagggtgtgggttggttccctacgcagaca

SEQ ID NO: 10755 - DNA, 392 bp, Glycine max
  Clone ID: LIB3092-017-Q1-K1-C4
ctattctcctcaagcaaaacctatagctctttcacactcctgcagtacttgaataaaaggtgaataaatattaaagcctttgcttcatcaaggtactgtttgatctttgaatttcagtcctcaaagattggaacaacaggaacatgtgtactctcacaactgttcctgtgctcccttctaagcttaacaagccttcgctttctccgcaccacaattctctttttccctactgtggaagacgggtcgggaagaagaacaaagcaatggttcctgttgcaaggttgttcgggccagccatatttgaagcctcaaaactgaaggttttgttcttaagagtggacgaaaattaacacccaggaaatctcccaaagacttatacgctaacccatagt

SEQ ID NO: 10756 - DNA, 430 bp, Glycine max
  Clone ID: LIB3092-017-Q1-K1-C5
cttcaattcaacacttcgagagatttgaattatctgagatgtggaagttgtaatcaagtggagagggcttttggagaattattatagatgaaaaatagatgaattttgattttggtcgctttgattggagaacaatactaaaagcacctacgggcatgagatggatcgggaagaatatttgcggaagtgttccaatatgaaatgccaaagagttcaggtggatgaatcatttgtacctgctcttcaagatgaagtaatggaagttgagcatttgcttgcagaacctagaaacgttcatgcttccctggatggtagtttggattctcatacaactttgaatgacaaggatgatttggaactggaggtccttgatggattgctggatgatgttgaaattgatgatcttgaaggaactggtggttttgctggt

SEQ ID NO: 10757 - DNA, 357 bp, Glycine max
  Clone ID: LIB3092-017-Q1-K1-C6
atccgcacagccacttagtcatgtcttcagccaaatgcattgtctatataaccaggtctagttaatagatctaggacggaggaactttgatcagtttgaagagtagcctttgagagcagagatgttgaagttattctagggacctattgatatacaggccaagatggactggagttagcgttacaaagccctggcagatattagtgatagcaaatcatcttctgctaaatggaatttaaataggatgcttttgagtgttttgggaaatttgttaaatatgggtgtgttggaggaattttaataattgtgaacaattacgaagttagcaaaaatgcattaatattagcaactattagt

SEQ ID NO: 10758 - DNA, 370 bp, Glycine max
  Clone ID: LIB3092-017-Q1-K1-C9
ctctaccggaccgcacgcgtccgattgccttcacaccatgctcacacagcaacttgcaaactctgagaaagaaagcctgccagcacatggatcattggggctatctcatccttcccatctgtccaatctatctacaaatccatatttgccacacgtaaatccactttctagctctggtgtcaccaatgcctcttatgctcactatcctatgactgctgactggatgccatgccagcctagacctacttaccttgatggttcaacgcctgaagactttaaaatctaccctggtcaacttggtgaaataccagagaatcttgagaggttcaaagagtcagaactcattcactgcaaattggccatgctttct

SEQ ID NO: 10759 - DNA, 429 bp, Glycine max
  Clone ID: LIB3092-017-Q1-K1-D1
ttgacatattgggagagtgcagctcgcatgattgctgatgtctcgaagtctgacaagatcggggtggagaaatccacagtccctgtcaaaactgctgaagccatagagaagattctgacccacaatagcaagggaatcaaattccagattctatcaaaccctgaattccttgcagagggaactgcaatcaaagatctctttaacccagaccgtgttcttattggaggcagggaaaccccagagggccaaaaagctattcaaacattgaaggatgtttatgctcaatgggtccccgaagaaagaatactgaccacaaatctttggtcggcagaactgtctaagcttgctgctaatgccttcttagcacaaaggatttcatctgtcaatgccatgtcagcactttgtgaggctacttgggcaaacgttcaa

SEQ ID NO: 10760 - DNA, 446 bp, Glycine max
  Clone ID: LIB3092-017-Q1-K1-D10
aaaaaagattctaaagaaatataactaatattctttagaataatcagaaagaatattaaatgcaaataaattttagatagaaaaaagacttaaaaaggaggatttgaaatgcgagatctaaaaacatatctttccgtggcaccagtagtaagtactctatggttcggggctttggcgggtctcttgatagagatcaatcgtttttttccagatgcattgatattcccttttttttcattctagttattgacacggaaaggggtgaagaagattatagatccaattaagtattaaatatatgtaattaatatgtaattaatctcctcttctttatttcgtcttttatttcttcttttttttacaattgtaatagaataagttaggaaagagaaagaataagggttaatttggcctaattgaaaattcgagtgaaactcgggatctcg

SEQ ID NO: 10761 - DNA, 373 bp, Glycine max
  Clone ID: LIB3092-017-Q1-K1-B3
tcgccggaccatccaaatcccgagaaaacagattttgaaacaaaagccatttgcatgagataaatagatagaacgaaaccgaatcgatgatggggtgggtggcgaatcggtggacgggcgtcgccgccgccatatggatccagtggagctgcggcgcatcgtacaccttcagcatctactcctccgtgctcaagtccacgcagggctacgaccaatccacgctcgacaccgtctctgtcttcaaggacatcggcgccaacttcggcgttctctccggcctcctctactccgccgtcgacccctacacaacccaccgcgcctgccccttcaagtccatatggacctcgctcagcgggccctgggtcgtcgtcgc

SEQ ID NO: 10762 - DNA, 445 bp, Glycine max
  Clone ID: LIB3092-016-Q1-K1-H1
gaaagacacagccattgtttgtttactttccattgattgagcgaaagctttgtttttttctgcgatgattttccattgggtggaagaaagtctcaacctttagtcgaaagagcaaggatctgagtgagtgagcgatcatgtgtggtggtgcgattatctccgacttcattccagcgggtcccgccggcggggcgcagcgcgtgaccgccgacatcctgtggccgaatttgaggaagcggttctcgaagtcgctgctggacgatgatttcgaggcagggttcagagaattcgaggatgactcggaaatcgaggatgtcgatgatgaggacgatgaagaggaggaggagttgaagaagaagaagccctttgggttctctcgctccaacaacaaggctgcttctaagcctctctctcgtggagcaacaactgtgaaatctgtggaatc

SEQ ID NO: 10763 - DNA, 240 bp, Glycine max
  Clone ID: LIB3092-016-Q1-K1-H11
ctataaccaacttcagggtttatgttatcaaaagattttgatacatgtggtatggctaaatatactctctgtggttctctgattacaaatacaacgactagaatactgtttcttttgtgacattgaacaaagttgttggatttcttcaacgtattgattttactctcaagtatgcatttcgaaagaaaccttgtgatatgatcagttccactatttattgttaatgggctgaagctttta

SEQ ID NO: 10764 - DNA, 460 bp, Glycine max
  Clone ID: LIB3092-016-Q1-K1-H2
cccacgcgtccgtcaacaacctaatcgccttacaaggaattccgacggggcgattctccgggcgtcggccggcgagactaggaaatcggcgtcgccggagaaggaggaccggtactacacgacgcggggttcggcggaggagaacggcaaggtcaccggcgacggcaacaacggcgaggaacgtgccctagtttggcccaagctctacatcactctctcaagcaaggagaaagaggaagactttctcgccatgaagggttgtaagcttcctcagcgacccaaaaagagagccaaaatcatccaaagaagcttacttttggtgagtcctggggcgtggttgtctgatatgtgccaagaaagatatgaagttagggagaagaaaagtaacaagaagagaccaagagggttgaaggctatgggaagcatggtaaggcgatctgaatgatgatgatgatgatga

SEQ ID NO: 10765 - DNA, 460 bp, Glycine max
  Clone ID: LIB3092-016-Q1-K1-H3
tctgaacatagaacaactcttcacacaacacaactttttctagcattgtagcatcatgactggcaaagacatcctccatataatgaaggtgaaagcagggtttgcaccaccagacacagggaaaggaaaaggcaaaatatcaaaacacatcacacatggctttcacttgatgaagggcaaatcggcacatcctatggaagattatttagtttcggaatttaagcaagaaaaggatagagaattaggcttgtttgcaatatttgatggccacttaggccatgatgttgccagctatttgcagaaccaccttttccaaaacatcttgaaagagcatgacttttggactgagacagaaagcgcggtgaagagagcttaccttgaaacagatgagaaaatattggaacaagcacttgtgttggggcgaggagggtcaacagctgtgactgcaatacttattgat

SEQ ID NO: 10766 - DNA, 447 bp, Glycine max
  Clone ID: LIB3092-016-Q1-K1-H5
cttgaggcttgagctagctactctacacacttagcacaacaacaacaacaaccatatttcgaacttgagacaccggattctgtaggataagagcttatcaagagtagagttgccttgtgcaatctgtttctgtcttctgtctagtgcatcagatatagctggttaagattctctactcgggtgcatggcaatggtgatctcttctgttcatgccacactatttgccagggcctctttcttttgccaaagtagtggcctaagaagctttaggtcgtgtttacctttctcatcttcagctgcttctgtctccactcacaatttttcacggaagaaatggaggcagccagtgttgtcagtattggatcttggcggaatcaacataagcagagaagatgtggtgagggatgatccaacaaataatgtgccagacaatatattttcaaaact

SEQ ID NO: 10767 - DNA, 238 bp, Glycine max
  Clone ID: LIB3092-016-Q1-K1-H6
ctcgatgcttgaactagctactctacacatttagcacaacaacaactacaaccgattttggaactttatacaccggattctgcatgataagagcttatcaacagtatactcaccttgcgcaatctgcatctgtctactgtctagtgcatcagatatagctgcttaagattctatactccgctacatggcactgtttatctcttctgttcatgccacactatttgccatgaccactttc

SEQ ID NO: 10768 - DNA, 449 bp, Glycine max
  Clone ID: LIB3092-016-Q1-K1-H8
cccacgcgtccggtgagaaaagggtcgaacaactggtgaagtcattgatggctacagaggaagagagtgcggtgaaggagcctttggatctcattaggctcagcctcgacgagcgtatctatgtcaaactccgttccgacagagagcttcgtggcaaacttcacgcttatgatcagcatcttaatatgattcttggtgatgttgaagaaattgttactacagtggaaatcgatgatgagacatacgaagaaattgtgaggactacaaagcggacagttcctttcctgtttgtcaggggagatggggtgatattggtttccccgccattgaggactgcatgactggactgatgaactatgtgatcattttaataacaagtgtcactgttatgaaattgtataacttaagtagtgatctcatttcatatgattaggttagttactcaattg

SEQ ID NO: 10769 - DNA, 322 bp, Glycine max
  Clone ID: LIB3092-016-Q1-K1-H9
acgctttcgtcctcgcatccaattacacttgggattcaattttcgatgccattccgagcttgttggttcgatacatcgcttcgctttccagactcttttgtaaaaaaaaatcattttactctgcctaactggttagttggaaaaaaatggaccatgacaagactgtgtgccaagctactccttaagggcctatattgtgcatcaactactgtggattttttggaagtgcacttaccatgaatatgtgttctaaatgccacaaagacatgttgctgaaacacgagcaggccaagcttgcaacatcatccattgggaatattat

SEQ ID NO: 10770 - DNA, 375 bp, Glycine max
  Clone ID: LIB3092-017-Q1-K1-A1
cccacgcgtccgcggacgcgtgggcggagcgtgggcgaaaacatgatgtaggtgtggaaagcgttaaggcagatctatcgtggaacaaagtgactgttaccggcaaattggatgccgagaagctgcgagataagatcgccgagagaaccaagaagaaggttgacatcatctcagctccgcccaaaaaagaagccgccgccacggaaaatccaccggagaagaaggttgaagagaagaaacctgaagagaaaaaaccagaagaaaaacctaaagagagtatggtggttttgaagatcaaactgcactgtgacggttgcattgcgaaaattcgaagaatcattatgaggttcaaaggtgtacaatcggtgagccttg

SEQ ID NO: 10771 - DNA, 239 bp, Glycine max
  Clone ID: LIB3092-017-Q1-K1-A2
cccacgcgtccgcccacgcgtccgcgtggctctctctcattgtcggtgtacgcagatcttagtacactccacgctcttggcacgtgctttctgctgttgttcttgcggattggctttgtggggtgtgacaaattgtggtttttctgttgagagtagctgaaaggtgggtttttgtgtggaaatgagggcgcttttgctggtggggtggtggagtgtatgataataataaagggtggtgg

SEQ ID NO: 10772 - DNA, 374 bp, Glycine max
  Clone ID: LIB3092-017-Q1-K1-A3
caatgttttcattgtagtccacatggttggagcatatcaggtgatggctcaaccactatttggggtaattgagatgggtgctaacatggcgtggccgcgttcagatttcattaacaagagctatcccatcaaaatgggctccttaacatgtaacatcaacttgtttaggataatttgtaggtcaatgtatgtggcagtggccacagttattgccatggctatgccatttttcaatgagtttcttgccttgcttggagcaatagggttttggcctctcattgtcttcttccctgtacaaatgcacattgcacagaaacgggtaaaaagactatcattgaagtggtgttgtcttcaaatattgagcttcgcgtgct

SEQ ID NO: 10773 - DNA, 127 bp, Glycine max
  Clone ID: LIB3092-017-Q1-K1-A4
ccattcacaacaactatcccatcaaaatcaactccttaacatttaacatcaactccaacattataatttttaactcaataaacaactcaatccccacaattatttccataaccctaccatctctcaa

SEQ ID NO: 10774 - DNA, 403 bp, Glycine max
  Clone ID: LIB3092-017-Q1-K1-A6
caacaaaaggctcggtttcgcacagcacacttccctctccaatggaaaatcaattcccaagtatcagtgattcctactgtgttccttatcttatcaatctacgaatcaatacagaaaaaggtatcacttacgacgcaaacaatgtccgtcacttttatatcaaagataaattattcacacttcacaagcgacgtgtcctgtgtgataatcaaggaaaccccatcgtcactctatacaagaaggtttgactactgaggcatcttatgctcgttgatttccttcaataaagaatgacattgcatgggcgatgccaagtttttaggggttataaaagcaaagatttctctcaattgctcttttcagtgaagagatcagcaatgataccgagtgggatgattaactt

SEQ ID NO: 10775 - DNA, 398 bp, Glycine max
  Clone ID: LIB3092-017-Q1-K1-A7
agcacacatacgagaatggaagattccaagtaggtgaaggatagtagttgtacaagatacgaacaattttcgcaaagcgttgagactgcctcccaagaaccctaatcactcctactacaataactacctatcaagggacgaccaatgctatcccgcgttacatcctactggactcaccattgtcactacaaatcacactcgatactgactaattcactatcctggtactgcaccactgatccaagcttcatggtctgaatcatactccatggtacacttaccatgcgtcacaaagtactctggttgattacatatgagagctaatgacgattatcacagatgacagtggcactcactttctattaatggctaatatcgcagaacacaggcccatatac

SEQ ID NO: 10776 - DNA, 199 bp, Glycine max
  unsure at all n locations
  Clone ID: LIB3092-017-Q1-K1-B10
gggcgcacnngagcaacaanggngcacccaanagcagaggcaaacgaggaaagnccgngcgggaaaccaacgccggaagagnncnacgcgcancacncagngagncacggngccgagngcgngacgaaccccagaggncacaagcacnncacacagagatggaccccacacattccttaaaccatcattggaaccttcg

SEQ ID NO: 10777 - DNA, 298 bp, Glycine max
  Clone ID: LIB3092-017-Q1-K1-B11
cagacagtgtcgaagaagaagaagaagaagatggcattgggtgttgctgctcttcccctgacgatacgtggctcacgttctggcacttgttgccagcatcttggtcgtgctctgggtcctcaattttaggggtggcttggcttgggattctgataacaaggccctcatcttcaatcttcatccagttcttattgtcattggcttactagtccttgggggtgaagctattataagctacaaagcattacccctgaagaaggaagtgaagaaattgatacaccttgttttccatgccatg

SEQ ID NO: 10778 - DNA, 247 bp, Glycine max
  Clone ID: LIB3092-016-Q1-K1-G9
tctgtctcctcacattctcttcaattatattaacaacaccatcatattctccaaattcaggaccactctacactttataaaacatctcatatggcaaggacaaacatcattctcaatctgacaaaggaactctctcacaccttgctcatgacttaactcctacatcacatcatgaacattcttaccaacctctgtctaacccatcaccacctaactcataccctacacaacaaagatatcctccaac

SEQ ID NO: 10779 - DNA, 431 bp, Glycine max
  Clone ID: LIB3092-016-Q1-K1-F3
ccataatctggtacgacgtgtgcatggtacgctactccaaccaaaactacctcaacaacagagtacgcgcagtggacatgtctgactccaaaagcgtggctggcgctgatcttgaccggttcaacgaggtgctggcgggattgttgaacgctctggcaacgaaagctgcgaattccgaggatgagaagttcgaaacaggggaagtgaacttgacgagttcagtaaccctttatgggttagtgcagtgcacaccagagttgtccttgttcgattgcaacatgtgtttcagaagcgccattgcatctgttccaaattgctgtgatgggaaacaaggggcaagggtgttgcttcccggatgcaatatcagatatcaagtgtatccattttacaatagcactaaaatattggccacaccggttgtgaagtctcgt

SEQ ID NO: 10780 - DNA, 456 bp, Glycine max
  unsure at all n locations
  Clone ID: LIB3092-016-Q1-K1-F4
cccacgcgtccggagaaaaccaaccagacctattactcttgaggaaacaaaaatctaagaggagccgccatccttctgtcaaatgggctcagacgtctgatgtactctacttaacagttgagctgcctgatgctcaggatgttaagctcaaactggagccagaaggaaaattttacttctctgcaactgctggtgcagagaaaattccttatgaggttgacattgatctgtttgacaagattgatgtaaataatagcaaagctagtgttggttcaagaaacatctgctacttggtgaaaaaggctgagaacaagtggtgggacagattgttgaagcagggagggaaatctcctgtctttctgaaagttgattgggataaatgggtggatgaagatgaggagcaagataataaacctgcagcatctgatatggactttggtgacatnngattttcta

SEQ ID NO: 10781 - DNA, 440 bp, Glycine max
  Clone ID: LIB3092-016-Q1-K1-F5
tttcagctggcggtttggttgttaatgacactactttacatcttgcagttcatactttaccatttgggggagttggtgagagtggagtgggtgcataccatgggaaattcacatttgaagcttttagccacaaaaaagcagttctatatcgcagatttattggtgatgcaccagtaaggtacccaccatacacaaatacaaagatgagattgctgaaagctctcataggtggtggcatacttggtattattcgcgccctgtttggttggtgataggctttaattttaattatattggaattggaatcttgatgctatagacggcttttaatctggcttccttggattttaatctccagttaatttttttatgtaatactcatcaaccttgacttttggatgataggtaaaaatcatgtattggtattcggttcttttggc

SEQ ID NO: 10782 - DNA, 445 bp, Glycine max
  Clone ID: LIB3092-016-Q1-K1-F6
gtgaaagcagggtttgcaccaccagacacagggaaaggaaaaggcaaaatatcaaaacacgtcacacatggctttcacttgatgaagggcaaatcggcacatcctatggaagattatttagtttcggaatttaagcaagaaaaggatagagaattaggcttgtttgcaatatttgatggccacttaggccatgatgttgccagctatttgcagaaccaccttttccaaaacatcttgaaagagcatgacttttggactgagacagaaagcgcggtgaagagagcttaccttgaaacagatgagaaaatattggaacaagcacttgtgttggggcgaggagggtcaacagctgtgactgcaatacttattgatggtcagaagcttatagtagcaaatgttggtgactcaagagctgttatttgtgagaatggaaaggcaagacaac

SEQ ID NO: 10783 - DNA, 452 bp, Glycine max
  Clone ID: LIB3092-016-Q1-K1-F7
cccacgcgtccgaagaacaagtagttgagaactaagaaggagaagcaaatggcttcctcagtgatctcttccccagctgttaccactgtcaaccgtgccggtgccggcatggttgctccattcactggcctcaagtccatggctggcttccccaccagaaagaccaacaatgacattacctccattgctagcaacggtggaagagtgcaatgcatgcaggtgtggccaccagttggcaagaagaagtttgagactctttcctacctgccagaccttgatgatgcacaattggcaaaggaagtagaataccttcttaggaagggatggattccttgcttggaattcgagttggagcacggtttcgtgtaccgtgagcacaacaggtcaccaggatactacgatggacgctactggaccatgtggaagctgcctatgtttggttgcactgatgc

SEQ ID NO: 10784 - DNA, 450 bp, Glycine max
  unsure at all n locations
  Clone ID: LIB3092-016-Q1-K1-F8
gttttgtccttgtgtattatttgggcgcaatgtagaaagattgaaggaagacactccttggactgggccatgcatttgtcatgccatttgtattgaaggtggcatttctctggcaatagcaactgctgctgcaacttccatctttcctgctattgagccagggactgtatgtctcattattgagggtttattgtttacatggtggatgtgtggcattcacactggtcaagtgcgccaatctttacagaagaaatatcacttgaagaattcaccgtgtaatgcatgttgtgtgcactgctgctttcactggtgcgccctgtgtcaagaacacagggagatgaatggacggctctcggacaacattttttcagaaatgaaccgtgtaaacccttctnccgttcaagagatgaaatctaccgatgacaaggaaactcctgaaacgtcttcacc

SEQ ID NO: 10785 - DNA, 406 bp, Glycine max
  unsure at all n locations
  Clone ID: LIB3092-016-Q1-K1-F9
cccacgcgtccgcccacgcgtccgttggcttcctacggagagaaagagtggtacttctttggaccacgggaccggaaatacccgaacggttccaggccgaaccgggcggcgggaaccggttactggaaggcaaccggggcggataagcccattggccaccccaaaccggttgggataaaaaaagctttggtgttttacgcagggaaagctccgaaaggggacaagagcaattggatcatgcacgagtatcgtctcgccgatgtagatcgctccgttcgcaaaaagaacagcctaaggttagatgattgggtgctttgccgtatttacaacangaaaggcacgatcgagaagttccaaccaagcagcgatgtngttgttagccgaaaaatggaatccatcgagatcg

SEQ ID NO: 10786 - DNA, 431 bp, Glycine max
  unsure at all n locations
  Clone ID: LIB3092-016-Q1-K1-G1
gtcgcttcgtggttcattcttctcgttcttgtgatctgttctattttggagtacttacaacactcctgtgcaagtttaattaattaaagaggctaatcaattttcaattggactgcagcagatggctgangaaggttgcaaggttactctaaatgtttatgacttgagccaaggactagcacggcagctttcaatgtcctttttggggaaagctattgaaggcatatggcacacaggagttgtggtttatggtaatgagtattactttggtggtggcatacaacattctnctgctggattaacaccatatggaactccacttagagtggtagacttaggtgtgacacatgttcccaaggatgttttcgaaatgtatttacaggaaatcagtccgcgatacctgcctgaaacatatagtctgcttactcaca

SEQ ID NO: 10787 - DNA, 407 bp, Glycine max
  Clone ID: LIB3092-016-Q1-K1-G11
cccacgcgtccgcccacgcgtccgcccacgcgtccgcccaaatcaggaaacactttctcatcttccctttcccagtttcacaccctacctcatggaaggctctgtcaacgaacgtcttcattttgggaagattggatatggatgcaatcattacaggagaagatgcaggattcgtgctccctgctgcaacgagatctactcatgccgtcactgtcataacgaggccgcgagcttgttgaagaatccctttgatcgccacgagctcgttcgccaagatgttaaacaagttatttgttcagtttgtgacactgagcaacctgttgctcaagtttgcacaaactgtggcgtcaaaatgggagaatatttctgcaacatctgcaaattcttcgatgatgatgttgagaaag

SEQ ID NO: 10788 - DNA, 344 bp, Glycine max
  Clone ID: LIB3092-016-Q1-K1-G12
cgcgtgcgcccacgcgtccgcccacgcgtccttttcacgcgtgcgcccaaatcacgaaacactgtctcaggttccctttcccagtgtcacaccctacctcatggaaggctctgtcaacgaacgtcttcattttgggaagatcggatatggatgcaatcattacaggagaagatgcaggatccgtgctccctgctgcaactagatctactcatgccgtcactgtcataacgaggccgctagcttgtcgaagaatccctttgatcgccacgagctcgttcgccaagatgttcaacaagttatttgttcagctcgagacacttagcaacctgttgctcaagtttgct

SEQ ID NO: 10789 - DNA, 394 bp, Glycine max
  Clone ID: LIB3092-016-Q1-K1-G2
tggtttcgccccaccagtctcgaggatttcgagaagcctcacacccttccttaacaacccgtttctgtctttcaattaggacatcatatatattatacaaaattaaataaataaacactagtcagtagtagtgactagtgaccaagtggaagtggtgtcaggtgtggttgcttagctttccctgtgtatacttatttagtcctcagcttcactccatctgcagggttgcttggttggttggtgatgcatgcatgctcccctctagtacatagcagctagctactcatgaactaccttatgatgcatcatgtatttctcttttcatacaacaacttttatgtcagacttattattattattatgcttatgctactactactgcttatactactaa

SEQ ID NO: 10790 - DNA, 460 bp, Glycine max
  Clone ID: LIB3092-016-Q1-K1-G4
ctcttattgttttcttcatatcttccttgtcactgcccgtgtgtcgccgccatggccaccgtcacgacccaagcctccgccgcaattttccggccatgtacctcgaaatcgaggtttttgaccggctcttccggtaaacttaaccgggaagtgactatgcggccaatggggtgccctccttctgcctctttcaaggttgaagccaagaagggagagtggttacctggcttggcctccccaacttacctcaatggcactcttcctggtgacaatggatttgaccctctggggctagctgaggacccagagaacttgaggtggtacgttcaagccgagcttgtgaatggacgttgggccatgttgggtgttgcaggaatgttgcttcctgaggttttcaccaagtttggaatcatcaatgcccctcaatggtatgatgctgggaaatcagagtactttgcat

SEQ ID NO: 10791 - DNA, 429 bp, Glycine max
  Clone ID: LIB3092-016-Q1-K1-G5
attccgcaacagagagtagaaaagatggcgcggttgatcacagtggtgtggtgcgcggtggcggtgctactgtgcgccgcggcgggcgcgtcgtgggtggaggaggcggcgaacccgatacgaatggtggcgggggtggaggcggaggtggttcgggtgatagggcagtgccggcgcgcgctgaagtttgctaggttcatgagcaggttcgggaagagttaccgaagcgaggaagagatgagggagaggtacgagatattctcgcaaaacctcaggttcatccgctcccacaacaagaaccgcttgccctacactctctctggtaatcattttgctgattggacttgggaggagttcaaaagacacagactaggcgcttgccaaaattgctctgccactcttaacggcaaccacaagctcactgatgct

SEQ ID NO: 10792 - DNA, 288 bp, Glycine max
  Clone ID: LIB3092-016-Q1-K1-G6
caccacacttaattaaatttataacttttataatcacacttatcaactgggctctggctttattacaatacaccatatctatcacacaaaatttaaaaaatacacactacccaatactaatgactacatacctaaactaaatatttatattatgtaataactcaaactcttcttctctctacttattgatatactcatcatcactccatcataatacttacctaaactattaataaatgaatgcatactaccatatattacataacaactatatactcattaactacc

SEQ ID NO: 10793 - DNA, 452 bp, Glycine max
  Clone ID: LIB3092-016-Q1-K1-G8
cccacgcgtccggcacgcgcgcgcacggaggaagagagaccatagacgtcgtgctcagaagtaattttgaagagaaaacgttgatctgattccgaatttgcgttcgttcccgtatcagagtccaggacgatgtcgtttgggtcctctctgttgtctcattcgcatacccttcaattcttgtccaacagaaacagaacctcccgcttcaaagccaccgccgaagttcccgatttcctctctgcagattggtttgaatctcgcaagaaaagaccctttggcccacgattagattttagtgcagaagatgcggtgcattaccagcttgaagccttgaagtataatgaccagccccgtccagattatggaatcgaggttatgtacaggtttgctggatttgatccctttgaaaggtctccctattttggccctttctttgatttgggtcagtttga

SEQ ID NO: 10794 - DNA, 460 bp, Glycine max
  Clone ID: LIB3092-016-Q1-K1-F2
cccacgcgtccgcccacgcgtccgcccacgcgtccgcccacgcgtccgggtgagttgaccgaattaagcaactgttctgtgaagaagaccttctcctctatgatgttaatcatgcatgagctgcaaagtcatgccttgcaaacaagggagagcctgtgtggtgaaaacttgcaaggtgtcatgaccaagctagagagagagatggatgcttcatttgtttggctcttccagcaggttttctggaagaccccagctctcatggtctatgtgatggtcctcttagctaactttttagtgttctctatgaatgataacactgtcaaagtaatcactccttcttccatgatcacaaaggctctaaccttgaccagcaatgagagtaaagtacagcattcgcatgttgatgttgatcaaggtgagtatgtgaatagggagttgacagaagaggagcacatgttgt

SEQ ID NO: 10795 - DNA, 259 bp, Glycine max
  Clone ID: LIB3092-016-Q1-K1-D7
atctggacactactcactcctcacaccacctttacctactcaacctccttctttggaccaggcactaatcactatactcattaccttctctttatatactccattattattttcacttaaccctctactgaaaattcctccaattttcatattaaacgtttcaattcaatttccttcatttcaccacaaataataaaaataactatacatatatcttaacattacaaatatatttattacccattacatttactaaaca

SEQ ID NO: 10796 - DNA, 448 bp, Glycine max
  Clone ID: LIB3092-016-Q1-K1-D8
cccacgcgtccgcccacgcgtccgcccacgcgtccgcccacgcgtccggcaattgacgtgagcggccatccatggtttcgcttcatccacatacactaacactagcgtgccctttgtccgtttcctcttcatcctcccgttttctcagatgctccgtaaattctgccccgaagcgaagaagaagcagcttcattactgcttcgtggcaagagctcgcgggagttttactattctccgcgattcctttcactgccgtgaaagctatagctaatagtccgctaggggagtcgcttcagaggaaaatggaggagagaaagacatttgctgtagaaaactcgtctacattcaaggccttagccggcaaggcccgaaaggagagcttttggtatggagaagatcggcctcgttggcttggtcctatttcatatgaatacccatcatatcttac

SEQ ID NO: 10797 - DNA, 434 bp, Glycine max
  unsure at all n locations
  Clone ID: LIB3092-016-Q1-K1-D9
cggacgcgtgggcggacgcgtgggaagttgaggtgggtacaaagaacggtgtttcaggtaaggtcaattgggattcaggctcagaaaattcacccattgttccatcccctggaacattgggcctggctatagacaccacttggagacttggcttagagaatacacacttgggatggagtggaatagatcaaggaaatgcaaatgtgggttggggagtaggacagactgcagtgcaggaaaacagaagttcaagttcgtacacttctacagtaactccaggccttggggatagccaaacaagatatggcagtgatcgattttctgtgtccagagatcggngttttcaaggtcatggtagggaatcaggttttagtagaagcagaattccatataacaggcaaccgtcatatggtgttggaaatggaagatcatat

SEQ ID NO: 10798 - DNA, 458 bp, Glycine max
  unsure at all n locations
  Clone ID: LIB3092-016-Q1-K1-E1
gcatcatatctgtgtttgctgcaagggcttgactcctctacctcctcctcctcctccgctgcaccagagacgaaacactctagtcattacttttgcttcaaagtctggaggaggattttcacttaactcgttactgaaaagttgtaaaagttgcggaggaaagggggcaattgaatgtcctggatgggacgggaaagaataaaaagaacggaaatatatttgaacggtggaaatgttttgattgccaaggatttgggctaaagagctgtcccagctgcggaaaggaaggcttaacacccgaacaaagaggagaaagataggactaaggattcaaacttgcactnttctctcaattgatcaaccccttacccctttatgcaatcttatacttacgatataaatagaggtcatatgcatctttntgaaactttgataatttgaatattaaacttcagatt

SEQ ID NO: 10799 - DNA, 219 bp, Glycine max
  Clone ID: LIB3092-016-Q1-K1-E11
gaaagaatgacgactgggctatgcttcataacattaaaaagtgaagtatatatgaagcatgaacattgtgcctatcttacttaccaaatggtgtgcaagctttgcaataatttgtaacattaatattgtggcaacctaatatttttatagataagtttttaatgtaaaagacagaaaagtgtggtttctgactattaatttttctctgtcatgatcagt

SEQ ID NO: 10800 - DNA, 455 bp, Glycine max
  Clone ID: LIB3092-016-Q1-K1-E4
gtcagtggctggttgtgttgagaactccaggggtgttgaaatgatgaacaatggaaggtgtgaggagactacttatgggaatgattctgtcacactggtgaaaaatatagtggccagtggaaatgaagtgtttcagcatgagctacagcagcagttgcagccgaatgcaatgctagggatggttcttgattctgcagaaaaggttctctcagaagctgtgcaagagccggtgataaggagattgagtctaccatcgacagtttagatatcagtggcaatgtctggaagtggcaattgttcaagtggagaaagaagagagccagcaatttgggtaagtactaatttaaatggctggctttcatttctctatttttttcaggcttgcttgatcgttcaagcatgcaaattggaactgatctgcatcaggctgaagagttggagctgagatttgtcag

SEQ ID NO: 10801 - DNA, 429 bp, Glycine max
  Clone ID: LIB3092-016-Q1-K1-E5
cccacgcgtccgatcagatcctgagggaagattgggtgaggctcctaggcctgaactgcgagagcaaggtcgaatatcaggtgcctgctttgatgctgctcgtggtattgtacctggtttgaaggtaagaggaacagactataagacggctgatggaacttgtgtacgagattatattgatgtaactgacctggttgatgctcatgtaaaagctctggaaaaggcacaacctagtaatgttgggatctacaatgttggcactggaaagggtagttcagtgaaggagtttgtggaagcttgtaaaaaggccacaggggtggacattaaagtggactaccttccgcgtcgtccaggcgattatgctgaggtgtacagtgacccatcaaagatcaaacgtgaattgaattgggttgctaagcacactgatct

SEQ ID NO: 10802 - DNA, 455 bp, Glycine max
  Clone ID: LIB3092-016-Q1-K1-E6
cccacgcgtccgggaaatcggaaaagaatataaagtcttcactgaggaagagaggaagaaggttgtggaagctggcggactacatgtagtaggcacagagcgtcatgaatcacgtcgaattgataatcagctgcgtggtcgaagtggcagacaaggagatccaggaagctcccgctttttcttaagtcttgaagataacatatttcgtatttttggtggagatcgaattcagggcctaatgcaagcgttcagagttgaagacctacctattgaatccaagatgttgaccaaagctttagatgaagcccaaaggaaagtggagaactatttctttgacattcggaagcaattgtttgagtatgatgaagtacttaacagccaaagagatcgagtttatacagagagaagacgagcccttgaatctgacaatcttcagtctcttcttattgaatatg

SEQ ID NO: 10803 - DNA, 289 bp, Glycine max
  Clone ID: LIB3092-016-Q1-K1-E7
cccacgcgtcctataaatctcattttaattttaagtcttcactgacgaatacaggcatacgtttctttaacctggccgactacatctactattcacatagcgtcatgaatcacttccaattcataatcaactgcatttactatgttgcatacaatgttatccatgaacctcccgctttttattaactcttcaacataacatatcacgtattttcccagcatatctaattcacgacctattccaatctttcaaacttgaatacctacctattgaatccaacatattgacc

SEQ ID NO: 10804 - DNA, 194 bp, Glycine max
  Clone ID: LIB3092-016-Q1-K1-E9
tccattcaacattatattttttatatactctcacctaaattcaatacagtcacctttatactacaactatatcactcacaaaaccctacacattcccaacttaatcatccttcatcacatccccctatcatcatctaccataatatccaacactcccttaccaatcatccttccctacactttcacaacctcaa

SEQ ID NO: 10805 - DNA, 434 bp, Glycine max
  unsure at all n locations
  Clone ID: LIB3092-016-Q1-K1-F1
gattcaatttatcaggatgcccaaagtgctataaatgatttgactggaaaatggcttggaagtagacagattcgttgtaattgggcaaccaaaggggccagtgccagtgatgaaaagcagagttcggattcaaaaattgtcgtggagttgatcaatggatcatccgaagaaggccaggaaacaaccaatgatgacactcccgagaagaatcctcaatataccactgtttatgttggcaatcttgctccggaggttacttctgntgatctccatcaacattttcattctcttaatgccggaattattgaagatgttagggtgcaacgagacaaaggttttgggtttgtgagatacagtacccatgctgaaacagctcttgctatacagatgggtaatgcccgaattctatttggcaaacctatcaagtgttcatg

SEQ ID NO: 10806 - DNA, 382 bp, Glycine max
  unsure at all n locations
  Clone ID: LIB3092-016-Q1-K1-F10
attgaactgcaatcaccacttcaaacaccgtctcaattctgcaactttttctcatttgggttgaactctctgtctcaatgaggctcttcttccactcttcactctgctcttaaactggttaatcaaaagatggagcgcgcgaggctaaacatgagaggccattgctctggttcgactccctcagaagaatctgctctggatcttgaaagaaactgttgtagtcattctaatctgccctcacttagtccaccaacgcttcaaccctttgcttcagctggacagcattgtgagagcagtgccgcttacttctcatggccaagccgcttgaatgatgctgccgaagagagagcaaactantttttaaatctacaaaaagggggtg

SEQ ID NO: 10807 - DNA, 357 bp, Glycine max
  Clone ID: LIB3092-016-Q1-K1-F11
ccgtcgtcttcttcttcggccgcggtagatccgtcatcggcggtggttgatgacgcgccacgcgaggcggaggaggttaaggcgccgcagcagaaccggtgtatgacgtgcaggcggcgcgtggggctcacagggttcaagtgtcggtgcgggatgatgctgtgcgggacccaccgttacccggagcagcacgcgtgcgagttcgacttcaaggggatggggagagagcagatcgcgaaggcgaatccggtggtgaagggcgagaagctcgacaagatctgaaacgaatgaacgaagggtgttatggtaatttcgtgtttatcaagttggtggtgatggataacggatgcgaaacgc

SEQ ID NO: 10808 - DNA, 438 bp, Glycine max
  unsure at all n locations
  Clone ID: LIB3092-016-Q1-K1-F12
aagaacaagtagttgagaactaagaaggagaagcaaatggcttcctcaatgatctcttccccagctgttaccactgtcaaccgtgccggtgccggcatggttgctccattcactggcctcaagtccatggctggcttccccaccaggaagaccaacaatgacattacctccattgctagcaacggtggaagagtgcaatgcatgcaggtgtggccaccagttggcaagaagaagtttgagactctttcctacctgccagaccttgatgatgcacaattggcaaaggaagtagaataccttcttaggaagggatggattccttgcttggaattcgagttggagcacggtttcgtgtaccgtgagcacatacaggtcaccagatactacgatggacgctactggaccatgtgnaagctgcctatgtttgttgcactgatg

SEQ ID NO: 10809 - DNA, 438 bp, Glycine max
  Clone ID: LIB3092-016-Q1-K1-D5
gttttctattagcgggtcgtgacaccatcgctgccgggttaacgggcttttttatgttgttatcgaaaagcccggaggtggaggagttgattagggaggaggtgggccgggtgatgggcccgggccaggagtttccttcgtttgagcaaatccgcgaaatgcattacctgaacgcggcgattcacgacagcatgaggctgttcccaccgattcagttcgattcgaagttcgccacggaggatgacgtgttgccagatggcactttcgtgagaaagggcagtagggtaacttaccacccttacgcgatgggccgaatggaaaatatttgggggcccgattgtcttgacttcaggcccgaaaggtggctgcctgatggggtgttcgtgccaaagtgtccctttaagtaccctgtttttcaggcttgtgtaaaggtgtgtt

SEQ ID NO: 10810 - DNA, 234 bp, Glycine max
  Clone ID: LIB3092-016-Q1-K1-B9
gaccgaccacgcctaaatcccaattcccaaattcctcccattagggtttctctctctctgtctccaattcatgttctcttattcttgattgattctcttctattcgattcgattgttctatggaaccgcagcttcagcccaagctggaccccgcgccggaggttgttagcggtggcggtggggattcggagaagtcgcatgtcagtgatgtcaccgaggttcgcgacgttgaca

SEQ ID NO: 10811 - DNA, 237 bp, Glycine max
  Clone ID: LIB3092-016-Q1-K1-C1
cgtccgacaaccgactcttcatgttacaatttctcacgttctgatccgccagggtgccagttgcaataagaaggttcgctgtgcctgcctccgatgcaagagaatgtggcagctctttcgactccattcctatgtttgtcacgacaccgattcctcctgcaaggaacccttttgcaggcaatttcaattgacaatgcatcatgagaaaaggaaagatgatgctaagtggaaactact

SEQ ID NO: 10812 - DNA, 363 bp, Glycine max
  Clone ID: LIB3092-016-Q1-K1-C10
aaacaaagttacaagtaaagtaaattaagaagatcattaatggcttctcttgcaaccttagctgctgttcaaccagctgcgctcaatggccttgctggaagttccctctctggaactaagctctctttcaagccctctcgccacactgtcaaatccaagaacttcaggagtggtgccgtggtagcaaagtatggtgacaagagtgtgtactttgatttggaggatctgggcaacactacggggcagtgggacttgtatggctcagatgcaccttcaccctacaaccctcttcagagcaagttcttcgagacatttgctgctccattcacaaagaggggattgttactcaagtttctgatattg

SEQ ID NO: 10813 - DNA, 251 bp, Glycine max
  Clone ID: LIB3092-016-Q1-K1-C11
catccgaaacaaaactacaagtaaactaaatttactttatcattaccgacttctcttgcaagcttagatgcaaatcaaacaccttcactcaatgtactaactactatttcactgtcaacaaataaactaaatacaaacccacatcaataccttgccttatccaaacacttttaaattattacaacagtacccactcactgtgacaagattaaatactgagaattacataatatttaaatctataacaatat

SEQ ID NO: 10814 - DNA, 416 bp, Glycine max
  Clone ID: LIB3092-016-Q1-K1-C12
tccactttcactggaatcacaatcctgaaacaaaaacatcttagcatttaacatactactagacaacatgaccaccacattggaaagaggtttctcggaagagcaagaagctctggtggtgaagtcatggaatgtcatgaagaagaattctggagagttgggtctcaagtttttcttgaaaatatttgagattgctccatcagctcagaaattgttctcattcttgagagattcaacggttcctttggagcaaaatcccaagctcaagccccatgccgtgtctgtctttgtaatgacctgtgattcagcagttcagctgcggaaggccgggaaagtcactgtcagagaatcaaacttgaaaaaaataggtgctacccattttagaaccggcgtagcaaacgagcatttcgaggtga

SEQ ID NO: 10815 - DNA, 454 bp, Glycine max
  Clone ID: LIB3092-016-Q1-K1-C3
caaaatctatataatataataaccgcagaaacttgataacataatcatttagtctagcgtgcacaaggaaactttttgaaacatttcttctgaattttagttgtcaacaccacccatttttaaagctttgaagcatcatcatcgctgtgttctagttagcttccaataactaatggtacttttgacagagaaacttgcaaaacgttacttcaacttcaagctggagaatcgccaccatgccattacacatcctcaaccagaggagttatcatcttcacttcttgcgtttaaatcctatgtgtccaaatcaattgaccaattagcattggatttgaaacctggatcagagaccttgtccttgacatggtttggaaggtgttttgacctcttgcccttaatcaacaaggcttttgcaaagcttgttgcggatattgactaccccatgagtaaatgg

SEQ ID NO: 10816 - DNA, 416 bp, Glycine max
  Clone ID: LIB3092-016-Q1-K1-C4
cccacgcgtccggaacattgaactcagatgaaccaagagaccttaagctgccattgaaagagaggttcttccttcaaccattgtctccaactgatgctgcacaaagggcaaaggaatcagccaaggaaattgttggcgttaagaagttgattgaaaagaaggcttggccatatgttcagaatgatctgcgtctcagggccgagtatctgcgctttgatctcaacactgtcattgctgcaaagcctaaggatgagaagaaatcactcaaggaactcactggcaagctcttccaggatatcagcaatctggatcatgcagcaaaaattaagagcagcccggaagcagagaagtactatgctgctactgtatcttctctgaacgatgtccttgccaaacttggttaatgtgattaattt

SEQ ID NO: 10817 - DNA, 406 bp, Glycine max
  unsure at all n locations
  Clone ID: LIB3092-016-Q1-K1-C5
cgcatgcgattgtcgcagcgatctttcgctcgttgttgtacgaggcatgcggtcggatagtgaacccgatttacgggtctgtcgggctattatggtccgggagctggcagctgtgtcaagccgccgtggaaaacgtcttgaaaggcgcgccgattacgccgatcacgtctgaagccgcggctagcgggcggtgcccaccgctcaaggcttacgacatacgccacgtgttcaaagacgagaactccgccgncgcgtccaacgaaactcagcaccaacgagtcaagacccgctctcgagtgaagcgacccctcgccaagcccaaatccaccgncaaccaaaacaacaacattaacactaagaatacgggaacccgattccgatcggatgaaccgggtttgggtgcatg

SEQ ID NO: 10818 - DNA, 392 bp, Glycine max
  unsure at all n locations
  Clone ID: LIB3092-016-Q1-K1-C6
cacgaaataacgatggatatctgcctatagcaaggatgctcgcaaaacatggagttgtctgcaatttcacctgcatggaaatgaaggacagagagcagccagactttgcaaactgctcacctgaagggttagttcaccaggtgaagatggcaacaacaacagctagagcagagcttgcgggggaaaatgcattggagagatatgatgcagatgcatatgctcaagttttatcaacaagtaagtcagaatccggcagtggattggctgcattcacatatctaagaatgaacaagaggttgtttgaagctgacaactggcggcacctagtggatttcgtaagaagcatgtctganggtggtcggagagagagacttccggcagctgattcccat

SEQ ID NO: 10819 - DNA, 311 bp, Glycine max
  Clone ID: LIB3092-016-Q1-K1-C7
cccacacaacctactacattacaaacaccatcactctatattacatatccactcacactatcatgcacaacgtaaaatttttcaacacatcaaattccaatacatactacatcaacaccatccaaacttaaacccttaaaccttaatcaaccattcaacaacatacccaactacaaacacaacttcacaaaaaactataaaaacaacttaacctacacacatactaaatctcaacataccattacacattcttaaccaaaataaatctcatcattaatataaccaataatatactatatatccaaatcaac

SEQ ID NO: 10820 - DNA, 437 bp, Glycine max
  Clone ID: LIB3092-016-Q1-K1-C8
cccacgcgtccgattttatccaattgaaattttaaaaatgactgggataaacttaagaatggcaattattgaaattgaataagtaaacaatttaattggattggtcgaatggtatcaaaaaaatggagtactaactcccatttcttatttattattgaattaaccgatcaacttgctttgttatcgaacatttctttttgatttcaaaaattttccggaaaaaatttgaatctatttttatatgcgaatcaatcctactacttctggtcctgaggtttctgcgcttgaaaaaaaaaatctgggacgtatcgcccaaataattggtccggtactagatgtagcttttcccccaggtaagatgcctaatatttacaacgctctgatagttaagggtcgagatactgttggtcaacaaattaatgtgacttgtgaagtac

SEQ ID NO: 10821 - DNA, 277 bp, Glycine max
  Clone ID: LIB3092-016-Q1-K1-C9
aacacttatactatcaaatgttttagatttcaaacctatccaactctctaaggctaacgctacttctaataaactaaaggctataactcaatctatacattactctacacacacactctctttcacacaatactaccttaattctaacctcatatatcctcatctttcaaacaccttctctcacaaagaattcacttccccacctacaacaactcaaacaccttcctctaactacacaattctaaatccaactccaaatcttgtcttacatatcata

SEQ ID NO: 10822 - DNA, 285 bp, Glycine max
  Clone ID: LIB3092-016-Q1-K1-D1
caaaacagaagtgcaagaatcacaccatattttgagatggggttcaagtcactgatgtagtgtaagggaataaattagataactcattgctaggggatactttatttgattctcaaaggtctctctttaggagctctcttgctgtcttctttaatcataagctctgtggcagcttttcacttatgacaagcccatttttccgttggccttttattgtttataaattagatcttaaagtcttgattcatgttttaaatgtctttctagtacatgaatctttgaatt

SEQ ID NO: 10823 - DNA, 398 bp, Glycine max
  unsure at all n locations
  Clone ID: LIB3092-016-Q1-K1-D11
gaaaaatgcacgatttctgcttcacgatcccctacggattgatgttagtgggtggtggactgttcgcctacataagcaaagggagcatcgcttctctcgccggaggcgccggctccggtttgcttctcatcgtcgccggctatctcagtctcaatgctttcggcaaacgaaaaaactcttacctcgctctctttctcgagaccgtttgtgcagccatactaacttgggtcatggggcagcgatatttggaaacatccaagattatgcctgctggtcttgttgctggaatcagtgctctcatgactctgntttatctctacanattagcaactggtggcaaccattctcccaccaaagctgantgatgatataatgatatatcatatatttgcttacta

SEQ ID NO: 10824 - DNA, 456 bp, Glycine max
  Clone ID: LIB3092-016-Q1-K1-D12
gtggaactaacaacaacacaaggccatcatcatggcagctgcttctcctatggcaagccaactcaagtccaccttcactaaaactcttgtagctcccaagggcctctctgcctcttcaccactccacctcctgccttctaagaggcaatttagcttcactgttagggccatccaatcagaaaagccaacctatcaagtgattcaaccaatcaacggtgatcccttcattggaagccttgaaaccccagttacatccagccccttgattgcatggtacttatcgaacctccccgcatacaggaccgcagtgagcccactactaagagggatcgaggtgggcctggcccatggctaccttctggtgggcccattcgtgaaggccgggcctctgaggaacaccgagatcgccgggcaagcaggctctctcgccgcttgtgggcttgtggtgatcctcac

SEQ ID NO: 10825 - DNA, 441 bp, Glycine max
  Clone ID: LIB3092-016-Q1-K1-D3
gcagttctctcttctcttctcactccgcagaagagagagaaatatccaatacctagcgttagcgtgggcgtactctcccaatcccaatcccctctctctctctatcccttcttttcttcttcttcttcttctattccctctccctccgctttttctcttcatcgttgtggttcggcgtcgctgaatccgtcacgttgttgtttgtgtcgaatcggacggcgaagattgcatcgcgaggtattatgcagcagagtgatcaaacggtgttgagcttgaggcccggtggtggaagaggcagcaggctcctcgctcctcgattcgactcctcctcttcatccgcttcccctgcttttggctcctttcccgctgatcttcctctcctgcgtccccacggtggagctccctcacccttctctatcaagggctgagatgctcggtttg

SEQ ID NO: 10826 - DNA, 120 bp, Glycine max
  Clone ID: LIB3092-016-Q1-K1-D4
gttatccgctattcaatctcgtcgccactagcacttgttcagccgaagctcaactctaatgctctgtgctctacgacagcacactctaagagaatctctctcatgaatcatgacttattc

SEQ ID NO: 10827 - DNA, 440 bp, Glycine max
  Clone ID: LIB3092-016-Q1-K1-B8
cccacgcgtccgcccacgcgtccgccttcacaagattctcacaaacaactcttgagaaagaaagaatggctgccaacacattgatgagttctgccatctcagccttcccatctctcctttcctcctcaaaatccagatttgccgcagcagttcctctttccagctttgttgtcaccaatgcctcttcttctcgcttttccatgagtgctgactggatgcctggccagcctagacccccctaccttgatggttcagcacctggtgactttggattcgaccctcttcgtcttggtgaagtaccagagaatcttgagaggttcaaagagtcagaactcattcactgcagatgggccatgcttgctgttccagggattttggttccagaggcattgggcttaggcaactgggtaaaggctcaggaatgggctgcagttcctggt

SEQ ID NO: 10828 - DNA, 261 bp, Glycine max
  unsure at all n locations
  Clone ID: LIB3092-016-Q1-K1-A5
cttgttccaaactttatctctctctctctttttttaaattaacttggtcctaaactggtgccanaaagtcctttcttttaaggtccttcttgcttcaaattaccactctcttcctatgctatgatacagatacaggaagaggatcaaaataccccaccataagacaaacccaaaggaatagcaacgtcaattatggtgggaggtttcaatggagaaagtgttgtgagagaaaaaagaggggangaagaaaacaacacgtgg

SEQ ID NO: 10829 - DNA, 456 bp, Glycine max
  Clone ID: LIB3092-016-Q1-K1-A6
gagaagaggttctaatttgggaaggtgctaagaatatggagaaaacatcttgggcgtgcggcgttatcacccaggtgtgtctctgctttgctctatacatagctctcaacttgggtcaacctcagacttctgatctttacttcatcagtgtcaaaggaggtttcagaccctttacccaacaattgcatcttctcaagcagatggataaggtggcaaaagcttacaacgcaagttttgttgtgagcagcagtgagctgggggaatatgattcactcatgcagaatgctactcaacattttccgtctctgagactaccctggtacaccacatacactactactacatcttcaaaaacaaaaggacaagaagtggggtgcttttcaaagaagatcacgacatctaacaggataacctcaggtgtcatcggtgtggatactgaattattgaaagattatg

SEQ ID NO: 10830 - DNA, 446 bp, Glycine max
  Clone ID: LIB3092-016-Q1-K1-A7
gtttagttatctactcttttctgcatgtttgttctctcaacgactcctccgcgaaagagtgttattcaatattttggttgggttgaatcccggggttgaagcgttgcagacatcacggctattctaagagtgtctcgctccctcattcatgtccgatctgtacgacggaggacgggtagttgcgtaactgccgttaacccttcgccgcacggtgggcgtggtgctttgccttctgaaggtggtagcccttcagacttgctcttcctcgctggtggtggtttcttctagtttcttcactcttttcattacttttagcctgcatagttttaaataagaaaaaaaaaacagcgactttgtgactagttaagatcacccgttcttcttcttcttcttcttcttcttcttctactactactactactacttttcctccacaaaatgatgct

SEQ ID NO: 10831 - DNA, 451 bp, Glycine max
  unsure at all n locations
  Clone ID: LIB3092-016-Q1-K1-A8
ctttcctcacaatcagctccacatttttcaaatcccaattttgccctcctcccttcccctgtcgcgtggtggcgtgtcacgttggatccaattccaatgttcaaaagcacgttgccaccgacctcaagttcgtcctccacgacgccctccatgactctggaatcaacaccactcatgccagagaagctagggagcatttctgctcacaaattaggagattcactgatattgagaagggaaccagtatttgtatcaacaggtgtgttgatttggggagaactgctctctacatagctgcagaggatgattctctagtgtcacattcatcagttccacttcctgtcgatgattntattacgagattagatgatctttcgatggactactgtccgcactacagccccaaatatgattcatcgccggagaagttcttagagagcatagagagatt

SEQ ID NO: 10832 - DNA, 453 bp, Glycine max
  Clone ID: LIB3092-016-Q1-K1-A9
cacaatcagtctgagattcgccaccgaaaaacctctcaccatggtttctcgccatttgggtgcgctcttcctctgactcctctgtttcgagatctctgtttcatcaattcgattgcccggtttggaccaagacgccaaggccacgcatggatcggtgcttaggttgaacagaggaggctcttcagtgaagtttgatcccacacgggtcactcagctatcgtggagtcccagggcttttctctacaagggctttttatccgatgaagaatgtgatcatttgataactgtggccaaggacaagctggagaagtctatggtggcagataacgagtctggtaaaagcataatgagtgaagtcagaacgagttctgggatgtttctcaacatggcacaggatgaaatagttgctggtattgaagccagaattgctgcatggacattccttgctataga

SEQ ID NO: 10833 - DNA, 458 bp, Glycine max
  Clone ID: LIB3092-016-Q1-K1-B1
tgcattcttcccgtatttgacgaagataaacagcctacctattgcaaaagcttatgccacaaggacaatcctgttcttgaaagacgatggatctttaaagccacttgctatcgaattaagcaagcctgcaacagtgagtaaagtggtgttgcctgcaacagaaggtgttgagagtacaatttggttgttggccaaggctcatgtcattgtgaatgactctggttatcatcagctcataagccattggttaaatactcatgcagtgatggagccatttgccatagcaacaaacaggcatctcagtgtgcttcaccccatttataaacttctttatcctcactacaaggacacaataaatatcaatggccttgctaggcagtccctgattaacgcaggtggcattattgagcaaacatttttgcctggaaagtactccattgaaatgtcatcagttggtt

SEQ ID NO: 10834 - DNA, 455 bp, Glycine max
  Clone ID: LIB3092-016-Q1-K1-B11
cccacgcgtccgaagtttttgtcaggggatgcttcacacccacaaagtaaagaactccatgaatatcttgaaactctgtcccaaacaatgagaaaggagggctacgtgcctgatatttcatgtgtccttcacaatgttgatgatgaagagaaagaaactatgctctgtgggcacagtgagagactggcaatagcctttggtcttttaaatacccctccaggaactaccatcagagttgccaaaaaccttcgggtttgcaatgactgccatgttgccactaaaatcatatctaagattatggacagggaaatcattcttagagatgttagaaagttccatcatttcgcaaatggaacttgctcttgtggggattattggtaaaagaaagtgaatagtaaaatattttttttcttctaatttattcatctcaacttttcccttctttcatgagcaag

SEQ ID NO: 10835 - DNA, 400 bp, Glycine max
  Clone ID: LIB3092-016-Q1-K1-B12
cccaacccaacccaaaactcaagctaaattctcactctcacaacttcaatctctctctctgtctctctctctctctctctctaccaaaaaaatggctttggaaactctcaactcaccaacaacaaccgtcccatctttccccttcgacgacccaactattccatgggccaaaagaaaacgttcaaagcgttgttcacgcgaccacccttcggaggaagagtacctcgctctctgcctcatcatgctcgctcgcggcggcaccacccgccgcgtcagcactccaccgtcgcatccgacttcagatccttccaccaagctcagatacaaatgctccgtttgcaacaaaagctatcgctcttaccaagcgctcggtggacacaaggccagtcaccggaaactc

SEQ ID NO: 10836 - DNA, 450 bp, Glycine max
  Clone ID: LIB3092-016-Q1-K1-B2
ccttgatgagaagaccattttccacttgaacccttcaggccgttttgtcattggtggcccgcatggcgatgctggtctcaccggccgcaagatcattatcgatacttatggaggatggggtgctcatggtggtggtgctttctccgggaaggaccctaccaaggttgataggagtggtgcttacattgtgagacaggctgctaagagcattgtggcaagtggacttgccagaaggtgcattgtgcaagtgtcttatgccattggtgtgcctgagcctttgtctgtgtttgttgacacctatggcactgggaagatccatgataaggagattctcaacattgtgaaggaaaactttgatttcaggcctggtatgatctccatcaaccttgatctcaagaggggtggaaataacaggtttttgaagactgctgcctatggacactttggaag

SEQ ID NO: 10837 - DNA, 447 bp, Glycine max
  Clone ID: LIB3092-016-Q1-K1-B3
caaagttccaagttttttggtttggcgatatatagagttatacgcgtcacattttcataagaataaggtaatatctacagcggcggcagccacagtgctactcccacctaggattccgaccaccaccaacgttacccgctgctctgctttgccttctctccctcctcgcgtctccaacaccaaaaccactttgttctcaccttccctcaacaacttttcagtgtcccgaaaatcttctctgcttcagaccagagcttcttcagaggaatcatcctcagtagatgccaatgaggtgttcacagatttgaaggaaaagtggaatgctcttgaaaacaattccacagtacttctttaaggtggatggtctatagttgctatttgtctatccacaattcttgagaacgcccataactcaattccttgcttccaaagaattatgaatttggt

SEQ ID NO: 10838 - DNA, 460 bp, Glycine max
  unsure at all n locations
  Clone ID: LIB3092-016-Q1-K1-B4
caactattctacttaccttttctcttaatccaaatatcatcatctgaaacgatggctgccgtggcaaccacaaccctctcttcaaacccgaaactctcatttttccacggaaagcccgttacatattcttcccgcgtcgcacccaccaccaagttattctcatccaaacaaggcacaatctccatgtccctaacccaacccccatacgacctccaatccttcaaattccaacccatcaaagaatccatcgtctcacgcgaaatgacgcgccgctacatgaccgacatgataacctacgccgacaccgacgtcgtaatcgtcggagccggctcggcggngctctcctgtgcgtacgagatcagcaagaaccccgccgtgagcgtcgccataatcgagcagtccgtgagnccccgcggcggcgcgtggctcggcggacaactcttctnncgcatggtggttc

SEQ ID NO: 10839 - DNA, 473 bp, Glycine max
  Clone ID: LIB3092-016-Q1-K1-B5
gcgcgacgcgtccgcaatgctccaaattttttggtttggggatagatagagtgatacgcgtcacattttcataggaataaaaaaatggcagcggcggcggcagtgacggtgctactcccacctaggattccgaccaccaccaacgttacccgctgctctgctttgccttctctccctcctcgcgtctccaacaccaaaaccactttgttctcaccttccctcaacaacttttcagtgtcccgaaaatcttctctgcttcagaccagagcttcttcagaggaatcatcctcagtagatgccaatgaggtgttcacagatttgaaggaaaagtgggatgctcttgaaaacaagtccacagtacttctttatggtggaggggctatagttgctatttggctatcgtcaattcttgtgagcgccatcaactcagttcccttgcttccaaagattatggaagtggtagggcttggata

SEQ ID NO: 10840 - DNA, 443 bp, Glycine max
  Clone ID: LIB3092-016-Q1-K1-B6
gccgtgtgggagattcgccacgtgccagggtcttcaggttctgatccgccactttgccacgtgcgagaagaaggttcgcggtggctgcgtgcggtgcaagagaatgtggcagctctttcgactccattcctatgtttgtcacgacaccgattcctcctgcaaggttcccttttgcaggcaatttcaattgagaatgcagcaagagaaaaggaaagatgatgctaagtggaaactactagcgaggaaggtggcctcagccaaagtcatgtcttcattgtcactgccaaagaggaagcgagatgaagaaacaagagtgacgatggacaatcccgggattagaagttttaaattactatgaatattcttataaataatgatgtataggacagtgtgttccgtgttagatacttgatagagcagtttctatagggagagagtattct

SEQ ID NO: 10841 - DNA, 458 bp, Glycine max
  unsure at all n locations
  Clone ID: LIB3092-016-Q1-K1-A4
ccgacgcgtacggtttggttatctactcttttctgcatgttttttctcttaacgactcctnctcgaaagacgggtattggttaatttggttggggggaatcccggccttgaagcgttgcagacatcacggctattctaagagtgtctcgctccctcattcatgtccgatctgtacgactgaggacgggtagttgctgtaactgccgttaacccttctccgcacggtaggcgttgtgctttgccttctgaaagtggtagcccttcatacttgctcttcctcgctggtggtggattcttctagtttcttcactcttttcattacttttagcctgcataattttaaataataaatataaaacatctactttgtgactagttaatatcaccgtttcttcttcttcttctttcttattttcttcttactactactactactactttatcctccacaaaatgat

SEQ ID NO: 10842 - DNA, 439 bp, Glycine max
  Clone ID: LIB3092-015-Q1-K1-G8
cccgcgcgtccggctttctcatggctactatctttaccctcgcaacgctgtcactagccgggtcttctcgtgtttccattggcggagctccgattcgccaccaccgttctccgaaccggatcgggttgttgccgcctctcaaatgctcctctttggagccggaaaccgccccgcctcctcccttcgactggactcacaagttgatcgccggtgtcgccggcgtcggattcctcgaaacctcgtacctcacttaccttaaactcaccggcgcagacgccttttgccccgtcggcggcggcacctgctctaaaatactcgacagtgattacgccctcgttttcggtattcctcttcctctgattgggatggctgccgtatggtccctttttttttttggggggttgctgcacttggtgttcaattggcttcgaagaatttc

SEQ ID NO: 10843 - DNA, 376 bp, Glycine max
  Clone ID: LIB3092-015-Q1-K1-G9
cacaaatctatttccattccattccctcagagagagcaagatcacccttctatagagagaagacacacacacacacacacaaaacaaaactcttaaagagggtgaagattttttggaacagaataagagtatggcccttacaaaacaaatcttgggttcttcattgctagagaggtccatgtttgttccttcttcttccccttcatcacttctcaaccaaactcggttcttagttcctttggagaacaagagagttgtgagggtgaagagagctgcaaagtttcctgtggcagctataagtgaggatttgatgaagggttcttcttcttctccttcatcatcatcatcttcatcctcttcttcttcttcttcttct

SEQ ID NO: 10844 - DNA, 403 bp, Glycine max
  Clone ID: LIB3092-015-Q1-K1-H11
cggacgcgtgggctaaaaccaacttcagggaggttgctatcaaaggattttgggacatgtgtgatcccgagggatactctctctggttttgtgattacaaatacaacgacgagaatactgtttcttttgtgacattgaacaaggttggtggatttcttcagcggatggatttggctcgcaagtatgcatttggaaagatgcttgtgattggatcagttccaccatttaaggtgaaggggctgtggcttttccgtgggcaagaaatcccaaaatttgtgattgatgaatgctatgacatggagctctacgaatggactaaggttgacatctctgatgaagctcaaaaggagcgtgtcaatcagatgattgaagattatgaaccttttgaaggcgaggctctttt

SEQ ID NO: 10845 - DNA, 392 bp, Glycine max
  Clone ID: LIB3092-015-Q1-K1-H12
acgcgtccgcacaaaccaggatttatctggtagctggagaagcatatggtagaggaagtatgaaatatggtgaggatgctttccccaacattttctctcattcctctctgtcttctgaagaagagttgaatcctttcaagaatcaccagaacatgttagctggcatagactatattgttgcacttcagagtgatgtatttctctatacttatgatggaaatatggcaaaggcagtacaaggccataggcacttcgaaaacttcaagaagactatcaatccagacaaggtaaattttgttaaactcgttgataagttggatgaaggaaaaatttcttggaagaagttcagctccaaggtaaaaaagctgcatgaagatcgaatcggtgctccg

SEQ ID NO: 10846 - DNA, 296 bp, Glycine max
  Clone ID: LIB3092-015-Q1-K1-H3
catacagttacagaagttccaacataaatgggaatcatcactcgcagttctgctggtagaaaaccaagtgaaattatgaagttttttgtgacaacttttattagtatagttttaggattctttataggagtatcagttccaacattgtcaataacaaaattgaatcttccatctgggctggtttccttcattggtctttcttacatcgaagacagatatacaagtccgcaggcttggtcttttatggaataatggtaacaaaagaagttcatcgcaggttcaaattatcaaaatga

SEQ ID NO: 10847 - DNA, 366 bp, Glycine max
  unsure at all n locations
  Clone ID: LIB3092-015-Q1-K1-H4
gctaccccttttaatgattccttgtggagaacttgggttcctgatgatgggtttttcagacgcaatgttgggtcggaaaagctttactttggtgggagaatcaattaccatgttggaggggctagtcgtgaggttgggcctgataatgtgtataatagtgctaggttgattatgagtaagaatgattctgttcctaacgttaatatgacttgngtgtttccggttgttggagggtataagtacttggttcggttgcatttctgtgatattgctagcatttcggntggtttgctctacttcaatgtttatgtcaatggaaatttggcttatgaagatttggatctcttatacgttacgaattcgctg

SEQ ID NO: 10848 - DNA, 424 bp, Glycine max
  unsure at all n locations
  Clone ID: LIB3092-015-Q1-K1-H5
attagcactaggagcagcaacaactagtctcagctgaaatggcctcttcagtgatggcatctgtggccctcaaacctgcccctttcactgttgagaagtcctcagtgagaggccttccctctctctcaaggaactcttcttcattcagagttgtggccagtggcaagaagatcaagactgacaaaccttatggaattaatggtggcatggctttgagggatggaactgatgcatctggcaggaaaggaaagggaaagggtggtttaccagtttgtagacaaatacggtgctaatgtcgatggttacagtcctatctacgacaccaaggactggtctccaaccggtgatgtctacgctggcggtacgactggcttttgggcctttttaaaaaatttctgggctgtgactctactngtcttttact

SEQ ID NO: 10849 - DNA, 438 bp, Glycine max
  unsure at all n locations
  Clone ID: LIB3092-015-Q1-K1-H6
gtcaaccatcaaaagtaaattgcagatacaacatttcacttgatatacaacatctgcaagaggtggataacaaccgtcatttagctggtggtatattgacttgtaagaaggaaaagggtcctgttgaaaaaggccaacctgctgtacctctgagtagcnntgncnnnannatcatnactgacanaccttatggaattaatggtggcatggctttgagggatggaactgatgcatctggcaggaaaggaaagggaaagggtgtttaccagtttgtagacaaatacggtgctaatgtcgatggttacagttctatctacgacaccaaggactggtctccaaccggtgatgtctacgctggcggtacgactggcttggcttattccttaagggcggggtggaactgtgactctactnggctttagctggtggtgcactttt

SEQ ID NO: 10850 - DNA, 392 bp, Glycine max
  unsure at all n locations
  Clone ID: LIB3092-015-Q1-K1-H8
cgcgtgcgctacatctgatatctggtcctgtggagtcattctctttgtgcttatggctgagtgcgttgcgctttgatgagccaaatcatgcgacactgtaccaaaaaattggcagggcccaattcacatgtccatcatggttttctcccgaggcaaagaaactattgaagcgtattcttgatccaaaccctctaacaaggataaaaattcctgaactcttagaagatgaatggttcaaaaaaggatacaagccaacaacttttgtagaggaagaggatgtcaatgtagatgatgttgctgctgctttcaatgattctaaggaaaatcttgtgacagagagaaaagagaaaccagtgtcaatgaatgnctttgagctcatatctaggtcaacc

SEQ ID NO: 10851 - DNA, 345 bp, Glycine max
  Clone ID: LIB3092-015-Q1-K1-H9
ctctcctcctcgatcccaattccactagggattcaattccgatgcgattccgagcttgttagatccacgacaacgtttcgtttcccagattcttttgtaaaaaaaaataatcttcctctgcccaacaggtaagttggaaaaaaatggaccatgacaagactgggtgccaagctcctcctgaaggtcctatattgtgcatcaacaactgtggattttttggaagtgcagctaccatgaatatgtgttctaaatgccacaaagacatgttgctgaaacaggagcaggccaagcttgcagcatcatccattgggaatattatgaatgggtcttcaagcagcactgaaa

SEQ ID NO: 10852 - DNA, 380 bp, Glycine max
  Clone ID: LIB3092-016-Q1-K1-A1
cttggtccaaactttatctctctctctctctctctcaactcaactagttcttaacttgttgcggaaagttctctctttttatgttctttctgcctccaaattaccactctcttcctatgctatgatacagatacaggaagaggatcaaaataccccaccataagacaaacccaaaggaatagcaacgtcaattatggtgggaggtttcaatggagaaggtgttgtgagagaaaaagaggaagaagaagaaaacaacaagtggccttcatggctgcagccacttctcaagacacgtttctttgttcaatgcaaagtccacgcggatttccacaagaatgaatgcaatatgtattgcttggactgtgtgaatggaccccttt

SEQ ID NO: 10853 - DNA, 339 bp, Glycine max
  Clone ID: LIB3092-016-Q1-K1-A10
cggacgcgtggggtcgttcgtcgatcacaaaaatggcggcgaaacttcaaatatttacgggattgccccccgcgccatttcaatcttcttcttcctccactctctgcgtactcaagaagcctctcactacctccttcttcggcaccgcgcgagtggaagttctgaaacttagagtgatgaggattgtgaagcctacgcgtggcggaggtgctctcggtgctcgcatgaacctctttgacaggttcgccagagttgtgaagtcgtacgcaaacgctgtcttaagttcgtttgaagatccggagaaaatattggagcaagctgtgcttgaaatgaacgacg

SEQ ID NO: 10854 - DNA, 454 bp, Glycine max
  unsure at all n locations
  Clone ID: LIB3092-016-Q1-K1-A11
ggctgagaagatgcttgccagagagatcaaggagggcgactctgttatagtggatgttgattctgatggtaatgtgattgtgctcaatggtagcagcggagcccccgaatccttgccagagacgcttcctgtataatgcggttaatttgctaatactatgtacttaatttgtttaaaccatagtcatagtatgttttacttgtcaatgtacctaaagtttttaatggaatacctggtaggcctcatcatgttttttgcctataaagcaaatcaaattcagaaaaagggtagcggngttaccagggggatatagggaaaaactgaaaaaggatttgtggggaaggtgaaaatcagcgccgtattcggtataactttggcaccaatgaactattccgtcggaagcttgnggtgtttgtattgttccacttgtttgactatgatgtaatattaatat

SEQ ID NO: 10855 - DNA, 309 bp, Glycine max
  Clone ID: LIB3092-016-Q1-K1-A12
tcgtactcacaccatgctagccaaagatctcaatgacggcgactctactctacagatggacgggaatgaacattacgacattgtgatcaatgaacttagaagatcccctgtatacatgatagatatcattaaattttaatatagataacttctaccatatatgtacataatatggttgacatatatgcatagaagagtcactgataaatgtactcttgattattaatagaacaccgcagactccttatgatgggtgtggacatttgatcataccaaatgactaatagtggttgcatagctatctatacc

SEQ ID NO: 10856 - DNA, 454 bp, Glycine max
  unsure at all n locations
  Clone ID: LIB3092-016-Q1-K1-A2
ctttcctaaaccctgctctccattttcccttgtctcttcctttctctctctacaaagagtgtgtgtgagagagagaaggatttggaattttggataactagagcgaaagcgtgacaccaccaaaaaccgaactgttcccagatctctctctctctctctctcttccaacaatccaaatccaaatccaaaaccctaccaacaccacactcaatcgatcgatggggcagaagtctctgatctacgcgttcgtgtcgcggngaactgtgattctcgcggagtacacggaattcagcggaaacttcaactccatcgccttccagtgccttcagaagctccctgccaccaacaacaagttcacctacaactgcgacgcacacaccttcaattacctcgtcgacaatggctacacatattgtngttgtgcagatgaatcaattggaagacagttacccat

SEQ ID NO: 10857 - DNA, 390 bp, Glycine max
  unsure at all n locations
  Clone ID: LIB3092-016-Q1-K1-A3
cttggtccaaactttatttctctctctctttctctcaactcaactaagtcttaacttgttgcaaaaagttctctcnttttatgttctttctgcctccaaattaccactctctttctatgctatgatacatatacacgaagaggatcaaaataccccaccataagacaaaccccaaggaatagccacggtcattatggtgggaggttttaaatggaaaaggtgttgtgagagaaaaagaggaagaagaagaaaacaacaagtggccttcatggctgcagccacttctcaagacacgtttctttgttcaatgcaaagtccacgcggattcccacaagagtgaatgcaatatgtattgcttggactgtgtgaatggagccctttgctctgcat

SEQ ID NO: 10858 - DNA, 370 bp, Glycine max
  Clone ID: LIB3092-015-Q1-K1-G6
cggacgcgtgggaaaggattctacctgccgttttatgggaattgcgcttcaaggggtctcagatggcttatcacggtgacgagggtcaccaacggcacgtgcctttggggggcctaggccccctactgctggtcggcaaacggactgctggcgcacgcgtcgcttctagcccggattctgacttataggctttcagtcataatttaacgcactgtaacttttcgccactgactctttaaccaatcgcgctgaccaactgttcgaatcaacttttcctctcttactagggtgaattactattgctacactgttatcacttgtttaaaactatcctggcttacgacggtttaatctcagcttactttcccta

SEQ ID NO: 10859 - DNA, 386 bp, Glycine max
  Clone ID: LIB3092-015-Q1-K1-F11
cggacgcgtgggttttttttttttttttttttttattcttttttttttttccggcaagaaaatggggatcatctgatctgaattagtattatatttttggcaggaaaaaagaaaaaaaaaaaaaaaaagaagcagccccggggcagtactagaatgcaaagcacaatttgcacagttgcacttggtgtattgaattgttccataactaaggaagagcattactaatgtactagtagttgttcagcaaatttaatttaatcccaccaaaaggattttcatttcaatcatcatccaatgtcaagtaagaaaattacaagacggattcagtacggcacactaactgcgggagttgctgcgcttgggcgcgttgccctttgatccattta

SEQ ID NO: 10860 - DNA, 447 bp, Glycine max
  Clone ID: LIB3092-015-Q1-K1-F12
cccacgcgtccgcggacgcgtgggcgccgaagaaggtattgacgtcgatgatgaaaatgaaattggtgaaaacattactgcttctcctttgtgtgaaactcttctgttatgcagtgattggtgctcctcaaacttgtcctgctaacaatgaggataaatgcggcgattcagatgaatggaaaggggagtttttccctgacattcccaaaattaaatatgagggtccgtcaagtaagaatgtgctttcatttaaatggtataatgcagaggaggaaattcttgggaagaagatgaaggattggttaagatttagtgttgcattttggcatacattccgtggaacaggtgctgacccatttggtgcacctaccaaatactggctatgggaagatggtaccaattcattaaacatggcttaaagacgaatgagagctactttgagttcat

SEQ ID NO: 10861 - DNA, 335 bp, Glycine max
  Clone ID: LIB3092-015-Q1-K1-F3
aaagagacgctccctcgttatcactccaatttagatttacgaaaacgaaaaggaaaattaagctcgggctcattcatatcgaacattgacacaagactactacgacgaatgcagatacatgactccagcatactttgttttcatttcatcatatgacaaccttatccgttactttaatgtttcttgatccatacttaatttactttattattgtatatttatctcttccatttacaaaaaaaaacatttgtgtaaatttccttctttgaagtaaaaataaattaaatatgtactgaaaatgcaataatattgtgctttattagccatttataaac

SEQ ID NO: 10862 - DNA, 435 bp, Glycine max
  unsure at all n locations
  Clone ID: LIB3092-015-Q1-K1-F4
ttactccttctctcgttgattcggatctagtgtcttttttcactcttcagttctcgttgagattctgcgctttcctgaaactagggttttcaatttcgattcattcgttaataattaaagatgtttgggagggcaccgaagaagagcgataatacgaggtactacgaaatcctcggcgtctcgaagaacgcttcgcaggatgatctgaagaaggcttacaagaaagccgccatcaagaatcaccctgacaagggcggtgatcccgagaagtttaaagagcttgcacaagcatatgangttctgagtgaccctgagaagcgtgagatatatgatcagtatggtgaagatgcgcttaangagggaatgggtggtggccggtggggnccccccccaaaatttttgatccgtttgaatctttcatctttctttgagtgg

SEQ ID NO: 10863 - DNA, 434 bp, Glycine max
  Clone ID: LIB3092-015-Q1-K1-F5
gaccgactcgtccgcaaacgctcatccaaaattgcatcattaaatttaacgctacccaacacaccacattgagtatcgcttcattcccatgcgttcctgtctctgcactccaaatgtcaaacccaatcgaaacatccactgccaacgaccgacaatttcacgccgttcacatgaccatctcctactctcatgtcctgaataccctgttgcccatcctccttccgagcactgttcaccttactcctccattaatgcttacccttccagcagctcccactccgttaaaccttacaattgcatcgataacatcggctatgcacagcttccgataatccatactgctaattgccacatcacccattactaacacttttattaccacttgattaccttccccccaaaaatttttttgcacatctatacaagtcttaata

SEQ ID NO: 10864 - DNA, 308 bp, Glycine max
  Clone ID: LIB3092-015-Q1-K1-F6
gacccactcgtacgttacgccttcgtgtttttataaaattctattttaatttttttctaccgaacacatccttaaagcttaagattattttaattgtttcttgctctacacttcaaacttcaaaccctaactaaacattcactatcgccttctcacactctcacgcctatcacatgtttatttactacactcatatcctcaatttctttttatccatctttaattctttcacttcttacatttactttttaattctcacttcctttttatccttatacacttttttaaacccttcaattttatttatt

SEQ ID NO: 10865 - DNA, 428 bp, Glycine max
  Clone ID: LIB3092-015-Q1-K1-F7
cccacgcgtccgcaaagcgttaaactgcttcttcttcttcaatggcggcagaatcatctcggagtagcgctaaacgcccctttatggaagaagacgacgacgaattctccaaaaagccaccagcaaaaagggttaggtttccaaagggaaagaaagtgaagccaggagatgaagtggtggtggacaaagcaaatgttgaggagggtgaagaagttgacttggtgaatgctaaaactgctaccaatgctgccaaagagcgggaaaaactcagaagggttctaaagggagagaaagtgaagccaggagatgaagtagtggtggacaaagcaaatgttgaggagggtgaagttgacttgatgaatcctaaaattgcgggcttggccccccccccaaaaaaagagcgggcaaactcaaaatcaaatactgtg

SEQ ID NO: 10866 - DNA, 438 bp, Glycine max
  Clone ID: LIB3092-015-Q1-K1-F8
gcccggcatgattgtcaccggcatggaggtggcagaaattgatggctccccaaggatgggggcgacgtttggggcgatgatgatatcagggcagaaggcggctcatttggcgttgaaggcgttggggaggaacaatgcaattgatggaacgtgtggagttggaagggaagaaccccagcttattttcgcttctgcagacactgaggaaattgttgatgcttaaacttactttcaaattagctagatatatagcttttcttttcttttctttctgtttggtccctacttaattatgattttaattttggaataaatgaacaacatgtgaattatgaaggagacaatacttgttgttacattgtatttggacagcatcgttttggtccccccccccccacgtatagcggaggaaaccatatatataaggatggagagata

SEQ ID NO: 10867 - DNA, 199 bp, Glycine max
  Clone ID: LIB3092-015-Q1-K1-F9
tacactaccacttccattctattctttatttcacaactctatcaataatatatgagtcatgttacaacatcccatataacttaccaaataatatccaccctacacactaattagaaacattaatattatggcaacctaatatttttatccataatacctctactatacacgacagacaaaaaaaactcttgactattaa

SEQ ID NO: 10868 - DNA, 373 bp, Glycine max
  unsure at all n locations
  Clone ID: LIB3092-015-Q1-K1-G1
cttctgggttgcaaaaatgaattcggacacgacttcctattggtgctacagctgcacgcgcttcgttcacatacaagaacagaacgacgtcgtttgcccgcgctgccacggcggcttcgtcgaaaaggtcaaccgcccccaatcgtcaaggcaaggcttccgccgncgacgccgcaacgccgggaaccactcggcgttcaacccggtgatcgtgctccgcggaccgggagaggacgaggagagcagctttgagttatactacgacggcttcgacggcgaggggcttccgccgctgccatccaccatgtcggagttcttgcttggatcgggattcgaccggttgctggagcaagtttcgcagatcgagatcaac

SEQ ID NO: 10869 - DNA, 104 bp, Glycine max
  Clone ID: LIB3092-015-Q1-K1-G10
cccacgcgtccggtttagaacaacagaaactagaaaaaaaatagtttatcttgtcaaaaagacagttagaagaaaaaaaaaaagaattccaaattctattgttc

SEQ ID NO: 10870 - DNA, 445 bp, Glycine max
  Clone ID: LIB3092-015-Q1-K1-G11
gcgtacgctttcgtccacgcgtccgtccacacttgcgtttacacgtccgcccaaatcccgaaacacttgctcagattccctttcccagtttcacaccctacctcatggaaggctctgtcaacgaacgtcttcattttgggaagattggatatggatgcaatcattacacgagaagatgcatgattcctgctcgcctgctgcaacgagatctactcatgccgtcactgtcataacgaggccgcgagcttgttgaagaatccctttgatcgccacgagctcgttcgccaagatgttaaacacgttatttgttcagcatgtgacactgagcaacctgttgctcaagtttgcacaaactgtggcgtcaaaatggcagaatatttctgcaacatctgcaaatacttcgatgatgatgttgataaagaacatgttcactgtgatgattgtg

SEQ ID NO: 10871 - DNA, 389 bp, Glycine max
  Clone ID: LIB3092-015-Q1-K1-G12
ccacgcgtccgcaaacacgtaactactatttcgaactccgccatggctgccaccaccgccaccgccacgtgatactgttttggcacccgcctcaacaacccgacaaccttaaacaacggaagattccacgcgctcctcaacttcggcaaaaagaaggcggcggcgccgccaccgaagaaaaaggaagtgaaagtgaaaccctccggcgaccggctggtgtggtttcctaatgcggagccgccggagtggctcgacggaagcatgatcggcgaccgcgggttcgacccgttcggtttcgcgaagcccgcggagtacctgcagttcgacctggactcgctggaccagaacctcgcgaagaacgtcgccggcgatgtgatcggaaccagggt

SEQ ID NO: 10872 - DNA, 220 bp, Glycine max
  unsure at all n locations
  Clone ID: LIB3092-015-Q1-K1-G3
ggttttaacagggaggttgcancatcacccatgttttccttggtaaatcataattggggaatatggaacagaaactgtagtgtctgaatccatcataatagacacatttcttgatctacatctctggtttctcttttggtatcatgttgtagttatacaaaaaacagaagcaaattaattgagtttgatgataatatgataatgattgttgtgtattgag

SEQ ID NO: 10873 - DNA, 448 bp, Glycine max
  Clone ID: LIB3092-015-Q1-K1-G4
aaaaaaatccaaaaaaagaaaaacaaaacgcttaacgcaatacaaaaaccacagtttcaatcacatcggtctctctctttctcgcaaatttctactttctgggttttctatttgagattcgttgttccaatgagcgatcacttggtggtgttcgttgaccgtctcgcgcgccctgtccccgttgacccggtggcgcagccgccttccgagccgtctcctccttcggcccccgtgaatgctgacgcttccgggagctccggcaccgctccggtggaggattgtgacggagagggcggcggcgaggaggagccgctgatccagatggcggagtgccgcatctgccaggaagaggacggcgtttccaacttggagacgcccttgcggcccctttttggggggttttagcggcagtcttagtatgctcacagaaagtgtgccagcattgtgt

SEQ ID NO: 10874 - DNA, 413 bp, Glycine max
  Clone ID: LIB3092-015-Q1-K1-F10
ccacgcgtccgcccacgcgtccggctggattttcatctgaatcagatgcaaagtctgagtggataacaagggttcgagcaacatggaagggggcagttttgaaccatctttgggaatcaaatttcacacctcagaaacttgtcaggggtttaggtccttggggtcccaacatagtccgcaagtatacaagtgctaggtttggtacacattcaactggggaaatactgactgaagaggaatcaacattgctgacagactatgtttaccacacattggcggccaaagctagtggagagctgtgcttaaaatatattttttcatttggagcatttgctaggatgccccttcttctcagtgcctcagagtggaaggtgcccaccactttcatgtatggtttccaagactggatgaat

SEQ ID NO: 10875 - DNA, 441 bp, Glycine max
  Clone ID: LIB3092-015-Q1-K1-D2
tcgcggacgcgtggggcaaaaaaaaggcctggcttaagttgttaagcttaactggttaaggaagaaagaaggaaagtgaaaaaaatggcttcaaccggaccggtcccgttttgaagggcggcggggatgacgtccttaacatactcaaacttttgcccgaatttgctcaggaattgcctcaaggaaccctacaaggccgaatccctttttcgtgagaagctccattttgttctctccaaatgggtcgacgccaagcctgaaaaacctactattcgttcagacaccccagagcagtgatctggaatagttggaagctataaatgcataaatctttgagatctggaagttcattgtcattttgaacctttctgtgatgtttaaattttcccccccttttttttttttgttttttctctcatgaatggacatgcactgatttga

SEQ ID NO: 10876 - DNA, 440 bp, Glycine max
  Clone ID: LIB3092-015-Q1-K1-D3
cccacgcgtccgcccacgccgtccgggcgaaacaacaaagaatggctgaccctaaattgccaggggccagtaacccaaagccatactaggttacgccttgaccccaatagcattgggcaccgtgaaatccctgtggaataaccagggccaacttgcaagggctaaatactctgggtgaaccatagtggaagtaatccctgagggaagggttaataaaagacatttttagccgtgggagtggttgatgtatatatagtaaaatttgatactttggtgtgctgactgcttttacatctgctttccccccttattgttcagtgtcctgcctccattgtcaatggtagtggataatcattgactgggatatcaagcttattaagttttttaaaaattttttttatgaaagctcacaggaaatattgagtgactcacttgtgact

SEQ ID NO: 10877 - DNA, 245 bp, Glycine max
  Clone ID: LIB3092-015-Q1-K1-D5
tcatccaaactatatttctagggtaagttttcttacaacatgactacctcacacacttacccctctcacaaatcacactttcaatcacataaaaaacaacaaaaaccacccagcacgtctaaatactccaagcttacccacacctaaataccacctcatacaaacccaaaatatacaccataatacacattactgtactatatctaaatacatccaaacttataaacccctaaaatcacccaact

SEQ ID NO: 10878 - DNA, 421 bp, Glycine max
  unsure at all n locations
  Clone ID: LIB3092-015-Q1-K1-D6
cttgaatcttcgttatccttctttttttctccttgaactcgaatattcactatggcagatgaggtggttctgctagatttctggccaagtccatttgggatgagggtcaggattgcacttgctgaaaagggtatcaaatatgagtccaaagaagaggacttgcagaacaagagccctttgctcctcaaaatgaacccggttcacaagaaaatcccggttctcatccacaatggcaaacccatttgtgaatctctcgttgctgttcagtacattgaggaggtctggaatgacagaaatcccttgttgccttctgacccttaccagagagctcaggctagattctgggctgactttgttgacaataagatatttgaatcctttttttggggggggggaagaaagattggacatanagggagag

SEQ ID NO: 10879 - DNA, 417 bp, Glycine max
  unsure at all n locations
  Clone ID: LIB3092-015-Q1-K1-D8
tgctcttcttgatgatgggtgggatatttttgagaaagatgcagaactgaattccggagtgggctgactttttattctgctgagagggggaaacatggggagttaatgctaatgtttatacaacaaaataaaccttagaatccttcgatgatttttctttatgtttcagtagcatactagcatgcatacaatttttatgtagtcctcttggggagttaatgctaatgtttatacaacaaaataaaccttagaatccttcgatgatttttctttatgtttcagtagcatactaagtagcatactagcatgcatacaatttttatgtagtcctcttgagtttgggttctcattgttttccagattttgtatagnaaanaacccgggggntttttttcacagcaaattacttgatttctt

SEQ ID NO: 10880 - DNA, 357 bp, Glycine max
  Clone ID: LIB3092-015-Q1-K1-D9
aatcattaactcaacgaaattcatagttaattaacatgatgatacatatgtggcggaaatggaaccatgcaaattagaaactatcttttgtataattaactactattgcaccgccaataaatttattaaatacaattttacatcaatacctccttttatccacacatttttaaattattaaaacagttcccactcactgtattaaggttaaataatggtaattatattttatttaaatttattttattatagtcaatgatttagggttctattttatgggttaaacaatggatcttctagtccttgtctttgtccatgtattacagtgaattttattattaataaatatcaattacg

SEQ ID NO: 10881 - DNA, 413 bp, Glycine max
  Clone ID: LIB3092-015-Q1-K1-E11
cagggtggtgctgtttcgtgttctttatattggcggtcaaatgccagaagatattgtttaccaacgccctttgtttggtggcaagatatctagcacattcccccacagattccaggatgtcagcagcattcgacaagtccctgatcatcaggaggtgtttgcggacccgagccgtgatgaaagcttgatctttgagcttttagaattcaagcctgatgttgctgataatgggagtgctgggtggtttcttcaagaccttgctagtgaacaggatgctgaatgaagtgtggttattgagcagtcaggagttcttgaagcacctggtttgatgtacaacaatacgcctgcagttgtaacaactgcagtgggtcaaatggcaatttctaaaagacggcaaggaaaggaaagcacaa

SEQ ID NO: 10882 - DNA, 418 bp, Glycine max
  Clone ID: LIB3092-015-Q1-K1-E12
ccacgcgtccgggataaggctaattcatcattgtttggtgctcagaaaaaaaaaaaaaacatttgtcaatggttttctctttctttaactcctctctcttgggaatcccagatctccaaaccagtgttcaagccccaccttcatatggttctagatggcaaaaccaagttcagctgatggtaggactagaagttctgtgcagatctttatagtagttggtctgtgctgtttcttctatattttaggtgcgtggcagagaagtggtttcggaaagggagatagcatagcattggagattactaagactaacacagaatgtaatatagttccaaatttaagttttgattcccaccatggtggagaagttaacgaatttgatgaagctgattcaaaagcctaagtatttgagccatgtgct

SEQ ID NO: 10883 - DNA, 363 bp, Glycine max
  unsure at all n locations
  Clone ID: LIB3092-015-Q1-K1-E3
cccacgcgtccgtcatcttcggtcattttattttggataataaaagaaagataataaagaggataagtgatattaaatattaaatagaaaaaatgggccgatcatttatcaaaggccaatcttcggtagaagagaaagttcctttggaacacttatttctatttcagtataccgggtctctttctttcatttcaaaaaatttatagaatttcgattttgaaatgaaagaaaagtgtggggattaatattaatgacatanagatattggaacataatcttggaagagatgatggaagcaggagttcattttggccacngtactagaaaatggaatcctaaaatgtcaccttatatatctgcaaa

SEQ ID NO: 10884 - DNA, 437 bp, Glycine max
  Clone ID: LIB3092-015-Q1-K1-E4
attctgagagttttgttttgtttttacagcctggattgactctgtcaaagcccatggtgcctgggatttcaagtgaaaaccagggtcagcccagtccaatttctgttttagagcctccatttgaagatgataatgctgttatcgagtccttgggctgtttgaggggtggtcagctgggtaatgcttactcctttctctcactttattattgctatttcagtaagttcctttttgatattccttgtctttactgttttattacctgactgaattttttctgtaggatcacgggtgtctctgaagtctaatttaattgataaatcaccacctatagaatcaatcgcccggaccctctcatgggacgattcttgtgcagaagggtttggggggggggccccccaagtccataccctttgagccctcgttggcatctagac

SEQ ID NO: 10885 - DNA, 253 bp, Glycine max
  Clone ID: LIB3092-015-Q1-K1-E5
ctggtttatgaagctgcaggcagcatcaccttatgctttaatttctcctatccttttatctgtttcgcacaacataaaaactgtttaatacgttggtattgcaattactagtagttaccgaaaaagaatgggagatgtagtttccctagctgtaatttagactttgaattatctgctagtcttgtgtaataatgtacaagaaatgtaacagaaagatgttgcacttaattagaacatccttagttaacatgtt

SEQ ID NO: 10886 - DNA, 418 bp, Glycine max
  Clone ID: LIB3092-015-Q1-K1-E6
atgaggtggtgaacaaacatcgcctgatatttgtgagcagtgctggtaatagcgggccaggattgagcactgttggtgcacctggtggtacatcttccagtatcataggtgttggcgcatatgtatctcctgctatgacacacaaccacatctttctgcttctcttgctgagccaccagtttcagactacggcttagaggaagaagccagggaatatgccaactcagttcatatagatgatgatccagtggacaagtatagtcttcctgagcaccagcagcagctacaagaagaacttgaaaccgaaattgtggtggaggaaacttccgtacaggaggcatctccaccaattcataccgttgcacacacttatccaaaggaaaaaaaaaaacccccccctgttgctcttgggagagtc

SEQ ID NO: 10887 - DNA, 444 bp, Glycine max
  unsure at all n locations
  Clone ID: LIB3092-015-Q1-K1-E7
cccacgcgtccgcagattcaaggaacatgatttagaaaactgccaagcccacccatattcagtctctcaaaacttccaaccatgaactgaagcaccacacatacccacttcctccaaagacatcatttttattaccaatcttccaatttcagagaaaattctttgtgggcatctcttaattaaaaaaatgtcaagcttccccaacacggtggcggaaggccgcaggtccagcaaggcaccggaaaaatccactttttctcagacttgcagcctcttgagccagttcttgaaggagaaacgtgcttctgctgattccacctttcgaattggtgggaaaatggaacccatagcgagtaccaagggtttgttaggaaagcccctttgggggncnccccaaaaactctgatggggctttgatctaagcgcttctgcatggaattcttc

SEQ ID NO: 10888 - DNA, 208 bp, Glycine max
  Clone ID: LIB3092-015-Q1-K1-E8
ccgatcaggcgttcaccaaacctcggcttatgttttagaacactgccaatcatacccaggaccagtttatttcacttgcaaccatgcacttaacatccacccataccaaatttctccaaacacatcaatcttattacctatcacacaattacatataactatttctgtagacaaaccacaattaaaaaactttcaactcttacccatc

SEQ ID NO: 10889 - DNA, 439 bp, Glycine max
  Clone ID: LIB3092-015-Q1-K1-E9
gttggaggggcttgcgcataaggtgcttcagtggtacttatgcagaatggagggctggtttgctgcagattctgatactatttcactgaaaggatgggaccaggaggtgctgctccctggtggtcatggtcttatggtccgtggttacttgcctgttataaataccctagccaagggacttgatattctcttggggcacagggtcacaaaagtagttaggcgatataatggagtaaaggtaacagtggaaagtgggaaaacgttttttgctgatgctgctgttattgctgtcccacttggggtgctcaaggcaaagaaaatattgtttaagccaaagctttcagactggaaggaaagctgcaattgcgatcttgggattggacttgagaaataaatcattttacactttgaaaatgtgttttggcctaatgtggaattc

SEQ ID NO: 10890 - DNA, 464 bp, Glycine max
  Clone ID: LIB3092-015-Q1-K1-D12
cgcgtacgcccacgcgtccgcccacgcgttcgcccacgcttccgtccacgcgtccggacgaggaaaaaggcaaagctgatcacaatgctcttcttgatgatcggtgggatatttttgagaaagatgcagaactgaattccggagtttgctgactttttattctgctgagagggggaaacatggggagttaatgctaatgtttatacaacaaaataaaccttagaatccttcgatgatttttctttatgtttcagtagcatactagcatgcatacaatttttatgtagtcctcttggggagttaatgctaatgtttatacaacaaaataaaccttagaatccttcgatgatttttctttatgtttcagtagcatactaagtagcatactagcatgcatacaatttttatgtagtcctcttgagtttggggtctcatttgtttccagattttgtatataaaacgtc

SEQ ID NO: 10891 - DNA, 442 bp, Glycine max
  Clone ID: LIB3092-015-Q1-K1-B11
ctctctcattcaaaccattcgatctcatcatctgcttaacctgtaagtaaaactacaaatgactgggaatttacattaccactctcttagttattaacttagaatcttccctttctagattataattataattaaatttttttatatatatttcctcccatatagttatatattattgctgggatatatgcatagaagagtcatagataaagaaagtcttgattattaatagtccaaggcagtctcctttcgtggggtgtggttattcgatcatacaaaatgactagtggtagttgtattggaatctctaccatgaagccttgatgtagaatcctatgtcactattaaagtccatctatttttgggttttctccaaccaagttgagtgattcaacaatcatgggcatgttgtccagatcatgtagtcacaacttaacccatc

SEQ ID NO: 10892 - DNA, 457 bp, Glycine max
  unsure at all n locations
  Clone ID: LIB3092-015-Q1-K1-B12
cagattagtaccacaaaaatggagaaatagaataactgaatatcgtatagctcaaaataaagatttaaccaaatgcaattcatatgaaaaaagccaattaattctttacaaagaacaacaagtaaacgcattaaaaaaaaaaattagaaaacaatatagatacgatcttttatcctataattttatcaattatgcagataagaaagactcatatatttatggatatagatccctatttcaagtaaaaaaaaaaccaagtgatttcttctaattacaacacgtataaaaaagaattattggatatcatagataatctctttatcaagaattatatatcggaagatgcgattctagatatggaaaaaaatatgtatagaaagtattttgattggatgggaatcaatagagaaatactaaatcgttccatatcgaatccagaattttggntcttttcaaa

SEQ ID NO: 10893 - DNA, 249 bp, Glycine max
  unsure at all n locations
  Clone ID: LIB3092-015-Q1-K1-B3
cccacgcgtccgttttaaaataacatctatatgtcagtttgatntacataattatagaataatcaactggtctctttctaattttttagtactccaatctgggtcatcacaatgctttttcttctgggtcacaccgattgctggtactcttaatattggctaccatttgctcctttgatcattggtctattaattggagcccaattgccaggtgttattaccaagattggtcaaaggattcaaccacca

SEQ ID NO: 10894 - DNA, 375 bp, Glycine max
  Clone ID: LIB3092-015-Q1-K1-B4
gctttggatgatgagagggtcaaggttgctaatcaggtgggaagtattccgcttgattggggtttgggagcttttattctgcaaacagcagctgacgcagatataaagaaccataattggatcgccaccattttcagtgatgaatcacatactctcctctcaattattggaatttttatagtgttgttaacggcatggtctatatctaggtggaggaaacctcagttgaagacaatttacgatctagaaaagggacgatatattatcacacgagttggtagataatgcttgatggtagagcagatcgtgtttcttggtttacatgtgtggaggcactgttgtgattatgatgaaaatatttagcctttcgtgatg

SEQ ID NO: 10895 - DNA, 333 bp, Glycine max
  Clone ID: LIB3092-015-Q1-K1-B5
caccaatctaattcatcacaatgcttaaactcctgattcacactcatacctgatactcttattattggctaccatttactcctttgatcattaatctattatttgtaaccaatttacaaatgataataacaaatattattcaaataattcaacaactactaaagattataaaattaattccactatttcaacctaacgatgaccttttctagtttaacaaacctcgacttactctctacctcattaatttcatgctcttttataaatcttttcaactttcctacttttcaattttataaaaccccccctttttacacttcaatttcatataaa

SEQ ID NO: 10896 - DNA, 463 bp, Glycine max
  Clone ID: LIB3092-015-Q1-K1-B9
cggttactacaaaggcgacgacgacaaagccaaagccaaggccaaggccaaggtcaaggtgacttgcgtcgccgagcaggaccaccgcaaaaaagttctccgcgaactcaactccctgatctccggctcctcctcctcctccgccgcctccgacgacgtcgacgaggaggtcaccgacaccgagtggttcttcctggtctccatgacgcagtccttcgtcaacggcggaggacttcccggacaggccttcttcaactccgctccggtgtgggtcaccgggggcgaccgtctctctgcctcggcctgcgagagggcgaggcagggacacgtgttcgggctgcaaaccctggtttgcataccgttcgcgaacggcgtcgttgagctggggtccaccgagttaattttccagaacccggatctgatgaacaaggtgaaggttctgttcaatttcagcaacaacaac

SEQ ID NO: 10897 - DNA, 427 bp, Glycine max
  Clone ID: LIB3092-015-Q1-K1-C10
acgcgtccgaaaatatttgggggcccgattgtcttgactttaggcccgaaaggtggctgcgtgatggggggttcgtgccagagtgtccctttaagtaccctgtttttcaggctggtgtaagggtgtgtttggggaaggacttggctttgatggagatgaagtccgttgtggttgcgttggttcgcaggtttgatattcgggtcgcccaaccggatcaggagccccggttcgcgcccggtctaaccgctactttgagaggggggtttccggttcgggtttgtgaaaggaaatgaatagataaaggagttcacaacatgaatgtgaatggaatcatgaaatgaatgagtgaatgaaggaacagttttcgtgtaaataatataatgttgcagttaaaatcgaacgtttttctttttttttctactctttt

SEQ ID NO: 10898 - DNA, 399 bp, Glycine max
  Clone ID: LIB3092-015-Q1-K1-C2
cacgctttctcccacactttacttccaagtatcatttaatgcttcaccctatatttctagaatccgatttaacgaaaacatcactagctcactctctgacccaattatcatactacacttttaatcccatgttaatcatcaatgaccacctttcaatgctaaatactttctgtattacctatatttaattatacctttaggaaacctttattatacaacattttaagcatataaattcttttatgtatatataatataatttttatactttgcttttcttactgctttttacatctgctttccccccttattgatcattgtccttccttcattgccaatattatattataatcatttacttgtatatcaatcttattaaactttttataaaattttttt

SEQ ID NO: 10899 - DNA, 371 bp, Glycine max
  Clone ID: LIB3092-015-Q1-K1-C3
catgggaatccattgatcaacagcgcccgtttctacaactgccttgcactgcacatcaactattattcattcgataggctgtctttacctccagtaacttcaaaataatctctgtgccccatccatggctgcaccgtttttctcaacgccctttcagccttatgtttatcaaattccgcaagatgcaattataccttttcaaattttaaggtgtgaaactcaagtggttcaaataatgtttaagccacaagaaaaaatcattgcaaaacctagttccatgtgcttaatgtctggatccattgaaatggaaaatgcctaccttccataaaatgaaatatagcattatttttcagactcccctatcaaaaatt

SEQ ID NO: 10900 - DNA, 438 bp, Glycine max
  unsure at all n locations
  Clone ID: LIB3092-015-Q1-K1-C4
cccacgcgtccgcaaaaacccattcacttttccacaagccttagttcttctcatttattctgtttttcaaaatactttcactctctctaaccttccagttctcactaaacctcgtgaagctcgtgatggacaccaagataggttcactagacgcgcccaagcccaacagcaacgacgtcgtatcatgcaacctcaccagcagcgccgccatccagccctgcttgccggcgacggtgatcaacggcgccggctgtagtgactccaccttgggcggccacctggcccgccggctggtggaaatcggcgtcaccgacgtgttctccgttcccggggacttcaacctgacgctgctggaccacctcatcgcggagccggcgcctggcnaaacccccccccccctgtcgggtgctgaacgagctcaacgcggtacgcgcgacg

SEQ ID NO: 10901 - DNA, 430 bp, Glycine max
  Clone ID: LIB3092-015-Q1-K1-C5
gcgtgcgatcagtaccaattgctaaagacatttcactttttggtcacactactaatacagctggctgcgcattgcttcaactgtctgtcacatgcttctacttccccttctagtgatggttgcctatactggcgacttaaacaaagactctgacatcacatggagagatggccgctccaagatactaaaccatggagagttactcactctttcattggacaaagcatctgtctcatgttttcaatcaaagaatgagtatctcattgggaagattgacatgcagctcaagcttgtccctggaaactatgctgacaccgtcactgcctattatctatcttcaaaaggatcaacttgagatgaaatagactatgaatttcttggaaaaatttcccctttttttttaatgtgatcctacatccttacacaactt

SEQ ID NO: 10902 - DNA, 421 bp, Glycine max
  Clone ID: LIB3092-015-Q1-K1-C6
gaccgactcgtacgatcagtaccaatcgctaaagacatttcactttttaatcacactactaatacatctggctgagcattgcttcaaacggctatcacatgcttctaattcctcttctagtgatgattaccatatctgccaacttaaacaaagactctaacatcacatgcacagatggccgttccaagatactaaaccatagagcgttactcactctatcattgcacaaaacatctgtctcatgttttcaatcaaagaatgaatatctcattcgaaagattgacatgcagctcaagctcgtccctggaaactatgctcacaccgtcactgcctattaattatattcaaaaggatcaacctgtgatataatatactattaatttcttgaaaaaaaaatttctccccctttttagtcgtcatc

SEQ ID NO: 10903 - DNA, 421 bp, Glycine max
  unsure at all n locations
  Clone ID: LIB3092-015-Q1-K1-C7
cggacgcgtgggtctgaattcaactcgctcgcacatgggaatcgattgatcaacatcgccgagatctacaactgccttcgactggacatcaactattattcattcgataggctgtctttacctccagtaacttcaaagtaatctctgtgccccagccatggctgcaccgtttttctcaacgccctttcagccttatgtttatcagagtccgcaagatgcaattataccttttcagattttagggggtgaagctcaagtggttcagataatgttgaagccacaagaaaaaatcattgcaaagcctggttccatgtgctttatgtctggatccattgaaatggaaaatgcctaccttccagaaaatgaagtaggccattantttggggggggggccccagtggttatttggcaaactaaacta

SEQ ID NO: 10904 - DNA, 209 bp, Glycine max
  Clone ID: LIB3092-015-Q1-K1-C9
aatttccttaccgacccactcgtcctatcaaattctttcactttaacacatcatcttttatttcttctcataccttaattacttgagaatgttaaccttataaaatatctaaatctcatcaccacaaccattcattatctacacatacttatttactctcctaaaacatataaaaatcaatcaaaaaaacattcttctcttaacaaact

SEQ ID NO: 10905 - DNA, 380 bp, Glycine max
  Clone ID: LIB3092-015-Q1-K1-D10
gtttgatgtgaatctcctggcaagctattgcataaataaatggaattaagaccaagaaacggatcccaaagctgatttccttatcctaacactctcatctggtctctatgtctcgaatcttctccgcatggaacaagaagaagctgcaccttcatctcaacttaatccccactattttttcttcttcccacactcacttcgacgctctcgctgccgccaatagtgggcttctccggcccagtttgaggctctacagtagtagtagtagcagcagcaatggggagccaccagaggattggcctcacgatcactacgctgctacgcaaactcctattagtgttaatttcattcgggcctctgggcccagggacgggtgggtc

SEQ ID NO: 10906 - DNA, 370 bp, Glycine max
  Clone ID: LIB3092-015-Q1-K1-D11
cccacgcgtccgattttcctttgtaatggaaagttagaaaccctcatcgtcaaagcacgcgtttttggtaatctctctctctcaacaaatatttgtgggtagattcaattcaccatgtcgagctcatcggagtactctgaattttccggccagaaaccggcgaggtcgccggagaaatcgagcttctctcagacttgcagtctgttgagtcaatacatcaaggagaagggtagcttcggagatcttaccctcggaatgacatcatgtgggtcacctgagacatcttgtcaatctgctacaaccatgaactttgttcctcccaaggaaaacaacgtggcaccaaagaacctgacagctatggatttgctct

SEQ ID NO: 10907 - DNA, 315 bp, Glycine max
  Clone ID: LIB3092-015-Q1-K1-B10
ctctctcattcaaaccattcgatctcatcatctccccaacctgtaagtaaaactacaaatgactgtaaatttacattaccactctcttagttattaacttagaatcttccctttctagattataattataattaaatttttttatatatatttcctcccatatagttatatattattgttgggatatatgcatagaagagtcatagataaagaaagtcttgattattaatagtccaaggcagtttccttttgtggggtgtggttatttgatcatacaaaatgactagtggtagttgtattggaatctctaccatg

SEQ ID NO: 10908 - DNA, 401 bp, Glycine max
  unsure at all n locations
  Clone ID: LIB3092-014-Q1-K1-H11
ggcaatcaatgaacaacgccaattctgaaacttcttctccttcttcttcttcttttgtttgggttgtgtacttctgcttcttctgaacatgggactgttgtctctgagactcaccccttcaccttcgagttcgacttcatcgcttcctgcagcacttgctcactgctccaaactatgtgaatntcagccgaggaagaagaagaaagcgtgcttcgacgcgcctaggcttgcggtgcggtgtgtgaaagccctcgctgagcgaaccggtgatacgatcgatgatggggaagctcgtagcgggttcaccacacctgccatggaagtcaccacattcaatcgaagcactttcagcgatgctgctgactttcccgtttgggaaaagattggtgctgtcgtcagac

SEQ ID NO: 10909 - DNA, 436 bp, Glycine max
  Clone ID: LIB3092-014-Q1-K1-H3
ggcagttagagacagagagagagagaagcaaaaccctaattggtgagtggcgaaaatggcggagccggcggcggcggcagcagcaacaggagcagcagtaatcgagcaagtgcagtgcttcgggcggaagaagacagcggtggcagtgacctactgcaagcgtggtcgaggcctcatcaagatcaatggctgcccgatcgagctggtggagccggagatcctccgtttcaaggccttcgagccaatcctcctcctcggccgccaccgcttcgccggcgtggacatgcgcatcagagtcaagggcggcggtcacaccttccagatctacgccatcaggcagagcatagccaaggccctcgttgcttactaccagaagtacgtagacgagcagtccaagaaggagatcaaggacattctcgtcaggtacgaccgcacc

SEQ ID NO: 10910 - DNA, 109 bp, Glycine max
  Clone ID: LIB3092-014-Q1-K1-H4
cccactcgtcccatcaattcctaagatttacaaatcttagtatttgctacacccattggaggctacactaaatggcctttcctacctactcttccttccatcactctcc

SEQ ID NO: 10911 - DNA, 217 bp, Glycine max
  Clone ID: LIB3092-014-Q1-K1-H5
catatggtcgcgctccatgttctcagagacttcgacggcctttgttagctactactggttgtcgaatccacagatttagtgtggagctaccgaatcctggaattagtcaacctcttcagctagcttattattcagagaatttcgaattacatacacgtgaactgatatgctctaggctgcttgggctatatacttattgaaacttcccggagacctt

SEQ ID NO: 10912 - DNA, 331 bp, Glycine max
  Clone ID: LIB3092-014-Q1-K1-H6
cccacgcgtccgatcaattcctaaattgacaaatcttagtatttgtgatgcggtattgacgaattatgggcttgatatgtttaaagctcctgaaactctgaaactgctggacctcaaaggttgttggctcttaactgaagacactatcttgtcattctgtagaaatcatccacaagttgaagtcaagcatgaacttggtaccttattttctgtcaatcaaaacggacttaatcattcctttccatctggatcaacttccaagactatgcaaatgactaagaggaaggatcaaattccctaatctccatatttggttgatcaaggattgaag

SEQ ID NO: 10913 - DNA, 264 bp, Glycine max
  Clone ID: LIB3092-014-Q1-K1-H7
tcaattcctaaattgacatatcttagtagctgtcattctctatgggcgaactatcaacttgagatgtttaaaactccttaaactcttaaactaatttacctcaacagttaaaaactcttaactcaaaacactatctcctcattctttacaaattatccacaactacaaatcacctattaactcagtaccttatcccctggtaatcaaaacccaattaatcattcctatccatctttaacaactttcaatactattccaaccact

SEQ ID NO: 10914 - DNA, 343 bp, Glycine max
  Clone ID: LIB3092-014-Q1-K1-H8
cccacgcgtccgctcaagcctttgaacatcgttttgcagccatggaaacaggcatagcaggctacactcgcgggcctttcctgcctagtgtttcttccaagcactctccaccctccatctctccatcttttggcttgaggagtctgaaatcgagctctttatttggagaatctctaagagtggcatccaaatcaacactaaaggtttcaaagacaaagaatacttcactcgtgaccagatgtgaaattggtgacagtctggaagaattcctcacaaaagcaacaccagataaggggttgatcaagttgttggtgtccatgggagaagcattaagaacaatttc

SEQ ID NO: 10915 - DNA, 464 bp, Glycine max
  Clone ID: LIB3092-014-Q1-K1-H9
cccacgcgtccgcaccaaattacatagaatttttaggcgtaaccaaagtacgtaccaaaccggggcattgacaagtgaattgagaaaccttcttgcagctctagaggctgaagaagcagcccaaaaatccaaagggtaagtgaacacatacaccaaccatggcgatgggtttcagaacatcactggcactaagaccaacagtggtgcatattctggtgatggtaacactcatcacgccaccaacaactacggtggtggtcctgctataaataatagtggcaatttccagggacatggcaatgggaggcttattggtggtaatttcgatgcctcaacgaggaactactgattaatttatgtatgatcaacttcatgtattaaatatcgtgttctgcgctacgtatactaattaataataaaattagagctgcatgctgcagctctaacagtgtgtgatatgaata

SEQ ID NO: 10916 - DNA, 382 bp, Glycine max
  Clone ID: LIB3092-015-Q1-K1-A1
caattagttaagagagttgagtaagatcagaatggcagacttgatgaaaagaatcctccaagtgattgaagcttaacaagccagccaagggtccaaccatgggtcttcaaactcacattacaactattgcagcggaagccagaatggatcaaccatcaacagtggcaatcatcttaacaacggcaacaggtatgacgactcataccactacggtgaacgccctatttataacagtggcactttcaatggtaatggcaacgggtcacatatcaagggtggctttgactcctaacaaggaactactatggtcgtcgttatgattattaattatctggatttgatacagtatatgctaactagcttggcaaaatatataatatgc

SEQ ID NO: 10917 - DNA, 316 bp, Glycine max
  Clone ID: LIB3092-015-Q1-K1-A11
gccactctgttataatggaggtttgttctcattgtaatgtgaatgtgcccaaaggtatcagcggatccccctaattcttgccagaaaccctctctgtataatgcggttaatttgctaatactatgtacttaatttgtttaaaccatagtcataggatgttttacttgtcaatgtacctaaagtttttaatggaataccctttaagcctcaacaagttttttgcctattaagcaaattaaaattaaaaaaaaggtacctgggttaccaagaggatattcggaaaaacttaaaaaagattttatgcgaaagtgaaaaa

SEQ ID NO: 10918 - DNA, 306 bp, Glycine max
  Clone ID: LIB3092-015-Q1-K1-A2
tcgcacgcccctgcaccttccacaacggttggctctccctttccaagaacaccaacccatcccagttactgaacctaacagtccgagccaagcctgacccgggcttggaattccggttcgacggcaaaccggagtgcagcccgcaggttttccaaataaaaggcgacgtcaagcaaccggttttaacttgcaagttaagcttcagggacaaggacaaggctaacttcccttcgctaaacgccaaccacgccgccgagcgtaaaggatggtccatcaccgttcacgacttgtccggctctccggtcg

SEQ ID NO: 10919 - DNA, 380 bp, Glycine max
  unsure at all n locations
  Clone ID: LIB3092-015-Q1-K1-A3
gtctactagtaatagcagaatcgcgagtgtcagcagagcagaacaccgattaatcggtgggactgctcagacccaaaaggaggcttttgcggncgaccttgagcaacaaaagatccatgatgatgagcctgtagttgaggatgatgatgaggatgacgaagatgacgacgatgaggatgacgacaatgttgaaggtgatgcatctggtaggtccaagcagaccagaagcgaaaagaagagtcgcaaggcaatgctcaaacttggaatgaaacctgtcacaggtgtcagtcgtgtgactgttaagaagagcaaaaatatcctgtttggtatatcaaaaccagatgttttcaagagcccgacttctgacacatacatttata

SEQ ID NO: 10920 - DNA, 151 bp, Glycine max
  Clone ID: LIB3092-015-Q1-K1-A4
tcggtttccctttccaccaccccttttcttcccttcactgtaaaaaatgcttctactagaattccttcttgcacattattctcttacaggaaggcacgtaattaccaggattccaagaagggtggcttggcctgtgttggttcttcttaaa

SEQ ID NO: 10921 - DNA, 445 bp, Glycine max
  unsure at all n locations
  Clone ID: LIB3092-015-Q1-K1-A5
gtccgagaagagcaaggataatgactgatggattcaacagttgcagaaatgtggtttgtaattttactgaaggtgccatgtattcattccctcaaatacgcttgccgccaagagctttagaggctgctaaacaggctggaaaggttccagatgtttactactgcctcaagcttttggaagccactggcatatccactgttcctggttcaagatttggtcagaaagaaagggtgttccatttgaggacaactattttaccagctgaggaagacatgcctgatattatggataggttcaaaaagttcaatgatgaattcatggagcaatacgaagacgatagaggttattcaaggttgtaagaaaatcattgtaaagctgcattatttacccttttnnncccttttttgcgcttttgaagtcttcatcatcatcctcgagagaaaaa

SEQ ID NO: 10922 - DNA, 368 bp, Glycine max
  unsure at all n locations
  Clone ID: LIB3092-015-Q1-K1-A6
cctctctctcacatcatcaccatttcacctatttttctctctctctctctctctctctcgcgtcacaatttcatcaaaaccttttaagtcttcatagttttccttctttctttctttgtgaaaaaacaaaaagtccaaaccatggctcagaaaaccgagaaagaagaaaccgacttcaaggttcccgaaacgattacgctttgcgttaacaactgcggcgtcaccggaaaccctgctacgaataacatgtgtcagaagtgcttcaccgncttcaccacctctaccgncaccacgtccggcgccggaggtgccggaatagcttcttcggctaccagatccggcatctncgcgcgtccactgaagagatc

SEQ ID NO: 10923 - DNA, 220 bp, Glycine max
  Clone ID: LIB3092-015-Q1-K1-A7
cccacgcgtccgcccacgcgtccgtccacgcgttcgaaacattataatttctattacatacattttggagctaggatgagcaagttactactcattcgtggtgctggggtcgtgggaacctttgtcaccatggggatgatgatggtgcccaaaaacgtgagtggccaaaacataggtgatgacatcgtcacacaagaactttttaacagcataatcagtc

SEQ ID NO: 10924 - DNA, 358 bp, Glycine max
  Clone ID: LIB3092-015-Q1-K1-A8
cccacgcgtccgatcacgcgtacgccaacgcttacgaaacatcataatctctatcagatacgggtgcgttgccaggatgagcttgtcactactcatccgtgttgctgggtccgtggcagcctatgaacccatggtgaagaccatggctcccaaaaacgagagtgaccaaaccatatgcaatgacatcgacacacataacctctgcaacagcatctgcagtcacgccgatgaccgttgtacaactaacatctgtcactcgcgagacgccgtccttaatgcttacactgcctacactgactgcgccagacgtgccaatcaagatgactccgatccagagccgcatctgctgtcgccattg

SEQ ID NO: 10925 - DNA, 370 bp, Glycine max
  Clone ID: LIB3092-014-Q1-K1-G9
cccacgcgtccgcccacgcgtccgctggaatcgttcaccgtcgaaggcagcgacggaatgaggctccgtacaagggtgttcaagccagatgctggaacagaagcggatgggaagttggggatcgttctggtgcacccgtattctattttgggtggctgccaaggtctcctcaaaggaatcgcttctggcttggctctcaatggttacaccgctgtcacctttgacatgagaggcgttggcaagtccaccggcagggcttctctcaccggcttctgcgaagttaaggatgtcgttgctgtctgcaactggctttccaacactttctctcttcccaggattttgttgcttggttcttccgctggtgcaccta

SEQ ID NO: 10926 - DNA, 299 bp, Glycine max
  Clone ID: LIB3092-015-Q1-K1-A9
cgcgtcctgctgattttcttatatattgtggtgctgacttgaatcttgttggtcatgaagtttgttctgcgtaggtgagcttgaagatacctatttttgtctcgtgttggaaaaacatgtcttatactgatgcatcgggtttgtatgcctatggtgctaatggttctgctactagcttggacaatttaggctcttttcgtaatgagtttttccccaaactgtttctcactttttttacatattatcatgtttgcaatatgatgttttttgcccttaatgaagataatattttttaaatt

SEQ ID NO: 10927 - DNA, 442 bp, Glycine max
  Clone ID: LIB3092-014-Q1-K1-E5
cccacgcgtccgaaaaaagttccgcacgcaccctactttttctaacgtttctatgggatagtcccattagatcttcgaagatgggtttgaaggttgaattgtgatatattcttcacctatgcatgttgtaaaagctgctgattctgcttgatgatgatcgatggtgatgaagctaagcgacaggaactatatatccttaattgcagtagttgcagacaattgcagttgcagtttacaagtcctacagaaactttcatgatatacaatgaagaattatgatagttgaaaggtgacatgagctaaggaatttaggagacggagactgagacggagactgagaccagatcaattcctctatactttggaatacaggacacatgtacaacttgtataagccaaattcaacttgtatgctatgagataataaacatttgtgccacat

SEQ ID NO: 10928 - DNA, 200 bp, Glycine max
  Clone ID: LIB3092-014-Q1-K1-E6
cccacgcgtccgaaaaaagttccgcacacaccctacttactctaacgtttctatgggaggggacccattcgatcgtcgacgatgggactgaaggttcaattgcgatatattcctcacctatgcatgttgtaaaagctgcagattctgcttcgagatgatcgatcgtgatggatgtaatcgacaggaactatatatccgta

SEQ ID NO: 10929 - DNA, 459 bp, Glycine max
  Clone ID: LIB3092-014-Q1-K1-F10
cccacgcgtccggaaaaagaaaaaagcgatcatagtttcacttcggccttatccagtttagggtttcggttctctgccctatctttcacgtatcgaaaccttaaatttacgatcaggtctgagcaatctggttggtagaacctttggtcttagtgagtcaagttttatgtctgaattagacgatcaaattcctactgccttcgatccttttgctgatgcaaatgctgatgactcgggtgctgggtcaaaggagtatgtgcatattcgtgtacagcagcgaaatggtaggaaaagcctgacaaccgttcagggattgaaaaaggaattcagctataacaagatacttaaagacgtcaagaaagagttctgttgcaatggaacagttgttcaggacccagaactaggacaggttattcaacttcaaagtgatcagaggaagaatgtttctaccttcctagt

SEQ ID NO: 10930 - DNA, 394 bp, Glycine max
  Clone ID: LIB3092-014-Q1-K1-F12
caaacgtccatccaaaattgcgttcctaaatcgccgctaccgaacacagccgtagactttgggttcattccgctgcgtttctttctctgcacttcaaagttcaaaccctagcgaagcatccactgtcgccgtcgcacactcgcacgccgctcacaggtttatgggctacgctgatgtcctgaatttgttgttggccgtggtggtttggtgcactgcttacgttactgttgtagttctcgcttcctttcgagccgtttgcactttctgaaaccttgcaatttcattgataacatgggttatgcacagcttgtcataggtcctgctggtagtggcaagtccacgtattgctcaagtttgtatgaacactgtgttgctgcacggcgatcgatacatg

SEQ ID NO: 10931 - DNA, 343 bp, Glycine max
  Clone ID: LIB3092-014-Q1-K1-F4
gtcacttcctctaccgctttcttcctcgtcattaaggcgcaactctctctctctctttctgtgtctttgttaggtttggtgacacttagttagaaagagcgtgcgaagagggtggggagaagatttagtgttgtggccatggcggagtctgagaagagtactgtgcttgttacgggagccggtggtcgcacaggacaaatagtttacaaaaaattaaaagagaggccaaaccaatatgtggctagaggtctggttagaacagatgaaagcaaacagaacattggtgctgcagatgacgtttttgttggggatataagacatgctgaaagtattgttcctgcaa

SEQ ID NO: 10932 - DNA, 245 bp, Glycine max
  Clone ID: LIB3092-014-Q1-K1-F6
cccacgcgtccggcattcagtgaaacactagctagggtattgggagctctcgttgtgggggagttagggaccttacgcagccatggccactgctacgaatgccgccgccgccccaccacgccagctctcccagaaggaagctgacatccagatgatgttggccgccgacgtccacctcggcaccaagaactgcgacttccaaatggaacgttacatcttcaagcgccgcaacgacgggatttaca

SEQ ID NO: 10933 - DNA, 445 bp, Glycine max
  Clone ID: LIB3092-014-Q1-K1-F7
cccacgcgtccggcccctggaagtagaacagtaagagaacctagagttgtagttcagacaggcagtgacattgatatcctagatgatgggtatagatggagaaaatacgggcagaaagtagtgaagggcaatccaaatccaaggagttactacaagtgtacacacccaggatgtccagtgaggaagcatgtggaaagagcttcacatgacctaagggctgtgatcacaacctatgaggggaagcacaaccatgatgttcctgcagctcgtggcagtggcagccattctgttaacagaccaatgccaaacaatgcttcaaaccctaccaacactgcagccactgccataagtcccttgcaagtgatccaacacagtgacaattcccatcagaaccaaagatctcaagcaccaccagaggggcaatcacccttcaccctagagatgc

SEQ ID NO: 10934 - DNA, 258 bp, Glycine max
  Clone ID: LIB3092-014-Q1-K1-F8
acgcccacgcgtccggccattggaagtaggacatctagagaacctagagctgtagttcagacggccagtgacattggtctcctacatgacgggtatagctggagaaaataccggcagaaagtactgaatggcaatccaaatccaaggagttactacaagtgtacacacccacgatgtccatcgaggaagcatatggaacgagcttcacattacctaaaggctgtcatcacaacctatgacgggaagcacaaccattat

SEQ ID NO: 10935 - DNA, 397 bp, Glycine max
  unsure at all n locations
  Clone ID: LIB3092-014-Q1-K1-F9
acgcccacgcgtgcggccacgggaagncgaagagttagagaaccgagagctgtagttcagacagggagcgacattgatgtgctacatgacgggtatagctggagaaaataccggcagaaagtactgacgggcaatccaaatccaaggagctactacaagtgtacacacccacgatgtccatcgaggaagcatgctgaacgagcttcacatgacctaacggctgtcatcacaacctatgacgggaagcacaaccatgatggtcctgccgctcgttgcatctgcagccattctgttaacagaccaatgccttacaatgcttgaaaccctaccaacactgtacccactggcataagtcccttgcaagtgatccaacacagggacaattcccatcagaacc

SEQ ID NO: 10936 - DNA, 442 bp, Glycine max
  Clone ID: LIB3092-014-Q1-K1-G1
ggcgttgtgagcgtgttcttctcaatggcattgccgattcaagggttatgagttatcttcgttgtacattggctgctgcgacaatgatccgtgttattaaagagattgaatcatttaatgcgaccgagtacattgatcagcttctgggtttactaaagattagtgaggaacaagtgaaccagtgctacaaaatcatacagaaactattaggttgctatgaaggcatttacagccttcaccagaaacgcaagcgactatctgaaccgggtagcccaagtgctgtcactgatgcatctttcagttgtgatagctcaaatgattcatggaccgtgtcatcatcagtctcactttcactggagccgctgttgaagaggagaaaatctcaagaccagcaaatgcgactgccttctgtcaattgtgtgtcaattgatgttcttaatag

SEQ ID NO: 10937 - DNA, 356 bp, Glycine max
  unsure at all n locations
  Clone ID: LIB3092-014-Q1-K1-G10
ggccgcccttttttttttctttcttttggtttttttactttttttttttaaacaactaagcacattcaatggtgtcaaatccatttcctaacccaaaatcatatcaaaaaatgaagaccatatttgtacacccaaataataacttatatcttacactactatcaatgaatcactctgcttcatctcaaatcacaccaatgacaccttagacatgatatgcttattcaactccaccatcatgtcttttctcacccgcttttcctaacttaatgatgtcgtagctgtctacaactggctttacaacactttctctcttcccaaaatntttagcttggttcttcccctggtgcacctat

SEQ ID NO: 10938 - DNA, 119 bp, Glycine max
  Clone ID: LIB3092-014-Q1-K1-G11
aaaatcaagatccttcttgttcacccacattctatcttgggtggcttccatactcttcttaaacgaatcgcttctgacttaactctcaatggttacaccgctttcacctttcacatgat

SEQ ID NO: 10939 - DNA, 439 bp, Glycine max
  Clone ID: LIB3092-014-Q1-K1-G3
cccacgcgtccgcccacgcgtccgcggtgacttactcactcgctccttgcggacactattggaagtaaaaacctgttgcgtccacttctccatcggcttcgtcttctttctcgttcttactttgacggtttctagagagagaaagtgatggccggagttaatccaaacggcgtcgccgattttgcggcggttccgacgcatggcggacagttcattcagtacaacatatttggaaacctcttcgaggttacgacgaagtaccgtgctccgatcatgcctatcggacgcggcgcgtacggaatcgtttgctcactgttgaataccgagacgaacgagctggtggctgtgaaaaagatagcgaacgctttcgacaatcacatggacgctaagcgtacgcttcgtgagattaagcttcttaggcatttggatcatgaaaatg

SEQ ID NO: 10940 - DNA, 314 bp, Glycine max
  Clone ID: LIB3092-014-Q1-K1-G4
cggacgcgtgggcggcaacatgttgagaaaatatggcttatccgttgataacgtcatcgaggcgcaaattgttgatgtgaaaggaaatcttctaaacagaaaaacaatgggggaagatctgttctgggctattagaggaggtggtggagcgagttttggtgtcattttgtcgtttactattaaactcgttccggtgccggaaacggttaccgttttccgcgttgagaagactcttgaaacgaatgtcactgccactgaccttgtcgtgcagtggcagcaggtggcgccaaatactgatgatagacttttcatga

SEQ ID NO: 10941 - DNA, 393 bp, Glycine max
  Clone ID: LIB3092-014-Q1-K1-G5
cattttgtcgcgctccttcttctcttcgccgtcgacgacgtttgtttgctcctcctggtagtcgaagccacagatctgctgcggagctaccgtatcctgtatttattcttcttcttctgtaagcttcttcgtcggagaatttggaatttgatacactggatcggatatgccggtggctgcttccgctatatacttcttgaacctccgcggagacgttctcatcaatcgcctctaccgggacgatgtccggggaaatatggtcgatgcttttcggacacatataatgccaacaaaagaacttggtacttgtcctgtgaagcagattggtggctgctctttcttttacatgaggatcaccaatgtttacatcgtgattggtgtcagcagcaatgc

SEQ ID NO: 10942 - DNA, 210 bp, Glycine max
  Clone ID: LIB3092-014-Q1-K1-G6
catattgtcgcgctccttcttatattgtgcgtcaacgacctttgattgctactactggtgctcgaagccacagatctgctacagagctaccgtatcctgtatttattcttcttcacctagaaacgtcttacactcgaaaatatggaatttgatacactggatcggatatacctgtcactgcattcactatatacttgttgaacactacgc

SEQ ID NO: 10943 - DNA, 443 bp, Glycine max
  Clone ID: LIB3092-014-Q1-K1-G7
gagcaaagcaaagcagagccaacaacaagaagaacaaaaccaacatcaacaactacaagaggaagaagcttgcaaattagaagaatcttcagttgaaagggaagaacacacaagaacaaagagaggaagaaacgcgaatgaagggagaattagagttgccaccagggttcagatttcaccccactgatgaagaattggtgaatcactacttgtgtaggaagtgcgcgggtcaaccaatcgcggttaccatcatcaaagaggtcgatttgtacaagtttgatccatggcagcttccagaaattggctactacggcgagaaagaatggtacttcttttctcctcgggatcggaaatacccgaacggttcacggacgaaccgtgccgccggaagcggctattggaaagccaccggcgccgataaggcgatcggaaaaccgaaagct

SEQ ID NO: 10944 - DNA, 235 bp, Glycine max
  Clone ID: LIB3092-014-Q1-K1-G8
ctctttttgctcagtttctgttgtattttctcaattacaacatcgtattctgcaaatgtagaccgggtcttggttttctgaaagatgggaggtggcaaggacaagcatcatgatgaatctgacaaaggaattttttcacaccttgctcatggggtagctggtgcagcacatggtggacatgggtacccacctggggcttacccaccaccacctggggcatacccttcacaacaag

SEQ ID NO: 10945 - DNA, 326 bp, Glycine max
  Clone ID: LIB3092-014-Q1-K1-E4
gtgatttcagtgagtgatcggtgttcacttgatctcatcataatcgtcagcgtcaattgaggaggatgccgatcagaaacatcgccatcggaaggcctgaagaggcgactcaccccgacacgttgaaggcggctttggctgagttcatctcaaccttcatcttcgtgttcgccggctcaggctccggcatcgcctacaacaagctcaccgacaacggcgctgccacccctgccggcctcatctccgcctccatcgcccatgcattcgccctcttcgtcgccgtctccgtcggcgccaacatttccggcggccacgtaaacccggcc

SEQ ID NO: 10946 - DNA, 464 bp, Glycine max
  Clone ID: LIB3092-014-Q1-K1-C12
atcactaccaattgctaaagatatttcactcactggtcacactactaatacagctttctggagatggcttcaactgtctcttacatgcttctacttccccttctagtgatggttgcctttgctggggacttaaacaaagactttgacatcacatggggagatggccgctccaagatactaaaccatggagagttactcactctttcattggacaaagcatctggctcaggttttcaatcaaagaatgagtatctctttgggaagattgacatgcagctcaagcttgtccctggaaactctgctggcaccgtcactgcctattatttatcttcaaaaggatcaacttgggatgaaatagactatgaatttcttggaaatctgagtggtgatccatacatccttcacacaaacgttttcagccaaggcaagggggacagggaacaacaattctatctatggtttga

SEQ ID NO: 10947 - DNA, 439 bp, Glycine max
  Clone ID: LIB3092-014-Q1-K1-C3
ggcggggataagattaaagattcaacaatggcctctgcttctgctactcttctcaagtcagctgctgttcttgacaagtgcgagtgggtcaaaggccagacccttcgccaacctctcgtgagatgtaacccttcctcagcatcagctctcaccatcaaagctgcttcctatgctgacgagctcgtcaaaaccgccaaaacagtggcctcaccggggcgtggtattttggcgatggatgagtcaaatgcaacctgcgggaagcgtttggcatctattgggttagagaacacagaagctaatcggcaggcataccgtaccctacttgtgacagtacctggtcttggtgaatacatctctggtgccattctctttgaggaaactctctaccaatccactgtcgatggaaggaagatcgtcgacgtacttgttgaccaaaaca

SEQ ID NO: 10948 - DNA, 263 bp, Glycine max
  unsure at all n locations
  Clone ID: LIB3092-014-Q1-K1-C4
atcaaattctttgagttgaacacaggggccaagattccttctcttgggttagggacttggcgagctgaacctggggttgtagctgaagctctcaccacagccattcaggttggatacaggcatattgactgtgctagtgcgtataagaatcaagcagagattggttctgctcttaagaagctntttgatgatggtgtggtgaagcgtgaggacttatggatcacttccaaactctggggttcagatcatgcaccataagatgt

SEQ ID NO: 10949 - DNA, 134 bp, Glycine max
  Clone ID: LIB3092-014-Q1-K1-C5
ctcactctgagtctcctaatcttgtcagcttctcatcatcaatcaccctgaaccacggctggaacagataaatagagaatgtagaacacacactcacatacttatacggtaaactgacatcctttattactaag

SEQ ID NO: 10950 - DNA, 99 bp, Glycine max
  Clone ID: LIB3092-014-Q1-K1-C6
ctaactgttcgtcctataaagccgggatttactcaacatctagcactatcaactactgcggcatcacatgattgcagagattgctacgatcactccccc

SEQ ID NO: 10951 - DNA, 334 bp, Glycine max
  Clone ID: LIB3092-014-Q1-K1-C7
ggtgctttaatttcagttcactaccaactcaatccttctgcagatgactcaaatgcgtctggttcagagtctcactagtaagttcaaattcatgccacacattatcagatatgatcctatcctttggctcatttgttccctcatctttacctcataaaaccacattactgattcagaaaagataagaaagaatgtcattgcctgtatttaacaaagaaaacatggcatactggtcccttgcttctactacaaactctgtgtcttgactttcacaatatacatttctttacatgttggtaatttaaatactctatgatatggatgcaactacaac

SEQ ID NO: 10952 - DNA, 130 bp, Glycine max
  Clone ID: LIB3092-014-Q1-K1-C8
gcaacacttatactgtcaaatgttggagatagcaaacgtttgcaactgtgtaagtctaagcctaattctaataagctgaaggttatggttaaatcaagacgttgctctacgacacacactttgtgtcaga

SEQ ID NO: 10953 - DNA, 446 bp, Glycine max
  Clone ID: LIB3092-014-Q1-K1-D1
ggtcctcatcttctggctggtggttcaaccccgttccttcaagttccacgtcacggaagccgagctaacacaatttgagtactataccaacaacaacacccttcactacaacatggtcctcaacttcactgcacgcaaccccaacaagaagctcaacatatactacgacaaagttgaggcattagcattctacgaggatgtcaggttcgcaagttacgatgtcataacacacatgaactccttccgccagtacaagaagagctccagccccatgagcgccgttttcacagggcaacaattgctgatgctgaacaatgatcaagtctcagagttcaaccaagacaggaatactggtgtttatgacatctatgtgaagctctacttcaagatgaagttcaagctcggggactttatatccaatgactacaagcccaaagtcaaatgtc

SEQ ID NO: 10954 - DNA, 250 bp, Glycine max
  unsure at all n locations
  Clone ID: LIB3092-014-Q1-K1-D2
cccacgcgtccgctcccatcttccagaacacaacacanaacaaagcatcttcaataattcgtcggctctattattaagtatagtaaacacgctagtctatggggaacgctaattcttgttcttgtatttgtatccctaatggtgctattttgaaaaagataagaaaaggaacgaaaacagcgatgctgttggacagtgatgagaaccctcgggagatcaagctacccgcaacatcgggggagctcatgat

SEQ ID NO: 10955 - DNA, 399 bp, Glycine max
  Clone ID: LIB3092-014-Q1-K1-D3
ataatttcagagctagctagttcacagcttcagttcgtttttgttgatcctgtgaacttaggggtgacggggtggttctgttggatacatgggccagcatgtttgggatgagggttaggattgcattagctgaaaagggtgttgagtatgaatacaaggaagaaaatctcaggaacaagagtcctttgcttttgcaaatgaacccaattcacaagaaaattccagttctgatccataatggcaaaccaatttgtgaatctgcaattatagtgcagtacattgatgaagtctggaatgataaagctccaatcttgccctctgacccttatgagagagctcaagccagattctgggtagattacattgacaaaaaagtgtatgacacttggaggaaaatgt

SEQ ID NO: 10956 - DNA, 278 bp, Glycine max
  Clone ID: LIB3092-014-Q1-K1-D4
cttggttgtttgttaccatcttccaaaaatatcatgctcctaacgtaaaaatcctcggttgcagacgttcaactgcgatctctaaacaaaaccatggcatcactctcaggcatttgctcctcttccccaactctcaaaaaattcccgaaccaatccccatcgttgaccgaccctctccgcaaagaccacgtgtccttccccgcccgccgcgccgatcggactctcagcctcgcgccccctcctcgtgcggtggctcgtgaggtttccgacggagcatt

SEQ ID NO: 10957 - DNA, 434 bp, Glycine max
  Clone ID: LIB3092-014-Q1-K1-D5
attgctgggaggctttctatgatttctgtcttggatgtgagctactgtattaaaatgggtccctatgcgcttgagatgattggcaagaactgcaagcttctagaagggttgtgtcgaaacatgcacccattggatactgcggagaagccgcatcaagacgatgaagcatatgcaattgcctccacaatgcctaagctcaagcatcttgaaatggcttatcatcttatcagcacttcgggtgtccttcaaatacttgcaaactgccctaagcttgaatttttggatcaaagggggtgttggtgtgtgacacttgaccacatgtttttaaagcagaaatttccaaaactgaaggttttggggcctttggttcttgacacttatgagagtgatggctgggatgatttctcagatgtgtctgattcatcagagtactt

SEQ ID NO: 10958 - DNA, 207 bp, Glycine max
  Clone ID: LIB3092-014-Q1-K1-D6
tttgcgacttgccatgtgttccaagatataatctacaactgcaaacaaacctctttggaggacacatgtgtatgtttgtgcatgataaattctcattcatttttgggctgcaaatccaactgggtcattattactggttctgagtggtcttgcttcagatcaggtttttttgctaagaacaactcacattatcagtacagtgttact

SEQ ID NO: 10959 - DNA, 365 bp, Glycine max
  Clone ID: LIB3092-014-Q1-K1-D7
cttacggatactctcgtgtaccgtttcggagttcaccatcaagaaagctgcaacacctaggcctctttggaatgcagcatctcagattgtaatggcggtaggttacatactcctggccatggctatgccaagttccctatacattggttctatattagctgacatgtgttatggaatgaggcttgccattacagtccctaccggcttagagttattcagactcaaatattatggtcttatctatcacattctgatgcgtaaccttactcttggatctttccttttctatggtctgcttgctggcatactctatgatatggaagcaactaccacacaaggaggaagcaacacatgtgttggaagtc

SEQ ID NO: 10960 - DNA, 96 bp, Glycine max
  Clone ID: LIB3092-014-Q1-K1-D8
acgcttacgcatacgtccattcgacgtaatacattttcagtaccgtcacctatatttaagtcagccactgacatttgtctcctagatgactggtat

SEQ ID NO: 10961 - DNA, 456 bp, Glycine max
  Clone ID: LIB3092-014-Q1-K1-D9
ggaaggaagagtgggtgttggtggttgtcctcctccctcctcatgtgtatggcaaccctgtgctcctctcttccgcttttccatcgctaccctaaccctaaccctaatccttcgctctttcgcccctccctttccctctccttctccttctctcgcactaaaccccgtcgtgccccctttctcgttctcgcttcctcttcccacgatttcacctccaactccaagaaatcagtgctcactgagttgatacaagagatagaacctctggatgttagccacatccagaaagatgttcctccaactacaacagatgccatgaaaaggactatatctggtatgctgggcttgcttccatctgatcagtttcacgttgtcattgaggccttgtgggaacccctttccaagttacttatttcttcaatgatgactgggtatacgctgcacaatgttgaatat

SEQ ID NO: 10962 - DNA, 388 bp, Glycine max
  unsure at all n locations
  Clone ID: LIB3092-014-Q1-K1-E1
aaacaagagacacagagctgctgaaattttcagtaacccaaaggtccaagctgaagttccagggtgtggaatagaacaagagtacaccttacttcaaacaaatgtgaaatggccattaggatggccggttggtggctatcccggtcctcagggtccttattattgcagtgctggggcagataagtcatttggacgtgacatatctgatgctcattacaaggcttgcttatatgctggaattaacatcagtggcaccaatggggaggttatgcctgggcagtgggagtaccaagttggtcctagtgtangtattgaggctggtgatcatatcatgggcttcaggtacatnctcgagagagttactgagcaaagctgtgttgtgctctct

SEQ ID NO: 10963 - DNA, 458 bp, Glycine max
  Clone ID: LIB3092-014-Q1-K1-E12
aaacaagagacacagagctgctgaaattttcagtaacccaaaggtccaagctgaagttccagggtatggaatagagcaagagtacaccttacttcaaacaaatgtgaaatggccattaggatggccggttggtggctatcccggtcctcagggtccttattattgcagtgctggggcagataagtcatttggacgtgacatatctgatgctcattacaaggcttgcttatatgctggaattaacatcagtggcaccaatggggaggttatacctgagcagtgggagtaccaagttggtcctaatgtaggtattgaagctggtgatcatatctgggcttcaaagtacatcctcgagagaattactgagcaagctggtgttgtgctctctcttgatccataaccaatataaggttactggaatggaacatgatgccacaccaattacagtacaaagagca

SEQ ID NO: 10964 - DNA, 342 bp, Glycine max
  Clone ID: LIB3092-014-Q1-K1-E2
gctttttgctcagtggctataccaaaaagaaaagactaaacaccaagaatttcagatattgcagcaaatcttgttagccttcaaggcaacctcactgttatggaaactcatcatcatcatcagcaccaaaagaacacagaaaacgatgtacaaaagcaacaacatcaaattgaagaagaagtagcaccaccaccaccacagttaaggcaacaagaaaatacagaactagaccaaatagcatcatcatcaccacaatcttcaacaccctcttccccttctcaagagttttccttaacaatcttttttaacaattcacaataattccaactggttacttccaaa

SEQ ID NO: 10965 - DNA, 458 bp, Glycine max
  unsure at all n locations
  Clone ID: LIB3092-014-Q1-K1-C10
cccacgcgtccgagagaaggtggtaccgccttcaattctctctctccatttctcatcctcagcatcttattatacggcttccatctccataacatccacttgtaaaaaaaacccattaatatatatcacacacacatgtatctctgagctccaatccaatccaagaccacaccttgtcgcgtcggacgaaccttggtgtctgtcttttttttttttttgtttcattagtttctccgaagagatgcggaagggcagatgaggaggagcctcagcggcagcggcggcggcggtgaacggatccgttttaaaggagcctcggtaccggggcgtgcggaagagaccgtgggggagattcgcggcggagatcagagacccgttgaagaaagccagggtttggttgggaaccttcgattctgccgaggatgctgcacgtgcctacgacaccgncgctcggaatc

SEQ ID NO: 10966 - DNA, 349 bp, Glycine max
  Clone ID: LIB3092-013-Q1-K1-H7
acgttttgctctacgcctctccctctctctcaaaaatcgttctcttgtattttagggtgggggtgtgctgctgcctccgttccccccttctcataaacaacgcgttttctcttctgcttcgtatctattctttgcttttggttttggttgattcaaggccttcacagcattcgttgcggcattttaatcgatttatccaagcaggactgaatgaactaatggagtctaaaggtgggaaaaagaagtctagtagtagtagtagtaaatcattgttctacgaagctcccctcggatacagcatggaagacgttagaccaaacggtggaatcaagaaattcagatctgctgc

SEQ ID NO: 10967 - DNA, 416 bp, Glycine max
  Clone ID: LIB3092-013-Q1-K1-H8
actaatcatacagatcgataatcataatcatatctatagctaattgggttaattattttggtccctctactcttcttctctcctctaaactctcttttccattcttgcttcctttgtgggttgtttgagttttctttccttcaatttaattgaaagatggcttgcttggtatctcgctcgggaagggaattgcagaagtacaacaacatgggtggccggcaagttgatgggtgcataccttatagatataaacaagacatagagggtaaaatgagcaacgaattggaagtactagtggttagttcacagaaaggtcaaggattgatgttccctaagggaggatgggaacttgatgaatccgtagaagaagcagcttatagggaatcccttgaacaaacacgagtaatgggaatgat

SEQ ID NO: 10968 - DNA, 461 bp, Glycine max
  Clone ID: LIB3092-014-Q1-K1-A12
tatttttcaagtaacttaaggtttcaaacctaggaagttggaagtcatggcagcaacattgagggcagcaacaagttctggcactcttaaagcaactcctttcctaggccaaggcaagggtgccaatgccaatgctcttagggatgttgtttccatgggaactgggaagtacaccatgggcaatgatttgtggtatggaccagacagagtgaaatacttgggacccttttcagctcagaccccttcatacttgaaaggagaattcccaggggattatggatgggacactgctggcttatctgctgacccggaagcatttgccaagaacagggctcttgaggttatccatgggagatgggccatgcttggagcactaggatgcatcaccccagaggtgctagagaagtggttgagagtggacttcaaggagccagtgtggttcaaagctggagcccaaatat

SEQ ID NO: 10969 - DNA, 447 bp, Glycine max
  Clone ID: LIB3092-014-Q1-K1-A2
aacatttccctgctacttcatcttcttcttcttcttcttcatcaccggtggttctgttcatgtttccttgcaccttcttctttgaagatcgaaattgtgtttttgaaaaaatgggagttccagagaaagaccctctttcccaattgagtttgcctcctggttttcggttttaccccaccgacgaggagctcctcgttcagtatctatgccgcaaggtcgctggccaccatttctctcttccaatcattgctgaaattgatttgtacaagttcgacccatgggttcttccaagtaaggcgattttcggtgagaaagagtggtactttttcagccctagagacaggaaataccctaacgggtcccgacccaacagagtagccgggtcgggttattggaaagccaccggaaccgacaagatcatcaccaccgaaagtagaaaagttggca

SEQ ID NO: 10970 - DNA, 379 bp, Glycine max
  Clone ID: LIB3092-014-Q1-K1-A3
ggcgatcctctcagaatctgtggttcagccctcattagcgattgcccttatctctctccggcgtaactccaaccacaagaatcatattcccatttcgtgttctgaccaacggctttactcactgtcccaaaccattgtgtgcccactttgctatcgactcactctctcaactacccatcttcccaaaacctgccacttactttcgggccatccaattctcaactttttggcgctcaagctatctcattcttacttttccacaattcccttgtctgcttattcactcaaaggctccattttcgccaatgtgactaaaggttccaagccaccgaattttacgctgaaagatcacaacgggtaaaatgctatcctgttcaac

SEQ ID NO: 10971 - DNA, 286 bp, Glycine max
  Clone ID: LIB3092-014-Q1-K1-A4
gctgattttcttatatatggtggtggtgacctgaatcgtgttggtcaggaagttggttctgtgtatgagagcgtgaagatacctatttttgtctcgtgtgggaaaaacatgtcttatactgatgcatcgggtttgtttgcctctggtgctagtggttttgttactagtttggaaaattttggtttgtttggtgatgagtttttgcacaaactgttttgcactgtgtatgcaagtgatgatggtgggaatatgagtggggataaactgaatgtagataatgggtttt

SEQ ID NO: 10972 - DNA, 449 bp, Glycine max
  Clone ID: LIB3092-014-Q1-K1-A5
ctacgcgaagactttgtagcaaaagtaaaagaagcattggaaaatgagccttatcctctaagagcggagcaaagatatcaactttcttgggaagctgctactcaaagatttatggaatattctgagcttgataggatcctgaacaaggaaaataatggtgaaaaggcaagtgtagataaaggaaagctcattgctaagtcagcatcaatgcctaatctgacagaactagtagatggaggcttagcatttgctcactattgtcttactgggaatgaatttctgagattatgtacaggagcaatacctgggacacgtgactatgataagcagcacttgtaagaccttcatctcttgccttcactggtagaaaatcctatctatggctggtgaatgggttgactagtttggatgtttgaaggaaaacttgtcacaccagattatgacaagca

SEQ ID NO: 10973 - DNA, 465 bp, Glycine max
  unsure at all n locations
  Clone ID: LIB3092-014-Q1-K1-A9
ccgtgacaggccttcgattgtatttggaaggaaagagaagcaactgcttggcaatccattgcagcacctctctggcctgcccaaaactttccaactccaggatgagcctaacgggaatgcgtctaatgactcttcagaacgcangtactatgagaaggtccagtggaagagtttctctcacgtttgcacagctcctggtgattcagatgatgacaatgctgtcgtgactggtgctcactttgaagttggagatactggccttaagaaagttctattcctaagacttcatttctgtaaagttgttggtgcaacccgtgtgaaagtacccgaatgggagggttctcctggcttgacccagaaatctggaataatctcaacattgatcagcactaccttctcaagtccacanaagccaccaccaccacgggcatctgatgtaaacatcaactctgctttataccctgg

SEQ ID NO: 10974 - DNA, 392 bp, Glycine max
  Clone ID: LIB3092-014-Q1-K1-B1
ggttgaggaatcaaagaatcacaaccacaatcaccccttgactttgctgagtccaatatctgatcgcaaaatcgtgtaccctcatggcaccaattcccccgtgttgtggaacttgttggaatttcgggtcattgagttgtgcaaatcatataccaccaatatctcatctgcagcagtgagcaaagttgttttctttcccaattccccttggattggtgctcaagattctgtggcttgctgcatctttttggagggcaagttggggttcatgaaacatggggatgagaaatggacccttgtggataacaagaacttcttctacgatgatgttattgtgttcaaaggtcagttttatgtgactgatgatcggggtaccatttcatggattgata

SEQ ID NO: 10975 - DNA, 446 bp, Glycine max
  Clone ID: LIB3092-014-Q1-K1-B12
cttatggagctgtgggccatggtgggcattaccactctcagtctcctgaggctttcttctggcatgttcctggtatcaaagtggtcatccctcgaagtccacgacaagcaaaagggttattgctatcttgcatacgagatccaaatcctgtagtattttttgaaccgaagtggctttatcgtttggctgttgaagaagtaccagaggatgactacatgctgcctttatctgaggccgaggtaattcggcaaggaagtgatgtaacacttgttggatggggagctcaattagctataatggaacaagcttgtcttgatgctgaaaaagagggaatttcttgtgaattgattgatctgaagacactaattccttgggataaggaaacagtagagtcctcagttaacaagacaggaagattgcttgttagtcatgaagctcctataact

SEQ ID NO: 10976 - DNA, 386 bp, Glycine max
  Clone ID: LIB3092-014-Q1-K1-B2
ggttgaggaatcaaagaatcacaaccacaatcactccttgactttgctgagtccaatatcggagcgcaaaatcgtgtgccctcatggcaccaattcctccgtgttgtggaacttgttggaatttcgggtcattgagttgtgcaaatcatataccaccaatatctcatctgcagcagtgagcaaagttgttttctttcccaattccccttggattggtgctcaagattctgtggcttgcttcattctttttgaaggcaagttttggttcattaaacatggggattataaattgaccccttttgattacaagaacttcttcttacatgatgttattgtgttccagggtcaattttattttactgatgaaccgggtaccattttattga

SEQ ID NO: 10977 - DNA, 342 bp, Glycine max
  Clone ID: LIB3092-014-Q1-K1-B3
ctctctttgtgtcgcctggtcttggcatcttcgcagcaccacccaccctggaccaggtctgcaacagagagaaagagaaggaagaacacacacacacacacacacacgttaaactaacattttttattagtaagaagacatggctcaacccagttccaacggggatctgaataataaccagcagggtcaggttcagcaacagcagcagcagtgggcggcggcgcagccgcatcagtatcagcagcaatggatggccatgcagtacccggccacagccatggtcatgatgcagcagcagatgatgatgtacccgcagcattacatgccctacgcttaacccca

SEQ ID NO: 10978 - DNA, 206 bp, Glycine max
  Clone ID: LIB3092-014-Q1-K1-B4
ctctctttgtgtctcctgatcttggcagcttcgtatcaccacccaccctggaccacgtcggcagcagagagaaagagagggaagaacacacacacacacacacacacgttaaactaacattatttattagtaagaagacatggctcaacccagttccaacggggatctgaataataaccagcatggtcaggttcagcaacagcagc

SEQ ID NO: 10979 - DNA, 294 bp, Glycine max
  Clone ID: LIB3092-014-Q1-K1-B5
ctaactcttcgtcgcaaaaacaaaagaggcattgaaaaacgagccttatccactacggcgggagcaaagatatgagactgtcttgaaaggctgctactcaaagatttatggaatatgctcagcttgataagatccatgacaaggctaataatggttaaaacgctagtatatatactggcaagctcattgctaagtcaccctgaatgcctaatctgacagaactcgtacatcaaagcttaaccttcgctcactattgtcttactcggactgaataactctgattatgtacaagct

SEQ ID NO: 10980 - DNA, 430 bp, Glycine max
  Clone ID: LIB3092-014-Q1-K1-B6
ctaagactgcgtcccataaagtagagaggtattgaacaacgagcattatccactacggcgggatcagagatatagactgtcttgtaaggccactcctcaaagatttctggaatatcccgagcttgatctgatccatgacaaggctaataacggttaaaacgcgattgttgatactgcaaagcttattgctgaatcagtctcacatgcactaatctgacagaactacgtccatataagcttaggcttcgctgactatcgtcgtactgtgaatgaatcactctgaatatgtacacgcgcaataccttggtcacgttactatgatacgtggcatacggtagaccttaatatcttgtctccactgctcgaaaattctatctatggctttacaacgcgatgactagcttggatgcttcaaggaaaactttgcata

SEQ ID NO: 10981 - DNA, 372 bp, Glycine max
  Clone ID: LIB3092-014-Q1-K1-C1
cccacgcgtccgcccacgcgtccggggctcaactcgaggcgtcaactttcctcaaggatggctgcttgaagataaactgcactgttggtgttgtggtgtcttccattgattgttccaagttaaacacaatacaggttcccgaatccgatattggggcacatttcgggatgctgttagagaatgaggagggatcagatgttactttctctgtcggtggagaaaggtttcatgcacataagcttgttttggctgctcgatcaactgcattttgaaccgagttttttaatgggatggaagaagatgatcatgatgtaattggtactgacatggaacccaaagttttcaaggctttgcttcattttatttattgag

SEQ ID NO: 10982 - DNA, 353 bp, Glycine max
  Clone ID: LIB3092-013-Q1-K1-H4
ggaaaaatggcatcattcaccatgacagcttccatccttggcggcccaaccgtcaccaaggggttggcagtcggaacgcagacgaaatcactcgtaatgaatgctgccaaagctgttgaagcggaaaaggtcagttatgacaatgacatggatggtagcaatggaaggaggaacttgatgttcgccgcggcggcggccgctgctgtttgctctgctgctgggatggcagtggcagatgagccataaccaggaaccccagctgccaagaaaaagtatgctccgatttgtgtcaccatgccaactgctaggatttgtcgcaattgagggactcggtttttattttacttttgatg

SEQ ID NO: 10983 - DNA, 433 bp, Glycine max
  Clone ID: LIB3092-013-Q1-K1-F8
cccacgcgtccgcttgctttatacaggctgcttggcgccgatataggaaaaggatgactgtgaaagacctcagtttgagggaaaccattcctttagacgaagcagtagctggtgagagaaaacatggggactattctgctggttcaaattcaactcagactaaattgaaccttggggctacaattcttgcttcgagatttgctgctaacacacgaagaggggctctgaagatgaaagatgacatgccccagttacagaagcctgaagaacctgacttttccactgaagctgacgatgattagttacacttattcagtggcatttggttttcaaattcggttgggtcctgcattctatttcagtatggataatgattctgcaggtcacaaaaatcctgcgtaaccctctgcctgccgtatgacccttgctggta

SEQ ID NO: 10984 - DNA, 441 bp, Glycine max
  Clone ID: LIB3092-013-Q1-K1-F9
cccacgcgtccgcagagatggtagctattggctttggagcccctccgtctccacttccgtttcatcttcgcctggcttcctctccttctcctttggccttcccaataatccacaaattccaaaacgcaggcaagtcagtgataacaatctgttcaaagaaaaatgcaaaatcaagggtggtcactctctgctctgcacctgtgcaagttgatatgcaggagcaggaggttagtgatattactttgagagagagaagtgtttcggttgtcctattggctggagggcaaggcaagaggatgggagctagcatgccaaagcagtatcttcctctttttggtcaacccattgctttgtatagtttccacactttttttcacctggttcaagtcaaagaaattattgtggtttgtgatccttcatacaaggacatttttgaagatg

SEQ ID NO: 10985 - DNA, 371 bp, Glycine max
  Clone ID: LIB3092-013-Q1-K1-G10
gggaaagtgagggaaagcacgagaaagcttgcgaaaatttcacgtggttctatttgcaggcactgattttccattcaattactgctattattatcaattattattattttgctgcgatcaaattggtttatcgtattaagaattttcattattattattactgatgagactttcctcaagtcttgcaccaaagaactgggttcccagttttctgcaattctagggcaactttttcggctaaatccctttcttcccatcgaagcgagctctcattgcaaattaaacgcgctttgcgtgctgcgatcttggttgtgatggaaactagggcatagatttggccgtgcagaagaaaaaaagcgtttaaagaatgt

SEQ ID NO: 10986 - DNA, 305 bp, Glycine max
  Clone ID: LIB3092-013-Q1-K1-G12
gctgaaataactgataagcttggtcttcattctcttcgtcagcgtggctggtatatccggagcacatgtgccacatctggtgaagggctttatgaagggcttgactggctctcaaacaacattgcaaacaaggcatagtgattatcggtcatgggttgcatcaaagttcatttgagtttagcggttgtgacttccaatgtttgatgtgcttaccctgtttagaatcttattttctctagcatgtattatttgtcttcgataaagaacagattgtctactacctaatatcaaaataatttgcattt

SEQ ID NO: 10987 - DNA, 438 bp, Glycine max
  Clone ID: LIB3092-013-Q1-K1-G2
cggacgcgtgggcggacgcgtgggtctcactcaaccaaatctcagttttgagttcaactggactaaactatgtcttccttatccctatatgccaacctctcctctctaccatcctccctcaccattcgttcttcttcatccaaagatacctctttgaaacaggattggaggacaaagtccaaacctatcccaccaggtggcacataccctgcaaaagatcattgcagtcgttgtgggttgtgtgatacttactatattgcccatgtcaagaatgcatgtgctttcttgggagatggaatgtctaagattgaaagattggaacctgttgttcatggtagaggcaggaagactgataacttggatgagacctacttaggggtatatgaggaactgctatatgctcggaaacttaaccctgtggaaggagctcaatggact

SEQ ID NO: 10988 - DNA, 308 bp, Glycine max
  Clone ID: LIB3092-013-Q1-K1-G3
attcaacttttaaactcattcacctatatctctttttccgttaattataaccttttcttaccaatctcattccaaaaaaactttaataccccttatcattactttatatcttttcaaacttctcaaaacaaaacaacttctgcaattttcttcaattctcttatttttaaacataacttctatctctcacttctcatcatattctccaaaactccattttaacaattccaccccacaattttcaattttttcacaaatacccatattttttcaattaaaaatcaaaacaacatttctattcaacaatt

SEQ ID NO: 10989 - DNA, 326 bp, Glycine max
  Clone ID: LIB3092-013-Q1-K1-G5
gtcacttcctctaccgctttcttcctcctcattaaggcgcaactctctctctctctttcgttttctttgttaggtttggtgacacttagttagaaagagcgtgcgaagagggtggggagaagatttagtgttgtggccatggcggagtctgagaagagtactgtgcttgttacgggagccggtggtcgcacaggacaaatagtttacaaaaaattaaaaagagaggccaaaccaatatgtggctagaggtctggttagaacagatgaaagcaaacagaacattggtgctgcagatgacgtttttgttggggatataagacatgctg

SEQ ID NO: 10990 - DNA, 403 bp, Glycine max
  unsure at all n locations
  Clone ID: LIB3092-013-Q1-K1-G6
cggacgcgtgggcggacgcgtgggtgcaaaagtaaatccatcatgggcaagaaatctacacaggaacacaacagcaacaacaacaactgagtttaaaatgcgcaagtatgacatgatttaccatgattcattctctaatattgccttgtagaagtgtatttgctcttctctctctgcatcttatatgatgagttccaactcctcccagcagaagctataatagctgtttgtgctatctccactggcaacagcaaaagccagtgattagaaggaagcattttgctagaaaggcccagaaattctccactggattgagcaagagaactagcaaagtagctgagaagaaagagggtactgttgctggtgcagntgctcttatcattggtactagtattggtactgg

SEQ ID NO: 10991 - DNA, 441 bp, Glycine max
  Clone ID: LIB3092-013-Q1-K1-G7
cggacgcgtgggatcaaatcaccctcaacttgagagagagagagagggaagtggatgatggagagagaggaagagaaagaggtggttggtgtgagtgtgctgcacggtggtatgatcataacgatggacgaggagcagcgagtgtatagggacgggggaatcgtggttgaacatgataaaatcaaagcaatcggacaatctgctgatatccttgcggagttttctgatgtcgccgacagtattgttgatctgagcggacatatcttactcccaggatttattaacacccacgttcatagctcccaacaaatggccagaagcatagcagacgatgtggatttaatgacctggctgcatgagcgcatctggccttacgaatcgaacatgagcgaacaggattcggacctctctactttgctttgtgggattgaactcattcac

SEQ ID NO: 10992 - DNA, 434 bp, Glycine max
  Clone ID: LIB3092-013-Q1-K1-G8
cccacgcgtccgtgattccagatcctgaactcaacaacaacccaaagataaaaagcacaacacaagacactgaactcgcactcactgggttttcaaccatggatgcgatacggaagcagctcgatgtgttgatgggagccaaccgtaacggcgacgtccgtgaagtcaatcgcaagtactacgatcgcgacgtctgtcgtctctacctcgtcggtctctgccctcacgaactcttccagttaacgaaaatggatatgggcccttgccctaaggtccactccttgcagctccggaaagaatacgaggaggcgaaagcaaaggggaccgataattatgacagggagttggaggatgtaatagataagcttattggtgagtgtgataggaaaattggcagggctctaaagcggctcgaggacgacgatgcgaaagcg

SEQ ID NO: 10993 - DNA, 434 bp, Glycine max
  unsure at all n locations
  Clone ID: LIB3092-013-Q1-K1-G9
ctttaacttcaattccacccttcgcccctcttgttatcttcccttatcaccctcctcgtgatatccccacttctctaatacactctccacaactttcttgggccacatcgtaaccctcaaatatgccgccacttccacaagcaaccgtggccgttctctctccactcgcatgtcatgggacggtcctctctcttccgtcaaattgatcattcagggtaaaaatctcgagctcactgatgcagtgaagcagcacgtggaagacaaagtggggaaagcggttcagaagcacagtcacctagtgagagaggttgatgtgaggctttctattcgaggaggaggtgaatttgggcgaggacccagaactcgtaaatgtgaggtgactttgttcacgaaaaggcatggantggtgcgggctgangaggatgctgaaagca

SEQ ID NO: 10994 - DNA, 388 bp, Glycine max
  Clone ID: LIB3092-013-Q1-K1-H1
acgggttgcagtcactgctttgtttaaatcacaaccacatcgtgttctcttattccattggcggacatagcaactgagatgagcaacaagagaaagtttgtggctgatggagtgttcttcttcgaactgaacgaggttctgacacgtgagttggcggaggacggatactccggcatggaggttaaggttacgccgatgcgcaccgagattatcattacagccaccagaacccaagccgttctcggtgacaagggaaagagaattaaggaacttacctcaatggtgcataagaggttcaaatttcccgagaacagtgtcaagctttatgctgagaatgtcaacaacagaagcctttgtgccattgctcaggccgagtcgctttgctaca

SEQ ID NO: 10995 - DNA, 345 bp, Glycine max
  unsure at all n locations
  Clone ID: LIB3092-013-Q1-K1-H10
gggaaagtgagggaaagcacgagaaagcttgcgaaaatttcacgttggtctatttgcaaacactgattttccattcaattactgctattattatcaattattattattttgctgtgatcaaattggtttatcgtattaagaattttcattattattattactgatgagactttcctcaagtcttgcaccaaagaactgggttcccagttttctccaattctagggcaactttttcggctaaatccctttcttcccatcgaagcgagctctcattgcaanataaacgcgctntgcgtgctgcgatcttggttgtgatggaaactagggcattaaatggccgggcag

SEQ ID NO: 10996 - DNA, 185 bp, Glycine max
  Clone ID: LIB3092-013-Q1-K1-H11
accacgcgtccgtagaaactttattttacatgttttgtttaggctgtgtaagcatggcggcgggcttgaacccgtggagctgaatgtccccattttaacagaaaatccgaacggtcgagtttgggtttttcccaccgagatcgaagttcgatcacgagtcactcttaaattcacacatatatatt

SEQ ID NO: 10997 - DNA, 279 bp, Glycine max
  unsure at all n locations
  Clone ID: LIB3092-013-Q1-K1-H12
agcaagcgagcttctncaattcaacatacatggcccccgaaaccgatgtaattgaaatgtgcttcttccccttcgtaggaggaggccatcagattccaatgatagacgcagcaagagtgtttgcatctcacggagccaaatcaaccattctagccacaccctccaatgctctccacttgcataactcaatctcgcatgaccaacaatccggtcttcccatcgccattcataccttctccgccgatatatccgacacagacatgtctgctgccggtccct

SEQ ID NO: 10998 - DNA, 283 bp, Glycine max
  Clone ID: LIB3092-013-Q1-K1-H2
gtttgcagtcactgctttgtttagatcagaaccagatcgtgttctcttcttccattggcgggcatggcaactcaaatgagcaagaagagaaagtttgtggcggatggagtgttcttcgccgaactgaacgaggttctgacacgtgagttggcggaggacggttactccggcgtggaggttaaggttacgccgatgcgcaccgagattatcatcagagccaccagaacccaagccgttctcggtgagaagggaaagagaattaaggaacttacctcagtggtgc

SEQ ID NO: 10999 - DNA, 442 bp, Glycine max
  unsure at all n locations
  Clone ID: LIB3092-013-Q1-K1-H3
acgagaaaacccttttcgccggaaaacccaccgcaaccttcgcggttcgcgattccgcttccggttccaccgagctgctcttacacacagcatatgggaaaaactagttggttgataatattggttacttgtttgtgcctgcttgccttttctgatggtagagaactcaaggttagacataaaaagcctcattaccaatacaatcatacgcttgctacaatattagtggaatatgcttctgcggtatacttgtcagatttaactgaactttttacttggacgtgctctangtgtaatggcttgaccaagggatttgaaatgatagagttagttgttgacgtcgagcattgcttacaggcatttgttggagtggctgatgatccttgtgccattatcattgcattcagaggaacaaatgaacacagcttacagaattggattg

SEQ ID NO: 11000 - DNA, 441 bp, Glycine max
  Clone ID: LIB3092-013-Q1-K1-F7
cgtcatctgatgggagctctcctctacagtatcaactttatggcaatggaaagattggggttgatgtgcctccaggagggagtcaaaatcagcttcttgatagacagaaagctcatgttcaacaatttttggctactgaagatgcactaaacaaggctgcagaagcaagggatatgtgtgaaaaacttatgaaacgtttgcatggaggcactgatgtttcatcacgctcacttggtattggaagtaactcccaaaatgttggaagtctcaagcaacttgagctagatgtttgggccaaggaaagagaagttgctggtttaaaggcaagcttaaataccttaatgtctgaaatacaacgcttgaataaattgtgtgccgagaggaaagaagctgaagattctctaaagaaaaaatggaaaaagattgaagagtttgatgctc

SEQ ID NO: 11001 - DNA, 379 bp, Glycine max
  Clone ID: LIB3092-013-Q1-K1-D5
aaatcctgtcacagtgacgaaacgacacgaattgaagacaaaagagtcaaacataaatgatagatacatagggttcattcagagtttagtcaaatgcttcgttcacggcggcgctccccttacggcgcctacctctgcgccgtgatctccgccgtgctcctcctcttctccgtctccctcctctactcccgcctctcccgctcccacccccactcccaccacctcccccgtccctccctcgtttcccactccacctccgccgacatctccatcgcctcctccgacgaccccatcgacgagctcgacttcatcgacgaaaccctagatcccccctccctccgcctcaaccctcccccctaccacctcttcttcgatcccc

SEQ ID NO: 11002 - DNA, 132 bp, Glycine max
  unsure at all n locations
  Clone ID: LIB3092-013-Q1-K1-D6
cccacgcgtncgnccacgcgtncgagaacaagtagttgagaactaagaaagagaagcaaatggcttcctcaaggatctcttccccagctgttaccactgtcaaccgtgccggggccggcatgggtgctccat

SEQ ID NO: 11003 - DNA, 422 bp, Glycine max
  Clone ID: LIB3092-013-Q1-K1-D8
cttttattaaggatgacagtgttttagtgaaagacttggtgaagcaaactgtagctgcactcggagagaacattaaagtgcgccgttttgttcggtttacgcttggggagacatctgaaaaagaaacaacagtaccagcataactttaggataagtaacatgcatatggattccccagttaccattcatgcttgcttgatgttacttatcctaaagttatgctggtactggggaatccatatgcatgttacaaaagtccaagagactaatgttggaaacagcagcaattgattcttcataataaccaaatgtgcaatcggcagggacactttttcctaatctggatctacattgaagatacacgaggactaaaatttgtgtaattctctacagttgtatgctgaaaaatattagtggatgca

SEQ ID NO: 11004 - DNA, 398 bp, Glycine max
  unsure at all n locations
  Clone ID: LIB3092-013-Q1-K1-D9
cccacgcgtacggctgatgaaccaatctgcatggagccattttcaggggattttgagcaggaacaattggatgaagagcaaataaaagagatgatctacagggaagcattagcactcaatcctgagtatgcttaaagcagaaaaactcaaggacttgaaacacgcttagaaggaaaaataataattcgttttcaatttttttaatcactttaagttcagttcttacaatcacgaaaggatcaagttgaatgaaaattcaaccttgttgccgatcaaactccctaggtaatttattcaatctgtgtgactaggtaggtgcaattacggcttgatgagtgtacttctgctgtaaagtgccaagtaacgatattaatctccaattntttttaaccctgacg

SEQ ID NO: 11005 - DNA, 412 bp, Glycine max
  Clone ID: LIB3092-013-Q1-K1-E1
ctctcgcatatggatcaaatttcggctcgctttacgcaacggcttattagaatgtcaaggtgctattcatatggcatgtctattacatcaaacattttgcaattccttattgtggaaacaaaataagaacgcttaacctaccagttatgctaaatttacagtgctgtcgattaattctgacaatagcatcatatacttactcaagggtcttcttactttgtatatcactccattcactgacatgataattactgagtacattatgattggctgtacaggaattgatatgcgcatgtaatcaataacaatatgaatgcctgttaaacattcttttgagctccctaattggaactatgatggatctagcactcgacattcaccttgacatgatcgctaacttatcctatttcct

SEQ ID NO: 11006 - DNA, 336 bp, Glycine max
  Clone ID: LIB3092-013-Q1-K1-E10
cccacacgtccggttggagggcactcaacttaacagcactggggagcgggacagccccggcgtgcatcagctgcgggagtgccagcacctatgcaaaccacaacaatatataacgtgcgacacaagctataacggcaggctgaagaacatacagcatgtgactacataacattcaaatgggcgagtacactgatgaaaaagacaattcatacgaccatgggagaccgcacgctgaaaatcatgacaaaactaaaactgtgactcataaatgcacaaacaaatagggcatgtttaatgaaaaacatgttgatgaaagactaatgaagaacaaacatc

SEQ ID NO: 11007 - DNA, 310 bp, Glycine max
  Clone ID: LIB3092-013-Q1-K1-E11
cttcaatcagcgtttaaggaccctgagactggcaagcttagtggttatggacggatcctgtctggctttggtgctggggtgcttgaggctattattattgtcactccatttgaggtggtgaagataagattgcagcagcagagaggtctaagcccggagcttttgaaatacaaaggtcctgttcactgtgctcgaatgattattagggaagaaagcttccgtgggctttgggcaggagttgctcctactgtgatgcgtaacgggacaaatcaatctgccatgtttactgccaaaaatgcttttgatgtac

SEQ ID NO: 11008 - DNA, 373 bp, Glycine max
  Clone ID: LIB3092-013-Q1-K1-E12
cttaaatcagcgtttaaggaccctgaaactggcaagcttagtggttatggacggatcctgtctggctttggtgctggggtgctagaagctattattattgccactccatttgaggtggtgaagataagattgcagcagcatagaggtctaagcccggagcttttgaaatacaaaggtcctgttcactgtgctcgaatgattattatggaagaaggcttacgggggctttgggcaagacttgctcctactgtgatgcgtaacgggacaaatcaatctgccatgtttactgccaaaaatgcttttgatgtacttctgtggaagaaacatgaatgggatgggagagttctactaccgaggcaaactatgatttatg

SEQ ID NO: 11009 - DNA, 320 bp, Glycine max
  unsure at all n locations
  Clone ID: LIB3092-013-Q1-K1-E2
cttgagtttangatgggtcaaacatggtttttgcattcaccaagatgtttgaatctgccgtagaaacatgatggtaaattatggactcaagtctcattgaagtatttggaatcagtttttgcatcacccttgacttgagtcattaatttgttccaagtataattctgtttaatattgatattggcatgataaatagcaagaaaaaacatatttttttagttgaaaaaaaaaaaaaaaaaaaaaaaaaaaaaaaaaaaaaaaaaaaaaaaaaaaaaaaaaaaaaaggaagagggggggaaaaaaaaaaggggggaagcgcc

SEQ ID NO: 11010 - DNA, 412 bp, Glycine max
  Clone ID: LIB3092-013-Q1-K1-E6
cttcattttggagaattaagtgcaaggaaagtttttcaagtgacttgtatgaagcaaatattatggacaaatgaaggaaacagtgctggtgaagagagtgcaaatcttttcctcagggccattggacttagggagtactcacgctatctttgtttcaactttcccttcacccatgagagagcacttctggggcacttaaagttttttccttggaatcctgatcctgatatctttaagacttggagacaaggtaggactggctttcctttggttgatgcacgaatgagagaactttgggcaacaggatggatacacaacagaataagagtaatagtttccagttttgctgtgaaaatgttgcttctaccctggaaatggggaatgaaatatttgtgggacacactttctgatg

SEQ ID NO: 11011 - DNA, 416 bp, Glycine max
  Clone ID: LIB3092-013-Q1-K1-E7
caacaacaccaacaccaacaccaacctttttcataccttaattctggggtttgagcatgtggttgagtttcactgaccttctttctactaacaacaacaatagcttgaacatggatgatgatccctttggacttgaatttgctaataatttcaagtcagcttcactgcctctctctccttcttcaatctacccttcttcttatgctgagttccctcctggttttgtcccaacttcacagtcattgaattcacaccactttttttcttctcaaattgttcctgcatcttacacaactgagcaatcttctagcatgagctacaacatgagaaacacttcaactgagggtcaacacggaaaccaggaagaagagagaaactactctgacctctcttttctaacaaaaacaaaccacgtg

SEQ ID NO: 11012 - DNA, 444 bp, Glycine max
  Clone ID: LIB3092-013-Q1-K1-E8
caaaaacaaagaaaaaaaaaaacccttagccaacacaaccatcatgggcacctctgctatgcagcaatcagcattcactggtcaaactgctctgaagcagctcaatgagttcgtccgcaagaccggtggcgccggcaaaggtcgcactaacatgcgccgcaccgtcaagagtgctcctcagagcatttggtatggccctgaccgtcccaagtacttgggtccattctcggagcagattccatcatacctgaccggagaattccctggtgactacggatgggacactgctggattatcagctgacccggaaaccttcgccaggaaccgggagctggaggtgattcacagcagatgggcaatgcttggtgcccttggctgcaccttcccagagatccttgagaagaatggtgtcaacattcgcgaggccgtgtggttcaaagccgg

SEQ ID NO: 11013 - DNA, 304 bp, Glycine max
  unsure at all n locations
  Clone ID: LIB3092-013-Q1-K1-E9
caaaaacaaanaaattaaaaaacccttatccaacacaaccatcatgggcacctatgatgtgcggcaatcaacattcactgttcaaactgctctgaagcagctcaatgagttctgcctcaagaccggtggcgcctgcaaaggtctaactaacatgcgccacaccgactaaagtgctcctcagagcatttggtatggccctgaccgtcccaagtacttgggtccattctccgagcaaattccatcataccttaccagagaattccctggtgactacagatgggacactgcttgattatcagctgac

SEQ ID NO: 11014 - DNA, 215 bp, Glycine max
  Clone ID: LIB3092-013-Q1-K1-F10
atcgcatgtacgattacctggaggtcccttatatcacagtgctaggggcttcagccttcgtgcgccataagcagaggaatgcaatcaactattataacgatgattacattcctggtgccctttactctgacgtagatggaatatcaactcacgctacaaaatcaccacatatgctggcatcatacgaagcttaaactgctattgattctgctctt

SEQ ID NO: 11015 - DNA, 212 bp, Glycine max
  unsure at all n locations
  Clone ID: LIB3092-013-Q1-K1-F12
cccacacgtncggttggaaggcgctcattatctcaccactggtgagctcgacagccttagcgagcatcagcttgtggattgcgatcacctgtgttatccagaacaatattgaacgtgtgactcatgctgtaacggcggcttgatgaacaacgcatttgactacatactttcaactggggcgagtcactgaagtaaaggactattcatacacc

SEQ ID NO: 11016 - DNA, 436 bp, Glycine max
  Clone ID: LIB3092-013-Q1-K1-F3
ggatggccacagcagaagaaatttcaactttgaaactgttgcgccaatatctcttgggggatatttcagaccgttttctcaccaatctcattccagtaaaacttgaagacccctcatcaggacttgatatgggttcaaacttctcagaacaaagcagcttctgcaagtttctggagtgctttgattttgaagcagaagtggtaggtctcacttctcatcataaggtccaaagctccattgcaacaagtccaccccagaatttcaattttccagaagaaccaatggtgtcaatgaaaaaggaagcaacatgttatgcaacaaggcattacagaggagtgaggagaaggccatgggggaagtttgcggcagagattcgcgaccccaaaaagaaagggagcaaggtgtggcttggcacatttgacactgagaatgatgc

SEQ ID NO: 11017 - DNA, 462 bp, Glycine max
  Clone ID: LIB3092-013-Q1-K1-F4
gacccacgcgtccgggatggccacaacagaagaaatttcaactttgaaactgttgcgccaatatctcttgggcgatatttcagaccgttttctcaccaatctcattccagtaaaacttgaagacccctcatcaggacttgatatgggttcaaacttctcagaacaaagcagcttctgcaagtttctggagtgctttgattttgaagcagaagtggtaggtctcacttctcatcataaggtccaaagctccattgcaacaagtccaccccagaatttcaattttccagaagaaccaatggtgtcaatgaaaaaggaagcaacatgttatgcaacaaggcattacagaggagtgaggagaaggccatgggggaagtttgcggcagagattcccgaccccaaaaagaaagggagcaaggtgtggcttggcacatttgacactgagattgatgcttctaaagctta

SEQ ID NO: 11018 - DNA, 155 bp, Glycine max
  unsure at all n locations
  Clone ID: LIB3092-013-Q1-K1-F5
ccacaaaaaaanaaatttcaacttttaaactctcacttcaatatctcttgctcgctattttaaaccgttttctcaacaatctcgttccaataaaacttnaaaaccccttatcaatacttttatatttttcaaacttctcataacaaaacaacttc

SEQ ID NO: 11019 - DNA, 83 bp, Glycine max
  unsure at all n locations
  Clone ID: LIB3092-013-Q1-K1-D4
tctaatttaaaaattcaacacctttccatactctctcttcccatacaaattctccattccaaaaactnncccatcacccccaa

SEQ ID NO: 11020 - DNA, 456 bp, Glycine max
  Clone ID: LIB3092-013-Q1-K1-B5
ctcccttccaatgatcatctgaaattacataggatttatagggtcatcaagaactcttcagcatcacaaaagggtattgttcttttcttctctgtcttcctttaccaaccccaaacatttcttttgtgttaaatttactgattctactcagcaatcagcaatcagcaatcagcaatcagcaatcagcatcattacttttccttgtagccatgtcaatttgttttctgtttcaaaaaccaatatgtctttctctttttctagtttttttcttattttcctgaagtaggtaatttgcagttttgttctattttcccagtgatttataatcaaaaagcaagggacagacacacagaagttgttatcttgaatcagaaaacatgatgctaagaagctcttcaacaccagttcttggatccctcctctcttccttcacagatagccctaacaacaatattc

SEQ ID NO: 11021 - DNA, 395 bp, Glycine max
  unsure at all n locations
  Clone ID: LIB3092-013-Q1-K1-B6
atcttaaattacatattatttatacgtttatcaaaaactcttcagcatcacaaacgcgtattgttcaaaagcttgtctggcttcctttaccaaccccaaacatttcttttttgttaaatttactgattctactcatcaatcatcaatcaccaatcaccaatcatcaatcancatcattacttttccttgtatccatgtcaatttcttttctgtttcaaaaaccaatatctctttctctttttctaatttttttcttattttccttaaataagtaatttgcactttttttctattttcccactgatttataatcaaaaatcaacgtacatacacacaaaatttgttatcttcaatcataaaacatgattcttaaaaactttttaacaccaattctt

SEQ ID NO: 11022 - DNA, 428 bp, Glycine max
  Clone ID: LIB3092-013-Q1-K1-B7
cccacgcgtccgcttgaatcttcgttatccttctttttttctccttgaactcgaatattcactatggcagatgaggtggttctgctagatttctggccaagtccatttgggatgagggtcaggattgcacttgctgaaaagggtatcaaatatgagtccaaagaagaggacttgcagaacaagagccctttgctcctcaaaatgaacccggttcacaagaaaatcccggttctcatccacaatggcaaacccatttgtgaatctctcgttgctgttcagtacattgaggaggtctggaatgacagaaatcccttgttgctttctgacccttaccagagagctcaagctagattctgggctgactttgttgacaataagatatttgatcttggaagaaagatttggacatcaaagggagaagaaaaaga

SEQ ID NO: 11023 - DNA, 315 bp, Glycine max
  Clone ID: LIB3092-013-Q1-K1-B8
ctgagctgacaagactaactgcaccaagggaaacagctatggtgttgtactagaaactgagaagagctacatcgagactgttgacatggatgttccaccagctgatcatgaagggaagtgcaagatgtggcactaactgcacttgcacggactggacttgtggccattaaggaatatgtatgaaaatgtaattgccatgtgtttggcaatacaaaactccaaataatgtaatcttcatatgaataaatgagcgctgttatactacttcagggtctgtgtagacatgcaggatgaatcatgtgccagaactgtcat

SEQ ID NO: 11024 - DNA, 255 bp, Glycine max
  Clone ID: LIB3092-013-Q1-K1-B9
acgcttaccttaaccttttttatattcaaaaaattacaattatcttcttggactacactctgggcaatgacacatgccgactatgcaccaacatattgaagcaacaccctattttatacttaccagatgggcaaattcaccctctctcataagactggacttggctcctataacaagatacaaagcaaagaactttattccacatgcagcgcttgctgaatactacacttaaagatcttcaccaaatggatttct

SEQ ID NO: 11025 - DNA, 391 bp, Glycine max
  Clone ID: LIB3092-013-Q1-K1-C1
ctgcagaacatggcacagattttggctccctctacgcaatggcagatgagaatctcaaaggcctctcccaatgcaactcccattacatcaaacatgtggagttctttattgtggaaacaaaataagaaagtttcacctaccagttctgctaaatttagagtgctggcaattaagtctgacaatagcaccatcaacaggctcgagggtctacttaatttggatatcactccattcactgacaagataattgctgagtacatttggattggggggacaggaattgatgtgcgcagtaaatcaagaacaatatcaaagcctgttgaagatccctctgagctccctaaatggaactatgatggatctagcactggacaggcacctggtgatgata

SEQ ID NO: 11026 - DNA, 428 bp, Glycine max
  Clone ID: LIB3092-013-Q1-K1-C10
cccacgcgtccgcccacgcgtccgcccacgcgtccggaaccacaatattgaagcttccacaaggttccaatgatgtgcttctaaaaaatctctacctttcctgtgacccttacatgagaatgctcatgaccaaggtggaaggcctcgacgtgtttggcacctatacacctggctctccattaacagggtatggagtgtccaaagtcctagaatctggacacccagattacaagaaaggtgatttagtgtggggatctacaaaatgggaagaattcagcttggtgtccccaactcaaatacttttcaaaattgagcacaccgatgttccgctttcatattatactggtattcttggtatgccgggaatgactgcatatgcaggtttctttgaagtaggctctcccaagaaaggagagaaatgtttttgt

SEQ ID NO: 11027 - DNA, 377 bp, Glycine max
  Clone ID: LIB3092-013-Q1-K1-C11
acgaaaaccaacccttttgagcttgcacaactctgatggtagttgcacaggtacttcaaactgtctctctctgagtgcctcaccacacaaattctgtgatataccaatggaggccctcaatgctgctggcttgacccctctatctgtgctctctgatagaacaaaaacaagaactaaacacccttctgtttctgcatgcaaagtctcaaacttttccacctccaccaacaagaaacaagcattgctgcaaagttgcatatcaaaaactttgcatggggggctgattcttgcagcttcggctgttaatggtggagctgccacagccttaacgtacgatgaagcactgggacaacctttgagccttcctggtactgggg

SEQ ID NO: 11028 - DNA, 364 bp, Glycine max
  Clone ID: LIB3092-013-Q1-K1-C12
gaaaacttcacggtttttctgtaccaagattaaagacaaagtgctggggttactcttctgtccttttcaactactgatgatgcaacaaaacgatcacctatgaggtgtaaaaaaattagctttttgaatgaaaccaattgtcaatatcagactgattttcctgatattgctaaattcttagtggttacttacatcactgatgcaaaaacatatctgcactccgctcctataatggctaaaagtgaaagtggcagcaacgttggattgcatgactctgaaactgtttctatgtaaatggatataaatgtgattgcacaacctcaaaattcatatatagaacggcacacagacggtgcatttcata

SEQ ID NO: 11029 - DNA, 59 bp, Glycine max
  Clone ID: LIB3092-013-Q1-K1-C2
ctcgttcttcttcttttgttgttctgtgtttgtgtttggtttttctctcacctgaaaat

SEQ ID NO: 11030 - DNA, 438 bp, Glycine max
  Clone ID: LIB3092-013-Q1-K1-C5
ctctcgtgtcttctttaaccctcaatcagcaacgtgcgccctcctcgggtcaagctcaggcagcactgcaccgcaaatttttctttgcccctttcgatgagtaacgccacagactccgccggcgagatcccaccggagacgaggtccgccgagagtgacggtggtgggccccggcccacgattaagatcaatgttacgcacggttcctctcaccacgatttacacctcccggcccaatcaacttttggggatgttaagaaactccttgtcaataaaactggtttagagcctgcagagcaacgacttttcttcagagggatagaaaagggtgataaccagcgtttgcaggctgaaggtgtaaaggataagtcaaaactttttcttttggaaggcattggtagcaaagagaggaaacttgaggaaaccagaaaagaaaat

SEQ ID NO: 11031 - DNA, 325 bp, Glycine max
  Clone ID: LIB3092-013-Q1-K1-C6
atccattgttcactttcacatcaactcaagagattcaaccaagtcatagaagctagctagggtgtattgttagatttgttagcaaaaaacttgaaaaaatggagagcagcttgggagacatgttgattaaggttgtggtgttcattctagttcaagccttggtgtaccttatcctctccaattcatcaaacatcttcaacaagaacatgaagaaatccaacagcttcaggccagcgaggtcggtgagcattcgccggatgctggctttgatctctgattttcctccagaaggggaaccctctccttcaccaaagggtcctaaaac

SEQ ID NO: 11032 - DNA, 144 bp, Glycine max
  Clone ID: LIB3092-013-Q1-K1-C8
atataacgaaggatgcaatggaggacttatggactatgcatttgagttcattatcaacaatggcggatttgattttgaaaaggataaccttaaccggggggtggatggtaaatgtgacacatataggaaaaatgctaaggtggt

SEQ ID NO: 11033 - DNA, 392 bp, Glycine max
  unsure at all n locations
  Clone ID: LIB3092-013-Q1-K1-C9
caatcaacatgattgtgttttatggtatttcatcatcaaatgtttttggtagagttgcctactatgtaaggagggattcaaattcatgagaacaatgcactccatgtggncttaatttttattgtgttctctttacaggcatgtcatcaggaaaaagttcagtgacaagtttccagggatcacctgtacccccaggactaatggagggtggtctgattgatgttcaacaattttcactcaaagctttgcttctataagaattccgacaagaaataattcactctcataatatccggctgcaccaacggggaaagacatgcagcaatggttcttggcatgccaagaacagcaatcactttaaacaaaaaaatatatttgtgcttgcaatcaca

SEQ ID NO: 11034 - DNA, 103 bp, Glycine max
  Clone ID: LIB3092-013-Q1-K1-D1
cccacgcgtacggattcatgttcgtcttgcttttggaatctgtttcgtagaaagtcgtttggtcttgcatatggcatggctcttgaggtatttttttgcaagt

SEQ ID NO: 11035 - DNA, 294 bp, Glycine max
  Clone ID: LIB3092-013-Q1-K1-D11
cccacgcgtccgatcgttttgcagccatggaaacaggcatagcatgctacactcgcggggctttcctgcctagtgtttcttccaagcactctccaccctccatctctccatcttttggcttgaggagtctgaaatcgagctctttatttgaagaatctttaaaagtggcatccaaatcaacactaaaggtttcaaaaacaaaaaatacttaattcggaacaaaatgtgaaatggggaccagcttgaaaaatttcttaccaaagccacaaccaattaaggggtgaacaaggtggt

SEQ ID NO: 11036 - DNA, 326 bp, Glycine max
  Clone ID: LIB3092-013-Q1-K1-D12
cccacgcgtccgatcgttgtgcacccatcgtaacagccatagggtgctacactgaccgggcttgcctgactagcgggactgccaagcactctccaaactcacaacaatatatatatgtgctacgagaagccataaatcgagctctttattctaagaatctatcacagtaccttccaaagtcaacactcactgttgtaaagacatataatacttcactcgcgaccagatgctaaattgatgacaaactgcaacaatgactcacaaaagcaacaacagataaggcgttgatcatgacgaacatgttcatggtagactcatgaagaaca

SEQ ID NO: 11037 - DNA, 441 bp, Glycine max
  unsure at all n locations
  Clone ID: LIB3092-013-Q1-K1-D2
attcatattcatcttgcttttagaatctctttcataaaaagtcaccgggtaatacatatcgtcatgtttctaaatgtatttttttncatntacaacatataatccattacaacaactcatattcgaccatatatccatcccattctcttttttcgatcgctacataccccttcatcacatcattaatcaacgtttctctctcgttctacactttttgcctatctctcattttataaaattattttattattttaacctatgtacttaaaaaatatttcattttacaaatttttctattaattccctcaaaaccctttttttttttttctttatttaatctttaataatttttctcatctcaccttttccataacatttccgctttccatttcatcatcaaaaaaatttaattaaaaaaattttttttttttttcttataaa

SEQ ID NO: 11038 - DNA, 427 bp, Glycine max
  unsure at all n locations
  Clone ID: LIB3092-013-Q1-K1-D3
gaaagcaagctcatcctanagttttaaaaatggcagcagcctcctccatggctctctctgccccatccttggggggcaaggccgtgaagctgggcccatcagcccccgaagtcgggagggtcagcatgaggaagaccgtcaccaagcaggcctcctccggaagcccatggtacggcccagaccgcgtcaagtacttgggcccattctctggcgagcccccgtcctacctcactggcgagttcccaggtgactacggctgggacactgctgggctttcggccgacccagaaaccttcgccagaaaccgtgagctcgaagtgatccactccaggtgggccatgctcggggccttgggctgcgtcttccccgaactgttgtcccgcaacggggtcaagtttggaaaagctgtgtggttcaaggccgggtc

SEQ ID NO: 11039 - DNA, 292 bp, Glycine max
  Clone ID: LIB3092-013-Q1-K1-B12
cccacgcgtccgattttctctctcgatacaaaaatacatagaaatggcctcttctcttgcatcctcatcaactgttctctggatcctttttctaaccattgcaactcttcatttgagttcagccaggaagttgtccgggtcagacccgcagttgcagtttcaataccacagaggccctctcctcaaaggcaaaatctcagtaaacctcatttggtacggtaaattcaaaccttctcaaaaagccatcgttgctgatttcatcacctcgctctcctctcccaaacccgtcacc

SEQ ID NO: 11040 - DNA, 404 bp, Glycine max
  Clone ID: LIB3092-012-Q1-K1-H4
aacaaacagtcggctgaaaatgtacgtccttgtattcttggctgctacaattttggtagggtggcaatggcatgcgtacgatatgatccgtctccggatgaacactggctatggtgcccgtacttcggaggtgaaacgcgcaagttggaggcttgctgcggaagcacacaacatatctgggtttgagaccatacctgaagagtgcgtagaagcaacaaaggaatacatgcatggcgaacaatatagatcagactccaaaacagataaccaacaagcttacttttatgccatagaccatcaagtccatcccaaggacacatttgtgctcagtatagatggcaccgtactctctaatattccatactacaaaaaacatggatatggggtggagaaattaactcgac

SEQ ID NO: 11041 - DNA, 371 bp, Glycine max
  Clone ID: LIB3092-012-Q1-K1-H5
cctcgctctatttctcagtctctgcgtttgcggctgaggattccgaacgagggaccttggtcgtttctcgcaaagtttaagtcatcatgggtaacgaaaatgttcacatcaacattgtcatcattggacatgtcgactctgggaagtcaactaccactggtcacttgatctacaagcttgcaggtattgacaagcgtgtgattgacaggtttgcgaatgatgctgccgatatgaacaagatgtcattcaagtatgcctgggtgctcgacaagctcaaagctgatcgtgcacgaggaattaccattgatattgctttgtggaagattgaaaccaccaagtactactgcactgtcattgatgctcctggacat

SEQ ID NO: 11042 - DNA, 311 bp, Glycine max
  Clone ID: LIB3092-012-Q1-K1-H6
acgccgcgatctatttctcagtctctgcgtttgcggctgaggattccgaacgggtgaccttggtcgtctctggcaaagtttaagtcatcatgggtaaggaaaaggttcacatcaacattgtcgtcattggacatgtcgactctgggaagtcaactaccactggtcactagatctacaagcttgcaggtattgacaagcgcgtgatcgataggatttagaaggatgctgccgagatgaacaagatgtcattcaagtatgcctgtgtgcttgacaagcttaaagctgatcgtgaaagatgaataaccattgat

SEQ ID NO: 11043 - DNA, 162 bp, Glycine max
  Clone ID: LIB3092-012-Q1-K1-H9
tcgctcacacagatctggacccgtgaggctgacatctacgctactccaagggctgactcactgccagctgtgcttaccgaaattgaatccaccaaagtcggcatggcctgcctaaagcatggatcttcgacgttcatttctgaaggtccacgcttgataccc

SEQ ID NO: 11044 - DNA, 381 bp, Glycine max
  Clone ID: LIB3092-013-Q1-K1-A1
tgcttccttcctttcttttcttcaaatggaaaaaaaaggtccttttttttgtctccatgggcttattcattgctctgctatttcatggaggaaaggttttagctttcatgagccaagacggatcagaggaatggggatacgttcaagtcagacccaaagcgcacatgttttggtggcattataaaagtccatatagagcggaagatccttctaagcccgggccaattgttctatggttgcaaggaggacctggtgcttcacgagttgggattggaaattttgaggaggttgggcctttaaacacaagcttgaagccaaggaactccacatggttgaaaaaagctgatctcttgtttgtggacaatccagttggaaccgggt

SEQ ID NO: 11045 - DNA, 232 bp, Glycine max
  Clone ID: LIB3092-013-Q1-K1-A10
gaaatggaaacggtgttgttagaaagagatttggagaggtttgactttttgagagttgggagatctcatcctgtctatattgctcttctcgtctgaaagagaaagagaaccagaaaagaccaaagcgacaacatcaccagacaatacaaacgcagatagatcactttgacgccaccctgaatcttgatacctttgaccgcaacaaaattcttaattgatcactggtgtggag

SEQ ID NO: 11046 - DNA, 388 bp, Glycine max
  Clone ID: LIB3092-013-Q1-K1-A11
tgttccttcacctttcttatattcaggaaagtaagatcatctgcatcgccgacgcttccaacaataacaatggccgataatgcaacaacgcaaggaagcaacaccctattttctccttacaagatggccaaattcaacctctctcatagggtggtgttggctcctatgacaagatgcagagcgttgaactggattccacaggcagcgcttgctgaatactacgctcaaagatcaacaccaggtggatttctcatcagcgaaagcaccttgatctcccccactgctcctgggtttacccatgttcccgggatatattcagatgaacaagtggaggcgtggcgaaacatagtggatgccgtgcatgccaaaggcagcattatcttctgtc

SEQ ID NO: 11047 - DNA, 362 bp, Glycine max
  Clone ID: LIB3092-013-Q1-K1-A12
gaaaactccacggttttacaggaccaagaagagagtcagagtgctaatgttactgttgaagcctcgggagctactcaagatggaagaaaaagatcacctaaggggtgtaaaaaaatcagttttttgaatgaaaccaattgtcaagaacagactgattttcccgagaagtgctaagttcttggtggctactcacagcactgctgcaaaaacaaatctgcaggccggggcctatgatggttaaaagtgaaagtggcggcaacgttgcattgcatgactctgaatttgtgtctctggaaatgggattaaatgggcctgcacaaccacagatttcatatatagaaaggcaattcagacgggggatt

SEQ ID NO: 11048 - DNA, 215 bp, Glycine max
  Clone ID: LIB3092-013-Q1-K1-A2
ggcgccctttactgattccactctagtcagtatatacgggcgccatttgaaggtgcaggcggtgatgaatatggcggacatgccatggaacagaggcgttacctttactcacgcaaatatgatcacaggcctgagagaactctgatacaagaccaacagcgctcatcataccggggtgaaataaaacgccaaatagagcctgagatattactgat

SEQ ID NO: 11049 - DNA, 333 bp, Glycine max
  Clone ID: LIB3092-013-Q1-K1-A3
cacgggggacggacgcgtgcgccgtgtatgactttgtccaattcgatatggtcgacgagaccgccttgctccactctctcgggcgacgcgaccgggcgtcgtcttctctctccgcctttcattccttgaccagtggcacaaagacatcatatgtagggaacaagtgggcaagtttgtctcggccgttcagttcaaagcctgctggtaatgatgtcattggaattgatctgggtactaccaattcatgtgtttctgttatggaaggaaagaatcccaaagttattgagaattctgaaagagctcgaacaacaccatcagtggttgccttcaacc

SEQ ID NO: 11050 - DNA, 354 bp, Glycine max
  Clone ID: LIB3092-013-Q1-K1-A5
cccacgcgtccggtttctattcctcactaggagctcctctccactggttcttcatctgcatgcacacagttgcgtagttttggaaaccaagaattcctgaagaagggtagcatcaacaagcagttctgaaaatggagatcaccaatgtcagtgagtatgaggctattgcaaagcagaagttgccaaagatggcgtttgactactacgcatctggtgcagaagaccagtggactctgcaagagaacagaaatgccttttccagaattttgtttcggccacgtattcttattgatgtgagcaagatagacttgacaactactgtcctaggcttcaaaatatccatgccaatcatga

SEQ ID NO: 11051 - DNA, 384 bp, Glycine max
  Clone ID: LIB3092-013-Q1-K1-A6
cccacgcgtccgggaaaaaacttgacagatttattctgtgggaaggttctcaactgccttgatattggtggggaaggttctactctgatagctgctggtggttctgatcctgtcattaggatttgggatcctcgtaaaccaggcacttctgctcctgtttttcagttttcttctcatatgtcttgggtttcggcttgcaaatggcatgatcagtcttggtttcatttactttctgcatcctatgatgggaaagttatgttgtgggatctgagaactgcgtggcctctttcagtcattgaatcgcacagtgataaggtattgtctgctgattggtggaaaaagaacagtgttatcagtggtggagcagactcaaaactttgcatt

SEQ ID NO: 11052 - DNA, 333 bp, Glycine max
  Clone ID: LIB3092-013-Q1-K1-A8
gacccacacaaaccggcttcaattatttttttaactctaatcattataaaaacacccctttttaaaaatcactcgtgcaactaaagtggccggcataccatggaacaaatgctttaccttttcataccccaaccttataaaaatcttttttttaactcaaatccattctcaacaacacactgattttccttctataactaaattcttagtcgttacttacatcactcctccaacaacaaatctatactccgctcctataataactctaattttaattcccttcaactttacattttttaactctcaatctttttctattcaaatccaattaaa

SEQ ID NO: 11053 - DNA, 427 bp, Glycine max
  Clone ID: LIB3092-013-Q1-K1-A9
ctgagaggaagagagagggagattctttgtttgctaccttctctcggaaaaatggttacgttcaggtttcaccagtaccaggtggttgggagggctcttcccacggaagcagatcagcaccccaagatctaccgaatgaagctctgggccaccaacgaggttcgcgccaagtccaagttctggtattttctgaggaaactgaaaaaggtgaagaagagcaatggccaagtgcttgccatcaacgagatttttgagaagaacccaaccaaaattaagaactatggtatatggttgcggtatcagagtaggactggttaccacaacatgtacaaggagtaccgtgacaccactctaaacggtgcagttgaggcaatgtacaatgaaatggcttctcgtcacagggtcaggagcccttgcatccaaatta

SEQ ID NO: 11054 - DNA, 395 bp, Glycine max
  Clone ID: LIB3092-013-Q1-K1-B10
ggggcgttgaggaccctgctttgtgggcagacaaggttggtaacagggggcgcacaacgggagacatcaatgattcatgggcaagcatgacaaccattgctgatcttaatgataagtgggctgcatatgctgggcctggaggatggaatgacccagatatgttggaagttggcaatggaggcatgacttaccaggaatatcgagctcacttcagcatctgggctttagcaaaggctcctctattgattggctgtgatgtaagaaatttgactgctgaaacacttgagattttgagcaataaagaagtcattgccatcaatcaacactctcttggagtccagggaaggaaagttcacgtttctggagcagatggctgcagacaggtttgggcaggt

SEQ ID NO: 11055 - DNA, 403 bp, Glycine max
  Clone ID: LIB3092-013-Q1-K1-B11
cggacgcgtgggcggacgcgtggggcgaagtcgtaagagggtttcaaaagatggagaacatgcagagcttctggcaattgggcgatgaactccgtggacactcaaaagcatcggaggatcacaaatggttaatggttgcttcgaaattggcggaacagacaagattgaagggggagcgtgtgaacaaccttgatctttcaaagggccccattgaaacaaggtcaagggataaatttgggttccaggaagagaacaaatttgattctcttaacttaagcatgttgaaacctggactcttaaatttactgagaatgtgagcaaaagctcgcttcgaaatggtgtttatggtatgaatgcagtgtatcagaaaaacaatgcaaactttgttgagtatgtgatcagt

SEQ ID NO: 11056 - DNA, 120 bp, Glycine max
  Clone ID: LIB3092-012-Q1-K1-H12
tttactatcataaaaatttcatgcgcaaaactgcgtgtaaggtcccggtgctttattatacgaacatattcatacacccaccctctatctaccaataaataaaatcactttcactaatta

SEQ ID NO: 11057 - DNA, 228 bp, Glycine max
  unsure at all n locations
  Clone ID: LIB3092-012-Q1-K1-E9
tcgcgagtgttgaagataacacgaaacaaaaaccatcatttagttgccatccatcttccaccggtgtccactcccaacaccgatttcggcacggggccgncaccgggccccaacatcacgcttccttcgggccccttcggcgaggccttcttcttcgccgccgccggcgccagccccggccccatgaccctcgtcttcagcttcttcggctccgacgccggcggcgac

SEQ ID NO: 11058 - DNA, 337 bp, Glycine max
  Clone ID: LIB3092-012-Q1-K1-F11
attaagtattcaccatggaggcaccatcttccaccaaacccaacgacccaacaaaacctgccaacacttccaccacccttagtctggaggccggcccggcccaagcgagcccactccgaaaaatgtttgccgtggcgtccatcgccgccggcatacagttcgggtgggctctccagctctctcttctaaccccctacgttcagcttttaagagtcccccacgcggcggcctccttcatctggctctgcgggcccatctccgggctcgtggtacagcccattgtgggctactacagcgaccactgtaccttccgctttggtcgcaggcgcccctttat

SEQ ID NO: 11059 - DNA, 328 bp, Glycine max
  Clone ID: LIB3092-012-Q1-K1-F12
cggacgcgtgggcaacccatggccaccacctccgcattcctcctccttcccctcctcctgggcgccacctcgccatcgccgctcacggcatcggcatcaactacggcacgctcggcgacaaccttccaccgcccgcggcggtggcgaacttcctgaagacgaagacgaccatcgaccgcgtgaagatctacgacgtgaacccggacatcctgcgggccttcgccggcagcggcatctccgtgacggtgaccgcccccaacggcgacatcgctcgcttaaccaaaatcgactcggcgaagcaatgggtggcgacgcacatcaaaccctt

SEQ ID NO: 11060 - DNA, 74 bp, Glycine max
  Clone ID: LIB3092-012-Q1-K1-F2
gtcaattagatggatggacctggtgacaccaatgctatgtatttttcaacataattttggtatatggggttttc

SEQ ID NO: 11061 - DNA, 421 bp, Glycine max
  unsure at all n locations
  Clone ID: LIB3092-012-Q1-K1-F3
cccacgcgtccgatgctgcagaacatcaaggatcgcttatcaggtgacaccagcagcgacgagcagcgacagcgagagcgacaacgaaacttgccacaagaggaaggactgaaattgagctttgtgctaataataataattggagttcgagatcagaattcgcaactcagtctcagagaggccaatatatatatgtgtgtgtgtgtgtgtgtggggtgattgttgctgtccagtttttaaaaaaaaaccctaaaaaattatagcagagaagatgctaagtaaaagtacttactaaataaaaatcaatgtactttggttatggtgcaagtctgaggattgagacatacaaaaaacaaatgcatctactatgatataaactcgagcttnctattatatgaataaaactgtttggtttggtgtt

SEQ ID NO: 11062 - DNA, 382 bp, Glycine max
  Clone ID: LIB3092-012-Q1-K1-F5
gcgctacacataaatatagctccgattcctaatcacctggttaatttcttcacgtggagctagcgagatccaaccttcacatcaagaatgttttagtaaggtcagctgcgcgagctctgcttggcggcagtggtcggagctactaccggcagctctcaacggcggctatcgtggaacatatacaccagcacggtggcggctcgtttggaagcttgcactttcggaagatgttcactcttccagaggtaaaggatcagcactcagaggacaaaaagaacgaggttaacgacaccagttacgccgtcgttacgagttactggagaatcacaatgcccacagttcgtatgcaagaccgtacacaatgatcttggaactgctttat

SEQ ID NO: 11063 - DNA, 426 bp, Glycine max
  unsure at all n locations
  Clone ID: LIB3092-012-Q1-K1-F6
cctaaagccccatctggttggtcttcttcttccctctaaattcggcttgggcttccctgacacaaccaagccttcttcttcccttcccaccactttcttcatttcacacttctcctctgcccctctctcttcctacggaccctccctccacaagggaacaacaatcccctcccaatccctaaacgacgccgttctctgcgaagaagccttcacgcgagtcttccacctcgccgcactccgcgtcccctcctccgaatgctccgccctcgagagccgcctccgtggccacctccttaactggccccgcctccgcaatatcgcccgcgtccccggcgacgacatcgaccccaccctcgcccctctcttgcctcaaccaggtaacggagaattcgacttcgacgaanatgaagtagaagaaagacgtct

SEQ ID NO: 11064 - DNA, 349 bp, Glycine max
  Clone ID: LIB3092-012-Q1-K1-F7
gctaatcacgaagacagtatgaatggctctgccgatggctttcacgatgctcatatctagggctgacggccaatcagctgagaatcccaatagttcatctatgcccaaacttgtaatccatgcgtaaacatgcctacgctcacaagcttaccgagaccactcacaactggacaagcatctctaaacgatctccgtccattactgctaagccgacgcccgagacgcctacctgataatactcctcgtcaaatggctacacatgctaaggattccaaagccaacattccactgacactataaactgtcgacactgtcatcatagcaaaccaagcagcggaagctacatgca

SEQ ID NO: 11065 - DNA, 365 bp, Glycine max
  Clone ID: LIB3092-012-Q1-K1-F8
agcaagtgagatcatgtcctatgccaccataggggggatcccccaaagccgtatcaatggtgcctacacctacacagagagccagccttcatttccttctactttgaacagaacttctgctgattcaagtgcttcaattattcccagtgtgaacattacaaactccattcgagagcaccctcaagcatcatccacacctgttgtaagtaggaatctcttaaattcactaatacttctagataatgtctttttacaatgcttacgttgctataatcggtcatttattttctaatcaagattttcctatgtatacaaatctgccaattgctagaaaagctccactccaccagtttctggataatata

SEQ ID NO: 11066 - DNA, 365 bp, Glycine max
  Clone ID: LIB3092-012-Q1-K1-F9
cccacgcgtccgggagttctaaatttccggcgagttttgctctctcgaatctgcgacaccggcgaatctcgctcaccgggatttcgcattcagaaaatggctttaggtggaacagctcccccaagaggaagtgcagcggctactgcaagcatgatgagaaggagaacaaccggtggtgcggcctctggaggagcagctggaactatgctccaattttacacagatgatgcccctggactcaagatctccctcaatgctggtctagtaatgagcattggcttcatagcaattgttgccatcctgcatgtgatgggcaagctgtactatgtgcgtacggagggctatgagtatagatcaagatgtta

SEQ ID NO: 11067 - DNA, 366 bp, Glycine max
  Clone ID: LIB3092-012-Q1-K1-G10
acgcggacgcgtgggcaactgccaccgccttccgcttccggggccaaccctgcccctgcaacgaccagcaacaacaacaaggagcagcgtccccagcgccgccgcaaggacctcacgctgccgctgccgcagcgagacaccaacttggcggtgccgcttcctctgccgccatcgacggcgcctgctgcggcggcgagcggcggagcgagccagcaggcggcgcagcaggtgatccctttctcggagctggagagactgaaccgcatcgggagcgggaacggccggacggtgtacaagggggtccaacgtacgaacgggcccgtgtacccccttaaggggatataccggcaccaccaagagtccgtg

SEQ ID NO: 11068 - DNA, 388 bp, Glycine max
  Clone ID: LIB3092-012-Q1-K1-G11
gagatagttgacagaaggagaaattctggctcctctgaggcaggaccatctaacattaaatcccctgctgaaaatactgctggtagttcatcatcgagcaatgttgttgtgggatttgttggatatcctaacgtggggaaaagttcaactattaatgctctggttggtcaaaaacgcactggtgtcacctctaccccagggaaaacaaagcactttcagacattaattatctctgatgagcttgacctttgggattgtactggattagtttttccatccttctaaagctcaagatttgagatgattgcttgtggggtgttacctattgataggatgactgaacaaagggaatctgtccaagttgttgctgatagagtcccgagacatg

SEQ ID NO: 11069 - DNA, 337 bp, Glycine max
  unsure at all n locations
  Clone ID: LIB3092-012-Q1-K1-G12
acgcccacgcgtccgtataaacgttgttgttttcagataaacacgtgactcactatctatctatcaagcgatatctccgagttcagccgaaccaaactccgaagctatggcagagctccaaaccaaggttgaacctgttacggtcccggctccggtggatcccgagccaccgctagctgaggctccgccgctcgagaagaaagcggtggcggtgccaccacctgttccggctgcggcagaggaaaccaaagctcttgttattgtggagaaagagaaagagaatgagaagataccagaacctgtaaaaaagaacgcctcangtggatcccttgataga

SEQ ID NO: 11070 - DNA, 429 bp, Glycine max
  Clone ID: LIB3092-012-Q1-K1-G2
gaaaaaaaaaaactaaacataagaatgcattcaacgcgttgagttgttgtctggaagagcgtatgctgtttgttcgcaattcgcatggaaccatcagtttcagctccaccaaaaccttgggagaaagcagcatcatcatctgggccagcaccttttaaacccccatcagcaggtagcacaagtgatgtagttgaggcttcagggactgcaaaacctggcgaaatagttccagcttccgataagactgcaactgtcaataggaatgctcttgggagaccccttcccacaaggccatgggagcagaataatggaagtaccagctatggaggttatggttccacaatgaattataattctggatatggatcttatggtggagtgggagggttgtatggcggaggaatgtatggcagcagtatgtacagggga

SEQ ID NO: 11071 - DNA, 424 bp, Glycine max
  Clone ID: LIB3092-012-Q1-K1-G4
gaagtgagtagtgagtgctgaatcgaatcgaatcgattctccgaacatggcggcgagcggtcgcacagtgttgcaatgctcttcatcatcttcttcttcttcgcagatcttgtccgcgaaggtccaccctctggtcatcttcaacatctgcgattgctatgttcgacgccctgaccaagccgaccgcgtcatcggaaccctactcggctccgtccttcccgacggaaccgtcgatatccgaaattcctatgctgttcctcacaacgagtctatcgaacaggttgcattggatatagagtaccaccacaatatgttaatatcccaccaaaaagtgaatccaaaggaaatcatagtaggatggtattcaaccggtcttggagtaactggtggtagtgcattaatccacgagttttattctcgagaa

SEQ ID NO: 11072 - DNA, 198 bp, Glycine max
  Clone ID: LIB3092-012-Q1-K1-G6
acggagggaacgtgttagtgcattcaacgcgactcagtggaaactcgaatagcgtaaactggctaaactcgaatcgaatctaaccatgatcgtcaactccaccaaacacttcttataaagcaaagaccatatttcttatcagcgactctgtacaacccccatagatgtgaacgaaaggtattgtaggctgagctacaa

SEQ ID NO: 11073 - DNA, 266 bp, Glycine max
  Clone ID: LIB3092-012-Q1-K1-G9
ggaataggagcagataatcagaaaacaatggccgtagcaataggaagaagcttctgcattgagcccggctctttattcaacaacaagagcttggatagaggttcaccagctggaagattatcgtggcttggggatggtgctgctgccactccacgttataggcaaacttgggttggggcgcaacagcgacctacatggcttccaagacttggacccccaacttaatctgattggacctttggttgaaaatttggggtccaaccaat

SEQ ID NO: 11074 - DNA, 422 bp, Glycine max
  unsure at all n locations
  Clone ID: LIB3092-012-Q1-K1-E8
ccaaggccgagcccgagaaaaagaaggatggtggggagaagcccaaaggggatgctccggaaaaggaagccgagaagcccaagcccgggcccgagaagcccaaggacaagcccgcgccagctcccttacccgtgcagccacatatggctgcacctatggcggttccagttgggatgctctatgctcctcctccgtgctacgaaggcaggcccgttgggcctgggtacgaatacggtgggcccatgttctgttacgacgggtactatgcaaggcccgtatatgatagttacggtggaggcagaccctgttatgtgaaccgtggtgatcaatatttcagcgaagagaatccacaaggctgcataattatgtgacaattacgtncacggcgttgcattattgggtactgtaaatgatggtggcca

SEQ ID NO: 11075 - DNA, 214 bp, Glycine max
  Clone ID: LIB3092-012-Q1-K1-H10
gcgttcacaaataacgtagacgaggacactgatttactaagaacaataccgcctatgagaaaggcggagacatctgcactctaccataaaagaatgccgggtatctataatccgtaccacaaatgaccacatcaatgcgccatacggacaggaaggtggatacgatcgagaataacatcatcaaatgaagaattcagccaaaaacgaccactat

SEQ ID NO: 11076 - DNA, 188 bp, Glycine max
  Clone ID: LIB3092-012-Q1-K1-H11
ctcgtatctacttgcagagtaagagagagttggtggccaaataaagctctaattggtaagtgggttttcaccctgaacttcggccaaaccaaacccacccttttctgacttcaagctactatccgtcaatcagtttaaattttcgaggcgtagttataattgtaccatattgaggtaccttaaaaagg

SEQ ID NO: 11077 - DNA, 307 bp, Glycine max
  Clone ID: LIB3092-012-Q1-K1-D4
actcagtcggctgtgtcggtctatatgcactgagctcactggcaccttcatgattcaagatatatgggatgcaacgggctctcaagaccatgaagtgcccgatgaattaccacaataacccatttaacactgctgcctttcctacctgaactgcttttcactttacaatgcctacagcagcatggcccactgcacctactacctctgcagactactcaatctaaaacaccttcagcatgtattgcatatgaatccactatcacaagcgatatacctagcacacaagtataagttgctcccactacta

SEQ ID NO: 11078 - DNA, 421 bp, Glycine max
  Clone ID: LIB3092-012-Q1-K1-D5
gtgacttttgcaccaactggactgacaactgaagtcaagtctgtggagatgcaccatgagtctcttacagaggcacatcctggtgacaatgtgggattcaatgctaagaatgttgctgttaaggatttgaagcgtggttatgttgcctcaaactcaaaggatgaccctgcaaaggaggctgctaacttcacagcccaagtcatcatcatgaaccaccctggtcagattggaaatggctatgcccctgtcctcgactgccacacttctcacattgctgtcaagtttgctgaactcatgaccaagattgacaggcgatccggcaaagagcttgagaaggagcccaagtttttgaagaacggtgatgctggttctgttaagatgattccaaccaaacccatggttggtgaaactttctccgagt

SEQ ID NO: 11079 - DNA, 420 bp, Glycine max
  Clone ID: LIB3092-012-Q1-K1-D6
cccacgcgtccgcccacgcgtccgttccattgttatctcgctaaagtctcaaacctttctgtgctctgctctgctgaggaaattctgtaacttgatgattataaagatgaactgtttcttcttcaaaaacaagtcaaaatccgacccagaattaccaaagcgaaggaagaagagaaatcaggtgggcaataatggagcaagcaagtcctcccccagctcgctaccatcgccgagaagcataaaagaattgtacaaagaaaaagagcacaatttcagaatcttcactttgcaagagatggtaaatgcaacacatggtttcaataggatgctcaagattggagaagggggtttcgggaaggtatatagaggaacaattaaacctgaccctgaagatggagctgatcctattctggtcgcaat

SEQ ID NO: 11080 - DNA, 427 bp, Glycine max
  Clone ID: LIB3092-012-Q1-K1-D7
cccacgcgtccgagaaaagccaccttaacatctcttctctgaaaattctggttagagagatagatagaggaagaaagaatggcagcttgcactgactactcaacacaatctctgagcacaaattgctccatctcaaccccatcaaagacgcaactcagttttttccaccaaaagcaggtagttttctggaggaacagcaagaagggcagctgcagcagcagaagaagctatgtgataacatgtgcagcaggtgactcacagacagtggtgattggcctggctgcagactcagggtgtgggaagagcaccttcatgaggaggctgaccagtgtgtttggaggagcagcatagccaccaaagggtggcaaccctgactccaacactctcatcagtgacaccaccactgtcatatgcttggatgattacc

SEQ ID NO: 11081 - DNA, 311 bp, Glycine max
  Clone ID: LIB3092-012-Q1-K1-D8
cccacgcgtccgaccacacctaccttaccttctcatctctctaaattctcggtccattcgtagctatactctgatagggtgactctttacactgactactatacacattctctgagcacaaattactccctcttaaccctatcaaccacgcatcatccaattctaccaccgaaaacaaatcattttctcaatgaacaaccacacaggtacttccccaactcgatacaaatctatctaaaaacatgttcaaaatgtcactcacatacagcaccaattcaccatcctgactactcaagatatggtaaaagcac

SEQ ID NO: 11082 - DNA, 475 bp, Glycine max
  Clone ID: LIB3092-012-Q1-K1-D9
ctagattcagccacagttggaaaaaaaaaaaaaaaagttgttcgagatggcacgtacgaagcaaactgctcgtaagtccacaggaggaaaggcacctaggaagcagctcgcaaccaaagctgcacgtaagtctgcaccaactactggtggtgtgaagaagccacatcgttatcgtcctggtaccgttgctcttcgtgagattaggaaataccagaagagtaccgagcttttgatcaggaagctccccttccagaggctggttcgtgaaattgctcaggacttcaagactgatctgcgtttccagagccatgctgtgcttgcattgcaagaagctgctgaggcataccttgttggactctttgaggatactaatctgtgtgccattcacgctaagcgtgtaactattatgcccaaagatatccagctggcaagaaggattcgtggtgagcgtgcttgatgtggtggtggtggtggt

SEQ ID NO: 11083 - DNA, 340 bp, Glycine max
  Clone ID: LIB3092-012-Q1-K1-E1
gtcaaagtgtttcttttgcaagaagaaagagcacatgaagaaaaattgttcaaaattgaagagctggcgcgacaagaaagggtatggaaaacctaaggaggccagtgggaagtgagcagtacatctattcaggaggcaagatgagctcatatgtggaagtcattgggagatgcaatttagttttaagcaacgattttattttgtgtttagaaaagatattttacgttccaagtttttctaagaatttgatttatgtatcaagacttgcaccattgggcttttcctttaattttttaagttttggtttatctttaagtaataaatatggaattattggttc

SEQ ID NO: 11084 - DNA, 350 bp, Glycine max
  Clone ID: LIB3092-012-Q1-K1-E10
ctcgggcttgaattcccgggcggtggtactacatgacgatatgctcgagctttattcttaaccatttccaaacggctggcgagtggacaggctagggcttggattcacagcaattgcaattcattatcagacagtgatcaacttcgtcctgtttcaataccagatatgcattcagccagtgcaggaattactgaaggtttttccatgtgtggaggtgactttgttgaagtttacagtgattcaagccaagttggtgcatgggatgcagttgtaacttgtttctttatcgatacagctcataatattgttgagtacattgaaataatttcaaaaattttgaaagaaggggg

SEQ ID NO: 11085 - DNA, 377 bp, Glycine max
  Clone ID: LIB3092-012-Q1-K1-E11
ctgatcacttccttgcctattgcacattcttcatcacttcattcaacatttctctctcccttagctagtttttaccaatggctgctgcggttagtgctgcagtctcttttccatccaccaagtctacctctcttccaagcaggaccttcatcattaccccagagagagttgtattcaagaaagcttcattgcaatacagagatgtttgtagcagtggaagggtagtttccatcagagctcaagtcaccactgaggcttcagccaaggttgaaaaagagtccaagaaacaggatgaaggtgtggttgtgaacaagttcaaacccaagaccccttacgttggtagatgcctgcttcacacaaagatcacttgggatgat

SEQ ID NO: 11086 - DNA, 243 bp, Glycine max
  Clone ID: LIB3092-012-Q1-K1-E12
tcgaacttcaagaacacaaccactcaaaagggttgaaagagagaaaagggtttaataagtagtgttgttttcaatgtataaatatgatgagttcttgttgaatgagatggatcatattatcaatttcaatgtcaacaagcgtatgtgcatacaacgaccagttcgacttaaatgactccgcattcatccaccttatgaattgcatcatggatcctaaccatttccaacaccaatccaaaccaa

SEQ ID NO: 11087 - DNA, 436 bp, Glycine max
  Clone ID: LIB3092-012-Q1-K1-E2
gcgcccacgcgtccgcaaacttcaacttgtaatcaagggagagagaaaatttcaagcacaaagaatggcggggaagaaagtggtgatcctaggaggtggtgttgccggtgccaaccttgcaaaaactatacaacgtcaagccaacgtcacccttattgatccgaaggaatattttgagattccatgggcaagtttgaggggattggttgagccaacttttgctgaaaggatagtgatcaaccatagagagtacttcaaaaagggtaaccttgttgtatccagtgctgtcaacataactgaaactgcagtggtgactgaagatggccagcagattgcctatgactatcttgttattgccactggacacacagaaccaatccccaaaaccaggagtgaaagacttgaccaatacaaaggagaaaatgcaaagatcaaa

SEQ ID NO: 11088 - DNA, 371 bp, Glycine max
  unsure at all n locations
  Clone ID: LIB3092-012-Q1-K1-E3
tgcaaataaagcttctctaatggctgccattgattacataagctctgagaaaactcatggtttcatgcgatctaatggaagcaatatgggccatgcacttcacgtataaagatttatataactaatatacatggccgcttctataattatattgtaataactcatattcttaatgtgacaatttctataattattgaaactaaatgttatttcagggtcaccgggcctacgcacgacacaagaaatatataaccccaaacaaaagacagatgctcccctattttctggattcttccctccccgaagaagagttcaatatgattatcaaggaattgcatcangattcattatgtcagccagaattcaggact

SEQ ID NO: 11089 - DNA, 418 bp, Glycine max
  Clone ID: LIB3092-012-Q1-K1-E4
cggacgcgtgggcggacgcgtgggtttgcatcaaacacccaaatttgtttggtggaagggagaagcgtggatgtttcgtgggacaagggtctgtatgattcaaatgtcttggttgcatatagaaggccacggccagaatggcttgctcagcagtcttttgtattgcagcattctctttcacctgagattggagtccatggtatcccagtgaacaatttctcccgctcaggaagtggaggtataaatttatctcgattgtcagtgggaatggacctgaaggaacctgctagttcaaaatggagcagcactaccagcataaagtttgagcatgttcgtccattgaatgatgatggtcgcgctatatgtagagattatgatggatttcctttgacttccagtttaatcttcaaatagaaca

SEQ ID NO: 11090 - DNA, 425 bp, Glycine max
  unsure at all n locations
  Clone ID: LIB3092-012-Q1-K1-E6
cccacgcgtccgggatcggaacgggccaaagatcaaaagtacaattcttcaccatctctgtgagaagcagagacagagcccttactatgacaatctctgtcgccctgtttcagatttgcttccatttattgccaatgggatcagaggtgtcactaccaacccagcgatttttgaaagagctatttcatcctcaaatgcctacgatgatcagttgagggaattggtaggggcagggaaggacatagaaagtgcttattgggaattggttgtgaaggacatacaggatacttgcaaacttctggagccaatttacaatgaaacagatggggaagatggacatgtatctcttgcagtttccccaaagctagcaaatgacaccaaggggacaattgaggcagcanaatggcttcataatatggttggaa

SEQ ID NO: 11091 - DNA, 421 bp, Glycine max
  Clone ID: LIB3092-012-Q1-K1-E7
cccacgcgtccgggatcggaacgggccaaagatcaaaagtacaattcttgaccatctctgtgagaagcagagacagagcccttactatgacaatctctgtcgccctgtttcagatttgcttccatttattgccaatgggatcagaggtgtcactaccaacccagcgatttttgaaagagctatttcatcctcaaatgcctacgatgatcagttgagggaattggtaggggcagggaaggacatagaaagtgcttattgggaattggttgtgaaggacatacaggatacttgcaaacttctggagccaatttacaatgaaacagatggggaagatggacatgtatctcttgcagtttccccaaagctagcaaatgacaccaaggggacaattgaggcagcaaaatggcttcataatatggtt

SEQ ID NO: 11092 - DNA, 380 bp, Glycine max
  Clone ID: LIB3092-012-Q1-K1-D12
tcgggccaaccacctatcagatttcccttcaaactcatctatggaattaaagatgaatgtggtgatccgtggttttgtctatattgtactcaaaaacatgagactatgcttgctctctcctccgtaaaactccaagtcagttacataaactacgaaaatcatgaaattgtgttgaatgacccggaaaattgccttccgcacaagtttctgcaaatcaacgattctcttattcatccttacaaatttgacgatgaagctaaaacaagtaagttgagcttcttcaactgttcttcaattgagcatcaacacctgagaaactaccagcagtcacttgcagactcacaagacatgatcttctgtcccaattatgtttctgatct

SEQ ID NO: 11093 - DNA, 146 bp, Glycine max
  Clone ID: LIB3092-012-Q1-K1-B10
cttcgaacccattctcgctgaataatggcctggggtccttaagccttgccaggattcaatggttggtggaagaaaaatgggtccttccaccttgaattgtaggcggttggctgcctttcctggtaaccccaaaggattggttacca

SEQ ID NO: 11094 - DNA, 376 bp, Glycine max
  Clone ID: LIB3092-012-Q1-K1-B11
aatacccagccggacgcacgcgtacgctagaaccaattcacatcaatacaataaattttaaggcgctaatgatcacaataggatttgaacccttacccggactacttttccccgacatggctgcctattaagtagaagatgctgaaaaccttctactaatgttatctcccttataaccacaaacctttcactttataggtcaattcctcatcatgcttcaatctaataggatcatgaacaaattatggcagaattaccacaaatgattaacacacgaactactacgccaacatatgctgatactatgtcagccctatcacgcataatatcagtacaaagttccactacacattctatgttaaacatcatcattatt

SEQ ID NO: 11095 - DNA, 356 bp, Glycine max
  Clone ID: LIB3092-012-Q1-K1-B3
cttgtttctctcataatctcatcattggtccaacatagcccagcctaaaatttaagtaggagaagctagcactagctagttaggtttaatttctgtcttgtaattgagacaatttatgaaataaccgcacaattgattcatgatgaagaagagagtagcaagcaccagcaatgagtcctctaaacttgatcgcaaaaccattgaaaggaaccgcagaactcacatgaaatccctctgccatcagctttcttctcttattcctcccaatctcaaaccagtcaaacccaagttgatgctagggcttcaggaccagctggatcttgcagcaaggtatataagacaaatgacagagagag

SEQ ID NO: 11096 - DNA, 429 bp, Glycine max
  unsure at all n locations
  Clone ID: LIB3092-012-Q1-K1-B4
ttcttatgcaactatagtgaggctaagagattggtccataattaatcaaaatgttggctgtattccacaaagcttttgctcatccacctgaagagctcaacagccctgcatcttacaaaggttccaagaagcctaaggttcccgaggaaactctcaaagatttcctttcccaccatcctcacaacacttgctctatgagctttggtgatgctgctgttctagcttatgtccgtcctgatcaatctttctctcgtcatcaaaggctgttttgtgggatcgatgacatatattgtctcttcttggggagcttgaacaacttgtccctactcaacaagcaatatggattgtcaaagagtactgatgaggccatgtttgttattgaagcttacaagacactccgtgaccggngtccataccctgcagatcaag

SEQ ID NO: 11097 - DNA, 250 bp, Glycine max
  Clone ID: LIB3092-012-Q1-K1-B6
gctaaaagattttccattattaatcaaagttactggttccatgaacttttttcatccacctgacagcttaaaaccctcattttacaaaagttccaacaaacctaagttcccgagaaactttaaaaattccttttccaccattctacaacacttactctagacctttgtgatacctcttatctacttatgtccgtcctgatcaatctttctcttctcataaaatgcttttatctaggatcgattacatata

SEQ ID NO: 11098 - DNA, 412 bp, Glycine max
  Clone ID: LIB3092-012-Q1-K1-B7
gttcttttgcactttgggaagcatctcatatggttctatcagttctagatggtcgctggatccgatgctcagattgtatttttggtttccttcaatgttttatcttcttcaatattctggcagttgtcttatacttgttttgtttacttgaattgttaatgtggcagagattctttttggaaaccaaaaatacaatctgagcactgagtcgcaaattcagggtatctggcatccccatgcttgtggccattgcatcaagtggtcagacattgacaacaaaagctcgagatctggtttcactctatggagcagatgcatatcctttcaccgaggagagaataaaagaaatagagacagaacaagaagagactgccaagggggtggccggagaaactgaagcatgaattacatg

SEQ ID NO: 11099 - DNA, 277 bp, Glycine max
  Clone ID: LIB3092-012-Q1-K1-B9
tcgagcctatgttctatgaataacaactgtagatcatattgcctagcacgaatgaagtgtctgttgaaagaacattgctctcttgaacatgacgtttaaagcgtttagtggctttccgtggcacaactaatgcatgtgtaactataatgaacttgatattcatttctcatgagatgagaacatcactacctacaaaaattctgtttgtactttaaacgtgctcaagcttgtagcgcaagtcatcaaatgctgggactaatattctatgcttactatt

SEQ ID NO: 11100 - DNA, 195 bp, Glycine max
  Clone ID: LIB3092-012-Q1-K1-C10
gtttggtttggttacttgctcgaatttcctcgaatcgcttaatttgtatttgatgagttggaccgcaacgcggaatctcttttctcgaactggctaactctcaggcaagtggttcggacgctgattccagcaacaagcggctggtgctcgcactgtatgacgccctaaactccggcgactccgacgccgtcgtca

SEQ ID NO: 11101 - DNA, 340 bp, Glycine max
  Clone ID: LIB3092-012-Q1-K1-C12
ggaaagtttaaggccactgattcttccctttcgactgttccgggctacgatgtagctgagttggttttgaaggttggtagtcaagtgaaggactttaaagtgggtgatgaagtgtatggagatgtaaatgataaagcactagaaggacctaagcaattcgggtctttggctgagtacacaactgttgatgagaaattgttggcatcaaaaccgaagaattattacttttctcaatctgcttgtttttctctagcaattgatactgcttattatggttaggagaggacttgattttcttcttgtaaatttatttttgttctaaataattctagtttaattt

SEQ ID NO: 11102 - DNA, 235 bp, Glycine max
  Clone ID: LIB3092-012-Q1-K1-C4
aacactgtttctcttctctgatccttcccgaatatatggatcctcctcaattattagatcacacaaaaaattttttatccccttctacatactacaaataatttctaatatcattaatttattcattataaatttaccctttcatctatcattataaattattatatattctacccacacccatctatttactactcacactctatttttcataaataatatacactatttcatt

SEQ ID NO: 11103 - DNA, 412 bp, Glycine max
  Clone ID: LIB3092-012-Q1-K1-C5
gctgatttcatcacctcgctctcctctcccaaacccgtcaccgcccaaccgtccgttgcgacgtggtggaaagccaccgataaatactacaaaaactcgtcccccaaactcgctctttccctcggcaccacccaaatcctggacgagaattactccttaggcaaatcgcttacgaataaccaaatcttaaaacttgcatccaagggtccacagagaaacgctatcaacattgttctcacttctgctgacgtggcagtggaggggttctgttccagtaggtgcggaacacacggatcctccgtgggggcgcgcgtgaacggaaagagatacaagttggcgtacatttgggtgggtaattcagagacacagtgcccgggtcaatgcgcgtggccgttccaccaacccatttacg

SEQ ID NO: 11104 - DNA, 389 bp, Glycine max
  Clone ID: LIB3092-012-Q1-K1-C6
cggacgcgtgggatttaaaaaaacactgtttctcttctctgtacctccccctatatattgctccccctttattattagagcacagaaagaatttctgtgcctgttttgattagaagggaggagggagaagaagaagaagggagggaatagaaattaacccagtgtttgatcaatttgtatggttcaagattgaacacataaaatggcggttactactcgcactctatctgccacagaaaagaaacactggtggcttaccaaccgaaaggtaagattgtcgagaaatacattaaggatgcaaggagcttaatagcgacgcaagatcagagcgagatagcttcggctctgaaccttgtagatgcggcactggcgatttctccgaggtttga

SEQ ID NO: 11105 - DNA, 405 bp, Glycine max
  Clone ID: LIB3092-012-Q1-K1-C8
cggacgcgtgggcggacgcgtggagtttcgctgtctctcccatcctttcgcattctcgagacccttttgatttgtgaaaggaaagcaaacatggttgatcaggtccaacaccctacaatcatggacaaggttgctggtcagctccatctccgttctggtctttcatctggtattagaagttatgatggagcctaccgccacccagctatgtaccaaagaccctcttttgggaattactcgaatgctgcattgcagtttcctgtgatgcccacatgcaaagctaccatggatttgtctgctactgcaacatctgcctcacccgtctttgttgctgctccagcagataaaggccattttcttttagactttctcatgggaggtgtttcagcagctgtctccaaaact

SEQ ID NO: 11106 - DNA, 425 bp, Glycine max
  Clone ID: LIB3092-012-Q1-K1-C9
gtttggttaggttacttgctcgaatttcctcgaatcgcttaatttgtatttgattagttaaaccgcaacgcggaatctcttttctcgaactggctaactctcaggcaagtggttcggacgctgattccagcaacaagcggctggtgctcgcactgtatgacgccctaaactccggcgactccgacgccgtcgtcaagatcgtcgccgtcgacctcgagtggtggttccatggtccgccctcacaccagtttttgatgcgcatgctcaccggcgactccgctgccgacaactccttccgcttccttccgcagtccatcgtcgacttcggctgcaccgtcatcgtcgagggctgcgacaccgaccgcaacattgcctgggtccacgcctgcaccgtcacggatgggataattactcagatcagagag

SEQ ID NO: 11107 - DNA, 365 bp, Glycine max
  Clone ID: LIB3092-012-Q1-K1-D1
aacaaaaacaaagaaaaaaaaaaacccttagccaacacaaccatcatggccacctctgctgttcagcagtcagcattcactggtcaaactgctctgaagcagctcaatgagttcgtccgcaagaccggtggcgccggcaaaggtcgcactaacatgcgccgcaccgtcaagagtgctcctcagagcatttggtatggccctgaccgtcccaagtacttgggtccattctcggagcagattccatcatacctgaccggagaattccctggtgactacggatgggacactgctggattatcagctgacccggaaaccttcgccaggaaccgggagctggaagtgattcacagcagatgggcaatgct

SEQ ID NO: 11108 - DNA, 316 bp, Glycine max
  Clone ID: LIB3092-012-Q1-K1-D10
aattccgggtacgacgcacgcgtacgcgtaagtccaaggccactgatactacgctttctactgatccagtctactatgcgggagcggctaacattcaaggatggtagtccagtaaatgactgtacaaaatgctgatgcagtaatgctgacgtccataatgctacactaaatggcactattactaacgctacatatgcatattacacaactgatgcagtgtaaaaggtgtcatcacatccgaataattttgactgatctcaatctaaagctcattctctaacaattcagactgcatatgatgatgaccagaggactg

SEQ ID NO: 11109 - DNA, 473 bp, Glycine max
  unsure at all n locations
  Clone ID: LIB3092-012-Q1-K1-D11
cttatttccaacccttctcattatttttttcttctctgttgactcaaaaacaatactatgtctatcactcttaccattaatcaatcatctccctccgatcttaatttcttccatataacgagagagagagagagagttaattagttttcctgcaacttcaacttttgttatggccaaccggtggtggaccgggtcggtgggtctagagaactctggccactcgatgaaaaaaccggatctggggttttccatgaacgagagtacggtgacggngaaccatataggagaagaagatgaggacagagaaaacagcgacgagccaagagagggagctattgacgtcgccaccacgcgccgncctaggggacgtccaccgggctccagaaacaagccgaaaccgccgatattcgtcacccgagacagccctaacgcgctgcggagccacgtcatggagattgccgtcggagccgaca

SEQ ID NO: 11110 - DNA, 438 bp, Glycine max
  Clone ID: LIB3092-012-Q1-K1-A9
ctgcttcatataaccaaactcttcactctgcttctgcttctttggaaagcacttaaccagactctctgtttcagcttcctctgttttttgggtacgaacagagtttctctgtttttgacgatggccataaaggcgattgaactgttgaaagggtgcggatcacaagaagaaataatggaagtgcttgctgcggtggcttcggatttgggggatgtgatcgatgatgtgaacaccttgcaggtgattccactgaatggtgcaatgaccaatgaagtttttcagataaactggccaaccaaaaatggtggtgagatcagaaaggttctggttcggttatatggggaaggtggtgaagttttctttgacagggaagaagaaattcgaaactttgactggatttcaaagcatggtcagggtccacgccttcttggccgattc

SEQ ID NO: 11111 - DNA, 446 bp, Glycine max
  Clone ID: LIB3092-011-Q1-K1-G9
ggaaaatgttgagcttcattctctaatgaggaagttttgtatactctcttaaaagtgcatgggtatcatcctgagctatatgctatacaacattaaggttttgttccacatctgaagtaactctgttatttgccaaacaattagattcagcagtaaaaacatgaaacgtacgtcaatataaattgaacattgcggttacaaagacgacttgacgtgacatctacattgcatggcctagaatgatgttactagaaatgaaacattgcatgacctagaatgatgtgcataatagtgaagaggataaacaagtagtggtaggattgaaaatgacgggtgttgaatggtcattttaggttctacattatgtatgtgatcaacaagcaatgctattacactaaaaaagccacccaccaactcaataaacaccataaatgaagacgatcaac

SEQ ID NO: 11112 - DNA, 324 bp, Glycine max
  Clone ID: LIB3092-011-Q1-K1-H1
cgacccacgcgtgcgcccacgcctcctgattttctattacatatatctacatttttcttctataatcaaaaacacgggtttgtcgtataaggatgtactgtccccactcactggtactgttcttaatatatcgactcagaaatgaaacattgcaaaacatgagactgaattaattggtaaaactacattgtaatatctcaaccacataatggatagactatcttcacatttcctctccaacttgaaatgattgaaccttgttccactgtcataatacagtataggatatatcatgaatttatacccttactataaatgactcat

SEQ ID NO: 11113 - DNA, 454 bp, Glycine max
  unsure at all n locations
  Clone ID: LIB3092-011-Q1-K1-H2
cccacgcgtncgattctctttgcgcagttccctacctctcctttcaagatgcagatcttcgtcaagaccctcaccggaaagaccatcacccttgaggtggaaagctctgacaccatcgacaacgtcaaggccaagatccaggacaaggaaggaattcccccggatcagcaacgtctcatcttcgccggaaagcagctcgaggacggccgtaccctcgccgactacaacatccagaaggagtcaacccttcaccttgtccttcgtctccgtggtggcatgcagatcttcgtcaagactctcactggcaaaaccataaccctagaggtcgaaagctctgacaccattgacaacgtcaaggccaagatccaggacaaggagggaatccccccagaccagcaacgtctcatcttcgccggaaagcaacctgaggacgggcgcaccctcgccgactaca

SEQ ID NO: 11114 - DNA, 436 bp, Glycine max
  Clone ID: LIB3092-011-Q1-K1-H3
aattatttccaggtgggacgataggatgtcagcatctataccaaacgaggaggttttctacacagttggatttttgcactcaagtgggtttgatacttggaaagcatatgatgctcaaaacagtgaaattttggagttctgtagagatgctggcatcaaggtcaagcaatatcttcccaaccacagcacacaggaagattggacaaaccattttggtgctaaatggataaaattcttagaaagaaaacatcagtttgatccaagaatgattctatcaccagggcaaaaaatcttccacaaacaattacagccagcgttttaaatatttcccctaattaaaaaaagtaaatgttttatggtgggactaccccatttagatggctacctagggacaggtgtaaatacaatgagaccaagaccaagatggctttaattt

SEQ ID NO: 11115 - DNA, 443 bp, Glycine max
  unsure at all n locations
  Clone ID: LIB3092-011-Q1-K1-H7
ttcagaggcaacaaaggagttgtaaattaagagcatggctgcacaagctcttgtatcatcgtgatctcttaccttctcagccgaggctacaagacaaagtcttggaccaagatcactccaatctccatttggcttctcaagaaaagcctcctttcttgttaaggcagctgctactccccctgtcaagcaaggatcagacagacctttgtggtttgcatcaaagcaaagtctttcctacttggatggcagccttccgggtgactatggatttgaccctctgggactttcggaccctgaaggaacaggagggttcattgagccgaaatggctagcatatggtgagataatcaatggtcgttatgcaatgttgggtgcagttggtgcaatagcacctgaaattctangcaaggctggtctgatccctcaggagacagcactcccat

SEQ ID NO: 11116 - DNA, 293 bp, Glycine max
  Clone ID: LIB3092-011-Q1-K1-H8
tcgcacacgcgtgcaatgtacgagatacattatcaccagctacccgctatcacagcatcggagggggcttctacagacaagcctacttgtaaaccttaatacataacatcttcaactccatctcctgcttattttaattacattaaatatgatgttatgctaagggttatatagttttcagcatcactggtagctgctggcaaaatcataaatgctaataaaacagacattattcacattctaaacgctgttccatgggcaaacaacgacatatactcaccaccctttgttta

SEQ ID NO: 11117 - DNA, 442 bp, Glycine max
  Clone ID: LIB3092-011-Q1-K1-H9
ctccaatgaatattggaaatttaactagataatctatattgaactttaacgcaaagggtcattatgcaaattaataaagtgtaacttcaattctaattagataacaacaataaaatcctcagaaaaactgtacatatgttttatccttcaatgttttgctgcatttgaacgcatttacttttgttatggtaattttattttaaaattataatattctgaattttacgtttatgttgaattatttgttgttttgtattatgttcaaaccttaactttattagctgtaaagggtacatatttgctgttgttaaattgttatgattcgaatgatgtagttgcaaatgttcaattttgcatgtaattgttggtttgatactatgcagttgtacactggagatttgcaaaagcgcattgggataacatctggtatctgtattttgat

SEQ ID NO: 11118 - DNA, 388 bp, Glycine max
  Clone ID: LIB3092-012-Q1-K1-A10
ctagaaactgaggacttagctagtagttagagatgcctgagttttgcgtgacaggtggtactgggttcatcgcatcttacctggtcaaggccttacttgagaagggtcacacagtgaggaccaccgtgagaaacccagtggatgtggagaaggttggctttctgactgaactaagtggagccaaagagagactgaagatcttgaaagcagatctattagtggaaggaagctttgatgacgcagttagaggagttgatggtgtctttcatatggcgtaccctgtgcttattccttatgatgagaacgttcagcaaaattcgattgatccctgtataaaatgaactttgaatgtgcttaactcttgtgtcaaagcaactgagaaacattt

SEQ ID NO: 11119 - DNA, 393 bp, Glycine max
  Clone ID: LIB3092-012-Q1-K1-A11
tagacgtacgcgtccgcataaggatctggctgaaaagtatgatgtgagtggatttcctaccttgaagttcttcccaaagggcaacaaagctggtgaagagtacggaggtggaagagacttggatgactttgtggcttttatcaatgagaaatctggaacaagtcgagatgtaaaaggacaacttacttcccaagctggtatagtagaaagcttggatgtcttggttaaagagtttgtagctgccagcgatgaagagaagaaattcgtgtttacccgaatggaagaggaagttgagaagctgaagggttctgcctcaaggtaacttaaataaacatcatgcttctaaaacatttgctttgagttatgtcacttgagaataggttaatttgcatt

SEQ ID NO: 11120 - DNA, 317 bp, Glycine max
  Clone ID: LIB3092-012-Q1-K1-A12
gcactttgttctatggagaacaaggttagagaacatgctcgaaaacttttggagaaacacttgaagaagcctttctttaatgaacgttacggtgaaagtgttgaacggatgagtgtggaggaatttgaacagggcaagctctggttaagtgatactttctgtctcataaggtgtgaagataactcccttccaaatataagttgggttcttgatcttgcaaaagctgctgtattaaggcatggggtgcgtggacttagaattgatccttacaatgagctggatcatcaacgaccccaataccagactgtaacagaata

SEQ ID NO: 11121 - DNA, 209 bp, Glycine max
  Clone ID: LIB3092-012-Q1-K1-A2
ttctattcaattttctcttacttgtattatccaaactacaccttatggttctcaagcataacattcatggaatcaccaatccctctattctccgtactgtccatacttgatgtcgtcaagcgtatcaatgttcttatctattaataaactctctgtgttctcaatatctttctatagaacgtccattctctaactctttcaccctacac

SEQ ID NO: 11122 - DNA, 429 bp, Glycine max
  Clone ID: LIB3092-012-Q1-K1-A4
acgttttcaagcgaccaaacgtttcaaacctaggaagttggaagtcatggcagcaacattgatggcagcagcaagttctggcactcttaaagcaactcctttcctaggccaaggcaagggtgccaatgccaatgctcttagggatgttgtttccatgggaactgggaagtacaccatgggcaatgatttgtggtatggaccagacagagtgaaatacttgggacccttttcagctcagaccccttcatacttgaaaggagaattcccaggggattatggatgggacactgctggcttatctgctgacccggaagcatttgccaagaacagggctcttgaggttatccatgggagatgggccatgcttggagcactaggatgcatcaccccagaggtgctagagaagtggttgagagtggacttcaagga

SEQ ID NO: 11123 - DNA, 421 bp, Glycine max
  Clone ID: LIB3092-012-Q1-K1-A5
ccaaaatccaaacacactctctctccccatggcgttgaacaatggcgtccgcgccaccggggccggcctcatcgtcagcttcggtgagatgctcatcgacttcgtccccaccgtctctggcgtgtccctggccgaggcccctggcttcctcaaggcccccggcggcgcccccgctaacgtcgccatcgccgtgtcgcgcctcggcggcaaagccgccttcgtcggcaagctcggcgacgacgagttcggccacatgctcgccggaatcctcaaggaaaacggcgttcgcgccgacggcatcaactttgaccagtgcgcacgcactcgcctggccttcgtgaccctacgcgccgacagtgaacgtgagttcatgttctacagaaaccccatcgccgacatgctcctcaagcccgaagaactc

SEQ ID NO: 11124 - DNA, 386 bp, Glycine max
  Clone ID: LIB3092-012-Q1-K1-A6
cccacgcgtccgcccacgcgtccggtatattcattttagcatcaaggttgaatctcagagaaaaagaaacatcgacaagcatgtctggaagaggaaagggaggcaagggtctcggaaagggaggagccaaacgacaccgtaaggttctgagggataacattcagggaatcaccaagcccgcgattcgccgtctggccagacgtggtggcgtcaagcgtatcagtggtcttatctatgaagaaactcgcggtgttctcaagatctttctagagaacgtcattcgcgacgctgtcacctacactgaacacgctcgccgcaagaccgtcactgccatggacgttgtttacgccctcaagaggcaggggaggaccctctacgggattggc

SEQ ID NO: 11125 - DNA, 409 bp, Glycine max
  Clone ID: LIB3092-012-Q1-K1-A7
cccacgcgtccgcccacgcgtccggtatattcattttagcatcaaggttgggtctcagggaaaaagaaacatcgacaagcatgtctggaagaggaaagggaggcaagggtctcggaaagggaggagccaaacgacaccgtaaggttctgagggataacattcagggaatcaccaagcccgcgattcgccgtctggccagacgtggtggcgtcaagcgtatcagtggtcttatctatgaagaaactcgcggtgttctcaagatctttctagagaacgtcattcgcgacgctgtcacctacactgaacacgctcgccgcaagaccgtcactgccatggacgttgtttacgccctcaagaggcaggggaagaccctttacggatttggcggttagacaattggggatttcag

SEQ ID NO: 11126 - DNA, 307 bp, Glycine max
  Clone ID: LIB3092-012-Q1-K1-A8
tctaacactcgttcgttatattcaatttaacatcacatttggagctcaccgaaaaatttacattgtcaagcatacttctaacataaaacgaagccaagggtattcatacacgatactatccaaacatacatcctttacagttctaactgataacatctccataatcaccaatccctcgattcgaccactcaccatacattacttcgtcaagcttatcactgatattatctattaacaaactagcgaagttctcaagatcttactatagaaccacattcgcgacactttcacctacactgaacactct

SEQ ID NO: 11127 - DNA, 430 bp, Glycine max
  Clone ID: LIB3092-011-Q1-K1-G7
gggcagcctatcaaaggtaattgggcatatgtttgtggtcagagagaggatacgtggggtgactacaatatatttgttggcgatctaagtcctgaggttactgatgctacgttgtttgcatgcttttctgtctatcccacatgttcagatgcaagggttatgtgggatcaaaagactgggcgttcaaggggatttggatttgtttcattccgtaaccaacaggatgcacaaagctctataaatgatttgactggtaagtggcttggaagtagacagatacgttgtaactgggcaacaaaaggtgctgggggttatgaagagaagcaaaactcagatgcaaaaagtgtggtggaacttacaaatggctcatctgaagatggtaaagagacatctaacagtgatgctcctgagaacatccttaaaatactac

SEQ ID NO: 11128 - DNA, 450 bp, Glycine max
  unsure at all n locations
  Clone ID: LIB3092-011-Q1-K1-E5
cccacgcgtncgactggttaccattttgtataccatgttcactctggaagctttaattatgttatgggcatggaaaattttgttgacagtgccactgtttattgtgattttgacgtgtaaatggagaaaaagacatttgtcaatgtttgaaagtattgaaaattatctagaacaaaataacttgatgcctattagatattcatacaaggaagttaagaagatggcgggaggttttaaagacaagttgggtgaaggaggatatggctctgtgttcaagggaaaattgcgtaacgggtcttgtgtggcaataaagatgttaggttaatcaaaaggaaatggccaagattttattagtgaagttgcaaccattggaagaacatatcatcaaaatatagtacaattaattggattttgtgttcatgggtcaaaacgtgctcttgtctatgaatt

SEQ ID NO: 11129 - DNA, 248 bp, Glycine max
  Clone ID: LIB3092-011-Q1-K1-E6
ggaaaattttgggacagatagaaaagagattttagtgtcaatgaatgcttctgagctcatatctaggtcacaaagtttcaatcttgaaaatttgtttgagacgcagacacagggtgttgataggagatatatacttatgctcaaatgatatacatgtaatgatcacattccaactcactatgaagctgccgaacctcttggattctaatgacacaatggatattatatgatgaagaacctaaactgaa

SEQ ID NO: 11130 - DNA, 213 bp, Glycine max
  Clone ID: LIB3092-011-Q1-K1-E9
agcgccttatccatttctctacttgcgaagtgtacggaaagacgattggagcctttctccggaaagatagtcctcttcgtaaggatccggcatactatgttcttaaaaaaaaacaagcttcttggatttttgggtctaatggaaaaccaaagggggcttaatgcctgtccaaaccagtggatggaaaggttgattattgctaagggtgctgaa

SEQ ID NO: 11131 - DNA, 377 bp, Glycine max
  Clone ID: LIB3092-011-Q1-K1-F1
cccacgcgtgcgatctgatgtcgtcaagagagtattgtcaattgaagatccctctgcacaggatggggttcgacttgggataaaggactacccttatgctgctcatggacttgaaataaacaatgctattaagacatgggtacatgaatatgtatccttgtattacccaacagatgcagctgttcaacaacatactgaactacaaacatacaggaaggaagctgtggacaagggtcatggtgacttaaaagaaaaagcttggtggtctagaatgcacacaacttattatgtgatttcaatcatgctttattatcgtttggacagcttccgctatacatgctgctgttaaattttgaacaatattcttatgggggctt

SEQ ID NO: 11132 - DNA, 351 bp, Glycine max
  Clone ID: LIB3092-011-Q1-K1-F6
ggaaaatcttgtgacagagagaaaagagaaaccagtgtcaatgaatgcttttgagctcatatctaggtcacaaagtttcaatcttgaaaatttgtttgagaagcagacacaggggatagataggagttatataattatgatctaacggtatcatgctaatgttctcatttcaagtcactttgaaacttgtgaacctcttggattttaatcacacaatcgatgttatatgatgaagatcctgagctgaatgaacgggatgactgtaagcaattgactaacacaaatgctattgatagtgatatataattgaacatggaactactgatactgagctctgcattctgactgaac

SEQ ID NO: 11133 - DNA, 418 bp, Glycine max
  Clone ID: LIB3092-011-Q1-K1-F7
agcaaattaaagatatatatagacattcacatattaatcatcattaatttcagaggcgccggtttatgatgaatggtagtggcggttttatgatgctgacgcttaaatccggcggttttactgtggaagtcaacacccaaaagctgaaacgcactgacagtagacaaacgggcgtgttctctgtggaaaggatcatcacatactctgtggttggtatgcagcgacttctttcattgaagataactaaggtaatcaaagccgagaaagtgaacatagtaaatcttagcttcgcagaaaaatctggtaagagctctttagccaatttgaaactgcagataataagaaatgacaggtaccgagttctatgtttcatggacaatgaattatctgggtcgtacgaattgcgcaagataaacta

SEQ ID NO: 11134 - DNA, 52 bp, Glycine max
  Clone ID: LIB3092-011-Q1-K1-F9
aaaaccgggccgacccacacgtactatcaaattaatcataaaataaaacttt

SEQ ID NO: 11135 - DNA, 411 bp, Glycine max
  Clone ID: LIB3092-011-Q1-K1-G1
tggatcttcatcggacgctaaaacttcccaaattggttcctttcgggttccggaaaagcctcaagtttcgtctggggttggtaatttaactcaaaaacgcttcttggggaagccactcaatggcgaaaccgaacggaatgattctggtggtcctcttgcaacaactatcggtgctcctggagttgagaaagagaaaaaaaattttgagcaattagcgaaagaccttgaaaattcatctcctcttgagattatggataaggccctcgagaaatttgggaacgacatcgctattgcctttagtggtgctgaagatgttgctttgattgagtatgcacatttgacgggtcgaccctacagagtgtttagtcttgacactgggagactgaacccagaaacctacaaattttttga

SEQ ID NO: 11136 - DNA, 326 bp, Glycine max
  Clone ID: LIB3092-011-Q1-K1-G10
aaaaaaagaccgccccgctccggaaaattttacttattctctaattatttttttttatctctcttaaaagtgcttgtttattctaacttattcttacaacataaggttttttccacatcttaataactctttatttccaaacaattagattcaacataaaaacataaactacatcaatataaatttacattactgttcaaatacaacttgacttacatatacattgcatgtcctataattatattactataaatgaaacatttcattacctacaaatatcctcataatattgaatactataaacaaaaatttgtatgatttaaaat

SEQ ID NO: 11137 - DNA, 420 bp, Glycine max
  Clone ID: LIB3092-011-Q1-K1-G12
cgtgatggaaagtacaatctcatgtttgaggaatgggtgacagatagtccattcataatatcacctagaattacttttgaggtcagcgtgcgccttcttggagggctgatggccttgggatacacaattgcagctatcctgaaaagaagcagccatgtctttcatgatgataaagtgaccataaaaactgattggctagaacaacttaatcgcacctatgttcaggttcaagggaaagacagaaactattgtaaatttgtagcagagaaactggggttggatggttcctatgttcctcgcacttacattgaacaaatccagcttgaaaagcttgtaaatgatgtgatggcattgccagatgatcttaagacaaaactcagcatagatgatgacttggtttcaagccccaaagaagccctt

SEQ ID NO: 11138 - DNA, 413 bp, Glycine max
  Clone ID: LIB3092-011-Q1-K1-G2
gtgaaaaagggggagtttcttattccttctagacgcttccattgatcggcgatttctgatacatggcggagcatcacgaacacgaggaagtgaagggtgagtccttgttggagaagatttctgggaagatccacgaccacgattcctcgtcttcgtcggattccgacaacgacaaaaccagcgccactgattccttcaagtctaatgttttcaggcttttcggcagagaaaagcccattcatcatgttcttggcggtggaaaaccggctgatgtttttctatggagaaacaagaagatatccgcatcgacactcggagttgcgaccgctatatgggttctgtttgaattgcttgagtaccacctactgactttggtttgccacttcctgatccttgctctggcggggttgttc

SEQ ID NO: 11139 - DNA, 452 bp, Glycine max
  Clone ID: LIB3092-011-Q1-K1-G3
ccaacgcgtccgggggctttaatttcgtttccgaagcgacaggcagcacccactctctcttctcggcgcttccaaacatggaacgcatcgttggcggcaagtacaagctcgggcgcaagatcggaagtggatccttcggcgaaatctacctcgcgacgcatattgataccttcgagatcgtcgccgtcaagatcgagaatagtaaaacaaaacatccccaactgctttacgaggcaaagctctacaatattcttcaaggaggaagtggcattcctaacataaaatggtccggcatagatggggaggataatgtgcttgttattgacttgcttgggccgagtcttgaagatctctatgtgtattgtggaaggaagttttcattgaagactgtattattgttggctgatcaaatgatcactagaatagaatatgtgcattctaaacgattttta

SEQ ID NO: 11140 - DNA, 433 bp, Glycine max
  Clone ID: LIB3092-011-Q1-K1-G4
tggacggtttgggataaatggattctcggagacaatcctaccctcagggaacttctagagtggctgaaggcaaagggcttgaatgcttacagtatttcttgtgggagttgcctgctctataatagcatgttccctcggcataaagatcgaatggacaaaaaggttgcagatctggcaagggaagtagccaagtttgaaattcttgcgtaccgtcgccatttggacgttgttgtggcatgcgaggatgatgaggataatgacatcgacatccctcagatatccatttatttccgttagtaggttgctttcatcttgatagaggtgtgtttgagacttaagtgaaaaacgacagcatgtttgactctcatgcttcatattcataattgatacacaaaggcaacattatgtcaaatttcatatatgaattgaaaaa

SEQ ID NO: 11141 - DNA, 408 bp, Glycine max
  Clone ID: LIB3092-011-Q1-K1-G5
gcggcggggataagattaaagatgcaacaatggcctctgcttctgctactcttctcaagtcatctccttgtgttgacaagtgcgagtgggtcaaaggccagacccttcgccaacctctcgtgagatgtaacccttcctcagcatcagctctcaccatcaaagctgcttcctatgctgacgagctcgtcaaaaccgccaaaacagtggcctcaccggggcgtggtattttggcgatggatgagtcaaatgcaacctgcgggaagcgtttggcatctattgggttagagaacacagaagctaatcggcaggcataccggaccctacttgtgacagtacctggtcttggtgaatacatctctggtgccattctctctgaggaaactctctaccaatccactggcgatggaa

SEQ ID NO: 11142 - DNA, 336 bp, Glycine max
  Clone ID: LIB3092-011-Q1-K1-G6
caattgggactgaaattcaatggcacccacgaatttgcctgacacagaagattcttaagaaagcgcctaaaaagggttcaaagaatgctaaaccaattaccaaaactgaaaattgtgaaagcttcttcaatttcttcaacccaccgcaagttcctgaagatgatgaagacattgatgaagatgcggctgaggaacttcagaatcagatggaacaagatttttacttatggtcaacaataaaaaacaaaactattgcccatgctgtataatgatttactggggaggccattcatggggatgacgttctgacatttggcggatgtctatgattatgta

SEQ ID NO: 11143 - DNA, 453 bp, Glycine max
  unsure at all n locations
  Clone ID: LIB3092-011-Q1-K1-E4
ctctttagagagatagagagaggaagaaagaatggcagcttgcactgtctactcaacacaatctctgagcacaaattgctccatctcaaccccatcaaagacgcaactcagttttttccaccaaaagcaggtagttttctggaggaacagcaagaagggcagctgcagcagcagaagaagctatgtgataacatgtgcagcaggtgactcacagacagtggtgattggcctggctgcagactcagggtgtgggaagagcaccttcatgaggaggctgaccagtgtgtttggaggagcagcagagccaccaaagggtggcaaccctgactccaacactctcatcagtgacaccaccactgtcatatgcttggatgattaccactctttggacagaactggaagaaaggagaagggtgtcactgcccttgaccctagagccaatgattntgatct

SEQ ID NO: 11144 - DNA, 375 bp, Glycine max
  Clone ID: LIB3092-011-Q1-K1-C6
aagccttccgacccaccacctctaccaaaaccaggacctagtggaaggggaaaaggttagaacatcaaaccctgtcacgtgcacatccttcagagggaaaaaaagagagactgaactcattcatatgtatcctgactgcatgtctaattatcaccggatttcagagctggtatggcagaatgcccagctatgcattcaagggcttggttggcttcaatctactaaccctacttaagaaaagcccatatcatgtggagcccacgacacatgggagtctatcgctcaacatgccacgttacaacgttatcaatcgtcgaaattgactatggaagaaggccatgcccgttcttgtaatagtaaaaacaacaactccat

SEQ ID NO: 11145 - DNA, 305 bp, Glycine max
  Clone ID: LIB3092-011-Q1-K1-C7
gcctatcggaacaaccaaagcgagatctaatgcgaattctaagattttagggaatgggaagcggacattctatgtcaccctatctacgatcaacttgagtcggcgcacgtcttttgcctcataaatgcctcaccagtggaccagcttcctaggatcgatgctcaaataaagcacacatattgcgtgaatgaaaagtactctggacttgcacacaacggtgtcgatgaagagaaagatcttgatcagttcatgacccattatgttctgatgctctgtgcctataaagaacaactgtatcaatatgt

SEQ ID NO: 11146 - DNA, 358 bp, Glycine max
  Clone ID: LIB3092-011-Q1-K1-C8
ccttttcaaaccaaccaaaaatatttattattataattcacacattacaagccagggcccgggctcattcaatggcaccctacataccaacaaatttaaaacccccacctcttttacttcataaatttctaacataaaaaccttaatacatattaaccaaactattataaaaattacatattcccaaaaagataaggactcttatattttacacaacccaatacgataaagacatataacttcataattcaatcacccattcttatcttttgatctacaactctaaagaacaacttaactatcctctacatgtttattcaaaacatgcaatgattgctcatttttatctaaaacactc

SEQ ID NO: 11147 - DNA, 98 bp, Glycine max
  unsure at all n locations
  Clone ID: LIB3092-011-Q1-K1-D1
gtcacacntgagattaattgcgatatagattttgatagcttgcactgattactaaacacgggctcggaactcaaatagctcaatgttaactttatcaa

SEQ ID NO: 11148 - DNA, 190 bp, Glycine max
  Clone ID: LIB3092-011-Q1-K1-D10
accacacaaactaacataatatctttttttttaaaatcaatataacatatcttaaggcccgggtcttcacactcgtatccaaaaccacacaccattaaacaacccttattatctatttaattgacaataactgctatttactcttaaacccacattcctaatttttttataatttaaaaatttacctaaa

SEQ ID NO: 11149 - DNA, 447 bp, Glycine max
  Clone ID: LIB3092-011-Q1-K1-D11
gccaaaccaaattttctctctttcacttatttattgactccccaaaagcttttcaaatgtcggtgttcctctctcacgtaccttctccctatctttcactccacttcttaacaccacaaaacagaacaacggccgagcaaacaacaagaaaaatggtgttgttgtccaaagcaacaacagaacaatactcctacattaagaactgcatgccaaccaaattttcctcaacaattcccatagtgaacctctccaaacctgatgcaaagacccttatagtgaaggcttgtgaggagtttggattcttcaaagtcatcaatcatggtgtctccatggaagctatatccgaattggaatatgaagccttcaaattcttctctatgtcactcaatgaaaaggaaaaagtaagacctcccaatccatttgggtatggtagcaagaaaattggac

SEQ ID NO: 11150 - DNA, 429 bp, Glycine max
  Clone ID: LIB3092-011-Q1-K1-D12
gaaataatgtccgggatcatccacaagattgaggagaccctgcatgtgggagggcacaagaaagaggagcacaaaggagaacaccatggtgagcacaaaggtgaacacaaaggagaacaccatggtgagcacaaaggtgaacacaaaggagaacaacaccatggggagcacaaggagggacttgtggataagatcaaggacaagatccatggtgatggccatgacaagggtgagaaaaagaagaagaaggacaagaagaagaaggagcatggacatgaccatcatggtcatagcagcagcagtgacagtgattagatcttatatgttaagcaagtgtacggtacgatggtagtgaggagccagaatccctcttcctgctttatgatataatacaaataaaatagcgattccggaaatcatgtctgtagc

SEQ ID NO: 11151 - DNA, 122 bp, Glycine max
  Clone ID: LIB3092-011-Q1-K1-D2
gtgacacgtgggcttacttgccatgtaactggcgagaggtggtactgatgcctcaacgcagtgacggaggtgaatcagatcattggttgccttgacaatgactcacctggcctgtgtcaacc

SEQ ID NO: 11152 - DNA, 369 bp, Glycine max
  Clone ID: LIB3092-011-Q1-K1-D3
cccgactcaattacaccacgcttctaaattctgagaatgaattcgtaagatcgaagcaatagcctttttctctgccgccactggtttcgatcccacacccacaaacgcaaaccctccatcctttgaatgctcttgcgttttcctttcactacctcattcctaactcacacacacacaacgggtgatatcaatgtcgactcctgctaagaagaggctcatgagagatttcaagaggctgcaacaagacccgcctgcaggaatcagcggggcacctcaggataacaacataatgctgtggaacgctgtcatatttggtcctgatgatactccatgggatggaggcacgtttaagttgactctccaatttac

SEQ ID NO: 11153 - DNA, 433 bp, Glycine max
  Clone ID: LIB3092-011-Q1-K1-D5
cccacgggtccgcccacgcgtccgcttcaattcacaaaaaaacacacaaacctcttcagttcacaaagcacacaacctcttctaatattcgttttctgatctacgcaaggttaaggttaatttgcttctatctacatggacattaacgagatcgatgttccttcattctttctctgccccatttcgttagaaatcatgaaggatccagtgacggtctcaacaggcatcacctacgaccgtgaaagcatcgaaacatggctgttctcgaagaaaaacacgacatgccccatgaccaaacagcccttgatagattacaccgatctcacaccaaaccacacccttcggagactcatccaagcgtggtgtaccatgaacacttctcacggcatcgaaaggatcccaacccccaaaccccccattaacaaaaatcaaa

SEQ ID NO: 11154 - DNA, 225 bp, Glycine max
  Clone ID: LIB3092-011-Q1-K1-D6
ccctttcgaccgatcaattgtggattaaagtttgaatgctagcactgtatcctcaacacaggcttggagcacaaattgctccattacaaccccatctaacacgcacctcagttttgtccacctgaatctatctacattgtcgatgaacagaacgaagggcatttactctatcactagatgctttgtgataacatgttcagcaagtcactcacagacagtagagat

SEQ ID NO: 11155 - DNA, 209 bp, Glycine max
  Clone ID: LIB3092-011-Q1-K1-D7
atctttcttacgatccatagatgtttataattcggaatcttacactgtaaactaaggactgtgtttatacacaaacagcttaatttcaactatatctaaaacgcaccttcattttttttcacctaaatcaatctgtattgttgatgaacataaagaacgtaatttagattaagatcacatatttagtgataaaatgttcatcaatttac

SEQ ID NO: 11156 - DNA, 264 bp, Glycine max
  Clone ID: LIB3092-011-Q1-K1-D8
cccacgcgtacggactatgtatttttttagttatccctcccacaacacaagccaaggcccgggcttatacattggattggcactttacaccaataatgcaagcccgccgctgtctacctccttcacgtttgacactcaaggtcccgaaaccacaggatacctaactctgataaagatcacatattataccatatgatggacctgctttaggttacaaaaatgtgttgatgagtcatatcatcactgatggcaacagacgtttct

SEQ ID NO: 11157 - DNA, 218 bp, Glycine max
  Clone ID: LIB3092-011-Q1-K1-D9
accacgcgaacgaactatatatgtttataattataagtcacacaatacaagccaaggcccgggcttttacattgggtcggaacttgccactatatttaaagcgcgcggcttttttgctgcatgaatgtccacactaaaaacacgaacacacattatacctaacttatttaaagatcacatatttaccaaaaggtttggcccccaataggttacaaaat

SEQ ID NO: 11158 - DNA, 211 bp, Glycine max
  Clone ID: LIB3092-011-Q1-K1-E1
ctcactctagcgataaattgaggaataaagattggtatctagcactgactactcaacacagggtctgggctcaaattgctccatgtcaaccccatcaaagactcaactcagttttttacaccaaaagcaggtaatttttctgtaggaacagcacgaagggcatttgcactatcataagatgttatgtgataacatgtgcatgaagtgactc

SEQ ID NO: 11159 - DNA, 449 bp, Glycine max
  Clone ID: LIB3092-011-Q1-K1-E10
tcttcaacaagttcgacaagaacggcgacggaaaaatctctatggcagagctgaaggacatgctctacgcgctcggatccaaaacgacggacgaggagttgaaacgcatgatcgaggagctcgaccaaaacggcgacggtttcattgacctgaaggagttcgcggactttcactgcaatggcggcgccggaaaggacgactcgaaggagctccgcgacgcgttcgatctctacgacgtcgacaagaacggcctcatctccgcgaaggagttgcaccacgtgctccggaatctcggcgagaagtgctccctcagtgactgccggagaatgatcagcaacgtcgacggcgacggcgacggcaacgtgaacttcgaggaattcaaaaagatgatgactcgctcttaattaggtttaaatcaatagtccaataataagttcattgctcaaagg

SEQ ID NO: 11160 - DNA, 440 bp, Glycine max
  Clone ID: LIB3092-011-Q1-K1-E11
gtgaggcttctcttcttctttatcaatgatcatctctctgtgtcaggggtgaagttggttgcgtatgttcgtatttggttattgattggatcacactaatgttccactgcaagttttttgacatatattgttgacgggatatttcctagatggggggagcgtgttctaggaagcaagagcgggacaacaaagatagtcctaccagaggactatcacgaagatattgcaaaagcgggactttgaaatggtggacatcctctttttcttatccatctgtagattttcacctacgaaaaggagaatgtccaccactgttggacttgtgcatacagaaaataaatgaggatattgataaatataacacattttctatgctaccacgagatataagtcagctaattttcaataatttggtttactcccgacgtctaaccagtgct

SEQ ID NO: 11161 - DNA, 450 bp, Glycine max
  Clone ID: LIB3092-011-Q1-K1-E12
gccacgcttccgttcacgcgtacggatgtgtacatactcttataaatattaaatagcgctgggaataaagccaatcgaccaaacaacaataaaatgaaaaaagaaaaaactctgcattcaattctattgattcacaaattgcaactccttctcggctcttcctaatcatcacgaacacaacacagacacaaacacagagagtgacatggattttgaactgagaagagccagaaacaagctatagaaagagcagacgtagaggaatgatagagcaagactgaaacttcacaaggaaaagaaggtcaatgaagacgctcagaaacaaaacgataccatcgaagctgtcaaagatctcatcgtattgatgccgcacaagctcaactcaagtgctgccgacagaagcaagaaagcctacttgctggcacacgaataaacttttaccgactacta

SEQ ID NO: 11162 - DNA, 170 bp, Glycine max
  Clone ID: LIB3092-011-Q1-K1-E2
tcaaaaaaagggttagcttattttaataaatacatccaaccaacccgaatccttttaccgatgaacgtcttagaagatttcacagaacccttatctcttagttttcgacttttcggaaatatattagctgatgaattaggagatggcggtcctggttctttaggaccttt

SEQ ID NO: 11163 - DNA, 433 bp, Glycine max
  unsure at all n locations
  Clone ID: LIB3092-011-Q1-K1-C5
cccacgcgtccgattttttgtttcgatgctctctctcgcgaaacggcttcaggttcagccggtgacgacgccgattcttctcgggcagctccggtgggcccgaacgcggccgaagtcaccgtcggtggcgctgaagagggcagaggaacggtcagagtggtgggcggtggacggcgaagtgcacgagatcggtgatctcgggccgatacacgagcgctacatgattccccgagagaacatgcacaacaagcgccgcaggcagcttagagaacagttcatgcgtcgaacgcgcctagttattaaggaatccgagcatgatacttggtgcaaaacgtatatggtgctgtattatgaactaagagaaaactgggagaggctttattgggatgaggggtacactaaaaagcttgctcacgatcatgcanactatgag

SEQ ID NO: 11164 - DNA, 304 bp, Glycine max
  Clone ID: LIB3092-011-Q1-K1-E3
gctcctaaacattctctgcacccaaaccgtgtgattaatcgcgctgtttacttaacacaggcttggtgcacaaattgctccgtctcaaccccattatggacgcagctcacttttttacaccaaaagcagtatgttttctggagtaacaaccagacgggcaaatgcagcagacacaagaacctatgtgataacatgtgcagcatgagactcacagacagaggtgattggactgtctgcatactcagggtgtgggaagagcaccttaatgaggaggctgaccagtgtgctaggaggagcatcagat

SEQ ID NO: 11165 - DNA, 445 bp, Glycine max
  Clone ID: LIB3092-011-Q1-K1-A4
cggttctggtcttttttaaagtacctattggaaacctttttttttttaaaaaaaacccagcaggccaggttggtaaaggggtgaagaatggatgctataaggaagcaagcaagcaaattgagggagcaagttgccaggcaacagcaggctatacttagacagttgggccaaattagcaatgaaccgctcatgactgatgaatctgaaattgaatgtctccagcaacttcaaaagttatacacttctacaaagacagccaagcattttcagcggcatattgttcgtgctattgaaggattcatttctgttagctccaagcaaatggagatagtgaggaggatggcaagggactgctgtaagtatgggactgagaatctaagtagtagttacccccttgcaagggcttctcttcaatttggtaacacatacgatacaatggaaaatg

SEQ ID NO: 11166 - DNA, 354 bp, Glycine max
  Clone ID: LIB3092-011-Q1-K1-A5
gtttctgatctcttctaagttactattagaaaacctctctctctctagaaagacccagcaagtcaggttgataaaggcgggaagaatggatgctataaggaagcaagcaagcaaattgagggagcaagttgccaggcaacagcaggctatacttagacagttggtccaaattagcaatgaaccgctcatgactgatgaatgtgaaattgaatgtctgcaacaacttcaaaagttatacacttatacaaagacatccaagcatttttagcggaatattgctcgttctatcgaaggattcatttttgtttgctacaatcacatggagatactgaggaggatggcatgggacatgct

SEQ ID NO: 11167 - DNA, 247 bp, Glycine max
  Clone ID: LIB3092-011-Q1-K1-A6
gtttttgttcttttctaatttactatatcaaaacctttctctgtatagaaagacccaacaagtcagggtgattatgacttgaagaatggatgctataaaatagcaagctacctaattgacggagcaagttgacaaacaatagcaggctatacttagacagttggaccaaaatagcaaatgaacaggtcaagactgatgaatctgaaattgaatgtcttcagcaaaatccaaagttatacacttatac

SEQ ID NO: 11168 - DNA, 432 bp, Glycine max
  Clone ID: LIB3092-011-Q1-K1-A8
acctttttcaccttccccctttgtttctcaacatcattctcctcattcccctacctgcccccaattttcccttctgtatttctctttttcaattctcgatttcccttctcccttttgtgtcttcataatccagatcctctcttcgatctacggtttctggcttaattaacaatcaaatgtttaaggaagaatttctatgacgattcgcaaccccatgcgacgaatccggctcctccactccttctccgacgtcttcctctactggttctacgttttctcatgaactaactccctctcaatcccctaccctaattcctccaatttccccattttttttctaattaatcagatgtgcaaaatcctaatttctctatcctaacaaaaaccccaaattcaaacaaatccaatggcttcgattccgcgtacggcgag

SEQ ID NO: 11169 - DNA, 375 bp, Glycine max
  Clone ID: LIB3092-011-Q1-K1-A9
aaaaaaacccgggcacccaccgtccactttttaccttacaccttgtttttaacatcatctccaattccctacctgcccccaataaaccttgtgctttatctactaaattataatttccctctacctttttgtctaataatccagatactatcttctatctacggtatctagcttaattaacaatcaaatacataaagaataatttttatcaccattcgctaccccattcaactaatcctgcttcttcaactattattcaatcttttcatatatctcatctacattttattatgaactaacttcttctcaatcctttacacatatttctccaataaccccattttttttctaattatataaatcatccaaaatcct

SEQ ID NO: 11170 - DNA, 438 bp, Glycine max
  Clone ID: LIB3092-011-Q1-K1-B3
cggacgcgtgggcggacgcgtgggtgtttatgcaattggagatgtaattccaggcccaatggtggcacacaaggcagaagaagacggtgttgcttgtgttgagtacataactggtaaggtgggccatgtggattatgacaaagtccccggtgttgtctatacaatgcccgaggttgcatctgttgggaagacagatgagcaggtgaaggaacttggagttgaataccgtgttggcaagttcccgttcatggctaatagcagagctaaggcaattgacaatgctgaaggactggtgaagatattggctgaaaaggagacagacaagatattgggagtgcacattatggcacccaatgcaggagagcttattcatgacgcagcaatagcactacagtatgatgcatctagtgaggacattgcacgtgtgtgccatgcaca

SEQ ID NO: 11171 - DNA, 444 bp, Glycine max
  Clone ID: LIB3092-011-Q1-K1-B4
cgtcggtctttcattcttaaaacctggccgacaccaacaattctttccggttttctgttcctctggattcaggttcatttttacggttaccagaatgtccagctcatcggaatattcggcattttccggcccccgcccggccaagtcgccggccgagaagtccactttctctcagacttgtagtctattgagccaatacatcaaggaaaaaggtgccttcggagaccttaccctcgggatgactcgcacccacgatacttacggttcccctgagacatcgtgtcactctgcaacaaccatggagttgtttgccaccatcatcaagcaacggaacccaactactgtggatttcctatctccccagagtgcttatcctcaccactcagaggttccaaccatggtcaaatcaagtgcatttaagtctatagagaacgagcctaaagc

SEQ ID NO: 11172 - DNA, 385 bp, Glycine max
  unsure at all n locations
  Clone ID: LIB3092-011-Q1-K1-B5
tttctatttaaatttgccgaagaatccaattcatcgatctacgaagagctccatttggaaaaagaagcgaactgggtatccaattttcgaacactttcgatggggaatgatgcaaggtcacctcanggtccggttacgtgtgggtcgtggattcggaggcctgagaatttgaacttggtggtgttaggaaggtccagacgtggcaattcttgtccttctctcttggagattttctacttcgatcccaaaaccacttctgtgtctacctgtactctgaccacttatgtgttggaagcagaagaaggtgatcctgttgctattgcagtccacccaagtggggatgattttgtgtgcgctctcaacaatggtagctggaaattgtttg

SEQ ID NO: 11173 - DNA, 443 bp, Glycine max
  Clone ID: LIB3092-011-Q1-K1-B6
aaacaacatctactacaaaaacaggactattgggagtgggagggctagaacaacagatgcgtgcgcgtgcacaaccatcagagggaaagagagagagactgtagtaagtaatatgtttcctgtatgcatgtctaattatgaccggatttcagagctgatatgggagaatggccagctatccattcatgggcttggtgggcttcaacctactaaccctactcaagaaaagcccatatcaagtggggcccacgacacattggagtctatcgctcaacatgccacgttacaacgttatcaaccgtcaaaattcactagggaagaaggccatgcccctactagtaatagtaaaaacaacaactccattggtgcaccctattatggtggagaggttcaaggtgtgctatactcgacgaggaaaagaacatcgtccaatgctaacaaca

SEQ ID NO: 11174 - DNA, 114 bp, Glycine max
  Clone ID: LIB3092-011-Q1-K1-B7
ccaaaactgctgactgttttcgacttatcggtggcaaacaccccatagagtgtttggggcgctcacttaaattgcgtctcaatcttaaaacacagttttattgcacagcacttt

SEQ ID NO: 11175 - DNA, 208 bp, Glycine max
  Clone ID: LIB3092-011-Q1-K1-B8
cccacacatctctcaactaaaaaattatttttaaaacatactccataaaatcccttgcttgcttcattactggatattgctataaaaaaaactattttaaatgaattaaacataaactcacctaactcatcatacctaccttcatctaaatcacttaacacattttttttattacctcttttaccatactattaaaatcatatttaaa

SEQ ID NO: 11176 - DNA, 371 bp, Glycine max
  Clone ID: LIB3092-011-Q1-K1-B9
gctttctaaattcaacaggaatgaatattatcagaaggcacagaatgcagggggagggccgccatctttaactggaaaggaacatgccaatcttaataaaaagggtggcaactttaaggaaggaatgtctgagaattctgcatttccagacatggaccaacataataccaaagctgaagacacaaatcaaggcaagggcctaaataggctaaatcaggtagatgataaaggcatagctcgtaaaactgcatctgcaggagctagataaatgcacaaggatgctaaaaatgttcaaacaagtggttcacatagtattcctgcaaatggaaagaatgttggtgataatatggataatggagagctttaaaaat

SEQ ID NO: 11177 - DNA, 236 bp, Glycine max
  Clone ID: LIB3092-011-Q1-K1-C1
ctcgcccatacaataacaatgtactattcacacccctccacttgtccttctccgcccgccacgtcacctcctccgccgtaaccatgccctccttcgaagtcctcggcggcgcacgtgaccgttttctccctgttctcccccacttgtctcgcccctatcatgcttttcctcttctcgccgccaaccgccacatcgaaaccatcttcgcctccttcttccgctcagtccccgacgtc

SEQ ID NO: 11178 - DNA, 416 bp, Glycine max
  unsure at all n locations
  Clone ID: LIB3092-011-Q1-K1-C10
ggaaaacccggaacgaccgacgcgtccgactttctaaattcaacaggaatgaacattattataaggcacaaantccanggcgatgccccgcatctttaactggaaaagaacatcccaatcttaataacaaggctgacaacttcaaggaatgaatgtctgacaattctgcatttccagacatggaccaacataataccaaaactgaaaacacacataaaggcaagggcctaaataggctaaatcaggtagatgataaaggcatagctggtaaaactgcatctagaggagctagataaatggacaaggatgctcacaatgttgaaacaatgtattcaaatagtagttctgcaaaaggaaagaatcgtcgtgataatatggataatggaaagctttcaaaatcaaatgatcgtcttaaa

SEQ ID NO: 11179 - DNA, 57 bp, Glycine max
  Clone ID: LIB3092-011-Q1-K1-C2
gcgcagacacgtggccctactcttcatgtatgctttcgagaggacgatatataatgc

SEQ ID NO: 11180 - DNA, 393 bp, Glycine max
  Clone ID: LIB3092-011-Q1-K1-A3
acgcccacgcgtccggcctttgaagtttaaagaaaggctttcttggggtatctctctctgtgtggctaagataaaataatgagagagagagagagagagagaggatatggcttcgaagaggtatgcgctattgatgtgcggtgaggattctgagtacttggtgaagatgcacggaggcacctatggggtattgatgaaggagctcgaagagcaagaggaaaagtgggacctctacaagctcgtccaaggagagttctccggagcagcatgactggcctatctacgatggatttgacataagaggaagctgttatgatgcacatgccaatgacccatggatccttgacctgattgctctcgttatcaaatttgactacatgcacaagaagatcc

SEQ ID NO: 11181 - DNA, 441 bp, Glycine max
  Clone ID: LIB3092-011-Q1-K1-C3
acgcggacgcgtggtcggacgcatgggtgtttatgcaattggagatgtaattccaggcccaatggtggcacacatggcataagaagacggtgttgcttgtgttgagtacatagctggtaaggtgggccatgtggattatgacaaagtccccggtgttgtctatacaatgcccgaggttgcatctgttgggaagacagaggagcaggtgaaggaacttggagttgaataccgtgttggcaagttcccgttcatggctaatagcagagctaaggcaattgacaatgctgaaggactggtgaagatattggctgaaaaggagacagacaagatattgagagtgcacattatggcaccgaatgcaggagagcttattcatgaagcagcaatagcactacagtatgatgcatctagtgaggacattgcacgtgtgtgccatgcaca

SEQ ID NO: 11182 - DNA, 331 bp, Glycine max
  Clone ID: LIB3092-010-Q1-K1-F7
cccacgcgtccgcaaattgaaagatcttcaggaatgggctgggaacgacagatttataagagtgatgcctaataccccagcagctgttggccaggcagcatctgtaatgagcttggggggatctgcaacggaagaagatggaaatattatagcccaattatttgggtcaattggcaaaatatggaaagctgaggaaaagtattttgatgcaataactggcctgagtggcagtggtcctgcttatgtttatttagcaatagaagctttggctgatggaagagtagcagctggtttaccacgtgatctttcattaagtctagcttctcaaact

SEQ ID NO: 11183 - DNA, 86 bp, Glycine max
  unsure at all n locations
  Clone ID: LIB3092-010-Q1-K1-F8
ggaanacccgggcgcgaccgcacgcgtccgcccacgcgntccgcaaattgaaagtattttttttaactggactgtaaactacaaat

SEQ ID NO: 11184 - DNA, 381 bp, Glycine max
  Clone ID: LIB3092-010-Q1-K1-G1
cccacgcgtccgacaaaaggtaggtgaggaaaactttggacaaaaaatggagtgctacacaaggccaaacaggagtgacatccacctctcagcagaggaagaagccaccatagaagcaaagaccagagagtactttgatggagtcgcaccacaacgccacacaaagcctcaacgaagtgactattcagctcaatatgtcgatgctttctccaatgcccatcactcttctttaactataccagaattaacacaattccaactcctccagaatgatccccaagagaagaaattggtgtacaatggaagtcaagtaccggaagaatttgtggaaacagagtattaccaaaaatctaacagcgtggacaaacaccaccatacgac

SEQ ID NO: 11185 - DNA, 297 bp, Glycine max
  Clone ID: LIB3092-010-Q1-K1-G10
agtatgaagagaatctctcgatgtttgcatacatatgtgtctcaatggacaagtgcagtgttctgattccaatgaagcttcccattaaaagaagcaataatctctcaattcgcgagactagtaccaaccatccgtatgtcgccgctaacattggtcatcagaacctgaagactcgagtaggaaaaacaactgcaaccctgactggaatgaaaaattgaccctttctgtacaggacgttaaatcctcaaaacatatgacggtatatgacaaacacactttctctgatgatgacaaaat

SEQ ID NO: 11186 - DNA, 372 bp, Glycine max
  Clone ID: LIB3092-010-Q1-K1-G2
catgtttcctctccaactattgtaatcagctcacaggatgcaccatctgtgatcaagtatgcaaaaagccataagaagccaacagccaccatcaaatttcaacgaacatttgttggaataaagccagcaccagctgttaccatttactcttcaagaggtccttcaccaagctatcatggggtcttgaagcctgacataatggcacctggctctaatgttcttgctgcttatgttcctacagaaccagcagcaacaattggcaacaatgtgatgttatccagtggctacaatttgctgtctggaacatccatggcatgccctcatgcttctggtgttgctgctcttttgaaagctgcacacactaaatggagt

SEQ ID NO: 11187 - DNA, 412 bp, Glycine max
  Clone ID: LIB3092-010-Q1-K1-G4
cccacgcgtccgcccacgcgtccgactgtttcggttccatatcttcgttctgagtatgggaaggattatgaatatgaagctccagtcaagcttttggataaactgctgcattcaatgccacaatcaccggatgaacaacttgtcgtggtctctcaggtgctggtggctgatatcaacattggatatgaagattttgtgaacacccaggtccttgctttcaatggtcaaccagtgaaaaacctgaagagcttagccactatggtagagagctgcaatgatgaatatctaaaatttgatctagattatgatcagatagtggtgcttcgcacgaagactgcaaaagcagctactcttgatattctttcaacacactgtattccattcgcaatgtctgatgatcttaagtcatgat

SEQ ID NO: 11188 - DNA, 359 bp, Glycine max
  Clone ID: LIB3092-010-Q1-K1-G5
acacaatacagagtgagttgttgctccttcgccacaactctctgccaacatgggtatctgcagagattctatgcacaagaggcgtgccactggtggcaagaagaaggcctggaggaaaaagagaaagtatgagcttggtcgccagcctgctaacactaagctgtcaagcaacaagacagtcaggaggatccgtgttagaggtggaaatgtgaaatggagggcattgagattggatactggaaattactcctggggaagtgaagctgtaactcgcaagactcgtgtactagatgtggtttacaatgcctcaaacaatgagcttgtgcgtactcagactcttgtcaaaagtgctatcgttc

SEQ ID NO: 11189 - DNA, 321 bp, Glycine max
  Clone ID: LIB3092-010-Q1-K1-G6
acacaatacagagtgagttgttgctccttcgccacaactctctgccaacatgggtatctgcagagattctatgcacaagaggcgtgccactggtggcaagaagaaggcctggaggaaaaagagaaagtatgagcttggtcgccagcctgctaacactaagctgtcaagcaacaagacagtcaggaggatccgtgttagaggtggaaatgtgaaatggagggcattgagattggatactggaaattactccttgggaagtgaagctgtaactcgcaagactcgtgtactagatgtgtgttaacaatgccttaaacaatgagc

SEQ ID NO: 11190 - DNA, 383 bp, Glycine max
  Clone ID: LIB3092-010-Q1-K1-G7
gtttagctcaaataattttgtgaagcatttttattggtagaaatggagagtgagtcggtgaaacgcagaattcacatgattgctgctcactttgcacccaatgatgatatttcaactacccacgttctgcctatgaactgtagtggcagtctgaactctgtgctccggagatgtgataataaggtgtattttgcacgccaagcatctgcttctcttggttattttatgaggcagacttcaattgaagagggtggctcaactggctttattgctcccaaaacccatcctggtgctgctgcatctgaaggtccttctaatgcaagagcaccatgttttgctaaacctgcaagggcagaatcagtcttcacaaattcagtggtcca

SEQ ID NO: 11191 - DNA, 297 bp, Glycine max
  Clone ID: LIB3092-010-Q1-K1-H11
aacgccaattctgaaacttcttctccttcttcttcttcttttgtttctcttgtggacttgtacttcttctgaacatggaactgttgtctctgagactcaccccttcaccttcgagttcgacttcatcgcttcctgcagcacttgctcactgctccaagctatgtgaatttcagccgaggaagaagaagaaagcgtgcttcgacgcgcctaagcttgcggtgcggtgtgtgaaagcctcggcggagcgaaccggtgatacgatcgatgatggggaggctcgtaacgggttcaccacac

SEQ ID NO: 11192 - DNA, 313 bp, Glycine max
  Clone ID: LIB3092-010-Q1-K1-H2
attgttttcgtgtggaaacaaaaaaacaattcaaaaacaaacatatgatggtgaagccgagtagcgaaaagccagaggagcatagggattccaagtactacaaaggggtccgaaagagaaaatggggcaaatgggtatccgaaataagactacccaacagccgtcagaggatttggttgggatccttcgacacccccgagaaggccgcgcgtgccttcgacgccgcaatgttctgcttacgtggccgcaacgccaagttcaatttccccgacaacccacccgacatcgccggcggggaatccatgacgccgtc

SEQ ID NO: 11193 - DNA, 266 bp, Glycine max
  Clone ID: LIB3092-010-Q1-K1-H5
gttcattctctttgcgcagttccctacctctcctttcaagatgcagatcttcgtcaagacgctcgccggaaagaccatcacccttgaggtggaaagctctgacaccatcgacaacgtcaaggccaagatccaggacaaggaaggaattcccccggatcagcaacgtctcatcttcgccggaaagcagctcgaggacggccgtaccctcgccgactacaacatccagaaggaagtaacccttcaccttgtccttcgtctcccggggg

SEQ ID NO: 11194 - DNA, 319 bp, Glycine max
  Clone ID: LIB3092-010-Q1-K1-H7
cgccaatacaaacactcactcacgcgccgggacgcgcgtgcccccagacaaacgccgccgtcaaggtgcaaaaggtctaccggagttaccgcacacggcggaggttggctgattccgctgtcgtcgccgaggagctttggtggcaagggattgatttcgcgaggttaaaccacagcaccatttcgttcttcaatttgccaaaaagtgctgcgtcacggtggagtagggtcaaactcaacgcttccaaggtgggaaagggtttgtccttggacgccaaagcacaaaaattggttttcaacattggattgaagctattgat

SEQ ID NO: 11195 - DNA, 342 bp, Glycine max
  Clone ID: LIB3092-010-Q1-K1-H9
ctgttgtgcaacttgccatgcactttgacgttgctgactcctttcactttactgaggcaggagattttgggaccttaaaaagtaacaagtaaaaatgttaggcttacatgcaggctttggaagctaaggattctcagatcaaaggaatacaaaacattatgagttgacctttcgggcgacaggacaagagtatttattgtggggcctgtgctgtctggtggaaaaagaaattgttgggaatggttgcctctgcctgttgtgttgcttaattccactccacatgcttcattgatctatatgctgcatttggtggtttgctctgtaatgtaaagttaggtcatg

SEQ ID NO: 11196 - DNA, 53 bp, Glycine max
  Clone ID: LIB3092-011-Q1-K1-A1
gtccggctaatccctcactcttggtcttcaagctccttctattattcggcacc

SEQ ID NO: 11197 - DNA, 423 bp, Glycine max
  Clone ID: LIB3092-011-Q1-K1-A10
cccacgcgtccgcaagaacaaagagaggaagaaacgcgaatgaagggagaattagagttgccaccagggttcagatttcaccccactgatgaagaattggtgaatcactacttgtgtaggaagtgcgcgggtcaaccaatcgcggttcccatcatcaaagaggtcgatttgtacaagtttgatccatggcagcttccagaaattggctactacggcgagaaagaatggtacttcttttctcctcgggatcggaaatacccgaacggttcacggccgaaccgtgccgccggaagcggctattggaaagccaccggcgccgataaggcgatcggaaaaccgaaagcgctagggatcaagaaagctctggttttttacgccggaaaagcccccaaaggagtgaaaaccaattggatcatgcacgaa

SEQ ID NO: 11198 - DNA, 360 bp, Glycine max
  unsure at all n locations
  Clone ID: LIB3092-010-Q1-K1-F6
gtactttgcaaaaaccctaaaccctctctttctctctccgcgactctgtactcatcaatggcgacgcaatcgttagacgaagaaacaactaagaaagtcatacgacaggtcgagttttatttcggcgacagcaaccttctcaccgatggtttcatgaggaagagtatcactgaaagcgaagatggcatgattagtttggcgctgatttgctcgtttaatcgaatgcgaaaacaccttaatttgggtgatgttaagcccgatgaagtggcccaagaaaccgtgaatactgttgctcanactttgagaaattcggcttcactcaaggtctccgaagatgggaaaaaaagttgcaggaaaact

SEQ ID NO: 11199 - DNA, 340 bp, Glycine max
  Clone ID: LIB3092-011-Q1-K1-A11
cacgtggcagctgagttgagatatcaagcagaagaagcactctggttctgaggcgcaacctcgtcccaacaaccatggcggtccctgctacatcctcagcccctgtccttcgacccatccgcaccaatcactccttctcttcccctttccgctctctcccctctcccgccgccagaaaacccctaaccgtcttcgccatggcccccaaaaagaaggtgaacaagtacaatgataagtggaagaaggagtggtttggagcggggatattctacgaaggaagcgaagaggtggaggtggacgtgttcaagaagatagagaagaagaaggttttgagcaacgt

SEQ ID NO: 11200 - DNA, 435 bp, Glycine max
  Clone ID: LIB3092-011-Q1-K1-A12
cacgtggcagctgagttgagatatcaagcagaagaagcactctggttctgaggcgcaacctcgtcccaacaaccatggcggtccctgctacatcctcagcccctgtccttcgacccatccgcaccaatcactccttctcttcccctttccgctctctcccctctcccgccgccagaaaacccctaaccgtcttcgccatggcccccaaaaagaaggtgaacaagtacaatgataagtggaagaaggagtggtttggagcggggatattctacgagggaagcgaggaggtggaggtggacgtgttcaagaagatagagaagaggaaggttttgagcaacgtggagaaagctggcttgctctccaaggcagaggatttgggattcacgctctcttccatagagaagctcggcgtcttctccaaagccgaggagctcg

SEQ ID NO: 11201 - DNA, 123 bp, Glycine max
  Clone ID: LIB3092-010-Q1-K1-D8
taacatatcattactttttaataattattttttactcaactctaacaaaactatgcgcacgagtctcattatcctacttatctccaatcataatactattcccaatccacaatctcatttcac

SEQ ID NO: 11202 - DNA, 366 bp, Glycine max
  Clone ID: LIB3092-010-Q1-K1-D9
attccaaagccttttttcaggtttgatttcgaaagcgattttgagggaagaagaggatgaggccgatttttgctgggaacttggagtatgatactcgtcaatcagagctcgaacgcttgttcgcaaagtatggaaggattgaccgcgtggacatgaaatctggttttgcttttgtctattatgaggatgagcgtgatgcagaagaagcaattcgtgcacttgacaatgttccatttggtcatgaaaagcgaaggctatcagtggagtgggctaggggtgaacgtggacgtcatcatgatggatcaaaggcaaatcagaagccaacaaaaaccctgtttgtgattaactttgacccaatccgtacta

SEQ ID NO: 11203 - DNA, 434 bp, Glycine max
  Clone ID: LIB3092-010-Q1-K1-E1
gcatactttaagctcttgaacatttgagaaagaaaatagaggaatcaacagaaagaattcgtgtggccaagctaaaggaagaacaggcacggaaggtgtgggaatcagcatcaaaagtagtaagagatgaggaagcattaaagcaaaagttatgtgaagacttgagtaatctggttcaagagagcagtaactctcagtttgctcggctggaggaattaaaaagaagattggaagctttgaatccaactcgtgcatcaactaatctttatcatgatggaagatcaagagcgtcttctcaagatagtacaccccaacctggttcctctgttcccaatgcaaaagaaacaaatgaaggatcaaccgagagtgttcccaaccaaagtaatggtcagcaagttgcagtgcaaaatgggcctaatcagcagcctaatgaa

SEQ ID NO: 11204 - DNA, 443 bp, Glycine max
  Clone ID: LIB3092-010-Q1-K1-E10
cgttattctctctccgagcttcactctcttcgcctctgccaaagggagtaaaatggggtgctcctcctttctgggtcgtgttctctttgcctcccttttcatcctcactgcatggcagatgtttaatgaatttgatgccaatggtggacccatctcgaaagagttgattcccaaactcactgtggtgaagaaaaatttgtcctctaaattgggggtagcactaccagatattgatgcccggcaattcattgctactatcatatttcttaagggggtaggagggattttgtttgtgtttggcagcacatttggatctttcttactgcttttgcatctggcaattactactccacttctgtacgatttctataactatagacccggcaagcctaagtacaatcagctgctgaatgatttcttgctgaacacagcactttttgggg

SEQ ID NO: 11205 - DNA, 348 bp, Glycine max
  Clone ID: LIB3092-010-Q1-K1-E11
tgattctggattttcctatctcgtgagactccattttgctgaggtatcatcaaatataggcaaaagtaatcaaagagtatttgatatattcctcaataatcaaaccgctatgcctgaagctgatgttattgcctgggcaggcgaatttgacctttcacattctaatggggttccagtgcataaagattatgttgtatttgttcccaatggagaaccacggcaggacctgtggcttgcattgcatccaaatgaaagtaataagcccatgtattatgatgcaatcttgaatggagtggagatattcaaaattaatgatactgcacgtaatctggcagggacaaatactat

SEQ ID NO: 11206 - DNA, 321 bp, Glycine max
  Clone ID: LIB3092-010-Q1-K1-E2
agaaaatcaaagcccttgttttctccgtttttacaattgagggagcatggcaatgccatgggtgggatatgtaccctctgcgaatgaacactggctatgatgcccgtactccggaggtgaaatgcgcaagttgcaggcttgctgaggaagcacacaacatctttggctttgagaccattcctgaagagtgcgtcaaagcatcaaaggaatacatccatggcgaacaatatatatcagactccaaaacagataaccaacaagcttacttttatgccagagacctcgaagtacatcccaaggacacatttgtgttcagtatac

SEQ ID NO: 11207 - DNA, 424 bp, Glycine max
  Clone ID: LIB3092-010-Q1-K1-E3
gagagatgcaaaagccataaagatttttcttgaggatggtcatttaataggacttgctcagtcatatgcaaaaaatatgggactgtatggccagcgagcaggaagcctgagtgtgctttgtgaagatgagaaacaagctgtggctgtaaaaagtcagttgcagctgattgctagacccatgtacagtaacccacctctccatggagcacttatagtttctactgtccttggtgatccagatttgaagaagttatggcttaaagaagtcaaggttatggcagaccgcatcatcggaatgaggactacactacgagaaaacttagaaaagaaggggtctactttgccatggcagcatataactaatcaagatggtatgttctgctacagtggattgacacctgaacaggttgatcgtatgacaaac

SEQ ID NO: 11208 - DNA, 372 bp, Glycine max
  Clone ID: LIB3092-010-Q1-K1-E5
agataaatggggttcttgcgagtctccattacggttagggcaaggctcttaaagttataggtgggtgccactcactagggtttactctctcttcctttcgacatctttaatattgccttctacatactcgcacattttgaagacgtaaaacgatcgaaccctaaatatgcgccgactgcaaacattgaaacaagtttcatgggcctccgatttagatctttgtcaggataggctattcttatcagaggaatctccttcacaggttgggctaaattctcaagataacctccaagcaaaaacatcattgtcgctgcgtccaggttgagcacgttctgatgacattctgcctcctggatttgagggaactcatgc

SEQ ID NO: 11209 - DNA, 373 bp, Glycine max
  Clone ID: LIB3092-010-Q1-K1-E6
agatagatggggttcttgcgagtgtgcgttacggttacggcaaggctcttaaagttatagatgggtgccactcactagggtgtactctctcttcctttcggcatctgtaatatttccttctccatactcgcacattttgaagacgtaaaacgatcgaaccctaaatatgcgccgattgcaaacattgaaacaagtttcatgggcctccgatttagatctttgtcaggataggctattcttatcagaggaatctccttcacaggttgggctaaattctcaagataacctccaagcaaaaacatcattgtcgatgcgtccaggtggagcacgttctgatgacattctgcctcctggattagagggaactcatgct

SEQ ID NO: 11210 - DNA, 327 bp, Glycine max
  Clone ID: LIB3092-010-Q1-K1-E8
cacgtggtagtgctagggaagaagcagtattcactgagcttgaagtaatagatggagaggagtcgcaatttcttgcttagttctcatgtggcgccatccccacccgtcaaagtcaaagcacaggatattcgggtatgcaccaaccgcacctgcccgagacaggcctcaatttaaacccttaaaaccttttcttgccctccttcttccaaccttcccctgaaatccttccggtgctttgggccgttccgttgccggcccaaacttgtggtccttccttatggccttatcgttggccaatgccggaccgcttcttcggccgccgaagtt

SEQ ID NO: 11211 - DNA, 430 bp, Glycine max
  Clone ID: LIB3092-010-Q1-K1-E9
cccacgcgtccgcccacgcgtccgctctctccaatcagcggtgattttgtttatcagaggaggatctgatgtactcgctcgtggatctcaactatattcacgatcatgatggcccttgaaaattctgaaaatatgcaaataaactgtgaggcatctttaaaatgcctccagggcaagggatttccttgcaattttcagagtaatgggagttctatggaaggctttacagagcttaaaaatgagcctggtactcatccttctggggatgttgctgagcctaactgtcacttaagcagtgagtttcttgagccttccaatgaatttcacaccaaacctacttatcaccaaaattacagcacctggacaccctggcattttaactctcacaagtgcagcaatggccaatgaatgcttttgagaaccaatacta

SEQ ID NO: 11212 - DNA, 285 bp, Glycine max
  Clone ID: LIB3092-010-Q1-K1-F1
gaaagggtcaccggccgcccccgccaattgaaccctcctccctctttcctttctacaatagaagtgaattcccagagccaccggcccaaacgttctttggccatgtctacgtccgacgctggaggtgctggatccaatgattccaatgctaccaggagacaaagcaagagacccaagtactcaaagtttactcaacaagaacttccagcatgcaaacctattctcacaccaagagcggttatttcagcattcttgattgtcaccattgtgttcaatcccattgga

SEQ ID NO: 11213 - DNA, 381 bp, Glycine max
  Clone ID: LIB3092-010-Q1-K1-F11
tgcaaaaggaagacaaagtgaagcgtgataaccagactctcactaatttactagcggacggccatagagactacgttttgagtcacactcacacgggactcaaaaaggtacctgtagcttccctagtgggtaaaacaattggactctacttctcagcggaatggtgcgtcccatgcgccaagttcactcccaagctgatttccgtttacgagaagataaagcacgagctagccgaaaagggagaggaggacttcgaagttgtgctaatatccagcgaccgcgaccaagcatcctttgactcctactacagcaccatgccttggttggccttgcctttcggtgacccagagatcaagaacctcgttagacactacaacgtgc

SEQ ID NO: 11214 - DNA, 443 bp, Glycine max
  unsure at all n locations
  Clone ID: LIB3092-010-Q1-K1-F2
aaagggaataacggtaacggagatatggggcttctgtctaacagagtaactagagagagcctgagaccaggggatcacatctactcttggaggactgcttacatatacgctcatcacggcatttatgtcggcgatgacaaagtcattcacttcactagacatgggcaagaagtaggaaccggtactgcactagatcttctcctcatcagttcaggaccagccaagcctcgagaaagttgcccaacttgtacagcaccccaagaggaacacggggttatctcctcatgcatgaactgcttcctagctggtggcgttctgtatcggttcgagtatgccgttaccccagccctcttccttgcgaaagcccgcggtggaacgtgtactctngctgtctctgatgacgatgaatatggtcgtccatcggcaaaatatctgctcgaaaa

SEQ ID NO: 11215 - DNA, 384 bp, Glycine max
  Clone ID: LIB3092-010-Q1-K1-F3
gaaaatggctagtgtcttttctgcatgttcaggttctgctgttcttttctacagcagaaactccggtccctcaaaaggatctttcattcacctcaaaaggcctctctctgccaactgtgtagcttctttggggactgaggtatcagtgtctccagcagtagacactttctggcagtggcttaaagaagagggtgttgtctctgccaagaccccagtgaagcctagtgtggtgccagaaggcctaggattggttgcactcaaagacatttctaggaatgaggttgtcttgcaggttcctaagaggctgtggattaaccctgatgctgtggctgcttcagagattgggaaggtgtgcattggattgaagccttggttggctgttgc

SEQ ID NO: 11216 - DNA, 398 bp, Glycine max
  unsure at all n locations
  Clone ID: LIB3092-010-Q1-K1-F4
cccacgcgtccggactagttccagatgcattgatattccctttttttttcattctagttagtgagacggaaaggggtgaagaagattatagatccaattaagtattaaatatatgtaattaatatgtaattaatctcctcttctttatttcgtcttttatttcttcttttttttacaattgtaatagaataagttaggaaagagaaagaataagggttaatttggcctaattgaaattcggagtgaaactcgggatctcgtccaggcttccatggaattgaattaataattcaattccatttctattaataaaagagtgaaagcagaaatttaaatggaatgtatagggtgggggcaacaatatcatnaaaaatacttagtaaaaaaaacgaaatact

SEQ ID NO: 11217 - DNA, 426 bp, Glycine max
  Clone ID: LIB3092-010-Q1-K1-F5
agatagatggggttcttgcgagtgtgcgtgacggttagggcaaggctcttaaagttatagataggtgccactcactagggtttactctctcttcctttcggcatctgtaatatttccttctccatactcgcacattttgaagacgtaaaacgattgaaccctaaatatgcgccgattgcaaacattgaaacaagtttcatgggcctccgatttagatctttgtcaggttaggctattcttatcagaggaatctccttcacaggttgggttaaattctcaagataacctccaagcaaaaacatcattgtcgttgcgtccaggtggagcacgttctgatgacattctgcctcctggatttgagggaactcatgcttcaagtcaggttgagattaagccatcccagataccaggtattaagtggattac

SEQ ID NO: 11218 - DNA, 290 bp, Glycine max
  unsure at all n locations
  Clone ID: LIB3092-010-Q1-K1-D7
gttaagtaattaatggcagcttcaagtagcatcatctccatctcctctgcttcagtcttgactccaaaaatccaatgcctccccaaacacaacaaggaccatgatcatgttccaattccatcatcatcatccttcacaacacatgcttctctcaagatatcaagaccaacaacaacgtttggaatcaccacaacaaccacaaggcttaattttcctcctcgtatgttgagttgttcagcatcagcttcttcctcttccactcttccctcggctcttctattngactgtga

SEQ ID NO: 11219 - DNA, 276 bp, Glycine max
  Clone ID: LIB3092-010-Q1-K1-B5
cttccgaaaaaataagccgttcattaccttcccataaaaaggaaaaatcctatcgtgggggctctctttctacttggggccttcaccacctaatacctaccttcaaccaccgcggtggtcgataccaacggtgatattcttcagaatcctggcacatactttatcttgtccgtttttcgacccggcggcggagtagaattcgccgccactggaaacgaaacttgccctctcactgttgtgcagactctcttcgggaggggatttccagtaatctta

SEQ ID NO: 11220 - DNA, 400 bp, Glycine max
  Clone ID: LIB3092-010-Q1-K1-B6
attttctcttcctctctttctatctctctctgctccaattcacagataacaatgcaaatttctcttagcaatttagctttcaagacccctcaactcttcccaattcagcaccccattttccctccaaaggcaccactgtaccaccaccaagtttcaacgcagagccatgtcaacaatgtcctgaaagggtcgtcggggtatttgtcagaaatcagcaaagcagttctgttgactcatttttcaccaagatatactatagaggatattcgtcaagctgcatcaaaattgcagtccaggttgtctgctaaagtggttcctctcacagaaggcttcaaatctatgtactcttaagtgttaaaaaaatgtcactagttgtatctccggttcattttttttatgc

SEQ ID NO: 11221 - DNA, 257 bp, Glycine max
  Clone ID: LIB3092-010-Q1-K1-B7
attttacctacctctctttctatctatctttgctccaactcacagataacaatgcggatgtctcttatcaatttagctctcaagacccctcaactcttcccaatacaccaccccattttccctacaaaggcaccactgtaccaccaccaagttctaacgcagagccatgtcaacaatgtcctgaaacggttctccgcttatttgacagaaatcatcaaagcagttctgctgactcaattttcaccaacaaatactat

SEQ ID NO: 11222 - DNA, 257 bp, Glycine max
  Clone ID: LIB3092-010-Q1-K1-B8
attgtaccttcctctctttctatctatctttgctccaattcacagataacaatgcggaggtctcttatcaatttagctctcaagacccctcaactattcccaatacaccacctcattttccctacaaaggcaccactgtaccaccaccaagttctaacgcaaagccatgtcaacaatgtcctgaaagggtagcccgcgtattttgccgaaatcagcaaagcagttctgctgactcatttttcaccatgatatactat

SEQ ID NO: 11223 - DNA, 278 bp, Glycine max
  Clone ID: LIB3092-010-Q1-K1-B9
attgtatcttcctctctatagatttatatttgctccaactcacagataacaaaggggaggtgtcttatcaatttagctctcatcacccctcaactatacccaatacagtatcccattttccatacaaaggcaccactgtaccaccaccaagttctaacgcaaagccatgtcatcaatgttctgaaagggtcccgggcgtatttgtcagaaatcagcaaaccacttcagctgactcatttttaccaacatatactatccacgatattcgttaagctata

SEQ ID NO: 11224 - DNA, 481 bp, Glycine max
  unsure at all n locations
  Clone ID: LIB3092-010-Q1-K1-C12
gccaacgccgtccgcctctacgcgnntccgcaaaagggtcaatggctgaagttcgaggcctgaangtccgccactatnnatccactgaggatggtttnnggagccgnngtgatgagctcagcagacacttttgagtttcaattggggggaaacccaccacaagacatttatgtggaaaatctgaaaaaacanaattgttngggacccagagcttnngatgggaaatcactttagaagagattattagtgnnacatcatataatannagggtgacattcttccagctttttcaacaatgcagcacaggtatnnggaaccatgacttctntctgggagtgggcatgaaaccaggtggagggtggaaagggccatccggngaggcttctagaaactgatttgaaagagacttttggctcatttgaaaaattcctttgatgagtntaagggctgctgctgcaacacaatttggttcaagatgggc

SEQ ID NO: 11225 - DNA, 348 bp, Glycine max
  Clone ID: LIB3092-010-Q1-K1-C2
catatatctttgttttttctatttaggaagcatggcaatgccatgggtgggttatttactctctgccactgaacactttctatggagcccgtacttcgtaggtgaaatgcccaagatgcaggcttgctgatgaaacacacaacatactttgcctttggaccattcctgaagagtgcgttttatcatcaaaggaatacatccatggcgaacaatatatatcacacttcttaacagttaaccatcaagcttacttttatgccatagacctctaactacattccaacgacacatttttgttcagtataaatcgcaccatactcttttatatttcatactagcacaaaatat

SEQ ID NO: 11226 - DNA, 348 bp, Glycine max
  Clone ID: LIB3092-010-Q1-K1-C3
ccatcgcacagttagtatggatgatatcattctcgtgaagaatgaaatgaaaacgacaatcaatgatgttttattgggagtaacacaagccgctctcactcgctacttgaatcgagcatatgatgtaggcgcaaatagcaacggtgtgaaacagagatctagtgtcctcaagaagattcgccttagggcatcaattcttgttaacattagacctgctggtggaatacaggaactagcagatatgatggcagagaaatcaaaagtcaaatggggtaattgcatgggatacatcatcctacctttctctattgatgtgtataaagatccatctgaatatgtacgtcatgc

SEQ ID NO: 11227 - DNA, 372 bp, Glycine max
  Clone ID: LIB3092-010-Q1-K1-C4
gaaaaaaggggtgtcggtttttggtcctggtaacttgagagagtctcaagattgggtggggaaggagtgggtatttgtgagggaaagacctgatcttgtggcttctgttttatctagcttgaaaacaaaacacatctcatgcacatccaattccaataacatccaatcaactggagcaatcaccagagatggaatacaatttgcgcaatcggatactcgcttggattctgataaggatagaccaagaaaagctgaagtggatccagaccttttgaagaatgttttgtcatcccagttaacgtggaagaccaccagaaagaggagacgtggaaaaagcagcgcctcatatcagaagccacggtgcactgacac

SEQ ID NO: 11228 - DNA, 450 bp, Glycine max
  Clone ID: LIB3092-010-Q1-K1-C5
gaaaaaagtggtgtcggtttttggtcctggtaacttgagagagtctcaagattgggtggggaaggagtggttatttgtgagggaaagacctgatcttgtggcttctgttttatctagcttgaaaacaaaacaaaactcatgcaaatccaattccaataacatccaatcaactggagcaatcaccagagatggaatacaatttgggcaatcggatacttgcttggattctgataaggatagaccaagaaaagctgaagtggttccagaccttttgaagaatgttttgtcatcccagttaaagtggaagaccaccaagaagaggaaaacgtggaagaagcagcgcctcatatcagaagccacggtgcactgacacccatcagaaaaggtcaccgaatgttatgaaatcaaatgctcctgacagttttttgatcccgcatcattgaaagtgat

SEQ ID NO: 11229 - DNA, 213 bp, Glycine max
  Clone ID: LIB3092-010-Q1-K1-C7
gaatatcgtggctatgtctgtagaaaattcatccacctcggtgtctgtcgcagaaggacgatccaagaatgccatgaagcccaaatattctagattctcacagcaagaacttcatgcctggcaaccaattctaacacctagttgcgctatttcaatattcacggctataggactcatattcattcctgttggtcttgcttcattgtttgcatc

SEQ ID NO: 11230 - DNA, 358 bp, Glycine max
  Clone ID: LIB3092-010-Q1-K1-D1
tattgttatattccgttaaatcaacactcttggttttccatccagctattcttatcatctgtctgctcccctgcccttttttcttgcagagagaaatgggtagagtatttttgtgctcataatattctatatatcttctggtcagctaaagctgcttcagcagctgttgaaggtaaaatgcttaggtcaccattggaagctgatgattcagggaagaacaataatccagacacgaagatatatgacagggatgagcttcttgcacggatgcagtcagaggcagaaaagatagtagagatgaggagaaattctagctctgacacaaggccgtctaacattcaatcttttggtgaaaatg

SEQ ID NO: 11231 - DNA, 446 bp, Glycine max
  unsure at all n locations
  Clone ID: LIB3092-010-Q1-K1-D10
ccagattagtaccacaaaaatggagaaatagaataactgaatatcgtatagctcaaaatagaagatttaaccaaatgcaattcatatgaaaaaagccaattaattctttacaaagaacaacaagtaaacgcattaaaaaaaaaaattagaaaacaatatagatacgatcttttatcctataattttatcaattatgcagataagaaagactcatatatttatggatatagatccctatttcaagtaaaaaaaaaccaagtgatttcttctaattacaacacgtataaaaaagaattattggatatcatagataatctctntatcaagaattatatatcggaagatgcgattctagatatggaaaaaaatatgtatagaaagtattttgattggatgggaaatcatagagaaatactaaaatcgtccatatcgaaatcagaattttg

SEQ ID NO: 11232 - DNA, 217 bp, Glycine max
  Clone ID: LIB3092-010-Q1-K1-D12
cccacacatccttcacactaacttatttataccacaaccccccaatctaaaggatccgtttttttttacacgttctttccacttcatatctcttctatatcatcacctaaactcaatccactctccatctttttacaacaatattactcataaaaccctttccttacccatcttaatccccttccaacacatcccactttcctcatttctctttata

SEQ ID NO: 11233 - DNA, 310 bp, Glycine max
  Clone ID: LIB3092-010-Q1-K1-D3
cggacgcgtggggtttctgtatgcaaagtctcaaacttttccacctcaaccaacaaaaaacaaagcttgctgcaaagttgcatatcaaaaactttgcatggggggctgattcttgcagcttccgttgtaaatggtggagctgccacagctttaacgtacgatgaagccctgggacaacctttgagcctacctggtgctggggactttgatgtgaacggttttgtggagagtgtcactggctttgcagctgaaaaccctgcaattcttgctgggggagtagctgctttggcagggccattggttttgtctc

SEQ ID NO: 11234 - DNA, 404 bp, Glycine max
  unsure at all n locations
  Clone ID: LIB3092-010-Q1-K1-B3
cttatggcttgaatcgtacttggttaaatggccaaaaacatttatcgttgtttctcatgctagagaatttttaaacacggtggttactgatataattcacttacaaaaccaaaagctgactacttataaagggaattatgatgcttttgagaagactcgagaagaacaagttaaaaaccagcaaaaagcattagaggcaaacgaacgtgctagatctcatatgcagaccttcattgacaagttccgttataatgcgaagagggcatcacttgttcaatctagaatcaaggctttggatcgaatgggccatgtggatgaaattgttaatgatcctgactacaaatntgacttccccactccagatgatagacctggtgcaccaataataaagtttcagtgatgca

SEQ ID NO: 11235 - DNA, 457 bp, Glycine max
  unsure at all n locations
  Clone ID: LIB3092-010-Q1-K1-D5
gaaaaaagtggtgtcggtttttggtcctggtaacttgagagagtctcaagattgggtggggaaggagtgggtatttgtgagggaaagacctgatcttgtggcttctgttttatctagcttgaaaacaaaacaaaactcatgcaaatccaattccaataacatccaatcaactggagcaatcaccagagatggaatacaatttgggcaatcggatacttgcttggattctgataaggatagaccaagaaaagctgaagtggttccagaccttttgaagaatgttttgtcatcccagttaacgtggaagaccaccagaaagaggaaacgtggaagaagcagcgcctcatatcagaagccacggtgcactgacacccatcagaaaaggtcaccgaatgttatgaaatcaaatgctcctgacagttttttgatctcggcatcnattgaaggtgatcatgat

SEQ ID NO: 11236 - DNA, 329 bp, Glycine max
  unsure at all n locations
  Clone ID: LIB3092-010-Q1-K1-D6
cacgcccgtccgcggacgcgtgggccggactcnnngtgggtcgactccacgtccgtccgcgggacgccgnntgggtttttttgtattagtgtagttccgtnntttcgcttggtttttaagnnttttgtnncctggaatgcctaatgcnnaggatttaaagacccagggtcanngtcagttatttggttctctnnngcattttgtnntcccaaatgannaatgtctattgacttttttcgtcgtnncaagttctttagggtaaccaaattttaaaattgtttgccttgcttttgttatnntattatacccttagannataaaaatgtttc

SEQ ID NO: 11237 - DNA, 383 bp, Glycine max
  unsure at all n locations
  Clone ID: LIB3092-008-Q1-K1-H10
ctgctctctcacgataagaatactactaactgtgttgtaatacctcagtggatatcaagaggtgtccatggaacatgagaactgccaagttactctctcaacatcttgcttatcctccttatcgcttgtgagaagagattccaaacatattaaattccgttttgttgatcaangatcctagatgttcacagatgacaatcttttatgttagtcaatttcttgntctggatgatattcatgctgacaaagccaatgacatcatgtcttttgacagtgtatgaatgtctcaaaaccagaacgattgtgcttacacttatgcctgtacaacttctgctactcccagttgaccattcccttttcttaagaatatcattccaaccact

SEQ ID NO: 11238 - DNA, 85 bp, Glycine max
  Clone ID: LIB3092-008-Q1-K1-H11
ttgtaccttaacctgacgtatacactcacattcccaatggaacacgcatgacaaaggacgcgcccattttagcttatatgaaccc

SEQ ID NO: 11239 - DNA, 430 bp, Glycine max
  Clone ID: LIB3092-008-Q1-K1-H12
cgcttttgttcttgcagagcaagagagaggaggtggacaaatgaagctataattcttagaggggttaccaccctcaccttctgccaaaccaaacccacccttttctgtcttcaagctactatcgataaatcagtttaaatttttgtggcgtagtaataattgtaccatattgaggtaccttaaaaaggatctggggtttgcatatggaccttggaaagctctcagcgtactttggcttggctttctgaattttggtttttcagtgctgagagctgagcaagaagatggggcgtggaaatcaagacgcagtcaagcaactgcagaccctgacgtaaaatgtcgatgatgagcagctgaagaatacattccagattatgcaccatggttatcaaacggaaacgttaatacggtttctcaaagctagggactg

SEQ ID NO: 11240 - DNA, 270 bp, Glycine max
  Clone ID: LIB3092-008-Q1-K1-H2
ctttggttcagcagagtgtcttcagtcttggctcctaacactgtttgcaaccgtcctctgtttaaggactcactacctccgaacacgtaggtagaaatgtctgtgtctttctcttcaacctcggtttcgttctcggaatcctcatttgcattccaaagacctgctccagcacatctttgctcaaattcactcaccgttgcatcgaacaactttcattcagcaacaggtggtggtcgtcttgtgctgaatgttggaggcacctgcttgtgt

SEQ ID NO: 11241 - DNA, 420 bp, Glycine max
  Clone ID: LIB3092-008-Q1-K1-H3
cccacgcgtccggaatggttttccaattttaattcctaaaacaaaacccggttccttcacgcgacggagattttaaatttttattttttcttcctccgaattagacattaaattaaattaatgtaataaacccaaaaaagaaatagatcaattttgctttagcattattcattcatcaccaaactccaactgggccccacctaccacctcactctttactaactcgtactgcttcatatttttatttttatttattataatttcggtgtgtttttttcctcctttttaataatcttagctttgattacttttcctctcgatctctctgtcccacccctccccccctctcttcttcctctagtgttgatggatctccatctctcttacgcgtctttattttcactcacacacacaacactt

SEQ ID NO: 11242 - DNA, 380 bp, Glycine max
  Clone ID: LIB3092-008-Q1-K1-H4
gcgctttggttcagcagagtgtcttcagtcttggctcctaacactgtttgcaaccgtcctctgtttaagcactcactacgtgcgaacacgtatgtagaaatgtctgtgtctttctcttcaacctcggtttcgttctcggaatcctcatttgcattccaaagacctgctccagcacatctttgctcaaattcactcaccgttgcatcgaacaactttcattcagcaacaggtggtggtcgtcttgtgctgaatgttggaggcacctgcttgtgtcgaaagtttctgtggtttgaaactgtggctacttgagagactcagcttccaattccagccaccaaaacctccctatgaatagaacccttcactttaaggaataattt

SEQ ID NO: 11243 - DNA, 403 bp, Glycine max
  Clone ID: LIB3092-008-Q1-K1-H6
gcgctttggttcagcagagtgtcttcagtcttggctccgaacactgtttgcaaccgtcctctgtttaatgactcactacctccgaacacgtaggtagaaatgtctgtgtctttctcttcaacctcggtttcgttctcggaatcctcatttgcattccaaagacctgctccagcacatctttgctcaaattcactcaccgttgcatcgaacaactttcattcagcaacaggtggtggtcgtcttgtgctgaatgttggaggcacctgcttgtgtcgaaagtttcgtggtttgaaactgtggctacttgagagactcagcttccaattccagccaccaaagcaacctaggaatagaaaccatcacttcaggattaatttggaaaaatgaaagggatcggtttctg

SEQ ID NO: 11244 - DNA, 317 bp, Glycine max
  Clone ID: LIB3092-008-Q1-K1-H7
cagagagctaacaagagattcaagaccggcatggctaatgaagaggaacagaaggaccaggtcttcggcatcaaagatctcggtcacaagactctacttcagagtgatgcactctatcagtatatactcgaaaccagtgtctatccaagaaagcacgagtgcttgaaagagatacgcaggatgactgcaaagcacccactgaacatcatggcaacacctgcagacgaaggacaacttctgagcatgcttgttcagctcacgaattcacagaacgcctaggaaattggtgtattcactggttactctctgctatccac

SEQ ID NO: 11245 - DNA, 373 bp, Glycine max
  Clone ID: LIB3092-010-Q1-K1-A10
ctggcaggaaaggaaagggaaagggtgtttaccagtttgtagacaaatacggtgctaatgtcgatggttacagtcctatctacgacaccaaggactggtctccaaccggtgatgtctacgctggcggtacgactggcttggctatctgggctgtgactctacttggtcttttagctggtggtgcacttcttgtctacaacacaagtgctttggttcaatagactttgcaaatcgatgtttaagttataacatagtccatgtaactatctaaaaatgaagaactattcgtgaagtactttgtggatatgttccttcttgtctataaatgagtggatgtgaaaaaaactttttggtaagaatcatgcttcttcat

SEQ ID NO: 11246 - DNA, 131 bp, Glycine max
  Clone ID: LIB3092-010-Q1-K1-A11
gttccatgttagggatacactatgacacaagagattcttttatttgtttattgattcattgttatccggatgaataaatatatgaagttcaatgtaccaaagcaaaacatatagtatatgtgaattcaatt

SEQ ID NO: 11247 - DNA, 386 bp, Glycine max
  Clone ID: LIB3092-010-Q1-K1-A3
cccacgcgtccgggcacaaagcattcactgtgtcggaaaaagaagaagagaaaaaagatgagcgacggaggaaaacgacaaggtggaagagcgttgccgccgccgccaagaggccctccgcctcctcccccctctcgccctcgcctcgaacccgtcgatcgcgaaaagacatgtccgttactgctgcgagtgttcactaagattgggagtcaccattccatggaagactttgccgtcagaggcaaagagcccaaagacgaggttcagatttacacctggaaggacgctactctccgagaactcaccgatcttgtcaaagaagttgctccggctgcaaggagaaaaaacgccaaactctccttcgcctttgtattccccgacaaaaa

SEQ ID NO: 11248 - DNA, 235 bp, Glycine max
  Clone ID: LIB3092-010-Q1-K1-A5
atggccccttcgtatatttatatcgatctctgctctaactcacagataacaatgcacatggctcgtagcaatttagctttcaagacccctcaactctttccaatacagtaccccattttcccgacaaaggcaccactgtaccaccaccaagttccaacgcaaaaccatgtcaacaatgttctgaaagggtcctgcgcgtatttgtcagaaatcagcagagcagatctgctgactc

SEQ ID NO: 11249 - DNA, 183 bp, Glycine max
  Clone ID: LIB3092-010-Q1-K1-A6
aaggcacctaggtatcgtaaggacgacattggctgcaactcaaagataacaaagcacatggctctgagcactttagttctctagacccattaactatagacaaaacactatctcatttgccagtaccaggcaccactgcgccaccaccaagtgctaacgcagagccatgtcaacaatgttctg

SEQ ID NO: 11250 - DNA, 239 bp, Glycine max
  Clone ID: LIB3092-010-Q1-K1-A7
aaggcacctacgcatcttaaggtctacatctgcggcaattcacagataacaaagcacatgtctcttagcaatttagctctcaagacacattactatgaccaaacactatctcattttccagaacaaggcacctctgtgccaccaccaagtgcttacgcaaaaccatgtcaacaatgttctgaaacggcacccggcgtatttgaccgaaaaccgcaaaccagaacaactgactcaatttt

SEQ ID NO: 11251 - DNA, 259 bp, Glycine max
  unsure at all n locations
  Clone ID: LIB3092-010-Q1-K1-A8
acgaatgcatctacctatctttatatctatctctgctccaattcacagataacaaaggacatggctcttagcaatttagctttcaagacccantaactatatacaatacactacctcattttccctacaaaggcaccactgtaccaccaccaagtgctaacgcaaagccatgtcaacaatgttctgaaagggtcccgcacttatttgaccgaaatcagcaaagctgatctgctgactcatgtttcaccatcatatacta

SEQ ID NO: 11252 - DNA, 418 bp, Glycine max
  Clone ID: LIB3092-008-Q1-K1-H1
gttggtacagaggctattgcaaagaagctggctgatctcagtggaaagggggtgaccacagattatgggaggaggagattctgttgcagctgtggagaaagtaggagttgctagtgtcatgagccacatatctactggtggtggtgccagtttggagttattggaaggcaaagagcttccaggagtccttgctctcgatgaagccgtcccagttgccgtgtaagacaattttcagcttggaaaatttttccatcctcagatttcggtgttgtcaatcttgtaaaagagcatatgttgtaggacccttcggagtctgttagtgtaaattttatcatgcttgagttattattggcttcacacataaattgcgtgtaactgtaaaccctggctgagagccataaattcgaataaatctttt

SEQ ID NO: 11253 - DNA, 266 bp, Glycine max
  Clone ID: LIB3092-010-Q1-K1-A9
aatgcacctacctatctttctatctatctctgctccaattcacagataacaatgcgcatgtctcttatcaatttagctttcaagacccctcaactattcccaatacactacctcattttccctacaaaggcaccactgtaccaccaccaagttctaacgcaaaaccatgtcaacaatgtcctgaaagggtaccccgcgtatttgtcagaaatcagcaaagcagatctgctgactcatttttcaccaagatatactatataggatat

SEQ ID NO: 11254 - DNA, 403 bp, Glycine max
  unsure at all n locations
  Clone ID: LIB3092-010-Q1-K1-B10
tcttcatcacttcattcaacatttctccccttagcttgtttcaccaatggctgctgcggggagtgctgcagtctcttttccatccaccaagtctacctctcttccaagcaggacctccctcattgccccagagagagttgtgttcaagaaggcttcattgcaaaacagagatgtttctagcagtggacgggtagtttccatcagagctcaagtcaccactgaggcaccagccaaggttgaaaaagagtccaagaaacaggatgaaggtgtggttgtgaacaagtttaaacccaagaccccttacattggtagatgcctgctcaacacanagatcactgnngatgatgctccangagaaaactngcacattgtcttcagcaccgagggagagattccttacaga

SEQ ID NO: 11255 - DNA, 316 bp, Glycine max
  Clone ID: LIB3092-010-Q1-K1-B11
acgcgtccgtcttcatcacttcattcaacatttttccccttagctcgtttcaccaatggctgctgcggggagtgctgcagcctcttttccatccaccaagtctacctctcttccaagcatgacctccctcattgccccatagagagttgtgttcaagacagctccattgcaaaacagagatgtttctagcagttcacgggtagtttccatcaaagctcaagtcaccactgaggcaccagccaatgttgaaaaagagtccatgaaacatgatgaaggtgtggctgtgaacaagtttaaacccaagaccccttacatt

SEQ ID NO: 11256 - DNA, 411 bp, Glycine max
  unsure at all n locations
  Clone ID: LIB3092-010-Q1-K1-B12
ggcgggcganaatctcatcctcactttctatctctctcttctctaattcacacataacaattcatatggggttgtcaatttagctttcaagacccctcaactcttcccaattcatcaccccattttccctccaaaggcaccactttaccaccaccaattttcaactcatatccatgtcaacaatgtcctaaaaagttcatcctttaatttgtcaaaaatcatcaaaacatttctgttgacttcattttcaccaatatattctatacaggaaatttcttcaagcttcatcaaaaattccattccagtttgtcttcttaaaattgtatcctcttacaataatgcttcaaatctattttcttttataatattaaaaaaaatttcacaaattttaacctcctaataatttttttt

SEQ ID NO: 11257 - DNA, 431 bp, Glycine max
  unsure at all n locations
  Clone ID: LIB3092-008-Q1-K1-F3
cccacgcgtccgaattctttgagttgaacacaggggccaagattccttctcttgggttagggacttggcaagctgaacctggtgttgtagctgaagctctcaccacagccattcaggttggatacaggcatattgactgtgctagtgcgtataagaatcaagcagagattggttctgctcttaagaagctttttgatgatggtgtggtgaaacgtgaggacttatggatcacttncaaactctgngtttgtgtcttttaagaattgtgatctncttttgaatattgagaaagattgtatgtgtttggacccagttgggtgctgaatgaaagatcctttgatttgttggctatattttaggtgttcagatcatgcaccagaagatgtgcccaaagctttggataaaacattacaggaattgcaacttgacta

SEQ ID NO: 11258 - DNA, 283 bp, Glycine max
  Clone ID: LIB3092-008-Q1-K1-F4
attacacatgaaatttcgaactttaaaactctaaattccctatcattgattagatgtgagttctcgtgtactattacggattcaatacggtctttaaagcatcttacatttctagcacttaattctaatatgttcactgtaactataccactctctcttgaccatctatcaaatattgattgacttgatcttgcttaaaaccatctttaaagtactattactgtctctgatgaccaatgaagaccatgccttgaccttcttcttaaggcacaacactttcata

SEQ ID NO: 11259 - DNA, 249 bp, Glycine max
  Clone ID: LIB3092-008-Q1-K1-F5
tattcataacactatacactccttcacaatgattgagccatggttttattgaagctggacataaatctgatatcatcttcatcatcacattgctaaaatcatagattatagaaaatactatttcctgttaatataaataccataatgattctaatccaaataaaatttttgatgatttaacatgtaacttattaaacttaatgttcatttcccaattatatttctgataatatccttaacaacaaacac

SEQ ID NO: 11260 - DNA, 339 bp, Glycine max
  Clone ID: LIB3092-008-Q1-K1-F6
attccacaagaaattgggaacttgaaaaatctaaaatccctatcattggttggttgtgggttctcgtgtcctattccggattcaatagggtctttaaagcagctgacatttctagcacttaattctaataagttcagtggaactataccacgctctcttggcaatctatcaaatattgattggcttgatcttgctgaaaaccagcttgaatggactattcctgtctctgatgaccaatgaagaccaggccttgaccttctccttaaggcacaacactttcatatggtgagcaataagctcactggtacaataccagaagaactctttaactccagtatg

SEQ ID NO: 11261 - DNA, 354 bp, Glycine max
  Clone ID: LIB3092-008-Q1-K1-F7
tctcacgcgtccgatatttctatctctctctctctctctctctcattacaatttcgtcaaggccttttatgacgtcatagttttccttatttctttctttacgaacaatcaaatagtccacaccattactcacaaaactaatacatattaaaccgacttcaaggttccctatactattacgcttttcgttaacaactgcggcgtcacccgaaaccctcttacgaataacatgtgtcataagtgcttcaccgtcttcaccacctctacctccaccacattcttcaccaaaagtgcctgaatatcttctacggctaccagatcctgcatcttcgcgcgtccactgaagatatcttt

SEQ ID NO: 11262 - DNA, 313 bp, Glycine max
  Clone ID: LIB3092-008-Q1-K1-F8
accacacgtccgacgccgatgctcaacgcacggacttgatgaccatcacccgggttctgcggaaccaacaatgcatccaccctgagtctcgtggcgatttctcaatcttgctcagtcacatagttctcgattgcaagtatctctgctctgctgttaacaaggcgggtcttgctaagcttatagcacttgcaagacagacatatgttcacgtctaacagcatatgatactggatgtcctttccaatgatgtctttatcaaggctttcgtcagtattgtacgaacatgcatcttgtagcttgaacaatatcagga

SEQ ID NO: 11263 - DNA, 394 bp, Glycine max
  Clone ID: LIB3092-008-Q1-K1-F9
cccacgcgtccgcccacgcgtccgattttattttgacgaatatgccctgaggctggggtggtgtgtagctgcgtgcctacctccatcgcatcatacgatatggatagggtgttctcagtggacgatatctccgatcacttctggcagccgcctatccctgtctccgacgtccaaacttcctcccagatgagccgcagcgccttctagtgggccttccaacgcttcctccaggaagcttccgcctccgcaccctctcctgcgtattcttcctccgccgccgacgtcgtattcgtcgagatcgaagatcaacctaaacccgccccttcccctccgtcaaacggcgccgttctccccaatgcccctggtcccgtccaccttgactccgacgaatacc

SEQ ID NO: 11264 - DNA, 420 bp, Glycine max
  Clone ID: LIB3092-008-Q1-K1-G10
cggagattgttccaaccatggatgcagaggtccgaaagcagtttcagcgttctcttgaggggcaaggcctgaaattcaagctgaagacaaaggtagttggagttgatacttctggggatggtgtgaagctaactcttgaaccggctgctggtggtgatcaaactacacttgaagcatatgttagccttgtatctgctggtaaggactacatacactgtttgacttttattggacaagataggtgttgaaactgacaagattggactgattttggtaaaagaacgatttgccacaaatgtctttggtgtttatgcaattggagatgtaattccaggcccaatgttggcacacaaggcagaagaagacggtgttgcttgtgttgagtacatagctggtaaagtgggccatgtggattatgac

SEQ ID NO: 11265 - DNA, 431 bp, Glycine max
  Clone ID: LIB3092-008-Q1-K1-G11
catcaagctatgcttacaaagagacccattgtctcgcccgacagcccataagttactagggcaccccttcattcgagatcaatcggcaacaggagctgcaaacgtcagcataaccagagatgctctccctcgcatgtatgatggaagccggacaccgcctgtgatagagtcctattccaaccgaacaagtctaacttatcttgatggagagcttgcattatagccagctcttgcagcaccacgagcattaaggagtcctagagataacacaagaatgatcacatctttaccagtatctgcctcttcaagtccattgcgacggtatgggccaacgcatcagagctgcttgttctctactcctgatccagcttacacaataatgggacaaagtagttacactttgaatgacatatcatcatagtccaatgaca

SEQ ID NO: 11266 - DNA, 419 bp, Glycine max
  unsure at all n locations
  Clone ID: LIB3092-008-Q1-K1-G12
ctcctactcgtcaatcattgtgaagaaaagaagtgaacactgactctgttattgttctgggtttgctcaccctatacaactagttttaacgaacatggaaactgaaaagtctaatgtttcaaaggctgaagaatttaaactccttgccaatgaatcattcaatgctcgaaaattcttcatagccattgatctatatacacaagcaattgagctgaactgtcaaaatgcagtttacttttctaatcgtgcctttgcccatcttcggcttgaggaatatggtagcgcaatacaagatgccacaaaggctattgaaattgatcctaaatattcaaagggttattacaagcgatgtgctgctcatcttgggctggggaaattcaaggaagctctgaaagattttcaacantgtcaagaaaatg

SEQ ID NO: 11267 - DNA, 382 bp, Glycine max
  Clone ID: LIB3092-008-Q1-K1-G2
attccacaagaaattgggaacttgaaaaagctaaaatccctatcattggttggttgtggtttctctggtcctattccggattcaatagggtctttaaagcagctgacatttctagcacttaattctaataggttcagtggaactataccacgctctcttggcaatctatcaaatattgattggcttgatcttgctgaaaaccagcttgaagggactattcctgtctctgatgaccaaggaagaccaggccttgaccttctccttaaggcacaacactttcatatggggagcaataagctcactggtacaataccagaagaactctttaactccagtatgcatctaaaacacctgcttttcgaccacatcaactagagggtgg

SEQ ID NO: 11268 - DNA, 392 bp, Glycine max
  unsure at all n locations
  Clone ID: LIB3092-008-Q1-K1-G3
cccacgcgtccgggtgaaacacgtagggccagtagctcaagtagagcagtgattggaaagaaatctcttgaaggtttgaggatattgcttgcagaagatacaccggttattcaaagggttgcaaccataatgcttgaaaaaatgggagccgtcgttgtagctgtaggtgatggacaacaggcagtggatgctctaaatggcatgcctggtgttgaagattgtataagggagtctctcctgaaggaaagaaacacaagatcatctcaaactgagattctcggttgccctccatatgatttgatcctaatggattgtcagatgccanagatggatggctatgaggcaacannnaagcatccgaaatcggaaggggaactgacttgcacattcca

SEQ ID NO: 11269 - DNA, 347 bp, Glycine max
  Clone ID: LIB3092-008-Q1-K1-G4
cccacgcgtccgcaacaagggaaacagaatattattccattttttcacttccacactttgttgcattcattccccattttcaactatggcctcttcagctcaattttccaccactttggtcgtactatgtctcttccaattcctagcaggttcatattcaacgacattcacaattgtgaacaagtgcagctacacagtttggcccggcattttaaccggcgccggaacctcaccgctctccaccaccggcttcgtcttacaacccggcgagtccaacgtgatcaccgtgccggccgcctggtccggccgcctctgggggcggaccgtctgcacccaagacgccaccg

SEQ ID NO: 11270 - DNA, 297 bp, Glycine max
  Clone ID: LIB3092-008-Q1-K1-G5
aacacgtatggccagtagctcaagtatagcagttattgtaaaggaatcggtttaatgtttgaggaggttgctttcagaagatacaccggttattcaaagggttgcaaccataatgcttgaaaaaatgggagccgtcgttgtaactgtatgtgatggacaacaggcagtggatgctctaaatggcatgcctggtgtttaatattgtataagggagtctcttctgaaggaaagaaacacaatatcatctcaaacttatattctcggttgccctccatattatttgatcctaatggattg

SEQ ID NO: 11271 - DNA, 319 bp, Glycine max
  Clone ID: LIB3092-008-Q1-K1-G6
tccacgcgtccgaaaaagtgttcattaccctctgattcgtgcagtgcacggtggtcaagcagagacacccgagagcatgaagagtgaagggtcatctaatgctcagtcttcaagtgctgctgctcctaaacccaagatacccgtctattccttgaagaaaggtcagattgtgagggtggacaaggagaaatatctcaatagcgtcaattatctttctgttgggcacacaccttattacaaaggattagattacatttatgaggaccgtgatgaggtcctggatatgcgtatatttgaaacggcagattatgcacttatt

SEQ ID NO: 11272 - DNA, 249 bp, Glycine max
  Clone ID: LIB3092-008-Q1-K1-G7
cgtcacgcttatacacacacagtctctaactctaagttagcactgattttaaagggatctgttcaaatgtagacgagattgctttcataagatacacctgttattcaaagggttgcaaccataatgctttgaaaaatgggaaccctcattgtaactgtaagtgattgacaacatgcaaagtattctttaaattgcatgccttgtgtttaacattgtataacggagtctcttctgaaagaaagaaacaca

SEQ ID NO: 11273 - DNA, 430 bp, Glycine max
  unsure at all n locations
  Clone ID: LIB3092-008-Q1-K1-G9
cgctcactacaccgccttttccacacttccatcgtccggcacttcatggccgcggcggagcccactataagcccatctaacacgcgcgtgggctggatcggcacgggcgtcatgggccagtccatgtgcgcccacctcatccgtgccggctacaccctcaccgtcttcaactcgcacccgctccaaggcccagcccctcctcgacctcggggcctacttcgccccctccctccacgccgtcgcagcccgctccgacgtcgtcttctacatcgtcggctacccctcggacgtccgctcagtcctcctccacccctcctccggcgccctctccgccctccgccccggcggcgtcctcgtcgacatgaccacctncgaaccctccctcgccgtcgaaatcgcggacgccgctaccgncaaaggctgccactca

SEQ ID NO: 11274 - DNA, 383 bp, Glycine max
  Clone ID: LIB3092-008-Q1-K1-F12
attaaatcggtgtaccgactcactgagtccgactcgacggtgatcgttcttcctttattggacgtgcacggcttgatcgcggggctcctgagttcgctcggcaccggggcggcggtggcgctgcctgcggcggagagattcttcgtctcgtcattctggaaggacatgattaaatacagcgcctcgtcctttccaacagttgctccgtcagattggatgatactggaccgccactcgaacagccctgaaccggtttactcgcgcctccggttgattctaagctgcagcgcgtggctcgtaccggctattctgggtgaacttgacgaggccttcggtgcgccagtgctggaggcttacgcgatgacggaagcgtgacatttgat

SEQ ID NO: 11275 - DNA, 444 bp, Glycine max
  unsure at all n locations
  Clone ID: LIB3092-008-Q1-K1-D5
cccacgcgtccggaaatcgcttgctaccctaacaccgtcctctcttggcgttctggcgtggaaaaggacccggatgaagtgctgcagtcccacactgtttataccaatgtttccaaaggggttcttgccaagtccaaggatttaatttcagcttttggcaccgatgaccactccaaaatttgcttagatattttaaagaaaggggagcttcaggtagctgggaaagagagggaatcattgttatcgagtcagttcagggatattgcgaccattgtgatgcacaagacttacaatcctgagactcagcgtccatacactatcagtatgattgaacgcctcatgcgggaaatccattttgctgttgatccacacagcaccttcaagaagcaggctctggagttaattcaagagcttcagaggcacttncctataaaacggtgtccg

SEQ ID NO: 11276 - DNA, 445 bp, Glycine max
  Clone ID: LIB3092-008-Q1-K1-D6
cttgttaaggactatgcaaacagcagttggagtctttggtgggcaaccatatactgatgggattaatgtacctcccctgatgaatgacaatgtgggagatagtggtcgccctgcaatttccagtctaaatgccccaccatttatagcagtagagctttgccgagaacatttgggggtgcatccttgtgataagagaagaaacatcactgactaccgacatatgtttccagctattgatttttcattgatagaaaatgatgaggacattttgtggaaacctgacattagagagaagaatgaagaagttgctgccaggggactgaaatttttggaatggttgtggacacgtatagaaaagggagatagctgtcgttacccacagcgtttttctgtttcattctctaagtgcttttggaaattgatgtcaatcaaacgtgaagaatga

SEQ ID NO: 11277 - DNA, 443 bp, Glycine max
  Clone ID: LIB3092-008-Q1-K1-E1
ggacacgaggtggatatatatgagtcaaggccttttattggtggcaaagttggttcttttgttgacaaaggtgggaatcacattgaaatgggattgcatgttttctttggttgctacaacaatcttttccgattgatgaagaaggtgggtgcggataacaatctacttgtaaaggatcacactcacacttttgttaacaaagggggtcaaattggagaactagattttcgcttcccaattggggcaccaatacacgggataagggcgtttttgtccacaaatcagcttaatacttatgataaggctagaaatgctgtggctcttgcactcagtccagttgtcaaagctcttgttgatccagatggtgcactgaaggacataaggaatttggatagtattagcttttcagactggtttttatccaaaggtggcacacgcatgag

SEQ ID NO: 11278 - DNA, 367 bp, Glycine max
  Clone ID: LIB3092-008-Q1-K1-E10
aatttacctcagagttatggcatcccaatgtgtatcctgatgggcgagtttgcatatcagggcggcatcctcctggtgacgacccaaatggttatgagcttgcaagtgagcgctggacgcctgttcatacagtatagagtatagtattaagtatcatatcgatgctttctagtcctaagtgatgaatctcctgcaaatgttgaatctgtataggagtgtggagataggagagatgaattcaagaagaaggttagccgatgtgtgcggaagtcacaagttatgttgtgatttacagcttggattctcatcttccttttgtgaacagaaggatatacaacttaatgtgtggattggttcacctgttact

SEQ ID NO: 11279 - DNA, 419 bp, Glycine max
  Clone ID: LIB3092-008-Q1-K1-E11
cccacgcgtccggccaactcaacaacaacgccgtgcctaatccttaagaataacgagttggaacaaccaaccatgttgcattgtctcaacacttcctgttcggacatcacagtcttggaaagacaacgggaagcaaccatcaagtgccagaaccaccaaccaccctacttaacggactttaacgccgtctttccttcttcttattgttcttcttcttcttcctcttcttcttctcatagtcagggcttgctcatgatgtgctcggattcctcgctcggccaggtcctaactcactccgtcaaacccgatccgggcgtctggcccgaattcggttttctacccgtcatttcgagaacttgtagcagagactgagacttggtttcgcccaaagaaaacatggccagtgagaaaagaaaatg

SEQ ID NO: 11280 - DNA, 408 bp, Glycine max
  Clone ID: LIB3092-008-Q1-K1-E12
tgcgacaggagggaatatattccatggagctatggcgttggattcccttttcctcatgcgacctgcataagggtgggtaaactacaagactccgcttataaggttatacttatgcggaaatggggcacatcctggtggatatgttatgagatcacctgagcaataagcttctaaattaattattaaagaatttggagaaagaacttaaagatgataatctaaatttagatgctcaaccaaatggttactgcctgcaaactggctctgaaagatggctatcgctaatatattggaattatatgcagtaactattgcaaaatttgcaacgcgtcagatagaataatcatcgtgacaatgaattatcaatttggatgaactgcataacaaaaatgcaaaaacctgtaatgt

SEQ ID NO: 11281 - DNA, 328 bp, Glycine max
  Clone ID: LIB3092-008-Q1-K1-E2
gaaaaacatagctataggtgctatagaaagatcgaactcaacagttccagtttgcgaagggaatgcggcacacttgcttacgaataaacatcagattatttcacagaatcttgtgcactctgccgctttagatccactacacatggtgcgagaaagcctaaaatctgcaaggctgagcctactgggattcaaagcatagatcagaccacagcatagttgatatctgcgttgaagactattctactatgagtagaactcacatatatacttcttccaattgtataaagcatttgctaaactacattgatacaagattggacagtctact

SEQ ID NO: 11282 - DNA, 412 bp, Glycine max
  Clone ID: LIB3092-008-Q1-K1-E4
gttctactgggcaccaacaagggatgaccgcattggtgtctgcactggaatttttcgcaccgattgaattcctgaacaggacgttgtcaagattgttgacaccttccctggccaatccattgatttctttggtgcactgagggccagagtatatgatgacgaagtgaggaagtggatttctggtgttggtgttgacggcattgggaagaagcttgtgaactcaaaagatggacctccaacctttgagcagcccaagatgactctggagaagctcttgacgtatggtaacatgcttgtccaagaacaagagaatgtcaagagagtccaattggctgacaagtacttgaacgaggctgcacttggaaatgctaacgaggatgctattaacaggggaacttttttcaatcttgaa

SEQ ID NO: 11283 - DNA, 436 bp, Glycine max
  Clone ID: LIB3092-008-Q1-K1-E5
cccacgcgtccgcccacgcgtccggtgatatgcaaaacatgtctctaatagcttcactcgcctccacaacttcacaactcacttcccttccttccctcccttcttcctcctctccactttctcgcaaatttcccctcactttccgggaaaaaaacagaactccaatcacacctcacaagctccctttttcagcaaggcctaccaccaccagagtggtgttggtgaagtctcaggccacagcacctgcttcttctgaggctgtggcagtgacacctgtgtcttctgagatgaaggcatgggtctatggggaatatgggggtgtggatgttctgaagctggactccaatgttactgtgcctgatgtgaaggaagatcaggttctaatcaaagttgttgctgctgctcttaaccctgttgatgccaagaggaggcaggg

SEQ ID NO: 11284 - DNA, 372 bp, Glycine max
  Clone ID: LIB3092-008-Q1-K1-E6
ctctgtctctcccctgcggctagggttttgtctttcactcactctcttctctgtcttttgttctcatttcccttctctttcgatctgaacaataataattaaccatggaaccgtcgctgagttaacctttttcttctgcgcggtgctgttctcttttgttgtttgggtttttttttttctttctgagaagggcttgttgttgttgtgtttcgaaataatggcgactacgaatccctttgatttgttgggcgacgacgccgaggacccctcacagttgatcgcggcggagcaactgaaggccgcggcagccgcggccaccgcgccacccaagaaggaccaggccaagcccggagctcgcagcggcgcgccggc

SEQ ID NO: 11285 - DNA, 385 bp, Glycine max
  Clone ID: LIB3092-008-Q1-K1-E7
gctgattgatgtcatgttggacctacaacataccgagccagaattctacacccgggaaagtgtcaaaggagttattctggcaatgcttgtagctggttctgaaacttcagctactaccatggaatgggctttctcccttctcctcaaccatccaaaaaaaatgaataaggttaaggaagagatatacacttatgtaggtcaagatcaaatgctgaatggattggacactacaaaactgaagtacttgcaaaatgtaattactgagacacttcgcctgtatcctgtggctccactacttctacctcacgagtcctcaaatgattgcaaagtctgtggttttgacatcccgcgaggaacaatgttacttgtgaatctatggaccttg

SEQ ID NO: 11286 - DNA, 296 bp, Glycine max
  Clone ID: LIB3092-008-Q1-K1-E8
tcgctattctacttaccttttctcttaatccaaatatcatcatctgaaactatgggggccatgacaaccacaaccctctcttcaaacccgaaactctcatttttccacggaaagcccgttacatattcttcccgcgtcgcacccaccaccaagttattctcatccaaacaaggcacaatctccatgtccctaacccaacccccatacgacctccaatccttcaaattccaacccatcaaagaatccatcgtctcacgcgaaatgactcaccgctacatgaccgacatgataaccta

SEQ ID NO: 11287 - DNA, 409 bp, Glycine max
  Clone ID: LIB3092-008-Q1-K1-E9
ctcatacagccggctgtgctaaggccatatgcacgctttgcttcactctcgaacgcggcgggatttgcaccagcacaagacgcatggatgcaatatcagtcccttatcacatgaaagcttggacatactctgagtatggaaaattcaaggaagttatcaagtgtaatcatggtgtggctctacctgatgtgaaggaagaccatgttcgtttcaaagttgctgctgcttccgttaaccccattgatcataacagaatgtaaggctattacaagaacagcgactgcactttacctactgctcccggttatgatgttgctggagtggtggttaaagtgctaagtgaagtgaagaaatttaactgtggggatgaagtttatggtgatatcaatgtcaaagctaatggaatatc

SEQ ID NO: 11288 - DNA, 453 bp, Glycine max
  Clone ID: LIB3092-008-Q1-K1-F1
cccacgcgtccgcttttgatgtgctattcagaacactatacactggtggagaaggatggagccatgttgttggggtggaaggacagaaatttgatatcagcttcagcatggcattgctaaaaacatagatagtaggaaatactgtgtagtggtaatagaaataccatgatgatgggaagccaaatggtatttgggagggtttaacatgtagctgattaaggtttatgttcattgcccgctgatattggggataatagcctcagcaacaggcacagctgggggtgtagcatatttgggtttgaagggaaacagccatgtggtgggttggaataaaatttgccatgtttacgataagttctgtaggcatgttggtgcctccatagcagtggctttgtttggaagcattgtcacagtcttgctcatttggctttcagcatacagcattcatagccc

SEQ ID NO: 11289 - DNA, 370 bp, Glycine max
  Clone ID: LIB3092-008-Q1-K1-F10
gcggtcaaaaccatgtctacctggctagggatttcacctacattgatgatattgtgaagggttgcgtcggatcgtgggaggcttcggctaagagtaccgggtcgggtgggaagaagcgtggacccgctccgtatagaatatttaacctggggaatacttcgccggttactgatcctactagtgtgagtgtattggaactgcattcgaaggataaggcgaagatgaatattgttgacatgttctggaaacggtgacgttccttttactcacgcgaatattagttcggtctgtatagagctcgggtacaagcccacgaccgatttgcaaaccgggttgaagaagttctgcaagtggtatccatgctattacg

SEQ ID NO: 11290 - DNA, 118 bp, Glycine max
  Clone ID: LIB3092-008-Q1-K1-F11
cttgaagtagatctcacgcggacactctatagcatgcacgataacttactcgtaccttcgggatcatatcattcctaaaatgtctcctacattcaattcaatggccagtatactacaa

SEQ ID NO: 11291 - DNA, 308 bp, Glycine max
  Clone ID: LIB3092-008-Q1-K1-D4
cctacgcgtccgcccacgcgtccgcccacgcgtccgattacaaaggaaaggtctcgttgtgatatggttaagaaaaatatatttaccatgtgcagcactatctctgaacatttgttattacaaaattatttcatgtgtcaaaaaaaaaaaaaaaataaaaaaaaaaaaaaaaacaaaaaaaaaaaaaaacaaaagcaaataaaaaaaacatataatgacaattagaatgctttgtacaaaaatttctaaatgataataataactcttacctggacattaaaaaataggggggaccttttaaaggatcc

SEQ ID NO: 11292 - DNA, 446 bp, Glycine max
  Clone ID: LIB3092-008-Q1-K1-B5
tcgcccacgcgtccgtgttgatatcactgcaaagtcttcggcatatttgccactgcaagaggcgtgcatccacaggtttaagcatgttgaagaagcaggcttagttcctgggttcaaagaggagtttttgatcattggtgagaactcaatagatgatagcttggtcttgagtttaaggtctcttcagtttgaccttgcatgggaacgttgtagacagcttcaagctgaagatgtcacagtcaagggtaagattgtgggggtgaacaaaggtggagtggtggctgagttggaagggcttagagggtttgttccattgtctcaaatatcaacgaactcaaatgtagaagagcttcttgataaggagcttcctcttaagtttgtggaggtggatgaggaacaatctagacttgtcctcagcaaccgcaaggccgtagctggcaaccagg

SEQ ID NO: 11293 - DNA, 370 bp, Glycine max
  Clone ID: LIB3092-008-Q1-K1-B6
cccacgcgtccggcggtgccatcatcgctgacttcataccccgccgtggaggccgccgcgtcacggcctccgagctctggccaaactccttcgccaaagacgatgactttgacttggattactcccacatcgctacccaacaaccctccactctcaaaaggtcccaacctcccaaagttagcgagcaggttgagaataagccggtgaagaggcagaggaagaatctctacagagggattcggcagcgtccgtggggcaaatgggccgcggagattcgcgatcctagaaaaggggttcgtgtctggttgggcacctttaacaccgcagaagaagccgcgagagcctacgatcgtgaagctcgaaaaatccg

SEQ ID NO: 11294 - DNA, 409 bp, Glycine max
  unsure at all n locations
  Clone ID: LIB3092-008-Q1-K1-B9
ctggattctggtgttgtgagtcgccggcgttttccactcgaagcacacaccagccataatggattacacaccgtgataagataagattgaaaagatgtttagggacgtgtcaagctgcaacacgtacaactacggcgaggctgggtattgggacgcgcgctacatccaagagggtggatccttcgattggtaccagcgttactatgctctcangccttttgttcgcaatttcatccctctttcttccaggattctcatggttggttgcggcaatgctgttatgtctgaagatatggtcaaagatggttacgaggacatcgtcaatattgatatttcttctgttgcaattgacatgatgagaacaaaatatgagtacatnccttagctaaaatacatgcagatggatgtc

SEQ ID NO: 11295 - DNA, 448 bp, Glycine max
  Clone ID: LIB3092-008-Q1-K1-C1
aagtaacttaaggtttcaaacctaggaagttggaagtcatggcagcaacattgatggcagcaacaagttctggcactcttaaagcaactcctttcctaggccaaggcaagggtgccaatgccaatgctcttagggatgttgtttccatgggaactgggaagtacaccatgggcaatgatttgtggtatggaccagacagagtgaaatacttgggacccttttcagctcagaccccttcatacttgaaaggagaattcccaggggattatggatgggacactgctggcttatctgctgacccggaagcatttgccaagaacagggctcttgaggttatccatgggagatgggccatgcttggagcactaggatgcatcaccccagaggtgctagagaagtggttgagagtggacttcaaggagccagtgtggttcaaagctggagccca

SEQ ID NO: 11296 - DNA, 438 bp, Glycine max
  unsure at all n locations
  Clone ID: LIB3092-008-Q1-K1-C10
ctcttcctcaccgattgctagaatggaatttcgatgctcagtcatctcttttaccaggcggttctctcttgctcttgcaggagagagccatgtccatgcatcgctacctgaggaagattattgggaagctgtttggccaaacactcccattcccactgcactgcgagagcttctaaagcctctccctgcaggtggtgaaatcgatgaactccctaagcaaattgatgatacacagtacccaaaaacattcttctataaagaagaccttcatccaggcaaaacaatgaaagtacaattcaccaagcgtccctatgcacaaccttatggtgtatatacatggttaacggatattaaagacacctctaaagaaggatatagttttgaagagatatgcattcaggaaagaagccgtttgangggagaagaagaagttttgtg

SEQ ID NO: 11297 - DNA, 436 bp, Glycine max
  Clone ID: LIB3092-008-Q1-K1-C12
gaagtgccggcgtgcgttgaagtgtgctaggatcgtgagcaggttcggataagagtggccagatcgaggaagagatgaaggcgaggtgcgagatattctcgcagactctcaagttcatccgctcccacatcaagaagcgtttgccctatactctctctgttaatcatcttgctgattggacttggcaggagttcaaatgacacagactaggatctgttgaaaattgctctgccactcttaacggcaaccacaagctcaccgatgctgatactactccaacgaaagactggagaaaagaacgcatagtgagttcagttaaagatcaaggcagctgcggatcatgctggacattcagcacaactggggctttagaagcagcctatgcacaagcatttgggaagagtatctctctttctgagcaagcaactagtggact

SEQ ID NO: 11298 - DNA, 317 bp, Glycine max
  Clone ID: LIB3092-008-Q1-K1-C2
gcgaagtaacttaaggtttcaaacctaggaagttggaattcatggcagcaacattgatgtcagggacaggttctgtcactcttaaagcaactcctttcctaggccaaggcaagggtgccaatgccaatgctcttagggatgttgtttccatggtaactggtaagtacaccatgggcaatgatttgtggtatggaccatacatagtgaaatacttggtaccctttttaactcataccccttcatacttgaaaggataattcccagtggattatggatggtacactgctggcttatcttgctgacccgaaagcattttc

SEQ ID NO: 11299 - DNA, 447 bp, Glycine max
  unsure at all n locations
  Clone ID: LIB3092-008-Q1-K1-C3
atttactttgtgttgaattcaatatgagtcttaagggatttttcgagggtggtgtcgcttgcatcggcgcaggctgcaccactcacccactcgacctcatcaaagttcgaatgcaacttcaagaaacccacactctccgcccagcctttgcctttcacgctcccactccaatgcctcctccgccgccctccggccccatctccgtcggcctccgcatcgttcagtcggagggactcgccgctcttttctccggcgtctccgccaccgtcctccgccagacgctctactccaccacccgcatgggcctctacgacgtcctcaagcgccactggaccgaccccgaccgcggaaccatgcccctcacaaganaaatcacggccgggctcgtcgccggcgggatcggagccgccgtgggcaaccccgccgacgtggcgatggtgcgaatgc

SEQ ID NO: 11300 - DNA, 200 bp, Glycine max
  Clone ID: LIB3092-008-Q1-K1-C4
tactttgatttcaatccaatattattcttaacttatttttcttatattaattactctgccatcggtacattttaaaccattcacccactctaccttatcaaacatccaatgcaacttcaataaacccacactcttcatccatcctttacctttcacactcccactccaatgcctcctcctactcccttcataccccatct

SEQ ID NO: 11301 - DNA, 446 bp, Glycine max
  Clone ID: LIB3092-008-Q1-K1-C5
cccacgcgtccgcatgaattttctaaccttcgttactgttctactcttcatactaccagcgacctcatcttcccagtatttggggaacaaccttctcactcatcgcaagatattcctaaaaaaagacaacattattacctcgtacgctgtcatctttgacggtggtagcacaggaacccgtgtgcatgtcttccattttgaccagaatttggatctccttcccattggtgatagtcttgagcttaataaaaagatcacacccggtttaagtgcttacgaggatgatcccgagcaagctgcagaatctctgattccacttttggaggaagcagaaagtgtagttcctgaggacttgcgtcccaacacacccgttaggctaggggcaactgcaggcttaaggcttttgaaagggaatgcttctgaacaaatattgcaagcggttaggg

SEQ ID NO: 11302 - DNA, 263 bp, Glycine max
  Clone ID: LIB3092-008-Q1-K1-C6
atgaattatctaaccttctttactgttctactcttcatacgaccatggaccttatcttcccaggatttgctgaacaaccttctcactcatcgcaagatattcctaaaaaaagacaacattattacctcgtacgctgtcatctttgacggtggtagcacaggaacccgtgtgcatgtcttccatttttaccagaatttgtatctccttcccattggtgatagtcttgagcttaataaaaagatcacaccctttttaagtgctta

SEQ ID NO: 11303 - DNA, 439 bp, Glycine max
  Clone ID: LIB3092-008-Q1-K1-C7
tgcacttcaaacagtttgggcgtcatgtggagagagagagcgttattggtgatcctgctgctgcttctagtccagcaaatttgtgctaccaagaagcaagatcatggttgccccctttcttcctgcggcaaaatcaccaacataacttacccatttcgattaaagggccaccctaaaagctgcggcgacaataggagtcgatcaacaaacaaattgctcctcccttcctcgctatttcttgtctcgctccaatttcactgatacttacagtgatatttacaacatggatccataccaagctggtcaatattcaggtcatcggaatttatttatttgttatcggtaaagattagttgttagtttttatttatgatgaaatccacgactttttcattctcaattctttcaatacttaggtcgtagtaattgggacaggctt

SEQ ID NO: 11304 - DNA, 483 bp, Glycine max
  unsure at all n locations
  Clone ID: LIB3092-008-Q1-K1-C9
tccactgccgtctcggcatggcagcgctgtggcatttggctgataggtgacaaggagccagtagaaatgggtactcccacgaagggtgcaagcgttttagcctgtgagaagatatgtgttcagggtgtgcctgtaggaggtacctcacgtcaagttgcatttaacctcgggatcgggcaccatgtttatcttgttggtagaaggtgaaccatggacgtcagtggagtatgggaggaaagttcacctactggtctactcaattggatggtacttatatgaccttcctcccccacaggatcccagtggcactgcaactgagggacagtggatagctaaactagttgcttgtggtggccggcataccctggcaatagtagaatggaaatcaaatgaatcttaaaattgactcaaattctaaataaaacagaaactggaaagtggatgaggctaatgactgatttggaactcaattcangtgctgga

SEQ ID NO: 11305 - DNA, 118 bp, Glycine max
  Clone ID: LIB3092-008-Q1-K1-D12
gtatgatcgctgatggatacgtgccgacgatattatccagggggataataggccttgtgcgggggaacacacagcgtccaatcgaaaccgggaagaacatatgaccatgagagatggc

SEQ ID NO: 11306 - DNA, 395 bp, Glycine max
  Clone ID: LIB3092-008-Q1-K1-D2
aaaaaatatcttgggttgcaaattttctactcttccatatgataatctaattgggatggggtctcggtttgctacatgatcaaagctaatatgtctggggctggttaatgatgatgttcgagttgttggaattactgggatgggtggaataggaaagtccactcttggtcaagctttatatgaaagaatctctcatcaatttaattctcgttgttatattgatgatgtaagtaaactttatcaagggtatggtacattaggtgtacaaaaagagttactttctcagtctctaaatgaaaaaaatctaaagatttgcaatgtatctaatggaacacttctggtatgggagaggctatccaatgcaaaagcacttataattcttgacaatggtgatc

SEQ ID NO: 11307 - DNA, 378 bp, Glycine max
  Clone ID: LIB3092-008-Q1-K1-D3
ggtgtttgaacgtgaaagactaaatggacattatagtgtcactgcatttgtgattgggaacaccttttcagcaatcccatacttgttgttggtttcaatcattcctggggctatagcctattacctacctggtcttcagaaagactttgagcactttgtgtacttcatttgcgttctctttgcttgcctgatgctagtagagagccttatgatgatagttgcaagcattgtccccaactttctaatgggtatcataaccggggctggaattcaaggaatcatgattataggtggtggattctttaggttaccaaatgatcttcctaggccattttggaaataccctatgttctatgttgcattccatagatatgccta

SEQ ID NO: 11308 - DNA, 393 bp, Glycine max
  Clone ID: LIB3092-008-Q1-K1-B3
gcgcttgctaatgagcaccacatacatccgcgctcatgctgaggattacaaatcatggacttgccttgcagcatccactgctggtggttgccttacaacgtcacaactgctagaacaccctatcaacctaactgaagccacaaggacaacttcatccgcctgtaaccctgcctacttcaaaactgtccctctctgctccaaattgaaagctgcacctccaactgaagctgcaactgctgctactgccaatgatgagcttgaccagtgctatggtcctgacagaacgaacttctagcctgacggtctctaggaccgatctgacatcccatagtacttgaccggagaagtctccggagactatggttatgacccatctggaacttaacaagaagc

SEQ ID NO: 11309 - DNA, 284 bp, Glycine max
  unsure at all n locations
  Clone ID: LIB3092-007-Q1-K1-H8
cgaccgcccgaattcggtcgccacgcgtcgggatactagaacagtgtgagaaaagaagtccttgttttcttcgttgctacaattttggtagcatggcaatgccatgcgtacgatatgttccctctccgaatgaacactggctatggtgcccgtactccggaggtgaaatgcgcaagttggaagcttgctgtggaagcacacaacatctttggctttgagaccattcctgaagagtgcgttgaagcaacanaggaatacatncatggcgaacaatatagatcaga

SEQ ID NO: 11310 - DNA, 313 bp, Glycine max
  Clone ID: LIB3092-007-Q1-K1-H9
gagacgcctacaaccaggcgtacgaataagactgtcttagactacttcagaactacaattggggaaggaggagcttgatatgacatacgaaatgaataaaattgcgactgagcactgagatccagggccactaatccaaaagtaaagtgctcagggcagaatctggcatttcaagcacacaacatcaacagctaataaacgatctcatgtgagcgactatatatatgcttatttatgcttagttgatcaagggtaaaagatcatttgttatacaaaatcgaactatttggggtcattttcttaggcgtggaaa

SEQ ID NO: 11311 - DNA, 451 bp, Glycine max
  Clone ID: LIB3092-008-Q1-K1-A1
agctgcttcttagtttctccaaacccaaactttcaccacaggtacgttttactttaaactattcaatattcatctaatcctctagcttcatccattcattaaatttatcttcgttcagaccatgatctgtgccttaaaccatggaaaattcagttagctgaatctgaatttatgcatgattaacgggaatctaatgttgattgattttgtttgaaattttgttttttttattcttgtggttatggtttgttggattggctttcatttaatgagatgtaaaaactgaaaagtgttcacaaggaagaggcaattcaactacgtgtaaggaggaattaatttggatttggaatctggatgcttctgtttaaaagaaaaaaaaatgttggattttttactgctatgacagagatttgcatgtttaagcaaattaggatgtgtagcattgatgtgg

SEQ ID NO: 11312 - DNA, 426 bp, Glycine max
  Clone ID: LIB3092-008-Q1-K1-A10
ccttatcgtatctaacagcagaacaagcacttgctgatttttccgttctcatcacggatctcaagcataattactccgccaaggattgccccgttgtcttgtttggaggatcatatggtggaatgttggctgcatggatgagactcaagtatcctcatattgctgttggtgcactagcttcttccgctccgattcttcaatttgaagactttgttccacctgaaactttctatgaccttgtttccaatgcttttaagcgtgaaagtttcacttgctttaactatataaaacagtcatggaatgagatagcatctacaggccaaacaaataacgggctggagcttctgaccaaaactttcaacttatgtcagaaattgaagaggactaaagatctgtatgactgggcagaggctgcgtatagttatt

SEQ ID NO: 11313 - DNA, 423 bp, Glycine max
  Clone ID: LIB3092-008-Q1-K1-A11
ttcccgacccaagcgacccgtccgttttgaatctatacaatcaacaatcttgtttaacgaagagcaccatttctagtcggagggctacgccggagccttcaaaacctaccctcatcaagccggtaccatccgtaagaacggctacatcgtcatcgaatgcctttctttctagaattagaattttatacttttatgactttaaggcacggtcacgcataattattaattttgtgatgattatattttcactgccaagaaacttgatgatattgtgccctattttcacaattatgatgttcctcatgtgaatcgtactgattaccagcttattgatattgctgaggatggatttttgagtctgcttactgaaaatggtaacactaaggatgaccttaagctttccactgatgagagtctgctcac

SEQ ID NO: 11314 - DNA, 317 bp, Glycine max
  Clone ID: LIB3092-008-Q1-K1-A2
gttcgaatggagccaaacgaggagaacggaggcagtacgagcagggaggaacaggaagaggcattggtggctttgatcgaacaccgaacccacgaagtcaaaaacctccgtcaccgcatcgcttattataaaacccagcttgatgaagcggagaaaaggttgcaagattctgaatccaaattggcccgccttcgaggtcaaacagtgtcatctagaagtaccttagatgatggaatcgaaactttgaagacaaagagcagatcaagcagtcccattgatagaaacgaagtttctaccaaaagccaacatcaatctaa

SEQ ID NO: 11315 - DNA, 446 bp, Glycine max
  unsure at all n locations
  Clone ID: LIB3092-008-Q1-K1-A3
gttcgaatggagccaaacgaggagaacggatgcagtacgagcagggaggaacaggaagaggcattgggggctttgatcgaacaccgaacccacgaagtcaaaaacctccgtcaccgcatcgcttattataaaacccagcttgatgaagcggagaaaaggttgcaagattctgaatccaaattggcccgccttcgaggtcaaacagtgtcatctagaagtaccttagatgatggaatcgaaactttgaagacaaagagcagatcaagcagtcccattgatagaaacgaagtttctaccaaaagccaacatcaatctaaaccagaacttcttattccttcactgaatccaaaaatatcacaacctgtattgttgccaaagtcttcttcaaaagcttcaataactttcagntctgaagccactcctggagtccataattctcctatcac

SEQ ID NO: 11316 - DNA, 416 bp, Glycine max
  Clone ID: LIB3092-008-Q1-K1-A4
gccacgcgtccggctggagtggtggacgccttgaaggaccaaggtatatgcaggtggaacagtgtgatgagatcagcacaacaacatgctaaacataatatgaagtctttgtctcaaaccaagaagctttcttctcaatcatctgttatggcttcagccaaattgaaagatgagaaagctaagaagtcagaggagtccttgagaaccgttatgtacttgagttgctggggtcccaactaaatacagatgcatggattttatgcaattctggatttttatgttcttggaatatgaattgcatgaagatgagaaatggaagactcagaagatacaccaatcagagaagagtttcaactctcaaccaacaccatgttacttgcatgctatgcttgaacacctgttgatcaaaccgatcg

SEQ ID NO: 11317 - DNA, 346 bp, Glycine max
  Clone ID: LIB3092-008-Q1-K1-A6
gtcggttcgaatggagccaaacgaggagaacggatgcagttcgagcagggaggaacaggaagaggcattggtggctttgatcgaacaccgaacccacgaagtcaaaaaccttcgtcaccgcatcgcttattataaaacccagcttgatgaagcggagaaaaggttgcaagattctgaatccaaattggcccgccttcgaggtcaaacagtgtcatctagaagtaccttagatgatggaatcgaaactttgaagacaaagagcagatcaagcagtcccattgatagaaacgaagtttctaccataagccaacatcaatctaaaccagaacttcttattccttcactg

SEQ ID NO: 11318 - DNA, 363 bp, Glycine max
  Clone ID: LIB3092-008-Q1-K1-A9
gccacttctgaatctattgaatcaacaatcatgtcggacgaagagcaccatttcgagtcgaaggccgacgccggagcctccaaaacctaccctcagcaagccggtaccatccgcaagaacggctacatcgtcatcaaaggccgtccctgcaaggttgtggaaggttcgacttccaaaactggaaagcacggtcacgctaagtgtcactttgttggagttcgaaattttcactgccaagaaacttgaggatattgtgccctcttctcacaactgtggtgttcctcatgtgaatcgtactgattaccagctcattgatattgctgaggaatggattttgagtctgcttactgaaaatggtaacac

SEQ ID NO: 11319 - DNA, 445 bp, Glycine max
  unsure at all n locations
  Clone ID: LIB3092-008-Q1-K1-B1
gctcgacctggctccctcactctctctgctccgccgccacggaggttgatttcggccaccataggcgttgccttctgattttgcccaatccaagctgcgaccatcaaagctatttccgcccaccacgggattgcatgttctttggatttgagattgtgtggatgtactgttggtattcaattttagatacatttcatgaggtgagaaggagacgtgactgaaaggaggagtcatatgacaccataatgttggaaaagtatggagaagactcttcaaagcatccattggttgattcaacagtgtgggcagatgtgtcagattcaaagaagagacaaatttttggaactatggctacttcatcttcaaagatcataggtccctcccacatttgaatttctacacangaagtttattaaggaagctgtaaatggtgccatgacttctt

SEQ ID NO: 11320 - DNA, 422 bp, Glycine max
  Clone ID: LIB3092-008-Q1-K1-B10
gacaagtccaaggccaagattgtcagggacagcaacggtgtctcagggttcgatggggctgatctgaagctggatgtttacatggttcagcacgacatggacaacatgtacatgtgggttttcaaggagaggccggataacgcgctgggtaagatgcatctgtggagttttatgaatgggcattctctccaatgggaactcacgttttctggtagtgctgacaagggttttgctcggacccacaggtatgcaacgaaagctttatagatgactatcaaaccctcaatgcgtgcatggcgttgacgttgttaccacacccaatctgatgaccctggatgatgatgatcgaaaaaggaggatcgaactcactggccgagacttgaattgtacaatttcaactgacgcaagtgatttcagttcat

SEQ ID NO: 11321 - DNA, 399 bp, Glycine max
  Clone ID: LIB3092-008-Q1-K1-B11
ctggattctgctgttgtgagtcgccggcgttttctactcgaagcacacaccatccataagcgaggacacaccgtgataagataagattgaaaagatgtttagggacgtgtcaagctgcaacatgtacaactacagcgaggctggatattgtgactcgcgctatattcaataagttggttccttcgaatggtaccatctttactctttttttaatccttttgttcgcaatttcatccctctttcttccatgattctcatggttgtgtgttgtaatgctgatatgtctgaggatatggtcaaagatggttacgaggacatcgtcaatattgatatttcttctgttgcaattgacatgatgagaacaaaatatgagtacatacctcagctaaaatacatgca

SEQ ID NO: 11322 - DNA, 437 bp, Glycine max
  unsure at all n locations
  Clone ID: LIB3092-008-Q1-K1-B12
gtcttagtccacgcccgccacccacctcattatttcaattttcccctctcttactgagtcggtttctctcttcccttattcatcactcttccaaaataaaattaaaaaaaaaacccacctttttagttttctctcatagtctcatctcatcacgacaaacaacaatctaatctatgcaaccccaaagaaacccaattcaatagataatgaaatcaaacaatcagatgagccagtggatacacgtggcggtggcagcatccgccgtgggatgcgtctcgacccttttgttggtctttctctggcgttggtgccataaaagaaatcatcgcagaaatttcgttgagccggctagtttgaccagagtggaaagtgtccagggagggatttctgtttccaggcttcatcaacnnacaacaaccttttcaattggatcaggg

SEQ ID NO: 11323 - DNA, 398 bp, Glycine max
  Clone ID: LIB3092-008-Q1-K1-B2
gacgatttaaccgatcctgcgcctgctacgacatttgcacatttagatgctactactgtactatcaggaggattagcggccaaaggtatctatccagcagtagatcctttagattcaacctcaactatgctccaacctcgaatcgttggtgaagaacattatgagactgcgcaaagagttaaacaaactttacaacgttacaaagaacttcaagacattatagctatccttggcttggacgaattatccgaagaagatcgcttaaccgtagcaagagcacgaaaaattgagcgtttcttatcacaaccttttttcgtagcagaaggttttaccggttcgccggggaaaatatgtagtctagcagaaacaattagagggtttaaattgattctttctgg

SEQ ID NO: 11324 - DNA, 425 bp, Glycine max
  unsure at all n locations
  Clone ID: LIB3092-007-Q1-K1-H7
gtcggccacgcggtcggccaagccttcggttaaaccttttttaaaactctttaaaatccccctttcccagttcccaacttcatttcaaatcaatatgaaaaaaattgtgctaaagttggaaatccatgacgacaaaaccaagaaaaaggccatgagggcagtatctggtatttcaggtataaaatctcaacatctaataatcgntctcatgttagttactatatatatgcttttttatgcttagttaatcaagggtaaaaaatcatatgttatacaaaattgaattttttggggtcattttttcaggggtggagacagtctcagtggacatgaatgacctgaaaatgactataattgggaatgttgatgctgtaataatagttggcaagcttagaaaatgttgtgatcatgctgatatactatca

SEQ ID NO: 11325 - DNA, 284 bp, Glycine max
  unsure at all n locations
  Clone ID: LIB3092-007-Q1-K1-G10
cccacgcgtccgatttctttttgatttcaaaaattttccggaaaaaatttgaatctattttgtcaagcgcagaaacctcactatcanaactgattatgacaatatacactacaagagaggggtcttctacttctaactacaactttattggtgttagatgaaattctaacacggatgaaatttgacctgcttatacaaagctggctatgcaatgctatacctatacttcacatcgtcgccttctttgctggctgaagataaacacatattccaagccattcaag

SEQ ID NO: 11326 - DNA, 279 bp, Glycine max
  Clone ID: LIB3092-007-Q1-K1-G11
gagagaacaaaacacaatgggcgtcttggtgatcgacggcagcaccgtgcgcgagtgcgtgggcgactaaaccgacttcaccaatagcgtgtacaaacatttctcggcgctggacctaaacaacgacggagtcctgtttcgctcggagctccgcacggtcttcgagtgcatgcgcctcatcgagacacacttcggcatcgacgtttccacgccaccggagcagctcgcgaatctctacgacttcatattcgacaagtttgacggcgaacggagcggctc

SEQ ID NO: 11327 - DNA, 361 bp, Glycine max
  unsure at all n locations
  Clone ID: LIB3092-007-Q1-K1-G12
cccacgcgtnctaaatgatttgataggagagaaaagtaatgatgtggctgcagagacaaaggcagttgaaccagaacctccagtttatgcaaataagatggaggctaaagatgcattcaaagcactcttggagtctgtaaatgatggatctgactggacttgggatcggaccatgcgtttaataattaatgataaaaggtatggtgccttaaaaacacttgttgaaaggaagcaagctttcaatgagtacttaaatcagaggaaaaaacaagaagccgaagaaaagcgtatgaaacagaaaaaagcccgggaggattttaaaaaaatgttagaagaatccacggacttgacttcatccact

SEQ ID NO: 11328 - DNA, 410 bp, Glycine max
  Clone ID: LIB3092-007-Q1-K1-G2
accgcccggatccggtcgccacgcgtcggctcgtttttgtattctttccacaaaccccacaaccagaaacctcaacttctcagttttaaaaccaaatgtgttgtcactgcgttcattctctcttcctcaaaaacactatcttcgtctccgtccctgcaagtgttcctccaccgcccccgtgtccaccaccacctacgagttttctgatggttcttcggaggtggagttaagattaaacatacgaggtttggatgtccgaagctccagagatatattggttgatacaaatgatacctctttagctatcagagtgttgcggccaggatctcccatcacactcatagaaactaatcctctttttgatagggttaaatcctccgaaacaatatggtatatagatgatgatcaac

SEQ ID NO: 11329 - DNA, 343 bp, Glycine max
  Clone ID: LIB3092-007-Q1-K1-G3
ctggtttccacgctttctcccacacctcctttttcatttttttttcatcaatcatcaccaggggctcgtgacttttcactgcgttccaattgttttttgcaaaaatgggatgttcagagaaagaccctctttcccaattgagtttgcctcctggttttcggttttaccccaccgactaggagcttctcgttcagtatctgtgccgcaaggacgcttgccaccatttctctctttcaatcattgccgaaattgacttgtacaagttcgacccattggttcttccaagttaagccattttcggtgaaaaaaaatggtacttttttagccccatatacaggaaata

SEQ ID NO: 11330 - DNA, 460 bp, Glycine max
  Clone ID: LIB3092-007-Q1-K1-G5
gtcggaagcgcgtggggctgaccgggttcaagtgcaggtgcggagtgacgttctgcggggcccacaggtgcccggaggagcacgcgtgcgggttcgatttcaagacagtgggaagagaggagattgcacgtgccaaccccgtgatcaaagcggagaagctgcggaggatttgatgatttcaatctgggccgttcgatgggaccggagcttggtgatttaatctccaccgtcctcgtgtatgcgagagaaagaaaaagagagagtgagagggaaaatgcggttattatgtaacattatgattatgatgatctgtgttttaattaagacgaaagcttgaaaagtcggtttgtctggtctagaagggatgatgaaatgaacgagttatatttattttggctttgttccactgtccgggggtggttgaaagttaaaatgatttgtgataagagtcttagggcaa

SEQ ID NO: 11331 - DNA, 293 bp, Glycine max
  unsure at all n locations
  Clone ID: LIB3092-007-Q1-K1-G6
gccaggttttggaccatggttctgcaacctaatcaaaacaatctgcaagagttccagacaacaccatccatacttcaagatgtctcgcagcaattaatggagctcttttaaaagtatggaagaactggattacagcgttcttcttagtagagtaggttttgagtatataattcanaatgttatttactttggagggagacattaggaactatgacatatttggtgagttacaggattagtggttgtgtgacctacggatttttaagttttaccaacttctctgaaaaanaaaa

SEQ ID NO: 11332 - DNA, 358 bp, Glycine max
  Clone ID: LIB3092-007-Q1-K1-G7
gagatcgtggaagccctgcttatcttagattgagccagaaaactgtcaattcccttggtgatctagtccccttcagcaacaagttgtattctggatgtttgcaaaagagggtggggataacagctggaatctgtgtcttgatccaaaacaaagccgagaagaagggagataggtatgaggcaatctacagcttctactttggggactacggtcacatttcagtgcagggttcatacctgacctatgaggacacttatcttgctgtgactggtggatctggcatctttgaaggggcttatggtcaggtcaagctgcatcaaattgtgttcccctttaaactattctacacattttatct

SEQ ID NO: 11333 - DNA, 315 bp, Glycine max
  Clone ID: LIB3092-007-Q1-K1-G8
cccacgcgtccgcccacgcgtccgcttcttcttctttttcatcaatcatcaccagtggttcttttccttctgagaagatcgaattgtgttttgcaaaaatgggagttccagagaaagaccctctttcccaattgagtttgcctcctggttttcggttttaccccaccgacgaggagcttctcgttcagtatctgtgccgcaaggtcgctggccaccatttctctcttccaatcattgccgaaattgacttgtacaagttcgacccatgggttcttccaagtaaagcgattttcggtgaaaaagagtggtactttt

SEQ ID NO: 11334 - DNA, 110 bp, Glycine max
  Clone ID: LIB3092-007-Q1-K1-G9
agcattgctcttgtatcatattctaacccctacaaccagcaacctccacttcttaactttagaaccagagtgtcttgacactgtgttcacactctttaactcaaaaacac

SEQ ID NO: 11335 - DNA, 401 bp, Glycine max
  Clone ID: LIB3092-007-Q1-K1-H1
gagagaacaaaacagaatgggcgtcgtggtgatcgacggcagcaccgtgcgcgacttcgtgaacgacgaaaccgccttcaccaagagcgtggacgagcagttctcggcgctggacctcaacaacgacggcgtcctctcgcgctcggagctccgcacggccttcgagtccatgcgcctcatcgagacgcacttcggcatcgacgtttccacgccgccggagcagctcgcgaagctctacgactccatcttcgacaagttcgacggcgaccggagcggcgccgtcgaccgccgcgagttccgcgacgagatgaggaagatcatgctcgccatcgccgacggcctcggatcgttccccataaggatggtcctcgaggacgatcccaatagtcttcttcagaaag

SEQ ID NO: 11336 - DNA, 327 bp, Glycine max
  Clone ID: LIB3092-007-Q1-K1-H10
cacgcgtgcgattattgctctggaccgattggtcgtttggtggccacggttgcccttcaaaggaatgatgttgaacttgttgctgtcaacgatctgtctttcctcacacactagctttcgtcttagtttatgtcgacaccgttcattgacagtggaagcattttgatgtgaaggtgaaagactctaagacccttctctttggtgagaagcccgtcaccgtttttggaatcaagaaccctgaggaaattccatggggtgaggttggtgctgattatgttgttgagtcaactggtgtattcactgacgaggacaaagctgctgctcact

SEQ ID NO: 11337 - DNA, 222 bp, Glycine max
  unsure at all n locations
  Clone ID: LIB3092-007-Q1-K1-H11
ccacgccttccnnacacntnnnccacactttctnttctacttcaacacaccttcgcggacaccggggatcacatctgccatttaaatcttaccttttatttctatgcacacaccaaggccacgccaagcatgtaatggacaaatgtcacaaacgacattgtattattcagacacaaggagtttgactctgttttggccgcaccaatccattaagatctagct

SEQ ID NO: 11338 - DNA, 364 bp, Glycine max
  Clone ID: LIB3092-007-Q1-K1-H12
tgcatcttcagaatttgaggggatgactgcattaattattgacccaagatctgttagagcagaagtgtctggatatcacatccaacggcttggcattcatgttgaaatggtttcagatttaaaacaaggtttgtcaaccataagcaatgggaatgtagttgttaatatggtcctgattgagcaggaggtttgggatagagatttaggcttgtcatctcactttgtcaataacacgaggagaattgatcatggggttcctccaaagctgttcattcttgttaattctagtagttcttttaaagctagcgtaaacttgggtgttcataatcctactgtgatcaccaaacctctgagagcaagtatg

SEQ ID NO: 11339 - DNA, 322 bp, Glycine max
  Clone ID: LIB3092-007-Q1-K1-G1
caagattgcagctcttctaagttcttacacctccattgaacaatggcctacacatcaccatgggtgatcgggactttacttgtttttgacaagcttttaaccgttgatttggacaaaccatttggcaaccttttgcgtaaactgagagctgcaaatccaccaccccatcttgcctaatcatcagagctagatcctatgctcctcaactccgtcagacctaaaaaacactggcttcatccaagaagggtcttgttgccattcacaagtccaaagctacctgcttgcatcttaagccttcaacttgtctagctaacactgaatc

SEQ ID NO: 11340 - DNA, 371 bp, Glycine max
  Clone ID: LIB3092-007-Q1-K1-H4
aacatttctaatctcattctccttctgttcaaacactctctctcatggcatcagataagaagattaggatcggcatcaacgggtttggaaggattggccgtttggtggccagggttgcccttcaaaggaatgatgttgaacttgttgctgtcaacgatcctttcatcaccactgattacatgacatacatgttcaagtacgacaccgttcatggccagtggaagcattttgatgtgaaggtgaaggactctaagacccttctctttggtgagaagcccgtcaccgtttttggaatcaggaaccctgaagaaattccatggggtgaggttggtgctgattatgttgttgagtcaactggtgtattcactgac

SEQ ID NO: 11341 - DNA, 411 bp, Glycine max
  unsure at all n locations
  Clone ID: LIB3092-007-Q1-K1-H5
cccacgcgtncgnccacgcgtncgcccacgcgtncgcccacgcgtncgcccacgcgtncgcgcacgcgtgcgcccacgcgtncgatttttcctctgcgcctttgcatttcagcagcacaccacaatggccaccaatgcattcactggcacatctctctccatgcgatctgtcattcctcaaacacaggcatttgcctcaatttctggcccgacatctgcttcaatttccagctttgggagaaagaatgtttcttttagcttgcagccacgcttaattcgccttaaaatttcctgtgctgccgctaaaccagagacagtagagaaggtgtgcaaaatagtaaagaagcagctggctatgcctgaaactgatgtggtgactggggagtcaaaatttgcaactcttggggctga

SEQ ID NO: 11342 - DNA, 414 bp, Glycine max
  Clone ID: LIB3092-007-Q1-K1-H6
caacaaccaacctcagtctgcatcttcagaatttgaggggatgactgcattaatgattgacgcaagatctgttagagcatatgcgtttggcctttgcatttcagcagcacaccacaatggccaccaatgcattcactggcacatctctctccatgcgatctgtcattcctcaaacacaggcatttgcctcaatttctggcccgacatctgcttcaatttccagctttgggagaaagaatgtttcttttagcttgcagccacgcttaattcgccttaaaatttcctgtgctgccgctaaaccagagacagtagagaaggtgtgcaaaatagtaaagaagcagctggctatgcctgaaactgatgtggtgactggggagtcaaaatttgcaactcttggggctgatttccttgaca

SEQ ID NO: 11343 - DNA, 402 bp, Glycine max
  Clone ID: LIB3092-007-Q1-K1-E4
ggacattgaggaaaaggccaaggaaagtaggaggaggggtttccaattctctgtcaccacagacgatgcagcaactgagtgctgaagtgactggcatgttccaagacgtaggtaagagtgcttgggacaagaaacaatggatgaggaataggaatgctgcagaagatggtcccagctcctcagcaacagccgctgctgatggtgattatcttgatgacatatatgacgatgacgagttggacatggatgagttagaagaattggaagcaagcttatccaagacatccatcctaataaaggaaacaggagctgaagcttaatcctgagagtttgtcgcaatcttcatgtgatatttttatgcctctgctgaacaatagagcatttgcctgtagccactcgctc

SEQ ID NO: 11344 - DNA, 442 bp, Glycine max
  unsure at all n locations
  Clone ID: LIB3092-007-Q1-K1-E6
gctgaatgttgctatgagggcccttggatttgagatgacagaggagcaaatcaatcaaatgatagcagatgtggacaaggatggaagtggagcaattgattatgaagaatttgagtacatgatgacagccaaaataggagaaagggacactaaagaggagctcatgaaagctttccatattattgatcatgataaaaatggaaagatatccgcattagacatcaagcgcattgcaaaagagctaggtcaaaatttcactgacagagagattcaggagatggttgaggaagcagaccaagataatgatcgagaggttagtgcggaggagttcatcacgatgatgaacagaactcgcttccatcactagtcttatctatatgggggcagttgatatncttgtttgcttgactactagtatgggaaattaaaaataaataaaaac

SEQ ID NO: 11345 - DNA, 403 bp, Glycine max
  Clone ID: LIB3092-007-Q1-K1-E7
gccaacagcacgggacttggattaattgaatctaaccatgaaatgggagaaagagagatcaccaaaaatcaacctggcttccccataaaaataatgaaccaaatacagcagctacaaaacgaaatctggctagttaaactctagaaattcgaacaaaaaatcaagtgcacccctacagaaaagcgcatggtgttggtgagcaacttctactcaaccaaacagaaaaagaacaaagagtgaaaagagaagcacaaacgaattatcatgagccaagttgctccaccgatgacttctgtaaccacaccatattatttccaattgaatgaccaagctggaatcaacatattacagcaaacagcttgactaacagaaacttgagaccaagcaagtgcataattgatat

SEQ ID NO: 11346 - DNA, 240 bp, Glycine max
  Clone ID: LIB3092-007-Q1-K1-E9
gctcactaataggaaagagctctaaaccgaacatgcgtacgtacacgtacatacacagaaatagctctcggataaattaacggacggtttaatgactgtccattcctttacaacgtccccactatttaaaccttgatttttcccaaataattacccttgcacttcatccccttttcctcctttgattcaaaaacaaagaggcccgaatcgaattatcagatttactgggtcgccgggaac

SEQ ID NO: 11347 - DNA, 395 bp, Glycine max
  Clone ID: LIB3092-007-Q1-K1-F10
caagagcaaagagccaagagggtgcaattacatgagctgaaagaagtaacgcaaaagcccctttattttttatggttagaacttagaagctgattgtgacaatggatgctcgtggagaagggtcttctacttcttactacaacgttcttggtgttagctcagattctaacgtggatgagattagacgtgcttataggaagctggctatgcaatggcatcctgataagtgcacaaggtcgccttctttgctgggtgaagctaagcgcaaattccagcaaattcaagaagcctattcagtgttgtctgatagtaagaaaagaactatgtatgatgcgggcttgtatgatcctcaagaggaagaggatgagggcttttctgattttgtggaagaaatg

SEQ ID NO: 11348 - DNA, 412 bp, Glycine max
  Clone ID: LIB3092-007-Q1-K1-F11
accctatctagccacaatgcagatattcgtgaaaaccctaacggggaagacgatgaccctggaggtagagtcatcggacacaatcgacaatgtgaaggctaacatccaggacacggagggcatcccgccggaccagcagcgcctgatcttcgccggtaagcagctggaggacggccgcaccctcgccgactacaacatacagaaggagtccacgcttcacctcgtcctccgtctgcgcggcggcgcctagaagcgcaagaagaagacctacaccaagcccaagatgatcaagcacaagcacaagaaagtcaagctcgcccttctccagttctacaaggtccacgactccggcaaggtccaaaggctccgcaaggaatgccccaacgcccgattgcggcgccgggacttttat

SEQ ID NO: 11349 - DNA, 448 bp, Glycine max
  Clone ID: LIB3092-007-Q1-K1-F12
cccacgcgtccgatttctttttgatttcaaaaattttccggaaaaaatttgaatctattttttcaagcgcagaaacctgaactaacaagctgattgtgacaatggatgctcgaggagaggggtcttctacttcttactacaacgttcttggtgttagctcagattctaacgtggatgagattagacgtgcttataggaagctggctatgcaatggcatcctgataagtgcacaaggtcgccttctttgctgggtgaagctaagcgcaaattccagcaaattcaagaagcctattcagtgttgtctgatagtaagaaaagaactatgtatgatgcgggcttgtatgatcctcaagaggaagaggatgaaggcttttctgattttgtggaagaaatgttgtcccatatggcttaagtgaggcgagagggaaagcattacggtttggaaga

SEQ ID NO: 11350 - DNA, 368 bp, Glycine max
  Clone ID: LIB3092-007-Q1-K1-F2
aaaggttttagttggagtttgagtatctaagcatggctctctcccaatcttgccggaaaacaagccttcgaaaacgatgctatctggttgcaaagcagcagaagacgcgcttctacatcttcggacgctgcatagccatgctcctctgctggcacgaccacgctatttccgattagacccttcactctaacttgcgtttcagctatgagagcatcgaaatttcgatctttgtccatatgggcacccaccctcggcgtcacgttattgcttttgccacacccgacgacaaagaggggtgtaggaaagtggaggattacaacacattgaagatcaatcactgcaaatgcaaattggattgtcttgtgtct

SEQ ID NO: 11351 - DNA, 304 bp, Glycine max
  Clone ID: LIB3092-007-Q1-K1-F3
aaaggttttaatacgagttggagtatataattatggctcttttcaactttttccagaaaaggaggtctggggaaacgaagctatctggctacaaaccagtagtagacgcactgttacatcttcggacgctgcctatccatgctcctgtgctgacacgaccacgctatttcctattagaccctgtactctaactatgcttatacctatataagcatcaaaagttatacctttgtatataatagcacccacccttggcgtaccgatattgcttttgtcatacctgacgacaatgaggcttgtatga

SEQ ID NO: 11352 - DNA, 360 bp, Glycine max
  Clone ID: LIB3092-007-Q1-K1-F4
gacaatggatccagcgtgacccattgtagcgctgacgcttgtctagggtgccatcatcaggttcctcatcttcaacaccgactgatgcaagcgccaatacgaaatacgatccatggccgagccaactgcaaatttaaattcgagtgccactctcgtgtctttcaaacccgctttcaagaagactgtttacgaaccccattgctaggactaggatcaaaacatgcgtcaccatgcgttggatttggataccttgaagggtgacggtgatgcacaggcaggggtatgcttctcccgcgatggacgagatttggcaactggttgcgctgatggaattgcgagagtattcaagacggatgatgc

SEQ ID NO: 11353 - DNA, 441 bp, Glycine max
  Clone ID: LIB3092-007-Q1-K1-F5
ggctgctcgtgcacatttgaagaattttgcacatctactgttatattgtttcaattgttataacctttttgttagcttatcttacaatgttgtgtactgaccaatttacctttttttttcctggggctttattctgaagccgaatgcaacgctagggatggttcttgattctgcagaaaaggttatttcagaagttgtgcaagagccggtgataaggcatgttcttgtttaataattattgtttttagagctggtctatctgtattttgtctttatgctgtctcttgtgctttttgatgtatcaggagattgagactatcatcgacagtgtgagatatcagtagcaatatctggaagtggcaatctttcagtggagaaagaagagagccagcaatttgggtaagtactaatttaaatggctggccttcatttctctatttt

SEQ ID NO: 11354 - DNA, 407 bp, Glycine max
  Clone ID: LIB3092-007-Q1-K1-F6
ggaaccccttcccaatcctaaaggtaaggaagtaatcgtgggttgagaatgcaggagaaggcgcagggtaggaaggaggaggtgcttaccagagagcacaccattaacctccacaagcgcctgcatggctgcacatttaacaagaaagctcctaaagctattaacgagataaggaaatatgcccaaaaggccatggggaccaatgatgtgagggtggatgtgaagctgaacaaatttgtctggagccagggaatcaggaatgttccaaggaggattatggtaagaattgctcgcaagaggaatgacgatgaatatgccaatgatgagctatactctcttgtcaccgctgttgagattcctaaggatgagctcaaagggttaggcaccaaggctattgatgatgaaga

SEQ ID NO: 11355 - DNA, 413 bp, Glycine max
  Clone ID: LIB3092-007-Q1-K1-F7
cttgcacccaaaccctggaattaagcacgttatttcattagggttggttttgttgaacagaaaaaaagagaaaaaaaaattatgggaagcgatggcgtgaggaaaccaagattcctatgccttcatgggttccgaacaagcggagaaatattgaaaacacagttacataagtggcctcaatcggttctagacaacctcgatctagtatttgtggatgctcctttttcttgccttggcaaatccgatgtagaaggcatttttgatcccccttactacgagtggtttcagttcaacaaggaatttacagagtacaccaactttgacgagtgccttcagtacattgaggaatgcatgatcaagtacggacctattgatgggcttcttggtttctcacaaggatcaatattatcggc

SEQ ID NO: 11356 - DNA, 394 bp, Glycine max
  Clone ID: LIB3092-007-Q1-K1-F8
accctagctagccacaatgcagatattcgtgaaaaccctaacggggaagacgatgaccctagaggtagagtcatcggacacaatcgacaatgtgaaggcgaagatccaggacaaggagggcatcccgccggaccagcagcgcctgatcttcgccggtaagcagctggaggacggccgcaccctcgccgactacaacatccagaaggagtccacgcttcacctcgtcctccgcctccgcggcggcgccaagaagcgcaagaagaagacctacaccaagcccaagaagatcaagcacaagcacaagaaagtcaagctcgccctcctccagttctacaaggtcgacgactccggcaaggtccagaggctccgcaaggaatgccccaacgccgagtgc

SEQ ID NO: 11357 - DNA, 314 bp, Glycine max
  Clone ID: LIB3092-007-Q1-K1-F9
accctagctagccacaatgcagatattcgtgaaaaccctaacggggaagacgatggccctggaggtagagtcatcggacacaatcgacaatgtgaaggcgaagatccaggacaaggagggcatcccgccggaccagcagcgcctgatcttcgccggtaagcagctggaggacggccgcaccctcgccgactacaacatccagaaggagtccacgcttcacctcgtcctccgccttcgcggcggcgccaagaagcgcaagatgaagacctacaccaagcccaagaagatcaagcacaagcacaagaaagtcaagc

SEQ ID NO: 11358 - DNA, 373 bp, Glycine max
  Clone ID: LIB3092-007-Q1-K1-E12
cttgaggattataggctgtcacatccggaagttactgttctggatcctccagatgccatacaacatttacgcaaccggcagtatatgcttcaggctgttgcggatatgaacctttctgattcctatggcactgttggtgttcctcggcaattagttatcaagagagacgcattagccatcccagagttggtcaacaaagctggcttgactttaccccttggtatgtatatgttggtttttcaactacttttagatgctgcggttatgcgatttctcagagcatggatgcatggacatttattgttacgagggttgtgtttttgaggcaaagtcattagaacttatgaaaataggcatgttgcaaagccactag

SEQ ID NO: 11359 - DNA, 186 bp, Glycine max
  Clone ID: LIB3092-007-Q1-K1-C1
ttatgtggtgggatattacattttaacatcaacaacaacatcaacaaaagggggtttgggggcaaactctaattcgatcgataatattttttttagttcaacccttttttttttaaatggcttatccgtactccaatatactaaatcccaccttgcaaaaaaaaacaacaaggacctttctggctt

SEQ ID NO: 11360 - DNA, 344 bp, Glycine max
  Clone ID: LIB3092-007-Q1-K1-C10
cccacgcgtccaactctttggtgcctgggatacgctcacacttcgcaagcgtttgtaatgggggaccattaggaggcaaaggtttattttgataaggcagctgtgtactttcagcaagctgttgatgaggatccttcaaatgaactttaccgcaaatcattggaagtggctgctaaggctcctgagctgcatgtagaaatccataagcagggatttggtcagcagcagcaggcggcagcaacagctggatcttctacttctgcttcgggtacaaagactcagaataaaaagaagagcagtgatctgaagtatgacatattttggatggataattctggcagtct

SEQ ID NO: 11361 - DNA, 399 bp, Glycine max
  Clone ID: LIB3092-007-Q1-K1-C11
aagagaaggaagaggagagcatggcagagattcagattctaaacctcggaggcccgccaagcttaagtacgaggaaactgccatgccattcgcattcccaaaactggacttgtttgcagcacaagctcaagtgcaacggcagattcctttgccttttctccaacaacagaaaggaggaacaagctagaaaagcattagaaggtgcactaagtgggaagaaaaatgaatttgacaagtggaacaaggaaattaaaagaaaagaagagctgggaagtggaggtgacactggtggaggtggctggtttgggtggggtaaacggtttggctggtctaatgatgataatttttggcaagaagcataacaagctattcttactatacttggtcttggtctaatat

SEQ ID NO: 11362 - DNA, 218 bp, Glycine max
  Clone ID: LIB3092-007-Q1-K1-C12
aatagaaataatataaaagcatttctgatattcagattctaaacctcttatgcccgccaaggttaatttcgaataaactgcctttccattctcattcccaaaactatacttgctttctatacattctcaaatgcaacaacaaattcctttttcttttatccaacatcataaaggataaacaagcttataaatgcactttatagagcactaattcttaa

SEQ ID NO: 11363 - DNA, 431 bp, Glycine max
  Clone ID: LIB3092-007-Q1-K1-C2
tccggtcaatcattggcaaacgtcataaaattgtttttggttgggaggattggatgaccactgaagtaagaaaggcgaaattgaatacatatttatttgacctaaaatcatctttaaggcttggtgatctatctgaagtgggtctagaaaaggaatggaaccatgtggaaattacatacgcaagtctgatagagacctcactggttaaagcaaccggaatccatgtattcagacaggatgatattcgatatgatgatccctatggcaagagaaaattagagcatgatctcaacagttttgaatcacaaccactaattaaaaaccctaagttgttttgcaggttatcgaggtgggttggccctgaaagaattataaatcttcttgggaatgctgcagatggagctttacttaccaatgccgagaagagatat

SEQ ID NO: 11364 - DNA, 403 bp, Glycine max
  Clone ID: LIB3092-007-Q1-K1-C3
cccacgcgtccggacaaggtggccaaagttcaaatctcaaagcgcttgagttcatctccctgtgtgcttgtatcagggaagtttggttggtctgcaaacatggagagactaatgaaggcgcaagcccttggggacactgcaagtttggagtttatgagggggaggagaatattggaaattaatacagatcaccctattatcaaagacttgagtgctgcctgcaagaatgcacctgacagcagcgaagctaagcgagcagttgacctcttatatgacacagcactaatttctagtggattttctcctgacagccctgctgagttgggaaataagatttatgaaatgatggccttggccttgggaggaagatggggtagatcagaagaagaggagggagatgcac

SEQ ID NO: 11365 - DNA, 415 bp, Glycine max
  Clone ID: LIB3092-007-Q1-K1-C4
tttttctctctccttagtcaaagggattcatcgttcttcttcccaggttatttagaaaagcaaaatggtgaagatttgctgcattggtgctggatatgtggggggtcctactatggcagtcattgcacttaagtgcccatccattgaagtcgctgttgttgatatctctaaatcccgcattgcagcctggaacagcgaccagcttcctatctatgaacctggccttgatggtgttgtgaagcaatgccgtggcaagaacctcttcttcagcactgatgttgaaaagcatgtctttgaggctgacatagtgtttgtctctgtcaacaccccaaccaaaactcagggtcttggagctggcaaagcagcagatttgacatattgggagagtgcagctcgcatgattgctgatgtctcg

SEQ ID NO: 11366 - DNA, 371 bp, Glycine max
  Clone ID: LIB3092-007-Q1-K1-C5
aatctcaaagcgcttgagttcatctacctgtgtgctggtatcatggaagtttggttggtctgcaaacatggagagactaatgaaggcgcaagcccttggggacactgcaagtttggagtttatgagggggaggagaatattggaaattaatacagatcaccctattatcaaagacttgagtgctgcctgcaagaatgcacctgacagcagcgaagctaagcgagcagttgacctcttatatgacacagcactaatttctagtggattttcttctgacagccctgctgagttgggaaataagatttatgaaaagatggccttggccttgggaggaagaatgggtagatcaaaagaagaaggaggagatgcac

SEQ ID NO: 11367 - DNA, 449 bp, Glycine max
  unsure at all n locations
  Clone ID: LIB3092-007-Q1-K1-C7
cccacgcgtccgttttaggatattatccatccaagactctcgctctcacagggactccatgaatgtatatttcgcactataatattagaccataaaataaacaaaataatgtggaagtttgggctaaggttgggccgagcccagttgaaattcaaattgagaagtgagcgtaatcaaagggtggatatagctgcgttaggttaacgcgttcattcaaaatacggaacttgaaaccctcccaatataaaccctcgcttccttgtgtactctctcactttccattctcttcaaacctaacgcagcatcgctattctcttcattccatggctttgcccaaccagcaaaccgtggattaccctagtttcaaactcgttatcgtcggcgatggtggcacaggaaagacaacctttgtgaaaaggcatnctcaccgagaattcgagaagaaatat

SEQ ID NO: 11368 - DNA, 120 bp, Glycine max
  Clone ID: LIB3092-007-Q1-K1-D10
gcttattctatccttttcatttccatgtaatgaaagcttctagaatattaaaattgctgcccggacaactattggttgtggctctagtcatgatgggtcagcttatcttgattttttttc

SEQ ID NO: 11369 - DNA, 236 bp, Glycine max
  Clone ID: LIB3092-007-Q1-K1-D11
acgcactcctacaaaacaactttcgcgcacgccttcggaataaagttcaagaaagcttgtatggggaactcgtgagattctattatcgaggaatatatcaagggtgttcctttcatgcatgtgttttgtgtcttcggcaatgctgtgaaagcttttgctttctcccttcattctgctgactaaactaacatctctggcgtttttgcagggatgcacaggaatttaaattgagtgct

SEQ ID NO: 11370 - DNA, 153 bp, Glycine max
  Clone ID: LIB3092-007-Q1-K1-D3
ccaacatctagaagactataatctctcctgacaatctgtgttatcatggtttaaagaaagaagtattacattcttgttcattataaattgtgtggatgtagatttttatgggatggaatgccatcattttgcaaataaaagctacctctttcc

SEQ ID NO: 11371 - DNA, 357 bp, Glycine max
  Clone ID: LIB3092-007-Q1-K1-D5
cccacgcgtccgcccacgcgtccgcccacgcgtccggaataatgttcaggaaagcttggttggggatctctggagtttcgattagcgaggaatatatcaaggatgttcttttcatgcatgtgttttgtttcttcgtcaatgctgtgaaagcttttgctttctccctccattctgctgactaaactaacatctctggcgttttggcagggatgcacaggaatttaaattgagtgcttcggtagaaatggtctcattagttagtgctatgctatcatctggttttgttgaattgtaattttttgttttggtggtatgttgaacagtaattttactggatatattcaagtctatttgaat

SEQ ID NO: 11372 - DNA, 370 bp, Glycine max
  unsure at all n locations
  Clone ID: LIB3092-007-Q1-K1-D6
gaatcccggtcgaccacgcgtncgccacgcctaggccacaccttcgccacgcctccggataaagttcaggaaagctaggttggggatgtctggagtttcgattagcgaggaatatatcaaggatgttcttttcatgcatgtgttttgtttcttcgtcaatgctgcgaaagcttttgctttctccctccattctgctgactaaactaacatctctggcgttttggcagggatgcacaggaatttaaattgagtgcttcggtagaaatggtctcattagttagtgctatgctatcatctggttttgctgaattgtaattttttgttttggtggtatgttgaacagcaattttactggatatattcaagtcta

SEQ ID NO: 11373 - DNA, 446 bp, Glycine max
  Clone ID: LIB3092-007-Q1-K1-D7
gtcaattacagtggagctgtattccgccagtacccaggtccttggcaggtgatgcttaaacaagcagatggttcttatgcttgcatagcagaaagtgcaaaccgcttcagccttggcgaggccaaagaggaattgttgagggtcttgggacttcaagaagaagagggaagttccctagaatttcttcgaagaggctacaaggcaagcacgtggtgggaagaagattttgattcagaagtatcttctgcatggcggagttgagtagtacactgttagaagagactgttttattgcatctgcatgtagtagtcattgaatgggctcccgtatattcaagaaagacatttcctgcagaactgcccaatttttatttttatttgttaatatttcgtaaggtaatatttttccattctccccctttcttgttgaaaacggatgtcacgcat

SEQ ID NO: 11374 - DNA, 404 bp, Glycine max
  Clone ID: LIB3092-007-Q1-K1-D8
aaaaaaacaactttgcggctgcgctgctgctaatagcgcgttgcatctgctacctatcatacatattttcgccaaaccgccgattccgttgagcgtttctaccgtagcgctcaggaaggaggcagtggctggtggtgttggttgtggtggaggtggttttgctgatcatttgtggtagagggtaggaaagaaaaaaaagttgaaaatgagttcagacagccgcagcaggagcagaagcaggagcccaatggaccgtaagatccgctctgatcgattttcctatcgtgatgcaccttacaggagagattcacgtcggggtttcagccgtgacaatctgtgcaagaactgcaagagacctggtcattatgcaagagaatgccctaatgtcgcaatttgccacaact

SEQ ID NO: 11375 - DNA, 394 bp, Glycine max
  Clone ID: LIB3092-007-Q1-K1-B9
cccacgcgtccgactctttggtgcctgggaaacgctcacacttcgcaagcgtttttaattccggaccaggaggaggcaaaggtttattttgataaggcagctgtgtactttcagcaagctgttgatgaggatccttcaaatgaactttaccgcaaatcattggaagtggctgctaaggctcctgagctgcatgtagaaatccataagcagggatttggtcagcagcagcaggcggcagcaacagctggatcttctacttctgcttcgggtacaaagactcagaagaaaaagaagagcagtgatctgaagtatgacatatttggatggataattctggcagtcggcattgttgcatgggtgggatttgcaaaatcaaacctggcaccgcctcccc

SEQ ID NO: 11376 - DNA, 203 bp, Glycine max
  Clone ID: LIB3092-007-Q1-K1-E1
ccaacatttaaaaaactataatctctcccgtcaatccgtgttatcatgggttaaaaaaagagggtttgcgcttcttgttcattataaaattggcggatgttaaattttatgggattgaacgcccctcttttgtcaattaaaacctccctttttccaaaaaaaaaaaaaaaaaaaaagggccgccctttttaaagaacccaact

SEQ ID NO: 11377 - DNA, 435 bp, Glycine max
  unsure at all n locations
  Clone ID: LIB3092-007-Q1-K1-A12
cccacgcgtccgcagatttcgaccaccaggacatttcaattgtaaaacttatataattataacttagttcaagatcaagggatcatcgttcatcaaacgaccacatgcaccttatcaacatcttattttcgtgttcatttctttcacatgtgcataatcgagtgtcacgttagataactgtcaatttcgtcaagccgaataatatttaagaattaaggaattaacattcaagacacacatgagaatctcaattgtcacttcctctatttggttttgaatggtcaagaagtgattacatatggacaccatccttttgtcttcatacctcgctcacatttagttaaattntgttgaccaaaaatcacttacacaattgtcacacttatttcancattatcaagtgaacatctaactaatagtttaaccatatttcac

SEQ ID NO: 11378 - DNA, 442 bp, Glycine max
  Clone ID: LIB3092-007-Q1-K1-A2
caagcagcctccaattcgtgccactctcttcaaaatggccgttaccttctcaaatctccacacagaatcaggtctcaagtccctcgacgacttcctctctgggaaggtctacgtttctggggatcagttcacaaaggacgacatcaaagtgtatggtgctgttttggagaagccaggtgactcttttcccaatgctgccaagtggtacgaggttgtctcatctcagcttgctgcaagcttccccggcaatgctcaaggggtgagattcagtggcaaagcttctgctccagcggaggctgctcctgcgaaaccggatgcttctgctgctgaagatgatgatgaccttgatctctttggcgatgagactgaggaagacaaaaaggcagcagaggaaagggaggctgctaagaagtctaccaagaagaaagagagtggcaaatct

SEQ ID NO: 11379 - DNA, 368 bp, Glycine max
  Clone ID: LIB3092-007-Q1-K1-A3
cgcgtccgcaagcagcctccaattcgtgccactctcttcaaaaaggccgttaccttctcaagggtccacgcagaatcaggtctcaagtccctcgactacttcctctctgggaaggtctacgtttctggggatcagttcacaaaggacgacatcaaagtgtatggtgctgttttcgagaagccaggtgactcttttcccaatgctgccaagtggtacgaggttgtctcatctcagcttgctgcaagcttccccggcaatgctcaaggggtgagattcagtggcaaagcttctgctccagcggacgctgctcctgccaaaccggatgcttctgctgctgaagatgatgatgaccttgatctctttggcca

SEQ ID NO: 11380 - DNA, 263 bp, Glycine max
  unsure at all n locations
  Clone ID: LIB3092-007-Q1-K1-A6
ataactgtcaacttcgtcgagccgcataatgtttaagaattacggaattaacattcaagacacacatgagaatctcaattgtcacttcctctatttggttttgaatggtcaagaagtgattacatatggacaccatccttttgtcttcatacctcgctcacatttagttaaattntgttgaccaaaaatcacttacacaattgtcacacttatttcacagntatcaagtgaacatctaactaatagtttaacaatatttcact

SEQ ID NO: 11381 - DNA, 404 bp, Glycine max
  Clone ID: LIB3092-007-Q1-K1-A9
cccacgcgtccgcccacgcgtccgcccacgcgtccgcagcattgagcaatcagtctctatgatccatttgagagagccacctcctatcttgaggccatcagagagcaattcagagacagaagctattgaaataacagtgacaaagttgcttttgagatcatactacggcattgtcagaaaaaatgttgaggatcttatccccaaagcaattatgcatttcttggtaaacaacaccaagagagagctgcacaacgtcttcattaaaaagctatatagagacaacctgtttgaagaaatgttgcaagaacctgatgagatagctgtgaaaagaaagcgctgtcgagaacttctccgagcttatcagcaggcttttaaggacttggaggaactgcctctggaagctg

SEQ ID NO: 11382 - DNA, 435 bp, Glycine max
  Clone ID: LIB3092-007-Q1-K1-B1
ggtggttaccatgccactgctcacattcttccacaaataaaattgctgctgaaccagttacggtgtctttaagtattgaaggaaggagagcattactcagttgtctcctcacaactgttgttggagtctatgcatgtgatgtggctggagctgttagcacaagtagaagagctctaaggggagccaaaattcctgaaagtgattatacaaccttgcccaatggtttgaagtactatgatttgaaggttgggaatggagctgaggctaaaaagggatcccgtgttgcaattcactatgttgccaaatggaagagtatcacctttatgactagtagacaaggaatgggcgttggaggaggaacgccctatggatttgatgtaggccaatctgagaggggaacagtccttaaaggggtggatttaggagtacaaggca

SEQ ID NO: 11383 - DNA, 258 bp, Glycine max
  Clone ID: LIB3092-007-Q1-K1-B10
cccacacatccccagatttcgatcaccaggatatatgaatagtaacacttatatagctatggcgtactttaagatcaagggatcataattcattaaacgaccacatgcaccttatcaacatgttattttcgagtcatttgtttcacatgtgcataatctagtgtcacagttagataactgtcaatttcgtcaagccgaataatatttaacaattaaggaattaacattcaagacacacatgagaatctaaattgacac

SEQ ID NO: 11384 - DNA, 366 bp, Glycine max
  Clone ID: LIB3092-007-Q1-K1-B11
cccacgcgtccgactctttggtgcctgggaaacgctcacacttcgcaagcgtttgtaattgcggaccaggaggaggcaaaggtttattttgataaggcagctgtgtactttcagcaagctgttgatgaggatccttcaaatgaactttaccgcaaatcattggaagtggctgctaaggctcctgagctgcatgtagaaatccataagcagggatttggtcagcagcagcaggcggcagcaacagctggatcttctacttctgcttcgggtacaaagactcagaagaaaaagaagagcagtgatctgaagtatgacatatttggatggataattctggcagtcggcattgttgcatgggtgggattt

SEQ ID NO: 11385 - DNA, 422 bp, Glycine max
  unsure at all n locations
  Clone ID: LIB3092-007-Q1-K1-B12
agagaatttgaatggatctgagcttcttacccaaaccatttatgttgattgggccttcaggagtggacctattaatgagtcagtcagaataaagaatgctataccacctcgagaacggcgttccaggagcccccggaggagatactgacatgtgtattgagtaaatgtttgggttgatgtgtgtggacccttaaacgtgcggattgatttttccgtggaggatttttctgatacttgtgcttccgtcaagcaaaatgcatatttgatgctgacgattctcatctaatacatcctttgttgaatggtataaacttttagctagtttattatggtgtatggtatttaacatactattgnttcattgtagtaaatgtgttttgacgtgctttttcttacatgtaatggggtaatgttgaggaacg

SEQ ID NO: 11386 - DNA, 215 bp, Glycine max
  Clone ID: LIB3092-007-Q1-K1-B2
gttggttaccatgccactgctcatattctttcacaaataaaattgctactgaaggagttagggtgtctttaaatatggaaagaagcatagcattactcactagtcttctctcaactgttgtcggagtctatgcatatgattttgctgcagctgttagcacaagtagaagatctctaaggttagccaaatttactcaaaatcattatacaaccttg

SEQ ID NO: 11387 - DNA, 374 bp, Glycine max
  Clone ID: LIB3092-007-Q1-K1-B3
cccacgcgtccgactctttggtgcctgggaaacgctcacacttcgcaagcgtttttaattccggaccaggaggaggcaaaggtttattttgataaggcagctgtgtactttcagcaagctgttgatgaggatccttcaaatgaactttaccgcaaatcattggaagtggctgctaaggctcctgagctgcatgtagaaatccataagcagggatttggtcagcagcagcaggcggcagcaacagctggatcttctacttctgcttcgggtacaaagactcagaagaaaaagaagagcagtgatctgaagtatgacatatttggatggataattctggcagtcggcattgttgcatgggtgggatttgcaaaatc

SEQ ID NO: 11388 - DNA, 425 bp, Glycine max
  Clone ID: LIB3092-007-Q1-K1-B4
cggaatcgacccgaccggcccgcgcacgcgtcgaggttttttggtctttctttggttttggtacctcggaggaaaggcaccatgtgtgtcgggtgtcaaagcagcactgattccgtggcatcttatggaagagctttggcacacatttggtgtgacaatccttgcattgttgacaaacaaacctgttctcccaccgatggtgatgctgatcaccctgcttggaacgctagagggaaccacagagccatttggaaaatgtaatagatggctgagcactaatggtgttggaatagaatggctgagtatgaaatcatgaagctggtctagagctattgagaattgagatagttcatcatcatttggcattaggaatgtcaaatcattgctttgcagtgagctgggctggctgtttattattttgagga

SEQ ID NO: 11389 - DNA, 407 bp, Glycine max
  Clone ID: LIB3092-007-Q1-K1-B6
cgaccgcccgaatccggtcgccacgcgccgttttttttctccttagtcaaagggattcatcgttcttcttcccgggtaatttaaaaaagcaaaatggtgaagatttgctgcattggtgctggatatgtggggggtcctactatggcagtcattgcacttaagtgcccatccattgaagtcgctgttgttgatatctctaaatcccgcattgcagcctggaacagcgaccagcttcctatctatgaacctggccttgatggtgttgtgaagcaatgccgtggcaagaacctcttcttcagcactgatgttgaaaagcatgtctttgaggctgacatagtgtttgtctctgtcaacaccccaaccaaaactcaaggtcttggagctggcaaagcagcagatttgacata

SEQ ID NO: 11390 - DNA, 376 bp, Glycine max
  unsure at all n locations
  Clone ID: LIB3092-007-Q1-K1-B7
cccacgcgtccggcgaaggtggtctcacttgactcgattgcaagtgatccacgacacactgttcgcttgacaaaagcttcgaatccaattcctcagtaacatctgcaagaagtcttctccttcaccatgccaccaaagcctttagactatgggtcaataaatgaaaacgtgaagaagagtcaatatgctggcagaggtgaattataccttcgagcttctgagcttcagaaagagggcaaaaagattatatttactaatgttggcaacccacatgcattgcgacagaaaccactgagcttncctcgtcaggttggtgctttgtgccaagctccattcctacttgatgatcctaatggtggactgctattccctgctg

SEQ ID NO: 11391 - DNA, 510 bp, Glycine max
  unsure at all n locations
  Clone ID: LIB3092-007-Q1-K1-B8
cggtgatgctctctggtgtggtgggtggtcgctcactggtcaacaacaacaacaaccaacaactgaacgcgcagacgcagacgccaaacgccgaataagaagccgagaaccattctctnnntcagctcaacccnnttttctttttcgatgggcttaatcggcacccacgattattctaatgggcagacctctgcagaacagaagcnnaactaggacgttnncatggattattgaatccataactcagnngccatgtgatgtgcatatgtgcnnactgtatgaaaaggannaactgaaaggagttgaaatccggcttatttcagaaatctcttcttaatgacatnnntactgatctctacannacttcatagaatggtcttgcggggacatgagtnngccctagtgtatgataagttcaaattcaacgcttacttttgccgcatggaatcgacttgtggggatcaaagcaacgaaacatttccaacaattttgaagggaaattagcacact

SEQ ID NO: 11392 - DNA, 407 bp, Glycine max
  Clone ID: LIB3092-007-Q1-K1-A11
cggacgcgtggggttctttgggtcttccttgggttttggagctcggggggaaggcaccatgttgtcaaatgtcaaagcagcactgattccgtggcatcttatggaagagctttggcacacatttggtgtgacaatccttgcattgttgacaaacaaacctgttctcccaccgttggtgatgctgatcaccctgcttggaacgctagagggaaccacagagccatttggaaaatgtaatagatggctgagcactaatggtgttggaatagaatggctgagtatgaaatcatgaagctggtctagagctattgagaattgagatagttcatcatcatttggcattaggaatgtcaaatcattgttttgcagtgagttgggcttgcttgttagtattttgaggaggatga

SEQ ID NO: 11393 - DNA, 290 bp, Glycine max
  Clone ID: LIB3092-006-Q1-K1-F7
atataatacaacatcatccaaacagacgtgcccgagaacatctatacactagtagaatcgcaacaagctaaagacacgaacctctcacataaaggattacctttacacctttgactaagcaaaatctaactcaactcctaaaaacgcacactctactaacaataatcattgatgagatccaaaaccactgaacaaaataactgataaggatattacaactaaaccagcatgctcacctacatacaatacaaaactatgaactagacttttatacatcaaccgcattcaaa

SEQ ID NO: 11394 - DNA, 54 bp, Glycine max
  Clone ID: LIB3092-006-Q1-K1-G10
aatgtacccaaactaccatataaaaccaatttcacgaacgataaaccttaattt

SEQ ID NO: 11395 - DNA, 441 bp, Glycine max
  Clone ID: LIB3092-006-Q1-K1-G11
ctcctactcgtcaatcattgtgaagaaaagaagtgaacactgactctgttattgttctgaatttcctcaccctatacaactagttttaacgaacatggaaactgaaaagtctaatgtttcaaaggctgaagaatttaaactccttgccaatgaagcattcaatgctcgaaaattctcccaagccattgatctatatacacatgcaattgagctgaacagtcaaaatgcagtttacttttctaatcgtgcctttgcccatcttcggcttgaggaatatggtagcgcaatacaagatgccacaaaggctattgaaattgatcctaaatattcaaagggttattacaggcgaggtgctgctcatcttgggctggggaaattcaaggaagctctgaaagattttcagcaggtcaagaaaatgtgtccaaaatgatccctgatgcc

SEQ ID NO: 11396 - DNA, 447 bp, Glycine max
  Clone ID: LIB3092-006-Q1-K1-G2
cgtgaatcgataagcaaccaaaccgacgtggccctgagcatctcaaagctgctgttgtcgaaagaagctcgggacaagaacctcgtgtattcgccgctgtcgttgcacgttgttctgagcatcatcgccgctggctccaagggccccacactcgatcagcttctctccttcctccgatccaaatccaccgatcatctcaactccttcgcctctcagctcttcgccgtcgtgctctccgacgcctctcccgccggcgggcctcgcctctccttcgccgacggcgtgtgggttgagcaatccctctcgcttctcccttccttcaaacaacttgtcagtgctgattacaaggccactttggcttcagttgatttccagaccaaggctgttgaagtggccaatgaagttaattcatgggctgaaaaggagacaaatggacttgttaaagac

SEQ ID NO: 11397 - DNA, 237 bp, Glycine max
  Clone ID: LIB3092-006-Q1-K1-G3
acgaccacgcgtccgtccatatccacatccaaaatctcctactttactctctctctctctcttgcaaccccgacacttgtattgtctcaagcaaccatggcaatggcaacccaagcctctctcttaaccccaaccctatccggtctcaaagccagcgaccgcgccttcgtgccatggaagcaaaactccagcctctccttctccagcccgaagccccttcaagttctccagaacaat

SEQ ID NO: 11398 - DNA, 414 bp, Glycine max
  Clone ID: LIB3092-006-Q1-K1-G5
aatgaatcgataagcaaccaaactgacgtggccctgagcatctcaaagctgcggtatacgggaagaagctagggacacgaacctcctatattctacgttgtcgatgcacgttgttctgagcatcatagtggctggctccaaagaccccacactcgatcaacttctctccttcctccaatccaaatccaccgatcatctaaactccttcgcctatcagctcttcaccgaagagctctccgacgcactctcccgacggaagacctcgcatcttcatcgccgactgcgtatgggttgagcaatccctcttaattgtcccttccttcaaacaacttgtcaatgctgattacaacgccagtttggcttcaattgatttccagaccaaggctgttgaagtgttcaatgaaattaattcat

SEQ ID NO: 11399 - DNA, 346 bp, Glycine max
  Clone ID: LIB3092-006-Q1-K1-G7
ctcttataataaaaaaaccttagcatcgactctactaactgtctctaattggcgaccccggcacttgtatgcgtctcaagcaaccatggcaatggcaacccaagcctatctcttaactacaaccctctcctgaatgaaatccaacgatcacgcctacctgacatgccaccagaaatccagcctgttcttctccagcaccaagcccctgaacttctccagaacaactcacataccatcacgtcgacgagaccacagaggcaccagcacaagatcacgctgcacccgtccggctcaccccaccagaacttgaaccaaacaccacttaacagatcttcgggggcaaaac

SEQ ID NO: 11400 - DNA, 435 bp, Glycine max
  Clone ID: LIB3092-006-Q1-K1-H1
cccacgcgtccgtccatatccacatccaaaatctcctactttactctctctctctctctgacaaccccgacacttgtattgtctcaagcaaccatggcaatggcaacccaagcctctctcttaaccccacccctctccggtctcaaagccagcgaccgcgcctccgtgccatggaagcaaaactccagcctctccttctccagcccgaagcccctcaagttctccagaacaatcagagcagcagccgccgacgagaccacagaggcaccagcaaaagtagaggctgcaccggtcgggttcaccccaccagaacttgacccaaacaccccttccccgatcttcgggggcagcaccggcgggctcctgcgcaaggcacaggtggaggagttttatgtcattacgtgggactcacccaaagaacagatctttgaaatg

SEQ ID NO: 11401 - DNA, 445 bp, Glycine max
  Clone ID: LIB3092-006-Q1-K1-H10
cggtgacgaagaaaaacacgatgctccgcgacgcgatcccggtgcggcagcgcgtggccgtctgcatctggcggctcgccaccggcgatccgctccggctagtctcaaagcgcttcgggttaggaatctccacgtgtcacaagctcgtcctcgaagtctgctccgctatacgcactcgttctgatgccgaagttcctgcaatggccgaacgaggaataaacgaatcaaatcaaagacgagttcgagaaaatctcaggaatacctaacgtaggatgagcaatgtacacaacgcacgttccaataatcgctccgaaaatcagcgtctccgcgtatttcaacaagcgccacacggagcgtaaccagaagacgagttattcgataacggttcaaggcgtggttgattcaaaaggcgttttcaatgacgtgtgcattcggttggccaggt

SEQ ID NO: 11402 - DNA, 417 bp, Glycine max
  Clone ID: LIB3092-006-Q1-K1-H11
cgcttttgttcttgcagagtaagagagaggaggtggacaaataaagctataatttttagaggggttaccaccctcaccttctgccaaaccaaacccacccttttctgtcttcaagctactatcgataaatcagtttaaatttttgtggggtagtaataattgtaccatattgagggaccttaaaaaggatctggggtttgcatattttccttgcgaatctctcagctactttggcttggctttctgaattttggtttttcagtgctgagagctgaacaagaagatggggggtggaaatcaagaggcagtcaagcagctgcagaccctgatggaaaatgtggatgatgagcagctgaagaatacattccagattatgcaccagggttatcaaacggaaacgttaatacggtttctcaa

SEQ ID NO: 11403 - DNA, 451 bp, Glycine max
  Clone ID: LIB3092-006-Q1-K1-H12
acgccttatcagatctaacagcagaacaagcacttgctgatttttccggtctcatgacgggatgtcaagcataattactccgccaaggattgccccgttgtcttgtttggaggatcatatggtggaatgtaggctatatggatgagacagaagtatgctcatattagtgtaggagcagctagcatattccactccgaatcttagatgttgagacattgagaagcctagaactttctatgaccttgtttccaatgcttttaagcgtgaaagtgtcacgagagataactatataaaacagtcatagaatgagatagcatttacagtgcaaacaaataacgggctggagcttctgaccaaaactttcaacttatgtcagaaattgaagaggactaaagatctgtatgactgggcagaggctgcctatagttatttggcgatggtgaaactaccc

SEQ ID NO: 11404 - DNA, 438 bp, Glycine max
  unsure at all n locations
  Clone ID: LIB3092-006-Q1-K1-H4
gngaaactgggaaaatggggagagcctttgtgtatgtgattcttggaggaggcgtggctgctggctatgctgctcttgaattcgtcaagaaaggagtctctcatggtgaactctgtattatttccgatgaaccagttgctccttatgaaaggcctgcattgagcaaaggatttttgcttccagaagctgctgcccggcttccatcctttcatacctgtgttggtgcaaatgaggagaggctaactccaaaatggtataaagagcatgggattgaattagttcttggaaccggagttaaatccactgatgtgaaacgtaagacactattaacaacaactggagagaccataagttacaagattctgattgttgctactggtgctcgggctttgaagctggaagaatatggggtgagtggatcagatgcagaaaatgtat

SEQ ID NO: 11405 - DNA, 209 bp, Glycine max
  Clone ID: LIB3092-006-Q1-K1-H6
gtcgaccagcgccgaggaatcgatagcaccaaccgactgccctgaacatggacagctgctgaggcggagagcgaggtaccgaacctgcggattctacgctgtcgatgcacgtagttctgagcatcatagtcgctggctccaaaggccccacactcgatcagattctctcctttctccgatccaaatccaccgatcatctaaactccttc

SEQ ID NO: 11406 - DNA, 149 bp, Glycine max
  Clone ID: LIB3092-006-Q1-K1-H7
aatgaatcgaaaaaaactcatacctacgtattccagagcatctataaattagtgttatgggtagaatctagttacacgtgcatgcgatgtaatggattttcttttctggcacgtctgtgcagacaatcggctgacttttaacaacattc

SEQ ID NO: 11407 - DNA, 408 bp, Glycine max
  Clone ID: LIB3092-006-Q1-K1-H9
ctgctctctcacgagaagaatactactaactgtgttgtaatacctgagtgtagatcaagaggaatgcatggaacatgagaacttccaagttactctctcaacaacttgcttatcctccttatcgcttggtagaagagattccaatcatgggtaaattcagtttggtgagcaatgaatcaagatgttcacagatgacagtcatttatgttggtcgatatcttgtcttggatgatattcaagctgacaaagccaaggacatcatgtcttttgtcgtcaaaggaatgtctcaaaaccataacgactgtgcttacactttccctgctacaacttctgctactcccagtagaccattcccttatcttatgaatatcattccaaccactgccaacaattccgttcaagaccacc

SEQ ID NO: 11408 - DNA, 433 bp, Glycine max
  unsure at all n locations
  Clone ID: LIB3092-007-Q1-K1-A1
aatgaccggtcgaccacgcgtccggcacgcatccgttgaaatctcactgncagcaaaaacnccnnnttggattatggattcaagggagctgaaaattgaaatggcctcttattgctctgaaactccaatacttggcgaacccgggacaggccgtgcaagggccacacacacccaaagggactctttcgggctgatttcatcaaggaagacacatgangctattgagatcctcaagctcatgtnctccactttcctcattgcactttgccaagccattgacttgaggcatttggaggagaatttgaagaacacggtgaagaacgttgtgagccaagttgctaagcggactctcaccacaggtgtcaatggagagcttcacccttcaaggttttgtgagaaggacttgctcaaggttgttgatagggagtacaca

SEQ ID NO: 11409 - DNA, 429 bp, Glycine max
  Clone ID: LIB3092-007-Q1-K1-A10
ggagttttaagtgtagaatgtaaggaagttgtttctgaatatggagaattgttatgggatctcttgggatctggggtacgacccgatgatgtatgctcacaggttggcttatgtttcaaaaggactaaatcagagagcaatggaattgagatggtgaccgaaaaggaacagagagagttgtcaactaaagatactgctttgtgcacttcctgtcagatgctcgtggtttggattcagaatcaactaaaacaaaagaagaccaaggagatagtattcaactatgtaaatcagctgtgcgagagcttgccgagtccaaatggagagtcagtagtagactgtaatagcatttatggattgcctaacatcacgtttactgttggagacaaacctttcaccctcactcctgagcagtatattctgaaaactgga

SEQ ID NO: 11410 - DNA, 394 bp, Glycine max
  Clone ID: LIB3092-006-Q1-K1-F6
ggaggaggaaggtgacatatacgacggtgttcgagctcagttccctctctcattcgggagtcaatcgaagcctcaaacccctcttgaagccatccacaatgcgacacgtcgttccaattccaatcccaaaacagccaacgaccttccttctgtctcctcctcttccagggattggctcaattccctccggcctaccaaaacccctactcctcctacttcgctgccgccgccagatcacgacgactgcccaatggtgggaccgccgtcgccttcgcccacagctgccgacgaagaagaagacgactacgacgccgagatgattggcccgcccccgcctccgacgatcgcgtcggagtccgaagacgattcggatcaagatgaggtaggaacccgc

SEQ ID NO: 11411 - DNA, 229 bp, Glycine max
  Clone ID: LIB3092-006-Q1-K1-D5
ctggtgccctctacacatgagtattcttggctactaccagatactgctatgggatgcaggccaatacagagcacacacagacactaccagagcgctgctatgctgttacttgaacaccttctatgatggttggtgaatactctacatggacttaacatgggtgacagctttgctaaccttgatgtggaacacacgacaattgaatcacccttgtacgctcagacaaggc

SEQ ID NO: 11412 - DNA, 368 bp, Glycine max
  Clone ID: LIB3092-006-Q1-K1-D6
atcacttgtctgaccaatgccgtattctgtcttctctcttctcgctacatactcttccgggccaaaaccaaactctttttctttacacgctcctccaaacccctcacactccaattctcacacctcaactacttcgtcattgtattcctagactaaccatctcaccggtatacccttgaaactttcgtggaccatactttcgaattggctcaacaagaagaagaacagatcctatctgaaacccaaacctaccttgaaagttcagagcccaaccgcgaaaactcctgacatgagagcttcactcaaccgccacaagaggtcaagctcttcgctgagaacttgccttactacgttgatagccagaaatt

SEQ ID NO: 11413 - DNA, 434 bp, Glycine max
  Clone ID: LIB3092-006-Q1-K1-D8
gttgagaactaagaaggagaagcaaatggcttcctcaatgatctcttccccagctgttagcactgtcaaccgtgccggtgccggcatggttgctccattcactggcctcaagtccatggctggcttccccaccagaaagaccaacaatgacattacctccattgctagcaacggtggaagagtgcaatgcatgcaggtgtggccaccagttggcaagaagaagtttgagactctttcctacctgccagaccttgatgatgcacaattggcaaaggaagtagaataccttcttaggaagggatggattccttgcttggaattcgagttggagcacggtttcgtgtaccgtgagcacaacaggtcaccaggatactacgatggacgctactggaccatgtggaagctgcctatgtttggttgcactgatgcttctc

SEQ ID NO: 11414 - DNA, 432 bp, Glycine max
  Clone ID: LIB3092-006-Q1-K1-E1
cccacgcgtccgcccacgcgtccgcccacgcgtccggtggctcactactcaccatggagggtgccacaacagcttctagcatcgcactcaacaagcccatgctggcattgccctcttcgtctcgaaccgcaacccctatcagagccatgaactcctccacctcctccgtcaggacctctctctcctccaacttcgtcgctccttacactggaatcaacagcgcctatagcctcttctccggccacaagctccgactctcctccctcaatccggggtcgtttcgcggctccaactccaaacgaggcgtcgttaccatggttattccttttcaaagaggaagtgcatgggagcaaccttcaccggacttagcttcttacttgtacaaaaatcgaattgtttatttgggcatgtctcttgttccatctgtcactg

SEQ ID NO: 11415 - DNA, 142 bp, Glycine max
  Clone ID: LIB3092-006-Q1-K1-E10
cccacgcgtccgcgcacgcgtgcatctgtgcctctcctaatctatatgcttctcttatcagaacaacctcagccaatggccatagtcaccaaccaattaacatacgtctatatatcatcatatcatcaccaaattaacaata

SEQ ID NO: 11416 - DNA, 439 bp, Glycine max
  Clone ID: LIB3092-006-Q1-K1-E11
tttgacaggagggaatatattccatggagctatggggttggattcccttttcctcatgcgacctgcaaagggatggtgaaactacaagactccgcttcgagggttatacttatgcggaagtggggcacatcctggtggtggtgttatgggagcacctgggcgtaatgctgctcgtttagttcttcaagaagttggagaaagaacttaaagtggtgatactgagttatgattctcacccaaatggttactgcctgcaaactggctcggaaagatggctatggctctttcattggaattatatgcagtaactattgcaaaatttgcaacgcgtcagatagaagaatcatcgtgacaatgatttatcaatttggatgagctgcataacaaagatgcagaaacctgtaatgtggatttccgaacactacaaacttgtaaatcc

SEQ ID NO: 11417 - DNA, 392 bp, Glycine max
  unsure at all n locations
  Clone ID: LIB3092-006-Q1-K1-E12
cccacgcgtccgcccacgcgtccgattttattttgacgaatatgccctggtgctgggtgggggtgtagctgcgtgcctccctccatcgcatcatactatatggatagggtgttctcagtggacgatatcttctatcacttctggcagccgtctatccctgtcttcgtcggccatacatactcccagatgatccgcagctgcttcgagtggtgcttccancgctgtctccaggaagcttccgcctccgcaccctctcctccgtcttcttactatgccgccgacgtcgtattcgtctggatcgaagatcaacctaaacccgcccctccccctccgtcaaacggcgccgttctgcccaatgcccctggttccgtcccccttgactccgacgaata

SEQ ID NO: 11418 - DNA, 400 bp, Glycine max
  Clone ID: LIB3092-006-Q1-K1-E2
gacggacgcgaactaacgaagagaaacaaaacggctttactcaatgatctcttccccagctgatacgactgtcaggcatgcccgagccggcatggctgctccattcactggcctcaagtccatggctggcttccccaccagaaagaccaacaatgacattacctccattgctagcaacggtggaagagtgcaatgcatgcaggtgtggccaccagttgtcaagaagaagattgagactctttactacctgacaaaccttgatgatgcacaatatggaaaggaagtataataccttcttaggaagggatggataccttgcttggaattcgagttggaacacgggatcgtgtaccgtgagcacaacaggtcaccaggatactacgattgacgctactggacc

SEQ ID NO: 11419 - DNA, 416 bp, Glycine max
  Clone ID: LIB3092-006-Q1-K1-E3
gccaagttcttgtcttggatgatattcaagctgacaaagccaaggacatcatgtctttggccggcaaaggaatgtctcaaaaccagaacgactgtgcttacactttccctgctacaacttctgctactcccagtagaccattcccttttcttatgaatatcattccaaccactgccaacaattcggttcaagaccaccctcaaacaccatccaaacctgttatttgtgatctaccattggctaggaaagcttcacttcatcggttcttggagaaaagaaaggatagaattgctgccagagcaccatatcaaacaagcaatcacatggcagcccttaataagctagctgaatccaagccatggctcaccttggcacctaaatcaccacaacaagacgaatctgattctgatagcagc

SEQ ID NO: 11420 - DNA, 387 bp, Glycine max
  unsure at all n locations
  Clone ID: LIB3092-006-Q1-K1-E6
nccacgcgtacgctttattctctacttcctcttccttcttcttgtttcatctgccactgggtgtgatcgctgcttgtatcaatccaaggcttcctatttctccaaagcttctgctctttcatctggggcatgtgggtatggctctttggcactagacataagtggtggacaccttgcagctggtgtggattctctcttcaaaaatggagcacgttgtggtgcctgctttcagatcagatgcacgaacccaactctatgtcgcaaacaacgtaccacactggtattgactgatcttaatcacaacactccaactgattgtgtgctaagcagcagagtctttgcagtcatggctcaaaagggtatgggccaacacatactgaagcttgg

SEQ ID NO: 11421 - DNA, 385 bp, Glycine max
  Clone ID: LIB3092-006-Q1-K1-E7
ctttttcttcttcggtgtaaactcctattccttgttgcaatcgaaaagggggcctttgggtgttcttgtctactgttgttgatgtctattactgttgctgatgggaattggcttgtgattgtgaacacacccaattcctcgccattgcaacacacccactcgtctttctctaaacgcagatgggataaggagttttctgagctccagagtggatagtatctgaatcagattcataacataacaattcaattgtggttttttgatattttggaatcaatggattcttcacaagggtctaccattgctggtttcgtggacaatgcatccatttagagaaatgagtctagctttgatggcgttcccgtgtatgttacggaactaattg

SEQ ID NO: 11422 - DNA, 432 bp, Glycine max
  Clone ID: LIB3092-006-Q1-K1-E9
gcaaaactgagcctgcagactggctttacgtctgagtatacacgaatgatgatacatgagactgagcatctaaagaaagtcaaggaatcatctggaccgaaagaagcgtcaaagaagagcaatcctctattcgaggcacccgtccaaggccagagaatgaatttactaccacatttaggtatcggcttcggcaacttaactacaattgatgtaaatactacttcaggatttgaatcgaaattgcctgaagtgcccgaaatcttcaaggtatccacaaattgttttgaaacctattgcagttactgctgttgcatgtgctgcatccagtgctgtacccggataaacagacaatgtgcaaccgcattggcacaactctgcattgggctaggatgcttcagctgcatctcatgttgatcagatatatgctgttct

SEQ ID NO: 11423 - DNA, 427 bp, Glycine max
  Clone ID: LIB3092-006-Q1-K1-F11
ctccgatttggcacattctactccttgtagcaacatacaagaatcagattcatcctgggtggctcatatttcggactctaaacttgctcacctatcttttgtgacccagattccggtgcctgtgcctaatgttcaattccgggtaccgagtttgggacagaattgtgtttcaaagttgtaccattcttcggttgcttcatcatcaatttttgtgactactgtatcactctgctgacattgcctagaatctcgatgtctgctgcatattcccatggtatcttcaattcaacttctgaggctgaggtcatgtataaatggcatttacccgaactgaatgctttggatgattctagttgttcattgacaaagtcaaggacagtggtggtcttgctgggatggttgggagcaaggcagaaacactttgaag

SEQ ID NO: 11424 - DNA, 123 bp, Glycine max
  Clone ID: LIB3092-006-Q1-K1-F12
tcgaacttaatacacgcgcgcttgcacactcatagctctcgtatcgtcacgccctaagggaaggccacggccggcgcatcacacagtcgcgactgctaaaaccctgccgtcacccagcttaat

SEQ ID NO: 11425 - DNA, 439 bp, Glycine max
  Clone ID: LIB3092-006-Q1-K1-F2
cgtgaatcgataagcaaccaatccgacgtggccctgagcatctcaaagctcgtgttgtggaaagaagctcgggacaagaacctcgtgtattcgccgctgtcgttgcacgttgttctgagcatcatcgccgctggctccaagggccccacactcgatcagcttctctccttcctccgatccaaatccaccgatcatctcaactccttcgcctctcagctcttcgccgtcgtgctctccgacgcctctcccgccggcgggcctcgcctctccttcgccgacggcgtgtgggttgagcaatccctctcgcttctcccttccttcaaacaacttgtcagtgctgattacaaggccactttggcttcagttgatttccagaccaaagctgttgaagtggccaatgaagttaattcatgggctgaaaaggagacaaatggacttg

SEQ ID NO: 11426 - DNA, 426 bp, Glycine max
  Clone ID: LIB3092-006-Q1-K1-F3
aaagacaacaccgatatcacccattccaaacaaaggccgattgcgtaactactgcggaaagtcggaagctcttgacatgtaccaattctgtctcaaactctcgctcctaatttcactcttccatctctcctttgctgctaggagactcaaacagctgcatcaggaccagtcacagctactccattaccacaacgatcctaacctatacggctaaaacgtcttgaacctaatctggtatgatcactttaaaccatgccaaactgccatcatcatcgacgacggtacctgactggcatactcatcgtctcacagcagtcagtcttgtcgtgccacctggtctaaaaccacggacaaatactaccacctgtattccaaaaacaagaatgctgcatcttctcttgatctatcactgggcgatcagtttct

SEQ ID NO: 11427 - DNA, 412 bp, Glycine max
  Clone ID: LIB3092-006-Q1-K1-F5
catgaatcgataagcaaccaaaccgacgtggccctgagcatctcaaagctgggtgagtcgaaagaagctcgggacaagaacctcgtgtattagacactgtcgttgcacgttgttctgagcatcatcgtcgctggctccaaaggccccacactcgatcagcttctctacttactgcgacccaaatccaccgatcatcttaactccttcgcctgtcagctctttgccgtcatgctctcacgacgactctcccaacggcggaactcgcatcttcttcgccgacggcgtctgagttgagcaatccctctagcttgtcccttacttcaaacaactcgtcagttctgattacaaggtcactttggcttaattgatttccagaccaaggctgttgaattggccaatgaagttaattcat

SEQ ID NO: 11428 - DNA, 426 bp, Glycine max
  Clone ID: LIB3092-006-Q1-K1-D4
aaagagaacgaagacaaacgaaaacgcttactgaacgatctccatcccaggggctaccggcgacaaccgtgccggtgccggcatgggtactcacatgcacacgactaaaaagcatggctggagtcctcacaaggaagacctaacatgacatcacctacattgctagcaacggaggaacattacaatacatgcagatcgggccactaattgatacaatgaagtactcgactctaccctacttaccagacatgaaatcaaccacaacaagtaaaggaaagtgacatctaaaaaaggaaaggatggatcccttgcacgtaattatgagtcgagcacgggcgtgagaacgctcagcacagcatgtcacctagatactaggatggacactactcgaccgagaacaagcaaactatgaacggcagcactgat

SEQ ID NO: 11429 - DNA, 357 bp, Glycine max
  Clone ID: LIB3092-006-Q1-K1-B4
atcacatctctaaccatcgccctatactatctactctctcgtacctcctcattctaccaggccaatacggtaccctgtctctttacaccaatttacaaacccctgacactcaaattttcatccctcaacatctccgtctttctctaccttaccggaccaactcaacattctcctcttgtcacctatcttgaccacacttacgatcgtacctaacaagcataacaacagattctcagtcagactgaagcatgccacgaaagatgaaaccccaacttaaaatactccgacgatgagagctctctcaaaccgacctatgaagtctacatcttccttgcgaactctccttacgacttttat

SEQ ID NO: 11430 - DNA, 313 bp, Glycine max
  Clone ID: LIB3092-006-Q1-K1-B6
acggacgcgtccgatcaagtttaagggtagctgtgtatgctttttactatgccaaggctcatgggggataggcgatttctgccatacacaaagccaatattatgcataagacttatggcctttttctcaagtgttgccttgaggttgtagacaaatatactgatataacttatgacgaagttgtcattgacaattgctgcatgatgcttgtgaataatcctgcacttttccatgtactagtgatgcctaacctttatggtgatattatcaatgaccattgtgctagcttgattggaagattgttcttaacacc

SEQ ID NO: 11431 - DNA, 419 bp, Glycine max
  unsure at all n locations
  Clone ID: LIB3092-006-Q1-K1-B7
attttattttgcagctatttttcgatccttgttatacgaggcatgcggtcgaattgttgacccaatttacgggtcagtgggtttgttatggtccgggagctggcagctctgtcaagccgctgtggaagccgttttgaaaggtgagccgatcacgccgataacatccgaagccgcggctaatgggcgggccccacctctcaaggcctacgacatacgccacgtgtcaaaagaccagaactcggcaaatgaaactccaaagaccaagacccggtcccggttcaagcgaaccagcggcacgcttattaaaccgaaggccagcaaaggaaccgggttcgttccggttgagccggagatggcgaaccggactgcgagtcatgagtcggngctgagccacttgtcggaagccacggcgatgggtg

SEQ ID NO: 11432 - DNA, 432 bp, Glycine max
  Clone ID: LIB3092-006-Q1-K1-B8
attgtattttgcagctatttttcgatccttgttatacgaggcatgcggtcgaattgttagcccaatttacgggtcagtgggtttgttatggtccgggagctggcagctctgtcaagccgctgtggaagccgttttgaaaggtgagccgatcacgccgataacatccgaagccgcggctaatgggcgggccccacctttcaaggcctacgacatacgccacgtgtcaaaagaccagaactcggcaaatgaaactccaaagaccaagacccggtcccggttcaagcgaaccagcggcacgcttattaaaccgaaggccagcaaaggaaccgggttcgttccggttgagccggagatggcgaaccggactgcgagtcatgagtcggggctgagccacttgtcggaagccacggcgatggtggagggggaaagcaa

SEQ ID NO: 11433 - DNA, 412 bp, Glycine max
  Clone ID: LIB3092-006-Q1-K1-B9
caatttctctctcttctgctctcactctctcacttgggggtcgaagatgagaatgggtggagcagccatcagcagcagctacaccaccacgtccagattcgcttttagtgtctgctctctctcccctctccagtcctgctcaaaaccaagttcctgccttcactttctagaatttctgtcaagcgtctctgcttcctgttacaaagtcatgcgcacatttgcgcgaacaagccctgcatgaacctgttgaacagactcgcgtttggcatcgcaagagcaccagacaacattgattcatccattcctcagggtccagatgatgacataccagcaccaagccagcattttgcctagtttggtgctggctgcttttgaggtgttgagttggcctttcataggttgcctggtgtga

SEQ ID NO: 11434 - DNA, 116 bp, Glycine max
  Clone ID: LIB3092-006-Q1-K1-C11
caaatatcgacgtacggtggactgatctaagaaaatattctggttcttatatatgaggccggttccattcaatggaggaaatcccaatgcctgatattatcattaacaaaccagat

SEQ ID NO: 11435 - DNA, 436 bp, Glycine max
  Clone ID: LIB3092-006-Q1-K1-C12
tgtttttgcagaattgcttccaaagcaccatatcaactagcaaatgggtcttctaaccaggcagctgagtccaagccatggcatggactgagtgcttcttcacctcgaatctgagagcagctatagtttatatgtaatttttaagcattatttttgttgtgaaaatgctaactagtcagaagcttttttgccagaattcttgactaattttctggttatattttttttcctgactaaatagcattattacttcttttttctcttttttttcgtcgataaaaaaacctcttttttttttttctttaaatgattttcagatgatttatgggcttcttgctaggcctgtatttgtcatagtaatgttggctctgctgggccgtatcatagatctaactattggttagttgatgctgctctaattatagggaattcaata

SEQ ID NO: 11436 - DNA, 439 bp, Glycine max
  Clone ID: LIB3092-006-Q1-K1-C2
accacgcgtccgcacattttcatcctcgggttcgccacagcaaagagtgaacgcttttggaagggtagaatggtccgatgggaagcacgtggttggaaccccaatttcgattaattggggttgatgcaaggttcatcactcactcgaatagggggtgtgtcttgattggttgacattgatgatagcggggacctcgtgcttgattggtgttggttctgtttgttccctgggagaaatgttgcaaaggggaaaaaatgtttggctcatgtgtttcttttcttcccggtgtacagcgttctaatcattgatgaatatttttcgtcgaccatcttgacattaaagtttatgttcaactactttaaagtgaattcatttaactttccattttaatttaatgtttgcatcaaagccactagtagttgtaaccattctcgtacgc

SEQ ID NO: 11437 - DNA, 432 bp, Glycine max
  Clone ID: LIB3092-006-Q1-K1-C3
ggtcaatccaaagccaagtttcaaatggaaccaaacaccggagtgacatttgatgatggggcttgagtggatgaagccaagcaggactttatggaggtggtggagtttttaaagaagcctgagaggtttactgctggtggggctcgcattcctaaaggagttcttcttgttggtcctccaggaactgggaagaccttgttagccaaggctattgctggtgaagctggtgttccatttttctctatatcaggttctgagtttgttgagatgtttgctggtgttggtgcttctcgtgttcgtgatttgttcaagaaggcgaaagagaatgccccttgcattgtctttgttgatgaaattgatgctgttggaagacaaagagggactggaattggtggacggaatgatgaaagagagcagaccctcaaccaactt

SEQ ID NO: 11438 - DNA, 431 bp, Glycine max
  Clone ID: LIB3092-006-Q1-K1-C5
ctagacactacattcaaagacggttattacgtaataaccgtctttgaattggtctaaatgtcaaagacggttattataataaccgtcgtaaaaagcagttgtgtttcaacgacgttatatacaacgacggtttacaaccgtcgttaaaagcacttaataaccgtcgtaaaaagctatttttctagtagtgaccgttgtaggaccatacatgtctaaacattaattattaataaaatacctaatctatgaagaaatatagtactactattttatgtttgataatcaaactgaaatatattatcatttcatggatataaatcataagagttcaatgagtatcaaagtcaacctattaaaaatcacagttatacgcgtaacgtttaatataattattataaaagttgataaatttattaatcatataaaattat

SEQ ID NO: 11439 - DNA, 255 bp, Glycine max
  Clone ID: LIB3092-006-Q1-K1-C8
cccacgcgtccggagtctgtctttgttgcgtttcgagtgtctgtggaatccctaaccctgatttattgtgtggcgaaatgggatcaattggggtactcctggtggctcaggtgataccgtacctggagcaagagctggacaagcgctacaagctgtttcgggcgtatgatcagccgcagacggcgcaggttctaagccagcacgcgagctcgatccgtgcggtggtcggaaactcgaacgccggggccgacccgg

SEQ ID NO: 11440 - DNA, 382 bp, Glycine max
  Clone ID: LIB3092-006-Q1-K1-C9
caaatattgacgaaaggtggtctgaaagaagaaaatattatcgattttatgtatggggacgttgcattcaatgggtaaaacccaaggcctgtagtcatcattaacaaaccagattgatgtaatgtttataaagtgagtccaaaggatcacaccgtctaatatttgactaatgattacttttctgctgattcatttggatatttattatgcactgacttatgtcagtgtcaatgttgtagacagtgatcctgatgatcatatattagtttactatactgaccatggaagttcttatgtactcagtatgcatgctgattatgacttatactcggatgatctgatcgaagtcttgaagattaagcctgcttcttgaacatataca

SEQ ID NO: 11441 - DNA, 433 bp, Glycine max
  Clone ID: LIB3092-006-Q1-K1-D10
ctttgatctctgatggagacgttccgtgtttagtagcaagggttagttgaggccttgtgtgtggaaacgtacggtgtcgttttggagttgggaaaacaaataattctgagagatggcaaccacgaacccttttgatttgttgggtgacgacgctgaggacccttctcagctcatcgccgccgagcaactcaaggcggcggctgctgctgcggctgccaccgtcgctcccaagaaggcgccggctcagcagatcaagccggctcagctccctagcaagcctcttcctccggctcaggctgtgagggatgccagaaatgagtctgttcgtggaggccgtggaggtggacgaggtgggggacgtggatttggacgtggtcgtgggtttagtcgtgactcttccaatgacgagaactcattcccttaccagcggagc

SEQ ID NO: 11442 - DNA, 193 bp, Glycine max
  Clone ID: LIB3092-006-Q1-K1-D11
gtaagatgtatgatggatacgtgccgaccataatatccacgtggataatagaccttatgcgctgaaacacacaggcgaccaattgcaaccacccgaacatcctaaccatgtgatatgacaacgactgaccctttagatatgatgcgctactacgctcttgacccttattacttgatgatccccatgctgctaa

SEQ ID NO: 11443 - DNA, 130 bp, Glycine max
  Clone ID: LIB3092-006-Q1-K1-D12
ctcatacaggcgcctgtgctagtgctttatccccgctatccctaactctagaactgggcgggatttgcaccagcacaagaagcatggctacaatatctatcccttactgcatgaaagtctgggacatact

SEQ ID NO: 11444 - DNA, 254 bp, Glycine max
  Clone ID: LIB3092-006-Q1-K1-D2
aaacttggtgttttctttcttgtgctaagaaggatctatatctatatccttgaattatcgtatcttttatatctttctaaatcgatgtttgactgatgaccattattgaacctttcttttagtattattactattgctataactatgctacttgaatttatgacacctagggtaactttcggggatttaattattgatgcgctcacgaatccaatctcttgcacaaacttgatccctggtatcatacgaaaaca

SEQ ID NO: 11445 - DNA, 416 bp, Glycine max
  unsure at all n locations
  Clone ID: LIB3092-006-Q1-K1-D3
cccacgcgtccggtagctgccactagtactcatcctcatcctcaacctcaagtctctaaggaattagcacctcaactcaaattaaaacaacatcatcgctagtttgctagctgctaattaacacccattaattcttgttggtcaatactaaacagtactaaacatgggtgtctgctttgcttcgctcgctcgccaccaaacaccctctaaatccattccctacgcaggttcagggcgtgagtccttggggagcaaggatgagaatatggggattactgaaagcactagtagtgttaatggaggaagctgtagtagtcatagcagcaagaacattgtgtttcctagcgtggaagtgcggaacctgaaggagttcagttttgcgaatctgaaacagncaccaagagtttcaaatcgat

SEQ ID NO: 11446 - DNA, 376 bp, Glycine max
  Clone ID: LIB3092-006-Q1-K1-B2
catatgcacgagaggtggatgaccataaacgcacattgctcttggttaataaggcagatggtttacccgcttctgtcaagtttaaactttttgtatatggtttattgttatattccgttaaatcaacactcttggttttccatccagctaatattcttatcatttgtcttctcccctgcccttttttcttgcagagagaaatgggtagagtatttttgagctcataatattctatatatcttctggtcagctaaagctgcttcatcagctgttgaatgtaaaatgcttaagtcaccattggaagctgatgattcagggaagaacaatattccacacacgaagatatatgacagggatgagcttctttctcggatgc

SEQ ID NO: 11447 - DNA, 293 bp, Glycine max
  Clone ID: LIB3092-005-Q1-K1-G8
tgccttaggacagcacaagaagcatatctcaatatcaattatggaatgtccagatcaactgccgagggtattgaccaggcaatgacccatgctgcttacacaaaagtcaaatttgttagtgtaaatctttctgtggaagcacaattacatgattttccatataggactgaagcacatctatgtggtggatatcggcatcctgcttcaacttacagagatggtatacaagaagtggcaaggtcaggacatgacattgatattgagtgggtgcacgtagtgtttaaagcttatcc

SEQ ID NO: 11448 - DNA, 290 bp, Glycine max
  Clone ID: LIB3092-005-Q1-K1-H10
gcgtacgatttacggctggtgagtaccacttctattcaatgaacggtttacaaaacattcaacggtggcctttggacacttggtagggcttctgataaaaggtccgctggagtatctacatatgactctacttatgctcaaagctctgctactgcacacaccaatggatgctacccacagcccacatatttatgccaacgaatcccaattggtcgaaaacactttgggttgggaggcactaagtgtcttacaagccattgtacatagacacaactgatcgactggttctg

SEQ ID NO: 11449 - DNA, 317 bp, Glycine max
  unsure at all n locations
  Clone ID: LIB3092-005-Q1-K1-H12
cacgcgtncggaaatttgtttttgctggcccttccaaatctgctgatacccttttcagatatatagctgcggagctggtcccggttcaatacggtggtcttagcagagaggctgaacaggaattcacctctgcttaccctgttacggagtttactattaaacccgctaccaaacattctgttgagttccctgtttctgagaaaagccatcttgtttgggaaatccgagtggtgggttgggatgtcagctatggagctgaatttgtgcccagcgctgaggatggatacactgtcatagtacacaagagcaggaaaatt

SEQ ID NO: 11450 - DNA, 374 bp, Glycine max
  unsure at all n locations
  Clone ID: LIB3092-005-Q1-K1-H7
aatgttcanaaaccagtacgacacggacgtgaccacatggagccctgcggggaggctgttccaggtggagtacgctatggaggcggtgaagcatggctcggcggcgatagggctccgatcgaagacccacgtggtcctcgcatgcgtcaacaaggccaactccgaactctcctcgcaccagaagaagatcttcaaggtcgacaatcacatcggcgtcgccatcgctggcctcaccgccgatggccgcgtcctctcccgctacatgagatccgaatgcatcaactataattacacctacgagtcgccgctccccgtcggcagactagtcgttcagctcgccgataaggctcaggtttgcacacagcggtcttgga

SEQ ID NO: 11451 - DNA, 277 bp, Glycine max
  Clone ID: LIB3092-005-Q1-K1-H8
cgggcaagaggaggagtcgttgagcgtaacttttgcccggaacaacgtctggctacccaatgagcggctgcgcctgcaatcgcgagacagaccgggacttggggttggaccacagcgacgcgatggtccacagttgcgtcatgcacaggagtgggcttacgatttcatcattgagtgacacgacgaccttttctgagagcttacaacttctaaagcgatgaagaagagaggctgctacttgggagcatgtgataagatacaaggaatatactttgag

SEQ ID NO: 11452 - DNA, 327 bp, Glycine max
  Clone ID: LIB3092-005-Q1-K1-H9
cttgtgtttcaccacttctatgcaatgaatggtttccaaaacattcaactgtggcctttggacacttattaatgcttctggaaaaaggaccggtggagtatcaacgtgtgattctacttatgctcaaagctctgctacagcacacaccaatggatgctacccagagtccacatatttatgcaattgtatcccaattggtagaaagcactttgtgttgggaggcactaagtgtcttacaagcccttctacaaagatgcagctcattgactggttctcatacatatgaacctgcgtcattggagaatggaattggtggaactgaagaaa

SEQ ID NO: 11453 - DNA, 107 bp, Glycine max
  Clone ID: LIB3092-006-Q1-K1-A1
gattttaattggtgcaactgatactgatggtgattttcttgttaagttttgattcaagagtaataaagactcttctctatggtactatagaaaaggacttttcttcc

SEQ ID NO: 11454 - DNA, 385 bp, Glycine max
  unsure at all n locations
  Clone ID: LIB3092-006-Q1-K1-A10
tcttaactcatttaacttcacaactttctcttactaatagcaccatttttaatttgagtccatctccaaagccttcaaaacctacccttagcaattcggtaccatccttaagaacggctacatcgtcttcaaatgccttccttgatagtttttttaattttttcttacattattgtaatgcacagncacgctatattttaattttatctaattgttattttcacttctcagaaacttgacgatattttgccctattcttacaattatgatgttcctcatgttaatcgttctgattaccatcttattgatattgctcaagatggatttttgagtctgcttactgaaaattgtaacactaatgttgacctcaagctttccactgatt

SEQ ID NO: 11455 - DNA, 438 bp, Glycine max
  Clone ID: LIB3092-006-Q1-K1-A2
cattataaccctgaaactccatttcactcacagaaaagtagagatatagagagagaaagtgcggcagagtacacacatacacaccacttcttcaagagagagaggtgtgagaaggaaaataagaactgaaagaaaaattgtgctaatggcggaattaaactttgcaaagttaacaactgataaagaagatcagtgatgcgcctctctcttggtgatgatggtgctctttgcagagaaaatctcactgcagcactcacacgcacacccttcttcgagtctgaatctggatcagtgacaaattcttcacaaaagggtcgctgactcttcatagagacacagatcatgacgttggatgcaaaatcctagacacactttgggggttatggaaacagactatatgaaccatatagattgcaaggattccgagccagagttttt

SEQ ID NO: 11456 - DNA, 414 bp, Glycine max
  Clone ID: LIB3092-006-Q1-K1-A3
gcgtccgctcttttctttgcgcgctgggttttagcgcagcttcttctagatttaaggaagatggggtatgaaagggttcacatcagtattgtggtcattggccatgtcgactctgggaaatccactaccactggtcacctgatttacaagcttggaggcattgacaagcgtgttattgagaggtttgagaaggaagctgctgagatgaacaagaggtctttcaagtatgcctgggtgctggacaaacttaaggctgagcgtgaaagaggaatcaccattgatattgctttgtggaagtttgaaacaacaaagtattattgcacagttattgatgcgcctggacatatggatttcattaagaataatattactgcgtgcaacatcgcatgctgattgtgctgtttttatcattga

SEQ ID NO: 11457 - DNA, 315 bp, Glycine max
  Clone ID: LIB3092-006-Q1-K1-A5
agcaagtctaagggtagctgcgtatgcttttcactatgccaaggctcatggaacatagagggtttctgccatacacaaagccaatattatgcaaaagactgatggacttctcctcaagtgtggccgagaggttgcagagaaatatcctgagacaacttatgaggaagttgtcattgacaattgctgcatgatgctagtgaagaatcctgcacttttccatgtactagtgatgcctaaccttcatggtgatattatcagagacctttgacctggcttgattggaggattgggctaaacacccaagcttgcaacatt

SEQ ID NO: 11458 - DNA, 168 bp, Glycine max
  Clone ID: LIB3092-006-Q1-K1-A6
gcgattctgagcgaaaactgaagccatgcatatctattgtgaccttcatactgtgcttaggctctatcatctccctctctctggggcccaaattcgcgtgggacccaaccacttctgtgcgaatgagtatattcatcagaaacctgatgagatgacccagattgaccc

SEQ ID NO: 11459 - DNA, 368 bp, Glycine max
  Clone ID: LIB3092-006-Q1-K1-A7
gcgattaccaacgactgctgaagccaggcatgtctactctgacctactcgggaagcttggcctttatcaaagcaggacctctgtgaccacaatacagagaggagcaatcaactaggcttgaaaggagtacatagatgatagtagcagtggaagggcccagtacatacagatctcgaagaaccagtgaagctccagcaatggttgaaagatagtccaagagacaagatgaaagagtggctgtgaacatatacaaacccgagaccccttacgttggtagatgccagctcaacacaaaaatcactagagatgatgctccaggagaaacttggcacatgggctgcagcaccgacggagagattccttacaga

SEQ ID NO: 11460 - DNA, 433 bp, Glycine max
  Clone ID: LIB3092-006-Q1-K1-A8
gcaaaatccaaacacactctctctccccatggcgttgaacaatggcgtccccgccaccggcaccggcctcatcgtcagcttcggtgagatgctcatcgacttcgtccccaccgtctctggcgtgtccctggccgaggcccctggcttcctcaaggcccccggcggcgcccccgctaacgtcgccatcgccgtgtcgcgcctcggcggcaaagccgccttcgtcggcaagctcggcgacgacgagttcggccacatgctcgccggaatcctcaaggaaaacggcgttcgcgccgacggcatcaactttgaccagggcgcacgcactcgcctggccttcgtgaccctacgcgccgacagtgagcgtgagttcatgttctacagaaaccccagcgccgacatgctcctcaagcccgaagaactcaatctcgaactc

SEQ ID NO: 11461 - DNA, 403 bp, Glycine max
  Clone ID: LIB3092-006-Q1-K1-B1
catatgcacgagaggtggatgaccataaacgcacattgctcttggttaataaggcagatgttttacccgcttctgtcaggtttaaactttttgtatatggtttattgttatattccgttaaatcaacactcttggttttccatccagctaatattcttatcatttgtcttctcccctgcccttttttcttgcagagagaaatgggtagagtatttttgtgctcataatattctatatatcttctggtcagctaaagctgcttcagcagctgttgaaggtaaaatgcttaggtcaccattggaagctgatgattcagggaagaacaataatccagacacgaagatatatgacagggatgagcttcttgcacggatgcagtcagaggcagaaaagatagtagaga

SEQ ID NO: 11462 - DNA, 413 bp, Glycine max
  Clone ID: LIB3092-005-Q1-K1-G7
cccttgtcgaccacgcgttcgacccacctgggcatattccttatggacagcacaagaagcatatcgcaatagcaatgatagaatgtccagatcaactgccgaggctattgaccaggcaatgacccatgcggctgacacaaaagtcaaatttgttagtgtaaatctttctgtggaagcacaattacatgattggccagagaggactgaagcagatctatgtggtggatatcggcatcctgcttcaacttacagagatggtatacaagaagtggcaaggtcaggacatgacagtgatattgagtgggtgcaggtagtgttgaaagctgatcctggggttagaatggaagatatcgaggatcaagcaccaagacggcggaaggaacatcgtcgtgttccaagtacagtggcaatag

SEQ ID NO: 11463 - DNA, 92 bp, Glycine max
  Clone ID: LIB3092-006-Q1-K1-B10
ctggattctaatgtagtgagtcgccggcgttttccactctaagcacatcatcattcaaatggggtggcacaccatgataagatgtttattga

SEQ ID NO: 11464 - DNA, 388 bp, Glycine max
  Clone ID: LIB3092-006-Q1-K1-B11
tcgagatcagaaatttcctcggcgagaagaaggtgaggaaagtggacatgcttgagggcgtgtcggctgttagatctgaaaaggtcaaagatgaattgctcttggatggaaacgacattgaacttgtttctaggtcatgtgctctcattaaccagaaatgtcatgttaagaacaaggatatccggaagtttcttgatggtatttatgtatgcgataagggaacaatattggaagagtcgaggatgaaaacatttgtgttggtttttgctttggagaccctttttgttaacttgctgagatatgattttacaatttgtgttgtcaaacttttccttttgggattcttttttaaaaacatttatttctatatatgctttggtattgaata

SEQ ID NO: 11465 - DNA, 431 bp, Glycine max
  unsure at all n locations
  Clone ID: LIB3092-006-Q1-K1-B12
agaaaacccagttagatagagagaagaagaaagcgtttctggaattttcgtttcgctggtgtatcgtgtgcgtctgcgtgtggaggttcttttctttgcaactttccttcaaattctagattccttccctttcttttctttcccttataaccaccaacctctccctttccctctttattttccatcatccttctccctaacgttttctagaatataaaatggcggaagaacacagatgtcaggcgccgcgcttctgcgccaacaattgcggtttctttggcagccctgccacgcataatatgtgttcaaagtgctaccgcgatttccagctcaaagagcagcaatcttccaacgcgaaaatggttctgaatcagtctctcgttccgccaccgnctccgtcggtgatttctcagccgtcgtcttcttccgct

SEQ ID NO: 11466 - DNA, 328 bp, Glycine max
  Clone ID: LIB3092-005-Q1-K1-D5
tttcaattctctatgcacacatcaaactcgtcactgggttgttcttaaactcacagcaaagactatttgcatcaccaactactttctagcttattatatattcaaaagttgtgaagaatatgagttcaacaagccgtgcttgggcttggaccgtggcagctggtgttggagtggtggaggccatgaaggatcagggtatctgcaggtggaacagtgtgatgagatcagcacaacaacatgctaaacataatatgaggtctttgtctcaaaccaagaagctttattctcaatcatctgttatggcttcagccaaattgaaagatgagaa

SEQ ID NO: 11467 - DNA, 379 bp, Glycine max
  Clone ID: LIB3092-005-Q1-K1-D6
cattttgcttcttccaatttttcattttcgcgctagtgcttcgttcttcgccatgagagggggttctccttcttcatcttcctcccgttgttcgcgtttctggtcgtcggcgctccgatcgaagcgcctcgtgtcgccggcggaaaaggccgcccgcgacagctccgacctcggcctctcccgccgcctcggcgttctcgacctcgtactcctcggaattggcgcctccatcggcgccggcatcttcgtcgtcaccggcaccgtcgcccgcgacgccggacctggagtaacaataagttttatacttgcgggagcatcatgtgttataaatgcactctgttatgctgaactagctacccgatttcctgcttgtgttgga

SEQ ID NO: 11468 - DNA, 391 bp, Glycine max
  unsure at all n locations
  Clone ID: LIB3092-005-Q1-K1-D7
gcgtncgaacagaaactttgtcagaatgtggaagccacgtgtcgttcccagtgttctctctttgctggttcttcttcactcgctgctcgggatggtctctgcacaaggcattatccgaaccacttggaacactctcactggttcgtgtctcgtttcattcttctttctctcccttctgtttcacacttattcatatgttgccgacaaaatgcaccaaaaaataaattataagaggaattgttcgaagcttgacttagcttgtttagtgttccttcgttcatctttgtcgagctcgtgctttgaaaattatgtatttatttatatttgatgtttgtagaatttgagtgagtacgaaagtgagaattttacagttggagcaggtaatcaactc

SEQ ID NO: 11469 - DNA, 396 bp, Glycine max
  Clone ID: LIB3092-005-Q1-K1-E12
cgcgttcgcccacgcgtccgatctttgaacgacgcataatgttcatccaatctccgaatcctttaatggcattgcaaccatgtcgaggggaaaggtcagagagccaaaggaggaaaacgtgactcttggcccagctgttagagatggcgaacatgtctttggcgtcgctcgcatatttgcctcctttaatgataccttcattcatgtcactgatctgtctgggagggaaacgcttgtccgcatcactggtggaatgaaggttaaggctgacagagatgaatcatctccttatgctgctatgcttgcagctcaagatgttgctgccagatgcaaggaacttggcattactgctcttcatatcaagcttcgtgccacgggtgggaacaagacaaaaac

SEQ ID NO: 11470 - DNA, 374 bp, Glycine max
  Clone ID: LIB3092-005-Q1-K1-E3
ggcttgcttagctgttgttcaaccatctactgttaagagcctttctggaactaagctcggtttcaagccctctcgccagagtttcagacccaagaatttcaggagtggtgctgtggtatcaaagtatggtgacaagagtgtgtactttgatttggaggatctaggcaacactactggtcagtgggacttgtacggctccgatgcaccttcaccctacaaccctctttagagcaagttcttcgagacatttgcctctccattcacaaaaaggggattggtactcaagtgtttgatcctgggaggttggtccaccctggcatatcttatttccacagctttatgtgacattctaccaatcatgaaaggcccacaat

SEQ ID NO: 11471 - DNA, 350 bp, Glycine max
  Clone ID: LIB3092-005-Q1-K1-E7
atgccttatggactgcacaagaagcatatcgcactagctatgatagaatgtccagatcaactgccgtgggtattgaccagacaatgacccatgcagatgacacaaaagtcaaattgcttagtgtagatctttctgtgtaagcacaattacatgattgtccagaaaggactgaagcagatccatctggtggatatcgacatcctgcttcaacttacagagatggtatacaaaaagtggcaaggtcaggacacgacagtgatattgagtgggcgcacgcattgtataaaactgatcctgtggtttgaatggaagatatcatggatcaagcaccaacacagctgatggaacat

SEQ ID NO: 11472 - DNA, 425 bp, Glycine max
  Clone ID: LIB3092-005-Q1-K1-E8
acgcgtccgcgcacgaatatcttgttgtttggagcgatccgagaaaaactctgttaacatgttggtttagcaggacctccttacaggtgatgagcttctctctgactccttccgttacaaggaaattgagaatggaatgctgtgggaagttgaggggaagtgggttgttaaaggagcagttgatgtagacattggtgcaaacccttctgctgagggtggaggagaagatgagggagttgatgatgcagctgttaaggttgttgacattgttgacacattcagacttcaggagcaacccgcattcgataagaagcagtttgttaccttcatgaagaggtttatcaagaatttgactcccaagctcgatgcagagcaacaggagttgtttaagaagcacatcgagggagcaactaaatacctgctct

SEQ ID NO: 11473 - DNA, 341 bp, Glycine max
  Clone ID: LIB3092-005-Q1-K1-F3
cccacgcgtccgcagaaaggaaaaaagaagtaaatgagagaaagaagaaaaatatgagtggcttgaatcgtgtttggatggcggcaacggtggcggtagcgcaaggccacaccgatcccggccacaagtgcaagacggcgctcaactccattcaccacaaccggagccgtctcttttccggcggagccctgtctgatctccggccgctgtccggcgttgttggacctgacgtctttggcgcggtaacggggagctccgacgcgaaaaatatggtgagccaagccgatgactctttgaggaaagtgatgtactttaattgctggggtcaaggcttaaccaca

SEQ ID NO: 11474 - DNA, 397 bp, Glycine max
  Clone ID: LIB3092-005-Q1-K1-F4
catgtttatctcatcaggcacactaaattttatgcagggtggtatctactatcaagggggagtgttttagagaaaaatattgccaatgtcattactgatggtactattgaacgtgttccatggactaatcctaccccagatagattgcataacactgatgatagataactaaactaatgccatcataacataactctaatgtaaatgaatgaataaagtactatttcggtatcaaacatcaacttaaaagaatttgatctaccttaaatgcattcatagccggggtgttttaatcaatctttgaagattaatgtaaaacctttaactttacataaagacacttatatacttatatctgtctctacgacaaaaaatatgttacatattttaataacct

SEQ ID NO: 11475 - DNA, 403 bp, Glycine max
  unsure at all n locations
  Clone ID: LIB3092-005-Q1-K1-F7
gcgtncgtacacncctgtgcatatcccttatggacagcacaagaagcatatcgcactagcaatgatagaatgtccagatcaactgccgaggctattgaccaggctatgacccatgcggctgacacaaaagtcaaatttgttagtgtaaatctttctgtggaagcacaattacatgattggccagagaggactgaagcagatctatgtggtggatatcggcatcctgcttcaacttacagagatggtatacaagaagtggcaaggtcaggacatgacagtgatattgagtgggtgcaggtagtgttgaaagctgatcctggggttagaatggaagatatctaggatcaagcaccaagacggcggaaggaacatcgtcgtgttccaagtacagtggcaatagagg

SEQ ID NO: 11476 - DNA, 302 bp, Glycine max
  Clone ID: LIB3092-005-Q1-K1-F8
atttcatatgcttatggaagttcatgaacatatctcatttcatttatagaaggttcatatcaactgtcgaggcgattttccattcaatgacccattcctctaacacaaaattcaaatttgtttgtgtaaatcttttcttgtggaagcacaattacatgatttgcctgtgaggactgaatcatatctatgtggtggatatcttcattcctgcttcaacttacagtgatggtatacaaaaagttgtaatggtctggacatgacatttatatttatttttttcacgtatttttttaaactgatcc

SEQ ID NO: 11477 - DNA, 335 bp, Glycine max
  Clone ID: LIB3092-005-Q1-K1-F9
aacccttcgttcctctctcgttccctgcttcaattcgatcaaacacagggtagtacttttttattatgatggccgtggcccgaaaggaaatggaccggatcaagggcccgtggagcccggaggaagacgaggctcttcagaagctcgtggagcggcatgggcccagaaactggtccctcatcatcaggtccattccgggccggtctgggaaatcgtgcatgctccgatggtgcaaccagctgtcgccacatgtcgagcaccggtccttcacgccggaagaggacgagaccataattagggcccatgctcggttcggttacaagtgggccaccata

SEQ ID NO: 11478 - DNA, 397 bp, Glycine max
  Clone ID: LIB3092-005-Q1-K1-G10
attgtcatctcttcttccaccaaactttcggagttttctttggttaattagtaaaaaatggcttaattaatttgtccttccagaggatcgaatgagatagaaagggtactggaggggcaattaattaattaatctctagtgagtatatatataaatatggagagcctggaagaaagagtgtttatgttgatgaatgaacaatattattattccaattccaatgtatcagatcagctgcatatgcatcatcatcgctctgtgtctgtggagaatctaaacctatggtgggaaaacaacaccgactccgatgactcatccgagcgaattttgtattgggaatctcagatctcactgcttcaggaaattttggagcggtaccatttaagtgggtcaaaat

SEQ ID NO: 11479 - DNA, 422 bp, Glycine max
  Clone ID: LIB3092-005-Q1-K1-G11
ctgcatcaaccaaacaaacaaataaagcaaaaggcctttttattccaaagcaaggaagggagaaataaaccgaatgagagcattaacctcttcttcttccactttcattccaaagcgttattccttcttcttcttcctctccattctcttcgctcttcgatcctcgtccgggggctgctccgaataccaccaccaccacgcgccgatggccacgataggaggcttacgcgactcccaaggctctcagaacagcgtccaaaccgaggccctcgctcggttcgccgtcgatgaacacaacaagaagcagaattcacttctggagttttctagggtggtgaggacacaggaacaggttgttgcgggaaccctgcatcaccttactctcgaggctattgaggcaggtgagaagaagctctatgaaa

SEQ ID NO: 11480 - DNA, 383 bp, Glycine max
  Clone ID: LIB3092-005-Q1-K1-G12
ggttcttgtgggaggtgcagagtactacagaattattaatggcctgaacttcgaagacaaagttcatccaggtggtccattggacccattggggcttgcaaatgatccacaccaagctgcactgctaaaggtgaaggaaattaagaatggcagacttgctatgtttgccatgcttggtttctacttccaagcatatgtcaccggagaaggtcctgttgagaacctatcaaaacatctcagtgacccttttggcaacaacttgctcactgtcattgccgggtctgctgagagagctccaactctctaaatcattcatcttcatgtttttctccaatcttaatgtacaatacatatcactgagatattattaaagcattttgctt

SEQ ID NO: 11481 - DNA, 398 bp, Glycine max
  Clone ID: LIB3092-005-Q1-K1-D4
gaaagatacaaaagcatcatttgaagcttcttgaggaggatggtttaccctttcaaaagggaggtttcagacagcagagatcctattccagccacatcttgccggagtgcaagctatgggtcttcaccaagccatagctctttgtgtggaacattgccattctgcagatttagcatgttacagtgattggtacaagactatagtcttatcaggggggactgcatgcttacctggtttggctgaaaggatagagaaggaactccatgccttactttctccctacgtgttcaaaggaattagaatcataccttctccatattgtgctgatactccatggtttggagcaaaaaatgttggcaattttagcacctttccttgtcattggtgcttcacaaaaa

SEQ ID NO: 11482 - DNA, 317 bp, Glycine max
  Clone ID: LIB3092-005-Q1-K1-A7
gcacacatgcctcaacagcttctcagagaggtcctcccacgcattcaataaggaatgtgcaaattcaccctgcggaggagcgtcacctctcgtggctgaaaacgactgacctccacgatggtcatcttcaaggaaagcgtgttgtcagctgattactcttccaacatactccttgcctatctctttcaaacagtcgtgccccgaatgtacacattctcatgcgcttgattaagcgcagcatttcctgacagacgtagaagctgatgagaatggtacatacggccctagatgatataataaaccagctccttctagct

SEQ ID NO: 11483 - DNA, 391 bp, Glycine max
  unsure at all n locations
  Clone ID: LIB3092-005-Q1-K1-A8
tccacgcgtncggggttttacattttattcgttctccggtgagaaacagaaacacacagaagacagagtgagacgcttctcacgatggagggaggagtatcctacgcgcgcatgcctcgggtcaaaatccgcgagctgaaggacgactacgccaagttcgagctccgcgacaccgacgcgagcatcgtcaacgcgctgcggcgcgtgatgatcgccgaggtgccgacggtcggcatcgacctngtggagatcgaggtcaaactcctggtgctcaatgacgagtttatcgctcacaggctgggcctcattcccctcactagcgagcgcgccatgtccatgcgcttctcacgtgactgcgacgcgtgcgacggtgacggacagtgcgagtttt

SEQ ID NO: 11484 - DNA, 185 bp, Glycine max
  unsure at all n locations
  Clone ID: LIB3092-005-Q1-K1-A9
gaaacagaaacacacaggagacananngagacgcgggncgcgangganggaggaggagccaacgcgcgcangccncgggncaaaaaccgcgagccgaaggacgacnacgccaagnncgagccccgcgacaccgacgcgagcancgccaacgcgccgcggcgcgngaagaacgcggaggngccgac

SEQ ID NO: 11485 - DNA, 381 bp, Glycine max
  unsure at all n locations
  Clone ID: LIB3092-005-Q1-K1-B1
agacacgcctacccatcctcacacaacaactcncaaggcctaacaaaaaaagggtgccggcccatttatgagtactggtctctcagccttcccatctctcctctcttcctcaaaatccagattcgccaccccaattcctctttttagatttgccgtcaccaaaacctcttcttctcgcttttctatgagtgctgactggatgccaaaccagcctacacctccttaccttgatggttcaccacctggtgactttcgattccaccctcttcgtcttggtgaagcaccacacaaccttgagaggttcaaagagtcaaaactcattcacttcagatgggccatgcttgctgttccaaggattttgggtccatacgcattgggctt

SEQ ID NO: 11486 - DNA, 307 bp, Glycine max
  Clone ID: LIB3092-005-Q1-K1-B4
gagttatactacgacggcttctacggcgaggggctcgggccgcttccatccaccatgtgggagttcttgcttggatcgggattcgaccggttgctggagcaggtttcgcagatcgagatcaacggcctcgggagggctgagaatccaccggcgtctaaggcggctatagagtcaatgccgacggtggaaatcaccgagtctcacgtcgcgtcggagacgatctgcgccgtgtgcaaggaagccttctagcttggcgcgttggcgcgtgagatgccgtgtaagcatctttaccactccgattgcattc

SEQ ID NO: 11487 - DNA, 400 bp, Glycine max
  Clone ID: LIB3092-005-Q1-K1-B6
gcgggcttctcagggctgatgaaaccaccaagaagtgggtaccaaagctaaggatagatggaccttacggtgcgccagcacaagactacagaaactatgatgtcctgttacttgtcggtctcgggataggagcaacaccttttatcagcattctgaaagatcttctcaacaatattatcaaaatggaggagctggcggattcagtctctgattcaagtagaggttcagaccttagcactgggagtgcagattcaatatcttctaataagatttctcctaaacggaagaagacactgaagactacaaacgcttatttttactgggtaacaagagaacaaggttctttcgattggtttaaaggggtcatgaatgaagttgctgaacttgatcaaaagggtgt

SEQ ID NO: 11488 - DNA, 410 bp, Glycine max
  Clone ID: LIB3092-005-Q1-K1-B9
gatgacaccgaagtaggaggactcgttggtgatggaaccaaaatcgaacttaacagggacaactacaacaacggtggcgcttatttacctgctgttgcaaacgggaaagcccactcttacgtttctggaagagagctattggtgaaggatggtggtgatattgggcaattggtgcatagcaatgtgagtggtggtgatgaagatcatcggcaagaggggttaggtaagtctcagaattcatttaccgttgctgaaactgactgtgaggagtactattcgcactatcttcacggcggcgaaggggcttctgggcagaaagcgatggcggatgatagtggttgtgggtttagtgggaggaaagatgctatgtattcgagcgagtcaggggaagtactcatggcaattctttc

SEQ ID NO: 11489 - DNA, 368 bp, Glycine max
  Clone ID: LIB3092-005-Q1-K1-C10
agtcctagatccgtgcgttcgatcgcgatctatgatgcgagttatctaaccccagtgggagtttcactcacacaccgaagtcagttacaacataacatactgcttcctctcacctcacatgaatctttctgtgtctgatatccgcgccttctcttcactttcatattgctctggctctatatctccgaatcacacaacaggagaattttctgtgggagagtttcaatttttcaaatcctgtcatggatccatttggaattgcacacgcgtttctctccttctatcatcgtcagatattaatagcttttcgtttctagaaggaagggtggtttagtttttattaaccatagatgcaatcatggtataaa

SEQ ID NO: 11490 - DNA, 372 bp, Glycine max
  Clone ID: LIB3092-005-Q1-K1-C11
ggagtgcaaggatcactagctctttcattcgggcagagtggccggcagttggcatcccccttgatcatgaagcatttgcaggtccaaaaggttataatgcacctcaacaagtgcacatcacgcaaggtgactatgatggaaaagcaggaatcatctcatgggtgaccacaaaagaaccagggcacagccatatacagtatggcacatcagagaataaatttcaaactagtgaagaaggcacaagtacaaactatactttccacaaatacaagtctggctacattcatcactgtcttattgaaagccttgagtatgagactaaatactactatagaattggaagtggtgattcttctcgagaattttgggttc

SEQ ID NO: 11491 - DNA, 353 bp, Glycine max
  Clone ID: LIB3092-005-Q1-K1-C12
cgacgccccccaaaacgacaaccctgaagacccaaacggcgttgtttcgttcccaaatctcccaaattccccattctacccctggtggcagatcacgcacttattccatgacaccgagagaggaggtcccgaatggaagtttcacagagagaacatgcttctcaacattgattcctggggcgtcgttatcaacacattcaccgagttagaacaagtttacttaaaccacttgaagaaagaattgggacacgaaagagtctttgcggtgggcccggttctgccgattcaaaccggttcgatttcaacaaaaccggaagaacgaggcgggaacagcaccgtttcgcgacatgaca

SEQ ID NO: 11492 - DNA, 380 bp, Glycine max
  Clone ID: LIB3092-005-Q1-K1-C3
acgttcttttctttgccaacactccttcaattatggggtgggatcccaaattacaaattgggcgccatgaacgcaaccttatactctgctcttccttctacattccgcagtctccatcatcggaatttctcagcgttttgttctgatatccaaaatcctggctatgttgattgccattcaaattgtgataagtctacatctcaagcgtctttgtttttgtgttccgactccaacagtagaagaaatggcgtttttggtagaccactttgtgtgaacccctctggcaggagaaacctaattggtccagctttttattctctggagactaatgcttatgacgtggctgctttaaaatcttcttcccgtgttgcagaagaaaa

SEQ ID NO: 11493 - DNA, 396 bp, Glycine max
  Clone ID: LIB3092-005-Q1-K1-C4
tccatcttacacccacgcttccaaactgtttctgagggacactatatctgtgtaagcggggttgtttttacacgaaattgcttatatgatccgcatagcaccttttttaattcctcttgctttcatgtggccatggataatcaacaagaatgcaaacaaattaccacctggtcccatacggttgccaattctgggaagccttcacaagttgggtgcaaatcctcatcacggcctgcaccaactagcccaaaaatatggacctatcatgcacttactcttaacgtttgcgcccaccatatatatttacctcccccatgctgctgaactgctcctcaaaacccatcaacttgtctttgctatttgaccaccccattaagccattaaagtacatttcct

SEQ ID NO: 11494 - DNA, 317 bp, Glycine max
  unsure at all n locations
  Clone ID: LIB3092-005-Q1-K1-C7
cacgaatatggagatgcctggagcgaagcgcaaaaaacacatnacacatgctgggatagcatgacctcattacagggggggggcatttctctgactccgcccatgcaaggaaacaaaaatggaatgctgtgggaagatcaggggaagtgagctcattaacgagaatgtgctgtaaacactggtgcaaacccttctggtgaaggtggaggacaagattaaagagacaatgatgcacttcataaagttgctgacattggtcacacatgcaaacttgaggagcaacccgcattggataaaaaggagtttgtgaccttaat

SEQ ID NO: 11495 - DNA, 417 bp, Glycine max
  unsure at all n locations
  Clone ID: LIB3092-005-Q1-K1-C8
cccacgcgtncgctgagggcttccaaagctatgcaagataggttgattatcacgaatgtggcagagtgtttgacaatcccaatgtcgctgtgcacttcaatacagatgcagtggaccttgtaagcaacaccaaaggacagatgtctggcattttagtaagaaagattgatactggggaggaatatgtgcttgaggcaaaagggctgttttatggcataggccattcgccaaataccgaactgttgaaaggccaagtcgaattagaccactctggctatgtacaagttcaggagggtactgcaaaaacttcagttgaaggtgtatttgctgctggagatgtgcaggaccatgaatggaggcaagctataactgctgctggatctggatgcgttgcagctttatcagttgagagatatc

SEQ ID NO: 11496 - DNA, 206 bp, Glycine max
  Clone ID: LIB3092-005-Q1-K1-D12
gttcaatccttatgattgggacactcacccatgtgaccgcatcaggaggaatcatcattttctggcaatctttagccagacccgatcaacaacaacttattgcattggggaggatttatttgcatacacagaccagccattccgttttcatctaccttacctttgtatatagattttttacactttaggcctagttcatactcaat

SEQ ID NO: 11497 - DNA, 296 bp, Glycine max
  Clone ID: LIB3092-005-Q1-K1-A2
tcctgcggggagttacattttattagttctacatggtgaaacagaaacactcaggaggacacaatgagacgcgggggaggaaagatgcaagagtatactaccctctcatgcctcaggtgaaaaaacaatagctgaaggacgactactccaagttcgagctaccgaacaccgactcgagcatagtcaacgcactgcagaacacgatgatcaccgaggagccaacggtctccaaagaacccttggagatcaaggtcaaatgccctgaactcaataacgaggatatcgctcacaggctg

SEQ ID NO: 11498 - DNA, 419 bp, Glycine max
  Clone ID: LIB3092-004-Q1-K1-G2
ttggaatccaaaaatgagagaaatcatcagctttcacataggtcaggccgggatccaggttcgcaactgctgcttggaacggtactgcctggaacatggcatccagcccgatggcatgatgccaagtgactcctccttcggtgtagcccacgacgccttcaacaccttcttcagcgaaaccggatccggctagcacgtccctcgcgccgtcttcgtcgatctcgagcccaccgccatcgactaattccgttgtggcacttaccgtcaactcttccaccccgaacaactcatctccggcaaggaagatgccgccaacaactttgccagaggccactacaccgttggcaaaaagatcgtatatctgtgcttggatcgcgttcgaaagcttgcatacaactgcactggttttcagggctttc

SEQ ID NO: 11499 - DNA, 425 bp, Glycine max
  Clone ID: LIB3092-004-Q1-K1-G5
ggaagaagggtaaactatgagtctgagggaagaagggttgaaggaagaaaaaaaggggggcgcagaaatggagggtgggaacaacagcagcagtaacaacaaccctgatgagttggcggaggggtgcttgctttcgatcaagacaacgttgggcgacgaattcgaaggccaagtcgtcaccttcgatctcccctccaacattctcatactccaagaaccttccaaacctaaccctcgtcgaaatcttacgttgctcaaagccaattacatcaaagacttcacctttctcggccatgcccaagaccctcttgatcccaacacctgctttcttgacctcaccgctctacaacaaacggaagatgttgctgttagacaagcggaagctgatgctgagaagattgtggttggtgttaccagcgaagcac

SEQ ID NO: 11500 - DNA, 401 bp, Glycine max
  unsure at all n locations
  Clone ID: LIB3092-004-Q1-K1-G6
attgcattagttctaantgctaacaccttcagtgttcaatggcctctgcatcancatcgatgctgaagtcttcacttgttcttgacaantctnagtgggtgaaaggacaaaccctttcccaaccttctgcatcagttgtgagatgcaaccccaccaccccatcatgcctcaccatcagagctggttcctatgctgatgaactcgttaagaccgcgaaaacagtggcttcaccagggaggggtattttggccatggatgattccaatgctacctgtgggaagcgtttggcttcaattgtgctaaagaacactgaagctaaccgccatgcataccgtaccctcctctttacagtttcaggccttggtcagtacatctctggtgccattctctttttgaaacac

SEQ ID NO: 11501 - DNA, 422 bp, Glycine max
  Clone ID: LIB3092-004-Q1-K1-G7
tcgcccaaccctccgtgggattccaaaatggaaagaaatcatcaccttccacataggtcaggccgggatccaggttggcaactcctgctgggaactctactgcctggaacatggcatccagcccgatggcatgatgccaagtgactcctccttcggtgtagcccacgacgccttcaacaccttcttcagcgaaaccggatccggcaagcacgtccctcgcgccgtcttcgtcgatctcgagcccaccgtcatcgacgaagtccgttgtggcacttaccgtcaactcttccaccccgaacaactcatctccggcaaggaagatgccgccaacaactttgccagaggccactacaccgttggcaaagagatcgtagatctgtgcttggatcgcgtccgaaagctcgcagacaactgcactggtc

SEQ ID NO: 11502 - DNA, 453 bp, Glycine max
  Clone ID: LIB3092-004-Q1-K1-G8
ccgtccggattcccggtcgaccacgcctccgcctgttggaagttgtgtcccatgggaggaaggtgccactgtttggaaggccagtcctgggaattgaaggcctggtgggtgccacaggattaagtccactgatcgattgttcagttactattggcgatcctggactgatatccgcattcgtggagaggtggcacggtgagactagcaccttccaccttccggtaggagagctgacgatcacattggatgatgtgtcgtcacttcttcatttgcccatctctggcgccttgcacagtttccatgctctttctatggaggaggccagatttttgctgatagagttgttggaggtgtctgccgaggaggccagagcggagacatcactcacacgtggggcatatgtacgactaaaatgggttcgagacatttatgagacaagatgtcaggcccggc

SEQ ID NO: 11503 - DNA, 361 bp, Glycine max
  Clone ID: LIB3092-004-Q1-K1-G9
tgtttggaaggccattgcttgggatggaaggcctggtgggggccacaggattaattccactgatcgattgttcagttactattggcgatcctggactgatatccgcattcgtggagaggtggcacggtgagactagcaccttccaccttccggtaggagagctgacgatcacattggatgatgtgtcgtcacttcttcatttgcccatctttggcgccttgcacagattccatgctctttctatggaggaggccagatttttgctgatagagatgttggaggtgtctgccgaggaagccatagcggagacatcactcacacgtgtggcatatgtacgactaaaatgggttcgagacattta

SEQ ID NO: 11504 - DNA, 416 bp, Glycine max
  unsure at all n locations
  Clone ID: LIB3092-004-Q1-K1-H10
ctttgttcaattgcgaggcatagcaagcaaagcacaacacaagatggggatacttagtccagaacagctccgattcttcaactctcaaggttatcttgtgattgaatctttcgcatgtagcgatgagattgagtccatgatgaagaggatggagcagttggtagatgactntgacccttctntcaccgcctctattttctccaccaagaaccagcaacagtcgactgataattactttttcgacagcgccgagaggatttctttcttcttcgaggagaaagcatttggtaatgatggtaagttaaagcagccgaagcaattgtcccttaataaagttggccacgctcttcatgagattgagccagcattcaaaaagttttcttcttctgagaaagtttcaagtttgatgcgctcct

SEQ ID NO: 11505 - DNA, 376 bp, Glycine max
  Clone ID: LIB3092-004-Q1-K1-H11
acaacacacgatggggatacttattacagagcagggccgattcttgaactctcaacgttatcttgtgattgaatctttcgcatgtagcgatgagattgagtccatgatgaagaagatggaccagctggtagatgactttgacccttcttccaccgcctctattttctccaccaagaaccagcaacagtcgactgattattactttttcgacagcgccgaaaggatttctttcttcttcgaggagaaagcatttggtaatgatggtaagttaaagcagccgaagcaattggcccttaataaaattggccacgctcttcatgagattgagccagcactcaaaaaattttcttcttctgagaaaagttcaattttgatg

SEQ ID NO: 11506 - DNA, 431 bp, Glycine max
  Clone ID: LIB3092-004-Q1-K1-H2
cccacgcgtccgtaattgtttaaacctaattctcatttcttcatcgttcgattcgggtcctgctaaagatgcagatcttcgtgaaaactttgaccggtaagaccatcacccttgaggtggagtcctccgacaccatcgataacgtgaaagctaagattcaagacaaggaagggatcccacctgaccagcagagacttatctttgcgggtaaacagcttgaggatggtcgaacccttgccgactacaacatccaaaaggaatccactctccacctcgtgcttcgcctcaggggtggcatgcaaatctttgtcaagactttgactggcaagaccatcaccctcgaggtcgaatcctcggacaccattgataatgtcaaggccaagatccaggacaaggagggtatccctccagatcagcagaggttgatattt

SEQ ID NO: 11507 - DNA, 433 bp, Glycine max
  Clone ID: LIB3092-004-Q1-K1-H3
ctgaactcatggatactgatcttcaccatatcattcgctccaatcaaaatctgtcagaggagcactctcaatacttcttgtaccagattcttcgtgggcttaagtatatacattctgcaaacgtaatccatagagatttaaaaccaagcaacctgctgctaaactcaaattgtgacttgaagattattgattttggtcttgcgagaccaactttggaaagtgacttcatgacagaatatgtagtcacaagatggtacagagctcccgaattgttgttgaattcctctgattacacctctgctatagatgtgtggtctgttggttgcatctttatggagcttatgaataaaaagcctctgtttccgggcaaagaccatgtgcatcagatgcgcttattgacagagcttcttggcaccccaactgaagctgacct

SEQ ID NO: 11508 - DNA, 89 bp, Glycine max
  Clone ID: LIB3092-004-Q1-K1-H6
tcgaaacattctgggaattggaatattctaattcctttaactattcacgtgatgatatttagacatttataaattacaaacatcctctt

SEQ ID NO: 11509 - DNA, 284 bp, Glycine max
  Clone ID: LIB3092-004-Q1-K1-H7
ttacctgtaataccatcaccctttatgtggagtcctccgacaccatcgataacgtgaaagctaagattcaagacaaggaatggatcccacctgaccagcatatacttatctttgcgggtaaacagcttgaggatggtcgaacccttgcctactacaacatccaaaaggaatccactctccacctcgtgcttctcctcatgtttggcatgcaaatctttgtcaagacttttactggcaagaccatcaccctcgatgtctaattctcggacaccattgataatgtt

SEQ ID NO: 11510 - DNA, 251 bp, Glycine max
  Clone ID: LIB3092-004-Q1-K1-H8
ccaaattctttctgggcttaagtatatacattctgcaaacgtaatccatagagatttaaaaccttaaacttgattcaaacaaaaatgtatcccacctaaacagcaaagacttatctttgcgggtaaacagcttgaggatggtcgaacccttgccgttttccaatataatacaaaaccccccaacacctgttgcatttccttaattacaccattcatatatattttaaaaacttttacttgcaataccatta

SEQ ID NO: 11511 - DNA, 421 bp, Glycine max
  Clone ID: LIB3092-004-Q1-K1-H9
aaaaaaataaaataaagaaattttcatgggtaaccattcgtgcagatgaaattagtaaaattatccgtgaacgcattgagcaatataatacggaagtaaaaattgtaaatacgggtaccgtacttcaagtaggcgacggtattgctcgtatttatggtcttgatgaagtaatggcgggtgaattagtggaatttgaagagggtactataggcattgctttgaatttggaatccaaaaatgttggtgttgtattaatgggtgatggtttgatgatacaagagggaagttcagtaaaagcaacaggaagaattgctcagatacctgtaagtgaggcttatttgggtcgtgttataaatgccctggctaaaccaattgatggtcgaggagaaatttcagcttcggaatctcgattaatcgaatc

SEQ ID NO: 11512 - DNA, 195 bp, Glycine max
  Clone ID: LIB3092-005-Q1-K1-A1
tcgggcccacattcctcaacagcttctcacagaggtcctcccacgcattcaataaggaatgtgggggtgcaccctggccaggagcgacacctcctgtggcttaatacgactgacctccacgatggtcatcttcaaggaaagcgtgtaatcacctgattactcttccaacatactcctgctccatttctttgaaac

SEQ ID NO: 11513 - DNA, 427 bp, Glycine max
  Clone ID: LIB3092-004-Q1-K1-G10
ggaggtttcgctctctcagtttcttttccccaaattgtttttcatctaacaatttactttgcagaaccctaaccctagccccttcgcctaccttgtaaccttcctttcgatccttcatctcgcagacaatgggtgaaactaaggacgaagcatacgaggaagagcttctcgattacgaggaggaagacgacaaggcccccgactccgccggagctaaagtcaacggcgaagctaccaagaagggctatgttggaattcacagttcgggatttagggacttccttctgaagccagagcttcttcgggctattgtggactcgggatttgagcatccatctgaagtgcaacatgagtgcatacctcaagcaattctcgggatggatgtaatttgtcaagcaaaatctgggatgggaaagactgctgtttt

SEQ ID NO: 11514 - DNA, 389 bp, Glycine max
  unsure at all n locations
  Clone ID: LIB3092-005-Q1-K1-A10
accggnccgagaggagggtgcgtctatgcgttctggaaatttcagcccccatcgaaaaacaagatgcgccaacgatagtaatcatcgaaggaatttgaaaggtcgaaacttgagcatctgggatcgcgaaattggggattttggttaaaagggtataatcttcggaactgattgatggcaaaactgtacgtgaaggcggtgccaccggcggatctgaacaggaacacggattggttcacgtaccctggcgtttggaccagttacatcctcatccttttcttttcttggatcctcgtactctctgtcttcggttgttctcctggcatcgcttggaccatcgttaatctcgcacactttgctgtaacatatgacttttttcactggaagaa

SEQ ID NO: 11515 - DNA, 415 bp, Glycine max
  Clone ID: LIB3092-005-Q1-K1-A12
cgaccacgcgtcgagtccaacatcatctacttttagttcttgtggctcttccatgatggcctctggtacatctccaagagttctcttcttgagtctctttgtaactctttccatgattttacatttgagttcagccaggaagttgtctgagtcagacccccaattgcagttccaataccacagaggccctctcctcacaggcaaaatctccgtaaacctaatttggtacggtaagttcaaaccttctcagaaagccattgttgctgatttcatcacctctctctcctctttcaaacccctcaccgcccaaccatccgttgccacgtggtggaaagccaccgacaaatactacaaaaactcgttccccaaacttgcactctccctagggtcccaaatcggtgatgaaaactactct

SEQ ID NO: 11516 - DNA, 430 bp, Glycine max
  Clone ID: LIB3092-004-Q1-K1-E3
ctgcaaaaagcatcacaagaggctgatgaggccaaatcacttgctcaggcagctcaggcagagctgattgaagcacaagaagaggttgaacaagccaaggccaaatcaagcacattggaaagtagtttattggcagcacaaaaggagattgaagcagccaaggttgccgagatgttggccagagatgcaatcacagcattggagaagagtgaatcagctaaaggcaacaaaaatgacaaggactcttcctcaatggtgacactcacactagaagaatatcatgagctcagcaggagagcctataaggcagaggagcaagccaatgcgaggatcgaagctgctacttctcagattcagatagcaagggagtctgaattaagaagcctggagaagttaaaagaactgaatgaagagttgtctgtaagaagag

SEQ ID NO: 11517 - DNA, 410 bp, Glycine max
  Clone ID: LIB3092-004-Q1-K1-E5
ctttcactagccgcagcagcctcaggaggagaataaggatgtctcacaggaagttcgagcacccaaggcacgggtcactgggatttctccccaggaagcgtgctgctcgtcacaggggaaaagtgaaggcattccccaaggatgacccatccaaggcacccaagctcactgcattcttgggttacaaggctggtatgactcacattgttagagaggtcgagaagccaggatcaaagcttcacaagaaggaaacatgtgagcctgttacaattattgagacccctccaatggttattgttggtgttgtgggttatgtgaaaactccccgtggtctccgaacattgaacactgtatgggctcagcacttgagtgaggaactgaaacgtaggttttataagaactggtgcaag

SEQ ID NO: 11518 - DNA, 403 bp, Glycine max
  Clone ID: LIB3092-004-Q1-K1-E6
ccacgcgtccgacaaactcagggtaggcatataagagagagagagagagagagagagagagagaatgggagggtgggctatcgcggtgcatggtggcgctggtgtcgaccctaatctcccactcgagcgccaagaagaagcgaaacaacttctgacgcgctgtctcaatcttggaatctctgctctaaattctaatcttaccgccatagatgtcgtcgaacttgtggtgagggaattgggaacggatccgctgttcaattcgggccgtggatctgacctgacagaaaaaagaacggtggagatggaggctagcatcatggatggtccaaaacgacgatgcggcgcctgttcgggtcttaccaccgttaagaacccgatctcgcttgctcgtttggttatggac

SEQ ID NO: 11519 - DNA, 439 bp, Glycine max
  Clone ID: LIB3092-004-Q1-K1-E7
catttttcttcctccatctttatcttaaacataacttgaactctccattccttaaattttagctacgagctagttccgacacagacaaagcaatggcaaagaccgagttagaggtgactgttgagagcaagaacaaagacctcaagcacctggggtttgtgaggattgctgctattcaaacatttgtgattgtgtcaaatctgtatgagtacgcaaagcagaattctgggcctttgagatccgtcgtaggaacggttgagaacactgtaaccaccattctcggtcctgtctgcaacaaattcaaggacgtccctgatgatgtccttgtttttgttgacaaaaaggtggatgaagcttcccacaagttcgatgagcacgctcctccttttgctaaacacattgcggatcaagccaagggtgtgattcagaaagtgacttg

SEQ ID NO: 11520 - DNA, 440 bp, Glycine max
  Clone ID: LIB3092-004-Q1-K1-E8
acgcatttttcttcctccatctttatcttaaacataacttgaactctccattccttaaattttgggtacgagctagttccgacacagacaaagcaatggcaaagaccgagttagaggtgactgttgagagcaagaacaaagacctcaagcacctggggtttgtgaggattgctgctattcaaacatttgtgattgtgtcaaatctgtatgagtacgcaaagcagaattctgggcctttgagatccgtcgtaggaacggttgagaacactgtaaccaccattctcggtcctgtctgcaacaaattcaaggacgtccctgatgatgtccttgtttttgttgacaaaaaggtggatgaagcttcccacaagttcgatgagcaacgctcctccttttgctaaacacattgcggatcaagccaagggtgtgattcagaaagtgac

SEQ ID NO: 11521 - DNA, 432 bp, Glycine max
  Clone ID: LIB3092-004-Q1-K1-E9
ttttacatcaggaaatgctcttaaaaaatttgggtgcattgatgcacaagcattggtagctgttggatatgtagaaaaataaaccgattgcaaggaatattcattttgaacatgatcaacaggtaacgaggttgggtttctcactttgaaagttgcttcctgaaataaaatgatgtgttgtggcttattaaaaacagtgtgcaagattttgggggctatcgaggtttgttctttttctcctacgtttgatttttacagcaggaaatgctcctgaaaattttgggtgcattgatgcacaagcattgagctgttggattgtggatatgtagaagaataaatcaattgcaaggaatattcatcttgagcatgatcagcaagtgatgatgtcgggtttctcaatttgaaagtggttcccggaaagaaaatgatatt

SEQ ID NO: 11522 - DNA, 302 bp, Glycine max
  Clone ID: LIB3092-004-Q1-K1-F1
ctccaaaaagcatcacatgaggctgatgattccaaatcacttgctcaagcatctcagtcggggctgattgaagcacaagaagacgttgaacaagccaaggccaaatcaagcacattggaaagtagtttattggcagcacaaaatgagattgaagcatccaaggttgccaagatgttggccatatatgcaatcacagcattgaataagagtgaatcatctaaaggcaacaaaaatgacaaggactcttcctcaattgtgacactcacactagaaaaatatcatgagctcatcaggaaagccta

SEQ ID NO: 11523 - DNA, 417 bp, Glycine max
  Clone ID: LIB3092-004-Q1-K1-F10
tgataaacccatacctgatggagttgatcttggaggtttgtgtgagcctggtcaaggattgttctgcaatgtgactgatcttcgattagaaaacagtggcattgaagaacttgacaaattacttattaatacattgtttgaggttgtggttagtgagagcagagatgcacctttcattttgttcatgaaagatgcagagaagtctatagttggaaatggagatccattttcatttaaaagtaggcttgaaaatcttccggacaatgtggtcgtaataggttcacacactcacactgacagtcgaaaggagaagtcacatcctgggggtttgctttttacaaagttcggaagtaatcagactgctcttcttgatttggctttcccggatagttttggaagattgcatgacaggggaaa

SEQ ID NO: 11524 - DNA, 397 bp, Glycine max
  Clone ID: LIB3092-004-Q1-K1-F11
aacaagtagttgagaactaagaaggagaagcaaatggcttcctcaatgatctcttccccagctgttaccactgtcaaccgtgccggtgccggcatggttgctccattcactggcctcaagtccatggctggcttccccaccaggaagaccaacaatgacattacctccattgctagcaacggtggaagagtgcaatgcatgcaggtgtggccaccaattggcaagaagaagtttgagactctttcctacctgccagaccttgatgatgcacaattggcaaaggaagtagaataccttcttaagaagggatggattccctgcttggaattcgagttggagcacggtttcgtgtaccgtgagcacaacaggtcaccaggatactaccatggacgcttct

SEQ ID NO: 11525 - DNA, 307 bp, Glycine max
  Clone ID: LIB3092-004-Q1-K1-F12
acgcgtgcgaacaagtatttgataactaataatgagaagcaaatttcttcctcaatgatctcttccccagcgtttccactgtcaaccgtgccggttgccccattgtttctccattcactggcctcaatttcattgcttgctttcccaccatgaataccaacaattacatttccttcatttctatcaaccgtgtaagagtgcaattcattccagttttgccaccactttgcaagaaaaaatttgatactcttttctaccttccataccttgattattcacaattttcaaatgaaatttaataccctct

SEQ ID NO: 11526 - DNA, 208 bp, Glycine max
  Clone ID: LIB3092-004-Q1-K1-F2
ccaaatcttaaaacttgcatgcatgggtccacagagaaacgctatgaacattgttctcacttatgctgacgtggcagtggaggggttctgttccagtatgtgcggaacacacggatcctacgtgggggcgcgcgtgaacggaaagagatacaagttggcgtacatttgggtgggttattcagagacacattgcccgggtcaatgcgcg

SEQ ID NO: 11527 - DNA, 199 bp, Glycine max
  Clone ID: LIB3092-004-Q1-K1-F3
ggggcgaccacgcgtcctcccacgcttttctaaatctctctcattggctttttagcaacacgactccattttgggcgggggatacttggacgacgacgacgactattctcatttggactattagtaccaacattacgaccactaataaatcgtgccctttccctccaccgttatctctttcaccgtttcctttcccggt

SEQ ID NO: 11528 - DNA, 427 bp, Glycine max
  Clone ID: LIB3092-004-Q1-K1-F5
acgaccactcgtccgattgattccagctgaccttgtttttctgaaaggcaaggaaatcattctcgtggaaggcctgaagcttgatgatgtacgcagcaggaatatatactggccatagcttacctcttaagttggctggtgctgagggatcacccataaaatgcattctcatcaaataataagtcaacagctagcagtccaaatgccgacacgacatgcagcagaggtttatgcttggaaatgggtcttaattacgagcataaggttgagtttcaatgtagatatcttaaatacgaataagttggaaaaataaatatatagtggtgtcccgtgtccatttggagcaaggtatcataaatgcttagcaaagtgcataaacgctcctacaaatcatttcagaaataaagcaatatggatattggatgat

SEQ ID NO: 11529 - DNA, 436 bp, Glycine max
  unsure at all n locations
  Clone ID: LIB3092-004-Q1-K1-F7
acgcgtccgttcttgtccctttcgatcctcgatttcgctttaaattattattcctaaattcttcaatcgagtgcgtgcgctcgttcaattgccattttcctcttncgtttgatcccttaatcgttcccctttcgtaacctttgtagtttagggttagggtttcgattcggtctttcagggtcgtaagattgtcgttttttgttgcgtttcccccaaaactccaggttttggatcttattcgcttgatatttcgacccaatttggcgtaatttgttgtcgcgcatacgattctagggtttcgttcccgtcgacttttagggctttcttatctctgaatttcaggaggggttttctgtaaatcgattgacgggtttgcttccttcccatacctgacgaaattctagcggtcctattgctttttatttattgatttcta

SEQ ID NO: 11530 - DNA, 334 bp, Glycine max
  unsure at all n locations
  Clone ID: LIB3092-004-Q1-K1-F9
cccgattngaagtcagtgccacatgggaggatggttacactgactagtgaggccaatgctggagatggaacgcctagtgcgcgccacacgattaagttcactgactgaatgctcaccaactattggccatcctggactgatatccggattcgctgagaggtggcacggggagacaaacaccttccatcttccgcatagagagccgaccaacacattggatgatttatctgcactacatcatgtgcccatctgtggcaccttgcacagaacacaacgattctctatggaggacgccagacaattgctagagagacatgttggagggaattgccga

SEQ ID NO: 11531 - DNA, 416 bp, Glycine max
  Clone ID: LIB3092-004-Q1-K1-E12
cctgatttgaagttagtgtcacatgggaggaaggtgacactgattgggaggccagtgcttgagatggaaggcctggtgggtgccacaggattaagtccactgatcgattgttcagttactattggcgatcctggactgatatccgcattcgtggagaggtggcacggtgagactagcaccttccaccttccggtaggagagctgacgatcacattggatgatgtgtcgtcacttcttcatttgcccatctctggcgccttgcacagtttccatgctctttctatggaggaggccagatttttgctgatagagttgttggaggtgtctgccgaggaggccagagcggagacatcactcacacgtggggcatatgtacgactaaaatgggttcgagacatttatgagacaagatgtca

SEQ ID NO: 11532 - DNA, 436 bp, Glycine max
  unsure at all n locations
  Clone ID: LIB3092-004-Q1-K1-C7
cccacgcgtncggcttgcgttctttttctttttcctttctctgcttgcagttgcaaaagtaggaggggggcggtgattgtgttgtgtgctttagaggatgaaagatttcaattcggatctattcgacccgggaacggtgatggactcttcctcctccgattactctcgcagtgcttcctcttccgacgccgatttcgggttcgctttcaatgacagtaatttctccgacaggatcctccgaatcgagatcatgggggaccccgtcgaggcccgacccgattccgacggttgcaccactatcgccgactgggctcgccaccgcaagaggaggcgcgaggatatcaagaaggataacgttgttgatcttactttattgcctgacgagcaaattttgaacgggaatcagcctgatatggatgattttgtaccctccgag

SEQ ID NO: 11533 - DNA, 443 bp, Glycine max
  Clone ID: LIB3092-004-Q1-K1-C8
cccacgcgtccggccaagttcgccaagacctacgccaccaaggaggagcacgatcatcgcttcggcgtcttcaagtccaacctccgcagagccaggctgcacgccaagctcgacccctccgccgtccacggcgtcaccaaattctccgatctaactccggccgagttccgccgccagttcctcggcctcaagccgctccgcttcccggcgcacgcccagaaggcgcccatcctccccaccaaggatctccccaaggatttcgattggcgagacaaaggagccgtcactaacgtcaaggaccaaggggcgtgtggttcgtgttggtctttcagtacgacgggagcgttggaaggagctcattatctggccactggtgagctcgtgagccttagcgagcaacagcttgtggattgcgatcacgtgtgtgatccagaaaaatatgg

SEQ ID NO: 11534 - DNA, 418 bp, Glycine max
  Clone ID: LIB3092-004-Q1-K1-C9
ctgttcttaattttgaagtctcatgaacctgcttctttcgttggtgtccttcttaaatatatttttagtaaatcccagacacaccccttttaaattgtgattttcacacccccttttttcaccgatcgtcttttgtttacccgttataaaaagttatagtgatctgattgtgttattgatatttcatacagaaaacaataaacttttttgtgtgattttaattgatttccatttgggtttattcaattatgattgtcttttaggtggtatgattttttttcttcagtgttgttcattgtttctgtgatccccggaagaacttagtgatcgaaaatggcttcaagggtgtctcccaatctcaaatgttggcagttcagaaccccttattattgtgattcatggaagacacctcgtgcag

SEQ ID NO: 11535 - DNA, 355 bp, Glycine max
  Clone ID: LIB3092-004-Q1-K1-D1
cttcacaccattctcacaaaacaactttcatactctgagaaagaatggctgccagcgcatgtgtgagtactgctatctcagccttcccatctctcctttcttcctcaaaatccagatttgccaccgcagttcctctttctagctttggtgtcaccaatgcctcttcttctcgcttttctatgagcgctgactggatgccaggccagcctagacctccttaccttgatggttcatcacctgttgactttggattcgaccctcttcgtcttggtgaagtaccacagaatcttgagaggttcaaagagtcataactcattcactgcagatgggccctgcttgcttgtccatggatttt

SEQ ID NO: 11536 - DNA, 410 bp, Glycine max
  Clone ID: LIB3092-004-Q1-K1-D10
ccgaacccttcttttcggcacaaacacaactggttaaaggtccacggggcacaacttatgatgcatgccataccagatgagcggctcatgcacctcgggcgctgctttttattaccgtaaaggtcattagaagggtctcctttctgtgactcaaagtgcgcgcagaggtgtgccaaagctggggttcaggacagatgcttgaggttttgcgggatctgctgcgagaagtgcaactgtgtcccatctgggacttacggaaacaaggacgagtgcccttgctacagggacatgaagaactccaagggcaaggacaaatgcccttgaagaatatctaatttcatcatcacactccattccaataaactaccttgtattgtatcttcagccttccttttcagagtattgcatta

SEQ ID NO: 11537 - DNA, 394 bp, Glycine max
  Clone ID: LIB3092-004-Q1-K1-D11
tcgatagttggttgaagcgcgaaggaagggtccgcgcgccatggctggcatcacaaccttgccctgggaactctctcactggcctgtcttctctacttccgattccaaactcttcggccttcccctctccaatccctattccatcaaattcgacccttcttctctctacagtacctgtctcccctacgtcaccgcccgctactactgcggcggatgctgcacctcttcccgctcccgcaacgacccccgctcccgcaagtcctccgattctgacgacgacgataaagctgtcgacctcttcactctcaggtcagataccgtgaggcttatcgatcagagccagaatatggttggagtcatgacaatcgatgacgccattcaaatggctgaagat

SEQ ID NO: 11538 - DNA, 436 bp, Glycine max
  Clone ID: LIB3092-004-Q1-K1-D12
tttcgcgttggtgcaaagcatccttcgtttcaatttctctctctcagcgctttctgcaatcgaaccttgcatctccaaagggatccacaggccgaaggagaaatggggctgacattcacaaagcttttcagtcggcttttcgcgaagaaggaaatgcgaattctgatggttggtcttgatgctgctggtaagaccactatcctgtacaagctcaagctcggagagatcgttaccacaattcctaccatcgggttcaatgttgagactgtggaatacaagaacattagcttcactgtttgggatgttggtggccaggacaagattcgtcccttgtggaggcactacttccagaacacccagggtcttatttttgttgtagacagcaatgatagggacagagttgttgaggccagagatgagttgcataggatgttga

SEQ ID NO: 11539 - DNA, 311 bp, Glycine max
  Clone ID: LIB3092-004-Q1-K1-D2
ccctgacattccctgttcagacaggaaagtcaaggtagaggccggtttcttggatctgtacacggacagggagccagggtgcgggtactgtaagtactctgcgagggaacaggttttgggagaggtgaagcggttgatggagaagtatgcggacgaggaggttagtgttacgatagccggacatagccttgggagtgcgatggcgatattgagtgcctttgatattgttgaaactggggtgaatgtggggaaagatgggagaaaagcgcatgtttcggtgttttcgttttcggggccgagggtggggaatg

SEQ ID NO: 11540 - DNA, 346 bp, Glycine max
  unsure at all n locations
  Clone ID: LIB3092-004-Q1-K1-D4
cgacccacccgtactttaaaatccatactctcccacatttctttcttaccattatcaggtccctancttctacatagttttcatcttaactctgcactccccctcacatattattccatacatatcccacaactttattcttatctacttatcatctcatcacaatttacaaccaacattaatatatatttcacctactcatttatactcaacaactcattttacaactataatctttattattaaaacctacttatgtatcttacaaaccactttcatacacacatatttcttattctaataattcaacaaaaccctcccttttacattatcaacatctttaaac

SEQ ID NO: 11541 - DNA, 423 bp, Glycine max
  Clone ID: LIB3092-004-Q1-K1-D5
catgaaggtatatcaacgagaaagacaaaatgggcattatggtgtgactgcatttgtcattgggaacaccttgtcatcaatcccatacttgctaatggttacattcattcctggggctatatcttattaccttcccggtcttcagaatggatgcgaacattttctgtatttcatttgtgttttattttcaagtctcatgttagtggagagtcttatgatgatagttgctagtgtggttcccaactatcttatgggcatcattgctggttctggaattcaaggaatcatgcttttacttagtgggttctttaaattgccaaatgatattcctaagccagtttggaagtacccattacactatgttgcttttcatacgtatgccaaccaaggaatgttcaagaacgaatataaaggactaagatt

SEQ ID NO: 11542 - DNA, 425 bp, Glycine max
  Clone ID: LIB3092-004-Q1-K1-D6
catgaaggtatatcaacgagaaagacaaaatgggcattatggtgtgactgcatttgtcatggggaacaccttgtcatcaatcccatacttgctaatggttacattcattcctggggctatatcttattaccttcccggtcttcagaatggatgcgaacattttctgtatttcatttgtgttttattttcaagtctcatgttagtggagagtcttatgatgatagttgctagtgtggttcccaactatcttatgggcatcattgctggttctggaattcaaggaatcatgcttttacttagtgggttctttaaattgccaaatgatattcctaagccagtttggaagtacccattacactatgttgcttttcatacgtatgccaaccaaggaatgttcaagaacgaatataaaggactaagattta

SEQ ID NO: 11543 - DNA, 432 bp, Glycine max
  Clone ID: LIB3092-004-Q1-K1-D8
gaacagttcagtttgttgactggtgccctactggtttcaagtgtggtatcaactaccagcctccaacagtggtaccagcaggtgatctggccaaggtgcagcgagcggtttgtatgataagcaacaacacagctgttgctgaggttttctcacgcattgattacaagtttgacctcatgtatgctaagagggcatttgtccactggtatgtgggtgaaggaatggaagaaggtgaattctctgaagcccgggaggatcttgctgcccttgaaaaggactacgaagaggttggagcagaaggcgaagaagaagaagaagaacccgatgattactcaaagtagtcaatcattcatcaccagctaccttacctacatctaccttctttcctctgtctaatgtctatccttggccattgaattttaagcatctttc

SEQ ID NO: 11544 - DNA, 324 bp, Glycine max
  Clone ID: LIB3092-004-Q1-K1-D9
gtcaactggagctgacatcattgttgagtccaccggagctttcaccgctaaggacagggctggcgtacattctaagggcggtgccaagaatggtattattgtctggccccagttaggatgcccccatgttcgttgttgggggtaatgagcacgaatacacgccagagcttgatattatttgcaacgctagctgctcatccaactgtcttgctccactcgccaaggttatcaatgacaagcttggcattgctgaaggttcgatgaccactgttcattccatcactgctacccagaagactgttgatgggccatcatccaaggact

SEQ ID NO: 11545 - DNA, 425 bp, Glycine max
  Clone ID: LIB3092-004-Q1-K1-E1
ggaggttccaaactctcccatgtttggatcagactatgttcaggaccccagcatctacatattaattgttggagctcttcaatatgcaacaaatgttaggcaagaaataagccacagtttaggcatgccagttattatctcagcccctttacaatcattggaatatagtcaggcggattcttggatacttccaaagcatgatcaactatgggttaccttttcaacccgcttctgatctcaaatagctagccatacacccattctgtgatgctgattgtcctcagacccagatggtggaagatcaacatctggggcatgcatttaccttgaccagaatctgatctcatggtagtaaaagaagcagaccttgattgcttgctctattgcagaagccgaatatcacagcttggcaatcactacaactg

SEQ ID NO: 11546 - DNA, 403 bp, Glycine max
  Clone ID: LIB3092-004-Q1-K1-E10
tctcttttaaagttctggcccgaaccctttctttcgctacattcacaacctgtttaagggggtccgtgcaatatagatgaagctcgagttcccaaatgtgctacttctgtgccttgcccttagctcttctttcttgtaaatctcaatggctggttctcctttctgtgactcaaagtgcgcgctgatgtgtaccacagcttgggttcaagacagatgcttggagttttgcgggatctgttgcgagaagtgcaactgagtcccatactggacttacagaaacaaggaccattgctcttgcttcatggacatgatgaactccaagggcaaggacaaatgcccctctaaaatatcaacattcattatcacactttattccaataaactaccttggattgcattattt

SEQ ID NO: 11547 - DNA, 369 bp, Glycine max
  Clone ID: LIB3092-004-Q1-K1-C6
cccacgcgtccggttgaatccttgctgatccccatcatgggaactatttttcctggcgaggctctctctccactcctcaacatcaaaccttcaccctcaagaattctcttggctccctctccgcaacccaagtcaaattctctcttttgctcgaaacccattgtttctagtctcagaaagaaccaaactttatctcctaaaccttcatcaagcacaagctggttggctcatgctcaacaaggcctagcagctttggctatctccttggcactcaactttagcccaattttgttcaatggcaatgcactggcatctgaatttgatgtacttaacgagggtccacccaaagattcttatgtgtttgatgat

SEQ ID NO: 11548 - DNA, 434 bp, Glycine max
  Clone ID: LIB3092-004-Q1-K1-A6
gatggcattgactacgccggcgtgacagttcagctaccgggaggcgaacgtgtgccctttctcttcaccatcaagcagctggtggcatcatggaagccagatagctctagtggggagtttctagtcccatcctaccgtggaagctctttcttggaccccaagggaagaggtgcttccacaggttatgacaatgcagttgctttgcctgctggtggaagaggagatgaggaagaacttgccaaggaaaacaataaaagtgcctcatcatccaagggcaaaatcaccttgagtgtcaccaagaccaagcctgagacgggtgaggttatcggtgtgttcgagagtgttcaaccatctgacactgatttgggagcaaaggctccaaaggatgtcaagatccagggcatctggtatgctcagcttgagtcatagagtgt

SEQ ID NO: 11549 - DNA, 387 bp, Glycine max
  Clone ID: LIB3092-004-Q1-K1-A7
tggctcgtcactccttgctcttagccctcctcctcttcgccgccgtggccaccgccgcgatggcggtggccgcgtccgacgccgacgacatcctgatccgtcaggtggtgccagatgttggcgaagccgaagaggaggacaacctgctgaacgccgagcaccacttcgcgagcttcaaggccaagttcgccaagacctacgccaccaaggaggagcacgatcatcgcttcggcgtcttcaagtccaacctccgcagagccaggctgcacgccaagctcgacccctccgccgtccacggcgtcaccaaattctccgatctaactccggccgagttccgccgccagttcctcggcctcaagccgctccgctttccggcgcacgcccaga

SEQ ID NO: 11550 - DNA, 417 bp, Glycine max
  Clone ID: LIB3092-004-Q1-K1-B1
cccacgcgtccgctgacactcttctctccttaaagccaccacattctgatacccttttgatcaatcaaagtgaagatcagcatagaatgcttgtttgattctatttcattgctatggataagtacgaggctgttaaggatttgggagctggcaattttggggtggctaggctcatgaagaacaaggtcaccaaggagcttgtagccatgaaatacatcgagcgtggccccaagagaacgaaaggcttcaattttacttcaaatttcaaattgatgagaacgtggcaagggagattatgaaccacaggtcccttcggcatcccaatataattcgttacaaggaggtggttttgactcccacacatttagcaatagtgatggagtatgcagcaggaagagagctctttgagaggatatg

SEQ ID NO: 11551 - DNA, 289 bp, Glycine max
  Clone ID: LIB3092-004-Q1-K1-B10
aacgataaatttttccaacattgtcccaccatattaccagtcaaaatacgctctaactggggctgcagttttgtatgctggggtgcatcttaatgtctcaaaaattgtggtcattggacacagtgcttgtggtggtattaatgcgcttctgtctttaccatatgatggaacctactctactcattttatttattatatagtgaaaaataaattgacttcctggccaaggttataacacaacgttcccgatgacccttttgctgacttgtgctcacactgtgagaatgaa

SEQ ID NO: 11552 - DNA, 433 bp, Glycine max
  Clone ID: LIB3092-004-Q1-K1-B12
ctgatgcttaatttgaagtctcatgaacctgcttctctcgttggtgtgcttcttaaatatggcttgagtaaatcccagacacacccctgttaaattgtgattttcacacccccttttttcaccgatcagattttgactacccgttataaaaagttatagtgatctgattgtgttattgatatttcatacagaaaacaataaacttttttgtgcgattttaattgatttccatttgggtttattcaattatgattgtcttttaggtggtatgattatctttcttcagtgctgttcattgtttctgtgatccgcggaagaacttacggatcgaaaatggcttcaagggtgactcccaatctcaaatgttggcagttcagaaccccttattattgtgattcatggaagacaactcgtgcagttactgtctatatac

SEQ ID NO: 11553 - DNA, 435 bp, Glycine max
  unsure at all n locations
  Clone ID: LIB3092-004-Q1-K1-B4
gttgagagtttttacaggcctggttcgggagactataggatacggctttttatccgaactgaactgttggggaagggaattccacccactcatcaatggcatctactctcttcgcttgcccgtcgttgtgttcctcctcttcttctatattttctacttccgtcaaattctccttaaacccgaataaaatttctcttccgttcgccggaaacaaaaaacctctttcggctccaattcgaaggcggttcaatgtcattgctatggctccccctaaacccggtgggaaggccaagaaagtggttggaattataaagctggctcttgaagctgggaaagctacacctgctcctcccgttggccctgctcttggttccaagggtgtcaatattatggctntctgtaaggattacaacgctagaaccgccgacaagcccg

SEQ ID NO: 11554 - DNA, 409 bp, Glycine max
  Clone ID: LIB3092-004-Q1-K1-B5
cttcgcttgcctaaccttggatcctcggtccttggtttggtccggttccgcgtttggccttcttccgggaccttgaccaatgaagaatgcaaagggcaagggagcagcaagggcctcaaaagaatcactgaagcccgttgatgaccgctgttacaggaaataatgtagtgatggaacatatatctctgttgttttcagaaaggttggaaagcggaaggcttccggtaagcctgggagaagtagtgcaccaaagaaggagaagaaggccaagaaagaccccaacaagcctaaaagaccacccagtgctttctttgtgttccttgaggagttcaggaagacctttaaggctgagaatcctaatgtgaaggctgtatcagttgttgggaaagctggaggagagaaatggaaa

SEQ ID NO: 11555 - DNA, 435 bp, Glycine max
  Clone ID: LIB3092-004-Q1-K1-B8
cccacgcgttcgcggaaaccaatttatgggatacggctatgatcaacgacaaggagttcattatcagcaacaaggagttccatatattgaacggcaaatgtatggtatgtctgttagagacgatagtagtttgagaaacccttaccaagcttctaccacatcgtatgctccatctgggaagccttccaagccagaggataagttatttggagaccttgttgacatggcaaaagtgaagccaaaacccactccaggccgagctggtagcatgtaaaaactatattatcgggtttgcacatttcagttctattgctaacttttgtccccgattttccttgatttttatttttatgtttttatattatatataatttttttggttcttggttcatattgtttgcttgtctgggaattagcatttgattatgtacattc

SEQ ID NO: 11556 - DNA, 359 bp, Glycine max
  Clone ID: LIB3092-004-Q1-K1-C1
cagaaatgttgccaacattgtcccaccatatgaccagtcaaaatacgctggaactggggctgcagttgagtatgctgttttgcatcttaaggtgtcggagattgtggtcattggacacagtgcttgtggtggtattaaggggcttctgtctttcccatatgatggaacctactctactgattttattgaggagtgggtcaaaattggcttgcctgcaaaggcaaaggtgaagacacagcatggggatgccccttttgctgagttgcgctcacactgtgagaaggaatctgtgaatgttccccttggaaacctgctatcttacccatttgttagagatggcttggagaacaaaacattgc

SEQ ID NO: 11557 - DNA, 441 bp, Glycine max
  Clone ID: LIB3092-004-Q1-K1-C10
cttccgaccaggggtttttttgccggcttcttaactttttctcgtttcaatcgaaaccaaaacaaaggcatgggcagaaaattcttcgtcggtggcaactggaaatgcattgggaccactgaggaggtaaagaagattgttactactttgaatgaggctaaagtccctggagaagatgtcgtagaagttgttgtgagccctccttttgtgttccttcctgttgtaaaaagtttgctgcgccctgatttccatgtttcggcacaaaactgttgggttcgcaaaggtggtgcttataccggtgaggttagtgctgaaatgcttgttaatttgggaattccttgggttattattggtcactctgaacggaggcagcttttaaatgaatcaaacgagtttgtgggagataaagttgcctatgcacttcaacaaggtctaaaagtt

SEQ ID NO: 11558 - DNA, 427 bp, Glycine max
  Clone ID: LIB3092-004-Q1-K1-C11
accaagggtttctttgactgcttttcaactttttctcgtttaaatcgaaaccaaaacaaaagcatgggcagaaaattcttcgtcggtggcaactggaaatgcaatgggaccactgaggaggtaaagaagattgttactactttgaatgaggctaaagtccctggagaagatgtcgtagaagttgttgtgagccctccttttgtgttccttcctgttgtaaaaagtttgctgcgccctgatttccatgtttcggcacaaaactgttgggttcgcaaaggtggtgcttataccggtgaggttagtgctgaaatgcttgttaatttgggaattccttgggttattattggtcactctgaacggaggcagcttttaaatgaatcaaacgagtttgtgggagataaagttgcctatgcacttcaacaaggtc

SEQ ID NO: 11559 - DNA, 436 bp, Glycine max
  Clone ID: LIB3092-004-Q1-K1-C2
cttcacaccattctcacaaaacaactttcaaactctgagaaagaatggctgccaacacattgatgagtactgctatctcagccttcccatctctcctttcttcctcaaaatccagatttgccaccgcagttcctctttctagctttggtgtcaccaatgcctcttcttctcgcttttctatgagtgctgactggatgccaggccagcctagacctccttaccttgatggttcagcacctggtgactttggattcgaccctcttcgtcttggtgaagtaccagagaatcttgagaggttcaaagagtcagaactcattcactgcagatgggccatgcttgctgttccagggattttggttccagaggcattgggcttaggcaactgggtaaaggctcaggaatgggcagcagttcctgggggccaagcaacctacct

SEQ ID NO: 11560 - DNA, 336 bp, Glycine max
  Clone ID: LIB3092-004-Q1-K1-C3
cttcacaccattctcacaaaacaactttcatactctgagaaagaatggctgccaacacatggatgagtactgctatctcagccttcccatctctcctttcttcctcaaaatccagatttgccaccgcagttcctctttctagctttggtgtcaccaatgcctcttcttctcgcttttctatgagtgctgactggatgccaggccagcctagacctccttaccttgatggttcagcacctggtgactttggattcgaccctcttcgtcttggtgaagtaccagagaatcttgagaggttcaaagagtcagaactcattcactgcagatgggccatgc

SEQ ID NO: 11561 - DNA, 429 bp, Glycine max
  unsure at all n locations
  Clone ID: LIB3092-004-Q1-K1-C4
cccacgcgtccggttgaatccttgctgatccccatcatgggaactatttttcctcctcactctctctctccactcctcaacatcaaaccttcaccctcaagaattctcttggctccctctccgcaacccaagtcaaattctctcttttgctcgaaacccattgtttctagtctcagaaagaaccaaactttatctcctaaaccttcatcaggcacaagctggttggctcatgctcaacaaggcctagcagctttggctatctccttggcactcaactttagcccagttttgttcaatggcaatgcactggcatctgagtttgatgtacttaacgagggtccacccaaagattcttatgtgtttgatgatgcangagtgcttagtagggtaaccaggtccgatttgaagcaggtgttgtctgatttggaa

SEQ ID NO: 11562 - DNA, 337 bp, Glycine max
  Clone ID: LIB3092-004-Q1-K1-C5
atcaatggaaccctttatactaggcaggctctatattcactgctcaacatcaaaccttaaccctcaagaactctcttggctccctctccacaacccacgtcaaattctctcttctgctcgaaacccatagattctagtctcagaaagaaccaaactttatctcctaaaccttcatcaggcacaagctggttggctcatgctcaacaaggcctagcacctttggctatctccttggcactcaactttaacccacttttgttcaatggcaatacactggcatctgagtttgatgtacttaacgagggtccacccaaagatccttatgtgtttgatgatg

SEQ ID NO: 11563 - DNA, 400 bp, Glycine max
  Clone ID: LIB3092-004-Q1-K1-A5
gattccacaacagtgggagggagatccaaaaagagagagtggaaaagatggcgcggttgatcacagtggtgtggtgcgcggtggcggtgctattatgcgccgcggccggtgcgtcgtgggtggaggaggcggcgaacccgatacgaatggtgtctggcgtggaggcggaggtggttcgggtgatcggggagtgccggcgtgcgttgaagtttgctaggttcgtgagcaggttcgggaagagttaccaaagcgaggaagagatgaaggagaggtacgagatattctcgcagaatctcaggttcatccgctcccacaacaagaagcgtttgccctatactctctctgttaatcattttgctgattggacttgggaggagttcaaaagacacagactaggagc

SEQ ID NO: 11564 - DNA, 384 bp, Glycine max
  Clone ID: LIB3092-003-Q1-K1-F1
caattatctacttgtaagaagtccaatttcgggcaacaacgggggtaatgcaaaaatagggcattagcattgtaaatctccaggcgataaatggaatatcaaatggaagacgccgcatatcttctggtgtgacaatatcattgtgttgggcaaagcattttcgaagaaattacgtggatttaggaagattctgattattcttctacatctacaattattaaggtgaagataatttcggctctttacaagtaaagaatgaaattttcatatggtagatttagttgatcaatataattattgttttaatttaattccttgaattaatttaattattgttcttcgacactttattcagtatattattaatttttttaaataacaaaa

SEQ ID NO: 11565 - DNA, 407 bp, Glycine max
  Clone ID: LIB3092-003-Q1-K1-F10
gtgaagtttttggcccatatcaacctattgctctcaaattgtggggatcagaacggtcagtccaagctcttgaaggtgttgcaatggaattggaggactctttgtttcctttgttgagggaggttagtattggtatcgatccttatgaagtgttccaagatgcagaatgggctttgctaataggtgcaaaacctcgaggacctggaatggaacgagcagacttgttagacataaatgggcagatttatgcagcgcagggaagagcattaaatgccgttgcatcccgcaatgtcaaagttatagtagtgggaaacccttgcaatacaaatgcattaatttgcttgaagaatgctcctaacattcctgccaaaaattttcatgctttaactcgtttagatgagaacaga

SEQ ID NO: 11566 - DNA, 336 bp, Glycine max
  Clone ID: LIB3092-003-Q1-K1-F11
gcgtttgccacggctaaacaggccttcgaggaaccaattcctgggcccgacacccttgggaggaaatcttaccaagagggcacgctcataatgcgcagcttttaagacacaacctcaccctttgcacttctgatgttcaggaccagctagattagccctgttatcccttatagggtgatgggtggtattcttcctatcatggaggtgcgctaagaatgtcatttatttgcgctaatgaagaatcgccctagtttataaaatgattggcaacccgtgatataatgttgcataaacagagaccaggcttctttcttatgtgagtcatatggtatcggc

SEQ ID NO: 11567 - DNA, 204 bp, Glycine max
  Clone ID: LIB3092-003-Q1-K1-F2
cccactcatcctctcttctctttttttttcttctccttcgtttgaatcaatcggtgcatatgttaaaatctgaaatccccttaaaatctctcaccaatctcatcattactactcttctcttattcatccctcacattttattttttattttccttcttttttatccttttttttatttatactttttttttccctaatttttta

SEQ ID NO: 11568 - DNA, 361 bp, Glycine max
  Clone ID: LIB3092-003-Q1-K1-F8
cgacccactcgttcgcccacgcgtccgtggaaagcttttattcatctccaatttcagagccatattttcaccaggagctcttggagcgattggtggctttattgttggagtagttccccagatacgtaaattgttgattggcggctatgcttcacttcatgtgattcacgactcaattaccatgtttggtgaaacatccttcccacttataacctttataatggtagcaatcctccttatatgtttcaagggatccaatacttttttttggacaattcttgtaattatattatcactatattttttcttgccaattttttggtactctagttattaaaggagcaactcacttatgttttaa

SEQ ID NO: 11569 - DNA, 424 bp, Glycine max
  Clone ID: LIB3092-003-Q1-K1-F9
atttcatctcctcttcgtcaggatctgacccgaacccgaagcatggtatccgcttccgaaccagatcgatgctcgcgaacttcgcggactccgagccgcctctccagctcccgtagatcccaatcccacttttcttcgtggtatccaaggaaacgagccaaactgcttctctcgcttattgcttttctcgctttcgttttctttcacaattggtttatgcttctccgtttacaacatcaacccgatcctatacccaaacctacacttcgttcctcctccgtttcactttctcttcagcggaaatggaacaagccttcaaataagaaaaaatcacaaaaggggaattatgcaaggatgttggcattggctgcacatgccttggcagagaataaacgcgaacctaaagatttgtggcaagaaccct

SEQ ID NO: 11570 - DNA, 354 bp, Glycine max
  Clone ID: LIB3092-003-Q1-K1-G10
ggaataggggcaaacagcaagtcctacccctaaccctaacttggaaccttcttccttcagagtcatccgtaccgcgggttatattactggatgcggggcatattgctgttaccgtgtttctccgctttcatttataagatgcacttctggtcatcattttaccaacatgcaggttttgagttgttggcttttgaatataaatggacgccaaacggttcatccatctggttgaggagaagaagaacaagattatggagagaaaggaagctcctctgaaatgggagcaaaaactggaagctgctgcttaaactaaagagaggaagctgaaggcttcaaagcataaaaaaagatctg

SEQ ID NO: 11571 - DNA, 307 bp, Glycine max
  Clone ID: LIB3092-003-Q1-K1-G12
cccacgcgttcgcccacgcgtccgcccacgcgtccgcccacgcgtccgcgatttattaggtgcttcaatatctgttcggtccttcaagcttccaaatcccgtgtattacattccttagtaatgccccattcatttgcatataattgttgtttgaattgtacataagggtagtggctcaattcatatactgaatatcatattgccaatgattcataaactgaatatcactgaaattctaatacatactgactaattaaacttgtgttaaaacttatgtaacattttccagttgtttacatgattgggc

SEQ ID NO: 11572 - DNA, 375 bp, Glycine max
  Clone ID: LIB3092-003-Q1-K1-G7
cgaccgcactcgtacgattttatctgctaacaaccagtccttcccctaaccctaacttgtaaccttctcccttgaggtacattcttaccgagggcaatctcacattattcagctcatattactcataccgagtttctacactttcatttataagatccacttatattaaccattctaccaacattcaggtgttgagttgtatgcttcctaatataaatgtacgccaaacatttcattcatctggtctatgagaagaacaacataattattaaaagaaaggaagctcctctaaaatatgaacataaactagaaaccactcctgaaactaaagagaggaatctgaaatgctcaaagcataaaaaaagatctgtctct

SEQ ID NO: 11573 - DNA, 282 bp, Glycine max
  Clone ID: LIB3092-003-Q1-K1-G8
cgaccgcacgcgtacgatatcatcttctattaaacaggatctcacctaaaccctaatcatgtccttctctctcgaagcatatctatactgagggagttctcacactactctcctcctattaatcttacctagatcccaatcctacttttattataagcatccaaggaaaccatcctaacagcttattttgcttattgcttttttcgctttaaataaattttacaacttactttatacttatccgttttcaacataaacccaatcctatacccaaacctacac

SEQ ID NO: 11574 - DNA, 225 bp, Glycine max
  Clone ID: LIB3092-003-Q1-K1-H10
gcgagtgccacgtccaaacaggccttcgagtaaccaataactgagccctacacccttgagaaagatatcttacagatgcgtgtctctcataatgcagctcttaatacacaaccccaccctttgcacttttaattatcaaaaccacctatatgaacccttatatccactatcgggtgttttgtttttatttttattaaataattatttctacttaatttttttttt

SEQ ID NO: 11575 - DNA, 233 bp, Glycine max
  unsure at all n locations
  Clone ID: LIB3092-003-Q1-K1-H11
tcgccacgcgttcgcccacgcgtncgtggctcgtcactccttgctgttagccctcctcctctgggccgccgtggccaccgccgcgatggcggtggccgcgtccgacgccgacgacatcctgatccgtcaggtggtgccagatgttggcgaagccgaagaggaggacaacctgctgaacgccgagcaccactttgcgagcttcaaggccaagttcgccaagacctacgccacca

SEQ ID NO: 11576 - DNA, 423 bp, Glycine max
  Clone ID: LIB3092-003-Q1-K1-H7
cccacgcgtccgcccactcgtccgaaacgacgtgaggaggatgcaacgctgcctcatcgagggatacggtttctccggggacgacatcaccgttttgatcgacacggacgagtcctacacggagcccacggggaagaacatccggtcagcgttgaccaggctggtccgatcggcgaagccaggggacattctgttcgtccattacagcggacacggcacgcgcctccccgcggaaaccggagaggatgatgacactggctttgatgaatgcattgttccgtctgacatgaacctcatcactgatgatgatttcagggaatttgttgatggggtgcctagaggttgcacgatcacaattgtgtctgattcttgccacagtggtggcctacttgaagaagctaaggagcagataggagagagcac

SEQ ID NO: 11577 - DNA, 381 bp, Glycine max
  Clone ID: LIB3092-003-Q1-K1-H9
gttccactccccccaatagccgctattctactcgcaagcaaatcagaacaagagaagagaatggcaggagcagaggggctaaacagagaacagtacgtgtaccttgcgaagctgtcggagcaggcggagcggtacgaagagatggtggagttcatgcagaaggtggtggtggggtggacgccggcgtcggagctcacggtggaggagcgcaacctcctgtcggtggcctacaagaacgtgatcgggtctctgcgtgccgcgtggcgcatcgtgtcctccatcgaacagaaggaggaaggacgcaggaacgacgaccacgtgtgcctcgtgaagcactacagatccaatgtcgagaacgagctcacgcatgtctgcgccagc

SEQ ID NO: 11578 - DNA, 437 bp, Glycine max
  Clone ID: LIB3092-004-Q1-K1-A10
cccacgcgtccgatcagaaacataagtgcaagaattaggtggcatcaccgatgtgcatggagctgccaacagcgtcgagatcaacaatctcgctcgctttgctgtagaggaacaaaacaaaagagagaattcagttctggagtttgtgagggtgattagtgcaaagcagcaagtggttgctggagtgaattactacataacattggaagcaaaagatggtttgattaaaaatgagtatgaagcgaaggtttgggtgagggaatggttgaactccaaagagttgctagaattcaagccagtcaatgtttctagcacaccaataggtggcattaccgatgtgactgcgaatagcctcgagatcgacattctcgctcgttttgctgttgatcaacacaacaaaaaagagaatgcaaatctggagtttgtgggggtgatta

SEQ ID NO: 11579 - DNA, 436 bp, Glycine max
  unsure at all n locations
  Clone ID: LIB3092-003-Q1-K1-B8
tcgcggacgcgtggggttgtatcgtcatctcatattaaagcctttaaactattgaacctcagagtataaattgggggtgcgggcattacanaaggagatgcaagatcagagcgccgtgctgtgatgaggtttttgactgtaggcattgccataatgaagctaagaattctgaggaggttgatgctgtggatcgtcatgatgttccacgccatgaaattaagaaggttatctgctccttatgtgatgtagagcaagatgttcagcagtactgtataaactgtggaatatgcatgggcaagtacttttgtactatatgcaaattctttgatgatgatatttcaaagaatcaataccactgcgatgaatgtggcatttgcagaactggaggcaaggataatttttttccactgcaaccgatgtggatgttgctactcaa

SEQ ID NO: 11580 - DNA, 419 bp, Glycine max
  Clone ID: LIB3092-003-Q1-K1-C1
cccactcgttcgtccacgcatcttccaactcgtacgactgtcagtgtgtcaccaccatgggcactttcacataccgaagccttctacgagattctccgtccatgtgccttgaaatcaatgtttctgacctgctcttacggctaacttaaccgagaagcgactatgaagccattggtgtgccctacttatgcctatttcatggttgatgccatgaagggagagtggttccatggccaacgttgactaccttaagatagtgcgtgtctcctgcatgaacatcggcttcgtctcaaatgatgtgggactggatgccgacaactgcaaggtcctcgtcaacattgagcagcagagccctgatattgctcagggtgtacacggccaccttaccaaaaaacctgaagaaattggtgctggtgacc

SEQ ID NO: 11581 - DNA, 414 bp, Glycine max
  Clone ID: LIB3092-003-Q1-K1-C2
cacgcgattcgcggacgcgtggacacgtcatgacgtctctaacatataattactcaatgaatgaaaaacgtgccgtactaatgcatagggaactttgtgatggggctgatcctgaaatggaagatttaagaacaactctcgatccaccaactgagcaagatgattctaatacaatctctctggcaattgatgatctttttgttgaagacaccatactgtacatgcttgaggatgttatatcaaagttagatgtcaacataagactctgcattagagatagcttgttccggttggctcaaagtgctatgcaaaggaattatgctagtgatacaagcagtacaaacaacagttgcagagaagaacttaaagttgctgcaagagaagaaagaagtagccaaaacagatatgctagga

SEQ ID NO: 11582 - DNA, 251 bp, Glycine max
  Clone ID: LIB3092-003-Q1-K1-C3
gacccacgcgttcgaagcaggatggactcgcctatggatcgcctcttttgttactccttatctgcaaatcgtggcgaactgattcctcatggtcctattttttacccttactccttactccaaataattagcaacaacctcatatccactatctgagactgtttattctaataccacctatattccctcctttgatctttatcctctacagacaaacttcaacatcctacccgattccataacagttttac

SEQ ID NO: 11583 - DNA, 329 bp, Glycine max
  Clone ID: LIB3092-003-Q1-K1-C6
tcccactcgtcctccctcacgttcgatcactcttccccccaagcctacgaccacgcgtgcgggatactatatgcaaagccatggatgttaattcccatcctctgtgcacaattcttacccccacacgcaaacactcacttgttattccacaacacatccccaatacttctaaacattctccatcattatactttcccgccaacactatatccaattcttttcgtttatcttctccaactcttttgttcgctacgccaaaaaaccaattcatcatacctaacagatagaacaccaatgcaagcgatttggctctacattattctcattcc

SEQ ID NO: 11584 - DNA, 222 bp, Glycine max
  Clone ID: LIB3092-003-Q1-K1-D1
ctaaccctttatattattcattcaacaccactttctccaaccttcaacatctcctaacacactttaacaaatttttatctctttcctaccctcaaacccttttccaaattccccctcttaacattctcattccctctttatcctccccaaaatcacatctaccctttttacatttaacctaaagtatacctttttccacccatattatcatcccatcaaatc

SEQ ID NO: 11585 - DNA, 231 bp, Glycine max
  Clone ID: LIB3092-003-Q1-K1-D10
ttgctacgtccaaacattcctacctttaaccctttcctcaacccttctccctttgggttcattcttacaaatagttctctctcataattcggctcctaatactcatcccctccctttccacttttatttatcaaaaccacctttattaacccttatacccacaataaccttataagtcatatacttcctatcataaaaccaccccaacaatctcattcatcttttctaatt

SEQ ID NO: 11586 - DNA, 418 bp, Glycine max
  Clone ID: LIB3092-003-Q1-K1-D12
cccacgcgttcgcccactcgtccgaccagttaaggtggaagaccaccacaaagaggaaacgtggaagaagcggcgcctcatatcacatggcacggttcactgacacccatcagaaaaggtcaccgaatgttatgaaatcaaatgctcctgacagttttttgatcccggcatcattgaaagttgatcatgatgactgcaagtatgttggggatccttccatcttcagttcttcagttgtgccttctttaactaacatggttatgtgtaggtgactccatgattcatatcttagtttccgggttctttacttctctcactcctttgcttttaagtacatgtatttagcccctaaaccttagtgcatcttttcgatgcctgtcttgttcagatcttcacgtccagtatctattctcttcgt

SEQ ID NO: 11587 - DNA, 417 bp, Glycine max
  Clone ID: LIB3092-003-Q1-K1-D2
gaaagaaggaaggagacatttataaaaagctctttcccttcccctaaatccctcacactcattccatttttacctttctctctcgctcgcaaacgcaaataataaaaaacaaggttttagccatggcatcgaagcggatcttgaaggaactcaaggatctccaaaaggatcctcctacctcatgcagcgccggtcctgttgctgaagacatgtttcactggcaagcaacaattatgggtcctccagacagtccttatgctggaggtgttttcctagtcactattcatttccctccagattatccctttaagccacccaaggttgcattcaggacgaaggtatttcacccaaatataaatagcaatggaagcatttgccttgacatattgaaggagcagtggagccctgcgctaacta

SEQ ID NO: 11588 - DNA, 413 bp, Glycine max
  Clone ID: LIB3092-003-Q1-K1-D3
gcaaagaaggaccaacacacttatacacggccgtcaaaactttcccttaatcccttacactcggaccattaacacctgggtgtgtggctcaacgacgacactgttcatataacacagttttagccatggcatcgaatcgtaatcttgaaggaactcactgatctccaaaaggatccttctacctcatgcaaagcctttcctgtagctgaaaacatgtttcactggcaagcaacaattatgggtcctccagacagtccttatgctggaggtgttttcctagtcactattcatttccctccagattatccctttaagccacccaaggttgcattcatgacgaaggtatttcacccaaatataaatagcaatggaagcatttggcttgacatattgaaggagcagtggagccctgc

SEQ ID NO: 11589 - DNA, 384 bp, Glycine max
  Clone ID: LIB3092-003-Q1-K1-D8
cccatgttctaattttctttaatagcgatcttcaaatatggagtgggttttccaacaaccaaactttccctttaacacattttaattctacgcaattttttttaaaaaaaattcgaaagctgctcgggaagatttctgggttcttgatcaatctaactatggtgggagtggacaaaacatggaacaaatacttcaccagaaatgaataggttgatggtatcgtgaaagagaaaaaatgggtgatatttaaaggagaggaggatcctacctctatcccagttgaatggatatgttggctgaatgggcagcgtaaaaaggctccaactccagaggaaatgatggaaattgaaacaaaacgtgaacgtttaaaacaaatgtttctct

SEQ ID NO: 11590 - DNA, 262 bp, Glycine max
  Clone ID: LIB3092-003-Q1-K1-D9
ccactgcacacttttcatactaaggcgccatttatatttgggactttcttccccccaaatatcataaaactctctctttactcatttcttttatcacttcttttcttcctagttctcataatcttcaccccatccatcccccattcccaataataccattatttctcctaccacctcaccttcctctttattcctaatacacttaacttcttatccaatttcccttttttttttatttccctttatttcactttttctctct

SEQ ID NO: 11591 - DNA, 337 bp, Glycine max
  Clone ID: LIB3092-003-Q1-K1-E10
gacccacgcgttcgcgctgttgctgagtcggtcccataaattgaagaatgactcgcttacgactctgtacaagcgtgcttctgtgaggcgggccaaggataaagcggtgagtgcctaagcattaaagccgcttctcgaactttttgcggaggatgggagcggaatggctgataaatcgatggtggtgctgaacaacttgacgggcattgagaataggaaagatgccattgttgaataaagtgggattgatgcacttctggaagcaattgatgattgttctgtataaagaaatgaattcgattgtttgactatgtgcagctgtaggctcacaacattt

SEQ ID NO: 11592 - DNA, 324 bp, Glycine max
  Clone ID: LIB3092-003-Q1-K1-E11
cccacgcgtccgctgagtatttgcgctttgatctcaacactgtcattgctggaaagccggaggatgagaagaaatcactcaaggaactcactggcaagctcttccaggatatcagcaatctggatcatgcagcaaaaattaagagcagcccagaagcagagaagtactatgctgctactgtatcttctctgaacgatgtccttgccaaacttggttaatgtgattaatttcttgctttcttgtgtaagctttgtgcatcattttctcagacactttgttgactgatattttaagaaaatcaaatgatgagggaaaattttctat

SEQ ID NO: 11593 - DNA, 385 bp, Glycine max
  unsure at all n locations
  Clone ID: LIB3092-003-Q1-K1-E2
cccacgcgtncgttctctttcatctgaattttccctttcaaatctcttcctttgaagtttgcgtagttctctgcatgatggagatggaacgcgtcttcgagtttcctcacactcacatggatcggcgcccgagaaagagagcgagattgggctgggacatccctgaggtccccaagataagatacatagcaaaatgggtgaaggaacttttgggcaggtcttaaaatgctgggatagagaaaggaaggaaatggttgccgtaaaaattgtccgtggtattaagaagtatcgagaagcagccatgatagaaattgaggtgttgcaacagcttggtaaacacgataaaggaggcaatcgtcatgcatgacttgcgcatgattcatac

SEQ ID NO: 11594 - DNA, 427 bp, Glycine max
  Clone ID: LIB3092-003-Q1-K1-E3
cccacgcgtccgttctctttcatctgaattttccctttcaaatctcttcctttgaagctgtcgtagttctctgcatgagggagatggaacgcgtcttcgagtttcctcacactcacatggatcggcgcccgagaaagagagcgagattgggctgggacatccctgaggtccccaagataagatacatagcaaaatgggtgaaggaacttttgggcaggtcttagaatgctgggatagagaaaggaaggaaatggttgccgtaaaaattgtccgtggtattaagaagtatcgagaagcagccatgatagaaattgaggtgttgcaacagcttggtgaacacgataaaggaggcaatcgtcatgcatgacttgcgcatgattcatactgacctgaagcctgaatacatactactagtttcaccagagta

SEQ ID NO: 11595 - DNA, 410 bp, Glycine max
  Clone ID: LIB3092-003-Q1-K1-B6
ggctggactgcccataagtacccggtggtctcctgagataaagaaggaaatcaagcaaagcaggattcgagtgaccggaaaggttgcagaattgataaacagtgcaccagatgatattcgacctaaagtttttgttagtgcaacagctgttggttattatggcaccagtgagacacaagtctttgatgaacaaagtccatcaggaaaggattacttggctgaggtttgcagggaatgggaatccacagccctaaaggtaaatggagatgttagagtggctctaattcgcattggtgttgttcttggtaaagatggtggagcattagttaaaatgatacctatcttcaacttgtttgctggtggacctctaggctctggaaaacaatggttctcctggattcatttggaag

SEQ ID NO: 11596 - DNA, 429 bp, Glycine max
  Clone ID: LIB3092-002-Q1-K1-H10
cccacgcgtccgatctgtacatgatacaacaggaactagtccaaaactggatgggaagactgtatattccattggtccaagattgaaagcattctctgattggttactgaaaactatggtgtcgggcaaacttgatgccatctttccagctgctactcgtgaatatgcaccattgatcgaggaattatggaatgatgctgccattaaggctacatacgataggagaagcgaattagaaatgctgcctagtgttgccagttatttcttagagcgggctgttaaaatattaaggacagattatgaaccctcaaatttagacatcctttatgctgaaggagttacttcatctaatggggtggcttgtgtggaagtttcatttcccccatcagtttttgactaaactgttgacactactgatctacatgattc

SEQ ID NO: 11597 - DNA, 236 bp, Glycine max
  unsure at all n locations
  Clone ID: LIB3092-002-Q1-K1-H5
tncgccacgcgtnncgccacgcgtncgtccattttagggttcactttgtatttgtaataccatttcctcgcgcggcactgcttcccgccgncgncgncggcgtcagcgtcagcaccaatggcagacgcatcttctctgccgacggatcaactcgccggcatcaccctcgacgaggttcccaaagctaatttctccgaccgcgtccccatccgatccatcatctcccgcaccgacgg

SEQ ID NO: 11598 - DNA, 182 bp, Glycine max
  Clone ID: LIB3092-002-Q1-K1-H6
tccacgcgtgcggggtacttcaaatcttaagattccgccaaaaaaccctatgagtgccgatgaagagtcccttccttctagggcatgctgtgttattgttgagtttgtctctggggggacactaaagcaatatttgtttaaaagtaggatgaggaaacttgcttattagattgtgattcagc

SEQ ID NO: 11599 - DNA, 357 bp, Glycine max
  Clone ID: LIB3092-002-Q1-K1-H7
atcaaactattagcaatttagcaccttctactactttgtaatcgttcaagagttgtgagctgtgaagaatgagttcaacaagccgtgcttggacttggagcgtggcagcaagtgttggagtggtggaggccttgaaggaccagggtatatgcaggtggaacagtgtgatgagatcagcacaacaacatgctaaacataatatgatgtctttgtctcaaaccaagaaggtgtcttttcaatcatctgcgatggcttctgccaaattgaaagatgagaaagctaagcatgcagaggagtctttgagaacagttatgtacttgagttgctgaggtcccaactaaacaaagatgctaagac

SEQ ID NO: 11600 - DNA, 466 bp, Glycine max
  Clone ID: LIB3092-002-Q1-K1-H9
ccgggtcggaccaagccgtcggccaagccttccaacctgtccttgttccaccaggacctatcccaaacctgatggggaaagctgatttttccatgggtccaggattgaaggctttctctgatgggttactgaaaactatggtggtcggcaaacttgatgccatcttttccagctgctactcgtgaatatgccccattgattgaggaattatggaatgatgctgccattaaggctacatacgaaaggagaagcgaattagaaatgctgcctagtgttgccagttatttcttagagcgggctgttaaaatattaaggacagattatgaaccctcagatttagacatcctttatgctgagggagttacttcatctaatggggtggcttgtgtggagttttcatttccccaatcagcttctgacgaaactgttgacactactgatctacatgattctttggtcaggtatc

SEQ ID NO: 11601 - DNA, 308 bp, Glycine max
  unsure at all n locations
  Clone ID: LIB3092-003-Q1-K1-A1
gtattcttccactcttttgtaattgtggctgtggtatccctttctctccaacctctgaagttgaaaatggtgaaaggaagtgagagcggtgcatttcccgaaccggttatggattcagtcaacaccactctctccaaccttcaacaactccgaacgcactttaacgagtttttgtctctctccgaccctcanaccctctcccaaatgcccnctcttcaacgggctcattccctcttcatcctcgccaaagtcacatctacccttcttgcattgaacctaaggtgtacccggggtcacccaaatgatca

SEQ ID NO: 11602 - DNA, 410 bp, Glycine max
  Clone ID: LIB3092-003-Q1-K1-A10
gtcgttccggccggtgacttggaggacctacagtgggtttcacacttcgtggacgattcgagtcccggagctgtggggtgttatacccggttcgttcggaggaagcgaaccggtttgttgaaccggaaccctcagtgaagaaaacgcctcgttttccgtgggaaatgaaaataacgagcaaggcgagaagcgtacggaataggaagcccaacactcgcgtgtggtcattgggcagcacgttgctctcgctcccgtcttcgccgcccacgaagaagcataagaagcgggccgaggcccatgtccagcccgttggagtccagattcagcggcggtgcagtcactgccaggtgcagaagacgccgcattggaggaccggcccactgggcgccaaaaccctttgcaacgcgtgc

SEQ ID NO: 11603 - DNA, 199 bp, Glycine max
  Clone ID: LIB3092-003-Q1-K1-A11
gacccactcgtccggtaagactgtcggtgaataatattgaacttctatagacccaatgattttttgacacaatgggggcttaatattataacgctagtttttgatcttgacctctcataacatccattactcaactttttgatcacatcattactaataatatgttttccaaaaatatcaatgatccctactcttttat

SEQ ID NO: 11604 - DNA, 227 bp, Glycine max
  Clone ID: LIB3092-003-Q1-K1-A2
cgccacgccccacgcatagcgaaagtcgggcaaataggtttctgaaatacagcttaccaatagcctttaacccatatgggtacggtcttatgactctcctgaaaaaacaccgcgagccttcaatactcacctttactgtctacgtggccagcatgccaatttcaatttccgcaacacaccttgcaacatggacactaccaatgctccttaccaatctcttaccccac

SEQ ID NO: 11605 - DNA, 248 bp, Glycine max
  Clone ID: LIB3092-003-Q1-K1-A3
ttctcttcaacctaacgcagcatcgctatactcttcattccatggctttgcccaatcagcggaccgtggattaccctagtttcaaactcgttatcgtcggtgatggtggcacaggaaagacaacctttgtgaaaaggcatctcaccggagaattcgagaagaaatatgagccaaccatcggtgtggaggttcacccattggattttttcacaaactgtggaaagattcgattctactgctgggatact

SEQ ID NO: 11606 - DNA, 202 bp, Glycine max
  Clone ID: LIB3092-003-Q1-K1-A4
acgctcactcgtactcccacgcgttctcccactcgttccactggcagggtgataccaccagggggaccgtcacaacgcaagccttcaccactattttccggccatgatcctcgaaatacaagtttcagaccagctcttactgtaacataaccgagaaggtgctatcaggccaatgtcgtgccctccttctgcctctttcaaa

SEQ ID NO: 11607 - DNA, 402 bp, Glycine max
  Clone ID: LIB3092-003-Q1-K1-A9
gatatgcaaagctacttaatcagggacgtagcaaccttcatcccttttgtccaccaaaagctgatgacattgcaggcgagtttgctacacaagtggtacaactggaaccccaaaaggtgctatcttgacccatggaaactttattgcaagtgttgctgggagtactatggacgagaaattcggtccttctgatgtttatatatcctatctccctttggcacacatttatgagcgagcaaaccatgtcatgacagtacattttggcattgcagtgggattttaccagggggatagtatgaaattaatggatgacatagctgctctaagacctactgtcttttgtagtgttcctcggctatataacagaatatatgctggtattactaatgctggtaaaacatc

SEQ ID NO: 11608 - DNA, 301 bp, Glycine max
  Clone ID: LIB3092-003-Q1-K1-B1
aactttaaccccaaaatgtgctttttttacccatggaaactttattgcaattgttgctaagaatactatgaactagaaattcggtccttcttatgtttatatttcctatctccctttttcacacatttattatcgatcaaaccatttcatgacactacattttttcatttcagtgggattctaccatggggatagtattaaattaatggatgacatagcttctctaatacctactttcttttttattgttcctccgctttataacaaaatatattctggtattactaattcttttaaaaca

SEQ ID NO: 11609 - DNA, 424 bp, Glycine max
  Clone ID: LIB3092-003-Q1-K1-B10
gacccacgcgttcgctggccactccctgcttgtgtgaacaaggacagaatatcaactgaatttttggatggatgggtacaaattatagtgggtaaagtttgaatatgactgagcaatattgatttgtagcacatatatttatacgtatacctataccccgtgcatatagatggagaagaaatgggcattgttctgcatgggccatgtcatgccctacatatatttgtaatgtaatgagcagatgatgggttaattttgatttcatatacaacattaattgttgtgcgggcaaaaaaataatttacttaattcaatatttccttaaatttagattataactatattacgtttagttatgctttatattatttttatgtgtaccttaaaatttaccttatatatttttttggtggcggcccgtttt

SEQ ID NO: 11610 - DNA, 433 bp, Glycine max
  unsure at all n locations
  Clone ID: LIB3092-003-Q1-K1-B11
gacccactcgtncgnattatgtggggagtcatgaatctactgaaatgcaacgcctatgtactttgtgatccaagcgtgtttcaaattttaggggatttcatttaacaggatgttgcaaaactccacctatttcaagtgagtccatttcatttataacgcatagttcaccaaggtccaatggaagtaacttaaattttccatggcaaggttcatatcagcaatatcctctattaactggtgttgaagggttgcaaatgattctcatggagatgaaagtctttgttaggcttcctatttattagtgctatatctttaatctctagcctattcttgtggattcagatatttgttgtttctttctttgttggtaatttcctgcatttcatgtttttctaacgtgtttcattagtttagacaacttttatcagaaaac

SEQ ID NO: 11611 - DNA, 412 bp, Glycine max
  Clone ID: LIB3092-003-Q1-K1-B12
gacccattcgttcgaagcagggttgtattgacaatggaaggcctgatttggggcaccttttctggaggtggaaaccaagtgaatgccatcggccaaggtttgaccctggcacttttctccaactcataagcaacaagcacatatcttttattggagactctctggccaggaaccacctagagtccctcctttgctttttagccactactgaaaaactacaaggattcacccaattccaagaaggttatactcggtggctctttcgttctcacaaggcaaccgtgtccttctattggtccccttttcttgtagatggtgttccaagaaaaaatccgggactcccttataacaaaattcatttggatcgtgctaatatgaagtgggaaaaggatttggatcatatagacatcat

SEQ ID NO: 11612 - DNA, 355 bp, Glycine max
  Clone ID: LIB3092-003-Q1-K1-B3
aaattgggcgtgcgtgcattacagaaggagatgcaagatcagagcgccgtgctgtgatgaggtttttgactgtaggcattgccataatgaagctaagaattctgaggaggttgatgctgtggatcgtcatgatgttccacgccatgaaattaagaaggttatctgctccttatgtgatgtagagcaagatgttcagcagtactgtataaactgtggaatatgcatgggcaagtacttttgtactatatgcaaattctttgatgatgatatttcaaagaatcaataccactgcgatgaatgtggcatttgcagaactggaggcaaggataattttttccacttgaaccgatgtgga

SEQ ID NO: 11613 - DNA, 355 bp, Glycine max
  Clone ID: LIB3092-002-Q1-K1-H1
ggatgaggataccaaggttaaagggaaggcagccattgatgttgtgtgcaacccattggggaagtctggaggtgccctcatccagcaatttatgatattgacttttgggtcactagctaattcaaccccatacttgggaggagtgcttctgctgattgtttctgcctggctagcagcggcaaaatccttggatacccaatttactgcattgcgtaaagaggaagaactcgagagagagatggaacgagcagccgccgtatagataccagtggtggctgagactgatagtggaaatggttctcttgcaactggttcaccactgagtccatgctgaggtgactcctcaagcagtcca

SEQ ID NO: 11614 - DNA, 410 bp, Glycine max
  Clone ID: LIB3092-003-Q1-K1-B4
tgcaccgggactagagcgtctaaacattcttcctttcagggttgctgcatatgacaagacgtaaggtaaaatggcattctttgacccttcaaggcctcacgacttcctgttcatatatagctcaaagatgcgcacactggcaaggaacaaagaaagtcctgctgatggatttacatgccctgccctacatatagtgctagttgattactatgatagcttagtactctcaagcaacggcaaagtgcaggaagctgttccagcttaatcttgtatcatatcataatgtatatatctcatgattgggagaaaccttaagcttatgtattctcctgctaagacatacttcacgaggatcctctggcccaatctaataataataataaattaaaactttggggaggcacaagcac

SEQ ID NO: 11615 - DNA, 300 bp, Glycine max
  Clone ID: LIB3092-002-Q1-K1-E6
aaaaaaaaaaaaaaaaaaaaaaaaaaaaaaaaaaaaaaaaaaaaaaaaaaaaaaaagaaaagaaatataaaaaaaaaaaaaaaaaaaaaaaaaaaaaaaaaaaaaaaaaaaaaaaaaaaaaaaaaaaaaaaaaaaagggccccccttttaaaggatccaaatttacttcccctttttttcaacttaaaaatttttttttagtgccacctaatttaatttacttgtccttcattttaaaacttattatcttgaaaaccctttcgtttcccaattttaatccctttgataaaaatccccttt

SEQ ID NO: 11616 - DNA, 377 bp, Glycine max
  Clone ID: LIB3092-002-Q1-K1-E7
gtaggttctagacaggggtgacaagatagagcttctggtggacaagactgagaaccttcataaccaggcacaagatttcagaacttctggaaccagaatccgtcgaaaaatgtggctgcaaaacatgaagattaagctgattgtattgggaatattgatagcacttatcctgataatagtcctatctgtatgtcgtgggttcaactgtggaaaataagccattcaccgaggccttttataatgttatttcagccttttatcggaggaaagatactaatctatggcatgagtttgtatgtaatatagatatagatatagtaaaaggtcgtatgttggtcactttggtctacttataaatgcttttggaaatataattt

SEQ ID NO: 11617 - DNA, 352 bp, Glycine max
  Clone ID: LIB3092-002-Q1-K1-E8
ttggtgctctgtgtctctacgatctggatccaacggtccaaaatgttcggggcttgtgctgcttgttttcccaggttttagagctccaaaccttcagatccacctcattcgtctccagatcttccttccttgataacgttttcgggttcgagaaggcacttgtttgtttgtcgtacgaaatggagactaaaccgagttcggtgatggttacgctcagttacggcgcgttgacgtgcgccgcggaagttctcgcgactttgctagcttctgctgtcgtcaaagccacgcttttggccccggatctctaccggctgctattgaccaacacgcctacaaccaaaggagagagaaa

SEQ ID NO: 11618 - DNA, 330 bp, Glycine max
  unsure at all n locations
  Clone ID: LIB3092-002-Q1-K1-F12
ctcaattcttcgcaagtcgggttctttcgcgagggctcttgctgtctcgggtcaattggcgaagaataaccacctgggtcatcgcactttactctccaccgccatcagccagcaccagcaccaggattcgcttgttccaaggttccacttttcttctgtagcttccaagaagaaaccaacctccgatgagaaccttctncggctcatcgaatccgaaatcgaatgcgcccaagagaccgacgatcataacgcagctgaagaggttcgggtaaattttccgttaaaataatcgatagtccggacaacagaacataacgcttgagagaatgt

SEQ ID NO: 11619 - DNA, 407 bp, Glycine max
  Clone ID: LIB3092-002-Q1-K1-F2
aaccgattcttgctaaagacaaagcacaggatgtttgggaagacaagttttcccccaatgcagcaaattctctaagaaatttatcaggaagtcatgatttctctactatccgatcgacctattgtgaccttgaggatgactatgagaaagagatccaaaaggaactcagatggctcagagccaagtaccaaatggagttaagggatcacaaggatcgacagtttgggcaatgttcgcatagttgtaacagtgagcacagaacagaaaatggctttttgtcaccttcactgacagaaacattaaaaggaggcaacaatgggactcagttgaaacccattactaccaagtggaattgtgattccagtagtcaccctcatgtccatgaaagcagccccaattcggacacc

SEQ ID NO: 11620 - DNA, 361 bp, Glycine max
  Clone ID: LIB3092-002-Q1-K1-F4
tcgagcaatcatgggcatgttgtccagatcatgtcgtcacaactcaacccatcgccataggtgcaatacctgtaatactcagaatgtagggtacataaatgggatccatccgaatcggagagattttagtgtttccggttcgaattggggtcttgctaggaattttagcactagtttttgtgtcaatattggtagttttaggcctagggttgtgtccttgataccgcatgtagcgtcggattttaggaatcactctacatcagttgattctaatgctaatgacacgagctttgagaagattttcattcatagcagcttgaatgtcaagccattgataattgaaagaattgagactgatcaa

SEQ ID NO: 11621 - DNA, 299 bp, Glycine max
  Clone ID: LIB3092-002-Q1-K1-F6
cggacgcgtgggcggacccctgggccgacgcgtgggccgacgccttggctttttgattgatttgggatgaagaagaacaagtatggtaattaaagttacatcaattttacatttacatcatttaaatttgaggggtgtttctgtttgttgatttcgtgtctccatacttaggtccaaggaagagagagaaaaaaattgagaataacagaacagaatcatattcgtattcatgtgctgtagctgaaggcataacatacatcactgacccattacataataaacctttttttttctttctc

SEQ ID NO: 11622 - DNA, 241 bp, Glycine max
  Clone ID: LIB3092-002-Q1-K1-F7
aacaatttcatcaagcctgccatggcttcctcgtgtgcttcctctgccattgcagctgttgccatctccacaccaagttcccagaagaatggatcactcttgggaagcacaaaagcttcttttcttagtgggaggaaactgaaggtgaacagttttacagcaccagttggagcacgatccagcactacagtgtgtgcagttgctgagcctgataggcctctgtggttcccaagcagcaccc

SEQ ID NO: 11623 - DNA, 336 bp, Glycine max
  Clone ID: LIB3092-002-Q1-K1-G1
cagcattcaatggtactaaagctatttcggaaagggtaagtcatatatgactcatttttttgtctcattgagatattgtaatgacaattgcttgagaaacaaaccataatcatattgaattttgctactggaagctactaagtagagcatacaaaagtttgtcattataattcggtgtttgctatcaaaacttgtcacataagaatgagagagtcttgtccttagttatctcttattgtctttcttgtacttaattttcattttctattataatcaattctccttttaaccataataagtacttagagcataaatgccgattggactattattttt

SEQ ID NO: 11624 - DNA, 313 bp, Glycine max
  Clone ID: LIB3092-002-Q1-K1-G10
agaaaagccgcacgagagagtccagcgagtccacagcgtggaggagttcgagtgggcgcgcgaatccgccaaagacaggcttgtggtggtggaatacgctgccagcgacagcgaggagagcagccagatataccctttcatggtggagctgagccgcagctgcaacgacgtggagttcatcctggtgatgggcgacgagtcggaaaagacgaaagaacttctgaagcgggaagaagtggagaatgtgcctcacttcagcttctacaagagcaggagaagatacacgaggaggaagggattggtcccgacatgc

SEQ ID NO: 11625 - DNA, 135 bp, Glycine max
  Clone ID: LIB3092-002-Q1-K1-G11
ccggtctcggcaattccgagggtacgacgctcacgcgtatcgtagaagaagcgcgacacgaagagagtgccagtcgaggtccacagccgtggtaggagtctcgagtcgtgtcgcgtggaatctcgcacaagagac

SEQ ID NO: 11626 - DNA, 403 bp, Glycine max
  Clone ID: LIB3092-002-Q1-K1-G12
agaaaagccgcacgagagagtccagcgagtccacagcgtggaggagttcgagggggcgctggaatccgccaaagacaggcttgtggtggtggaatacgctgccagcgacagcgaggagagcagtcagatataccctttcatggtggagctgagccgcagctgctacgacgtggagttcatcctggtgatgggcgactagtctgagaagacgaacgagctcctgaagcgggagaaggtggagaatgtgcctcacttaagcttctacaagagcacggggaacatacacgacgaggaagggtatggtcccgacatgctggcaggggatgtgctatactacagggaccaccactctggggttgtgcaactggacaacgtggaggacgtgcagaagcttatagaggac

SEQ ID NO: 11627 - DNA, 190 bp, Glycine max
  Clone ID: LIB3092-002-Q1-K1-G2
cttcggtttttaattcttaccagaagggccaaatcaaactggcccataaaagtggtttgggaccggttacccaaccaaaggttttacaacaccgtccaaaaacccattgccatcctttactactccaaaagaacttccaacggaggccttttaattactgaagccactggcgtttttgaaacggttaaag

SEQ ID NO: 11628 - DNA, 367 bp, Glycine max
  Clone ID: LIB3092-002-Q1-K1-G3
gccaaattgccgaaactggactacctcctagaataaatttcatttttattttttttgttcaaggccaagaattcaatggcaggtattgcatctggaatcagcacccttgccattggctcaggtgatgctcgacggcgtccagcacaagcccaatccactcccaacactaacactaacacaaacactaacagcaacacttcttcttctacgccatcatctgaagggttcacttatttaaattctgccaagcaagatataaagggtcttaccaaccagactggatacgttaaaggcaacgctaatggggtcatcaactttgggaccctcacagcctctgcttctgtccaaaggcaatgaatcccttaac

SEQ ID NO: 11629 - DNA, 358 bp, Glycine max
  Clone ID: LIB3092-002-Q1-K1-G6
gaaaacacacccggagccaccgtgaatgacgaccgttttgaggccaccgattgggttgcgcttcctccaaccaccacagctttccccttctcccacatcgtgtgtttctttctccctctcactcaagcttcccagaatcaactctaattactcctctttcgaagttagagacgttacctatcaacccccggggactcagcttagacttctgaattcagttagtttttcacttccagagaagagttttggtttaattttcgggcacagtggaagcggaaaaacaactctgttgcagcttcttgcaggaataagcaaaccaacctctggatctatttacattcaagaatatgagagtgat

SEQ ID NO: 11630 - DNA, 380 bp, Glycine max
  Clone ID: LIB3092-002-Q1-K1-G7
gccaaggttgcacacggactcgagcagctcggagcacgtggtttcgcccgatgtgaggtgcgagagggaagtgcagagcgaccccaagtggaataacgatgattatgatctgggcctacagctagaaaacgcgtttgattttcagtttaattacttggacgataataacctttccgtcgacgatgacccctttggcactgttcagtaccaaatgggtcagctctcgcccttgcaggacatgttcatgtacctacagaagatgtgaaaacgatacgttttttttggacaagatgatgggacccccaaatatctttaataattttttggagtaaaagtcaacatttgggggcaattggattggacctaacattttggggact

SEQ ID NO: 11631 - DNA, 369 bp, Glycine max
  Clone ID: LIB3092-002-Q1-K1-E4
gaaaaaagggccctataaaactaaacgctccccttctcgaagaggccgctcgctctctagggtttttctttttctcttctcactgcatcgcttcaggttcttctgaaaagatgtctcgcgtgtatgttggtaacttggattcacgagtcactgagagagatctcgaagacgaattccgcgttttcggagttattcggagtgtttgggttgcacgtagaccacctggttatgcttttattgactttgatgaccgcagagacgcacaggatgctatccgtgaattggatggcaagaatggttggagggttgagctttctcacaactctagaagtggaggtggtggtcgtggtggtcgctctggtggttctg

SEQ ID NO: 11632 - DNA, 448 bp, Glycine max
  Clone ID: LIB3092-002-Q1-K1-C12
cccacgcgtccgcccacgcgtccgcccacgcgtccgtcttctttttactctctgtctggctctctctacgctttctcgttcgagatccctcaagggatccactaactgaaggagaaatggggttgacattcaccaagcttttcagccggcttttcgccaagaaggaaatgcgaattctgatggtgggtctcgatgcagctggtaagaccaccatcctgtacaagctcaaacttggagagatcgttaccacaattcccaccattgggttcaatgtggagactgtggaatacaagaacattagtttcactgtctgggatgttggtggccaggacaagattcgtcccttgtggaagcactacttccaaaacacacagggtctcatttttgtggttgacagcaacgacagggacagagttgttgaggccagagatgaagtgcacaggatgtt

SEQ ID NO: 11633 - DNA, 287 bp, Glycine max
  unsure at all n locations
  Clone ID: LIB3092-002-Q1-K1-C2
cttttgttgctgaggaccgaaagcaaaccgtgaaacaacttgatgagttcttgaacaccaaggttgcccctaaagaacttgttgatgaaataaagatattggaaaggctctttaccatnctctaccaataataaggctctttctgctccagaagagaaaagttcagagcttgctacagctgatagcactgtacagaatgcagtagctactcccgagcccaaagcggatgcagtagctcctgaagtaaactcagtgcccaaaactgaagtgaaggcagaagaatcatt

SEQ ID NO: 11634 - DNA, 404 bp, Glycine max
  Clone ID: LIB3092-002-Q1-K1-C4
ggctgcacaagctcttgtatcatcatcttctcttaccttctcagcggaggctgcaagacggagtcttggaccaagatcactccaatctccatttggcttctccagaaaagcctcctttcttgttaaggcagctgctaccccccctgtcaagcaaggatcagacagacctttgtggtttgcatcaaagcaaagtctttcttacttggatggcagccttccgggtgactatggatttgaccctctgggactttcagaccctgaaggaacaggagggttcattgagccgaaatggctagcatatggtgagataatcaatggtcagtatgcaatgctgggtgcaagtggtgcaatagcacctgaaattctaggccaagatggtctgatcccttaagagaccagcactc

SEQ ID NO: 11635 - DNA, 465 bp, Glycine max
  Clone ID: LIB3092-002-Q1-K1-C5
cccacgcgtccgcccacgcgtccgggaagattttgaacagatagccagtgatctcgacagtgcttcacctcttgaaatcatggatagagccctcgacaaattcggcaacgacatagctattgccttcagtggtgctgaagatgttgctttgattgagtatgcgaaattgacgggtcgaccctttagggttttcagtttggacactgggagactgaacccagaaacttatcaactttttgatgcggttgagaagcattatggaattcgcattgagtacatgttccctgatgctgttgaggttcatgcattggtgaggagtaaggggttattctctttctacgaggatgggcaccaagagtgttgcagggtgagaaaggtgaggcctttaaggagggcccttaagggctcagagcatggataactggtcagaggaaagaccagtcacctggtactaggtctgaaata

SEQ ID NO: 11636 - DNA, 261 bp, Glycine max
  Clone ID: LIB3092-002-Q1-K1-C6
aaaaaaaaaaagagagaaaagaaaaaatttggtttataactttttaacttattggtcacttcttcttcttcttcttcttcaatatcttggttctttgatattattctattgggcaaaaaatgggagttccagagagagaccctcttgcacaattgagtttgcctcctgggtttaagttttaccccacagatgaagagcttttggttcaatacctttgccgcaaggttgctggccatcatttctctctttccaaccttggtt

SEQ ID NO: 11637 - DNA, 431 bp, Glycine max
  Clone ID: LIB3092-002-Q1-K1-C9
cggacgcgtgggcggacgcgtgggcggacgcgtgggcggacgcgtgggtttttctcttggcacaaccaaaagatacccttaactcaagttctatatcattcaagttcttggttaattctcaattccatctacctattgatgtaaattgtcatgagattaatgattcttcgtagttgcaaaattttgaatgatctgaactatggtttagactggttagtgcccattccttcccccaattgtgtatttctttttggaatatcagatgattattggacagagatattaatatttgataattagttggctccaaccctaaagtagttatgaaaatttgttgctcgagttgtagaaatcattgtttgccacgtgcttcttcagcagttttttatggttattcaactggttttgctgactgcatatatcaacttttt

SEQ ID NO: 11638 - DNA, 333 bp, Glycine max
  unsure at all n locations
  Clone ID: LIB3092-002-Q1-K1-D10
tcggaaggcgaaagagtagcagcagcaggcggcgccgagtagcggctccccacctcgagctggccaccatggctagaggattgaagaagcatttgaagaggctcaatgcgcccaagcattggatgctggacaagcttggcggagcttttgctcccaagccatcttctggacctcacaagtctaaggagtgcctgccactgatcctcatcatcaggaacaggctcangtatgctcttacataccgtgaggtcatttccatcctgatgcaacgccatgtacttgttgatggcaagggtcgggacagacaagacctaccctgctgggttcatggat

SEQ ID NO: 11639 - DNA, 429 bp, Glycine max
  Clone ID: LIB3092-002-Q1-K1-D12
tcgtaccgcctcacgtcgtcgcggttatttggttctccttcctttggacgaatcgatcactgatgttcgatggagcaaggcgagaagtaagaatgccagactccagtaactgcgaagtagggttgttcgatataggcatcacatggtgctcgggagacgaggcggggtcccaattagcaatttgtgcggtaaaacgacgcgagggagcttttgtgtgtcggcttgttgatatgacactcgctctctcaaaagtcctttacgcccgtagagggggaagggctttcccgtccctggtgataacaaacatccactcggtttttcgcgcttttacttgcctcccatctttggatctcgatgcttctaagttccttagggataagaaattgcgatcgcatgtgtgtaacgaaaatttcaatggcttgttgcaag

SEQ ID NO: 11640 - DNA, 309 bp, Glycine max
  Clone ID: LIB3092-002-Q1-K1-D2
cccacgcgtccgggtacttgctcacagatatatttttttttttgtctccatcattttctcgagagctttcagtttctgtggttcatctttcttcttcttaatctttccccccctctctgtaacatcccgcttctctgaatccctttctgctaatcatctgtctttcaagctaagattttctggtttgtcttttaattcacccaaaagcaaacttagaaagatttttcgaaagccaggtgttttcagaaacgagatccaggctttattgtcggatttcgctagtcatattaatatttcatcaattttttt

SEQ ID NO: 11641 - DNA, 303 bp, Glycine max
  Clone ID: LIB3092-002-Q1-K1-D3
gttctgtttaacacagacgagctgtggtagcagctagcgggtgaaggtttttgcgccgcgccttatatcacaccgtcgtccgaaagcgtcgttgccgtgaaaccctagaaagaaacgacgacgtaaatggaggtggagcccgtggagccgcagtcgctgaagaagctaagcttcaagtctctgaagcgcgctctcgatctcttctctcccatccacggacacctcgctactcccgatgccgaaagcaagaaaatacgcactagccacaaggtgagcgtggagtatggtggaatcaaaagcact

SEQ ID NO: 11642 - DNA, 379 bp, Glycine max
  Clone ID: LIB3092-002-Q1-K1-D6
ctccaattaacctcctctctcactattccatcttcttaattactcatcactcttcttagaaactagtctaacaattaggttttgaagggcacacaaatatattccaaggttgtgtgaaaatgcgaatgagttgtaacggatgtcgtgttttgcgcaaagggtgtagcgaagattgtagcataagaccgtgtttgcaatggatcaagaacccggagtcgcaagctaatgccactgggtttcttgctaagttctatggccgtgctggcctcatgaacctcatcaacgctggtcctgaaaaccttcgtcctgctatttttcgatccttgttatacgaagcatgcggtcgaattgttaacccaatttacgggtcagtgggttt

SEQ ID NO: 11643 - DNA, 200 bp, Glycine max
  Clone ID: LIB3092-002-Q1-K1-D7
ggatctgtttaacacagactagctgtggtagtagctatcgggtgaaggtttttgcgccgcgggtaggtcacaccgacgggcggaagcgtcgatgccgttaaaccctataaagaaacgacgtctgaaatggaggtggtacccttggagccgcagtcgctgaagaagctaatcttcaagtctgtgaagcgcgctctcgatct

SEQ ID NO: 11644 - DNA, 385 bp, Glycine max
  Clone ID: LIB3092-002-Q1-K1-D9
cccacgcgtccgatttgatcctgatacatgtgaatcacaagctaagtttggtcgttctggtatccctagttcatcctctatcctgaatttgacgtgcaactcatgcaatgtgggaacttctgaatgtctggagcaatcagggtcaactgccaatgaaggagatgaaggcaccatcttttcgaaccgagagcctgatattattggaactcctgctaaaggaaaaaaatcgcctcaagaagagctttctctacaacagaaattatcagttgcagatgtgacatgtacaatgtgcaagcaactgctctttcatcctgtagttcttaattgtggtcatgtgtactgtcaaatttgtgtcatcaacatacatgacgagatgctcagatgt

SEQ ID NO: 11645 - DNA, 444 bp, Glycine max
  Clone ID: LIB3092-002-Q1-K1-E11
cccacgcgtccgctgattgggaagcttttatttggcattgaaaagggtccagaagtactgaacgctgttagaccggctggatcggcacttgttgatgactggcactgcctgaaaaccatggtatcatttttgttctgaagccaatatgatagatagacttttggcataaaaatgagtttaaaatctatgctcagataggtgaggacttttgagacacattgtggatccttgtctcaatacgggatgaaacacatgaggtcctttgcaaacatctgcaatgtagggataaagaatgaacaaatggctgaggcttcagcacaagcttgtgtcagtattccttccaatccctggagttctctgcaaaggggtttcagtgcataataactccctgtaatgtgcactagtaaagaccaaagtatgattattgttacattatgttacatg

SEQ ID NO: 11646 - DNA, 445 bp, Glycine max
  unsure at all n locations
  Clone ID: LIB3092-002-Q1-K1-E12
cctcgctctgtttctgtctctgtgtttgcggctgaggattccgaacgagcgaccttctgcgtttctcgcaaagtttaagtcatcatgggtaaggaaaagactcacatcaacattgtcgtcattggacatgtcgactctgggaagtcaactaccactggtcatttgatctacaagcttggaggtattgacaagcgtgtgattgagaggttcgagaaggaggctgctgagatgaacaagaggtcattcaagtatgcctgggtgcttgacaagctcaaggctgagcgcgaaagaggaattaccattgatattgctttgtggaagtttgaaaccaccaagtactactgcacagtcatcgatgcccccggacatcgtgactttatcaagaacatgattactggtacctnccaggctgattgtgctgtccttatcattgactccaccactg

SEQ ID NO: 11647 - DNA, 227 bp, Glycine max
  Clone ID: LIB3092-002-Q1-K1-E2
gcaatattgattgatgtaagtacatgatagataggctaacttgtacattaaataggaagaaaaaaaatacagagtaggatgagagccaacagaataggggtaaaggaaacagaatgcagggaagcacgggcctggaatactccttgcctttttagattacaatattttttttctggttccttttgtaatttgcattataatatagtggcttcattcttttgttggtg

SEQ ID NO: 11648 - DNA, 209 bp, Glycine max
  Clone ID: LIB3092-002-Q1-K1-E3
ctatatctctagcgcccgtcgactatctttatataatcatatatataacagggaaaggatacaaaataaggaagaatctctatatatataaaaataatatatctaaggtacacatagtaaatctaggtacccatcttatgataaactttccttccatatttgatcctctaataagcctataatttcctgcaattgcaataacttcttta

SEQ ID NO: 11649 - DNA, 366 bp, Glycine max
  Clone ID: LIB3092-002-Q1-K1-C11
gaacatagaagacgcacccttcccagatgcctctcttctccagagagtcctgagagtgatggtgcgcagaaagatcttcagtgcacaagaatcagagacaggagaaaccctcttcggcttgacacgagcctcgaagtggatccttcgcgacacgaaaatgaccctagcacccatgttgctgctggagaaccacccaattcacctgaaccctgcgcactacatcagtgagattattagagaaggcacataaaatggcactgctttctttaagtgccatggacatgagcaatttgagatgacgggtttggatcctgagtataataggttgttcaatgagggcatggtgtgcactgctagggttgtgtc

SEQ ID NO: 11650 - DNA, 340 bp, Glycine max
  Clone ID: LIB3092-001-Q1-K1-H8
gtcatcgactctatctcggtatctctctcattgtctctatgttgcattgcattgtcatcaggaggataaacccacggctgctatcacttatctctctttgtcagaaactacccattgctgagaaagacaaacgtaccatctccttcactcgtattctcgctctctcttcagaactctctgagtcacgaaccgataccacgacccactacgtggctctccgagcattcaattctgcgaataaaatggttgttcactgcatgtgtattgtcacatatatacctcccactgaacctgagacaaacttgaaattcctcaatgcttataatcgaccaatccctac

SEQ ID NO: 11651 - DNA, 336 bp, Glycine max
  unsure at all n locations
  Clone ID: LIB3092-002-Q1-K1-A2
cccacgccgtaccgcccacgtccgtccgcgcccggcgtacctctaacctcgtgtttccgtccccgagggagccgagaggtactccatctgaaaaccatcgcgcgtcaggaggagattatacctcatcctcgctcgtcatgccacaggcggtcgatgatcgcccggtgtatcatacgtcactcgtcaagggccgatanatcctaactgatatagatccggaatgccgttaccttgaatggatatgcgtccgcccgaacgtgttcttatgaaggacagcgacggctgtgtatacggcgcctctgccaggcgtctttacccagcccgtgcaaactaacg

SEQ ID NO: 11652 - DNA, 355 bp, Glycine max
  Clone ID: LIB3092-002-Q1-K1-A4
acgcacttactcttcttcttcttcgtacatgtctatcacttcttccacttccttcaagtccctgactatggccgagtcctgccttctctcttcttcctcctcactcttcaacaacaaaaccaaaccctctctattctcacccccctccaaacacctcacactccaattctcatgcatcaactcctcaatctctctctgcctcgccgcgcgagctcaccgctcttccctcgtcacgcgcgtggcccaaactttcgattgggcccaaacagaagaagacgacaccggcacctttcatgacgaaaaacagggccttattgaaacccatccgggcctttcagttggaagcccaacggcg

SEQ ID NO: 11653 - DNA, 359 bp, Glycine max
  Clone ID: LIB3092-002-Q1-K1-A5
aggagatagaccccagaagtggtttctgcagctccaattcaatcttctacagcaagcgggggcccctcccactccctgccaacaacgccttagacgtcaccaccttcatctcctcccgcgcccaccgcgccaccacagccttcgtcgacgccgccaccgcccgacgcctcacctacacccagctatggcgttccgtggagggcgtggcagcctctctctccgtggacatggggatccgaaagggcaacgtggtcctcatcctctcccccaactccatccacttccccgttgtgtgcctggccgtcatgtccctcggcgccatcatgaccaccagcaaccccctcaacaccacccgcgaa

SEQ ID NO: 11654 - DNA, 264 bp, Glycine max
  unsure at all n locations
  Clone ID: LIB3092-002-Q1-K1-A6
ctcattatgatgcgttcaatcctgctgaatatggtccacaaaaagagccaaaggatggcgtcatttttgctatatttaactgatgttgangaaggtggggaaactatgtttccatttgagaatggcttgaacatggatggtaactatgggtatgaagactgcattggtttaaaaggtaaagcacccccaaggggatggcctctaatttaatcaatggttacttaagggtccaattgttccaccttaattccttggaacctgccc

SEQ ID NO: 11655 - DNA, 189 bp, Glycine max
  Clone ID: LIB3092-002-Q1-K1-A7
cccacgcgtccggtagaaaattgctagagcaacaatgattcccagaagtcatggagaggggtttaatatcctacgctatgaggttgatcaaagatatgattctcattattatgctttcaatcctgctgaatatggtccacataatagccaaaggatggcgatatgtttgctgtatttaactgatgttga

SEQ ID NO: 11656 - DNA, 474 bp, Glycine max
  Clone ID: LIB3092-002-Q1-K1-B1
cagtttcaccgcacgaatatcttgttgtttggagcgatccgagaaaaactctgtaaacatgttggtttaccaggacctccttacaggtgatgagcttctctctgactccttccgttacaaggaaattgagaatggaatgctgtgggaagttgaggggaagtgggttgttaaaggagcagttgatgtagacattggtgcaaacccttctgctgagggtggaggagaagatgagggatgtgatgatgcatctgttaaggttgtagacattgttgacacattcagacttcaggagcaacccgcattcgataagaagcagtttgttaccttcatgaagaggtttatcaagaatttgactcccaagctcgatgctaagcaacagagagtgtttaagaagcacatcgtgggagcaactaaatacctgctctctaagataaaagatttcaattttttgattgtgagagcatgggtgatgat

SEQ ID NO: 11657 - DNA, 436 bp, Glycine max
  Clone ID: LIB3092-002-Q1-K1-B10
cttcaaaggagcatggaatgaaaagtttgattcttcgataacaaaagactatgattttgagcttcttgatggccgttcaatcagggttcccttcatgacgagcaggaagaatcagtttattagggcttttgatggtttcaaagtccttggtcttccctacaagcaaggtgaagataagcgccaattcaccatgtactttttccttccagaaacaaaagatgggctgttagctttggctgagaagttggcttctgaatctgggttcttggaacgcaagcttcctaataacaaattggaagtaggagacttcaggatcccaagattcaaaatttcttttgggtttgaagcctctaatgtgctgaaggagctgggagtggttttgcctttctccgttggaggtttgacagaaatggtggactctgctgtgggtcaaaac

SEQ ID NO: 11658 - DNA, 440 bp, Glycine max
  Clone ID: LIB3092-002-Q1-K1-B11
gccatctcttgagctcagtttaaagaggcttagaggagttgaagatgctggtgttgcaggtcaggatgacaggaatgttttaagacgttctgatcagtctgctttctcaaggtacaatgcagccttaaaccctaagaaatctcccactggatgtgttggaagcaattctcctcataataatagcttagaagttacaaagaaagattcatctcacgatattcaatctcattctagcggcaatcctcctaaccaaaactcaaatggtgctagcaataacattgatatgggttccactactaataatgcttacgctaaatctgcagttataagtgagccagcagtagcatcgacaaccaaatgtttgtaccaaacatctgcttaccagcctgaaaaaaacaaccttgtttgtacctctcaacaagttgtcttacataatactg

SEQ ID NO: 11659 - DNA, 446 bp, Glycine max
  Clone ID: LIB3092-002-Q1-K1-B12
cttatttgtatttatcccttttacctttatttgggaataaggataatctttacgaatataggagaaatcattatcaaaatctttatcaagataagggaaatacttattaagttataaaatcagggtaatgatccaccaacccgctagttctttttatgaggcacaaacgggagaatttatcctggaagcggaagagctactgaaaatgcgtgaaactatcacaagggtttatgtacaaagaacgggcaaacctttatgggttatatccgaagacatggaaagggatgtttttatgtcagcagcagaagcccaagctcacggaattgtagatcttgtagccgttgaataaaaaataagtggcaaggattattctaaaaaaatacatgatttgaaatttcatttttgaatcttcttactttcattttaatataatatctctattagtt

SEQ ID NO: 11660 - DNA, 270 bp, Glycine max
  Clone ID: LIB3092-002-Q1-K1-B2
ctccaatatccaccaggagttggatactggtcgtgctagctagcgggccaaagtagtgcggaagggttcctcatatcttccaccctttggcttattagtgggagcaatacatatcatccattcataggcatcaaaggagttgtaaattaagagcatggttgaacaagctcttgtatcatcatcatgtcttaccttcttagccgagggtgctagacaaactcttggaccaagatgactcgaatatagatttggcttctcacgacaagccta

SEQ ID NO: 11661 - DNA, 451 bp, Glycine max
  Clone ID: LIB3092-002-Q1-K1-B7
aagagaggagagggggggagaaggggttgcagagagagagagagagagatgtcatcatcttcagacctggacaggcaaatagagcagttgaagaggtgtgagcctcttaaggagtctgaagtgaaggcgctttgcctcaaagccatggaaatccttgtcgaagagagcaacgttcaaagggtcgacgcccctgtcaccatatgtggtgatattcacggtcagttttatgacatgaaggagcttttcaaagtaggaggggattgccccaaaactaactatttgtttctggaggattttgttgatagagggttttactcggttgaaacgtttctgcttctgctcgctcttaaggtgaggtatccggatcggataacactcattaggggaaaccatgaaagccgtcagatcacccaggtgtatggattctatgatgagtgccttcgaagatatg

SEQ ID NO: 11662 - DNA, 435 bp, Glycine max
  Clone ID: LIB3092-002-Q1-K1-C1
cccacgcgtccggaaaagaaggttcacataatagactttgacatcagccaaggaactcaatacataactctaatacaaacacttgcttcaatgccaggtaggccacctcgtgtgagattaactgtggtggacgatcctgagtctgtgcagcgttccatcggtggcataaacatcataggacaaagacttgaaaagctggcagaggaactcagattgccatttgagtttcgagctgtggcgtcaaggacgtcaattgtctcaccatcaatgctcaactgtcgtccaggggaagcacttgtggtgaactttgcattccagcttcaccacatgcgcgatgaaactgtatcgaccgtgaacgagagagaccaacttcttcgcaatgttaagagcttgaatcaaaattgggacagttgtggagcaggacatgaacacaac

SEQ ID NO: 11663 - DNA, 296 bp, Glycine max
  Clone ID: LIB3092-002-Q1-K1-C10
aagatacccttaactcaatttctatatcattcaaccttcttatttaattctcaattccatctacctatttatgtaaattgtcatgatattaatgattcttcgtaatttcaaaattttgaatcatctgaactattgtttatactgtttactgcccattccttccatcaattatgtatttctttttttaatatcatatgattattgcacatatatattaatatttaattattatatgtctacaaccctaatatacttattaaaatctcttgctctagttatataaattattttttatc

SEQ ID NO: 11664 - DNA, 277 bp, Glycine max
  unsure at all n locations
  Clone ID: LIB3092-001-Q1-K1-H7
gcatgccactgtatcagggaaccttaaggatggccaaggggttcaagtaaatgggggcatggagaagaccagacagaagagaccattaagcaattcatgaaagaaactgacatcttaggtctcttgcaccatcaaaatctggtttcactttatggccgcacttctcgcaattgcgacaaacccatgctagtttacgagtacatctncaatggcactcttactaaacatcttcatgaatcttcccatggtaaactacccatgcatactagatggaata

SEQ ID NO: 11665 - DNA, 397 bp, Glycine max
  Clone ID: LIB3092-001-Q1-K1-G12
cccacgcgtccgcccacgcgtccgctttttcccagtccaagcagcctccaattcgtgccactgtcttcaaaatggccgttaccttctcaaatctccacacagaatcaggtctcaagtccctcgacgacttcctctctgggaaggtctacgtttctggggatcagttcacaaaggacgacatcaaagtgtatggtgctgttttggagaagccaggtgactcttttcccaatgctgccaagtggtacgaggttgtctcatctcagcttgctgcaagcttccccggcaatgctcaaggggtgagattcagtggcaaagcttctgctccagcggaagctgctcctgcgaaaccggatgcttctgctgctgaagatgatgatgaccttgatctctttggcga

SEQ ID NO: 11666 - DNA, 227 bp, Glycine max
  Clone ID: LIB3092-001-Q1-K1-G2
cgaccgacacgtgcagaattaggcacaggccagcgttctaaccgattttccttatgctccatacggtgtctgctgcgattagggggccttcatctcaacgagtgccatgctatatgatataaccagactcatgctcctattacgagatcaatcctcaccttgagtctttaacaacagctcattatttgcattacgcgcttgatttttctggaactactgcaatattc

SEQ ID NO: 11667 - DNA, 460 bp, Glycine max
  Clone ID: LIB3092-001-Q1-K1-G4
gcgagaataccctctctcttgctgcatcagaggagttgctaattaagagcatggctgcacaagctcttgtgtcatcatcttctcttaccttctcagcggaggctgcaagacaaagtcttggaccaagatcactccaatctccatttggcttctccagaaaagcctcctttcttgttaaggcagctgctaccccccctgtcaagcaaggatcagacagacctttgtggtttgcatcaaagcaaagtctttcttacttggatggcagccttccgggtgactatggatttgaccctctgggactttcagaccctgaaggaacaagagggttcattgagccgaaatggctagcatatggtgagataatcaatggtcgttatgcaatgttgggtgcagttggtgcaatagcacctgaaattctatgcaaggctggtctgatccctcaagagacagcactcccatg

SEQ ID NO: 11668 - DNA, 321 bp, Glycine max
  Clone ID: LIB3092-001-Q1-K1-G5
cccacgcgtccgggaggacaacacatgaatggtatgagactcgtgagctgatgtaaaaggcagctgcctaattctgtctgtgcatctgaaccttcctactctaaataagtgctccatatgaagacatggcaaattaatgttttagttttacaagttgagaagtgacaatctttgcaccggttcccattgcatctcttcacacacaagtaagaatctgatgcaagttgatcgcccaaccgatagagactggccattgccatcatgcactgtgtattaattaatagaaagtcatagcccagccattttaatgcaactttggca

SEQ ID NO: 11669 - DNA, 460 bp, Glycine max
  Clone ID: LIB3092-001-Q1-K1-G6
cccacgcgtccgggaggacaacacatgaatggtatgagactcgtgagctgatgtaaaagggggctgcctaattctgtctgtgcatctgaaccttcctactctaaataagtgctccatatgaagacatggcacattaatgttttagttttacaagttgagaagtgacaatctttgcaccggttcccattgcatctcttcacacacaagtaagaatctgatgcaagttgatcgcccaaccgatagagactggccattgccatcatgcactgtgtattaattaatagaaagtcatagcccagccattttaatgcaactttggcagtgaaaggccacctaattgagttgcctcaaatgccaccaaaacataagcaatcaccgccataacattgtgttgtcttacgtccacattaccacccgaagtgttcaccggcattgggtatttaccgttccccgatttaat

SEQ ID NO: 11670 - DNA, 325 bp, Glycine max
  Clone ID: LIB3092-001-Q1-K1-G7
ggaaacaaccttttattaattcatcaactacattcaaaaaaatttaattgcacctctctctcaccaaagccttcctagaacgaataaaaaaagaagagcaattttccctcaccaaagaagaagaagcaaacaatggccgatcaacttaccgatgaacagatctccgagttcaaggaagccttcagcttgttcgacaaggacggcgatggttgcatcacaaccaaggagcttggaactgttatgcgttcattggggcaaaacccaactgaggcagagctccaggacatgatcaatgaagtggatgctgatgggaaatggtccattg

SEQ ID NO: 11671 - DNA, 444 bp, Glycine max
  Clone ID: LIB3092-001-Q1-K1-G8
gtgaaatggaggctggaggagatgccaacgaataacccagactagtaaggcccccatccaacagagaatcaatgcttcgatcattatctactgctgatggaaataattcaagagaagtagcaatgcagcgaatgggtagccaagctaccagtggattaagaaaagttgactcggcaaatgattcagctactggagttacccccaaaaaaggaatgattctacctttccaaccacttgcaatgtcttttgacactgttaattactacgtcgacatgcctgcagaaatgagagatcaaggagtgacagaagataggctacaactgcttaggggagtaactagttcctttaggcctggagtcctaactgcactaatgggagttagtggagctgggaagacaactttaatggatgttttagcaggaagaaagactggtggctacattg

SEQ ID NO: 11672 - DNA, 465 bp, Glycine max
  Clone ID: LIB3092-001-Q1-K1-G9
cgaagaaggcgggccatggtttccccggaaaacagcaattggctgttcgattacccgctgatcgacgacgttattcccgtcggcgacgcctccttttccgtctccgcctacgacttctcctggcccccacctcccgccaatgtcagtgttgaaattgatgcttcgcttggggattctgatggccccaaagatactgctttgaagaaaagggctagatgtgattcaagtactgcttgtagctctaaagcgcgtcgggagaagctgcggagggataggcttaatgacgaatttgctgaattgggcttcaatctgggagcctggtaggcctgccaaaacagacaaggctgacattctgattgatgctgcccgtatggtgacacagctgcgggatgaagccctgaagttggaagactcaaatacgagtcttgacgagaagatacaagagttgaaggctgagaagaatga

SEQ ID NO: 11673 - DNA, 339 bp, Glycine max
  Clone ID: LIB3092-001-Q1-K1-H1
gatattcaccattcaaaagagatcattagttttcgtaactatgagactcatgggcatatgctgattcaggactaggcgcatattcagtttctaaatgcatcatgttcccagtcaaatggtggaacaaagccaccctgatccttttgaaggacggttggaagcattcactcccgagagagagcattcgtatgtagcttcaaaaaatgaggatcaatggagatgggaaagagatgagtctaagatgccaaattctatgacctctcacatgttcaatgaaggtcaaagtcaagggggtgatgccacaagatcatactttcaaggtcagagacctaacccaaa

SEQ ID NO: 11674 - DNA, 347 bp, Glycine max
  Clone ID: LIB3092-001-Q1-K1-H10
cacgctttctgtatggcacgttcttactcttagtcctccaataaggaaaaccaacgaagatggaggcgcctactcatgccacgatgcaaattgtggctacactctcttgatctctcttgatgagcttgtcaaagatggtgtgctcacaaaagatgagtttgccagaaccagtcgaccatgaccatgtagtcttctccactgttgctgatataaaagatcccttgatagcaaaagctgccgaaaggttaattcaaagtgatggtgatcttaaaagacagcttggagaattttgttaagaccctgaaatatcaaactggcttgaaaaaacaacttattttgctgctatt

SEQ ID NO: 11675 - DNA, 173 bp, Glycine max
  Clone ID: LIB3092-001-Q1-K1-H11
cccacgcgtccggtttttatgtatgatgacattgcattcaatggggaaaacccaaggcctggagtcatcattaacaaaccagatggaggtgatgtttataaaggagttccaaagggattacaccggcgaaaatgttactggtgataacttttttggtggtttacttgggaata

SEQ ID NO: 11676 - DNA, 307 bp, Glycine max
  Clone ID: LIB3092-001-Q1-K1-H12
tcgacaaataataaaattaaaaaaaatccgcgattcgctcttctcttggaaaagtgaaaaccagaagttcgaacgaaagagaagagcgatttataagtgagagaagatggggttgtcgttcacgaagctgttcaacaggttgtttgcgaagaaggaaatgaggattctgatggttggtctcgatgctgctggtaagacaaccattttgtacaagctcaagcttggagaaatcgtgaccacttttcccaccatcggatttaatgttgagactgttgagttcaagaacattagcttcactgtgtgggat

SEQ ID NO: 11677 - DNA, 290 bp, Glycine max
  Clone ID: LIB3092-001-Q1-K1-H2
gataattgtaccattactaatgatgcatcatttatgttttcgaaactatgatacaacatgggcaatgggcttattcatgactaggcacagattcagtgtctcagatgcatcatgttaccagtcaaatggtggaacagagccaccctgatcctttcgaaggacggctgtaagcattcactaccgagagagagcgttcgtatgtaactttaaaaaatgacgatcaatggagatagtaaataaatgactctaagattccacattctatgacctatcacatgttcaatgaaggt

SEQ ID NO: 11678 - DNA, 362 bp, Glycine max
  Clone ID: LIB3092-001-Q1-K1-H4
gtcgaccacgcgtccgattaatcttcatatctgtctccgggagagtttctgtgttccggaaacaagggtacatcgtgcgctcatgctccatcaaattgaaatcccaatgcaaatttgtaattacattcctggagtgttctgctttagatcgccttaatgattgcttctgtaatttgaatctgggataacttcctatcaaaggatgcctctaagcttatagctgcaaacatgtctgatcggataaaaaactctccatcagtttcgagactgacatactcgattatcttgtaaaatcattcgacactgattgctcctcaccagatcaaaccttattaaccagaaccagtcggactctactatct

SEQ ID NO: 11679 - DNA, 322 bp, Glycine max
  Clone ID: LIB3092-001-Q1-K1-H5
cggacgcgtggtcttgtaagttaaatactaatgcattgtatcatttaatctaccatggctgcgtcaacaatggatgcctatggatcatcagcggctgtccaatctatcaatcttgcacgctccagccctcagcttgatgttggaagggttagcatgaggacaacagcctgcaagactgtttcttctggaagcccatggtaccgaccagaccgcgtcaagtacttggacccattctctgctgagcccccatcctacctaactggtgaattcccaaatgactatggatggcacactgctggactgtctgctgacccatagacct

SEQ ID NO: 11680 - DNA, 447 bp, Glycine max
  Clone ID: LIB3092-001-Q1-K1-H6
gcggaattgcgtccgctacactggcatcacacatggctacaatcaccatcactttcatgttcaggccccccatctctcatcacccaaagcagctcctatattcccaccgctcttctctacgctttctcaccaaatttaaaaccccctccggagcgaattctcggcggctggttccgaaagccacggcggctcccggagccaagaagacagaaaagccgcacgagagagtccagcgagtccacagcgtggaggagttcgagtcggcgctcgaatccgccaaagacatgcttgtggtggtggaatacgctgacagcgacagcgaggagagcagccagatataccctttcatggtggagctgatccgcatctgcaacgacgtggagttcatcctgatgatgggcgactagtcggagaagacgaatgagctcctgaagcggcagaaggtgg

SEQ ID NO: 11681 - DNA, 466 bp, Glycine max
  Clone ID: LIB3092-001-Q1-K1-G10
ctaagaaggcggcccatggtttccccggaatttagcacttggctgttcgattaccggctgagggacgacgttatccccgtccgcgacgcctccttttccgtcttcgtctacgacttctcctggcccacaccttccgccaatgtcagtgctgaaattgatgcttcgcttgctgattctgatggccccaaagatactgctctgaagaaaagggctagatgtgattcaagtactgcttgtagctctaaagcgcgtcgggagaagctgcggagggatacgctcaatgacaaatttgctgaattgggctccatattggagcctgctaggcactccaaaacagactaggctgacattctgattgatgctgtccctatggtgacacagctgagggatgaaaccctgaaagtgaaagactcaaatacgagtcttcacgagaagattcaagagttaaaggctgaaaagaatgaac

SEQ ID NO: 11682 - DNA, 302 bp, Glycine max
  Clone ID: LIB3092-001-Q1-K1-E11
cttgttcctacgctcaacaactataataacatctttctctctccgaacagatcacgcgttggcgcactaaagcgccaaatcagtccatgatttcaccgttaaagatgccaagggaaatgatattaaatctggtgactacaaaggaaaggtccctatcattggcaatggtgcctcacaatggtacctccccgattcttttttttcttaatccctattttaattctataattaagtaccttggaaggaggatcataagttttttttttaacctaaggtccctaattgaaattttacccttaaat

SEQ ID NO: 11683 - DNA, 203 bp, Glycine max
  Clone ID: LIB3092-001-Q1-K1-E12
cccactcgtccggcttaaacttactttaaaattagctagatatatagcttatctgggcttgggttcctgattggtccctacttaattatgattttaattttggaataaatgaacaacatgtgaattatgaaggacacaatacttgttgttacattgaatttggacagcacgtgccacgtatagcggaggaaaccatatattat

SEQ ID NO: 11684 - DNA, 373 bp, Glycine max
  unsure at all n locations
  Clone ID: LIB3092-001-Q1-K1-E2
gagaaaataaacgtttttaaaggcatattgcataactatgtttccgtgggtgtcatcagtgctactggtgtcttccaaatcatactacttgagtacctgggaaccttcgcaaacacaacacctgtcacgctgtcacagcggttcttgtgctcgtaggttggatctttgggcatgccaaatgctgctcgcttaaagaagatccctgtttgaagcacctgaatggataagaagcaatacttggttaccgtcagctgtcgcattgcttcaaggtccatgatgcctttacattcactaactcccctggtaatgctngaggctctcttgggctggaatcagaaatcgagcactgtaacagatcactggattgatgtct

SEQ ID NO: 11685 - DNA, 285 bp, Glycine max
  Clone ID: LIB3092-001-Q1-K1-E3
gaccaataaaatgtgcttaaatctttcagactcacacctggatcatgacccttcctcaatcatatgtgtgtcgacttgcgcaagcacccttggtgacaagctctggtcttcttactaacgcttggagtgatatctcttctcgtgatgaagacatagcttcgtactcaggacataatgtactgtccttggaagattgcgatgattccggtttgaccgatgttgcggtatgaagtcaacccggattttgatctacaatctacagctgtctgattctctgatgccaag

SEQ ID NO: 11686 - DNA, 283 bp, Glycine max
  Clone ID: LIB3092-001-Q1-K1-E4
caaaagtgtggtgattggggagagttcttcagctgcagaggctcattcagcgtgactaaaaccattgcagatgggagcatgctgattacttttcttggggatactataaatagaagtcaaatttcctgatgattaattattgtagaaaaacaattataacgtttcagctgcatgaacctgtgttttatgctcttctttttgtatttttatgtaatatgattcattattcatcaatagttgtatgttcatgtcttcttaaacgctatttttttgaaaataacaa

SEQ ID NO: 11687 - DNA, 417 bp, Glycine max
  Clone ID: LIB3092-001-Q1-K1-E5
attcaactcacttaagcctgcacaaaaacaacttaatagaagatgccttccaagaggcttcaatggagatccttagtacttggttgtttcaaggccaccaagaaccaatccttggaatctccaaacatagtttccaagaaatcatcttcaagtagaatcttcctttctgatttaagcctaagcgattattcatcagtttctatcatgagtgatttgtccaattctctcgtgggatcaaatcttcgtattttcacctaccaagagctctctgaggttacacacaacttcagcaaatccaactatcttagggaaggtgggtttgggaaagtgtataaaggatttattgatgacaatcttaaacgtggattgaaagctcaaactgtggcagttaaagccttaaacttgaatggaaaacaa

SEQ ID NO: 11688 - DNA, 438 bp, Glycine max
  Clone ID: LIB3092-001-Q1-K1-E7
cccacgcgtccgcccacgcgtccgcatagaaacccatcaacaagaatgaagaagatgattctaaccctcttcttcaatatcattttatctctcctctccctctcccacgcctccgtggtggatttctgcgtagcagactacacaggccccaatggccccgcagggtactcatgcaagagcccagcaaaggtcacggtggacgacttcgtctactccggccttggcaccgtcggcaacacctcaaacatcatcaaagccgctgtgacgccggcgttcgacgcgcaattccccggcgtcaacgggcttggaatctccattgcacgcctagacctagcagccggtggaggcatccctcttcacacgcaccctggtgcctcagagctgctggtggttgtgcatggaacaatctgcaccggcttcgttgcttcagacaacact

SEQ ID NO: 11689 - DNA, 420 bp, Glycine max
  unsure at all n locations
  Clone ID: LIB3092-001-Q1-K1-F1
atctttttctctctcttccctcttcaatcttcacattttctctatggagaatcatggcaacaagcgagtctgggaccagtcctctgactccaacactcagcgggtcgactcgcccgagtctaagattcgtcgagttgactcgtccgattcgggtattaactcgtccgagtctcaactcgaatcggtcctcgactcgtcggaggtgcagctacaagacgacatttttaacatgcttgacgacacggacaatgtgcccgagcgtgactcggtgcaaggtcttgactcagtgatcaaaagcttcgaggatgagataaatgctccaggttcggattctggttccggtgacccggcccaggaacccgactacggggagctacaatctaactngggctatcttctaggagccctccgacgacgagc

SEQ ID NO: 11690 - DNA, 362 bp, Glycine max
  Clone ID: LIB3092-001-Q1-K1-F10
gaacatagcaccaatatgaataatatcttcatttgcattgctaactgattcttgtgtgaaaagaggctgttctaaatggatttgaagtgtggtcgaattttgcccactgaaaaatgtagttccacagagagaatgccaaatgccaaaggtcttaattgacctgtattgaactatgtatattagatagtgcttgtgcaacctcaatacttatattttcaaggacatcgtgatatctacaatcgaatttgtacttgtgacggaaattaaccccggagaaagtgagctgcaataatggttttgaaacccgactgctgagttttcgattgttcttttttcagtgcttcgcaacagtttattaaaca

SEQ ID NO: 11691 - DNA, 254 bp, Glycine max
  Clone ID: LIB3092-001-Q1-K1-F12
cccgtccacacatacggacactactaactctatgttagattaccattttaaagaaagagatgaggcgttaggagccgagacgctaacacttgagaatatcacaagacaacatgaagaaatatgtcgataccaatataacgcagattcattaccatattcgaaattttgtattattcaaaaatataccatacctacaagtgactatcaaaagaaaaataaatgaaaaactttcttctaaattctttgtaccctac

SEQ ID NO: 11692 - DNA, 412 bp, Glycine max
  Clone ID: LIB3092-001-Q1-K1-F4
agaatacccactgtttggctgcagcagaggagttgtaaatgctcagcatggctgcacaagcgcttgtgtgatgatattctgttaccttctcatcggaggctgtctgacaaagtcttggaccaagatcactgcaatatccatgtggcttctccagaatagcctcctttcttgttaaagcagctgctaacgcccctgtcaagcgtaggatcatacagacctttgtggtttgcatcaaagcaaagactgtcatactcggatggcacgcttccgggtgactatggatttgaccctctgggactttcagaccctgaaggaacatgagggttcattgagccgaaatggctagcatatggggagatcatcaatgggcgctatgcaatgttgggtgcaaatggtgcaatagcacctgaaa

SEQ ID NO: 11693 - DNA, 303 bp, Glycine max
  Clone ID: LIB3092-001-Q1-K1-F6
tcgcaaatcgttagaacttgaaaattctgaacactctcactcagacagctattaatagggtatcgatcatcacgtacgaatagtgtacatcttacgcaccaaatatacgacagtacaccaaaagcacattattgcccgatcgacgtgcatccgccatagatgctcctatcttacatacgcctgcatgctaccacacagcgcttacatgccctaccataatatcaattcattagccatcacttctcaacgttcacactttgcaaacccttacattacccaaacaaatcgtcttgcagcacaaaa

SEQ ID NO: 11694 - DNA, 451 bp, Glycine max
  Clone ID: LIB3092-001-Q1-K1-F7
gttttctcagttcctcacatcatgtaccgctttgcaacctccctcgcctccaaagctagaattgccaggagcagcactcaacagattggaagtagggtcacttggaacaggaattatgcggccaaagacattaagtttggtgtggaggctcgggctctgatgcttaagggtgtcgaagagctcgctgatgccgttaaagtaacaatgggccctaaggggcgtaatgtggttattgagcaaagttttggagcacctaaagtgacgaaagatggagtaaccgttgctaagagcattgaattcaaagacaaagtcaagaatatcggtgccagtcttgtaaagcaggttgctaatgctactaatgacgtggctggtgatggaaccacttgtgctacaattcttactaaagcaatatttacggaaggatgtaaatcagttgcagctggaatgaatg

SEQ ID NO: 11695 - DNA, 361 bp, Glycine max
  Clone ID: LIB3092-001-Q1-K1-E10
cttgttcctccgctcaacatctataataacatctttctctctccgaacagatctcggtatgggcacctcaagcgccaaatcagtccatgattccaccgttaaagatgccaagggaaatgatattaatcttggtgactacaaaggaaaggtccttatcattgtcaatgttgcctaacaatggtacctccccgattctgttttttctcaatccctatttcattcctataattaagtacgtgggagggagtatcataagtattttttttaacctatgtgctctaattgaaattttaccctaaaattgccacggctagtcatgcttgcctagaaattgtagagattttgccctcaattttggtgc

SEQ ID NO: 11696 - DNA, 335 bp, Glycine max
  Clone ID: LIB3092-001-Q1-K1-F9
tcacatgatcaatcctaaaatgccgtaccctattgcaatcttagacatgacaatcgagagcacgcccaccagccggatcatcatggacctctactccgatgtcactccccgcactcacgagaacttccatgcactctgcactattgagaatgaagtcagcaaacgcggcaaaccccttcattacaaaggatcctccttccaccgtatgatccctaatttcatgtgccatggacgtgattacacccccggatatgctacatgatgagaatcaatctacagatccaagctctccgattaaaacttcatcaagaagcacaccgaacctagtattctat

SEQ ID NO: 11697 - DNA, 324 bp, Glycine max
  Clone ID: LIB3092-001-Q1-K1-G1
gaagaacttacagatcatcgatataggctgcggtcgttgtcgaggagatggtgtctgcgtcggtgagtggcgctgtgtctcaacgagtgtcatgctatttcatatttgaagactcgttgtagtattacgggaacaattgtcagcttcaatctttagcatgagctgattatttgccttatgggattgatcttggtggacctactggaagattctgcaactgctgaactactgctgacgctattgcctagctactatgatgtgacgatcatatttcaccgcatgccacagcacgaggtctagacatattgagcagtgtcaattatg

SEQ ID NO: 11698 - DNA, 356 bp, Glycine max
  unsure at all n locations
  Clone ID: LIB3092-001-Q1-K1-C10
atggattagccctttgtagatcaacagctttacgtggagggtatggtgatgttccactggatgaacgatgtgcagcangacacataatgatgactgtatcaataagaagactgttgaaacttctctatcctagcttgattcaactcgatgaatatcttctgaaggcatctgtacaggctaatgcttaaaaaatggttaaaaaaaggtaccttttactggggaaaacctaaaaccctaaaggccttaaatttaataataatgcatccgggtcaatatatgggttggttaggtgaattcaccctgtatagcacagaaattactttgggcaaactttgctgaaaaatatcaaagactac

SEQ ID NO: 11699 - DNA, 55 bp, Glycine max
  Clone ID: LIB3092-001-Q1-K1-C11
tcgatggattatccctttgtagatgattcgatctttttggatggtattgtgatgt

SEQ ID NO: 11700 - DNA, 272 bp, Glycine max
  Clone ID: LIB3092-001-Q1-K1-C12
atcaactgttacaagctactagtggccaatattggggattcccgggctgacttatgtaagaatggcttaaccaaacaactatcggtggatcatgaaccaagcttataaagtgatgatgtataaaacagaggtggttttgtgtcaaacttgccaggggatgtgccacgtgtcaatagtcagttggctgaggaaagggcataagatgactaaagcctgaagatacatttgatctgagatccatatgcaactgtggagatgattgaggatgatgc

SEQ ID NO: 11701 - DNA, 303 bp, Glycine max
  Clone ID: LIB3092-001-Q1-K1-C2
cacgcgttcgggcttattacattacaatttgtgcattggctcatgtcctttttcttctttgcttgtcaaaaagggtacggcacatgtatctagcaaatgggttctcaccatctagaaccatggctattggagaatgggaaacccaaggtgttgaccaaggagaatatgcatggccgatactgacacagtatgttctccacgtctttgcgcaagaagtctaacccaactcttggtttccagctttcatgtgccacactcagaagcatcctttttaaatattgcaatgagggttattcttgggta

SEQ ID NO: 11702 - DNA, 369 bp, Glycine max
  unsure at all n locations
  Clone ID: LIB3092-001-Q1-K1-C4
ggcttatcacatcacaatttgtgcattgcctcgtgtcctttntcttctntgcttgccaaaaagcttacacacacaggtatctagcanatgggttctcaccagcaagaaccatggctattggagaatgggaaaccgagggtgttgaccaaggagaataggcatggccgttctgcacacagcatgtcctccacgtctttgcgcaagaagtctagccgaactcttgtctccaagcttncatgtgccacactcagaagcatccttttaaatttgcaagaggttattcttggtaccaagctttccattctcatccctgccatttcagctgccatcattgccgagtgctatggctttgaaagacctgggatttta

SEQ ID NO: 11703 - DNA, 171 bp, Glycine max
  Clone ID: LIB3092-001-Q1-K1-C5
gacatagaataagcttgtaaattcatttcactagaaaacataaagctattaattgtctatggtttttcaaacactaatagtatacatctgaagttaaaaatattcaacagaagactaatgaaataatgattaaaccaaataaaatggccgccgctctataagaatcaagct

SEQ ID NO: 11704 - DNA, 321 bp, Glycine max
  Clone ID: LIB3092-001-Q1-K1-C6
gacatagcacatcataattcgtgcatttccttataaactatatcgtttctccttcgcgatcgcattacacacacctgtatctagcacattaagcctcaacaactagaaccattgctaaagaataatccgaaaccgatgatcttgcccaatgtgtataggcatggtctttccaaacacatgctttccatgacgtctgtgaacaatatgtctagctcaactcttagcattaaacttccatgtgccccactcatactcatcctttccaaacagcaagatactattccaggtaccaagctttacattctcatccctgccatttca

SEQ ID NO: 11705 - DNA, 433 bp, Glycine max
  unsure at all n locations
  Clone ID: LIB3092-001-Q1-K1-C7
gggaaagttcattggaaatggagagtgttggaatgatcccacatgattatgttgctggtttagatctaaaccttgatgatagtacagcattccctggatatactggcattagataagggtgaaatcaagcctggaatgcagttttgaaatgacctttggcttaacaagtggcatactcttggcaagttagtcttgatcagttcatgaattgcttgtggcttacaattggaaatgcattcttgcagttcgctccttggcatgccatttttggatataccagacaaacatttcaaaaggctagccttgctgaaggttcgatatgaaaatatagagatgtagaacgctgtcaatggattaattcttactgggaatatgtatnggcttggtgttcagctcgaatttgacagcgccattctttcatagatcagtgctg

SEQ ID NO: 11706 - DNA, 315 bp, Glycine max
  Clone ID: LIB3092-001-Q1-K1-D1
tgcgctcagacacaatctgttatgaatactaactggccaccagatatagatgctgaacttgcggaactgggatcctatgcatttgaaaaagcaccatcttccttagctcacttgactttgacaatgcgttgtaattgctgacttaaatcatggcggctaaatgatccacttgttatatagagggaacacactcagaagttttcatttggatggtttgtgacacattcatgcagatccacccttaattgacatgctttcgaaatctgtcttgatgccaaataccgatatgctaacgacaataacttcatgcttact

SEQ ID NO: 11707 - DNA, 298 bp, Glycine max
  Clone ID: LIB3092-001-Q1-K1-D10
ctgactcgtgcgatcaacttctattgcggcttgggttttagcgcaacttcttctagatttagggaagatgggtaaggaataaggttcacatcagcattgtggtcattggccatgtcgactctgggaaatccactacctctggtcacctgatttacaagcttggaggcattgacaagcgtggtattgagaggtttgagaaggaagctgctgagatgaacaagaggactttcaagtatgcctgggggctggacaaacttaaagctgatcgcgcaagatgaatcaccattgatattgcttt

SEQ ID NO: 11708 - DNA, 381 bp, Glycine max
  Clone ID: LIB3092-001-Q1-K1-D12
gtctctttggaggacctttatcttggaacttccaagaagctctccctctccagaaatgttatatgctccaagtgcagtggcaagggttctaagtctggtgcttcgatgaagtgtgctggttgtcaaggaactggtatgaaggtttctataagacatcttggcccatccatgattcagcagatgcagcatgcctgcaatgaatgtaagggtactggagaaactatcaatgacagagatcgctgcccacagtgcaagggagagaaagttgtgcaagagaagaaagtccttgaagttattgtagaaaaggggatgcagaatgggcagaagataacattccctggcgaagctgatgaagcgccggacacaattactggggatatc

SEQ ID NO: 11709 - DNA, 380 bp, Glycine max
  Clone ID: LIB3092-001-Q1-K1-D2
ttctctcacgcgtccggacccctcacatctgctttcaactatcacactcacaccaccaccatgacccttcctcaatcatttggctgaggacttgtgcaagcacccttggtgacatgctctggtcttcttactaaagtttggagtgatatctctcctcgtgatgaagacatagtttcatactcaggaaataatggactagccttgaaagtttctgaggattcgggtttgacggatgctgcgtttgaagtcaacccggatcttgatcttcaatctacagttgattctttctctgatcccaaggagaataatatgaaccgcttagagactctttgtaccaagaaacatacagatttctctgtcaacaagtctgtacgtgatct

SEQ ID NO: 11710 - DNA, 368 bp, Glycine max
  Clone ID: LIB3092-001-Q1-K1-D3
gaagaacaagttgttgagaactaagacggactagcacatggctcactcaatgatctcattcagagctgtgaccactgtcaaccgcgcccgtgccgacatggttgctccattcactggcctcaagtccatggctggcttctccaccaggaagaccaacaatgtcattacctccattgctagcaaccgtggaagagtgcaatgcatgcatgtgtggccaccagttggcaagaagaagaccgagactctgttctacctgccagaccttgatgatgcacaattggcaaaggaagtagaatgccctgttaggaagggatggattccttgctacgaactcgagtttgagcacgcttttgtgtaccgtgagcaca

SEQ ID NO: 11711 - DNA, 375 bp, Glycine max
  Clone ID: LIB3092-001-Q1-K1-D4
gacttatcacatcacaatttgtgcattgcctcttgtcctttatcttctatgcttgtcaaaaatgttagtgacacatgtatctagcacatgggttctcaccatcaagaaccatggctatcggagaatgggaaaccgatggtgttgaccaaggagaataggcatggtcgttctgcacacaacatgtcctgcacgtctttgcgcaataagtctatccgaactcttgtcttcgagctttcatgtgccacactcataagcatccttttaaatttgcacgatgttattcttggtaccaagctttccattcttatccctgccatttcaactgccatcattgccgagtgctatggctttggaagaccttggatttttatattg

SEQ ID NO: 11712 - DNA, 155 bp, Glycine max
  Clone ID: LIB3092-001-Q1-K1-D5
gactaagtacatgacaatttgtgcattgccttgtgaccatggttttttatgcttgtgaaaaagattacacacaccgggatctagcacacggggcttcaccagctggaaccatggctatgggagaatgggagaccgatgctgttgaccaaagagaa

SEQ ID NO: 11713 - DNA, 439 bp, Glycine max
  unsure at all n locations
  Clone ID: LIB3092-001-Q1-K1-D6
agaggatggagaaaacagaggaaaaggtggcggtgggcgtgccagtgcaattgtattacggtggagaaaatgaatatcaaaggggaatgatccctcctaacacggtgtttggagatccaaagggcatccccatccagcagaccatttacagggacactcctgctcctttcaactgcccttactgcggtgacaccgctctcactaccgtcagatcaaaagcccagtctagcagcatttgttggatgctttgtgccgatgatgcttggagtttgctttctttgcccttcaatggattgcctttggcataaatatcactactgtcctaaatgtcaagaaaaggttgctgactttgagaaatcagatccctgtgctgtgatggatccaccacactggactcangagagctttgcattgtctggataggatgataattctttta

SEQ ID NO: 11714 - DNA, 327 bp, Glycine max
  Clone ID: LIB3092-001-Q1-K1-D7
gaacaagtagttgagaactaagaaggagaagcatatggcttcctcaatgatctcttgcccaggtgttaccactgtcaaccgtgccggtgccggcatggttgctccattcactggcctcaagtccatggctggcttccccaccaggaagaccaaccatgacattacctccattgctagcaaccgtggaagagtgcaatgcatgcaagtgtggacaccagtcgtcaagaagaagtttgagactctttcctaactgccagaccttgatgatgcacaattggcaaacgaagtagaataccttcttaagaagggatggattccttgcttgga

SEQ ID NO: 11715 - DNA, 291 bp, Glycine max
  Clone ID: LIB3092-001-Q1-K1-D8
ttggggaaagttcattggaaatggacagtgttggaatgatcctccatgattaagttgatgattggggcctaaaacttgatgatagggcaatcattcctgtaaatactgacattatataaggatgaaaatgcgcatgaaatgcaactttgaaatgagctttggcttagcaagtatgatactattgggcagttagtactgatcacgtcatgaattgctgcaggcttacaattggaaatgcattctttgagatcactccatgacatgcgacttttggatatgcagaccaaacat

SEQ ID NO: 11716 - DNA, 310 bp, Glycine max
  Clone ID: LIB3092-001-Q1-K1-C1
gaaagacgccaagggtccattatctcacgaggctagggaccatgggattgaccactatatcgctgaatgcagcgcatggggcaacatctgtgggaaccatgcagatgatagagagctcattcattggagatatatgacgtatgctaggggtccagatcagccagccgatgtctacggagttaggacctgatacagcacaatgccacctagacagcggatcgtcaaggtctacactggagagaccatggatagagtgcaggtgccagatgtagcatacgctgccaagctatccgatatcatggtattaaag

SEQ ID NO: 11717 - DNA, 373 bp, Glycine max
  Clone ID: LIB3092-001-Q1-K1-D9
cacctttgttcactcttcttctctttcggctagggttttagcgcaacttcttctagatttaaggaagatgggtaaggaaaagggtcacatcagtattggggtcattggccatgtcgactctgggaaatccactaccactggtcacctgatttacaagcttggaggcattgacaagcgtgttattgagagggttgaaaaggaactgctgagatgaacaagaggtctttcaagtatgcctgggtgctggacaaacttaaggctgaccgtgaaagaggaatcaccatggatattgctttgtggaagtttgaaccaccaaagtattattgcacagttattgatgcgcctggacatagggatttcattaagaatatga

SEQ ID NO: 11718 - DNA, 304 bp, Glycine max
  Clone ID: LIB3092-001-Q1-K1-E1
ggacaatgttacaacttggaccatttcaatactgcccagatgtaatgatggcagatcttgtgaggccaagagcctgggatgaataaggggctacctgtctgattgagagtacagttactggtgcaaaatcagaatcctattcaccaaaaattgctcataccacaggcatgctcaccacttgtttcgacacatatacatgaccacaatccatattgatgactgataatactcactgctgtgtatgcaattgaaccttttgagcagacgatactcattataaaggtactaaacatactacttactg

SEQ ID NO: 11719 - DNA, 276 bp, Glycine max
  Clone ID: LIB3092-001-Q1-K1-A10
cttatgtctcacacaaaacactagtcccttcctttttacttgtctctttctcttcgcaacaacgggcagatcttccacaagactgtgactggcaaaaacataaccctataggtccatagtctcgacaccatcgacaacgtcaatgccacaatccaggacaaggaaaggatcccttctgaccaacacagggtgatttttgctggtaagcagcttgaaaatggtcgcactcttgctgattataacattcaaaaggaatcaacactctacttggtcttg

SEQ ID NO: 11720 - DNA, 289 bp, Glycine max
  Clone ID: LIB3092-001-Q1-K1-A2
agatatggagcttctatttccatttgttgactcggctttacctttagcatatggtgtcttgggggttcttctgtttcatgaggttggacactttctagcagcatttcctaaacaagtaaaattaagcatacctttcttcattccaaacatcacacttggcagctttggtgctattacacagtttaaatccatccttccagatagaagtacacaagtagacatatcacttgcaggtccctttgctggtgctgtattatcattttcgatgtttgctgttggtcttcttctc

SEQ ID NO: 11721 - DNA, 355 bp, Glycine max
  Clone ID: LIB3092-001-Q1-K1-A4
accacgcgtccgtcaccaacactttcatattcaaaccccccatctctcatcacccatagcagctgcttgattcccaccgctcttctctacgctttctcaccaaatttaaaaccccctccggagcgaattctcggcggctggttccgaaagccacggcggctcccggggccaagaagacagaaaagccgcacgagagagtccagcgagtccacagcgtggaggagttcgagtcggcgctcgaatccgccaaagacaggcttgtggtggtggaatacgctgccagcgacagcgaggagagcagccagatataccctttcatggtggagctgagccgcagctgcaacgacgtgggagt

SEQ ID NO: 11722 - DNA, 452 bp, Glycine max
  Clone ID: LIB3092-001-Q1-K1-A5
ccggaattcgacgccacgcatcagacgtccgctcacgcgttcgggataggtcttgtaggcgtgtttcatgctgatattggccattggaagttgggtttctcaacatctaaaccattaggaaactctctcatatccaagttgcaagcttggaaacatggttatcatatgttgtatggatttgtccaagttctaaatgctttggaacatggatgaggttagcgtgcatgtaaatagatgttggatcgtgattgacatgtctcacaaagttgcggattctcttacaagatggggaacaacttcttctaattatgatcagacttggagtcttcctcctaatggtgttctcttagcccttgggagagatgctttaagttccacttagtttctatttagtacttttatttccaaatgtacctaaaaaagattcctgtatatacaactaacgtctgtat

SEQ ID NO: 11723 - DNA, 252 bp, Glycine max
  Clone ID: LIB3092-001-Q1-K1-A6
gacgacgttggcgccaaacgtggaggattacagtgggagtttcgcgagatggattgcagcagggtcggggcaagtggttagggggattctgtgggctggggatgtgactgtggacaggttgaagtgggggaatgatttcttgaagaagaggttggagcctggttcacactcccaggttagtcctcaggcactggagagcatcaaaagggttaagaagttgaccaagatgtctgagaaagttgccactggtgt

SEQ ID NO: 11724 - DNA, 389 bp, Glycine max
  Clone ID: LIB3092-001-Q1-K1-A7
tgtctacgttggcgccaaacgtggatgattacagtgggagtttcgcgagatggatggcaacagggtctgtgcaagtggttagggggattctgtgggctggggatgtgactgtggacaggttgaagtgggggaatgatttcttgaagaagaggttggagcctggttcacactcccaggttagtcctcaggcactggagagcatcaaaagggttaagaagttgaccaagatgtctgagaaggttgccactggtgtcctctctggggttgtcaaggtgtctggattcttcacaagttctgtagtcaactccaaagctggaaagaagttctttagccttctttcaagggaaattgatcttgctaccatggatggattcaataaggttttggat

SEQ ID NO: 11725 - DNA, 380 bp, Glycine max
  Clone ID: LIB3092-001-Q1-K1-A8
tcgcccacgcgttcgagacagttagcttcagctggaatcaaaatgttgctcacagcaagaaatgagaagaaaggtcttcaaacactggaaacaactaaagacataaggctatcccaacctggactggttcaataaggggaattgggttatgccaccaatgtaacttctttggcagaatttggtcaaatccaaattggggaaactggtaattctggataaaaatgcaagggattggtgggaagtggtaattgatgacactgattttaatcactacagtcatcatgaatcgtggggctataccagaagataatgggacaaagggaataactcatacatacgagttagctgaagaatgcttgcaaataaattactatggcgct

SEQ ID NO: 11726 - DNA, 201 bp, Glycine max
  Clone ID: LIB3092-001-Q1-K1-A9
gcgcttatgtctcacacaaaacactagtccctcccttcttacttgtctctttctcttcgcaacaacatgcagatcttcgtcaagactttgactggcaagaccatcaccctcgaggtccagagtatcgacaccatcgacaacgtcaagggcaagatccaggacaaggaatgtatcccttctgaccagcagaggttgattttt

SEQ ID NO: 11727 - DNA, 341 bp, Glycine max
  Clone ID: LIB3092-001-Q1-K1-B1
cgcacccactcgtccgacaaaacggcggattaaaaattcttttgtcgttttcaatcggagcgggggagagagattgggaatttctacttttgaggaattctagagaacacgagctatggaagaatccatcaaggaccagcaatctactccatttcctggtaacgcagccagacccaagcttcagcgctatgctttgcgttcggggaataataaatctaaagatgacaagcttcctgctcctgaattgtcgaatcctccttcttctgcctcaaagaggggaagatctgtgtccagtgtgagcaaaagtgttggagtccttgaactatctgccaaggacaagt

SEQ ID NO: 11728 - DNA, 270 bp, Glycine max
  Clone ID: LIB3092-001-Q1-K1-B10
ctcctttccaaagggagaacaacacttgcgatttctgctactatcgaagaaatgtgagccgtgaaatccgttattgacaaagatgctaataccacgatggataggactattgataatgtccgtacaaatttcagtttcatattgacagggataagcaaacccatccattcttgacataattcaggtggaatactatggaagcccagttagctttgacagcatctgtcaaattaacacttctgatgccagatctcttttggtacagccata

SEQ ID NO: 11729 - DNA, 331 bp, Glycine max
  Clone ID: LIB3092-001-Q1-K1-B11
ttacactcctttccaaagggagaacaacacttgagttttctgatactatcgaataaattagagccgggaaaaccttaattgagaaagatgcttaaaccagcattgataggactattgataatgtccgtacaaatttcagttccataatgacaggtagagcaatacccatccatgcttgacaaaattcaggtggaatactatggaatcccagttagctttaatagcatcgctcaaattatcacttctgatgccagttctcttttggtacagtcatattacaaatcaagctttaaggctatagataaagccataattagctctgatcttttta

SEQ ID NO: 11730 - DNA, 320 bp, Glycine max
  Clone ID: LIB3092-001-Q1-K1-B12
ttcattcgggtcacttgggcagcggctactatgcgtttttttgtcagagaagacgacagtggcgaagcctactatgaactccatttcattctcatcttccaccaatcctcaaagcttaaagagcccatttcacagacaatcccaagcccgaagcctttcgctctcgttagccttatcattctcgcatctgaagaactttctgaagaagcctcacgccttccctttccttctctctggtatcctcttactcacttggatttttcttagaaatcagcactcttcttctcaattctcctctaggtatcaccaggctactgatt

SEQ ID NO: 11731 - DNA, 357 bp, Glycine max
  Clone ID: LIB3092-001-Q1-K1-B2
cttcttccttgggttctgttctgttctgtcctctctttctctttctcttctttttttccacgcgattctttcaattttcaattttgattcaatcacattcttcttttacattctcgattccttccttccttacttaaaaattctaatattatgcatcatttctcaccaaccacctagggtttctttccgacgttaggtttttttttctcgccgggattttgggggcagacttaatctccggcagctatggcctccaacttgcagatgagtcctcaggtggagcaaatccacggtgaaatccgcgacaactttcgagccctcgcaaatggcttccagaagctggataagattaaagat

SEQ ID NO: 11732 - DNA, 248 bp, Glycine max
  Clone ID: LIB3092-001-Q1-K1-B4
tcgatagatgagaagatcgcgtttacttgcatataaaataaggtctatctagtactaatgcagatgtggtatcccctctcatcattgtgaaagctcaggcacataaaacattgaatgatgaaatggcacgaaacatgaagatgactagactgatctgatagggtaatccgaatcctaaggtattggacgtgcacaaatactaaaattcacaggtcaagctacctcgcaactcaaccataatgtcatgt

SEQ ID NO: 11733 - DNA, 281 bp, Glycine max
  Clone ID: LIB3092-001-Q1-K1-B5
gaattttcatattgccaaactatcctaactttttacacatgacatggccctcaagggcactgtaaccattacttcttgaactagtgctctctcctacatattcaatttacttaccatacacactaatcaaatggatactcccactgctcctctaactgttcaaacccctacttactacctactgaatcgaccctgcttcatgtcaccgatcgtccatcttagcgcatactcattaattaacacgttcgatcacactaagtcagctcataattccggattaa

SEQ ID NO: 11734 - DNA, 394 bp, Glycine max
  Clone ID: LIB3092-001-Q1-K1-B6
ctcatttcttctcatcttctttttcttccctttaaaattattattccgtgcaaacacaacagcaacttcatcaccaacacgaagaacaagattagcgttatgggtctcttcctttctaggaatttggcttgcaaattcatatacccttttctttttttcaataaggtttcaaaggatttgttccccaagcagttggagaacatgatgtctctggtctctcctcgtactggcaggcatttgcagcgctatgacaaaggctgtcgccaagttgtgggatgcattccttacagatacaagaacaatggaacacaggataaggaattagaggttcttgcgattagtgctcaaaagggtcatggaatgcagttcccaaagggtggttgggaaactgatg

SEQ ID NO: 11735 - DNA, 307 bp, Glycine max
  Clone ID: LIB3092-001-Q1-K1-B7
ctcatttcttctcatcttctttttcttccctttaaaattattattccgtgcaaacgcaacagggacttcatcaccaacacgaagaacaagattagcgttatgggtctcttcctttctaggaatttggcttgcaaattcatatacccttttcttttttccaataaggtttcaaaggatttgttccccaagcagttggagaacatgatgtctctggtctctcctggtactggcaggcatttgcagcgctatgacaaaagctgtcgtcaagttgtgggatgcattccttacagatacaagaaccatggta

SEQ ID NO: 11736 - DNA, 143 bp, Glycine max
  Clone ID: LIB3092-001-Q1-K1-B8
ctcatttcttctttttttttttttctttccttttaaattattattcccttcaaacagtacaagaactttatcaccaacacgaagaacaagattagccgaatggaattcttcacttctaggaattaagcttgcaaattcatata

SEQ ID NO: 11737 - DNA, 375 bp, Glycine max
  unsure at all n locations
  Clone ID: LIB3092-001-Q1-K1-B9
ctcctttccaaagggagaacaacacttgtgagggctgctactatcgaagaaattgaagccgaaaaagccgcaattgaaaaagatgctaaaaccaggatggataggactattgataatgtccgtacaaatttcagttccataaggacagggagagcaaacccatccatgcttgacaaaattcaggtggaatactatggaagcccagttagcttgaagagcatcgctcaaattagcactcctgatgccagttctcttttggtacagccatatgacaaatcaagcttgaaggctatagaaaaagccatagttagctctgatcttggtatgactccaaataatgatggagaatngatacgactgagcatccacagttga

SEQ ID NO: 11738 - DNA, 231 bp, Glycine max
  Clone ID: LIB3092-001-Q1-K1-H9
ttcctgggtcgacgagctcactcgcatgtgcgcgctttctgaagatcagatcgacgcgcgctgacgtgctaatctgtactttctatgtgcgatcgtgcacagtagtcttctttgacgaagcttaacacgaagaagagccatggcactatagatcatcatcaattccacaatcatcatatcatatggaaatctcaagctcaacaggtaacttactcatctaagctagtacga

SEQ ID NO: 11739 - DNA, 340 bp, Glycine max
  Clone ID: LIB3092-002-Q1-K1-E5
tcgactatctttatataataatataaataagaataaaggaataaaaaaaaaaaaagaatctatataaatataaaaataatatatataaggtacaaatagtaaatcgaggtacccattttatgataaactttccttccatttttgttcctctagtaggcctagtatttccggcaattgcaatggcttctttatttctttatgttcaaaaaaacaagattttttagatacagaaaacaaagtaaaattctggggttttttattccccaattataatactaaattcaaaaaaaggagagtaatgagtataatctttcgctcagacgatgtactgatatattct

SEQ ID NO: 11740 - DNA, 224 bp, Glycine max
  Clone ID: LIB3092-004-Q1-K1-A12
tcaagcgtagaccctttagtattccttattacccacccacctgggcggcaaattaccattttgtcactaacgctcaactaatgttcattcccgccaatactacataattactgcgaatcttataaaacaaaaaaaaaatgccggtcgctatataggatcccagcttacctacgcgtgcccacaacctaaaagatcttatatagtgtgacccaaatttaattcac

SEQ ID NO: 11741 - DNA, 87 bp, Glycine max
  Clone ID: LIB3092-004-Q1-K1-H12
tataggatccaaacttacttacgcccgcttgcgacgacataaattttctttattgtcacctaaataaaattaattggccggcgtttt

SEQ ID NO: 11742 - DNA, 379 bp, Glycine max
  Clone ID: LIB3092-005-Q1-K1-C9
tgttgcaagttatctaagcccagtttgtgtttcactcacacaccgtttgcagtaacaacaaaacatcatgctttctcgcccctcacatcaatttttctgtttctgagatccgcgccttctcttcactttcagatggttctgtctctgtagctcggaatcagacgacaggagaatttgctgggggagagtttcaatttttcaaatcctgtcgttgattcatttggtattgcactcgcgtttctctctttctattttcgtcagagattatggtttttcgtttctagagggaggggtggtttgtttttattaagtatagaggcaattatggaataaatgaatagataagagattggtggcatgtcgatggtgtgatgaattt

SEQ ID NO: 11743 - DNA, 202 bp, Glycine max
  Clone ID: LIB3092-012-Q1-K1-H2
ttgcaaacaagatatcctgttgggtctcaaacgcagtaacagcattgctttcagctaaaaggaaacccccaaagatgagacagagatccaagtaatgcgttaaacctaatttgcttacgaagcttttacaaatgcttatcttaacaaatatgacacccagttcatagactgactagtctctccttattgatgctttgataca

SEQ ID NO: 11744 - DNA, 392 bp, Glycine max
  Clone ID: LIB3092-013-Q1-K1-A4
gacccacgctccgcgatggaagaagatgatattaatgacaatacccctaccgattaataagggtccgaatgtctttaagggttaaataaaaatttgagctgttttccaagctatacatcccaagaaggaaagctgacaattttccttccttaccatagaaggatgaggaatcctgtttgattagggatgttatgtgcatgatagtgcatgtttgaaaatcacgtggaaaagttcgaagtacttttgcaaaaagattaggacccttaattttgcttttattcgtcggatctgcattagaatgagtgtcataacaatttcaactgcaaaccaaacgtgctcataaaccgtataaacatgtttatatatatatattttggaattttgctatccta

SEQ ID NO: 11745 - DNA, 325 bp, Glycine max
  Clone ID: LIB3092-016-Q1-K1-E10
gaaatgataaagttcttttattatttattcatagtacaagcatcattttcacgcaactacttcgttcaatgacacacatagataagatgcatggtattgacttggccatagcattgtacaaataaaggattgaagtgcagagctagccaagaatgtctcatccctacaaagttgtaaattacgatttaggaattaaaaggagcaacgtacgtagtaggttaactgaacctctttattttagtagatagttaacattaacatgccttgttgcatggtttagaagtgatcgttgtcttgaactggtgggtacttaccataagggggt

SEQ ID NO: 11746 - DNA, 260 bp, Glycine max
  Clone ID: LIB3092-017-Q1-K1-A8
ctttacaacatcttcactactaaaacccttacattacccaacttaatcacctcgcagcacatacccctttttcatcattcgtaatatctaataaacccacacctatcacccttcccaacaatatcccatccttaatttctatataaactctccctttatcggcacattaatctctactaatttcctcaatactcacaacattaccacttcactatccaactccctaactccctctcctttcaatttcttcccttactttc

SEQ ID NO: 11747 - DNA, 363 bp, Glycine max
  Clone ID: LIB3092-020-Q1-K1-C3
aaagctacaacctacaaattattttcacatttgagcctaggtaaatgaaaactctcttaactagcacgagagagaagtttcacagtcttcatttattgacatgatctatgattattatagacttccttccctcggttatgctggtagtcaggatctacaaaactcactggtaatcccgatacaaaatatataactgggggtaaacttggcagggggacaatttatcaagtgcaaagttccgaggggatcaaagggaaatctgtgtcgaaatcgatcttatcgaagaaatcaaggtccattattggagaattggtgactgaagttggtgctgaaactttatcagtgatatcagactctgagctt

SEQ ID NO: 11748 - DNA, 282 bp, Glycine max
  Clone ID: LIB3092-021-Q1-K1-A5
aaaaaattataaaatcaaattattttttatttaatttatgaaaaattttaaaaattaaacattttttttatacaaaattttaaaatttattaaaaattaaaaaaaaattttttttttattttataaaagtttgttgggttttttaaaaaaaattttttaataaagatattatttaaacttgttaaagggcaccaaaaatttaattttcaaaaaaaatgcagtttgccttttcttattcggccatatttattttttaaagccttaaaacacaattaacttttt

SEQ ID NO: 11749 - DNA, 228 bp, Glycine max
  Clone ID: LIB3092-021-Q1-K1-E10
ctctttcaatctccattatactcatttaatatatatatatcttactcaaatccgctattctttaaacatctaaaacttaacacctatttaatcaccaacaattatcatctaataccttcacagttttaaacatcaaatcaaaactcgtctcatctatatcattcattcttacatacgcgtgcatactacctcatacatattctataaactcacctaacttcaattcac

SEQ ID NO: 11750 - DNA, 291 bp, Glycine max
  Clone ID: LIB3092-022-Q1-K1-D8
cgcgtacttgctacatgttatctatacaggctagtctcggacatacaacacaccggcccctacttgacaacgaagggaccaggaacaccatgccattacccaacttaagatgctggattgacatcatttgtcttcaagctggcgtaatacactaacaagaagttaccgcatcgacctaacaacatttacagcagaactgactggctaatggcacacacgctgtccttgacatcaaaccacaaagctgatgacactactcacatacactctggtacacatggaagcacccta

SEQ ID NO: 11751 - DNA, 218 bp, Glycine max
  Clone ID: LIB3092-022-Q1-K1-E8
tttttattttttttccgcctttccgcgttttttttttcccctcttcccctttttttttttttctttaaaccccaacccccccccccccttaacccatgttcccccccccaatcttcccaccaaactcccaaacattcccttctcccaaatcccctcccatcccccccacatcaattcatcatcaccttttctctccccctcccccatccacccttact

SEQ ID NO: 11752 - DNA, 153 bp, Glycine max
  Clone ID: LIB3092-029-Q1-K1-E5
gggcgacccacgcgtcggactctatggttttcaacttacttcctagagagagctttagtgataattgtgattaattttgtttttgacaggctaggatcatgatattgtatggttacattttacataaaatgtcttgatttgattttcttccta

SEQ ID NO: 11753 - DNA, 393 bp, Glycine max
  Clone ID: LIB3092-029-Q1-K1-H3
ttaaactctcaaagtcatgattgagataaagaaaaaaggaattaatgatagggtatcaccaaatgcagcccctcaaatcagactcaccgaggaaaaaggaaactaaaaatgggaataaagaaacaaaacaagtaaacaaaataaatgatactacgcctcacttcctatcttctcatgaattttgactgataatatggaaaaggaagaaagctattgcacaacttttactatccttacttgcactgcacacctgcttcagcagctcgacggggcgtgcttttgcgcctgcttccattatgcctaaaaccattggcctttgtcaactcatcagtggtgcttgttccattgccaatgctattttctttctcaactgagtctaatttctctttacct

SEQ ID NO: 11754 - DNA, 316 bp, Glycine max
  Clone ID: LIB3092-033-Q1-K1-G9
gaaagaatcgaattgttgttatggggttgtataccctgataaatacaattcaaaagatgatcatatgtgaaggagggaaaaaataatagtaatcggtaagtctctccaaagatgtcagtaaagcaatcaactgtgacattggcaagaaatcaaggatatatagactttatacaaaagataaaggcagaaatagttggccaaggatcaagaacttccactgaaaccttgattgttcttcatctttctcatttccatttcccttgtggtttggcggctctgtgcttcactacttgagcctgatgggtttaaaccatac

SEQ ID NO: 11755 - DNA, 174 bp, Glycine max
  Clone ID: LIB3092-034-Q1-K1-F9
cgtacgtaagcggtgagatttgcggatctgtgaaatggcggattcttttcgggaggagaacgtttggattctggaattttcggagcatgccgtgcgttactaggagatggttgtgttcatggagaatgttgcaaagactgtggatgttgaggagttgacagttgtcgagaggaa

SEQ ID NO: 11756 - DNA, 257 bp, Glycine max
  Clone ID: LIB3092-039-Q1-K1-H8
atacagtgacgagaagctcagagttagccggggaaacaacagtattcttttcgtacatgttcgtaccgatgcattgaggtgacctagtacatatgtgattgtttagaagaatagacgaaacctttgcgagtgacaattttaaatttgtgttcaattgggtatttaactgtacgacaatgcaaactaaatataaacataacatggacgtactacttgttcagcttccatttcccaaaggaaactggatcattttagat

SEQ ID NO: 11757 - DNA, 259 bp, Glycine max
  Clone ID: LIB3092-040-Q1-K1-C3
atttatagaaaattttccctcatcatttgattttcttaaaatatcagtcaacaaagtgtctgagaaaatgatgcacaaagcttacacaagaaagcaagaaattaatcacattaaccaagtttggcaaggacatcgttcagagaagatacagtagcagcatagtacttctctgcttctgggctgctcttaatttttgctgcatgatccagattgctgatatcctggaagagcttgccagtgagttccttgagtgatttct

SEQ ID NO: 11758 - DNA, 469 bp, Glycine max
  unsure at all n locations
  Clone ID: LIB3092-045-Q1-K1-F9
acaagagctaggacgtccggatgcgcgcatacgtaagctcggtcgctcgacgccattagcgtatctggtagtatttacaagtatacaggttgtctatgggattcatagaaatctagaacttgagaagcattacatggcgctgacgatgatggcggcgatcggcatcggcatgaaccaagagaagaagatgccggcgacgccggcgccggagaacgagctgaagaagcggactgaggagctcgagatggagctcagagagagcatggcgagggagcagcatatgaagcgcgaactgcagagcgcgtagtagaggctgcgcgttgncgaggatgctgaggagaggctctgctcccagctcggagagctagaaggcagagccgtttaccacgcgcgtgactaccacgcgcgcatcgtctacctcatggaccagctctcactcgcccagagcctgctcctgaagaccggtgcc

SEQ ID NO: 11759 - DNA, 288 bp, Glycine max
  Clone ID: LIB3092-045-Q1-K1-H9
tgacgtcgcatgcgcgcatacgtaacctcaggcttccgctatacgcctaatcacgagtctccagcatcaccatggagggggttatcaagggcttcatcaacgccggtctggacgctgatgataccaatcgggaagaacaacaacaccgttatagaccatctgagtataaactcttgcgctgaactgaatatcctcacgatcaacaatatcaccctatagctcatcaccaacacatggaacactcatcgcctcactacgaagagcctcaatctcaaacttcctacatac

SEQ ID NO: 11760 - DNA, 318 bp, Glycine max
  Clone ID: LIB3092-047-Q1-K1-C12
ttttgtgttttttttgttttttttccagtaatagtatttaatattataagcagagattcataattcaaattagccgaactttatacagaagcgaccaattaccaaacattaaaaaaaaaaaaaaagaagcacccttgagcttaacacacccatcacaagtccaaaacacttgaacttgctgaaaggcaaaacatgaccactttattttaaggatgtttgtttaacacaaaacaccagagtgcacgaaaaccatcacagacataatacataagtttttagctacacattaatagtttatcattattcctaattaagggc

SEQ ID NO: 11761 - DNA, 84 bp, Glycine max
  Clone ID: LIB3092-048-Q1-K1-E10
tatgatccaaacttactatcgcttgcatgctttttgttttctcttctatattgtcacctaaagtcaatgtattatccgacatgg

SEQ ID NO: 11762 - DNA, 278 bp, Glycine max
  Clone ID: LIB3092-049-Q1-K1-B5
acttactttatatgttttatattctattaaagggtaaatgcaatgggatactatacaaataagagtacagaaatgatggaccttggacactgacagttaaattacaaggagctttctgttacataaatatgatgcctagagtaagcagaatgtaaatcttactaggagggattcagtacaacgacatacatattaaccgctgcaacttactgatagcgacattttacaagaatatatacattaagacccagagtattaaataggatgattattataca

SEQ ID NO: 11763 - DNA, 207 bp, Glycine max
  Clone ID: LIB3092-049-Q1-K1-D9
ttcgtcttaagcagcggtaacaacgcatattacgcggttctagattttccatttcagaggtacacaccgcagatctgtgcaactgcatcctccgccgccgctgtcgacatgggtatcgatctagtagctgatggttaaagcaatctatctaaatgaactgcacctagatctgatgatatttacctgatactccttgttaagctttat

SEQ ID NO: 11764 - DNA, 210 bp, Glycine max
  Clone ID: LIB3092-053-Q1-K1-B8
taattcccggggcggccgacgcgtacgaattaacacacacaaacatatgctacttactatcaaattaatttagatggccggaagtgaagaacaaacaagtggttctgagggactatgtcagttgttttcctaaggaatccgacataaacatatttgaaggaaccacaatatttaagcttcaacaaggttctaatcatttacttctaaaaa

SEQ ID NO: 11765 - DNA, 265 bp, Glycine max
  Clone ID: LIB3092-053-Q1-K1-E1
gaaggcggggaggaccccgcgtccgcgaacttgcccattatgcaaggcattggtcaaaccagctgatctgcggacctttggagagggatcaacaagtctgttttttcagttgttttaagctcattttctttggcttgttgggtcatgtttttgagtcaaaatcttcctggaaaatgtcacctctggtttggtaaaattttccattaatgaaattgagatcgataaaagaatgaagatatataatatatatatatatatggccaaa

SEQ ID NO: 11766 - DNA, 65 bp, Glycine max
  unsure at all n locations
  Clone ID: LIB3092-053-Q1-K1-E2
tatccaaacttacttactcntgcattcgacttcatanctcttgtgtggtgtcatctaaattgagt

SEQ ID NO: 11767 - DNA, 294 bp, Glycine max
  Clone ID: LIB3092-056-Q1-K1-B3
ggtcgaccacgcgtccgggctgcttccatccagttagcccagcctagctcttgagcctatcccatctgccaccaggctgttaccacgtgctgttatagctgtcttcactgactgagcaacaatgcggatcgacattattacattgtttcttatctacagaagaatctcggatacagactcttaattaatctctgtgttaccttgtagctagaactagcatcttatctcgacaatgtacataatatatagtttcattaaaaaacacatcagcatgggcggccgttctagatgatc

SEQ ID NO: 11768 - DNA, 259 bp, Glycine max
  Clone ID: LIB3092-058-Q1-K1-E7
ttttatcttgctatttaatcttttcagtttttatctcaacaattctcccgacttttctgtatagtttaaaaggtaggggcttcctctctatatgatccaatcttacctactctttcatgctacttcatatctcttctataatttcacctaaattcaatttactgtccgtctctttacaatctctttaacttttaaaaccctttcattaccctacttaatcacctttcatcacatacctctttcttctatcttcttttta

SEQ ID NO: 11769 - DNA, 79 bp, Glycine max
  Clone ID: LIB3092-058-Q1-K1-F5
ctcccctctaaaacatccaagcttacatacgcgtgcatgctacgtcatagctgtgctatagtaacgccggggttcaatt

SEQ ID NO: 11770 - DNA, 84 bp, Glycine max
  Clone ID: LIB3092-060-Q1-K1-B5
ggcggggggcggccagaggatccaatcttacttactccttcattcttcctcatacctcttttatagtgtcacctaggtgcaatt

SEQ ID NO: 11771 - DNA, 273 bp, Glycine max
  Clone ID: LIB3092-061-Q1-K1-E8
ccaaacaaaattttactttttacaaaacaccccaaaaacccaccttaaaaaattttttcaattacccgggttaaaataaaatgcattctttcccacccctaataatcttattttgtttgacccaaaattttttccgctaaccataacttttttttttgccaaaaaaaaggaaacttttttccacccaattggccaccgatttatccctttttatttgaatcaaggcaacccttggatccattttttcctcccttaacatcataaaattttttt

SEQ ID NO: 11772 - DNA, 338 bp, Glycine max
  Clone ID: LIB3092-001-Q1-K1-A1
atgccatcctcagtggataatgcctcgagtagcggtaatatgcagggtaaaagtggtgcattcgaccaaggttattttgtaatgccgaaatcaagacgtgttgttgtagatgaatatagtacatctgtttctgcccgcaaagggaaaggtgtcatcaccatcagattgccctattctggctctgcctgtggaatgggctatgaagtccgagaagttgacagtaaagagtttctgtgcatatgcagtagcaaaattaaaattgaccgagttgggcttcttgaagatattagcagttctgtttattcgaagactgttcagctgctcatggatttgaaatc

SEQ ID NO: 11773 - DNA, 114 bp, Glycine max
  Clone ID: LIB3092-001-Q1-K1-A3
atttttacaaacacctgtgtaacataccaacaattatgaaatatacagtatataccataattggtgtatgttacacaggtgtttgtaaaaatagtttttatcattattttagta

SEQ ID NO: 11774 - DNA, 387 bp, Glycine max
  Clone ID: LIB3092-001-Q1-K1-F2
tagctagagaccggagagaatccaaattgcatttcatcaggcgccatccttttcctgctgagagtgagaggcgttaatctgaatgggttacatccaccatggaagaaccggtctcaggcacttattcagattcagaaccgccaccggcgtggtaaaaaactccgcgagatcgcaattacgcactgcatttctctcccattcttgccctatcctcggcaacaacgtggtttttttctccacaggcgacaaattcctgcacgaaattaccgcggaggtggagaaagacaggcgcagggagcgaaacgagcgtttgcgcctcggcctcgacaccgtcgacatcgacgccgagtcggagcatgactacatgggcgtggggcccctcatcgc

SEQ ID NO: 11775 - DNA, 314 bp, Glycine max
  Clone ID: LIB3092-001-Q1-K1-F3
tagctagagaccggagagaatccaaattgcatttcatcatgctccatccttttcctgctgagagtgagaggcgttaatctgaatgggttacatccaccatggaagaaccgttctcaggcacttattcagattcagaacctccaccggcgtggtaaaaaacttcgcgagatctcaattactcactgcatttctctcccattcttgccctattctcggcaacaacgtggttttttctctccacaagcgacaaattcctgctcgaaattaccgaggaagtggagaaacacaggctcattgagcgaaacgagcgtttg

SEQ ID NO: 11776 - DNA, 127 bp, Glycine max
  Clone ID: LIB3092-001-Q1-K1-F5
caaattgtttgagcttgtaaattctgttcactagaaatcagaaagctataaagtgtatattgattttcaagttttaatagtatacatctcaagtaaaaaatattcaacagaaaaaaaaaaaaacata

SEQ ID NO: 11777 - DNA, 459 bp, Glycine max
  Clone ID: LIB3092-002-Q1-K1-B3
tatttgttctagagaagataaataaataaataaacaaatcattgtaagttgtaactaatgataatgcactagtagtgactcattcatcattccgtttccagttcaagaacttgttctactcttttatcctacgcactcctcccttcttatcctgcgcatctttcaccgagatcctccccttcgcatcttcactttccaccatttcagtgggaaagaatcatgagttggttcagctagtgcgaagaggatgacctccacaaggctgctgaaagtggaggaccatacgtcgtaaaaaatccagcaggaaatgatggaaattatcttgcttctgaaactgcaaagcagggcactcagcctgttaaacctcaggccattggaagtgctaatatatgatccgatgaactgaaagaagttacagataactttggtcaagatgctctgattggagagggatcctat

SEQ ID NO: 11778 - DNA, 387 bp, Glycine max
  Clone ID: LIB3092-002-Q1-K1-B6
ctcttccgcaaaaccacagcaactcctcggatctactatctacctttgtctgaagagcaagttgccgcaaaactttcaacacagggtaaaagcgggaggcagtagataggccattagcctgcaaatcttcccttgcagccctttaactgatttggatatttttattagtgctatgggattattttgaatgcgtcttgttggcagatctggtggtgttttgtctcgggaagaaattgtcattgctaatgtatcttgagacttaaatttatttagttttagaagtcgtgaactaagagctactggggttggatagattttccccactgtttgaactaggcttgagcaaacctttacctgaaattttatggaaaaatttggcgtttaaaa

SEQ ID NO: 11779 - DNA, 444 bp, Glycine max
  unsure at all n locations
  Clone ID: LIB3092-002-Q1-K1-F11
tgcggtttcagagtttgtgacgcacgcatccatggccaccaccaccaacgccggcgcaggcccgccgcgccagctctcccagaaggaagccgacatccagatgatgttagccgccgacgtccacctcggcaccaaaaactgcgacttccaaatggaacgttacatcttcaagcgccgcaacgacgggatttacattattaaccttgggaagacatgggagaagcttcagttagcagctagggttattgttgcaattgagaaccctcaggatatcattgttcaatccgcaaggccttatggtcaaagagcggttctgaagtttgctcagtacactggtgctcatgctattgctggaaggcacactcccggtaccttcaccaatcagcttcagacttcgttcagtgagcctcgtctncttatcctcgctgatccaagaacagatca

SEQ ID NO: 11780 - DNA, 398 bp, Glycine max
  Clone ID: LIB3092-003-Q1-K1-C12
aagcagaattgtattgccaatggaaggcctgatttggggtaccttttctggaggtggaaaccaagtgaatgccatctgccaaggtttgaccctaacacttttctccaactcataagcaacaagcacatagcttttattggagactctctggccaggaaccacctagagtccctcctttgctttttagccactactgaaaaactacaaggattcacccaattccaagaaggttatactcggtggctctttcgttctcacaaggcaaccgtgtccttctattggtccccttttcttgtagatggtgttccaagaaaaaatccgggactcccttataacaaaattcatttggatcgtgctaatatgaagtgggaaaaggatttggatcaaatagacatcat

SEQ ID NO: 11781 - DNA, 353 bp, Glycine max
  unsure at all n locations
  Clone ID: LIB3092-003-Q1-K1-E4
tacatgaagaacataatccagatgaaggaacgggaagaccggggatgtataanatcatagcatgagtgattcggcagatttggattcctatatacccactcgtgcggtacttcattgtatgatctatatctatatatctatatctatatatctatctatagatatatagatatataagatccatctgtatagatatcatcatctacatccagaaagccgtatgctttgtaagaagcttgtacagtttgggaagaggttttgattgatcaaaaaagaagaatctactttaaccgatatgcccttaggcacggcaatacataacatataaatcacactcggaaagggtggacaat

SEQ ID NO: 11782 - DNA, 313 bp, Glycine max
  Clone ID: LIB3092-003-Q1-K1-F12
tcaacgcgtccgccaacccttccttcacgcgttcgaccacgcgtacgcgatttattaggaggttcaatatctggtggggccttcaacctttcaaatcccgtgtattacattccttagtaatgccccattcatttgcatataattgttgtttgaatttgtacataaaggtagtggctcaattcatatactgaatatcatattgccaatgattcataaactgaatatcactgaaattctaatacatactgactaattaaacttgtgttaaaacttatgtaacatttgccagatcttaacacgattgtgcaaaata

SEQ ID NO: 11783 - DNA, 362 bp, Glycine max
  Clone ID: LIB3092-003-Q1-K1-G11
tcggcgtgtgccatggctaaacatgcttttgaggaagcaattgctgagcttgacaccttgggggaagaatcttacaaagacagcacgctcataatgcagcttttaagagacaacctcaccctttggacttctgatgttcaggaccagctagatgagccctgatatcccttataggtcgatgggtggtattcttcctctcatggaggtgggctttgaatgtcatttatttgtgctaattaagaatcgccctagtttataaaatgattggcaatctgtgatataatgttgtatgaacagagaccaggcttcttttttttgtgtgtcatatggtattggaaaaaattaactagtgatccttattt

SEQ ID NO: 11784 - DNA, 252 bp, Glycine max
  Clone ID: LIB3092-004-Q1-K1-A3
attttgaagttgttatgattatacaacttatgtcacggatcttatctgcaaattaagatgcatgactatttctgataggatccgtgacataagttgtataattttgaagttgttatgattatccttccactttgtgctactcggtacactttttgtaattgatggatgtgttgtagaggtaggtgtcaagttaacattgtagttattttgagatttagtataacatttaatctttcagttttggagcaagca

SEQ ID NO: 11785 - DNA, 364 bp, Glycine max
  Clone ID: LIB3092-004-Q1-K1-B11
ctaggtcatatgtcgaatcgttcctctaggcttattgtggacacggcaaatacacttaatggcgagtgattcactcgcgtataacatctatttattctcaattaagtagccagttgggtggcatattacctttttggggctggcccctatatgatgcacacttacgtacgcgtgcctgcaacgttgtagaatgttctataaagtacctaaattgaattccctggtcgaggatccacaactacgtaaccgtgcaaaccacgtcatatccctactatatcgccttgtaaaacatattcacttgcccagctgttacaatatcgaaaatgcccaaaccgatcggccttccaaacaattgcgcatgctg

SEQ ID NO: 11786 - DNA, 272 bp, Glycine max
  Clone ID: LIB3092-004-Q1-K1-F4
gattgtcctcaaatttctgaaagaggtgtccaaggagctgcaaagtctgtgtctttcaggcaagacttatcttggatgtactgaacctgttgggttttagggacatgaagtccgttgtttttttttatggccatcttcaatgcttctatatatctatagtgtatcacacacacgtaagattattctgttgtattttttatttttatgtcaaattctgttcttgtatttgttttgtaaatcttttaataaaataaatggcttctctggcaaaa

SEQ ID NO: 11787 - DNA, 345 bp, Glycine max
  Clone ID: LIB3092-004-Q1-K1-F6
atactattgtcctccaatttatgaaagatgactttgtttttctgaaatgtctttccctggtatgggcaacttatatcgggccggctgacccttcttttttccatttacatgacccaagttcacttctttggttgccctcctcgaagaccaacacatatattatgctttttgttatcaacagaggtaataagctattctttcaaatgttgacaccacatgctaaaaataaatttgatactattttcttcctaccaaacaccttttttgctcaatttgctaaagaagtttaataccctcttaagaagggaaggattcctttctttgaaatccaatttgaacaccgat

SEQ ID NO: 11788 - DNA, 323 bp, Glycine max
  Clone ID: LIB3092-005-Q1-K1-B8
tattgttatattccgttaaatcaacactcttggttttccatccagctattcttatcatctgtcttctcccctgcccttttttcttgcagagagaaatgggtagagtatttttgtgctcataatattctatatatcttctggtcagctaaagctgcttcagcagctgttgaaggtaaaatgcttaggtcaccattggaagctgatgattcaaggaagaacaataatccagacacgaagatatatgacagggatgagcttcttgcacggatgcagtcagaggcagaaaagatagtagagatgaggagaaattctagctctgacac

SEQ ID NO: 11789 - DNA, 407 bp, Glycine max
  Clone ID: LIB3092-005-Q1-K1-D10
gtttctcgctaatttgcgtcttccttcgtttccaagtcagcgttaagggtttagtttggtgcgtgccatgaagatcgaggagttggacgatggagagtgtagtagggacgaggaagagaagtgtgagaggcagattgtgagcgttgatgcgaagagagcgttggttggagctggtgctcggatcctgttctaccccacactcttgtataatgtgcttcgtaacaagattgaagctgagttcaggtggtgggatcaaattgacgagtttttgttactgggcgctgttccgttccccaaagacgttcctcacttgaagaagcttggtgtgggtggtgtgattactctcaatgagccctacgaaaccttggtgccatcgtcgttgtatcatgctcacgggattgatcatt

SEQ ID NO: 11790 - DNA, 414 bp, Glycine max
  Clone ID: LIB3092-005-Q1-K1-D8
cgtttattcagcatatgtctcaaaggcccacgattcctcactcttcttccatagcctgcggccttcactctcatctggtggtgtgcagtgagatgaaccctagctccaattggtcccattagttacctctttcctgcatctcatatatcccattctttctcattcacacagcatcatgggcgtcaaaggttttgttgaaggaggcatcgcttccatcatcgcaggatgttccacacacccacttgatctcatcaaggtccgcatgcagctccagggtgaaaacaatttgcccaaaccggttcaaaatcttcgacccgcactcgccttccaaaccggttcgaccctacacgtggcagctgcagttccgccgccccgcgtgggccccatcttggttgggggtcgcctcgtccagca

SEQ ID NO: 11791 - DNA, 124 bp, Glycine max
  Clone ID: LIB3092-006-Q1-K1-A9
tattcataacacactgtggtcggaactctacaatagaagcaatatgtgctgaagtggcggggcttacgtggccactatttacacatcagtttccgaatgaaagtctaggggtgcatgtactaaa

SEQ ID NO: 11792 - DNA, 330 bp, Glycine max
  Clone ID: LIB3092-006-Q1-K1-C6
attagatcgctagcgatcgctctatacgatctaatcttacgtacgtgttcattctacgtgggagatatcatatagtgtctctttaaatcaatttactaacccgtgacactcaaattttgagacttggaaaactctggcgttatctaacttaatggactagctgaacattctccttttgtcagttgtcgtgatacacaattaggattggactgatcgagcttaagaacagatgctcagtctgaatggagaatggcacgcaagctgtaacggcacattaaaagacgccggtgatgagagcactcgcaaagcgaccgataaagttgacatctt

SEQ ID NO: 11793 - DNA, 270 bp, Glycine max
  Clone ID: LIB3092-007-Q1-K1-A7
gccacgcatgcgttcactgttcactgatagcataaacctcatcttgacgatcaaagcctagtgtcaggtttgtttcaagatatagcaaagaattcttctcaaaaaaagtgaacatttttcatgttttgtacaagttttgaaaatatatttttaggaattgttgactcgtaggaatataaagtactgttgtcacttgccttattgaaagttgggtattttatgttttcatgggaatgaaaatcaatttctataatatctatttttatttca

SEQ ID NO: 11794 - DNA, 171 bp, Glycine max
  Clone ID: LIB3092-007-Q1-K1-C8
ggaaattatattcaaaaagtgttctgttttgcgaggaagaaaatgtattctcagacatgatagggattttgtatacgaattatgaggaatatattttggtttgacattgtcctctatgtaattttgtacaatcaaagaataaggaatttttgtctgaattaacatttaaaa

SEQ ID NO: 11795 - DNA, 171 bp, Glycine max; identical to SEQ ID NO: 11794
  Clone ID: LIB3092-007-Q1-K1-C9

SEQ ID NO: 11796 - DNA, 228 bp, Glycine max
  Clone ID: LIB3092-007-Q1-K1-D9
tcgaaaaaaacaactttgcggctgcgctgctgctgatagcgcggggcataggaaggcggtcatgcatattgtcgactaaccaacgattcggttgagcgtttttaccgaagcgctgacgacggatgcagaagaaaatggtgctgtttgcagtggaagaggaaatgctgatcaggcgggcgctctggtaggaccaagcttaccgtcgcctgcgagccaagacataacttt

SEQ ID NO: 11797 - DNA, 238 bp, Glycine max
  Clone ID: LIB3092-007-Q1-K1-E3
gcagcataagaggaaagtcgtcaacctggaggatgtcttgcactgtaaatcaccacaaatttccttcaaaataattgagtgactggttcagtgttgtactatccttgtgatagcgcccttttatttttccttctatttttgtcaaatattttctttttcctttttttcctttttctctcttcattcagaaaacaatgtctcgctgctgattatcagtcttctcgtgttgactggaaac

SEQ ID NO: 11798 - DNA, 241 bp, Glycine max
  unsure at all n locations
  Clone ID: LIB3092-007-Q1-K1-E5
gcggcagcatatgaggaaagtcgtcaacctgnatgatgtcttgcactgaaaatcaccacaaatgggcttcaggataattgagtgactggttcagtgttatactatccttgtgatagcgcccttttatttttccttctatttttgtcaaatattttctttttccttattttcctttttctctcttcattcagaaaacaatgtctcgctgctgattatcagtcttctcgtgttgactggaaac

SEQ ID NO: 11799 - DNA, 150 bp, Glycine max
  Clone ID: LIB3092-007-Q1-K1-H2
acgaaacattctgggaatagaaatattctagctcctttaactattcacgtcatgatggggagacgtgtataaactacacgcatcctatgtaccttttccaaatgaaaactggtttggcggccgctctacaggatccaaacttacctactc

SEQ ID NO: 11800 - DNA, 280 bp, Glycine max
  Clone ID: LIB3092-007-Q1-K1-H3
aaacatcatgttaatatacatattctactttttttatctaatcacatcataacagtgtgacgtttactaatcacaaacaccctataataaaattaaaaataaaaaattcaaagggcgacccttctacacaatccaagcttacctactcgttctcgctactacctcacctctctcaatagcttcacctaaattatcttcactggacggcgtctaacaaccacttcactgttaaaacccttgcctaacctaacttattcaactttcaccacatccctctttc

SEQ ID NO: 11801 - DNA, 430 bp, Glycine max
  Clone ID: LIB3092-008-Q1-K1-A8
gacggaccattctgatgacctttcaaaaggcattgcaattctggtggttgtgatggtctgcactttcgtgtcttcctttgcatggtcttggggtcctcttgggtggcttatccccagtgagactttcccattggagactcgttccgctggtcagagtgtcaccgtttgtgttaacctgctcttcaccttcgtcattgcacaagccttcctctctatgctctgccacttcaagtttggtatcttcttgttcttctctggctgggtcctcgtcatgtctgtcttcgtgcttttcctgttgcccgagactaagaatgtccccatcgaagagatgaccgagagagtgtggaagcagcattggttctggaagaggtttatcgatgatgccgcggatgagaaagtagcccatgtctctaatggtaatggatttgat

SEQ ID NO: 11802 - DNA, 443 bp, Glycine max
  Clone ID: LIB3092-008-Q1-K1-D1
gtgtgtgtgagagagagagagagagagagagagaaagagagagagagagaggttaggctatggctggtgagagcgtcgttgagtccccagtgaagaggcagagagatgatgatgaagaaaatgaggtctctgtttccatggatgtggagggtggcaaagaccctcttagtaacggtttatcatctgtgattcctgggtggttctctgaaattagttcaatgtggcctggagaggctcactccttgaaggtggaaaagattttgtttcacggaaagtctgaataccagaatgtcatggtcttacagtcatcaacatatggcaaggttcttgttataaatggagtaattcaactaacagaaagggatgaatgtgcctaccaagaaatgatcactcatcttcctctttgctctatttcaaaccccaaaaggttttggttatcggtg

SEQ ID NO: 11803 - DNA, 81 bp, Glycine max
  Clone ID: LIB3092-008-Q1-K1-H9
attatacacaaactacaatagaagagtaatgtgataaatcttaaaagtaaaaaaagggggggacaataaaaaaaacagtac

SEQ ID NO: 11804 - DNA, 140 bp, Glycine max
  Clone ID: LIB3092-010-Q1-K1-A12
gttccatgttagggatacactatgacacatgagattcttttatttgtttattgatggagggttatccggatgaataaatatatgaagttcaatgtaccaaagcaaaacatatagtatatgtgaattcaatttatataaat

SEQ ID NO: 11805 - DNA, 240 bp, Glycine max
  Clone ID: LIB3092-010-Q1-K1-D2
agaaaatgaaggcacttgatttcttcgttgctacaattgtggtagcatggcaatgccatgcgtacgatatgtactctctgcgaatgaacactggatatggtgcccgtacttcggaggtgaaatgcgcaagatgcaggcttgctgtggaagcacacaacatctttggctttgagacacattcctgaagagtgcgtcgaagcatcaaaggagtacatccatggcgaacaatgtatatcagac

SEQ ID NO: 11806 - DNA, 341 bp, Glycine max
  unsure at all n locations
  Clone ID: LIB3092-010-Q1-K1-H8
aagcattgcaggattcagaaaccaatacacttagctcaatatgacttctaaatccactgagatctaaattggtcccgagtggtaaataggtgcagcttgagaataatttttgtaattagtttgattcatcaccacaaagccaagtcctatactgtcttcagtatggttttgtttggagaaacttttctataagcacttatagaagactataagaataaaatagattgagtttctcacaattgataaagtaaggtgtaagatgattttagcttttagaagtaactcaattcattttatntatttttccccctcttattaatgcttaaggaaaaatttatccc

SEQ ID NO: 11807 - DNA, 217 bp, Glycine max
  unsure at all n locations
  Clone ID: LIB3092-011-Q1-K1-A7
gncatgtccactttaacgtggattttttgtcccatatgatccccttgatggctccgcattgttacacaaatgtacgggaccaccatatttggtgattgcctgcacataagtgactgggatcaccgaaagagataagttgcttcagtcatgcagctttttgttcctacaacaacatatgtacttgctataaaagactttactgacacccatgaattta

SEQ ID NO: 11808 - DNA, 293 bp, Glycine max
  Clone ID: LIB3092-011-Q1-K1-B2
cggacgcgtgggggggattgttactcaagtttctgatattgggaggtggttccacccttgcgtacttcagtgcaacagcctcaggtgacattctaccaatcaagaagggaccacaacttccaccaaagcttggtcctcgtggcaagatctaatttgatttgtatcagagctccatctattgagttcctttttaatttttatttttctggtttgcataatgtgtaagtatgcttgcagactacttactattcaaagatgcttctttccagtctaaaaaaaaaaaaaaagaaagg

SEQ ID NO: 11809 - DNA, 288 bp, Glycine max
  Clone ID: LIB3092-011-Q1-K1-C11
gattacaggagaatggttcacaaacagtattttgctcgagaagctcttgaaagctgattgggaaaattccaaagcgagatcaattagtttccacgtcatagttgtaaacgtttgcctgaagaaaaagtctgcaccttataaatgtcctttttttttccttgctttgatattgtaacctgaaactacgagagttctaagtcctcttaaaagtcttttaattactttctgtatagtagtaaaagttttcattgcaaaatagccaaatgacgcaatgacatctttgtgata

SEQ ID NO: 11810 - DNA, 331 bp, Glycine max
  Clone ID: LIB3092-011-Q1-K1-E8
taaacattctcttgcacccaaaccctttaattaagcacgttatttcattagggttgggttggttgaacagaaaaaaagagaaaaaaaaattatgggaagcgatggcgtgaggaaaccaagattcctatgccttcatgggttccgaacaagcggataaatattgaaaacacagttacataagtggcctcaatcggttctagacaacctcgatctagtatttgtggatcctccttttctttgccttggcaaatccgatgtaaaaggcatttttgatcccccttactacgatttggtttcagttcaacaaggaatttacagagtccaccaattt

SEQ ID NO: 11811 - DNA, 189 bp, Glycine max
  unsure at all n locations
  Clone ID: LIB3092-011-Q1-K1-F8
ancagatnaaataaatataaaaacatttactttataatcatcattaacttcacaaccgcccgtttatttttaaacctaccccccccaaaataatacttacacttaaattcaaatattttcctttatatctcaacacccaatatcttatacccactttacatctaataaactactacttcttctcttata

SEQ ID NO: 11812 - DNA, 352 bp, Glycine max
  Clone ID: LIB3092-012-Q1-K1-E5
gaaggggcttatggtcaggtcaagctgcatcaaattgtgttcccctttaagctattctagacattttatcttaagggcatcaaggacttgcctcaggagcttctttcccagcctgttgagcccagcccagctattgagcccagcccatctgccaaggcctgtgaaccacatgctgttattgctggctttactgactgaggaacaatgaggatcgacatttttcttttgattcttttttaaggaagaaactcggatacagtttcttaggtgttcttcgtgttgttttctggttagaattagagttttatttcgacaatttacataataaaagttttcattaaaggattaaaaa

SEQ ID NO: 11813 - DNA, 119 bp, Glycine max
  Clone ID: LIB3092-012-Q1-K1-G3
atcaaacactaatgctacagtgtttggtatctcagacaataatgctacagtgtttggtggctaaaatggtccaagaaattatttcacaagacatcctaatacaattttttttccttcta

SEQ ID NO: 11814 - DNA, 303 bp, Glycine max
  Clone ID: LIB3092-012-Q1-K1-H3
accacgcgtacggctgtcgaccttcttttttttatttttgacagaacaaggtgagcttggggaagatacgctgccaaagtgtgacaatggagacatgtgaaagcagtttaatcatgttaagttactcgtttaagtgccacgaagtttgtgcctaggcaacttgtaaatggcaaccacctttggtagctactagaatttagcagtacttatttttttgctatgttctttagtatgtaaataaaccttatcataatcttctaggctaaatatgtagttaaaataaagtattattttgaagcgtaa

SEQ ID NO: 11815 - DNA, 127 bp, Glycine max
  Clone ID: LIB3092-014-Q1-K1-D11
cccacgcgtccgctttgctatgagggtctgatatttgatgcaaactatgtttattgtcgagagtttcttactttggggttgccttcgagaagttaaatttgggtgagtcgagtttttgatgagataa

SEQ ID NO: 11816 - DNA, 232 bp, Glycine max
  Clone ID: LIB3092-015-Q1-K1-A12
caaataaactgttaaacacaagtattttctatttccttttgatacatacagggttcatgttgtttaatttggataagcccctacatggttcatgtatcttataagtttgaatatttgttcagagacaaacgtaatccaagtgtgggacaccttcattgctctttgtcttgcattatatacacatttaaatgcatattttttattaataaatattaatgcttagtattgctaa

SEQ ID NO: 11817 - DNA, 351 bp, Glycine max
  unsure at all n locations
  Clone ID: LIB3092-015-Q1-K1-F1
taaaagagaagcttcctggttatcaactccaagtacaagaaggaagggaaaaagggaaaagggaaaaagggagaagtgggtgcctcaattggatatttaaagattgagaacagggttttttgttggttggagatgcatgattgtggtgtgctttggtttcatttcatcatatgacagccttgtgggtttctttggtgtttcttgatgcatacttaatttactntattattgtgtatttatctcttccatttacaaaaaaaaaagtttgtgtaggtttccctctttgaagtaaaagaaattaaatatgtactgaaaaatggaataatagtgtgttttatttgtgttttataa

SEQ ID NO: 11818 - DNA, 158 bp, Glycine max
  Clone ID: LIB3092-015-Q1-K1-G2
gttctggttgcaaaaatgaattcgcactacttttattggtgctacactgcacgcggttcatcacatcaagaacagaacgacgtcgtttgcccgcgctgccacggcggcttcgtcgaaaaggtcaccgtcccccaatcgtcaaggcaaggcttccgccg

SEQ ID NO: 11819 - DNA, 272 bp, Glycine max
  Clone ID: LIB3092-016-Q1-K1-B10
ggcaattcttatctaataaggttgtagttctacttgtgcaagcccaaggatatgattatatgaagactcaaaataaagtgtagaattgttgattttattgcctaagttttttagttattatttgtaaatctaatggtgatttgagatagatttcattaggatttatgattgattttattaagatttgtttaattgtttttaaattttgtttcttctattaaaatgaggattctatcaaaaaaaaaaacggggcgtggttgtcctgatcatac

SEQ ID NO: 11820 - DNA, 214 bp, Glycine max
  Clone ID: LIB3092-016-Q1-K1-D6
gttggctattaacgggtcgtgacatcatcttcttcgggttaactgtcttttttgggttatgatctaatagcccggaggttgaggagttgattatgtaggatgtggaccatgttattggcccaggccaagaatttccttaattcgaccaaatccgttaaatgcattaccttaacactgtaatttaccacaacatgaggctgttaccactgattca

SEQ ID NO: 11821 - DNA, 219 bp, Glycine max
  Clone ID: LIB3092-016-Q1-K1-E12
gaaagaatgacgactgggctatgcttcatatcattaaaaagtgaagtatatatggggcaggaacattgtgcctatcttacttaccaaatggtgtgcaagctttgcaataattagtaacattaatattgtggcaacctaatatttgtatagataagtttttaatgtaaatgacagaaaagtgtggattctgactattaattcttctctgtcatgatcagt

SEQ ID NO: 11822 - DNA, 454 bp, Glycine max
  Clone ID: LIB3092-016-Q1-K1-H4
tactttcttcagtgagtcacccgaatttagttcgcctcttaggttgctgcatagagaagggagagcgtatccttgtttatgagtttatgcaaaatggaacactttctcagcacttgcaaagagagaggagtaaaggactaccgtggacaataagacttaccattgctaccgaaactgctaatgctatagcatatctccattctgcaattcatcccccaatttaccacagagacataaaatctactaatatactcttggattatggcttcaaatctaaaatagccgattttgggctttctaggcttgcattgacagaaacatctcatatctcaaccgtcccacacgggactccaggttatgtcgatccccaataccaccagaactttcagctttctgataaaagtgatgtctacagttttggaatggttttggtagagataataactgccatgaa

SEQ ID NO: 11823 - DNA, 291 bp, Glycine max
  unsure at all n locations
  Clone ID: LIB3092-017-Q1-K1-F11
caaagacgnggactnngctgctagaagaggaaagncncaaggatgggcgngatcatgtgtgtcaatcatatataatctttctgtgtttctttaattatttattattgttatcattgttggaggggatcttttgatttttgaattcttattcatatatttggaggaggacataattgctctatttatctgtataaatttcatgtaaattttggtggggcctttttttatcaatatatttgtctttttgtctgtagccaagctttaaaatatgtttgatctgtcaaataaaat

SEQ ID NO: 11824 - DNA, 206 bp, Glycine max
  Clone ID: LIB3092-017-Q1-K1-H8
cggacgcgtgggcggacgcgtgggtaatttttgacgtgaatctttcaattgaaagggtagctatttgaaaggtatagctgatgttaaggtgcaaagtctgatgttaggtttatctcaagatttaagacagaatttctcaaaaagtgaacatttttcatgttttgtacaagttttgaaaatatatttttaggaattgttgactcgta

SEQ ID NO: 11825 - DNA, 431 bp, Glycine max
  Clone ID: LIB3092-018-Q1-K1-B10
gagggagccttgacatagaccatatcaacataacttctacaaatgcctgggataaactctaataatgcaattctggaaattgaatcagtaaacaatttaattggattggtcgaatggtatcaaaaaaatggagtactaactcccatttcttatttattattgaattaaccgatcaacttgctattgaatcgaacatttctttatgatttcaaaaattttccccaaaaaacttgaatctatttttatatgcgaatcaatcctactacttctggtcctgaagtttctgcgcttgaaaaaaaaaatctgggacgtatcgcccaaataattggtccggtactagatgtagcttttcccccaggtaagaatcctaatatttacaacgctctgatagttaagggtcgagatactgttggtcaacaaattaatgtgac

SEQ ID NO: 11826 - DNA, 322 bp, Glycine max
  Clone ID: LIB3092-018-Q1-K1-B6
agatcaagaactggtttatcccagcaatctcacttttacttgaccagaagaacaagaggcttgtatacgtagctggctcgaggaaaggattggttttaaggcagacttcaaaatttctttttatcccgggaagttttcggaagcaaggcggagtataatacctgctggagatacttctcaatttataccatccagggatgctgacattgctatcctggaagaaccagaacatttgaattggtatcatcatggaaagcgttggacggacaaattcaaccatgttggtggtattgtccacacaaattatttagaatatatcaaa

SEQ ID NO: 11827 - DNA, 326 bp, Glycine max
  Clone ID: LIB3092-018-Q1-K1-C10
gcaatacttaaagatctcgtcttgaaatacactgaatgactatcttgggggatccactagtattattaacatgtaggttcttaaaatagattttatccttatcactatgctccatttacgtctgatctcaaggtccttggtgaacttgatattacctttaaactgtttaccctattcaaaccatataaccagcttctaacttttttatcttctgcaagctctgatgcactttcttaaccatatatcaaacttataactgatccaagctcaccaatcattgatttatatccattattactttcaaccgtacatgaatagcaaacact

SEQ ID NO: 11828 - DNA, 431 bp, Glycine max
  Clone ID: LIB3092-018-Q1-K1-C11
attctctctgtgtatttccctacctctcccttcaagatgcagatcttcgtggagaccctcggcggcaagaccatcacccttgaggtggaaagctctgacaccatcgacaacgtcaaggccaagatccaggacaaggaaggaatccccccggaccatcaacgtctcattttcgccggaaagcaacttgaggactgccgtacccttgctgactacaacattcagaaggagagtactcttcacctcttcctccgtctccgtggtggcatgcatatcttcgttaagacactcaccggcaagaccataaccctagaggttgaaagctccgacaccatcgataacgtcaaaggcaatattcatgacaagggagggtattcccccggaccagcaacgtattatcttttcccgaaagcatttttaggacggcttaccct

SEQ ID NO: 11829 - DNA, 378 bp, Glycine max
  Clone ID: LIB3092-019-Q1-K1-A7
cccacgcgtccggtgatattcttaagaatcctgttgtcacagagattgcagagagattggggaagacaccagcacaagttgcccttcgatggggcttgcaagcaggtcatagtgtgcttcctaagagcactaatgagtccagaatcaagggaaattttgatatctttgactggtctattcctcaagatttgatgaccaagatctctgaaattaagcaggaaaggctagttaaggccagtttttttgttcacgagacctatggtgcctataggagcattgaagacttctgggatggtgaactctgagcaatatgcatctttgagacgttgaaaaatacattgctcctagagcaaatttattctgccttatacccactag

SEQ ID NO: 11830 - DNA, 352 bp, Glycine max
  Clone ID: LIB3092-019-Q1-K1-B3
cccacacattctctgacccgtgggagtccgttacacacttatccacctactttcatttgagccgctcttctcagtccaaaacagcttctccttttctcatctgaaaaatgaggagcatctttgtccttctccttgttctgggtttgtttaagtatgcatttgctgaagaagggttttgctctgctccttcggaatcgaaatcaaagcctctttattggaaagtggataaccccactctctcacctatccaccttcaagatttgcctggattcacacgcagtgtttataagagtaatcatgctttggtatcaccagaaagtcatgtatatggcccattgcctgattggatcga

SEQ ID NO: 11831 - DNA, 326 bp, Glycine max
  unsure at all n locations
  Clone ID: LIB3092-019-Q1-K1-D3
aaaagagttggtgttttctactgtggggcgcacacattggttggagaacttaagaggctttggcttgactnttccaggagaaccaacaccaagtttgattttcataaagagaatttttaaattcttttatcatagttcgtatttttttttccaactgtaacgtatgtagttgagggaaagtttctagttatatatagtttgttggggtttttttctttggtactagagctaggtagataagcagctagctgcattcaattagagttgtatacatgtataaaaaaattcattttgatataaatgaaatggttacgttgttaacaaaa

SEQ ID NO: 11832 - DNA, 262 bp, Glycine max
  Clone ID: LIB3092-019-Q1-K1-E10
ctttacattcactaactcgcctggtaatgcttgaggctttcttgggttggggtcagaaatgcagcagtgaaacaaatcactggagtgatgtctcgaagcagtttgactagcattaaccatttaaccattttatttaatacgttgtttattttctaggatagcagaatgattgatgacttgctgtaaataagtaaattactagccttcctcagtttgtttcaatttttatatttataaatctcatttgtttctatgttctaaa

SEQ ID NO: 11833 - DNA, 346 bp, Glycine max
  Clone ID: LIB3092-019-Q1-K1-E7
aatgaatcttgatgatccattaaatcaaaacgttgatactgcgagaaatgttctacaagagcttagaacacaacttcccccagaaatatttgatttgtcaaagcttgtgtgtggaacatatgtggactcgaggatgcttgtccttcgaggggttagtggatccgcgctcctatttacaaggtcttttgtggatagaaacggttctagttagttgttgttgtagctgattcaaaattattattcaactgtatattgtttcttttcgattgtatagcttggtcgattgtgatctttaaacattagatgtaaaaaatgtattttttttattaaattgtattttattgaa

SEQ ID NO: 11834 - DNA, 361 bp, Glycine max
  Clone ID: LIB3092-019-Q1-K1-F7
cgagtttttcttgcagaggtatccgagttttcgccgggtccaatgagggagagagtcgttgggttgatagggaagaggagcttgcccaattggattaaagctgctagcttgcacaatttgatatttacgtttgatgatatgtataagatcatgacgagggagaaggaacgtcctgtcaattcactattttgggctttgtttggggctatctatctttgttttgctatgccagaaatgtatcgtgttctttttgaagtcttcggaatggatccagatgccgaagattgccagcccaaattgcatacacaacgtgaagatgtggattatgtatctgctgaagttgaaagcaagctaaactggc

SEQ ID NO: 11835 - DNA, 350 bp, Glycine max
  Clone ID: LIB3092-019-Q1-K1-G5
gttctatcagcttctttgggaaattgaatttttctttttcctcatggttaatttctgccgttccttacttaaattatgttgagtttcttttcttgattaactatatcataggctaactgattctcttttctacgcatggatgcagtacccactaggtgctgaatacaaacatgtgcttcaaatgctacgaagaattataattatgcaatcgcatgactgacaaatattctctgaagaagtttgtacaataaatggcctaattcttatttccataacatataaagatgcatatctaattatctaccaaaaaaaaaaaaaaaaaggcagacgctctaaacgatccaagctta

SEQ ID NO: 11836 - DNA, 218 bp, Glycine max
  unsure at all n locations
  Clone ID: LIB3092-020-Q1-K1-H7
tatatatatatatatatatggntggcttactagttactaccataccatggacagtgactcgcagtgtatgcccattttgtacctacatttaataagttgttatagtatatattggtaacctaaggctgtatagactgtgtatatgaaaatgagtttggtggtgttggaggatgtgtgactgtttataaagttattatcacaatttgtagttttctttt

SEQ ID NO: 11837 - DNA, 448 bp, Glycine max
  unsure at all n locations
  Clone ID: LIB3092-022-Q1-K1-G11
tatattgttagcatttatggtttctgaattgaataaagttcattggttttcaaacattcatataatgcttagtttagttaccaaggggcaagggtttatttcaatttcatcaattgctctcttgagtctctccgttcaaacaaactaaattgatttatgttttagatccactggccagtgcgcatgaaaagcggatcagttggattcaagaaggaatatctcgatcaaccggacattcccagcacatggaaagcaatggaggcactctatgactcangcaaggcaagagccataggagttagcaatttctcttcaaaaaagcttcaagatctcatgaatatagcaagagtgcctcctgctgttaaccaagtggaattgcacccaggatggcagcagccaaagctgcatgcattctgtgaatctaaaggagttcatctgtctgtaagta

SEQ ID NO: 11838 - DNA, 273 bp, Glycine max
  Clone ID: LIB3092-022-Q1-K1-G7
cccacgcgtccggttttcatccttgtgcgcagattccatgcccattggtcagttgtgattattaaagaaagaaaattgtaatttcttttgggttgtcaagttgcaggatcaagtgtatgttacaacttactagcaacttttgtcattgtaggtatgaaaaattagaatagagctttatggaaataaatacaattctattgtcgattgtattatattgacttttgtagttatttctggaggtttggaaatcaatactatttgagtcatgcaaaa

SEQ ID NO: 11839 - DNA, 283 bp, Glycine max
  Clone ID: LIB3092-022-Q1-K1-H1
attcaatggaattacggatggggtttccttcgaaatcaatcttcgcctgtttatctcaacagggatagaaccaggcttaggttcgattgtctacattatgcttcttgatgcgtgagatgtaaattccactagaagctcttgttggagttaaggacgttgccctgacctagcaattcaataacctatattggatttttttttatccactagaagctcttgttcgagttaagagccatttattattcaatgagtaattttttttataattttgtagttttcatta

SEQ ID NO: 11840 - DNA, 253 bp, Glycine max
  Clone ID: LIB3092-027-Q1-K1-A12
taaatttttacccccctctctcccacgacgtcgtttcaccacacgcctcaccacgtacccacaagctgctctggttcaagcaccgtcttcaccaccacctttttcgcccaaagacagctctagctccattcagcttctgaccttgtcacgtgccaatgacctgcaagccgaggccagagccatggcacgtgccgccaatgccaccgtctacaacccgcaactcattgcgtccatgtacggttcccaacccatc

SEQ ID NO: 11841 - DNA, 441 bp, Glycine max
  Clone ID: LIB3092-027-Q1-K1-B5
tacaaatacgacccctgggacctacccggattggcttcctacggagagaaagagtggtacttgttttcaccacgggaccggaaatacccgaacggttccaggccgaaccgggcggcgggaaccggttactggaaggcaaccggggcggataagcccattggccaccccaaaccggttgggataaaaaaagctttggtgttttacgcagggaaagctccgaaaggggacaagagcaattggatcatgcacgagtatcgtctcgccgatgtagatcgctccgttcgcaaaaagaacagcctaaggttagatgattgggtgctttgccgtatttacaacaagaagggcacgatcgagaagttccaaccaagcagcgatgttgttgttagcccgaaaatggaaatcatcgagatcgaagacaggaagccggagattctgaaaagc

SEQ ID NO: 11842 - DNA, 322 bp, Glycine max
  Clone ID: LIB3092-028-Q1-K1-G10
taaaagagatctttttctgctctttgaagaaagaagggtctttgcttgattttggagatgtgtgtgctctcagatctcatcaaccttaacctctccgataccaccgagaaggtgatcgcagagtacatatggatcggtggatcaggaatggacctgaggagcaaagcaaggactctcccaggaccagttagcgacccttcagagcttcccaagtggaactatgatggttccagcacaggtcaagctcctggtgaagacagtgaagtgattttatacccacaagccattttcagggatccattcagaaggggtaacaatatct

SEQ ID NO: 11843 - DNA, 155 bp, Glycine max
  Clone ID: LIB3092-029-Q1-K1-B1
ccatgatcctattcatatgtttaaaccaaatctttaacataccgcacgatggatcgattcgcgtgttgtctctggcatataccatctctaattaaatcaataaaccccccccccatcacttttttgaaaaaaaaaaatcaccaataaattaatat

SEQ ID NO: 11844 - DNA, 459 bp, Glycine max
  unsure at all n locations
  Clone ID: LIB3092-029-Q1-K1-B9
cccacgcgtccgaagcggtgtgatgatggccatggaaggacaacaaccacaatcatcatcagggaatgggagagagtcagaggattatggagaagaagggagagaaaagggtcctcatcctcttgctcaagctggaactggctctttccctggaggcttcattgggaaacataggttgcaagcagccataaccaacctcaataaccaaattagtattttgcaggaagagttgaaaaaagttgaaacaattggtgaatcctccaccgtttgcaaggatttaatttcaagcgttgaatccactccagatcctctccttccattcactaaaagttcggtcgatgcgggttgggatcgatggttcggaagtgcccaccactctcgaaatcacaaacgttggatttagatattttggtttgcatttatttatantttttgggtactatgaacacttaatttaaa

SEQ ID NO: 11845 - DNA, 461 bp, Glycine max
  Clone ID: LIB3092-029-Q1-K1-D3
gacgggacatgatcgatggcaagcttttaagggtgaaagcacagatgccaacgatctaatcggtactctgaaacggacgtcccttatccagtttaagaccaaattacatgtgtgtttggcgcaataacaccaaagaagatgtttgtgactttaatgtcaaaggtcgatggttggaacgatcctgcgttgtttatgctggcgaatctaacaacatcgttgcccaaatgcataaaaagcacacggatgaaaatattttgattgggaaagaccatttcatggtcacggtttataccaacattgattatgccttcatagcggcgctaatcgcgattcttgacgagattaacgacgatgagaatgaagattagaggaaagctatacattcagcgaatctttttgcttgattaggtgattcgactttctaatttatgagtgaataaaaatatttaaattcgagctgc

SEQ ID NO: 11846 - DNA, 245 bp, Glycine max
  unsure at all n locations
  Clone ID: LIB3092-030-Q1-K1-B12
attctttgctgaaaaataactcacatatacgcatagatagtaggcatcaattttattaatacgatactatangctcacaatgcaacttataataatactaaggaatcatggactagcttaataaatttgaaaagcattcttatttgtaaaccactctccacttcgttactttatattctttctcattgtaagttgtaaccaaccaaaataatatattcttcctttttggagtaaaaaaaaaaata

SEQ ID NO: 11847 - DNA, 118 bp, Glycine max
  Clone ID: LIB3092-030-Q1-K1-B5
gcttggaagttgaccttgatttgctgaagaaaaagtcatctggatatgccacggccaagaatgtggctattcaagaggcgagcaatattttagacgttgaaaacataaagcacttaca

SEQ ID NO: 11848 - DNA, 374 bp, Glycine max
  unsure at all n locations
  Clone ID: LIB3092-030-Q1-K1-B9
ncgttgtcctcaaaatttttcgaaaatcattgaaaccccagaaggcctgacattgtagtgagggtgtacttncaacataaaattatctccaccactggatcacgactcgataatgtttgtttagaagctatttgactcaatgccgaacattttgtgatttttttccctcaactttcattgttttatcttttaagagctatcctgaggaccaatgatagattttttgacagggagaaacagctttaaaattgtttacagtgagggatgttctaaacggcaattattttgagaatctacatgtaagcaataagcggttttaacttttaaatgttggatttttcagtaaaaaattactgtttactccttgagaaatg

SEQ ID NO: 11849 - DNA, 372 bp, Glycine max
  Clone ID: LIB3092-030-Q1-K1-F11
tcggttttgggccttctaatttccaactttcaattttcctataacccaaagccaaataggaccaggctctaatacccagtgattgagttctggtaacagagttcaattgaaatttgaaacatgtattggcttcaaggagacaccctcggactatgaagcttcactaccgttagtttagcgattccgtctactaatccgtatcagtttccagatgtaaccatcgttaagttcgctgaggctcaaaccttgtgctgtcttataaacgagaaacacatgctggatcgtctaagttcgtcgtatactatgataattcgctgcttccgagactacttcagtttttagaaccgcgttaattactacagtttgttccta

SEQ ID NO: 11850 - DNA, 303 bp, Glycine max
  Clone ID: LIB3092-032-Q1-K1-E4
acgttagcttcttgcatcctcagagcttgccgtttacatttattcctttcggttctctgcttctgtggagtcattttcatttttacggctaccagaatgtccagctcatcggaatattccgcattttccggtccccgcccggacaagtcgtcggacgagaagtccactttctatcatacttgtaatctattgagccaatacatcacggaaaacagtgccttcggagaccttaccctcggaatgactcgcacccccgatacttacggttcccctgatacatcgtgtcactatgcaacaaccatg

SEQ ID NO: 11851 - DNA, 86 bp, Glycine max
  Clone ID: LIB3092-032-Q1-K1-H2
gatatacccaaaatacaattttagagaaatgtgataaatcttaaatgtaaaataagtcaaagggaataattaaaacagtacaaacg

SEQ ID NO: 11852 - DNA, 285 bp, Glycine max
  Clone ID: LIB3092-033-Q1-K1-C11
ctcgcatataaaatcctaagcttcaaaaataatcaccccaacgcccttaacaatattgtgtccctttacaaatgatcctgagccaacactcacaaccaatccacctttcaaatctctcacacgaactgcttcaacctgactccacacttccacaacccatagcactactactaaatcaaccatatccgtaaccctaaccctaaccttaattctcgccctgtcattcttaacaatcaatcgattttctataattacacttacaataaaacaccttaactctctctt

SEQ ID NO: 11853 - DNA, 380 bp, Glycine max
  unsure at all n locations
  Clone ID: LIB3092-033-Q1-K1-E11
agggcttttcaaagtttgagtttaccatctacacatattccctacaatangataattctgaagctttattccaagtttttgccttctccttcttgtgctcatatcaaacccagaataatttctacctcaactcttccaatggattcctccgcttcttcccactcccagtcacaatatgcacacagcgataaatcttaagcacgcactgatactattgactataaatctttaaccaatgaacagtgtcataaacctctcacaaatgaacatttctatattactcttcagaagggaacttaaacagctttcactgtcgaatactggaatactaaaacccccgtgatttaccattgtatatgattccacacacctttattcca

SEQ ID NO: 11854 - DNA, 353 bp, Glycine max
  Clone ID: LIB3092-033-Q1-K1-G5
aagaagtccaagcgccaactcaaacgcgaacgtcgtctggaacaaaagtcagcacgaaacggtgtgtcccgaaattgccaaaacaggggatgttagttcatgtccttataaagacaagtgtcgtttcagccatgatttggaagccttcaaggcacagaaacctgctgatctagaggggcaatgtcctttctttaaatctggaggcgcttgcccatatggtttagggtgtagattttcgagtacgcatgaagatggtgtgccttctgccaatctgaatggtcttaaaaataattccgaggtgaatgggttgagcaaacatgttcaaaagcttttgtggaaaaataagatgagct

SEQ ID NO: 11855 - DNA, 164 bp, Glycine max
  Clone ID: LIB3092-033-Q1-K1-H7
atacgattagatttttgttagcctgatttgtgtttattgtaactgggttgtgtgctttgtaacatattgcagccctgatccatttgttctcattgtgaaaaatgatctagcatcagcagtgctatagaaaaatttccaattcacattgcctctttttttaaaaa

SEQ ID NO: 11856 - DNA, 397 bp, Glycine max
  unsure at all n locations
  Clone ID: LIB3092-035-Q1-K1-A10
cccacgcgtccgcccacgcgtccggtttcctttgagcaaagctgaagatgcttgggctaagagcattgatggccatgctaccggaaaaatcattgtggagccataggtacagtttgcttggaattgttgtatttctagtttctacatatctggacaaggtttgtgtaaagctcatatgaaaatgaataactagggatatcgtatgccgtaaggattttaagttaatgtgttttcatttgatatttcgtactggtttgtatatgacaagatgctttatcaggcaactttttctcgtgtcctactcggttgttgtgctttcaggaaacgggttaagacgacgaatccacatgtgtataaatgagcaatacgcattccacaaaaaaaaaaantaaaanag

SEQ ID NO: 11857 - DNA, 422 bp, Glycine max
  Clone ID: LIB3092-035-Q1-K1-F4
acgctcctgtttgacaagtgagtcctaaaatctgagctgtctcattcactactagacagatccatgtgacggcttaaatactgtgattcctgtctgacacgtgattcctatttcattcactgtcctatagtccatatcaataatgttcatcaaaaagaccaacaatgacattacctgccttgctatctacagtatccaagcttacttcctcctgcattcgacgccatatctcttctataaggtcaccaatattcaataccctggccacctttttacaacatacttactggaagaagcataatacctccttacgaagggatcgatccctagattggaatttgaccagcagcactaatacctataacgcgagcaccaatcgcccttaccaacctatgctcaaccctactggcccatgtgacacc

SEQ ID NO: 11858 - DNA, 411 bp, Glycine max
  Clone ID: LIB3092-035-Q1-K1-G9
aatgcctcctttggctccaagtgaagagcttcaattgggtctcatatacttccttggtccgattcccaaatcacgaatgccactttctctgcaggacttgggagcactagccatcaaggctaatgcagctcttgctgctgcaacacctaattatagctaccctatcttaaaacccaattcacaaaaaaagttccgtacgcaccctactctttctaacgtttctctggtgtattcccattagattttgaagatgggtttaaaggttgaatgtgtgatattttcacccatgttgtaaaagctgtggatgatggtgaagtcaaaggatctaactcatttgattgagtaaaatgcatgaagttatataaactccctgcactatattccaattggacccgtttaaaaaaaaaagga

SEQ ID NO: 11859 - DNA, 312 bp, Glycine max
  unsure at all n locations
  Clone ID: LIB3092-036-Q1-K1-C7
cttggaactgcctgactgtgtctccaccacaattcccctgtttggttttgttccttctctggttggccttgttcctatgtttgtgaattttcctttcctgtctggtaagagtactacttggattggtgattaaatgttggactccggtgacaccattttacggtaaaaaaaatggcaaaacaataatctaatgcatcttgcttactcatacagttganaaaaaaaaaaaaaaaaaaaaaaaaaaaaaaaaaaaaaatataaaataataaaaaaaaaataaataataaaattaaaataaattaaaaatatttt

SEQ ID NO: 11860 - DNA, 318 bp, Glycine max
  Clone ID: LIB3092-036-Q1-K1-E9
gagacatcaaccttgtcagttaaggataaggaggagaaggaaaaaagatgcgagtttgtgcaagggctgttgctgtccaccatacttgatgacaatttataaaggaaattcatggaggtggctgcttcagtagtgggcgaattcatatgcggtacctgctatgtatggtttgcctgatgaaattgtctatgtatttgatcagagtggaataataagtagtagaaaatgaatgtaatttatgttatatgtgaactgatgtttttagttcaagagtttcatcatctcctttaatctcagatcataaagcttaaatgaaaa

SEQ ID NO: 11861 - DNA, 381 bp, Glycine max
  Clone ID: LIB3092-036-Q1-K1-F5
taataacatttctaatctcattctccttctgttcaaacactctctctcatggcatcagataagaagattaggatcggcatcaacgggtttggaaggattggccgtttggtggccagggttgcccttcaaaggaatgatgttgaacttgttgctgtcaacgatcctttcatcaccactgattacatgacatacatgttcaagtacgacaccgttcatggccagtggaagcattttgatgtgaaggtgaaggactctaagacccttctctttggtgagaagcccgtcaccgtttttggaatcaggaaccctgaggaaattccatggggtgaggttggtgctgattatgttgttgagtcaactggtgtattcactgacaaggac

SEQ ID NO: 11862 - DNA, 319 bp, Glycine max
  Clone ID: LIB3092-036-Q1-K1-F8
cccacgcgtccgcccacgcgtccggtttgctaacgtagaggactctgcaggccacgtagggcgtttgggagtgagtttaattaccactttgtctcttggattcgcttacttacttctccttttgtattaattaggtctactcgtgcgtcacgctttaccttggttgtaataattttatgattgttgaatgtgcatcagtgcatgttcccccgcgcatgatttctttttgttttactcgtacgtgtcgttgtttcttattggtctttggacatcttgtatatcttaataaataaaagattgttgtttttttatttcaaaa

SEQ ID NO: 11863 - DNA, 66 bp, Glycine max
  Clone ID: LIB3092-036-Q1-K1-H7
aaaaaaaaaaaaaaaaaaaaaaaaaaaaaaaaaaaaaaaaaaaaaaaaaaaaaaaaggggggggga

SEQ ID NO: 11864 - DNA, 314 bp, Glycine max
  Clone ID: LIB3092-037-Q1-K1-H5
ctaatatatatccacatcatgtaacaaaagtcatggagactctccacaaccctgtacttcaggctctaacacaatgtagcgtgtaagtaaatgtcgcccctcgtaattcatctgcaatgacacctagtatgatgtctttttttttcttttctttttaaaattgttttctaaaggtgcttgtttcatgttgaaatgaagggagcaatggggggcagggtggtgtgatgctggattgaggggctaatgtgtttatgttcccataatgataggaactgttttttgtcaagcaatgcaattttctcacctttcctttt

SEQ ID NO: 11865 - DNA, 313 bp, Glycine max
  Clone ID: LIB3092-038-Q1-K1-A2
tctggtgaatggcttatgatttggtaggaaatctgttgggttgtccagcagtgtcatttcaatccatggaaaggttggatgattaatctgagtttgtaatctgagggaagtgaatggctgattgatctgttgaggtaggttcttggagatcattattttgagcatcatattctttttctgtaagtagtttatctgtttgaacagttgtattgctgaccgatggttataaaaacatatgggatctttccctaaatatgatgtacagtatcttactgttcccttatgctatattactgtacccttattagtaaaa

SEQ ID NO: 11866 - DNA, 280 bp, Glycine max
  unsure at all n locations
  Clone ID: LIB3092-038-Q1-K1-C6
tcgattattgtatgtacagaatgggctgagtgtatcattgatgtncgtatttcttcgagtcaaggtcaatttaatgggcagtctgtttctcattaatctccagacaaaaaatgctaccttgtttggtatttttagcttccatatggcatgaaaaattccttctgtgttatcatctttttggttcttgtccaatgattggtattcacttctaactgtgtgttttccagtggtatcatttgtccatacccatttatccaattgttggagatttatattaaag

SEQ ID NO: 11867 - DNA, 245 bp, Glycine max
  Clone ID: LIB3092-038-Q1-K1-E10
cccacgcgtccgatcagcatatgtgcatcatgtagcttctgggtttgaagtatcaagaagaatctttggtgccattccagatagcttgcagccagatgaagagctacgcaaggagcttgggttgactgatgcttccacgaaataaagttaaagaaaaatgatgttggaatgctgtgatgttaattaaaatttgtagagattctatcttctatacatatataactaattagttacccttgcattta

SEQ ID NO: 11868 - DNA, 195 bp, Glycine max
  Clone ID: LIB3092-038-Q1-K1-E8
tcgattttatttaaggcattgatcgctgaatttaatagcgattcttgaaaagaacatacaacagtgaagagaagtgcagcatccttcaaatgtgattttgttttccttttctcattttttgtgatcaagtctcgtttgtgcagttttgaatttcaacccttgcgaacaaataaaggtttatagttcataaatttt

SEQ ID NO: 11869 - DNA, 302 bp, Glycine max
  Clone ID: LIB3092-038-Q1-K1-F4
tggtcatgtttattgtcacttggtgatgctgtgtcaggtgccgctgcagtttatttgctggttagttttgatacatgatgcttatacgtttaacagagttccctgctggtgcaagaaaaaattctgcttctttcaattgtaaaatactatagtatagttattctctcatgtctttctcttaggtattcatatcgtttaggcaataatgttattgatagatgtggtttaatgctgaacaatattactgaattaagtcttgtgcctttcactttggctttagttgtttaaaaaagaaaagttag

SEQ ID NO: 11870 - DNA, 348 bp, Glycine max
  Clone ID: LIB3092-040-Q1-K1-B3
aaaaaaaaaaaaaaaaaaaaaaaaaaaaaaaaaaaaaaaaaaaaaaaaaaaaaaaaaaagggaaaaaggaaaaaaaaaaaaaaaaaaaaaaaaaaaaaaaaaaaaaaaaaaaaaaaaaaaaaaaaaaaaaaaaaaggggggggccgttttaaaggatcaaagtttacttacgcgggtttgcaaggtaatattttttttttagggccaccaaaattaaattaatgggccggggtttaaaaacgtggggatgggaaaaaccctgggtttaccaaattaaatggctttgaagaaaatcccctttttgccagttggcgaaataccaaaaaggcccaaaccaatcgcctttcc

SEQ ID NO: 11871 - DNA, 432 bp, Glycine max
  Clone ID: LIB3092-040-Q1-K1-C11
aaagcttgggtaggcctggtggtattgctgtgtttgattgtcacggccatcgccgaacaatgcggtcgtcaagctggcgggcagacatgtcccaacaacctatgctgcagccagtacggttggtgtggaaacaccgaagaatactgttccccttctaagaactgccagagcaactgctggggaggcggcggcggtggcggtggcggcggcggcggtgaaagtgcttctaatgtccgcgccacatatcattactatgagccagagcaacacgggtgggacttgaacgccgtgagtgcttattgctcaacttgggacgctagcaaaccttactcatggcgcagtaaatatggctggaccgctttctgtggtcccgttggtcctcgtggccgtgattcttgtggaaagtgcttgcgggtgacaaatacaggaaca

SEQ ID NO: 11872 - DNA, 432 bp, Glycine max
  Clone ID: LIB3092-040-Q1-K1-C2
gtggaatttgaagagggtactataggcattgctttgaatttggaatccaaaaatgttggtgttgtattaatgggtgatggtttgatgatacaagagggaagttcagtaaaagcaacaggaagaattgctcagatacctgtaagtgaggcttatttgggtcgtgttataaatgccctggctaaaccaattgatggtcgaggagaaatttcagcttcggaatctcgattaatcgaatctcctgctcccggtattatttcgagacgttccgtatatgagcctctccaaacaggacttattgctattgattcgatgatccccataggacgtggccaacgagaattaattattggagacagacaaacgggtaaaacagcagtagccacagatactattctcaatcaacagggacaaaatgtaaatatgtgttatgta

SEQ ID NO: 11873 - DNA, 423 bp, Glycine max
  unsure at all n locations
  Clone ID: LIB3092-040-Q1-K1-E1
gcgcccacgcgtccggctttgtgaaggtgatgaaggtttccagatacggtcgtttgttctaaattgttagcttgagctgactttgcacacagtttgggatgaatatcttattcattgatacaaatttgtcgatgacctaataataccattaagcgttcattagtgccatctgagatgtatttctattgctgaagtgcggggagaaaaaaaagaattaaaaaagcatgatgattttgcccccccccaaaaaaaaaaatgaaacatggtgattgatttgttttgtaaaaaaaaaaaaaaaaaaaaaaaaaaaaaaaaaaaaaaaaaaaaaaaaaaaaaaaaaaaaaaaaaaaaaaaaaaaataaaaaaaaataaaaaanggggggggccgttttaaaggatccaagtttacgtacgcgtgcttgc

SEQ ID NO: 11874 - DNA, 403 bp, Glycine max
  unsure at all n locations
  Clone ID: LIB3092-040-Q1-K1-H3
taaaagtgttggtgttgaggctcctgcagtgcagatcaaaaggccaagttgccccacttcttaaaaggcatgggagggtggtccttcaattgatgaaattttgccggccttgggtcttgaaaaggatcttataacttttcaagctgaagaaggtgatatgacacctctcaatcatatgaccgaggaagaactcaagggttatggccttcccatgggaaccaaaaaagaaaatcctttaacctctggagtcgaaagtataacatttagttatggaatgagattttataagctggatggtggtgggaggagatcaggatctaaaaaccaagtgtaatagcatagttcttggattatttgcgtttttaatatttcccctcactttntagacattaatcaagttaat

SEQ ID NO: 11875 - DNA, 128 bp, Glycine max
  Clone ID: LIB3092-041-Q1-K1-B4
cccacgcgtccgcacggattaaaacaatagtgaacattgtatattatgaacttgtgctgatgggctggtccatacacattctgacaagcccgtaattacaaactatataaaccaaatactctacaaga

SEQ ID NO: 11876 - DNA, 251 bp, Glycine max
  Clone ID: LIB3092-043-Q1-K1-B7
tttcaacctttttcagggaagaagtattctttacggggttaaattaaaatggccttttacttttaaagcaagttactttgttgatctatgcatggatcgatgtctattgcaaaaacttttatttatttattgtattataagcagtagatagaccagtagatgccacagaaaatacctttgattacttgtgaacgaagctcttgacgagggttgcaatcgtgtctgaatggtaaataaaaagatggataatt

SEQ ID NO: 11877 - DNA, 306 bp, Glycine max
  Clone ID: LIB3092-043-Q1-K1-E8
gaagctgcaacagaacttcagaacttctgggttgggttaaagatgttttccagcattgtgcggatcatgggatggggaggccttgatgagggaacttgatttcgtcagtaggatctttcatggtagtaaagacccgcggcggaggaaactgtattggaagtgtgatgatctcaaggaaaaatcgaaaagtggaaaagtggaatctaaggcaacatgcagggcaatattgatggtttttccaagagcttgagctggactctccaaagagcctgtaaaatgcagaaagtggaaggctaattgctcccc

SEQ ID NO: 11878 - DNA, 369 bp, Glycine max
  Clone ID: LIB3092-044-Q1-K1-C7
cccacgcgtccgcggacgcatccccatagaactatctcgcttcatcatgaatcggtaattcacgcacatatcatcctactacggctcaacaccgcatccatttcaaccaacttaaaaacagaagattctctatgatcaccatgatgatgcatacaaaagtcaatatgattgaacaaagtaccttccaattttgtaccaataaaatgacgtctaaccaattaccaataattagtataaaaaagtcatatgttctaatcacaaaaaaaaactcggccttatgactctttacatatcattaactaccaaattgattgaaatcaattaatacgacaatattactcatatgaatcatctcacattgacattcat

SEQ ID NO: 11879 - DNA, 202 bp, Glycine max
  Clone ID: LIB3092-045-Q1-K1-E7
ctcggtggatctgatgtcgagagcatataaattatatatatctaactcccacctcataaatttgtattcctccgtttatacggcatttctattatgatgattcttgtgactactgaattcccttgttataatgtagatgtagttagtgataattgatcctgtttcatttgttatgcaaaaaataaaaaaaaaagaagacata

SEQ ID NO: 11880 - DNA, 65 bp, Glycine max
  Clone ID: LIB3092-045-Q1-K1-G2
taacatcttattctactttatcctttaagatgctccaatctaaaaacggggttctactctgggga

SEQ ID NO: 11881 - DNA, 314 bp, Glycine max
  Clone ID: LIB3092-046-Q1-K1-C7
agatgatagaagtggtgtgttgcagcagggagggatgtttgtgttcagaggaaaacagctgctctatgcgaggaaagatgaagggacaggtgatcatgcccccttagatgatgtttttgatgtctgctgcaaagctccagtggcctaatgttgtactttataaaattttcaatttgcataagattaggaaatttcagtttaggaagatttgttttagtataccagatttctctgaatgatatcggtgacaaaatattgcaagttgtggatgatatgattaaatatcataaacaaatattataaagttcaatcta

SEQ ID NO: 11882 - DNA, 309 bp, Glycine max
  unsure at all n locations
  Clone ID: LIB3092-046-Q1-K1-G11
cgaattaagttaccttgcatanaaatctccaagaagtatgctctacaggtgtgaatgagggcgaacttaagagagtgaagtttttatgtgccccattcttccaccaagagcccatccacccttgaatttatttgggtctaacagtgggatccacctagttggtggcatcacatggtcaaaattttattggtgaaggaaaatatttgccttaaaggacataagaattgtccaaaatgagatattcttaaggaaaatgtttcatgaatatccagtatactatttaatacctttaacaactagaaagagtaa

SEQ ID NO: 11883 - DNA, 239 bp, Glycine max
  Clone ID: LIB3092-046-Q1-K1-G9
cccacgcgtccgaaataagtagtggtttactatactgtaatttaaaggttctctaggttcggtcttacaggttattgattattagattcggattctctcatgtggaggattctctcatgttccacatgagcagcatcctgttttgtaaatctaaatcacatgtttgtttaaagtgtgactaacaggtatccttacctcattattgagattaatttattttgaatgttacctttagtaat

SEQ ID NO: 11884 - DNA, 368 bp, Glycine max
  Clone ID: LIB3092-047-Q1-K1-B3
gcgggcacgcttccgcccaagccttccgtatgtgtttgaagatttccactttgttctgctttcgattgtgatggtgcacacaacaaattctttagtgctcggtacaagattcgtgaggggccagcaatgaccacatctgttctactcccatctccttcatgtgctgctatactgagcaaagggactaataaaatttgcactcgtgcttgatttcactcactttaatcccatgtgaacaaaggattcagagtgagagctgttaaagaaaaaacagaggaaattgaaagttcttcacagccatcttcatctgaggaagttacaaagaagtatggccttgaagctggtctttggctgattttcagctcaaa

SEQ ID NO: 11885 - DNA, 225 bp, Glycine max
  Clone ID: LIB3092-048-Q1-K1-F1
aaaagattttagttttctcgaggggaaacatcttagttctgtcataatggtacggtttcttgatttaaaatgtagctaacgttgaatccttgtcctgttgtcttctctaaggttgattgtgcaaagcattgtatagaacagttggctgcactaaggagcctaaagaaagttcgtttcaaattcctagtactagtaaaagtcacattgacaagtactcaagtaaaa

SEQ ID NO: 11886 - DNA, 418 bp, Glycine max
  Clone ID: LIB3092-048-Q1-K1-G2
ttcggaaccaatggctgccaccgaacacagactaagcttggaacctgagaaaaagaaccttctcagacaccacaccgagaagcacttcacagccggcgaaatcgtccgcgacatcatcatcggcgtttccgacggcctcaccgtccccttcgccctcgctgccggactctccggtgccaatgccacctcctccattgttctcaccgccggcatagccgaagttgccgccggcgccatctccatgggtctcggcggttatttggcagcaaaaagtgaaactgatcactacgccagagagttgaaaagagagcaagaagaaatcatcgccgtgccagatactgaagcggcagatgtagcagaaacactggctcagtacggaatagaggcacatgaatatgcacctgtggtgaatgctctc

SEQ ID NO: 11887 - DNA, 291 bp, Glycine max
  Clone ID: LIB3092-048-Q1-K1-H10
tgtcaacgtctccttaggccttgaccagaaactatgctatttagataaatcaaacatttgtgactatgttatcttatagttgacatttactaaatagcatagtttctgtcaacgtctccttaggccttgaccaatgactccgctggctatcgctgctgcgcactgtctttccaagaacaagtttctggtctttgcctatcctatctgatttaattacgtggacaatgttggaaacattgatgtgagtgaatatgaaaatggaaaatggaagaagtttttaatttcctaaaa

SEQ ID NO: 11888 - DNA, 382 bp, Glycine max
  unsure at all n locations
  Clone ID: LIB3092-048-Q1-K1-H4
tattgatgccgttctggaacttggtgaagctcatggcgaccccttcaactgctcctgcttggtttggcggtggtttattgggttatgtaatgtatgattgcacccattattacttgcaccatggtcagccaaagactgaagtgccccgaaatctcaagaagtaccacttgaatcatcactttcggatccaggataaaggctttgggatcacttcatcactatgggataaagtttttggaacacttnctcctaaaatggatgccaaaagtatgtaaattactgtcaaggatagcatatgttctttggttaaaataatatcaaagtcaggaattcctgcttttatttatctaatttatttgaccccccaatcattgatgttttc

SEQ ID NO: 11889 - DNA, 72 bp, Glycine max
  Clone ID: LIB3092-049-Q1-K1-A11
cccacgcgtccgcccacgcgtccgcccacgcgtccgcccacgcgtccgcccacgcgtccgcgcacgcgtccg

SEQ ID NO: 11890 - DNA, 415 bp, Glycine max
  Clone ID: LIB3092-049-Q1-K1-C9
aggacgcgtgggaaaactctccgatcacgaaatggcatccaccgccggcgcagccgcgaggtctattttccgttcatgttccgctcgccgtgcctcgttccgtctcggctccgatgctaaagcggctcggtctccgttccgtgtcgctttcaacaaacctctctcgcaatctacactcaggtgtcccgttgaattgagcttttgtgtggaatccatgctaccgtaccatagcgcaactgcttctgctttgatgacttcgatgctatccgtctatcgccacagctatggttggcttcctgaaggtagcttacaacatctgtaggattccttgtgttctttcttcaattgaattttcgggcacagagaagactatttgaagatcaagaagcaaggttggcatgacatggacctcttt

SEQ ID NO: 11891 - DNA, 400 bp, Glycine max
  Clone ID: LIB3092-049-Q1-K1-F11
cccacgcgtacgctaagctgtggatgactactttcccatccctcagcgccagactgaactggcctttttgctggccattgaggatgttttcaccatcaccggtcgtggaaccgtcgccaccggaagggttgttagaggtactattatgattggagagactgttgatattgttggtgtgaaggagactaggaacaccactgttactggcgtggaaatgtttcataagattctggatgaggctttggctggcgacaatgtgggcttgatgcttaggggtattcagaaaactgatattcacagagggatggttttggctaagcctggaaccattacttctcacaccaagttttctgcaattgtgtatgactttaacaaagaagagggtgggaggcactcttcc

SEQ ID NO: 11892 - DNA, 458 bp, Glycine max
  Clone ID: LIB3092-049-Q1-K1-H6
gatgacactgtcattcttgatggagcgggtgacaagaaagcacttgaggaaagatgcgagcagattaggtcagcaattgaaaacagtacctcagattatgacaaggaaaagttacaggaaagattagccaagctttctggtggtgttgcagtgcttaagattggaggagccagtgaagctgaagttggtgagaagaaggatagagtgactgatgcattaaatgcaactaaggctgctgtagaggagggcatagtgcctggtggtggtgttgctcttctatatgcatcgagagagttggataaacttcaaactgctaacttcggtcaaaagattggtgtccagattatccaaaatgctttaaagacacctgtgctcactattgcatcaaatgcgggagttgagggtgcagttgttgttggcaaactattggagcaagagaatcatgatctaagatatga

SEQ ID NO: 11893 - DNA, 235 bp, Glycine max
  Clone ID: LIB3092-050-Q1-K1-G12
cccacgcgtccgcagacattgaaatttatgttccatgtaaattatatcaaagtattgaggcttgtggtggcggggattctgttggtacagttaattttcaccattattgagaaatgaggggttgatgctactgatcatgttcttgacatgactggccatgcatttgtttgttggtctagttagcttttatgtatatgtatctgcagaatcttcagagttttggtatcattatgaa

SEQ ID NO: 11894 - DNA, 235 bp, Glycine max
  Clone ID: LIB3092-050-Q1-K1-G6
cccacgcgttcgcagacattgaaatttatgttccatgtaaattatatcaaagtattgatgcttgtggtggcaggtgttctgttggtacagttaattttcaccattattgagaaatgaggggttgatgctactgatcatgttcttgacatgactggccatgcatttgtttgttggtctagttagcttttatgtatatgtatctgcagaatcttcacagttttggtatcattatgaa

SEQ ID NO: 11895 - DNA, 359 bp, Glycine max
  Clone ID: LIB3092-053-Q1-K1-B4
tattaacacacacaaacagaggctacgtacgatcaaattaattaaaatggcggaagtgaggaacaaacaagtggttctgagggactatgtgagtggttttcctaaggaatccgacatgaacataattgaaggaaccacaatattgaagcttccacaaggttccaatgatgtgcttctaaaaaatctctacctttcctgtgacccttacatgagaatgctcatgaccaaggtggaaagcctcgacgtgtttggcacctatacacctggctctccattaacagggtatggagtgtccaaagtcctataatctggacacccaaattacaagaaaggtgatttagtgtggggatctacaaaat

SEQ ID NO: 11896 - DNA, 184 bp, Glycine max
  Clone ID: LIB3092-053-Q1-K1-D1
aaaatggataaagattgcttttgattccagttgtttaattgtcaactgtttaagaatagcggtgttgcaaagtagagactactgtgtggtgttgttgatttattagtagagtataaaattaaggatgttttgtcaatgtgtgatgctacatattttctactttgatagtttcctgttcataaaa

SEQ ID NO: 11897 - DNA, 345 bp, Glycine max
  Clone ID: LIB3092-053-Q1-K1-D11
cccacgcgtccggaattctcagatttgcggggcgagatgatgcagcagccaggacccggcgtggcacctcggaccatgggccagcagccgccgcaacagtaccagcagcctccgccgcagcagcagcaaccctacgtcatgatgccgccgcaggcccaggccccgcaggccatgtgggccccctgcgcccagcctgcgccttagcagcaggccgccagcgccgacgaggtccgaaccctctggatcggggatctgcagtactggatggacgagaactatctctatacctgctttgctcacaccggcgaggttacattcgggtaaagtaattcgaaacaagcaaac

SEQ ID NO: 11898 - DNA, 382 bp, Glycine max
  Clone ID: LIB3092-053-Q1-K1-D8
ccaacacttactctttatcattgctatacctcatcaagcctgttttgaatataccgggagtgttgctcaaaagtgttggacaaccacatctctccaccttaaaaaaaatggcgcccgttctaaagattccatctttacatactcttgcattactacaatattaactgctacaatcacgataccttaattcaaaccactacccgaagctttacaacgattatactggtaataccctgctgtttcacaatttaatcgcccatcagctcatatgctctttcacacaatggcgtactatgcattaggcccgcaccgatcctccttctctacaattgctcactctatttgcttaatgggaccctccctataccggttcatcaatctc

SEQ ID NO: 11899 - DNA, 241 bp, Glycine max
  Clone ID: LIB3092-053-Q1-K1-E5
ctaacttgcccattatgcacgtcattgctaaaaccagctgatctgcggacctttggagagtggatcaacaagtctgttttttcagttgttttaagctcattttctttggcttgttgggtcatgtttttgagtcaaaatcttcctggaaaatgtcacctctggtttggtaaaactttccattaatgaaattgagatcgataaaagaatgaagatatataatatatatatatatatggccaaa

SEQ ID NO: 11900 - DNA, 241 bp, Glycine max
  unsure at all n locations
  Clone ID: LIB3092-053-Q1-K1-E6
ctaacttgcccattatgcacgtcattgctaaaaccagctgatctgcggacctttagagatgtatcaacaagtctgttttttcanttgttttaagctcattttctttggcttgttgggtcatgtttttgagtcaaaatcttcctggaaaatgtcacctctggtttggtaaaattttccattaatgaaatttgagatcgataaaagaatgaagatatataatatatatatatatatggccaaa

SEQ ID NO: 11901 - DNA, 362 bp, Glycine max
  Clone ID: LIB3092-053-Q1-K1-H1
accaagagaggtgggggtgctagtttctctaagccatccattgccatcctcgtcgctgcatcgacacacgctctcgccgtcgccatgactgagcagatgacccttcatggcaccctcaagggccacaactgctgggtaacccagatcgctactaccccgcagttcccggacatgatcctctccgcctctcgagataagaccatcatcatgtggaaactgaccagggatgagaccaactatggaattccacagcgtgctctgcggagtcactcccactatagtagtgatgtggttatctcctcagatgaccagtttgccctctcatgctcctgggatggaaccctgcgcctttgagaatctac

SEQ ID NO: 11902 - DNA, 262 bp, Glycine max
  Clone ID: LIB3092-054-Q1-K1-A6
atttaatgtagccggtgggcatcatagaaaagggactggagtcatattactgacatcatctatcacatgtacctactacaactccttctcagtgccttatacgcctatcgtttagacaattcctatgacaaacaactctcatccatttataccttgtatttatgaatatcatgtcatagctcaaacccagaaagaccacttcactaacggacacattttccatacttactacgctacacattgacttataatcataaaccac

SEQ ID NO: 11903 - DNA, 190 bp, Glycine max
  Clone ID: LIB3092-054-Q1-K1-C11
tatcaacctataggctatatatagcaaatgttttggcaatagtcttcaagactatgtgtcgacttgtgaaatcacattgtgtgttgcatttccgtagtcagtgttactggtaatgtgaatattgcgtacctaaggccttgtcacttctatcagtctatatataataaaattgtggcaacaatttatgttt

SEQ ID NO: 11904 - DNA, 199 bp, Glycine max
  Clone ID: LIB3092-054-Q1-K1-D4
taagatcctccaatcacagcctagcgggcagtctacacaactcgtaccgacactcacacacagcagaatccatgccctgctgagacgcttcttgtttcgcttgaacaaccctcggttccttccgaaatggtgactgtaaccagttgcagattaatgcctctgaactcggagacattgcgcgccttcattgacatgattg

SEQ ID NO: 11905 - DNA, 397 bp, Glycine max
  Clone ID: LIB3092-054-Q1-K1-E11
ccaagggaaggggtgcctcaactggttatgacaatgctgttgctttgcctgctggtggcggaggagatgaagaggaacttgctaaagaaaacaacaagagtgcttcttcttccaagggcaaaatcaccttgagtgtcaccaagaccaagcctgagactggtgaggttattggggtcttcgagagtgttcagccttctgatactgatttgggggctaaagctcctaaggatgttaagatccaaggcatctggtatgctcagcttgactcatagaccctttttcttaatgctgtatttctactttcttgtaactcccccagttggcgaagcactcagagcgttatcacgtgtgtatattatattgacttcgattataatgcttaaaattaaaaatgtcc

SEQ ID NO: 11906 - DNA, 189 bp, Glycine max
  Clone ID: LIB3092-054-Q1-K1-E4
taaagaatgggcaacgtgtcaattccagcctcgcacaacggtgttctccatactcattttccgagcgtccaaactctcacgtggcacccctacaccttcaacgctcagaacttctcactctgcagaaactgagttacatggacctcatgacactaaggcaggatcgcttaatgtcaaagtaatctaaga

SEQ ID NO: 11907 - DNA, 402 bp, Glycine max
  Clone ID: LIB3092-054-Q1-K1-H9
tcttacattacaattcaacaccttaccactatctctactcataatcactcttaaaaataatactcacagaacttatataaataacggaacaacataacacttctcactcttataatttcttatcacaatcacttcaacataactcttcaaaatatcataaatatatttacttactttccaaacactgataaaagaaataaaaaagcccacacattcaacaattatatattaatcaacaaaatatttctacgattaaactctatcatcattgctcttacaaaccccaaatcatatactatcatcaacttataattactaaataacttctataaattatccttttcattatatcttgaattcttcataaaccaatatatatacaattcttccttcataatatat

SEQ ID NO: 11908 - DNA, 383 bp, Glycine max
  Clone ID: LIB3092-055-Q1-K1-A1
gctgcgagaagacgacagaagggtatatatattattaaactatgcataattcggaccatcgagctgacctataaaatcatgactactacttcaaaataatcatatttcatgttacaattttataatatttattatggtatgttggatgaggtatattaatgtgtgctttaatgttatatgcttataataaatataactaatttatactatcaactattatatcaaatatttaacataatagtttataatataatgttagcataatactatcgtaattttattataaatttcataatccaatatttataatgtatacgttatctgttacataaattaagattccaatacatattagctggtaaccgatcatgatgatatgcata

SEQ ID NO: 11909 - DNA, 117 bp, Glycine max
  Clone ID: LIB3092-055-Q1-K1-B5
tagagaagacgacagaatgggtcccagcaggaatatattcactgaattgcttgcctcttaggttggttcactctgaggcatcaccaattcgatgcattctgatcaaatgatcaaatg

SEQ ID NO: 11910 - DNA, 255 bp, Glycine max
  unsure at all n locations
  Clone ID: LIB3092-055-Q1-K1-C9
gcaagctgtattgctatcttcaacagaggcagctgaaatgatccttanaggtgattaaggaatgacggtgtctgcgaggaggagagaagaccgaatgtaaaatatcctgagggtccaactttggatgattggggtgccagcattttttggcgtaatatgagtgctgtgatattttgatatggtggatgtaattggaagaaacttggttgtaatgctaaaaatttgttaggtaaattttgatttgttttggaaccc

SEQ ID NO: 11911 - DNA, 376 bp, Glycine max
  Clone ID: LIB3092-055-Q1-K1-F5
tacggctgcgagaagacgacagaaggggtgtgcaaccaaatatagggtggtttataatgggggcaaagactagaagtccttaataagtccttattgtatgaacagccaaaaatggctagtatagatttaaaattgattttacgattttagtaataaatattacaagagtgtatagatataccattacatggattccaatgtacttaaacaaagaagcaacaattcatttctattgagtaaactttagttcatatgaatttagaaataataacaaacgcatgccaagactttgagtcacaataatacgagccaataatactctaatgatatgaacatgttggacgtacatgaggtatgttccaagagtttacattta

SEQ ID NO: 11912 - DNA, 128 bp, Glycine max
  Clone ID: LIB3092-055-Q1-K1-H1
acgtacggatgcgaaaagaccacactaggaggattcctcattaactacgctttcctgtcactgctgtgtttcaccgaatttgggcctatagatcataaccaaatcgtgttctcttacattggcaaaca

SEQ ID NO: 11913 - DNA, 164 bp, Glycine max
  Clone ID: LIB3092-056-Q1-K1-A9
taacatacaatcatttttcttcttaatcattatgtcttcttgatcaactggtacctttaggtgatccatctaatgacatgaataatctttttcaacaactcctcatcacgatggcactctcaagattctaccacctaatgaaacaatctcccactccactaaca

SEQ ID NO: 11914 - DNA, 326 bp, Glycine max
  Clone ID: LIB3092-057-Q1-K1-E10
ggtttctgcagcttcaattcaatcttttgccacaaggcgtaaactccctccgactccgtcccaacaacgccttaaacgtcaccaccttaatttcttcccgccccaaccggcccaccacacctttcgtcaaccccgccaccgcccgccgcttaactaaaacacaactatgcgctttccgggaaggccgtgccaccccttttttccgggaccttgggattccaaaaggccaacgggggcttattcttttccccaacctcattcaatttccccgtttgtgccttgccacgattttccttggggccattattaacaccaccaaacccctt

SEQ ID NO: 11915 - DNA, 86 bp, Glycine max
  Clone ID: LIB3092-057-Q1-K1-H7
cccacgcgtccgaaaaaaaaaaaaaaaaaaaaaaaaaaaaaaaaaaaaaaaaaaaaaaaaaaggggaaaaaaaaaaaaaaaaggaa

SEQ ID NO: 11916 - DNA, 383 bp, Glycine max
  unsure at all n locations
  Clone ID: LIB3092-058-Q1-K1-A3
tacacgcgtaagaactcgtcataatgattctaccaacaatgctgctataaactactgaggggtatatataaagggaggccaaacagttcatccaaactcgttcagtataaaagatccaagattacgtacacatacataccatcctctaactgttatctnaagcctccatactgcaactcactctaccgagattaacatcaacgctacatggcataaccctggatctacctatcataatcaccttgctactcacactcattatgacagctgacatactagcgaaaaatctcacaccaatcacacttcccatcatcactatcactctgaataccataagaaatgcaccctataacgttccattcagctcacactgaattcatcct

SEQ ID NO: 11917 - DNA, 371 bp, Glycine max
  Clone ID: LIB3092-058-Q1-K1-D2
gcaagctgtattgctatcttcaacagaggcagctgagatgatccttagagttgatgaaagcatcacgtgtgctccgaggaggagagaagaccgaatgtaaaatatcctgagggtccaactttggatgattggggtgccagcattttttggcgtaatatgagtgctgtgatattttgatatggtggttgtaattggaagaaacttggttgtaatgctaaaaatttgttaggtaaattttgatttgttttggaacccagtcgcacgccagtggattggggtgggtggcggagaaattttacttagaaccatttgttcctgccctgcaattagagttaattatgtctacttgaatttaaagacattatctttta

SEQ ID NO: 11918 - DNA, 414 bp, Glycine max
  Clone ID: LIB3092-062-Q1-K1-C12
cccacgcgtccgtactgctgcataagacctcagaagggggatcttagaccgctcatggaggcatcttgagaaaggacatgctttctattatgaagtctaagtcattaataaaatgaaaaaataattaatatgaaaattaaaagttattacaatcaaaagcagcaatatacttactaacatgaacgcatctaggaaaagtgatcctgtaaagtagtatcttcggatttcatctgagatcttctagagatgacagtctttcattacttgaatcgctcgattcatcaccttcagaccctactccggctactattctgccacgcacttatctgagtatgatacactttgcacctatatcatagccactgatgtgtatctagcatcagcattagaaaatcttataagtctagctactat

SEQ ID NO: 11919 - DNA, 517 bp, Glycine max
  Clone ID: LIB3092-002-Q1-K1-D9.F1
tattattcacaatgatgtaccaattattattaatattattgtaacaaacacatcatcatagatctcagacaaactcctagaatatatacattcccgaatgcaataacataaaatagccacaagctggagacaaattcagttgagacataaaaacactatcaagttggcatgcattagaaaatcacagagaccatgtagaattgagaattcctcaaccaattgactagcaaacttccttgaagcattgcattatttgctcctcttactattaggagttatccacttaaaccccccaccaaaacaccaatttttagacaatggacttttgttgagctcaatttttcaattggcggcttcagaatcattgtggttatcttctccatcaccaaacaatgcagcgccgtctgaagtaacttctatgtttcctatagactccaggtcaatcgaaccttcccctaactgtgctgtggccagcctcaacattatgttatgaataatgttgggttgtacagcttga

SEQ ID NO: 11920 - DNA, 594 bp, Glycine max
  Clone ID: LIB3092-002-Q1-K1-D9.R2
cccacgcgtccgatttgatcctgatacatgtgaatcacaagctaagtttggtcattctggtatccctagttcatcctctattttgaatttgacgtccaactcatgcaatgtgggaacttctgaatgtctggagcaatcagggtcaactgccaatgaaggagatgaaggcaccatcttttcgaaccgagagcctgatattattggaactcctgctaaaggaaaaaaattgcctcaggaagagctttctctacaacagaaattatcagttgcagatgtgacatgtacaatgtgcaagcaactgctctttcatcctgtagttcttaattgtggtcatgtgtactgtcaaatttgtgtcatcaacatagatgacgagatgctcagatgtaaagtttgtcaaagtccacatcctagaggattaccaaaagtgtgtttggagttggatcactttttggaggaacaatttcctgaagaatatggacagcggagagatgccattgaactacagcaaatcaaagtcaaacctgacaccccttcttcttgttcattggatggtggtaagaaaccagaaaaacagattggtggtctgatcctgac

SEQ ID NO: 11921 - DNA, 580 bp, Glycine max
  Clone ID: LIB3092-014-Q1-K1-C10.R1
cccacggtccgagagaaggtggtaccgccttcaattctctctctccatttctcatcctcatcatcttattatacctcttccatctccataacatccacttgtaaaaaaaacccattaatatatatcacacacacatgtatctctgagctccaatccaatccaagaccacaccttgtcgcgtcggacgaaccttggtgtctgtcttttttttttttttgtttcattagtttctccgaagagatgcggaagggcagaggaggaggagcctcggcggcggcggcggcggcggtgaacggatccgttttaaaggagcctcggtaccggggcgtgcggaagagaccgtgggggagattcgcggcggagatcagagacccgttgaagaaagccagggtttggttgggaacttcgattctgccgaggatgctgcacgtgcctacgacaccgccgctcggaatctccgaggttccaaggccaaaaccaatttccctctctcacctttttgctatcaacacccaccacggatcctttcttctacgctggttttcacgaccaccagaacaacagcaacaacaacaacgac

SEQ ID NO: 11922 - DNA, 597 bp, Glycine max
  unsure at all n locations
  Clone ID: LIB3092-014-Q1-K1-C10.R2
ccccgcgtccgagagaaggtggtaccgccttcaattctctctctccatttctcatcctcatcatcttattatacctcttccatctccataacatccacttgtaaaaaaaacccattaatatatatcacacacacatgtatctctgagctccaatccaatccaagaccacaccttgtcgcgtcggacgaaccttggtgtctgtcttttttttttttttgtttcattagtttctccgaagagatgcggaagggcagaggaggaggagcctcggcggcggcggcggcggcggtgaacggatccgttttaaaggagcctcggtaccggggcgtgcggaagagaccgtgggggagattcgcggcggagatcagagacccgttgaagaaagccagggtttggttgggaaccttcgattctgccgaggatgctgcacgtgcctacgacaccgccgctcggaatctccgaggttccaaggccaaaaccaatttccctctctcacctttttgctatcaacaccccaccacggnatcctttcttctacgctggtttccacgaccaccaaaacaacagcaacaacaacaacgacaaccttaacaaccc

SEQ ID NO: 11923 - DNA, 423 bp, Glycine max
  Clone ID: LIB3092-022-Q1-K1-C10.F1
aataacggaatacggtaacaactatggattcaagatactggaacaagaataagcttctccacagtcttgtgaaacttggtcgacatgcaccgattgcgaaccatggtgcaataatcaaactgttcagagaggctatatcttattctgtagacaaaaccgctatgcaactgtctagatcacttactaccaacatcagggttcgacaaaattattcccaataagcaaccatgatactaaacagtcacaagggatagttcacagtagcctcggctagattaatcatcacgacttatctgttgtaccacaatacacctttgctctcggaactttgatctggctccacataaatacactctcttgcctctctccacattgccttgacaaatggggtctcatgaaaccgataatactctcgcgaaatgg

SEQ ID NO: 11924 - DNA, 427 bp, Glycine max
  Clone ID: LIB3092-022-Q1-K1-C10.F2
aataacacaatacggtaacaactagcattcaagaactggaacaagaataggcctctccacatgcttgtagtaacttggtcgacatgcaccgattgcaaaccatggtgcaataatcaaaccgcacaaagaggctatatcttattttgtaaacaaaaccgttatgcaactgaatagatacttactaccaacattacggttaaacaaaattattcccaataagcaatcctgttactaaacagtctcaagggaaagttcaaagaatcctaggaatacattaattatcacaacttattgttgcaccaaaatacacctttaattttggtactctgatctggctacacataaatacactctgttgactctctccacattgccttgacaaaaggagtctcatcaaaccgatatatactctcccaaaatggcggac

SEQ ID NO: 11925 - DNA, 336 bp, Glycine max
  Clone ID: LIB3092-022-Q1-K1-C10.R1
gggctgacaaagcgtccgcaattttgggagagtattataggtttgatgagattcatttgtaaagggaatgtggagagaggaaagatagtgtatttatgtggagcagtttaaagtagagagagcaaaggtgtattttggtgaacaataagttgtgatgattaatgtagaggaggtttgtttgaagtttgtattgtgaatgtttagtatcatggttgcttattgggaataattttgttgaagcctgatgttggtagtaagtatctagagagttgaatagcggttttgtttacagaataagctatagcttctctgaagagtctgattattgcaccatgg

SEQ ID NO: 11926 - DNA, 422 bp, Glycine max
  Clone ID: LIB3092-022-Q1-K1-C10.R2
ccattttcggagagtattatcggtttgatgagacttcatttgtcaagtgcaatgatggagagaggcaagagagtgtctttatgtggagccagatcaaagttccgagagcaaaggtgtagttttggtacaacaataagttgtgatgattaatgtaaccagggcttattttaactttgccttgtgactgtttagtatcatggatgcttattgggaataatcttggtgaaccctaatgttggtaattagtctctacacaggttcatatggggttactttacagaataagaatagcctttctcaacaggttgatgtattgcaccatggattgcaatcggtgcatgtcgaccaagtttctcaagactgtggagaagcttattcttggtccagttcttgaattcaagttggtaccgtattctgatatt

SEQ ID NO: 11927 - DNA, 583 bp, Glycine max
  Clone ID: LIB3092-033-Q1-K1-F4.F1
aaatcaaacttctctcgtaatataaaatcaactaatattcttcaacattttcagcaatttcttcatctaacttttctacaaaagcctataaccttacaagggcttatttgtaagctagaacttacctcaagctatttaaaactgaacctaaacaacaccaagacttttgggctgcaaccatttaccatcaaatatcatgttaccaaccttaactagccccttctgaactcccaaaacaaacaacaactggaagagtgctggtacgtggtacttgaaaaggcaaaatatatttgatcaactatcaagtgcatcaatgcagaataagctctatacagaaatggtaataaaatattaaattctaaaccatgagggggaaaaatctccattcttttaattttcgaaagtaacagaacttacaactattgggaaatattggcttacaacatcccaaccccaaatacaatattctgaatgaaacaagcaaagcagccaattaaacttcatatcaaccatgtctatagcctatagtctatatgctacagtatctgacctgcttactctgacagatggcacttagagcagc

SEQ ID NO: 11928 - DNA, 597 bp, Glycine max
  unsure at all n locations
  Clone ID: LIB3092-033-Q1-K1-F4.R1
cacagagcacatttcaagatgagaagcaagtggaatttgactgttgcatgaaaccagaacagacacaagcatgtgctatgtacaaaatttgcagttgcaagtgttgtggagagaaggcagatgacacagactgtttggtttgtgattcatgtgaagagatataccatgtgtcctgtattgagcctgcagtgaaagaaataatacctcacaaaagctggtattgtgccaattgtactgctaatgtgattgaatctctccatgagaattgtgtgctatgtgaaaggttaaatgatgcaaagaccctggatgatgtaattggtgatggnagctttcctacaattgaggaaacacaaaatgaatttgaagagaattcaaattgcacctctgatggaattcaagtttccataggtgaggaaaaaacacccaattgcaagatatgtgaaaatgaagtggatggtggaaaaataaaaatatgtggccatcggttttgctccaataaatactaccatgtaaggtgtttaacaattaatcagttgaagtcatatggtcattgttggtactgcccttcttgtttatgccgggtttgcttaactgatc

SEQ ID NO: 11929 - DNA, 508 bp, Glycine max
  Clone ID: LIB3092-033-Q1-K1-F4.R2
cacagagcacatttcaagatgagaagcaagtggaatttgactgttgcatgaaaccagaacagacacaagcatgtgctatgtacaaaatttgcagttgcaagtgttgtggagagaaggcagatgacacagactgtttggtttgtgattcatgtgaagagatataccatgtgtcctgtattgagcctgcagtgaaagaaataatacctcacaaaagctggtattgtgccaattgtactgctaatgtgattgaatctctccatgagaattgtgtgctatgtgaaaggttaaatgatgcaaagaccctggatgatgtaattggtgatggaagctttcctacaattgaggaaacacaaaatgaatttgaagagaattcaaattgcacctctgatggaattcaagtttccataggtgaggaaaaaacacccaattgcaagatatgtgaaaatgaagtggatggtggaaaaataaaatatgtggccatcggttttgctccataaatactaccatg

SEQ ID NO: 11930 - DNA, 574 bp, Glycine max
  Clone ID: LIB3092-041-Q1-K1-H8.F1
cggcgccctttttttttttttttttttttttttttttttttttttttttttttttttggccaaaaaaattacactatcattcagcagacgactttacaattaatcacataagtcatgacaaataaatgaattatgattcgcatcccaaaaaatcgaaacatttgactacttggtacgttaaaaaaaaaaaactataatcatcactaactactaacacatggagggcttggcacgcaaaatttgacccaacccaaacccggatccgatccggattctgatatcgggttcggatataataaaattatccgaaccctgacccgcttagaaattccacaagaacgagtcctgaattatcaatccatccaagttctcttctccgaaattgaaacccggaagttcatgcaagaagaagtcccggctgaaatcgtcgaagctcggaaaatcggagaaatcgggcacaaaatcgcccgacccgaaatccgaaaacatatcagggaacgcccagtaactaattcggcgtcgttttggacgtcacgtctgagagaggaggagatgatgtatccgtatccgaaat

SEQ ID NO: 11931 - DNA, 471 bp, Glycine max
  Clone ID: LIB3092-041-Q1-K1-H8.F2
ggccaaaaaaattcactttcattcagcagacgactttacaattaatcacataagtcatgacaaataaatgaattatgattcgcatcccaaaaaatcgaaacatttgactacttggtacgttaaaaaaaaaaaactataatcatcactaactactaacacatggagggcttggcacgcaaaatttgacccaacccaaacccggatccgatccggattctgatatcgggttcggatataataaaattatccgaaccctgacccgcttaaaaattccacaagaacgagtcctgaattatcaatccatccaagttcttttctccgaaattgaaacccggaagttcatgcaagaagaagtcccggctgaaatcgtcgaagctcggaaaatcggaaaaatcgggcacaaaatcgcccgacccgaaatccgaaaacatatcagggaacgacccagtaactaattcggcgtcgttttgg

SEQ ID NO: 11932 - DNA, 503 bp, Glycine max
  unsure at all n locations
  Clone ID: LIB3092-041-Q1-K1-H8.R2
cccagcgtccggaggaagtgggggaagtacgtgtncggaaattaggttacccaacagccgtcaaaggatttggttgggttcctatgacagcgccgagaaggcggcacgcgcgttcgacgctgccatgttctgcttacgtggcagcggcgccaaatttaatttcccgagtgacccacccaacatcgccggcggggggaacatgacctcctcccagattcagatcgcggcggcgcgtttcgccaattcggagccccgaaatgagcgttcggatcaacccgtggagtctttaacttcggatgaggaaacggcatcgtttccggtcatttcggatacggatacatcatctcctcctctctcagacgtgacgttccaaaacgacgccgaattagttactgggtcgttccctgatatgttttcggatttcgggtcgggcgattttgtgcccgatttctccgattttccgagcttcgacgatttcagccgggacttcttcttgcatgaac

SEQ ID NO: 11933 - DNA, 186 bp, Glycine max
  unsure at all n locations
  Clone ID: LIB3092-044-Q1-K1-E3.R1
cccacggtccggcaacgttgctttgnacgagggagcagtaacggctatgttataatttctgagtttgtgttgtagagagaagttacgttctgagaggccaagatggattttacttcgttcttgacgtccctggngacttccctttgtgatatttctggttttgatgattgtgtttgcgtttctgtc

SEQ ID NO: 11934 - DNA, 601 bp, Glycine max
  Clone ID: LIB3092-049-Q1-K1-G5.F1
gacgcggcagcctgttttcacggttcattctgatcaacccgcgagctgaatcgtaccggtctactcatctttcggcatttacccctccacattatcctatggctccggagtactgtttacgccattgtacggacactcactcatcagggtccgacagtcccatcacgatgctcactttatcactgtacactcgcgcaccggcatcgatcctggctctaatcccttttccgcctacgtgtatactcgttacatgcttcgcgctgtgttccgcatcccatgtcaggtcttccatggctggtcgttccatttcgcacactgcatccgatcatagttcgtttctctgtctgatattgttatccgttcagagttccactcaacgtctcttcattatcatcccccgtaaaccatcgcggcctctaatgcggttacctggctcggattaatccgccttcgtcttaaatgccaaccttctactcttcgcgaatcgtaccccgacggcgatcagtgcaccgtcaaaggaccgggaaagatcaggtctaacccttgggacctcgtacggttcgtcgatcagtgcctggctggacgcagtcactccgctgct

SEQ ID NO: 11935 - DNA, 473 bp, Glycine max
  Clone ID: LIB3092-049-Q1-K1-G5.R1
tgtcgacatacgagtccctagcagggatagctgacgacacgcgaagatgcagttaacgcctctgcccggttagacgcaaaaactcggctgacacctggcgatacggcgcgtgattgcaacatgatatcagtcaattacgcatagacagcagagctgaaccttatgaggtccagtccgcacaactgtggtaatcaaggcccttcagtcatcaatattctctatagatcattccagtgggtaacatgaactggttgaccacgttcgctttcaggtagaacaactttagggtaatataaaacgttccagagagaatagaatatctgtcgctccgagagtacttggttaaatacgtcattaatcatacaaagactagtattagcaatgacagtcagttatacaacttcgtgactgtgaaacacataagcgttaccgaagttaatagtattacagaagagcaccgtttggaaaaatgg

SEQ ID NO: 11936 - DNA, 422 bp, Glycine max
  Clone ID: LIB3092-062-Q1-K1-C5.F2
aagattggaaaaggaaaagagatattatctatctataatatttacaatgagcacaatttctatgtttctgtctatgctactactctctacaacctatacaaatgttaacaactaaaccaaaatttcaaggtaaacaattgaatcatctctctataaaagacaattcatataatcttcatgtcgagtgtcaacagaggccatgctacaaaattttcagcaccctgtttcttctgcttccaccaaaaagaacaacccactgacacctgcagagctaaaatacggtcttcaactgtatctctaacagttaaccgtaaaactgtgacaggacgagtttgtccaattcgatgtgctcggtctattgcctgatcttcagttgtaggattccaccatagatctagcataagaacatggcaggcagcaac

SEQ ID NO: 11937 - DNA, 590 bp, Glycine max
  unsure at all n locations
  Clone ID: LIB3092-062-Q1-K1-C5.R1
aaatcctcagttgagatggcaaagaagcttcctcaggaaaaacgattatgtcttttaaaatgtttagaggcatcattggccctctgtggtatctgtaatgaccctcctgaagatgctgttgtttcagtttgtggtcatgttttttgtaaccagtgcatttgtgaatatcttactggtgatgacaatcagtgccctgctccaaactgcaaaactcgactaagcacgccctcagtgttttccaaagtcacactgaatagttctttttctgatcagccttgtgataatttgcctgattactctggttgtgaagtggaggaatctgagttttgttctcaggctcagccatatgattcttcaaaaattaaggctgcacttgaggtgttgcagtcgttgtctaaaccacaatgctttgcttcccaaaacaattctgtgcagagcttngctggggaaagtaccgatggccttggtagctcctctagtgctgacagaatgaaatccttgaatgaaattcctgagagtcaaaatgtgcttgaggagagaagcctaataattcagttggtgtaggggagaagctatagtgttttctcagt

SEQ ID NO: 11938 - DNA, 589 bp, Glycine max
  Clone ID: LIB3092-062-Q1-K1-C5.R2
aaatcctcagttgagatggcaaagaagcttcctcaggaaaaacgattatgtcttttaaaatgtttagaggcatcattggccctctgtggtatctgtaatgaccctcctgaagatgctgttgtttcagtttgtggtcatgttttttgtaaccagtgcatttgtgaatatcttactggtgatgacaatcagtgccctgctccaaactgcaaaactcgactaagcacgccctcagtgttttccaaagtcacactgaatagttctttttctgatcagccttgtgataatttgcctgattactctggttgtgaagtggaggaatctgagttttgttctcaggctcagccatatgattcttcaaaaattaaggctgcacttgaggtgttgcagtcgttgtctaaaccacaatgctttgcttcccaaaacaattctgtgcagagcacttctggggaaagtaccgatggccttggtagctcctctagtgctgacagaatgaaatccttgaatgaaattcctgagagtcaaaatgtgcttgaggagagaagctctaataattcagttggtgtaggggagaaagctatagtgttttctc

SEQ ID NO: 11939 - DNA, 521 bp, Glycine max
  Clone ID: LIB3092-014-Q1-K1-C10.F3
ttcttctacgctggtttccacgaccaccaaaacaacagcaacaacaacaacgacaaccttaacaaccctcaaagaccaacttcaagtggcatgagtagcaccgttgagtccttcagtgggccccgccctcccaccacaaccacaaccaccacgacgccgtttttgaccactacgcggagatacccgcgcactccccctcttgtccccgaagactgccacagtgactgcgactcttcctcctccgtcgttgacgacagcgacgacaacatcgtttcctcgtcgtttcgacctcccttgccgttcgatctcaacgcgctgccgtttgatgatgatgctgccgtcgtggatgatgatctacgctgcaccgcgctttgtctctgatgattatcgtgcgatgatgatttttaatttctcattttttttatctcttcaacttgattttttgttattgctatgagggaaaaaatatattaaaaaaatgatcagatgtaagattatggtaatatgatcttaattctgtc

SEQ ID NO: 11940 - DNA, 444 bp, Glycine max
  unsure at all n locations
  Clone ID: LIB3092-014-Q1-K1-C10.R3
ggtgtcgtaggcacgtgcagcatcctcggcagaatcgaaggttcccaaccaaaccctggctttcttcacgggtctctgatctccgccgcngatctcccccaggtctcttccgcacgccccggtaccgaggctcctttaaaacggatccgttcaccgccgccgccgccgccgccgaggctcctcctcctctgcccttccgcatctcttcggagaaactaatgaaacaaaaaaaaaaaaaagacagacaccaaggttcgtccgacgcgacaaggtgtggtcttggattggattggagctcagagatacatgtgtgtgtgatatatattaatgnggttttttttacaagtggatgttatggagatggaagaggtataataagatgatgaggatgagaaatggagagagagaattgaaggcggtaccaccttctctcggacgcgtggg

SEQ ID NO: 11941 - DNA, 652 bp, Glycine max
  Clone ID: LIB3092-033-Q1-K1-F4.F3
tgccttttgctctttagcctctctagtcatgtctttccatgtgatgtatcaaaatggtcggaaaatctatgaaagttttacagcctaccaaaatatcagtcattcaaaaaatgcagcaaatgcaaaatactgtgtattaacagtcaacaaatatgaagttaaagtcactactaacaataactggaaggttaacgaagcccaccacaaaattcatgttctctgtaacttgatgtggcttgccgcctctttctcttcaaaattcagagtattggctgcagttaaaagcatgtccattgctccaccactttccaattcccgtgcacgtttattgttgtgtttcttttcaagattggcattggctttgcagcatcttcaccatttcttcttggcttgttaaactcatatgcctttttagcctggtggattgcttgtattccagcatcacattttctgcagaaccagttccctcttggaatagaagtcgcgggggtttcatgcaatagatgtgatatgcatgatcacagccatcacacagaacaatccgatcatcatcttgatcagttaagcaaacccggcataaacaagaaaggcagtaccaacaatgaccatatgacttcaactgattaattgttaaacccttacatggtagtat

SEQ ID NO: 11942 - DNA, 491 bp, Glycine max
  Clone ID: LIB3092-033-Q1-K1-F4.F4
gcaacaccgatggccacatatttttatttttccaccatccacttcattttcacatatcttgcaattgggtgttttttcctcacctatggaaacttgaattccatcagaggtgcaatttgaattctcttcaaattcattttgtgtttcctcaattgtaggaaagcttccatcaccaattacatcatccagggtctttgcatcatttaacctttcacatagcacacaattctcatggagagattcaatcacattagcagtacaattggcacaataccagcttttgtgaggtattatttctttcactgcaggctcaatacaggacacatggtatatctcttcacatgaatcacaaaccaaacagtctgtgtcatctgccttctctccacaacacttgcaactgcaaattttgtacatagcacatgcttgtgtctgttctggtttcatgcaacagtcaaattccacttgcttctcatcttgaaatgtgctctgtg

SEQ ID NO: 11943 - DNA, 698 bp, Glycine max
  unsure at all n locations
  Clone ID: LIB3092-033-Q1-K1-F4.R4
tcttgtttatgccgggtttgcttaactgatcaagagatgatcggattgttctgtgtgatggctgtgatcatgcatatcacatctattgcatgaaacctccgcggacttctattccaagagggaactggttctgcagaaaatgtgatgctggaatacaagcaatccaccaggctaaaaggcatatgagtttaacaagccaagaagaaaggtgaagatgctgcaaagccaatgccanatcttgaaaagaaacacaacaataaacgtgcacgggaattggaaagtggtggagcaatggacatgcttttaactgcagccaatactctgaattttgaagagaaagaggcggcaagccacatcaagttacagagaacatgaattttgtggtgggcttcgttaaccttccagttattgttagtagtgactttaacttcatatttgttgactgttaatacacagtattttgcatttgctgcattttttgaatgactgatattttggtaggctgtaaaactttcatagattttccgacattttgatacatcacatggaaagacatgactagagaggctaaagagcaaaaggcataatctgaagctgctctaagtgccatctgtcagagtaagcaggtcagatactgtagcatatagactataggctatagacatggttgatatgaagtttaattggctgctttgctt

SEQ ID NO: 11944 - DNA, 353 bp, Glycine max
  Clone ID: LIB3092-041-Q1-K1-H8.R3
cttcttgcatgaacttccgggtttcaatttcggagaagagaacttggatggattgataattcaggactcgttcttgtggaatttctaagcgggtcagggttcggataattttattatatccgaacccgatatcagaatccggatcggatccgggtttgggttgggtcaaattttgcgtgccaagccctccatgtgttagtagttagtgatgattatagttttttttttttaacgtaccaagtagtcaaatgtttcgattttttgggatgcgaatcataattcatttatttgtcatgacttatgtgattaattgtaaagtcgtctgctgaatgatagtgtaatttttttggcct

SEQ ID NO: 11945 - DNA, 683 bp, Glycine max
  unsure at all n locations
  Clone ID: LIB3092-062-Q1-K1-C5.F3
ctgcagagctaaaaacggtcttcaactgtatctctaacagttaaccgtaaaactgtgacaggacgagtttgtccaattcgatgtgctcggtctattgcctgatcttcagttgtaggattccaccatagatctagcataagaacatggcaggcagcaaccatattcagaccaagactagcagcctttaaagacataatcataactngaaacctcagggagagtgttaaaatctttaacagctttatctcttgcagtgactgacattgttccatccagtcttctatactggatcgacgaattcttaagacatgcttcaagtatatctagcatccttgtccactgagaaaacactatagctttctcccctacaccaactgaattattagagcttctctcctcaagcacattttgactctcaggaatttcattcaaggatttcattctgtcagcactagaggagctaccaaggccatcggtactttccccagaagtgctctgcacagaattgttttgggaagcaaagcattgtggtttagacaacgactgcaacacctcaagtgcagccttaatttttgaagaatatatggctgagcctgagaacaaactcagattcctccacttcacaaccagagtaatcaggcaaattatcacaaggctgatcagaaaaagactattcagtgtga

SEQ ID NO: 11946 - DNA, 508 bp, Glycine max
  unsure at all n locations
  Clone ID: LIB3092-062-Q1-K1-C5.F4
ttcattcaaggatttcattctgtcagcactagaggagctaccaaggccatcggtactttccccagaagtgctctgcacagaattgttttgggaagcaaagcttgtggtttagacaacgactgcaacacctcaagtgcagccttaatttttgaagaatcatatggctgagcctgagaacaaaactcagattcctccacttcacaaccagagtaatcaggcaaattatcacnnaaggctgatcagaaaaagaactattcagtgtgactttggaaaacactgagggcgtgcttagtcgagttttgcagtttggagcagggcactgattgtcatcaccagtaagatattcacaaatgcactggttacaaaaaacatgaccacaaactgaaacaacagcatcttcaggagggtcattacagataccacagagggccaatgatgcctctaaacattttaaaagacataatcgtttttcctgaggaagcttctttgccatctcaactgaggattt

SEQ ID NO: 11947 - DNA, 195 bp, Glycine max
  unsure at all n locations
  Clone ID: LIB3092-062-Q1-K1-C5.R3
ctctgttggcactcgnctggaagatatatgattgtcttttatagnaggcagattcaattgtttaccttgcaattttggtttagttgttaacatttgtataggttgtagagagtagtagcatagacagaaacatagaaattgtgctcattgtcaaatattatagatagataatatctcttttccttttccaatctt

SEQ ID NO: 11948 - DNA, 616 bp, Glycine max
  unsure at all n locations
  Clone ID: LIB3092-062-Q1-K1-C5.R4
agtgttttctcagtggccaaggatgctagntatactntgaagcatgtcttaagaattcgtcgatccagtatagaagactggatggaacaatgtcagtcactgcaagagataaagctgttaaagattttaacactctccctgaggtttcagttatgattatgtctttaaaggctgctagtcttggtctgaatatggttgctgcctgccatgttcttatgctagatctatggtggaatcctacaactgaagatcaggcaatagaccgagcacatcgaattggacaaactcgtcctgtcacagttttacggttaactgttagagatacagttgaagaccgtattttagctctgcaggtgtcagtgggttgttctttttggtggaagcagaagaaacagggtgctgaaaattttgtagcatggcctctgttgacactcgacatgaagattatatgaattgtcttttatagagagatgattcaattgtttaccttgaaattttggtttagttgttaacatttgtataggttgtagagagtagtagcatagacagaaacatagaaattgtgctcattgtaaatattatagatagataatatctcttttccttttccaatctt

SEQ ID NO: 11949 - DNA, 358 bp, Glycine max
  Clone ID: LIB3094-104-Q1-K1-F4
gcaccagtttcaccgcacgaatatcttgttgtttggagcgatccgagaaaaactctgtagacatgttggtttaccaggacctccttacaggtgatgagcttctctctgactccttccgttacaaggaaattgagaatggaatgctgtgggaagttgaggggaagtgggttgttaaaggagcagttgatgtagacattggtgcaaacccttctgctgagggtggaggagaagatgagggagttgatgatgcagctgttaaggttgttgacattgttgacacattcagacttcaggagcaacccgcattcgataagaagcagtttgttaccttcatgaaaaggtttatcaagaatttgac

SEQ ID NO: 11950 - DNA, 328 bp, Glycine max
  Clone ID: LIB3094-104-Q1-K1-F5
attgctgctgtttgcctattggtgtactttggggtctctaccctgctggatgcctcatctagcgatggccaaaaatcagatgaagagcagaaggaggcagaactagcagtttctgaattttctggaaatggtgctgggatactatctgctgctagcacagttgccagtacttttctcttagtttttgttgctgaatggggcgacaagtcatttttctccacaattgcccttgcagcagcttcttctccccttggagtcatagctggagcactggctggtcatggtgttgcaactttgctagctgtacttgggggttctttacttggga

SEQ ID NO: 11951 - DNA, 454 bp, Glycine max
  Clone ID: LIB3094-104-Q1-K1-F7
cccacgcgtccggactgcccaagatgtatcgacaatgttacggtgcgggccaaaaaaccatagtttttctgatcaacaatggtggatacaccatcgaggttgaaattcatgatgggccgtacaatgtgattaagaactggaattacactgggttgattgatgcaatccacaatggtgaagggaaatgctggactgccaaggtgttctgtgaagaggagctagttgaagcaattgccacagccacaggacccaagaaagactccttatgcttcattgaggtgattgttcataaggatgacaccagtaaagaattgcttgaatggggctcaagggtttctgctgccaatagccgtcctcccaatcctcagtaatcttcagaatttatcctatgactaaattgctgcagttgccctttagctctatgaaagtgagaatcatttgagatgatgccctt

SEQ ID NO: 11952 - DNA, 272 bp, Glycine max
  Clone ID: LIB3094-104-Q1-K1-F8
gtcttcttctctaaaataaaaaaccctaacttctgaacctttcaccgcatcgccaccgatgccctatctccactaatcaaagaaaagaaaatgagtagacgctcgagcagaactgtctacgttgggaatctacccggtgatatccgtgaaagagaagttgaagatttgtttctgaagtacggacacataacacacatcgacctaaaggttcccccaagaccacctggttatgcatatggagagtttgaagatgctcaagatgctgaggatgc

SEQ ID NO: 11953 - DNA, 444 bp, Glycine max
  Clone ID: LIB3094-104-Q1-K1-G5
gaagttgcgagagtgaagaaatggcgcaagacttggcattggatttggaggagcttcgccggctccacagcatcgccaaaagacctcgaaccctctctcttctctcctccgaaattcgtaacctcgaaaagttatcgtcagaggaagcttctgcgcagattccggcgccgatttcgaccggaactaaagtggcgccttcacctgcgctgaagtatgcggcactcgcgtcgttcagttgggaccaggatagtgacaaagttaagatatatgtgttaatggagggaatcgatgagaataaggttgaatccgagtttaagtcgatgtcattcgatgttaagttccatgatgttcaagggaagaactaccgatgtgcaatatcaaaattgcacaatgaggaagtaccagagaaatgcaaggttgtggtcaagcctaaaagggcaatca

SEQ ID NO: 11954 - DNA, 422 bp, Glycine max
  Clone ID: LIB3094-104-Q1-K1-G7
cccacgcgtccgcggacgcgtgggcggacgcttgggcttctcctgaatctgcatcgggggggtcctatatgaactttaagaaaatggaagttacatgtggctaagtcttaggaacttctatggcctactctgggatccgggcaatgtgtgagggaggatacaacttaggcagtttaagaaacaattggcagaaaaccagtaagaagaatcactgtgggagcagaacaactgttatggaatttgaatcacactggacaaatcatagaaaatcatctgctcatactgctcaagggaatccttctgcaacatcagttatgccttggtctaagagaatcccaattggtgaaggattttatgaatttatgtatgtatatgccttctaacaaaagttctttgaatgctcataattgttggtttaaaaa

SEQ ID NO: 11955 - DNA, 361 bp, Glycine max
  Clone ID: LIB3094-104-Q1-K1-G8
cggacgcgtgggttatcctaagtctttgggaatagtgctgcaatggcttcaagtcaggaggaggtgacccttttgggagctactggaagcccatttgtgtgcagggctcatattgccctcaagttgaatggagttcaatacaaatatgtcgaagaaaatttgaggaacaagagtgaactgcttctcaaatccaacccagttcacaagaaggttccagtgtttattcacaatgagaagcccatagcagagactctcgagattgctgaatacattgatgagacatggaagaacaaccccatcttgccttctgatccttaccaaaaagccttggcttgtttctggtcccaattcattgatgata

SEQ ID NO: 11956 - DNA, 385 bp, Glycine max
  Clone ID: LIB3094-104-Q1-K1-G9
tccacgcgtccgcccacgcgtccgtggacgcttgggctcgagtgaacacaggttggagcaagggctttctttggtagaattgggaatttattaagacagacagcaagcatgcaggttagttcagaattgcgatcatcctcttcgttttttcaggctatactcagtatgtcatctgctccaagcacaaatctgtttatcggatgtgttttatattctacttactttctaattttttttgggtatgttttttttatatatttgttaagttattatattatttatttatattttttttatttatttttcttttataattctttttttttatttatttattatttttttttcttaattttttttttttatatatttatttttatttttt

SEQ ID NO: 11957 - DNA, 263 bp, Glycine max
  Clone ID: LIB3094-104-Q1-K1-H11
cttttaatttaaaagaaaaagtgcttaaacatgtctattctgacttagaaggagagatgcattggagtaccgatgtgtaccatgcatcagaatttagatatagtaatgtccatatcttaccaaaaacaagtcatttatggattttatcaggaaaatcatacaggtccggttcagtctctttttcaatccgaaaagatcaagatcaaatgaacattcattatctttctactggagaaagagatttttgtaaccttttagcaagt

SEQ ID NO: 11958 - DNA, 364 bp, Glycine max
  Clone ID: LIB3094-104-Q1-K1-H2
atgaaatcagaatgaggtttgacatgccgggtcttgccaaggaagatgttaaggtatcagtggaggatgatatgcttgttataaaaggtggccacaaaagtgaacaagaacatggtggagatgattcttggtcaagcaggacctatagttcctatgatacccgtttaaagctgccggataattgcgagaaggacaaggttaaggcagagttgaaaaatggtgtgctttatatcaccattcctaagaccaaggttgaacgtaaggttattgatgtccaagttcagtgagatatgcttgggctttgtattatgcaacacggttttttaccatgtttttacgtttttaacatatatacacccattat

SEQ ID NO: 11959 - DNA, 295 bp, Glycine max
  Clone ID: LIB3094-104-Q1-K1-F10
cttgatgatcccaacactttcggtaacaggattcacaggatgctgaagcttggactgagcattgatgaagatgctggtgaagcagatgctgacatgcctcctcttgaggacgctgatgcagatgctgagggtagcaagatggaagaagttgattaaatctgacttaattgcctgttacgtttttagaaacaatgattggagaaacagtctttttactatgttttatgttttttgaattttcgaaattttggaacgttggctagttaggtgccgtatgtagtagtttctttatggt

SEQ ID NO: 11960 - DNA, 473 bp, Glycine max
  unsure at all n locations
  Clone ID: LIB3094-104-Q1-K1-A9
gcgtttgaatacattccttgtagtttatactgaaagatgggtttgaagatggcgttagtnatcctaggcctttccctcatgctccttttggtctcctctgaggtggcatccacgaatacaaaagaggaggcaaatggagtggatgatgccaaatatcccggtggaagctatggagggggttacccaggtcatggcggtggcggttatcctggccatggcggtggcggttatcctggccatggcggtggtggtggctatcctggtcatggtggtggccaccctggtcatggtggcggctaccctggccgtggtggtggatactgtangcatggctgttgcggtggccggacatacaacggaggttgcagaaggtgctgctataacgctggcgaaactgttgctgcacaaactcaagattagactcacgattaagacgatgcagttctacttaattagtactttttatattttaa

SEQ ID NO: 11961 - DNA, 116 bp, Glycine max
  Clone ID: LIB3094-104-Q1-K1-B2
gaaaaaaaaaaaagccttttactttttttcttttgcatgatttgaatcttgattggaaaagcttcgaattggggtgttttacccatcaattcaattttaagccgtgccttcttcag

SEQ ID NO: 11962 - DNA, 456 bp, Glycine max
  Clone ID: LIB3094-104-Q1-K1-B9
caacagagtaatatgcaaaagctcagggacggaacccaagagcaagttctggagactgatcgtatcattatctgtgggatgaatagtcatcttcccttcatattaaagcagttaaataagtatcaggaatttgctgttctcttaggcacagctacagctaggtaaatggttcagacaaggaggcagagaatccttcttatgtctgatcttccaagaaaacagattgatagagtagcagacaatattgcaaaagatttaaatcatattgatgtccttacaaagaggtatcaatgctggttgcagccttaatatgaccaaatcatttgaaagagcagcagctaacagggcacgtgcaataattatactgccaacaaaaggagatcggtatgaagttgacacagatgcatttctttctggtttagcccttcaaccaattccaaacatggattctgtccc

SEQ ID NO: 11963 - DNA, 132 bp, Glycine max
  Clone ID: LIB3094-104-Q1-K1-C10
cccacgcgtccggtaggattaattgatgtatagaagaatcaattgctcacttatggaaggttgtatgaggagactttggcacaatccaaccaaccaaccacaaagtggatattttgactctttttttccctt

SEQ ID NO: 11964 - DNA, 351 bp, Glycine max
  Clone ID: LIB3094-104-Q1-K1-C6
cgcgtcgctgctccgtaccagtttcactgcataaatttgagagaaaactctgcaaacatgggggtttatcaggaccttcttacaggtgatgagcttctctcggactccttccgttacaatgaaattgagaatggaatgctgtgggaagttgaggggaagtgggttgttaagggagcagttgatgttgacattggtgcaaacccttctgctgagggtggagaagatgagggagtcgatgacgcagctgttaaggttgttgacattgttgatacattcagacttcaggagcaacccgcttttgataagaaacagtttgttaccttcatgaagaggtttatcaagagattgact

SEQ ID NO: 11965 - DNA, 421 bp, Glycine max
  Clone ID: LIB3094-104-Q1-K1-C7
caaattttccctctatttttctctctcttgcaaattacgataaccactcttcctcgatctacccttttccgaaagaaacatggttttattttcccgggaaaatactcctcacagttttctgggccaacctttcgtcctttatatcattccttcttcgatttgttgtagaattccaatttcctaggttgtcgatcgatctattgatccgccaatttcaatttggggcaattagattttatttttttcttccgtttgttctgtaaatttttttcttgtgattgttttggtggttgtaaatcgtgatagattcgtggacaggatacgcgaggagttgtaatttgtaaaaaattgtaatttgtaaaagaaaagagcgtgggtcacaccataggtatttgttgattagggttttggtaattatcgg

SEQ ID NO: 11966 - DNA, 470 bp, Glycine max
  Clone ID: LIB3094-104-Q1-K1-C9
cgcaaattcaaaggaggatctctcttgcgttttctctaggttttcgctatggcgtggaagcgaattttgaaggagcttaaggatttgcagaaggatcctccaacatcttgcagtgccggtcctgttgttgctgaagatatgttccattggcaagctacaattatgggtcctccagacagtccctatgcaggaggtgttttcctagtgaccattcatttccctccagattatccctttaagccacccaaggttgcattcaggacaaaggttttccacccaaatataaatagcaatggaagcatttgccttgatatattgaaggagcagtggagccctgctctaaccatttccaaggtgttgctctcaatttgttccctattgacggatccaaatcctgatgatcctttggtccctgaaattgcacacatgtacaagacagataggaacaagtacgagtcaaatgcaagaag

SEQ ID NO: 11967 - DNA, 469 bp, Glycine max
  unsure at all n locations
  Clone ID: LIB3094-104-Q1-K1-D12
cccacgcgtccgccaaaaccgaaaagaagaaaaacgctgaaatccccaaaatcgaggagaagagaaccaaaagcgctgaaatccctctaaccgatggcaaaacgaagagggatagagaaatcgccaaagaggagaacaagaagaagactaagaaacccaagctcagcaatggcacttcaaaacagcgagacgagggatccaaaaagggagtagcagaaggaaaaggagaagaggggaaaatgaacgtgtttccgatgaatcgcatcagaacgatgattaagggcgaagatcccgatatgcgtgtttctcaggaagcattgttggccatcaacaacgctgtggagaagttccttgagcaattctcgcaggaagcttatgctntttgtgttcgggaccgcaagaaatgcctcagctacgatcacctagcacatgttgtaaagtagcanaggagatatgactntctctctga

SEQ ID NO: 11968 - DNA, 379 bp, Glycine max
  Clone ID: LIB3094-104-Q1-K1-D6
gaagttgcgagagtgaagaaatggcgcaagacttggcattggatttggaggagcttcgccgcctccacagcatcgccaaaagacctcgaaccctctctcttctctcctccgaaattcgtaacctcgaaaagttatcgtcagaggaagcttctgcgcagattccggcgccgatttcgaccggaactaaagtggcgccttcacctgcgctgaagtatgcggcactcgcgtcgttcagttgggaccaggatagtgacaaagttaagatatatgtgttaatggagggaatcgatgagaataaggttgaatccgagtttaagtcgatgtcattcgatgttaagttccatgatgttcaagggaagaactaccgatgtgcaatatc

SEQ ID NO: 11969 - DNA, 454 bp, Glycine max
  Clone ID: LIB3094-104-Q1-K1-E10
cccacgcgtccgcccagcgtccgaattcctcaaccacacttgccatatcaaagaaaagagcggcaacatcagatcaaagatacaacatggaggcacttcaatcatgggtttcaaagcacaagctcgccagcattggggcactctgggcctctggaattggagcaacacttgtggcttattcatgcaaaaagtctccaatgaagccaagtctcaggcttatccatgctaggatgcatgctcaggctctaactttagcagtgctatccggtgcagctgcttatcattattatgagaaacgtgatgttcagccaaaaccagaggcagattatattattcctgctcccaatgtcacccagatggttgaatatgaacttcaatgtcctttctaaaaattaaaaataaaactggtagggtcatgttattaagattaggagatattcctatcatcgagttt

SEQ ID NO: 11970 - DNA, 268 bp, Glycine max
  Clone ID: LIB3094-104-Q1-K1-E11
gcgcccacgcctcctcccagcgctcctatcccttataccacacttgccatatcatataagacaacagcaacatttaatcagatatacaacatggacgcacttaactcaatggtttcaaagcacaaactcaccaacaatgggtcactctgagcctctaaaaccatatcaacacttgtggcttatacatgcaaaaagtctccaataaaaccaaacctaacgcttatccatgctaagacacatactcaaactctaactttaccaatactat

SEQ ID NO: 11971 - DNA, 438 bp, Glycine max
  unsure at all n locations
  Clone ID: LIB3094-104-Q1-K1-E12
cccacgcgtccgctcgagaatatgacccgtcctaaaatttacgaaacataattatgtattaggtatgatatataatgagaggaacataaacgaacaatcagatgctgctagtcatttggataataaacaacattaggatttaggcatatcacatgatcgctttacttataatttagggatatcagctcaataccacatgattcaagtaatattaccaaaatcaaagccttatcctacaagatgcggtcagctacatgggtcatgacgtcattcggcaagtttagaaaccaaagtgtagcaaacgggaaaaaagtacacttctccttacagaggtatcccatatgacacaataactctgaaatagtatagtataccatagtcttaatcagcggaatatacaatntcttacatgacaaaaggacagccactgatcccaga

SEQ ID NO: 11972 - DNA, 344 bp, Glycine max
  Clone ID: LIB3094-104-Q1-K1-E2
cccacgcgtccgcccagcgtccgaattcctcaaccacacttgccatatcaaagaaaagagcatcagcatcagatcaaagatacaacatggaggcacttgaatcatgggtttcaaagcacaagctcgccagcattggggcactctgggcctctggaattggagcaacacttgtggcttattcatgcaaaaagtctccaatgaagccaagtctcaggcttatccatgctaggatgcatgctcaggctctaactttagcagtgctatccggtgcagctgcttatcattattatgagaaacgtgatgttcagccaaaaccagaggcagattatattattcctgctccc

SEQ ID NO: 11973 - DNA, 362 bp, Glycine max
  Clone ID: LIB3094-104-Q1-K1-E4
cccacgcgtccgccaaaaccgaaaagaagaaaaacgctgaaatccccaaaatcgaaaagaagaaaaccaaaagcgctgaaatccctctaaccgatggcaaaacgaagagggatagagaaatcgccaaagaggagaacaagaagaagactaagaaacccaagctcagcaatggcacttcaaaacagcgagacgagggatccaaaaagggagtagcagaaggaaaaggagaagaggggaaaatgaacgtgtttccgatgaatcgcatcagaacgatgattaagggcgaagatcccgatatgcgtgtttctcaggaagcattgatgggcatcaacaacgctgtggagaaagttcttgagcaattc

SEQ ID NO: 11974 - DNA, 273 bp, Glycine max
  Clone ID: LIB3094-104-Q1-K1-E5
gccaaaatgaacatgccccctaaagtgagtgctccatcgccgttcacgatcgtgaagggagctctggactcgcacgggccggatctgaagcgtatctactgcaactaagaggtgagcatctacgtgatgcggttgttgacccctgaggacgaggattccgccatcgaccagctcttcattcacgtcgatgtctccaaaccttagcagaacgaatccttgattttcctctgcggtttggacgaggtttctcttgggatttactctggttccatg

SEQ ID NO: 11975 - DNA, 462 bp, Glycine max
  Clone ID: LIB3094-104-Q1-K1-E9
cgccatgctgttcttggagctacaaactctcgtcctgatttgatattgactggacgccaagagaatgcagaatttgctcttgcaatgtgcccaactgaaccctatgttctttcaggaggaaaggacaaaacagtggtgttgtggagtattgaagaccatataacatctgctgccacagactccaaatctggtgggtcaattatcaaacaaaactctaaatctggagaaggcaatgataaaactgctgatggccctactgttggaccacgaggcatttattgtgggcatgaggatacagttgaagatgtgactttctgcccatctagtgcacaggagttctgtagtgttggagatgattcttgtctcatcttatgggatgcacgtgttggctctagcccttgggttaagggtgagaaagctcataatgctgatcttcacttggtggacttgaatccacatgat

SEQ ID NO: 11976 - DNA, 427 bp, Glycine max
  Clone ID: LIB3094-104-Q1-K1-A7
cccacgcgtccgcccacgcgtccgcccacgcgtccgcccacgcgtccgtctccctctttctcgtcactagctctgagcattcttctctcgctctctgccttccatcacactcggcatttcctttcccaagatagtagaagatggcagacactgaggatattcaacctcttgtttgtgacaatggaacaggaatggttaaggctggatttgctggagatgatgccccacgtgctgtgtttcccagcattgtaggtcgtcctcgtcacactggtgtgatggttggcatgggccaaaaagatgcatatgttggtgatgaggcacaatctaagaggggtattttgactctcaagtaccccattgaacatggaatggtgagcaattgggatgatatggaaaagatttggcatcataccttctataatgagct

SEQ ID NO: 11977 - DNA, 373 bp, Glycine max
  unsure at all n locations
  Clone ID: LIB3094-103-Q1-K1-G11
cccacgcgtccgctcgagaatatgacccgtcctaaaatttacgaaacataattatttattatgtatgatatataatgagaggaacataaacgaacaatcagatgctgctagtcatttggataataaacaacattaggatttaggcatatcacatgatcgctttacttataatttagggatatcagctcaataccacatgattcaagtaatattaccaaaatcaaagccttatcctacaagatgcggtcagctacatgggtcatgacgtcattcggcaagtttagaaaccaaagtgtagcaaacggggaaaaagtacacttctncttacagaggtatcccatatgacacaataactcttgaatagtatagtata

SEQ ID NO: 11978 - DNA, 447 bp, Glycine max
  unsure at all n locations
  Clone ID: LIB3094-103-Q1-K1-G12
cccacgcgtccgcggacgcgtgggtgctattgaagcctctggcagagctttgcaactttatgaatcgggtgtatttactggtgaatgtgggacaagtttagaccatggtgtggttgttgttggatatggctctgaaaatggtatggattactggctagtgaggaattcatggggcactggatggggtgaggatggctatttcaagatgcaacgcaatgtgagaacccccacgggcaagtgtggaattacaatggaggccttctacccagtgaagaatggtttaaactctgctaattcagtttatgaaagcactgangtgtatgttagcagtgcttgatataacaaccttcatcgnntattatgatctttggaaattgggaagaggaacaagtgctcaagttgcaaatgtttctggtatctttgatgcttctattgaatatggtctgt

SEQ ID NO: 11979 - DNA, 103 bp, Glycine max
  Clone ID: LIB3094-103-Q1-K1-G3
taactggactcaccctgtataagatcattaatcgccgttgatgtagttgttacgcacatcattaccgcttcacttgtcattgcattagcgctcactccttttt

SEQ ID NO: 11980 - DNA, 284 bp, Glycine max
  Clone ID: LIB3094-103-Q1-K1-G6
cctaaacaactctttctcttcttccttcgctcgttgttctccctcgcgtagatcgacaatggcggagacagagacgtttgctttccaggctgagatcaaccagctcctcagtctcatcatcaacaccttctactccaacaaggagattttccttcgtgaactcatcagcaacgcctccgatgctttggacaagattcgatttgagagtttgacagataagagcaagctcgatgctcagccagagttgttcattcatattattccagacaagactaacaatacac

SEQ ID NO: 11981 - DNA, 421 bp, Glycine max
  Clone ID: LIB3094-103-Q1-K1-G7
atgaaatcagaatgaggtttgacatgccgggtcttgccaaggaagatgttaaggtatcagtggaggatgatatgcttgttataaaaggtggccacaaaagtgaacaagaacatggtggagatgattcttggtcaagcaggacctatagttcctatgatacccgtttaaagctgccggataattgcgagaaggacaaggttaaggcagagttgaaaaatggtgtgctttatatcaccattcctaagaccaaggttgaacgtaaggttattgatgtccaagttcagtgagatatgcttgggctttgtattatgcaacacggttttttaccatgtttttacgtttttaacatatatacacccattataagggttaaatattttgtattaagcgtagagaagtttaaataaaactgctgttgtat

SEQ ID NO: 11982 - DNA, 375 bp, Glycine max
  unsure at all n locations
  Clone ID: LIB3094-103-Q1-K1-G9
cttttctactttgagtcttcttgatccttctttttctccttgaactcaaacatggcagatgaggtggttgtgctagatttctggccaagtccatttgggatgagggtcaggattgcacttgctgaaaagggtatcaaatatgagtacaaagaagaggacttgaggaacaagagtcctcttctcctccaaatgaacccggttcacaagaagattccggttctcatccacaatggcaaacccatttgtgaatccctcattgctgttcagtacattgaagaagtttggaatgacagaaatcccttgttgccttctgacccttaccagagagctcaggctagattctgggctgattatngtgataagaagatatatgat

SEQ ID NO: 11983 - DNA, 443 bp, Glycine max
  Clone ID: LIB3094-103-Q1-K1-H10
cccacgcgtccgctcgagaatatgacccgtcctaaaatttacgaacataattattattatgtatgagtataatgagaggaacataaacgaacaatcagatgctgctagtcatttggataataaacaacattaggatttaggcatatcacatgatcgctttacttataatttagggatatcagctcaataccacatgattcaagtaatattaccaaaatcaaagccttatcctacaagatgcggtcagctacatgggtcatgacgtcattcggcaagtttagaaaccaaagtgtagcaaacgggaaaaaagtacacttctccttacagaggtatcccatatgacacaataactctgaaatagtatagtataccatagtcttaatcagcggaatatacaatttcttacatgacaaaaggacagccactgatcccagacaatattg

SEQ ID NO: 11984 - DNA, 347 bp, Glycine max
  unsure at all n locations
  Clone ID: LIB3094-103-Q1-K1-H11
cccacgcgtccgctcgagaatatgacccgtcctaaaatttacgaaacataattatttattatgtatgatatataatgagaggaacataaacgaacaatcagatgctgctagtcatttggataataaacaacattaggatttaggcatatcacatgatcgctttacttataatttagggatatcagctcaataccacatgattcaagtaatattaccaaaatcaaagccttatcctacaagatgcggtcagctacatgggtcatgacgtcattcggcaagtttagaaaccaaagtgtagcanacgggaaaaaagtacacttctncttacagaggtattccatatgaca

SEQ ID NO: 11985 - DNA, 473 bp, Glycine max
  unsure at all n locations
  Clone ID: LIB3094-103-Q1-K1-H4
ggctgaagcacaactacgagaccagcatggcaaccctgtcccactcaccgatcaatacggggatccggttatcttaactgacgagcgcggtaatcccgtccaactcactggtgtcgctaccaccgctaccggcacagcaggttctgggtttgggtcctatggtaccggtgcttacggtggtggtgcaagtgcaaccaccgttgcagatcttttggcaacccaaccaaggagtggcagggaggctagagagcttcgtcgttcctccagttcaagctctagctcgtctgaggatgatgggcaaggtgggaggaggaagaagggagtgaaggataaaataaaagagaaactaccaggggtaggaggagggaataataataaggagcatgcacacacaacaactgctncaaccaccgncactaaccaccctgctgatcagcatgagaagaaggcactatggagaagatcaaagaaaa

SEQ ID NO: 11986 - DNA, 452 bp, Glycine max
  Clone ID: LIB3094-103-Q1-K1-H5
gaagttgcgagagtgaagaaatggcgcaagacttggcattggatttggaggagcttcgccggctccacagcatcgccaaaagacctcgaaccctctctcttctctcctccgaaattcgtaacctcgaaaagttatcgtcagaggaagcttctgcgcagattccggcgccgatttcgaccggaactaaagtggcgccttcacctgcgctgaagtatgcggcactcgcgtcgttcagttgggaccaggatagtgacaaagttaagatatatgtgttaatggagggaatcgatgagaataaggttgaatccgagtttaagtcgatgtcattcgatgttaaggtccatgatgttcaagggaagaactaccgatgtgcaatatcaaaattgcacaatgagatagtaccagagaaatgccaggttgtggtcaagcctaaaaaggcaatcattacattg

SEQ ID NO: 11987 - DNA, 399 bp, Glycine max
  Clone ID: LIB3094-103-Q1-K1-H6
attgctgctgtttgcctattggtgtactttggggtctctaccctgctggatgcctcatctagcgatggccaaaaatcagatgaagagcagaaggaggcagaactagcagtttctgaattttctggaaatggtgctgggatactatctgctgctagcacagttgccagtacttttctcttagtttttgttgctgaatggggcgacaagtcatttttctccacaattgcccttgcagcagcttcttctccccttggagtcatagctggagcactggctggtcatggtgttgcaactttgctagctgtacttgggggttctttacttgggacgtatttgtcagagaaggttattgcctacaatcgagtgttctctttctcgtctttgccgcaataaccttat

SEQ ID NO: 11988 - DNA, 295 bp, Glycine max; identical to SEQ ID NO: 11959
  Clone ID: LIB3094-103-Q1-K1-H7

SEQ ID NO: 11989 - DNA, 301 bp, Glycine max
  Clone ID: LIB3094-103-Q1-K1-H8
cgaccgacgcgtgcgcttggtgatcccaacacttttcggttacagtgtatcacaggatgctgaagcttggagtgagcgttgattaatatgctggtcaaggatatgctgacatgcctccttttgatgactctgatgcatatgctgacggtagcaagatggaataagttcgttaaatctgacttaatcgcctgttacgcttttacaaacactgattggagaaacagtctttctactatgttgtatgtcttttgaattttcgaacttttggaacgttgcctagttaggtgccgcatgtattagg

SEQ ID NO: 11990 - DNA, 185 bp, Glycine max
  Clone ID: LIB3094-103-Q1-K1-H9
attcaaatgctgctagtcatttcaataataaacaacattacgatttattcatatcacatgatcactttacttataatttatcaatatcatctcaataccacattattcaagtaatattaccaaaatcaaatccttattctacaatattctttcaactacataacatattacatcattctgcaaat

SEQ ID NO: 11991 - DNA, 367 bp, Glycine max
  Clone ID: LIB3094-104-Q1-K1-A1
gaagttgcgagagtgaagaaatggcgcaagacttggcattggatttggaggagcttcgccgcctccacagcatcgccaaaagacctcgaaccctctctgttctctcctccgaaattcgtaacctcgaaaagttatcgtcagaggaagcttctgcgcagattccggcgccgatttcgaccggaactaaagtggcgccttcacctgcgctgaagtatgcggcactcgcgtcgttcagttgggaccaggatagtgacaaagttaagatatatgtgttaatggagggaatcgatgagaataaggttgaatccgagtttaaggcgatgtcattcgaaggtaagttccatgatggtcaaaggaagaactaccg

SEQ ID NO: 11992 - DNA, 474 bp, Glycine max
  Clone ID: LIB3094-104-Q1-K1-A11
gcgcccacgcgtccgggaagatggtgctttcggaggaggaaatgggtcgtctgtacggggtaaggaagacggtgatgcagatgcttcgggacaggggttttctggtgggtgacttcgagatcaacatgtcgaagcatgagttcaagtccaagtacggcgagcacatgaagcgcgaggacctggtcatcaacaagtccaagaaggacaactccggcgaccagatctacgtcttcttccccgacgagcccaaggtcggcgtcaagaccatgaagacctacaccaaccgcatgaactccgaaaacgtctatagagccatcctcgtcacccagaccaacctcacccccttcgcccgcacctgcatcagcgaaatctcctccaaattccacctcgaggtctttcaggaggccgaacttctcgttaacattaaagagcatgagcttgtccccgaacatcaggttctcactgacgccgaga

SEQ ID NO: 11993 - DNA, 358 bp, Glycine max
  Clone ID: LIB3094-104-Q1-K1-A5
cccacgcgtccgattgaatatccatggttctcttagttcttttatccattaaaaaactctagattaatatttctaagaggaactatagtagttgaaagatatcttttgcaaatatgcatatttaactgaggttgttataacttgttccttccctcaaaaaaaaaaaaaaaagaaagaaaaagaacctattagcctccttcattggatatattacatctataaggagtaaattctaccggttcagagaatagaaaaataatcaaaataaaagtcagcagtctcacatctctaattttggtgacagattcaaggggttaaatttgatccagaaggtgaatatgtgagacaatggctacct

SEQ ID NO: 11994 - DNA, 458 bp, Glycine max
  Clone ID: LIB3094-103-Q1-K1-G10
cccacgcgtccgctcgagaatatgacccgttttaaaatttacgaaacataattatttattagttatgagtgtataatgagaggagcataaacgaacaatcagatgctgctagtcatttggataataaacaacattaggatttaggcatatcacatgatcgctttacttataatttagggatatcagctcaataccacatgattcaagtaatattaccaaaatcaaagccttatcctacaagatgcggtcagctacatgggtcatgacgtcattcggcaagtttagaaaccaaagtgtagcaaacgggaaaaaagtacacttctccttacagaagtatcccatatgacacaataactctgaaatagtatagtataccatagtcttaatcagcggaatatacaatttcttacatgacaaaaggacagccactgatcccagacaatattggcaagtaaaat

SEQ ID NO: 11995 - DNA, 437 bp, Glycine max
  Clone ID: LIB3094-103-Q1-K1-D11
tctgggcatactaaaaacccagatgggtcagttcaattcacagcaggcaagactaaagttggtgatgctattgatggtgcaattaagataataactgttgcggtcaccatcgtagtggttgcagtaccagaggggctcccattagctgttactttaactctggcctactcgatgagaaagatgatggcagataaagccttggtaaggaggctttctgcctgtgagaccatgggctctgccacaaccatatgtagtgataagactggcacattgaccatgaatcagatgactgtggttgaggcttacgctgggggtaagaaaattgatcctcctcacaagttggagtcctatcctatgcttcgctctctgctcattgaaggtgttgcacagaacactaatggcagtgtttatgcacctgaaggtgctgctaatgatgt

SEQ ID NO: 11996 - DNA, 327 bp, Glycine max
  Clone ID: LIB3094-103-Q1-K1-D7
cagtaactcacctcaccatggccgcatccattacattgtccaggctcgtctcttcgaccctgaccactgcctctttcttcccacccataaccctgccttccaaactctcctctctccgactccccacccgccgccaccccaagccactcagattctcctcctccaccatcaccgccaccatctccgtcggcgacaagctcccggaggccaccttctcctacctggactcgtccggcgaggtgcagacgacgacggtgtcggaactgacgaaggggaagaaggcggtgctgttcgcggtccccggcgctttcacccccacgtgctcgc

SEQ ID NO: 11997 - DNA, 286 bp, Glycine max
  Clone ID: LIB3094-103-Q1-K1-D8
agaaaacctaagcttagaattagaaacaaagaaaagaagaaaggaaagaattgatcgttgaaaatgcagggaggaaagaaagcgggagagtccattaaggaaacagctacaaacattggtgcttctgccaaggctggcatggagaagaccaaggccactgtccaagagaaggcagaaagaatgacagcacgtgatccggtgcaaaaggagttggcaacccaaaagaaagaggcaaagatgaaccaggcggagctggacaagcaggcggcgcgtcagcataacacgg

SEQ ID NO: 11998 - DNA, 419 bp, Glycine max
  unsure at all n locations
  Clone ID: LIB3094-103-Q1-K1-E11
cccacgcgtccgattgcattgacctggaaacaaaccttgcatcaataggagataaagatggtcttataaatgccaggaaattatatgaatctgcactcgcaacttatgaccaaaatgtcagcttgtggcaagattactatcgcatggagaccaagatgggaacatcagaaaaggctaatgctatctattggcgtgcaaggaaagtactcaaagatgctagtgaatttgtcactgccacagatatgtgataatatttctaaattacgaccatggctattggagttcaattttgaccacttcatttatttggtttttctacagaaatttcttttcgaccagtctagtctagactncaaatttgttttccttcccaagaggtgaggaatagagcttnnctcctttccccaaaagctaattaa

SEQ ID NO: 11999 - DNA, 217 bp, Glycine max
  Clone ID: LIB3094-103-Q1-K1-E12
gtttggtgtaactgcatgctctttgccattgttgatggagtttgcctttagatttttgagttgcccatatagttatacaatttcattttagggtcttgttgactagtgttcctagactattggttaaggaactaaaaagagaagttttaatatgtaaatcataggaaagtataaaaaaaaatcatgaagaacgcaattttatgcctttcaataaaaa

SEQ ID NO: 12000 - DNA, 295 bp, Glycine max; identical to SEQ ID NO: 11959
  Clone ID: LIB3094-103-Q1-K1-E2

SEQ ID NO: 12001 - DNA, 430 bp, Glycine max
  Clone ID: LIB3094-103-Q1-K1-E3
cccacgcgtccgcccacgcgtccgcccacgcgtccggcgtcactctcactcagaccattttgcgcattgggttcttcaaaccgctttttttctcgaaccgggcggcggcggcgcttgcggcggcactcgattgagttgtagaatgcgagtgatcggattccgaaatggcttcgaacccttcgcttctccctgagatcggacccgatggtctcgctaaagaagctcccgtcatcggctacaccgagaagatcatcgaagcagaacagcttcaattgcagaaatacattcaagaaaactattctaaaattcgtgatgtggagcgtgagcttgcaaatctttcactggagatgaaactaacagctgggccgaaaaaagcagctcttgaacatttgaggaagaaaatagaggaatcaacagaaagaatccgggt

SEQ ID NO: 12002 - DNA, 385 bp, Glycine max
  Clone ID: LIB3094-103-Q1-K1-E5
cacgcgtccgcccacgcgtccgcccacgcttccggtttcactctcactcagaccattttggcgatggggttcttcaaaccgctttttgtctcgaaccgggcggcggcggcgcttgcggcggcactcgattgagttgtagaatgcgagtgatcggattccgaaatggcttctaacccttcgcttctccctgagatcggacccgatggtctcgctaaagaagctcccgtcatcggctacaccgagaagatcatcgaagcagaacagcttcaattgcagaaatacattcaagaaaactattctaaaattcgtgatgtggagcgtgagcttgcagatctttcactggagatgaaactaacagctgggccgaaaaaagcagctcttgaac

SEQ ID NO: 12003 - DNA, 308 bp, Glycine max
  Clone ID: LIB3094-103-Q1-K1-E6
ggcaaagatggggatgtggcactcttctttggactctcaggtaccggaaagaccactctttcgaccgatcacaataggtatctaatcggagatgatgaacactgttggggtgacaatggtgtctccaacattgaaggtggttgctatgccaaatgcattgacctctcacgggagaaagagccagatatttggaatgcaatcaggtttggcacagtgttggaaaacgtggtgtttgatgagcacgaccgagaagttgattactctgacaaatcagttacagaaaatactcgggctgcttatcctataga

SEQ ID NO: 12004 - DNA, 381 bp, Glycine max
  Clone ID: LIB3094-103-Q1-K1-E7
tccgaccacgctaccgtccactcttccgttgtcactctcactcagaccattttgcgcatggggatcttcaaaccgcttttgttctcgaaccgggcagcagctgcgcttgcggcggcactcgattgagttgtataatgcgagtgatctgattcctaaatagcttcgaacccttcgcttctccctgagatcggacccgatggtctcgctaaagaagctcccgtcatcggctacaccgagaagatcatcgaatcataacagcttcaattgcagaaatacattcaagaaaactattctaaaattcatgatgtggatcgtgagcttgcaaatctttcactgtagattaaactaacagctgggccgaaaaaagcagctcttgaacat

SEQ ID NO: 12005 - DNA, 279 bp, Glycine max
  Clone ID: LIB3094-103-Q1-K1-F1
gcgtacgctttgctactttgagtcttcttgatccttcttattcttcttgaactcaaacatgtcagatggggtgggtcatatagatttctggccaagtccatttgggatgagggtcatgattgcacttgctgaaaagggtatcaaatatgagtacaaaaaataagacttgagtagcaatagtcctcttctacttcaaatgaacccggttcacaagaagattccggttctcatccacaatggcaaacccatttgtgaatccctcattgctgttcagtacat

SEQ ID NO: 12006 - DNA, 274 bp, Glycine max
  Clone ID: LIB3094-103-Q1-K1-F12
cttttgtactttgagtcttcttgatccttctttttctccttgaactcaaacatggcagatgaggtggtgctgctagatttctggccaagtccatttgggatgagggtcaggattgcacttgctgaaaagggtatcaaatatgagtacaaagaagaggacttgaggaacaagagtcctcttctcctccaaatgaacccggttcacaagaagattccggttctcatccacaatggcaaacccatttgtgaatccctcattgctgttcagtacattg

SEQ ID NO: 12007 - DNA, 209 bp, Glycine max
  Clone ID: LIB3094-103-Q1-K1-F4
aatttgctcttgcaatgttcccaacttaaccctatattctttcatgaagaaaatacaaaacaatgctacttttgaaaatttaagaccatataacatcttctgccacatactccaaatctagtggggcaatcattaaacaaaactctaaatcttaagaaagcaatgataaaactgcttatggccctactgttttaccactaagcatttat

SEQ ID NO: 12008 - DNA, 474 bp, Glycine max
  Clone ID: LIB3094-103-Q1-K1-F5
cccacgcgtccggttttctattcgattcgacccatacttcttcaaatcgccatctgcatcctgtctcaccaaccaattacaaagactatggcgagcgcgggcaagtttccaagtccgactcccccatcgataatagaagtgaagaagccgccgccggcgaccataatctctggaccctctggaccctctggaacctctggagccttatacaactatgctgggaatgggaatagcaagacccaaactaagaatggaaaccttcttggcaaccgtcttggcaatgaaaagtgacaacaatcagaacaagaaaaagactttcaagtgaaaactcactcacttacttgcttcttggacagacagtttcatttcaatagctttggtgaatagtacatacatgatgatgctctagtaaaaagtgtttgcttgtttcttaaattactattacaggattatgctttggtttttctttctagt

SEQ ID NO: 12009 - DNA, 302 bp, Glycine max
  Clone ID: LIB3094-103-Q1-K1-F6
cgggccgaccgacgcgtgcgcccaggcctgctgttggctatactaaccgatctacacatctgaaaatcaccagagcatccggttaaatcaaaaaatgacatagacaatagcccaaccgaaccctatgctctatcacgactaaacaacaaaactataatttaagtaaccatcgacgaccacctatacacttgtaccacatacaccatatgtaacctctgaatccttaaacaactatgttaatattgagaataccaagacccaacctatgataggaatcctgattgaccaccaggcattcattg

SEQ ID NO: 12010 - DNA, 387 bp, Glycine max
  Clone ID: LIB3094-103-Q1-K1-F7
caaagacatccttctcctggatgtggctcccctcactctcggaattgaaactgttggtggagtcatgacaaagttgattcccagaaacactgttatcccaaccaagaaatctcaggtgttcaccacctatcaggaccagcagactacagtctccattcaggttttcgaaggcgagaggagtctcacaaaggattgccgccttcttgggaaatttgatctgtctggaattcctccagccccaaggggtacgcctcaaattgaagtgaccttcgaaagttaatcccaccgcattctaaatgtgaaagccgaagacaagggcccttggtaatcagaaaagatcaccattaccaacgaaaagggacgtcttaaccaggaagaaattgagag

SEQ ID NO: 12011 - DNA, 313 bp, Glycine max
  Clone ID: LIB3094-103-Q1-K1-F8
cgccatgctgttcttggagctacaaactctcgtcctgatttgatattgactggacaccaagataatgcagaatttgctcttgcaatgtgcccaactgaaccctatgttctttcaggaggaaaggacaaaacagtggtgttgtggagtattgaagaccatataacatctgctgccacagactccaaatctggtgggtcaattatcaaacaaaactctaaatctggagaaggcaatgataaaactgctgatggccctactgttggaccacgaggcatttattgtgggcatgaggatacagttgaagatgtgactt

SEQ ID NO: 12012 - DNA, 353 bp, Glycine max
  Clone ID: LIB3094-103-Q1-K1-G1
cccacgcgtccgcttctctctctctctctctgctttacttgcttgaagcaatggccaaagcgttggcatcagtgctgctgtttctcctcgtagctgtgagtaatgtgtttgctgtagagcttgaacttgaaactcttccaccctcttaccctcaccctcaccctgttcactcccccacaccagcacctcttcacccaccagcaaatgctcctcacccacaccaccaccaccaccaccaccaccctccagcaccagcacctgttccttcaccttctcaccacaattaccctactaccccttgccctgctaagccttctactcaccaccatcaccatcacccttctgctcctgtt

SEQ ID NO: 12013 - DNA, 386 bp, Glycine max
  Clone ID: LIB3094-103-Q1-K1-D1
gcgtccgcccaggcgttcggtgaagctggatcattccttcgaggtattcatggcaaccatcatacctgcgccctggtgattagccaataggaggcagaggactcatttgcagacatcacgcattgtaccgtcagtataaagctcagatcgaggacccacattgtcctagaatgcgtcaacaacgccaactgctaactctgctatcaccacaagaagatcttcaacttcgaccattacatcgaaagtcaccattcttcagcctaaccgccaatggcctcgtactctgccgctacatgctaaccaattgcatcaactataattacacctaccattcgactctacctatcttcagactaatcatacacatagccgattatgctctactt

SEQ ID NO: 12014 - DNA, 336 bp, Glycine max
  Clone ID: LIB3094-103-Q1-K1-B12
gcttcctcctcttacgagcctttcctttcagtccattgattcggtgggtgcgggtgcagcgaaaccgagctagaccctgatcggcgtcggcacaccgccggagaacaagatgattgtctgcgtcgccgtcgtcggtcaccagaacaatccgctgtacatacagagcttcacggaggccgatgatgctctcaagctccaccacatcgtccattgctcgctcgatgtggtcgacgagcgagtgaacaatcctaaaaagtctggccgatgcttaatgagacgctttttggactgcgttatcctattgaaactacacagtatatgggtatctgactaata

SEQ ID NO: 12015 - DNA, 431 bp, Glycine max
  Clone ID: LIB3094-103-Q1-K1-B3
cagagtttgagtggacctgtctcagctaccctttaccttggttattcactactcatggccattgcaatcatgttgtcaaccggcaccattggcttccttatgtcattctactttgtgcactacttgttctcatcagtaaagatagattgaggttcttggtgtcattgcatattaactatgaaaaaaggtgaatgatataacttggatcacattggataagtaagggcacgggaggttaaattcaatggctgatttaaattgcgaagggatctgcaagttggtcttcttctggctggtttccaaagtaatggactcattcaaggattccactaagggttgaaaacatggttcaaggattttggtcaaggttctttaaaagggtggattcaaacctctatttaattcaaaaccttagaaaaaaggaggtaggt

SEQ ID NO: 12016 - DNA, 219 bp, Glycine max
  Clone ID: LIB3094-103-Q1-K1-B4
accgacgcgtccgccgaggcttagtgtaccctagtcagctacgctagacacttagcaaataacaactcctgatcggcgaagggcatatttacaacagcccaactaactgcataatgtcattctaacatactcactacactgcacaacgagctctgataaacaccagtgaataatgcaacagattgttgactaaacaacaagaatatccatctagcagct

SEQ ID NO: 12017 - DNA, 444 bp, Glycine max
  Clone ID: LIB3094-103-Q1-K1-B5
accgacgcgtgcgcagagtttgaggggacctgtctcagctaccctttaccttggttattcactactcatggccagtgcaagcatgttgtcaaccggcaccattggcttccttatgtcattctactttgtgcactacttgttctcatcagtaaagatagattgaggttcttgttgtcattgcatattaactatgaaaaaggttgattgatataacttgatcacattgcatagtagggcaacggatgtttaattcattgtctgattttatattgcgatgggatctgcagtttgttctccttctgcctgtttcccaaagtagtgtactcattcaagtattcaactagtgtttgagatcatgtttcaagtattttgttcaagtttctttaaaaggttgtaattcaaactctcatctcatttcaatactgtagaaaaatgatgttagat

SEQ ID NO: 12018 - DNA, 295 bp, Glycine max
  Clone ID: LIB3094-103-Q1-K1-B7
atttgaaggttgttttgtgcttatagataaaagttctgccaaatcaagaggggttttcagatcatagtgtgtgtgtgtgtgttaaacaatggctaagttctttgctgctatgatcttggcactcattgccatttccatgcttcaaacagtggttatggctgctaatgagcaaggaggccacttgtatgacaacaagagcaaatatggaagtgggagtgtcaagagataccaatgcccatcacaatgctcgaggagatgtagcccgacccaataccacaagcccttgcatgttttc

SEQ ID NO: 12019 - DNA, 476 bp, Glycine max
  unsure at all n locations
  Clone ID: LIB3094-103-Q1-K1-B8
ctgagttgcaagattcacttcaaattatgcgtttcgctgatcggttcctcatcacatcaaacgacgtcgcagatcatcgcaattccttgattatttccttttgttgatacgcggaatcgcgcacacggtgctggtgtgtgcactgaggtagaaagaagaagattgaattgtaaacagcatgaattaccttcttggagctttcaagcctgcatgtaatgtcttgatcacgtttaatgatgggaagaaccggaagcaggttccgtttaaaaaagaaaatggtcaaatggtcacagtcccacttttccaaagtcaagaaaacattggtgggaagattacaatagaaccaatgcaagggaagaagattgatcacaatggtgtaaaagttgagctccttggacagatagagatngtatttgacagaggaaatttttatgactntacttnccttgtacgagaactagacgttcctggagaaa

SEQ ID NO: 12020 - DNA, 263 bp, Glycine max
  unsure at all n locations
  Clone ID: LIB3094-103-Q1-K1-C1
gaccgacgcgtacgcccacgcgtccggtgaagctggatcattccttcgcggtatcgatatgaaccgtttaccttgggtngtggaaaactaagagggggcaggtgtttcatctccaaacagcacggtttctagcgtcagtgtaaagcgcatcgagagggaaaccaatgtataataaaacgacacatacagagcttgttccataagcatcattatcgactaacaatatgctgtaacctctataaagaaacttatactctccaaat

SEQ ID NO: 12021 - DNA, 402 bp, Glycine max
  unsure at all n locations
  Clone ID: LIB3094-103-Q1-K1-C10
cccacgcgtccggccacgcttccgaaaaaatttgagactttttcttccatatggaccgtgtggttnatggttacatcactggggtctgcagcactctgagccaaccctcgtagaccagtggatgtacaatttggccgaaactacgtgcccacatgggcctttgatcacatcaaatacttcaatggaggttctgacattcagcttcatcttgacaagtacactggtactggcttccagtccaaagggtcatactttgttggtcacttcagcatgtacataaagatggttcctggagattcaactggcacagtcacttgctttctaattatcttcccaaaatgccgtatcacgactagatagactttgaattccttggtaacataacaggaccaccttacattt

SEQ ID NO: 12022 - DNA, 257 bp, Glycine max
  unsure at all n locations
  Clone ID: LIB3094-103-Q1-K1-C11
acccacccgtacacccacgcatccggccactcttccaaaaaaatttaaatttcttctcccatatgaaccctaaggtcnattgttacatcacaaacggtcttcaacactcttaaccaaccctcatataccaaataatctacaataatacctaaactacttacccacaaataccatataatcacatcaaatacaacaaatttaaatactgacattcaacttcatctttacaaatacacttatactaactaacataccaa

SEQ ID NO: 12023 - DNA, 462 bp, Glycine max
  unsure at all n locations
  Clone ID: LIB3094-103-Q1-K1-C2
cggacgcgtggggtttcctagtatgcaaggtaaagaatcagcaaatttcaaccccggatccgcgagtaacatgttgacaaaagtctaccgagttgcattttgttcttgtaacctcctcaacccactggaggtcgtgatctgtaaattttgagtgaattatacaacaaattcttgaaaaagaaatgattttctcttctgagctgctgcttattgatcgatgaatccagctgcaattattttccaaaaatggaaataaaatctcttctgcggtgttatctctttgactgaatntccaaatttgtaagtataatagttggctatgaaagagactgtaccaagaagcatagtgtgagagtcagaaatcagttgntaagtatgagatgtgagaacatttggtgaatgtatattggctaaatagaagtgcaaaagatgattatagattaaaaaaaaaaaaaagggcgg

SEQ ID NO: 12024 - DNA, 403 bp, Glycine max
  Clone ID: LIB3094-103-Q1-K1-C3
cccacgcgtccggtgaagctggatcattcctccgcggaatcgatgtgaaccgtttaccttctgtggttgattgcgaagaggaagcaggtgtttcatctccaaacagcacggtttctagcgtcagtggaaagcgcagcgagagggaaaccaatggagaagaaaacgacacagacagagcttgttccagaggcatcatcagcgacgaagaagatgctgaaacctctagaaagaaacttagactctccaaagatcagtcaattgtcctggaagagagcttcaaagaacacaacactcttaaccccgtaagtaaacgtacacatgccaattaattttttttgtcctgtttcagagacatagtatcctctgatctactggatcatatattaaatctcactcacgatgt

SEQ ID NO: 12025 - DNA, 296 bp, Glycine max
  Clone ID: LIB3094-103-Q1-K1-C4
catctccaaacatcacattttctatcttcaatataaatctcagctatatataaaccaatttataataaaactacacatacagatcttattccataatcatcatcatctactaacaaaatgctcaaacctctataaataaacttatactctccaaatatcattcaatatttcctgtaataaatcttcaaagaacacatctcatttaaccccatatgtaaacttacacattccaattaaatttatatatcctttatcatatacatattattctctaatctactttatcatatattaat

SEQ ID NO: 12026 - DNA, 441 bp, Glycine max
  Clone ID: LIB3094-103-Q1-K1-C5
cacgcgttcggtcaagctaaatcattccttccagtttatcacgtgaaccgtcataccttgggccgtggattactaagaggaagcaggtgtttcatctccaaacagcacggtttctagcgtcagtggaaagcgcaccgagagggaaaccaatggacaagaaaacgacacagacagagcttgttccagaggcatcatcagcgacgaagaagatgctgaaacctctagaaagaaacttagactctccaaagatcagtcaattgtcctggaagagagcttcatagaacacaacactcttaaccccgtaagtaaacgtacacatgccaattaattatttttgtcctctatcagatacatagtatcctctgatctactggatcatatattaatctcactcaccatgtatatgtgcgattgatcatagaaaattttgttcacaatgtg

SEQ ID NO: 12027 - DNA, 403 bp, Glycine max
  Clone ID: LIB3094-103-Q1-K1-C6
tttcctagtatgcaaggtttagatttagcaaatgtcaacccctgatccgcgagtgacatattgacaaaagtctaccgagttgcattttgttcttgtaacctcctcaacccactggaggtcgtgatctgtaaattttgagtgaattatacaacaaattcttgaaaaagaaatgattttctcttctgagctgctgcttattgatcgatgaatccagctgcaattattttcgaagatggcaataaaatctcttctgcggtgttatctctttgactgaattccaaattttgtaagtataatagttggctatgaaagagactgtactcataagcataatttgatattcatagatcagttgttaagtatgaatatgtgagaacatttttttaaatgatattgctaaata

SEQ ID NO: 12028 - DNA, 383 bp, Glycine max
  Clone ID: LIB3094-103-Q1-K1-C7
gttgaatcgtgaaaatgttcagaaaccagtacgacacggacgtgaccacatggagccctgcggggaggctgttccaggtggagtacgctatggaggcggtgaagcagggctcggcggcgatagggctccgatcgaagacccacgtggtcctcgcatgcgtcaacaaggccaactccgaactctcctcgcaccagaagaagatcttcaaggtcgacaatcacatcggcgtcgccatcgctggcctcaccgccgatggccgcgtcctctcccgctacatgagatccgaatgcatcaactataattacacctacgagtcgccgctccccgtcggcagactagtcgttcagctcgccgataaggctcaggtttgcacacagcggtct

SEQ ID NO: 12029 - DNA, 343 bp, Glycine max
  Clone ID: LIB3094-103-Q1-K1-C8
acccacgcgtgcgatagagacctaaactaagaataaatttcaatttatacgaagacaggaccaaattgagggcatggtgtacatttaagaaagaaagcgacacattccattaatgaaacacatacatacattgctacttctgtcaaatctaacatgcataagaccattgcctccgtccacgagaacgcctacagaatgacatcacatcatccgatgcacatggagttcgacactcacatcaaagacgccatcattaaccatactgagcttgacaagcatgcgtcgcgttaccttaacacctcattcatacactatcataacacttatgagcacatgttacatg

SEQ ID NO: 12030 - DNA, 400 bp, Glycine max
  Clone ID: LIB3094-103-Q1-K1-C9
cccacgcgtccgcccacgcgtccgaaaaaaatgggttcttcttcttccatatggaccgtgtgtttgattttggcatcactggcctctgcagcactctgtgccaaccctcgtagaccagtggatgtacaatttggccgaaactacgtgcccacatgggcctttgatcacatcaaatacttcaatggaggttctgacattcagcttcatcttgacaagtacactggtactggcttccagtccaaagggtcatacttgtttggtcacttcagcatgtacataaagatggttcctggagattcagctggcacagtcactgctttctatttatcttcccaaaatgcggagcacgaccagatagactttgagttcttggggaacaaaacaagaccaccttacattt

SEQ ID NO: 12031 - DNA, 295 bp, Glycine max
  unsure at all n locations
  Clone ID: LIB3094-103-Q1-K1-B10
cttgatgatcccaacactttcggtaacaggattcacaggatgctgaagcttggactgagcattgatgaagatgctggtgaagcagatgctgacatgcctnctcttgaggacgctgatgcagatgctgagggtagcaagatggaagaagttgattaaatctgacttaattgcctgttacgtttttagaaacaatgattggagaaacagtctttttactatgttttatgttttttgaattttcgaaattttggaacgttggctagttaggtgccgtatgtagtagtttctttatggt

SEQ ID NO: 12032 - DNA, 234 bp, Glycine max
  Clone ID: LIB3094-102-Q1-K1-E3
cccacgcgtccggctccctctccccgcttctcttctgttcaaacaatgtcgcaaaccgtggatgcgggcgtcgccaaaaaacttggctggggaaaggccgaaggcaagtgtctcccatggtcaggtgtttctggaagaactgctgctggatattcctactctgctctaggtcatcacagaactcattcccgcggccaacttagaggactaaagcgaggctttaggggcgcatct

SEQ ID NO: 12033 - DNA, 190 bp, Glycine max
  Clone ID: LIB3094-102-Q1-K1-E4
cccacgcgtccgccaaaaccgaaaagaagaaaaacgctgaaatccccaaaatcgaaaagaggaaaaccaaaagcgctgaaatccctctaaccgatggcaaaacgaagagggatagagaaatcgccaaagaggagaacaagaagaagactaagaaacccaagctcagcaatgggcacttaaaacagcgaga

SEQ ID NO: 12034 - DNA, 421 bp, Glycine max
  unsure at all n locations
  Clone ID: LIB3094-102-Q1-K1-E5
aaacacccttgtcgaccacaccaaaattaaaaacataaaaaagcataaaagcacaaaaagacataaaaaagggaaaataaaacattttgaagtcatatttgcacacttgattaaaggctgtcgtcccttgtgacggatgcgtggggtgctaataccttccctgtgcgtaaaaacaactcccgaactattcacacttaaagttcgtagaccacaccttttcaattttcccgacgctttcctcaaataaaagttggtggcgactccgcgcattttcctttcatggaagacgcacttgtgagtcccgcatcgccctcccgtcaaagggtaggttgcgacagtacttgccctcccgccgaagggtaggttccttaattgaattaactaataacanaagtgaaactaaggctaaaataaactcaca

SEQ ID NO: 12035 - DNA, 297 bp, Glycine max
  Clone ID: LIB3094-102-Q1-K1-E6
tgttgacctcacagtgaggctggagaaggaagcctcctacgatgaaattaaaaatgctatcaaggaggaatcagagggcaagttgaagggaattcttggttacactgaagatgatgtggtctccaccgactttgtgggcgatagcagatcaagtatttttgatgcaaaggctggaattgcattgaataagaactttgtgaagcttgtctcttggtatgacaacgagtggggatacagctcacgtgtcattgacctgcttgtattcggtgccaaaaagtctttttaaggttgtactgg

SEQ ID NO: 12036 - DNA, 107 bp, Glycine max
  Clone ID: LIB3094-102-Q1-K1-F2
gaatacccgggctcgcgcacgcgtgcgcccgcgcgtccgctcgagaatatgacccgtcctaaaatttacgaaacataatgatttatgatttatgatatataatgaga

SEQ ID NO: 12037 - DNA, 383 bp, Glycine max
  Clone ID: LIB3094-102-Q1-K1-F6
cggactggaattcccggctacgacgtcacgcgtacatgggtctcttcttcttctatgtggacggtgtgtgtgattttggcatcactggccgctgcagcactctgtgccaacccacgcaggccagtggatgtacaatttggccgaaactacgtgcccacatgggcctttgatcacatcaaatatttcaatggtggttctgacattcagcttcatcttgacaagtacactggtactggcttccagtccaaagggtcttacttgtttggtcacttcagcatgtacataaagatggttcctggagattctgctggcacagtcactgctttctatttatctttccaaaacgcggagcatgatgagatagactttgagttcttggggaa

SEQ ID NO: 12038 - DNA, 99 bp, Glycine max
  Clone ID: LIB3094-102-Q1-K1-F8
cccacgcgtccgaaaagaaggaagaaccagctgaagaatctgatgatgacatgggtttcagtctgtttgactaatttatgtaatgcttttgttgagttt

SEQ ID NO: 12039 - DNA, 365 bp, Glycine max
  Clone ID: LIB3094-102-Q1-K1-G3
ccggaccgacccacgcgtacgcccgggcgtgcgaaaagaaggaagaaccagctgaagaatctgatgatgacatgggtttcgggctggttgactaatttatgtaatgcttttgttgagtttatttggttagaattgaagttgtgtttgcctttcatttcaggtgttattttagtgtattcatgttacattgcaactacttttaatttccatagttaattaaagcttcaacgtttctgtctcttgtggttttaaattgtgatacctgataaatttacaattccccatctttgtgaagatggcaggagtgatgataagatgcctaattgcattaaacttcaacctcaaatgtctttgagcaagcaatg

SEQ ID NO: 12040 - DNA, 354 bp, Glycine max
  unsure at all n locations
  Clone ID: LIB3094-102-Q1-K1-G7
gcgatttgttgctgcaggaattcacagcccggcctgatatagcagatgattgttttttgttggcctcaaggtgtattcgctactgtcctcaactgtttattccctcgtctgtttttccttcattagtggattgctctatgattgggatcacagtacagcatagggaggcttcgaattccatattgcatttcttggctgacatttttgatcttgcgaattcctctgtgggggagcaatttataccaataagagatagtgtaataattcctcgaggtgccagcatcaccagaattttggttgcttcattaacgggagcacttnctaaatctcgaatggatgtgggatcttatacac

SEQ ID NO: 12041 - DNA, 187 bp, Glycine max
  unsure at all n locations
  Clone ID: LIB3094-102-Q1-K1-G8
gcgattgatattgaatatccatggttttcttatttcttttatccattaaaaaactcgacatggatatttttaanaagaactatagtagttgaaagatatcttttgcaaatattcatatttaactgaggttgttataacttgttcctttccttaaaaaaaataaaaaaggaaagaaaaaaaacctttt

SEQ ID NO: 12042 - DNA, 246 bp, Glycine max
  unsure at all n locations
  Clone ID: LIB3094-102-Q1-K1-H1
gcgattggntgctgcaggaattcacattccggtttgatatagcagatgattgtttggtgtgggctcaatgtgtattcgctactgtcctcaactgtttattccctcgtctgtttttccttcattagtggattgctctatgattgggatcacagtacagcatagggaggcttcgaattccatattgcatttcttggctgacaatttttgatcttgcgaattcctctgtgggggagcaatttataccaa

SEQ ID NO: 12043 - DNA, 116 bp, Glycine max
  unsure at all n locations
  Clone ID: LIB3094-102-Q1-K1-H2
nccgcnccggccannaaagagaccaagggtctaattacaaaaaaattccaaaaatttaagacctagaaattttaatgaaaaaaaggtaaccaccttaacccatccaaataataatt

SEQ ID NO: 12044 - DNA, 250 bp, Glycine max
  Clone ID: LIB3094-102-Q1-K1-H4
ctgagttgcaagattcacttcaaattatgcgtttcgctgatcggttcctcatcacatcagacgacgtcgcagatcatcgcaattccttgattatttccttttgttgatacgcggaatcgcgcacacggtgctggtgtgtgcactgaggtagaaagaagaagattgaattgtaaacagcatgaattaccttcttggagctttcaagcctgcatgtaatgtctagatcacgtttaatgatggaaagaaccgg

SEQ ID NO: 12045 - DNA, 347 bp, Glycine max
  Clone ID: LIB3094-102-Q1-K1-H6
aattccgaggtacgcgtcacgcccacgcgtccgattgaatatccatggttctcttagttcttttatccattaaaaaactctagattaatatttctaagaagaactatagtagttgaaagatatcttttgcaaatatgcatatttaactgaggttgttataacttgttccttccctcaaaaaaaaaaaaaaaagaaagaaaaagaacctattagcctccttcattggatatattacatctataaggagtaaattctaccggttcagagaatagaaaaataatcaaaataaaagtcagcagtctcacatctctaattttggtgacagattcaaggggttaaatttgatc

SEQ ID NO: 12046 - DNA, 337 bp, Glycine max
  Clone ID: LIB3094-103-Q1-K1-A1
gaaatgtgaaagccttatcatacagtgtttgcaagatgccaaggtagaagttgaagaagtagatgatgtgataattgtaggcggatgttcttacatcccgagggtgaaaaatcttgttactaacgtatgtaaaggcaaggaactttataaaggcatgaatcctttaaaaacttgtggttgccgtgcaacaatggaaagaacttttggtttaaggcttaaataatcctttgggaaactggaactggttacctatccaagttccacttttggccatgggaattcaacctgatgggaccaagtttgtcctctgaattccagggatactacaatgccagca

SEQ ID NO: 12047 - DNA, 174 bp, Glycine max
  unsure at all n locations
  Clone ID: LIB3094-102-Q1-K1-E2
aaagaccctnggcgaccacaccaaaaacataaacataaaaaagcataaaagcacaaaagggcataataaagggaaaataaaacatgtttaagtcatatatgcacacttgattaagggctgtcgtcccttgagacagatgcatgaggtgctaatacctaacctgtgcgtaaaaac

SEQ ID NO: 12048 - DNA, 305 bp, Glycine max
  Clone ID: LIB3094-103-Q1-K1-A10
cttcttctctggttgattcggatctagagtcttcagtttctcctcgttgttcttcgctttcgtgttttcaatttcgattctttcgttaatttaataagatgtttgggagggcaccgaagaagagcgataatacgaggtactacgaaatcctcggcgtcttcaagaacgcttcgcaggatgatctgaagaaggcttacaagaaagccgccattaagaatcaccccgacaagggcggtgatcccgagaagtttaaagagctggcgcaagcttatgaggttctgagtgacccttagaagcgtgagata

SEQ ID NO: 12049 - DNA, 376 bp, Glycine max
  Clone ID: LIB3094-103-Q1-K1-A11
tgttgacctcacagtgaggctggagaaggaagcctcctacgatgaaattaaaaatgctatcaaggaggaatcagagggcaagttgaagggaattcttggttacactgaagatgatgtggtctccaccgactttgtgggcgatagcagatcaagtatttttgatgcaaaggctggaattgcattgaataagaactttgtgaagcttgtctcttggtatgacaacgagtggggatacagctcacgtgtcattgacctgcttgtattcgttgccaagaagtctttttaaagttgtactgaaaaaaaagtagcttgtctagacattatgtgctggtgtctagctgcgatttagtgtcttcttgctcgggcagaaatgaga

SEQ ID NO: 12050 - DNA, 327 bp, Glycine max
  Clone ID: LIB3094-103-Q1-K1-A12
cgcgtccgcttggggatcccaacacttttggtaacaggatccacattttactaaatcttggactcatcagtgatgtgtacactggtgaagcggatgctgacattccttatactgaagacgctgatgcatatactgactgtatcaacattgactaatctgatttaatctgacttaattgtctgataccattttataaacactgattgaagaaacactctttgtactacaactaatgtttatacaatttacgaaatattggaacgcttgcattctatgtccaaatgtatttataacgttaacggaaaaaaaaatatctagtgttgacct

SEQ ID NO: 12051 - DNA, 369 bp, Glycine max
  Clone ID: LIB3094-103-Q1-K1-A5
atggctcccaaaccgcctagtacgggtctgtttgttggactgaacaagggtcacgtcgtcaccaagaaggaattgcctccacgcccctcagatcgtaaggggaaaacaagcaagagggtgcactttgtgaggaacctcataagagaggtagccggttttgcaccctatgaaaagcgtataactgagttgctgaaggttgggaaggataagagggcactgaaggttgcaaagagaaagctcggaacacacaaacgcgcaaagaagaagcgtgaggaaatgtccagtgttctcaggaagatgagggctggtggtgctggagacaagaggaaataagtcttaattactggtttccagattcactagatggac

SEQ ID NO: 12052 - DNA, 282 bp, Glycine max
  Clone ID: LIB3094-103-Q1-K1-B1
cagagttccagttaacctctctcacctacctattactttgattattcactactcatcaccggtacagtgataatctcaaccggccccattcacttccttatatcactctactattttcactacttgttctcatcattaaaaatacattcaagttctcattcccatatcatattaactctaaaaaactctcattcatataacattatcacattacatactaatgcaacctactatcaattcaacaacccaaattatattgcaacgatatttactgatacattt

SEQ ID NO: 12053 - DNA, 346 bp, Glycine max
  Clone ID: LIB3094-101-Q1-K1-H2
ttagtagatctatccattatggaactggtcaattttaattctgagaagaactatagtagtagaaagatatgttttgccaatatgcatatttaactgaggttgttataactcgttccttccctcataaaagtagaaataggatagaaaaggatcctactatcctcctccattggatatattacatatatatggagtaaattctactcggtcagaaaatagatgtattatcatgaataatgtgagcagtctcacatctctaattttggtgactgattcaaggggttaaattcgatccataaggttaatatgcaatacaatggctacctgaattgtaatgaatgccaac

SEQ ID NO: 12054 - DNA, 388 bp, Glycine max
  Clone ID: LIB3094-101-Q1-K1-H3
ggggctcattgttcttctaccaggttatttagaatcgcaaaatggtgcagatgagctgcgttggtgctggatatgtggggggtcctactatggcagtcattgcacttaagtgcccatccattgaagttgctgttgctgatatctctaaatcccgcattgcagcctggaacagtgaccagcttgctatctatgaacctggccttgatggtgtagtgaagcaatgccggggctagaacctgttcttcagcactgatgttgaaaagcatgtctttgaggctgacatagtgtttgactgtgtcaacaccccaaccaaaactcatggtcttggagctggtaaagcaacacatttgacatattgtcagagcgcatgtcgcatgattgctgatgt

SEQ ID NO: 12055 - DNA, 460 bp, Glycine max
  unsure at all n locations
  Clone ID: LIB3094-101-Q1-K1-H5
cccgcgcgtccgattgaatatccatggttttcttagttcttttatccattaaaaagctcgagattaatatttctaagaagaactatagtagttgaaagatatcttttgcaaatatgcatatttaactgaggttgttataacttgttccttccctcaaaaaaaaaaaaaaaagaaagaaaaagaacctattagcctccttcattggatatattacatctataaggagtaaattctaccggttcagagaatagaaaaataatcaaaataaaagtcagcagtctcacatctctaattttggtgacagattcaaggggttaaatttgatccaaaaggtgaatatgtgagacaatggctacctgagttggcaagaatgccaactgagtggatccatcattcttgggatgcaccgnttactgttcttagagcaacaagagttgagctgggtcaaaattattcaaag

SEQ ID NO: 12056 - DNA, 453 bp, Glycine max
  Clone ID: LIB3094-101-Q1-K1-H7
cccgcgcgtccgattgaatatccatggttttcttagttcttttatccattaaaagactcgagattaatatttctaagaagaactatagtagttgaaagatatcttttgcaaatatgcatatttaactgaggttgttataacttgttccttccctcaaaaaaaataaatacagaaagaaaaagaacctattagcctccttcattggatatattacatctataaggagtaaattctaccggttcatagaatagaaaaataatcaaaataaaagtcagcagtcttacatctctaattttggtgacagattcaaggggttaaatttgatccataaggtgaatatgtgagacaatggctacctgagttggcaataatgccaactgagtggatccatcatccttgggatgcaccgtttactgttcttagaacagcatgagttgagctgggtcaaaatta

SEQ ID NO: 12057 - DNA, 303 bp, Glycine max
  Clone ID: LIB3094-102-Q1-K1-A1
aaacacccttgtcgaccacaccaaaattaataacataaaaaagcataaaagcacaaaaagacataaaaaagggaaaataaaacattttgaagtcatatttgcacacttgattaaaggctgtcgtcccttgtgacggatgcgtggggtgctaataccttccctgtgcgtaaaaacaactcccgaactattcacacttaaagttcgtagaccacaccttttcaattttcccgacgctttcctcaaataaaagttggtggcgactacgcgcattttcctttcatggaagacgcacttgtgagtccc

SEQ ID NO: 12058 - DNA, 412 bp, Glycine max
  Clone ID: LIB3094-102-Q1-K1-A3
cccacgcgtccggaaaagggaagtaacttttgtgaataatatgaagggcggtcaagaaaggtcaagaacaccgtcctcttgtaagagaacactaagtcagggttcagttgatatatatgctgctcagtgcaaaaattgcttgaaatggagagagattgatacacaggaagagtttgaagagattagaagtaaagttgctgaggaaccttttctttgcagcagaaaggctaatagttcctgtgatgaacctggtgatattaaatatgattcctctcggacatgggtgattgacaagcctaacctcccaaagactccacaaggttttaagaggagcttggtgcttagaaaagattactccaaattggacgcttactacatcacacctgcaggcaaaaaactgagaacccgcaat

SEQ ID NO: 12059 - DNA, 317 bp, Glycine max
  Clone ID: LIB3094-102-Q1-K1-A4
ctgagttgcaagattcacttcaaattatgcgtttcgctgatcggttcctcatcacatcaggcgacgtcgcagatcatcgcaattccttgattatttccttttgttgatacgcggaatcgcgcacacggtgctggtgtgtgcactgaggtagaaagaagaagattgaattgtaaacagcatgaattaccttcttggagctttcaagcctgcatgtaatgtcttgatcacgtttaatgatgggaagaaccggaagcaggttccgtttaaaaaagaaaatggtcaaatggtcacagtcccacttttcccaagtcaagaaa

SEQ ID NO: 12060 - DNA, 190 bp, Glycine max
  Clone ID: LIB3094-102-Q1-K1-A6
cagaacagggactcactcgctacgcagcgttactctcggaggctgtcatcgtctcgggttgtcaagatgtacacatcgaggaagaaaatccacaaggataaggatgctgagccaactgaatttgaggaatcagttggacaggcatgggatgatctagaaactaccaacaaggagctgaaaagggatctga

SEQ ID NO: 12061 - DNA, 198 bp, Glycine max
  Clone ID: LIB3094-102-Q1-K1-B4
cggcccgacccacgcgtccgattggcaaccccatgcgacgaatccgacttctccactccttctccgtcgtcttgctctagtggatctaccacttctcatgaactaactaactatcaatcccctaccctaattcctccaatttccccatttttagtctaattaatcagatttgcaaaatcctaatttctctatcctaac

SEQ ID NO: 12062 - DNA, 327 bp, Glycine max
  Clone ID: LIB3094-102-Q1-K1-B5
cccacgcgtccggtgatttcagtgagtgatcggtgttcacttgatctcatcataatcgtgagcgtcaattgaagaagatgccgatcagaaacatcgccgtcggaaggcctgaagaggcgactcaccccgacacgttgaaggcggctttggctgagttcatctcaaccttcatcttcgtgttcgccggctcaggctccggcattgcctacaacaagctcaccgacaacggcgctgccacccctgccggcctcatcttgcgctccatcgcccatgcattcgccctcttcgtcgccgtctgcggcggcgccaacatctccggcgggcacg

SEQ ID NO: 12063 - DNA, 333 bp, Glycine max
  unsure at all n locations
  Clone ID: LIB3094-102-Q1-K1-B8
cccagcgacgaantcgnctcctccactccttctccgtcgtcttgggctaggggtactacctcttctcatgaactaactccctctcaatcccctaccctaattcctccaatttccccatttaggtttctaattaatcagatttgcaaaatcctaatttctctatcctaacacaaacccccagtgattcaaacactgtcgcaatgagctttcaatgtccgcggccagcgatatccagatcttcggagggaggaggagatccggctgcgatggacgagagaaagaggaagcgcatggagtcgaaccgcgagtccagacggggaacgcgggtgaaga

SEQ ID NO: 12064 - DNA, 221 bp, Glycine max
  Clone ID: LIB3094-102-Q1-K1-C2
attcgcaaccccatgcgacgaatccgtctcctccactccttctccgtcgtcttcctctagtggttctacgtcttctcatgaactaactccctctcaatcccctaccctaattcctccaatttccccattttttttctaattaatcagatttgcaaaatcctaatttctctatcctaacacaacccccaaattcaaacaaatccaatggcttcgattccgcg

SEQ ID NO: 12065 - DNA, 316 bp, Glycine max
  Clone ID: LIB3094-102-Q1-K1-C6
cccacgcgtccgcccagcgtccgaattcctcaaccacacttgccatatcaaagaaaagagcatcaacatcagatcaaagatacaacatggaggcacttcaatcatgggtttcaaagcacaagctcgccagcattggggcactctgggcctctggaattggagcaacacttgtggcttattcatgcaaaaagtctccaatgaagccaagtctcaggcttatccatgctaggatgcatgctcaggctctaactttagcagtgctatccggtgcagctgcttatcattattatgagaaacgtgatgttcagccaaaacc

SEQ ID NO: 12066 - DNA, 425 bp, Glycine max
  Clone ID: LIB3094-102-Q1-K1-C7
ttttgattttctggatccgtgtttttgagatgagtgtatgaatttaccgattgtttttcagatgaggttatcgttgaggcatgctttggtgtttgtgttaatcggggcgttgtggaacttgcaaagggcagagggtatccgatttgtgatagacagagacgagtgtttctcccatgatgtgaagtacgagggtgacactgttcatgtctctttcgttgttattaaggctgattctccctggcattacggcgacgaaggtgtcgatctcgtggtaaagggaccttctggcgagcaaattcaagaatttcgggacaagaccagtgagaagtttgactttgtggctcacatatccggggtccataaattctggtttaccaacaagtctccttatcatgaaactgtcgattttgatgtacatgttggtc

SEQ ID NO: 12067 - DNA, 325 bp, Glycine max
  Clone ID: LIB3094-102-Q1-K1-C8
cccacgcgtccgcttgccccaaacaaactaaactaaactaaaccattaacaaacacacctcattaagaaaccctaattataaattcatgtgctccttcggttctaccagcagtgcaccaagaccttcctacttggaacaagcccacggcttggcttccttaaaagacatggataggtgtcataaccgtgccaacaactttgtcttcaaggtccatgaccatgggttacgccaccttttacaacagaaccagtttaaggaacatcaacaacgtttcggtttcttcaccaagatctgggagattctacgacgccagattcgaagatc

SEQ ID NO: 12068 - DNA, 356 bp, Glycine max
  Clone ID: LIB3094-102-Q1-K1-D1
ctaacccagtcccttgacttggctcgctagttcgattcgattcgattctcggagatgaagaagggcttgtgttggctttgagtttgtgtttgggttcatcatcggagcaattaaattcgcgagaatgcgagaatctcggtttcatcggacttgtcttgtgctccgactgcaacactctctctgagtacgtcaaggacaaagtgattatttgaatcgtctaaatcaatatcgccagagggtttggacttgtaaaattactggaaaatctggcttgacttatgaagaggctctggtgtcagagaagcatgctgctgagaaagttcaacagattccggaagaattagtggcacctgctc

SEQ ID NO: 12069 - DNA, 344 bp, Glycine max
  Clone ID: LIB3094-102-Q1-K1-D3
cccacgcgtccgccaaaaccgaaaagaagaaaaacgctgaaatccccaaaatcgaaaagaagaaagcgcaaaagcgctgaaatccctctaaccgatggcaaaacgaagagggatagagaaatcgccaaagaggagaacaagaagaagactaagaaacccaagctcagcaatggcacttcaaaacagcgagacgagggatccaaaaagggagtagcagaaggaaaaggagaagaggggaaaatgaacgtgtttccgatgaatcggattagaacgatgattaagggcgaagatcccgatatgcgtgtttctcaggaagcattggtggccatcaacaacgctgtgga

SEQ ID NO: 12070 - DNA, 367 bp, Glycine max
  Clone ID: LIB3094-102-Q1-K1-E1
cccacgcgtccggcgaaaacccccaactccaacctctgttcatcgtctaccgcgctttcttttcaagcagaactatgattaagctttttaaagtaaaggaaaagcagagagaacttgcagaaaatgcaagtggcggaccacctgttaagaagcaaagtgctggagagttgcgtcttcacaaagatataagtgagctgaatctaccaaaatcatgtaccatgcaattccccaatggcaaagatgatctgatgaactttgaagtttcaattcgacctgatgatggatattacttaggtggcacatttttgttttcctttcaagtgtctcccatctatccacacgaagcaccaaaggttaagtgtaagac

SEQ ID NO: 12071 - DNA, 468 bp, Glycine max
  Clone ID: LIB3094-101-Q1-K1-H1
gggactcattgttcttctcccaggttatttagaatagcaaaatggtgaagatttgctgcgttggtgctggatatgtggggggtcctactatggcagtcattgcacttaagtgcccatccattgaagttgctgttgctgatatctctaaatcccgcattgcagcctggaacagtgaccagcttcctatctatgaacctggccttgatggtgttgtgaagcaatgccgtggcaagaacctcttcttcagcactgatgttgaaaagcatgtctttgaggctgacatagtgtttgtctctgtcaacaccccaaccaaaactcagggtcttggagctggtaaagcagcagatttgacatattgtgagagcgcagctcgcatgattgctgatgtttcgaagtctgacaagatcgttgtagagaaattcacagtcccggttaaaacagctgaggcaatagagaagattctgaccc

SEQ ID NO: 12072 - DNA, 153 bp, Glycine max
  Clone ID: LIB3094-101-Q1-K1-E7
ccgacgcgtccgtcaagcattgcatccttttggatttgtagttcgttttgtcctgtaagtaaaatttctgccaaatcaagaggggttttaaaaccatattgagggtttggcaccaatggctaaaatcttgctggttatatacctggcactctt

SEQ ID NO: 12073 - DNA, 465 bp, Glycine max
  Clone ID: LIB3094-101-Q1-K1-E8
cccacgcgtgcgagaaggcctgggcttagttgattagcataactgggtgaggaagaaagaaagggagtgaataagatggcgtcgagcggagcggtaccgttttggagggcggcggggatgacgtacataacatactcaaacatatgcgcgaatctgctcaggaattgcctcaaggaaccctacaaggccgaatccctctctcgtgagaagctccattttgttctctccaaatgggtcgacgccaagcctgaaaaacctactattcgttcagacaccccagagcagtgatctggaatagttggaagctataaatgcataaatctttgagatctggaagttcattgtcattttgaacctttctgtgatgtttaattccttttgttttttctctccatgaaatggaacatgcactggattttgatttgcacggttaatcttgtaataatacaagtttaaacgaaatga

SEQ ID NO: 12074 - DNA, 374 bp, Glycine max
  Clone ID: LIB3094-101-Q1-K1-F1
gtggctcagggttcttgttccaggatacttacattcgcaaaatggtgaagattagctgggggggggctatatatgtactgggccctactatggcactcattgcacttaagagcccattcattgaacaagctgatgttgatatctctaaatcccgcattgcaacctggaacagtgaccaacttgctatctatgaacctggccttgaaagagttgtgaagcaatgccgggacaagaacctcttctttaacactgattttgaaacgcatgtctttgaggctcacatacagtttgactctgtcaacaccctaaccaaaactcacggtcttggagcttgtaaagcatcacatttgacatattgtgacagctcaactcgc

SEQ ID NO: 12075 - DNA, 383 bp, Glycine max
  Clone ID: LIB3094-101-Q1-K1-F2
ctctttataccccccctctcttttttgcgttcattctgttttcgtaactgttgaagtcgttcccgagccaatggccaccgatcgtttgacccgggttcacagtctccgtgagaggcttgatgaaaccctcactgccaacaggaatgaaattttggcccttctgtcaaggatcgaagccaagggcaagggcatcctgcaacaccaccaggtcattgctgagtttgaggaaatccctgaggagaacagacagaagctcactgatggtgcctttggagaagtcttgagatctacacaggaagccatagttttgccaccatgggttgctctggctgttcgtccaagacctggtgtgtgggagtacctgagagtgaatgtgcacgctc

SEQ ID NO: 12076 - DNA, 444 bp, Glycine max
  unsure at all n locations
  Clone ID: LIB3094-101-Q1-K1-F4
gcgggaagcagaatcagcgtgatggctagaaactgggtggttcgatccttggcgctgggtcgcgcaatgaagaatagggttctcacactctccttcaaccgaattcttccctcactcccatcaaaatcctctctcttagccaccaccgccgccgccactgcctcctctcagctctccctcctcccctccttccaccactctcgctccctctcctccgcctcagctccttccgacgttgtccttgttaattccgaagaagagttcaacaatatccttaccaaagtccgagatgacttcgtgcaccccgtcttctatttcactgccgcttggtgtggaccttgcaagtttatttcacctatcgntggggagctcagtaagaagtaccctcatgtaacaaccatatagattgacattgatcaagaagcactttaaagcacactgggc

SEQ ID NO: 12077 - DNA, 430 bp, Glycine max
  Clone ID: LIB3094-101-Q1-K1-F5
aaaggatgggttcttcttcttctatgtcgtccgtgcgtgtgattttggcatcacgggccgatgcatcactctgtgccaacccacgcaggccagtggatgtacaatttgcccgaaactacgtgaccacatgggcctttgatcacatcaaatatttcaacggtggctctgacattcagcttcatcttgacaagtacactggtactggcttccagtccaaagggtcttacttgattcgtcactataccatgtacataaagatggttcctggagattatgactgcacagacactgatatctatccatcttcctaaaacgctgagcatgacgagatatactttcagtacttgctgaacagaacacgataaccttacattctgaaaacaaatgtgttcatcagatgcaaggttcatagatagcacagaatctatct

SEQ ID NO: 12078 - DNA, 459 bp, Glycine max
  unsure at all n locations
  Clone ID: LIB3094-101-Q1-K1-F6
ggaagcagaatcagcgtgatggcgagaaactgggtggttcgatccttggcgctgcgtcgcgcactgaagaatagggttctcacactctccttcaaccgaattcttccctcactcccatcaaaatcctctctcttagccaccaccgccgccgccactgcctcctctcagctctccctcctcccctccttccaccactctcgctccctctcctccgactcagctgcttccgacgttgtcctcgttaattccgaggaagagttcaacaatatccttaccaaagtccgagatgactcgttgcacgcggtcttctatttcactgcggcttcgggtggaccttgcaggtttatttcacctatcgttggggagctcagtaagaagtaccctcatgtgacaacatataagattgacattgatcaggaagcacttcaaggcacactgggcaagntgcagatttcatct

SEQ ID NO: 12079 - DNA, 445 bp, Glycine max
  Clone ID: LIB3094-101-Q1-K1-F8
gcgccgacgcgtccggacagaagagatcgttttagtcgcaaccctaataagaagaacgacagcttcaatcgagtgacatccaccagccatgggtcgtatgcacagccgtggtaagggtatatcctcttctgctttgccctacaaaaggacaccccctagctggctcaagatctcttcgcaagatgtggaagaaaatatctgcaagtttgcgaagaacggtttgaccccgtctcaaatcggtgtcattcttcgagattctcacggtattgctcaggtcaacagcgtcactggcagcaaaatccttcgcatcctcaaagctcacggtcttgcccctgaaattccagaggatctttaccatttgattaataatgcagtttcaattaggaagcatttttgagaggaacaaggaatgacaaagtactccaatttcaaggttgattcttgt

SEQ ID NO: 12080 - DNA, 390 bp, Glycine max
  Clone ID: LIB3094-101-Q1-K1-G1
gggacacagggtgcttttacacgggtatttaaattcgcaacatgcagcatattacctgcgtggggactaagatacgtagggggcccaactatggcagtcattgaactaaaccgcccatccatggaacttgctgttgctgatatctctaaataccgcatcgcatatctggaacattgaccaacttgctatctatgaacctgaccttgatggtgtagcgaagcaatgccggggcaagaacctgttcttgagcactgatgtctaaaagcatgtctttgaggctcacatagtgtttggctctgtcaacacgcgaaccaaaactcatggtcttggagcttgtaaagcagcagacttgacatattgatagagcgcatctggcatgattgctgatgc

SEQ ID NO: 12081 - DNA, 198 bp, Glycine max
  Clone ID: LIB3094-101-Q1-K1-G2
aatacccacctacacctacgcgggcaccgcctcctctatacaccactacttactatcacaaccagccaccacacgaccaagcaccgtttcatacaaaaatcaccccctacacattcatcaatttcacacacacactcaacatatataactcttatgcttctcactacaaaaacacactcaacatcttccacaacatct

SEQ ID NO: 12082 - DNA, 449 bp, Glycine max
  Clone ID: LIB3094-101-Q1-K1-G3
gggaaacctgctgttcttacacgtgttgtggatagcatgactgacaacttgagaccaactcgtgctgaagcaacagatgtcgccaatgctgttttagatggaagtgatgccattcttctgggtgctgagactttacgtgggttgtaccctattgagactatatctactgttggcagaatttgttcagaggctgagaaagttttcaatcaagacctttattttaaaaggacagtcaagtatgttggagaacccatgactcacttggaatctattgcatcctctgcggtacgagctgcaattaaggtgaaagcatctattataatttggtttacttcatctggaagggctgcaagattgattgcaaagtataggccaacaatgccagtactatcttgtgtgatcccccgacttaagacaaaccagctaaaagtgagctttagtggagcttt

SEQ ID NO: 12083 - DNA, 414 bp, Glycine max
  Clone ID: LIB3094-101-Q1-K1-G4
gggactcattgttcttctcccaggttatttagaatagcaaaatggtgaagatttgctgcgttggggctggatatgtggggggtcctactatggcagtcattgcacttaagtgcccatccattgaagttgctgttgttgatatctctaaatcccgcattgcagcctggaacagtgaccagcttcctatctatgaacctggccttgatggtgttgtgaagcaatgccgtggcaagaacctcttcttcagcactgatgttgaaaagcatgtctttgaagctgacatagtgtttgtctctgtcaacaccccaaccaaaactcatggtcttggagctggtaaagcagcagatttgacatattgggagagcgcaacttgcatgattgctgatgtttcgaagtctgacaagatcgttgtat

SEQ ID NO: 12084 - DNA, 366 bp, Glycine max
  Clone ID: LIB3094-101-Q1-K1-G5
cccacgcgtccggacagaagagagcgtcctagtcgcaaccctaataagaagaaccacagcgttcaagcgagtgacatccaccagccatgggtcgtatgcacagccgcggtaagggtatatcctcttctgctttgccctacaaaaggacaccccctagctggctcaagatctcttcgcaagatgtggaagaaaatatctgcaagtttgcgaagaagggtttgaccccgtctcagattggtgtcattcttcgagattctcacggtattgctcaggtcaacagcgtcactggcagcaaaatccttcgcatcctcaaagctcacgggcttgcgcctgaaattccagaggatctttaccatttgattaaga

SEQ ID NO: 12085 - DNA, 256 bp, Glycine max
  Clone ID: LIB3094-101-Q1-K1-G6
acgcgggctcagggttcttctacacactatttacatttccatactggcacagatccgctagctcggggctctatatgagtggcgtcctactattgcaggcattgcactcaagtacccatccatcgaatgtgctggtgtcgatatctgtaaatcccgcattgcactctggaacagggaccatcttcctatctatgaacctgtccttgatggtgatgagaagctacgccatggcatgaacctattcttcagcactgat

SEQ ID NO: 12086 - DNA, 444 bp, Glycine max
  Clone ID: LIB3094-101-Q1-K1-G7
cgacgttctcgataagcacttggaacgatcctctccttccacttctcgccccatcacctgcgcctccaagaattccaacctccaagtggaggaatctgaaacggagagtgaagagtctgatgttagtggctctgatggggatgacacctcttggatctcgtggttctgtaatctcagagggaatgagttcttttgtgaagtggatgatgattacatacaggatgactttaacctatgtgggttgagcagtcaagtgccctactatgattatgcccttgatttgattctcgacgtcgagtcgtcccatggtgacatgttcacggaggaacagaatgagttgattgaatcagcggcggaaatgctttatggtctgattcatgccagatatgtgttgaccagcaaagggatggctgccatgcttgacaaatacaagaactatgattt

SEQ ID NO: 12087 - DNA, 472 bp, Glycine max
  Clone ID: LIB3094-101-Q1-K1-G8
gcgcccacgcgtccgattgaatatccatggttttcttagttcttttatccattaaggaactggggattaatatttctaagaagaactatagtagttgaaagatatcttttgcaaatatgcatatttaactgaggttgttataacttgttccttccctcaaaaaaaaaaaataaagaaagaaaaagaacctattagcctccttcattggatatattacatctataaggagtaaattctaccggttcagagaatagaaaaataatcaaaataaaagtcagcagtctcacatctctaattttggtgacagattcaaggggttaaatttgatccataaggtgaatatgtgagacaatggctacctgagttggcaagaatgccaactgagtggatccatcatccttgggatgcaaccgttactgttcttagagcaacatgagttgagctgggtcaaaattatccaaagcccataatt

SEQ ID NO: 12088 - DNA, 370 bp, Glycine max
  Clone ID: LIB3094-101-Q1-K1-E6
cccacgcgtccgtcaagcattgcatccctcttgatttgtagtttgttttgtgctttagataaaagttctgccaaatcaagaggggttttaagatcatagtgtgtgttttgcaacaatggctaagttctttgctgctatgatcttggcactctttgccatttccatacttcaaacagtggtaatggctgctaatgaacaaggaggccacttgtatgacaacaagagcaaatatggaagtggaagtgtcaagagttaccaatgcccatcacaatgctcgaagagatgtagccagacccaataccacaagccctgcatgtttttctgtcaaaagtgctgcaagacatgcctgtgtgtgcccccggggtattat

SEQ ID NO: 12089 - DNA, 454 bp, Glycine max
  Clone ID: LIB3094-101-Q1-K1-B7
attgctgctgtttgcctattggtgtactttggggtctctaccctgctggatgggtcatggagcgatggccaaaaatcagatgaagagcagaaggaggcagaactagcagtttctgaattttctggaaatggtgctgggatactatctgctgctagcacagttgccagtacttttctcttagtttttgttgctgaatggggcgacaagtcatttttctccacaattgcccttgcagcagcttcttctccccttggagtcatagctggagcacttgctggtcatggtgttgcaactttgctagctgtacttgggggctctttacttgggacgtatttgtcagagaaggatattgcctacatcggatgtgttctctttctcgctttgtcgaaataaccttatttgaaattgtgcaatatgggttaaaagtaatgcaatataattcttcgtgccaagg

SEQ ID NO: 12090 - DNA, 413 bp, Glycine max
  Clone ID: LIB3094-101-Q1-K1-B8
cccacgcgtccggtgatttcagtgagtgatcggtgttcacttgatctcatcataatcgggagcgtcaattgaagaagatgccgatcagaaacatcgccgtcggaaggcctgaagaggcgactcaccccgacacgttgaaggcggctttggctgagttcatctcaaccttcatcttcgtgttcgccggctcaggctccggcatcgcctacaacaagctcaccgacaacggcgctgccacccctgccggcctcatctccgcctccatcgcccatgcattcgccctcttcgtcgccgtctccgtcggcgccaacatctccggcggccacgtcaaccccgccgtcaccttcggcgccttcgtcggcggcaacatcacctttctccgcggcatcgtctacgtcaatcgccagctcctc

SEQ ID NO: 12091 - DNA, 377 bp, Glycine max
  Clone ID: LIB3094-101-Q1-K1-C4
ggcaaagatggggatgtggcactcttctttggactctcaggtaccggaaagaccactctttcgagcgatcacaataggtatctaatcggagatgatgaacactgttggggtgacaatggtgtctccaacattgaaggtggttgctatgccaaatgcattgacctctcacgggagaaagagccagatatttggaatgcaatcaggtttggcacagtgttggaaaacgtggtgtttgatgagcacgaccgagaagttgattactctgacaaatcaggtacagaaaatactcgtgctgcttattctatagagtacatttcaaatgccaagataccttgcgttggcccttattcaaagaatgtcatacttttggcatgtga

SEQ ID NO: 12092 - DNA, 426 bp, Glycine max
  Clone ID: LIB3094-101-Q1-K1-C5
attgtatcttgttatatcgtataaatgggtggccaatgccttatatatgaattatacgtgggaatgttgctacagcagattcaccctacaacaaatgtttacattcataaggtggttcatcataccaatgtattattcactatgataactgtcatcaacatttactcatcagcataattgactcaaaatagaatcttctatgtcttcaatgatacacttcaaggctaaactatacagttaaagactatccaaatggtgacattctcgtctgggtggtgtatgatggttatcacgctagtctcacacactacaggtcccaggctcgaactctgactcatacatttcaatattctgtagacgatgtctgtgaactactatgagatatgtaaataggaataattttaatgctttggaaaagaattttac

SEQ ID NO: 12093 - DNA, 468 bp, Glycine max
  unsure at all n locations
  Clone ID: LIB3094-101-Q1-K1-C6
gtgcgttcttagaagagctcaatcctcctaacataattcttgttcatggagaagctaatgagatgggcaggctcaagcagaagctcataagtcaatttgctgatcgcaacactaaaattcttactccaaaaaactgtcaatctgttgaaatgtatttcaattcgcagaaaatggcaaaaaccatagggaagctggctgaaaaaacaccagaagttggtgaaactgtcagtggtttgcttgtaaaaaaaggcttcacatatcagattatggcagctgatgatctccatgtcttttcacaactatcaacagcaaacattactcagaggattaccatcccttattcaggtgcctntaatgtcatacagcatagactcaaacagatatatgaaagtgtagctcagtcagtggatgaagaatctggagttcccacattgcaagtccatgagntgtgtactgtgaaacatgaat

SEQ ID NO: 12094 - DNA, 366 bp, Glycine max
  Clone ID: LIB3094-101-Q1-K1-C7
gctggctcttcttacaagccattccttgtaggacaatgcttgagagtgtacaggttcaggggaaccgagctataccctgatcggtcgtcacacactgcctgataacatgatgtattgacatgtgactccagcagtcggtcaccatagcaatacgctgtacatacagagcttcacggatgccgacgatagctctgaatgcttaccacatcatacattgctcgctagattgtgagcgataggcttgtgaacaatcctaaaacgtatgagacgatgcttaatgataagcttcatggactgctacatcctattgcaaactacattgcttatgggaatatgactcatactacgggggaatttaacgtggtg

SEQ ID NO: 12095 - DNA, 151 bp, Glycine max
  Clone ID: LIB3094-101-Q1-K1-C8
gttacatcttctaacagctcaatcttacttacacaattcttgatcatccacacggtcgggggaaccttgctatacagctgactctcatcaggcactctgctgatcgtaacattgagatttccactccataaaactgtcactatgcaaaatt

SEQ ID NO: 12096 - DNA, 329 bp, Glycine max
  Clone ID: LIB3094-101-Q1-K1-D1
ctgagtatgactgcacccgtctcagcgacttcattatcttggtcattcactactcatggggatcggaatcattttgcaaagcgcgaccattgccttccttaagacattctactatgtgcactacatcaccttatgagcacagatatatagcggatctcgttctcatagcgtattaactatgaaacacgtacattgatctaaaccgaccacatagcatactatgtcaacaaatgtctaacgcattcactcatattataacgacatggtatcttgagaatgctctccaatctacccatttcccaaaataatgcactcaatcaagtttctca

SEQ ID NO: 12097 - DNA, 490 bp, Glycine max
  unsure at all n locations
  Clone ID: LIB3094-101-Q1-K1-D3
cgnntccgcagagtttgggagtggtatcctgtctcaagctacctnnctttaccttgggggttattcaactannctcatggcgcgattggcannatcatgtnntgtcaacnncggcaccattgggcttttccttaaatgtcattcnttactttgtgcacttanncttgttctcaaatcagtaaagatagaattggagggttcttggttgtcaattgcnnatattaactatgaaaaagggttgattgggatataacttgatcacanttgcatnnagtagggcaacggatgtttnaattcaattgtctgattttatanttgcgatgggatctgcagtttgttctccttctgcctgtttcccaaagtagtgtactcattcaagtattcaactagtgtttgagatcatgtttcaagtattttgttcaagtttctttagaaggttgtaattcaaactctcatctcatttcaatactttagaaaaatgatgttagat

SEQ ID NO: 12098 - DNA, 248 bp, Glycine max
  Clone ID: LIB3094-101-Q1-K1-D5
cccgcgcgtcctccaaaaccgaatagattaaaaacgctaaaatctactaaatcgggaatgagaaatttaaaaacactgaaatccctctaaccgatatcaaaacgtacattgataaataaatcttcaaataatataacattaataagacgatatatacccaatcttcatattgactcttcaaaacagcgagacaagtaatccaaacacatattatcataaggaaaatgataattataatacaatgaact

SEQ ID NO: 12099 - DNA, 448 bp, Glycine max
  Clone ID: LIB3094-101-Q1-K1-D6
cccacgcgtccgggaagatggtgctttcggaggaggaaatgggtcgtctgtaccgaataaggaagacggtgatgcaaatgcttcgggacaggggttttctggtgggtgacttcgagatcaacatgtcgaagcatgagttcaagtccaagtacggcgagcacatgaagcgcgaggacctggtcatcaacaagtccaagaaggacaactccggcgaccagatctacgtcttcttccccgacgagcccaaggtcggcgtcaagaccatgaagacctacaccaaccgcatgaactccgaaaacgtctatagagccatcctcgttacccagaccaacctcacccccttcgcccgcacctgcatcagcgaaatcttcttcaaattccacctcgaggtctttcaggaggccgaacttctcggtaacattaaagagcatgagcttgtccccgaaca

SEQ ID NO: 12100 - DNA, 466 bp, Glycine max
  Clone ID: LIB3094-101-Q1-K1-D7
gcttcctcctcttacgagcctttcctttcagtccattgattcggtgggtgcgggtgcagcgaaaccgagctagaccctgatcggcgtcggcacaccgccggagaacaagatgattgtctgcgtcgccgtcgtcggtcaccagaacaatccgctgtacatacagagcttcacggaggccgatgatgctctcaagctccaccacatcgtccattgctcgctcgatgtggtcgacgagcgagtgaacaatcctaaaaagtctgggccgatgcttaatgagacgtttttgggactgctttatcctattgaaaactacaaagtatatggatatctgactaatacgaaggtgaaatttatcttggtgaccacggatctggatgttaaagatgcggatgtaaggaattttttcaggaggttccatgccgcatatgtagatgcagtttcaaacccattccatgtaccaggcaaa

SEQ ID NO: 12101 - DNA, 204 bp, Glycine max
  Clone ID: LIB3094-101-Q1-K1-D8
gctgcctcctcttacgagcctttctttttattccattgattcggtgtgtgctggtgcaggtgaacttagctagaccctgatcggcttctgcacaccttctgagaacaagattattgtctgcgtcgtcttcgattgtcatcataacaatcttctgtacatacatatctttacagaagccgatgatgctcttaagctacatcatat

SEQ ID NO: 12102 - DNA, 415 bp, Glycine max
  Clone ID: LIB3094-101-Q1-K1-E2
gacccagacgtacgcgttcgacggcgcgtacgtcaagcattgcatccattcttgatttgtaagctgttttgagctttagagaaaagttgtgccatatcaagaggggttctaagatcatagtgtgtgttttgcaacaatggctaacttctttgctgctatgatcttggcactctttgtcatttccatacttcaaacagtggcaatggctgctaatgaacatggaagccacttgtatgacaacatgagcaaatatggaagtggaagctgtaatagttaccaatgcccatcacaatgctcgaggagatgtagccagacaccataccacaagccctgcatgtttttctgtcagaagtgctgcaagacatgcctgtgtgtgccccccgagtattatggtaattaagctgtgtgcccttgc

SEQ ID NO: 12103 - DNA, 331 bp, Glycine max
  Clone ID: LIB3094-101-Q1-K1-E3
ctctttatgcccccactctctcgtacgcgttcattctgcgttcgaaactgtcgaaatcgggacggagccaatggccaccgatcggtggaccacacttcacagactgcgtgagaggctcgatgaaacccttactgccaacaggaatgaaatcttggcccttctgtcaaggatcgaacccaaaggcaagggcatactgcaacaccaccaagtcattgatgattttgagcgaaatgcctcacgagaacagacagaagcttactgatggtgcctttggagaagtcttgcaatctacacatgaagccatacttttgccaccatgggtcgcttttgc

SEQ ID NO: 12104 - DNA, 311 bp, Glycine max
  Clone ID: LIB3094-101-Q1-K1-E4
ggatcgacccacgcgtacgctttttatggctcctctctcacgtatgcgttcattctggattcgaaactggtgatggcggtaccgagccattgtccaacgatcggaggaccacaatgaacagactgcgtgagaggctacattaaacaactacttggctcaggagagaaatctcgtcccttcagttaacgtactgaacacaaggctagggcatactgcagcaccaccaagtcattgctgagtttgaggaaatacctgtcgaaaatcaacagaacctcactgatagtgcccttggagaagccttgagatctaca

SEQ ID NO: 12105 - DNA, 340 bp, Glycine max
  Clone ID: LIB3094-101-Q1-K1-E5
tgtggacctcacagtgaggctggattaatttgccttctacaatgaaattaacaatgctagcatgctttaatcacagggcaagttgactggaatacttcattacactgaagatgatgaggtctacaccgactttgaagaccatctcatatcaagtattactgatgcataggctataatagcattgaataacaactttgagaaacttgactatagttatgacatcgagtggcaatacagcttacttatccttaacctaacttgaaatctctgacaacaaatctttctatggttctactgaaacaaaagtcgcttctctaaacattgagacatggtgtctagc

SEQ ID NO: 12106 - DNA, 466 bp, Glycine max
  Clone ID: LIB3094-101-Q1-K1-B6
attgctgctgtttgcctattggtgtactttggggtctctaccctgctggatgcctcatctagcgatggccaaaaatcagatgaagagcagaaggaggcagaactagcagtttctgaattttctggaaatggtgctgggatactatctgctgctagcacagttgccagtacttttctcttagtttttgttgctgaatggggcgacaagtcatttttctccacaattgcccttgcagcagcttcttctccccttggagtcatagctggagcactggctggtcatggtgttgcaactttgctagctgtacttgggggttctttacttgggacgtatttgtcagagaaagttattgcctacatcggaggtgttctctttctcgtctttgccgcaataaccttatttgaaattgtgcaataagggttaaaagaaatgcaatataatctccgtgcaaagggttcaagaacgt

SEQ ID NO: 12107 - DNA, 237 bp, Glycine max
  unsure at all n locations
  Clone ID: LIB3094-100-Q1-K1-G11
cagtggctcacctcaccatggccgcatccattacattgtccaggctcgtctcttccaggcgaccactgcctctttcttgccagccataaccctgccttccaaactctcctctctccgactccccacccgccgccaccccaagccactcagattctcctcctccaccatcaccgncaccatctccgtcggcgacaagctcccggaggccaccttctcctacctggactcgtccggcga

SEQ ID NO: 12108 - DNA, 434 bp, Glycine max
  Clone ID: LIB3094-100-Q1-K1-G12
cagtaactcacctcaccatggccgcatccattacattgtccaggctcgtctcttccacgctggccactgcctctttcttcccacccataaccctgccttccaaactctcctctctccgactccccacccgccgccaccccaagccactcagattctcctcctccaccatcaccgccaccatctccgtcggcgacaagctcccggaggccaccttctcctacctggactcgtccggcgaggtgcagacgacgacggtgtcggaactgacgaaggggaagaaggcggtgctgttcgcggtccccggcgctttcacccccacgtgctcgcagaagcacgtgccgggcttcgtggagaaatcgggggagctgagggcgaaggggatcgacacaatcgcatgcatttcggtcaacgacgccttcgtcatgaaggcatgg

SEQ ID NO: 12109 - DNA, 449 bp, Glycine max
  Clone ID: LIB3094-100-Q1-K1-G3
ttttgattttctggatccgtgtttttgagatgagtgtatgaatttaccgattgtttttcagaggaggttatcgttgaggcatgctttggtgtttgtgttaatcggggcgttgtggaacttgcaaagggcagagggtatccgatttgtgatagacagagacgagtgtttctcccatgatgtgaagtacgagggtgacactgttcatgtctctttcgttgttattaaggctgattctccctggcattacggcgacgaaggtgtcgatctcgtggtaaagggaccttctggcgagcaaattcaagaatttcgggacaagaccagtgagaagtttgactttgtggctcacaaatcccgggtccataaattctgcttcaccaacaagtctccttatcatgaaactgtcgattttgatgtacatgttggtcacttctcttactttgagcaacatg

SEQ ID NO: 12110 - DNA, 346 bp, Glycine max
  unsure at all n locations
  Clone ID: LIB3094-100-Q1-K1-G5
cagtaactcacctcaccatttncnatttattacattgtccaanctcnnntcttccaccagaacctcttactatatcttcccacccataacccctccttccaaactctcctctctccgactccccacccgccgccaccccaagccaatcacattctacttctccaccatcaccgacaccatctacgtcctcaacaaactccacaaagccaccttctcctacctttactcctaccaccaagtgcacactactacaaagtctgaactgacgataaataagaaggctttgctactcccttaccccatcgctttcacccccacatactcacataaacacattccaaacttc

SEQ ID NO: 12111 - DNA, 308 bp, Glycine max
  Clone ID: LIB3094-100-Q1-K1-G6
cccataacccttccttccaaactctcctctctccgactccccacccgccgccaccccaagccactcagattctcctcctccaccatcaccgccaccatctccgtcggcgacaagctcccggaggccaccttctcctacctggactcgtccggcgaggtgcagacgacgacggtgtcggaactgacgaaggggaagaaggcggtgctgttcgcggtccccggcgctttcacccccacgtgctcgcagaagcacgtgccgggcttcgtggagaaatcgggggagcctgaggcgaaagggatcgacacaat

SEQ ID NO: 12112 - DNA, 451 bp, Glycine max
  unsure at all n locations
  Clone ID: LIB3094-100-Q1-K1-G8
aaacacccttgtcgaccacaccaaaattaaaaacataaaaaagcataaaagcacaaaaagacatgggaaagggaaaataaaacattttgaagtcatatttgcacacttgattaaaggctgtcgtcccttgtgacggatgcgtggggtgctaataccttccctgtgcgtaaaaacaactcccgaactattcacacttaaagttcgtagaccacaccttttcaattttcccgacgctttcctcaaataaaagttggtggcgactccgcgcattttcctttcatggaagacgcacttgtgagtcccgcatcgccctcccgtcaaagggtaggttgcgacagtacttgccctcccgccgaagggtaggttccttaattgaattaactaataacaaaagtgaaactaaggctaaaatanactcacaaatcaagctttgtccattaaaatcacttaa

SEQ ID NO: 12113 - DNA, 307 bp, Glycine max
  unsure at all n locations
  Clone ID: LIB3094-100-Q1-K1-G9
gcgtacgttttggtactttnaatcctcttgatccttttttttgtactaaaacacaaacatgtcagaagatgtgtttataatagatggaggcccaactccatttgttaatagggtcattattgaacttgctgaaaacggaatcaattacgattacaaagaacaggacactgaggaacaatacatctattgaactacaatgaacccactgtacatgaatattccggttctaataaacattattcaacctatctttaaatccactaatgctgctcatctcatttaagaggaccttaatgacagcaaatcc

SEQ ID NO: 12114 - DNA, 261 bp, Glycine max
  unsure at all n locations
  Clone ID: LIB3094-100-Q1-K1-H3
cctaccttncctaaaagaaatttttttaataaactggacccccaccccttttttttttcaanttcatattaaccttcctttcacaccccacaacaaaacccttatttcaaaaaacaatattccctttttttcaaaaactttttcttccccaaacttaatttcccaacaccaaacaaaaaaaacctcctattcatcataataacctttatatcctcaccaccactacccctttttttttttttctttacccaaaacccaaac

SEQ ID NO: 12115 - DNA, 251 bp, Glycine max
  Clone ID: LIB3094-100-Q1-K1-H4
atggccgcatccattacattgtccaggctcgtctcttcccgctgaccactgcctctttgttcccacccataaccctgccttccaaactctcctctctccgactccccacccgccgccaccccaagccactcagattctcctcctccaccatcaccgccaccatctccgtcggcgacaagctcccggaggccaccttctcctacctggactcgtccggcgaggtgcagacgacgacggtgtctgaactcacc

SEQ ID NO: 12116 - DNA, 449 bp, Glycine max
  Clone ID: LIB3094-100-Q1-K1-H7
cccacgcgtccgtcaagcattgcatccctcttgatttgtagtttgttttgtgctttagatagaagttctgccaaatcaagaggggttttaagatcatagtgtgtgttttgcaacaatggctaagttctttgctgctatgatcttggcactctttgccatttccatacttcaaacagtggtaatggctgctaatgaacaaggaggccacttgtatgacaacaagagcaaatatggaagtggaagtgtcaaaagttaccaatggccattcacaatgctcgaggagatgtagccagacccaataccacaagccctgcatgtttttctgtcagaagtgctgcaggacatgcctgtgtgtgcccccggggtattatggtaataaagctgtgtgcccttgctacaacaactggaagaccaaggaaggaggacccaagtgcccttgagcttcaact

SEQ ID NO: 12117 - DNA, 402 bp, Glycine max
  Clone ID: LIB3094-100-Q1-K1-H8
cccacgcgtccgaaaagaaggaagaaccagctgaagaatctgatgatgacatgggtttcagtgtgtttgactaatttatgtaatgcttttgttgagtttatttggttagaattgaagttgtgtttgcctttcatttcaggtgttattttagtgtattcatgttacattgcaactacttttaatttccatagttaattaaagcttcaacgtttctgtctcttgtggttttaaattgtgatacctgataaatttacaattccccatctttgtgaagatggcaggagtgatgataagatgcctaatagcattaaacttcaacctcaaatgtcttgaagcaagcaatgttgctctagctttcgcgattacttcccgctatgaaatgagatctctaacaatgcctcg

SEQ ID NO: 12118 - DNA, 390 bp, Glycine max
  Clone ID: LIB3094-100-Q1-K1-H9
gcaaacatgtccaccgcaacaactcacgtgctcgcttatcccttccctacctccggtcacgggatccctctcttagacttcaccaaaaccctagtctctcgcggcgtccatgtcaccgttctggtcacaccctacaacgaagccttacttccaaaaaactattcccctcttctccaaacgcttctcctccccgaacctcagttcccgaacccgaagcaaaacaggctcgtatccatggtaaccttcatgcggcaccaccactacccgatcattatggactgggcccaggcccagcccattcctcctgcggctattatatcagatttcttcctcggttggacccacctcctcgcacgtgacctccacgtgccgcgcgtagtcttctccccc

SEQ ID NO: 12119 - DNA, 415 bp, Glycine max
  Clone ID: LIB3094-101-Q1-K1-A1
cgcgtcgctgctccgtaccagtttcactgcataattttgagagaaaactctgcaaacatggtggtgtatcatgacctccttacaggtgatgagcttctctcggactccttccgttacaatgaaattgagaatggaatgctgtgggaagttgaggggaagtgggttgttaatggagcagttgatgttgacattggtgcatacccttctgctgagggtggagaagatgagggagtcgatgacgcatctgttaaggttgttgacattgttgatacattcagacttcaagagcaacccgcttttgataagaaacaagtttgtaccttcatgaagaggtttatcaagaatttgacttccaagctcgatgcaaagaaacaagagtttgttaagaagcacatttgtgggagctactaaatta

SEQ ID NO: 12120 - DNA, 417 bp, Glycine max
  unsure at all n locations
  Clone ID: LIB3094-101-Q1-K1-A5
cccacgcgtccggcaacagaagctcagccagattcgggttaacactgacagcaccgagagggcaaccagctcgattttctgccttatacctgcgacggttgccaacagatcttatgttcgtaacacagatcctacaagtacgacgcgtgcctgaaatgcgaccacaacagcgtacaggatggtgattgcgaagcatgatccatgtccatcgataccaccggacatgtgtgacacgaccaggaggcaatcttgcagaatcacctcaagtctcggaagtgagaccctaccaagaagcngaaaccaatttgtcccgtcaagcggttcaaggaggatttgacggttttcaacaccattacatgtaaaacttgccacattaatgtgagcctcaggcatcgttttcatgatgatcatgcctgt

SEQ ID NO: 12121 - DNA, 175 bp, Glycine max
  Clone ID: LIB3094-101-Q1-K1-A6
aacaaacgtaactgacccgcagctcaatgtgattactattaacactgacggtaccgagagggcaattagatcgctatgatgtcttaaaacagcgacggtcgccatacgagacccacgttaacaaccccgatcatacatgctcgaatcgttcctaaaatgccacctcaacagattt

SEQ ID NO: 12122 - DNA, 203 bp, Glycine max
  Clone ID: LIB3094-101-Q1-K1-A7
cacactcgtccctcaccagcacctcagctttactaccaaaaacactgacagtgcggagaggtgcaatatgaacgcatttctgtctttcatctcctacggttgccataagatacctagtttgtatcacagatcctacatgctctaatcgtgcctagaattataccacaacagattactgtgtgatgatttaaaagcttgattca

SEQ ID NO: 12123 - DNA, 443 bp, Glycine max
  unsure at all n locations
  Clone ID: LIB3094-100-Q1-K1-F6
atttgttgctgcangaattcacagcccggcctgatatagcagatgattgttttttgttggcggggaggtgtattcgctactgtcctcaactgtttattccctcgtctgtttttccttcattagtggattgctctatgattgggatcacagtacagcatagggaggcttcgaattccatattgcatttcttggctgacatttttgatcttgcgaattcctctgtgggggagcaatttataccaataagagatagtgtaataattcctcgaggtgccagcatcaccagaattttggttgcttcattaacgggagcacttcctaaatctcgagtggatgtggtatcttatacactcctggcattaactcgatcatatgggatgcaagcgctggaatgggcaaaaaagagtgttttgttaattccatcaacagctgttacagatgta

SEQ ID NO: 12124 - DNA, 354 bp, Glycine max
  Clone ID: LIB3094-100-Q1-K1-D3
cccacgcgttcgagaaggcctgggcttagttgataagcataactgggtgaggaagagagaggagagagtgaagaagatggcgtcgagcggagcggtaccgttttggagggcggcggggatgacgtacataacatactcaaacatatgcgcgaatctgctcaggaattgcctcaaggaaccctacaaggccgaatccctctctcgtgagaagctccattttgttctctccaaatgggtcgacgccaagcctgaaaaacctactattcgttcagacaccccagagcagtgatctggaatagttggaagctataaatgcataaatctttgagatctggaagttcattgtcatttttg

SEQ ID NO: 12125 - DNA, 435 bp, Glycine max
  Clone ID: LIB3094-100-Q1-K1-D4
gcagagcagagatctagcgtattctctcgctctttctttcactgtcacagagccacatccgtgggcttcccagccaacggcgcctctgcggcccagcccctaaacttcctcatctacggccgcacgggctggattggcggcctcctcggctccctctgccgggcccagggcatctccttccattacggctcgggccgcctcgagaaccgggcctccctcgaaaccgacatagccctcctcaagccctcccacgtcttcaacgccgccggcgtcacgggccgccccaacgtcgactggtgcgagtcccacaaagtcgagaccatccgaaccaacgtcgtcggaaccctcactctcgccgacgtctgccgcgaccacggcctcattctcatcaactacgccaccggttgcattttcgagtacgactccgatcacccc

SEQ ID NO: 12126 - DNA, 350 bp, Glycine max
  Clone ID: LIB3094-100-Q1-K1-D7
aaaaaatggggtcctcctcctccaatggggacggtgtgggtgattttggcatcactggcctggggagcactctgtgccaacccacgcaggccagtggatgtacaatttggccgaaactacgtgcccacatgggcctttgatcacatcaaatatttcaatggtggttctgacattcagcttcatcttgacaagtacactggtactggcttccagtccaaagggtcttacttgtttggtcacttcagcatgtacataaagatggttcctggagattctgctggcacagtcactgctttctatttatcttcccaaaacgcggagcatgatgagatagactttgagttcttggg

SEQ ID NO: 12127 - DNA, 361 bp, Glycine max
  Clone ID: LIB3094-100-Q1-K1-D8
tgaatatggcatcactttccaagacggctttatattccaaccgacgcagcccactttatttctatttttccaaaactacttccccacatgttccttttttcacatcaaatatgtcaatattgaatctgacatttatcttcatcttaacaagtacacttttactttctttcattctcaaatttcttacttgtttagtcactacaacaattacataaaatatttcaatttatatatttctactacacattctcttgttattatttatcttcccaattcacattgcatttatatatagtacattttctattttgttaaacaaaacaaattcaacctttcataattttcaaaatattcttttcac

SEQ ID NO: 12128 - DNA, 263 bp, Glycine max
  Clone ID: LIB3094-100-Q1-K1-D9
gaatgataaggtatatgaacaatccttaacagatacttctacaagatgttctattttttcagagagaaaaattcgctcaaaaaaaacgcgaaaatattttaatcgtaacttagaggatttgttacgtagaaaaagaaagatagattcatattcccatacatataaattatataggaacaaaaaaaatcttggattactttttgaaaaaaaagtagaaatccatttttttggagtaaaaatactattccaattataataataag

SEQ ID NO: 12129 - DNA, 411 bp, Glycine max
  Clone ID: LIB3094-100-Q1-K1-E1
gggtcgcttggactgactcatgaacacttatggattactgaaaacagaatcgtggaaggagacatgttctatcacatattgatgccaagagtgcacacctccactgacacaaccaacaggaagaactctaaatcttggaggaagacagcgtggacgcttgatatgacagttacgatctaacgaagttcaaggaactttatcacgacacatacttcgtcggtcctgagcctgacttcagtgattgagagacgacatggcatctggtgcatcctgaagcgatgcaactgaatgaggactgctcaaaaaatgttaacctgcttcagggttgcactgccattgaattaggttctggtgttgggctgacctgtatactttgcaacatattctgccataacgttgtgatgacagatc

SEQ ID NO: 12130 - DNA, 449 bp, Glycine max
  Clone ID: LIB3094-100-Q1-K1-E11
tccggcctgaagcacacctccaagaccagcatggctcccctgtcccactcaccgatcaatacgggggggcggttatcttaactgacgagcgcggtaatcccgtccaactcactggtgtcgctaccaccgctaccggcacagcaggttctgggtttgggtcctatggtaccggtgcttacggtggtggtgcaagtgcaaccaccgttgcagatcttttggcaacccaaccaaggagtggcagggaggctagagagcttcgtcgttcctccagttcaagctctagctcgtctgaggatgatgggcaaggtgggaggaggaagaagggagtgaaggataaaataaaagagaaactaccaggggtaggaggagggaataataataaggagcatgcacacacaacaactgctccaaccaccgccactaaccaccctgctgatcagcatgagaag

SEQ ID NO: 12131 - DNA, 444 bp, Glycine max
  unsure at all n locations
  Clone ID: LIB3094-100-Q1-K1-E2
ggctgaagcacaactacgagaccagcatggctaccctgtcccactcaccgatcaatacggtagtccggttatcttaactgacgagcgcggtaatcccgtccaactcactggtgtcgctaccaccgctaccggcacagcaggttctgggtttgggtcctatggtaccggtgcttacggtggtggtgcaagtgcaaccaccgttgcagatcttttggcaacccaaccaaggagtggcagggaggctagagagcttcgtcgttcctccagttcaagctctagctcgtctgaggatgatgggcaaggtgggaggaggaagaagggagtgaaggataaaataaaagagaaactaccaggggtaggaggagggaataataataaggagcatgcacacacaacaactgctccaaccaccgncactaaccaccctgctgatcagcatgagaa

SEQ ID NO: 12132 - DNA, 435 bp, Glycine max
  Clone ID: LIB3094-100-Q1-K1-E4
cggacgcgtgggcggacgcgtgggcactaccgccgcagaagagaccgaaacgccgtctgaggcatctccgaacaccgaatatggaagaaagaggaaaccaacacaaacacgaacaagaagaagaagaagaaatcgtttgcttagacgcgtcgttcttcgtcgatgacaattaccagctgacgaaattcacgttcggttcgcaagacattcagctcttctgtctgcattctgcttccactgattttgatttgacagggcagctggtttggcctggagccatgttgctgaatgagtatctttcaaaaaatgttaacctgcttcagggttgcactgccattgaaataggttctggtgttggtattaccggaatactttgcagcagattctggcataaagttgtgatgacagatcataatgaagaggtgatcaagatct

SEQ ID NO: 12133 - DNA, 403 bp, Glycine max
  unsure at all n locations
  Clone ID: LIB3094-100-Q1-K1-E5
agagaccgaaacnccgtcttgtcatcntttaacaccgagggtggaacaaagaggaaaccaacacaaacacgaacaagaagaagaagaagaaatcgtttgcttagacgcgtcgttcttcgtcgatgacatttaccagctgacgaaattcacgttcggttcgcaagacattcagctcttctgtctgcattctgcttccactgattttgatttgacagggcagctggtttggcctggagccatgttgctgaatgagtatctttcaaaaaatgttaacctgcttcagggttgcactgccattgaattaggttctggtgttggtattaccggaatactttgcagcaaattctgccataaagttgtgatgacagatcataatgaagaagtgatcaagatcttaaagaaa

SEQ ID NO: 12134 - DNA, 214 bp, Glycine max
  Clone ID: LIB3094-100-Q1-K1-E6
ctaaaccatcacaaacactaacaataataataataataaatcatttgcttatacgcatccttcttcatcaattacaattaccatctaactaaattcacaaatcatttctcaaaacattcaactctactttcttcattcttctaccactcatttttatttaacaattcatcatttttcacctttaaccaatttgctaaataaatatctttcaaaa

SEQ ID NO: 12135 - DNA, 386 bp, Glycine max
  Clone ID: LIB3094-100-Q1-K1-F1
ggccttcggggatcctcgtttttgctgcagtgaggcgtactcgacgcctgacatgtgtgggcgcttctccttattcgttgttcttcaagcacgcttgcccacgcgcgtatagctacgcgtacgatgacaagaccagcacctacacatgtgccaatgctaactatttgattattttctgccccttcccctataccagccaaaaactgttgggagtacgaaaagatggggcacagcttcctctggtaaataaaactatgatgtacttatcaaggctacaatcaggtggttcttcaccatcagggtagacacttacaccaaaaatagctgcttcttagtataaccgtgtaagcttttcatgctgtctccctttgatcttactattttac

SEQ ID NO: 12136 - DNA, 384 bp, Glycine max
  unsure at all n locations
  Clone ID: LIB3094-100-Q1-K1-F10
gcaaggatgtccaccgcaacaactcacgtgctctcttatcccttccctacctccggtcacgtaatccttctattagacttgggcacaaccctantctctcgcggcgtccatgtcaccgttctggtcacaccctacaacgaagccttacttccaaaaaactattcccctcttctccaaacgcttctcctccccgaacctgagttcccgaacccgaagcaaaacaggctcgtatccatggtaaccttcatgcggcaccaccactacccgatcattatggactgggcccaggcccagcccattcctgctgcggctattatatcagatntcttcctcggttggacccacctcctcggacgtgaccttcacgtgccgtgcgtagtcttt

SEQ ID NO: 12137 - DNA, 472 bp, Glycine max
  Clone ID: LIB3094-100-Q1-K1-F2
ggtcttgaaaacccgcggcgggccacgcgtccgggctgaatcacaactactagaccagcatgttttccctgtcccactcaccgatcaatagaagaatctttttatatgaacgggggagcgcagtaatcccgtccaactcactggtgtcgctaccaccgctaccggcacagcaggttctggggttgggtcctatggtaccgttgcttacggtggcggtgcaagtgcaaccaccgtttcagatcttttggcaacccaaccaatgagtggcatggaggctagagagcttcatccttcctacaggtcaagctctagctcgtctgaggatgatgggcaaggtgggaggaggaaaaaaggagcaatgataaaataatatagaaactaccaagggtaggatgtgggaataataattatgagcatgcacacacaacaactgttccaaccaccgtcactaaccacccttgtgatcagcatg

SEQ ID NO: 12138 - DNA, 233 bp, Glycine max
  unsure at all n locations
  Clone ID: LIB3094-100-Q1-K1-F3
ccactacaaccacattctcccttcccaccaccacaacggggatttttataaaactgacgaccncaatccctccaactacttttcctaccaccctacctcacacatttctggtttgatcctatttacctttctacggtgtttcaaattcaccaccttcatatctttttcacccaccaagatttcaataggctaaaagcttctcttccttaattaaactctacttctctagatta

SEQ ID NO: 12139 - DNA, 425 bp, Glycine max
  Clone ID: LIB3094-100-Q1-K1-F5
acaactcactttcttcttatcccttccctacctccggtcaagtaatccttatattagacttgaccaaaaccctagtctctcgcggcgtccatgtcaccgttctggtcacaccctacaacgaagccttacttccaaaaaactattcccctcttctccaaacgcttctcctccccgaacctcagttcccgaacccgaagcaaaacaggctcgtatccatggtaaccttcatgcggcaccaccactacccgatcattatggactgggcccaggcccagcccattcctcctgcggctattatatcagatttcttcctcggttggacccacctcctcgcacgtgaccttcacgtgccgcgcgtagtctttctccccttcggcgcctttcggctctccgtcttctacttcctctggcgcgacgccccccaa

SEQ ID NO: 12140 - DNA, 350 bp, Glycine max
  Clone ID: LIB3094-100-Q1-K1-D11
gaccctccaaaacctaccctcatcaagccggtaccatccgcaagaacggctacatcgtcatcaaaggccgcccctgcaaggttgtggaagtttcgacttccaaaactggaaagcacggtcacgctaagtgtcactttgttggaattgatattttcactgccaagaaacttgaggatattgtgccctcttctcacaactgcgatgttcctcatgtgaatcgtactgattaccagctcattgatattgctgaggatggatttttgagtccgcttactgaaaatggtaacactaaagatgacctcaagcttcccactgatgaaagtctgctcactcagaaaaagatggatttg

SEQ ID NO: 12141 - DNA, 446 bp, Glycine max
  Clone ID: LIB3094-100-Q1-K1-A12
ctctctgtgtatttccctacctctcccttcaagatgcagatcttcgtcaagaccctcaccggcgggaccatcacccttgaggtggaaagctctgacaccatcgacaacgtcaaggccaagatccaggacaaggaaggaatccccccggaccagcaacgtctcattttcgccggaaagcaacttgaggacggccgtacccttgctgactacaacattcagaaggagagtactcttcacctcgtcctccgtctccgtggtggcatgcagatcttcgttaagacactcaccggcaagaccataaccctagaggttgaaagctccgacaccatcgataacgtcaaggccaagatccaggacaaggagggtatccccccggaccagcaacgtctcatcttcgccggaaagcagctcgaggacggccgcaccctcgccgactacaacatcca

SEQ ID NO: 12142 - DNA, 294 bp, Glycine max
  unsure at all n locations
  Clone ID: LIB3094-100-Q1-K1-A5
cgataatcccaacactttccaaaacttcatccatcaacatactgaanctaanactgggcgaggttttatatactggtgaagcacactctaacattcctcctnttaaacacgctaatacaaatactaagggtagcaacatctaagaagccgattaaacctaccttaacttcctactacctttttataaacaatgattacataaacacactttttactatcgtttattacaactgaattatccaaattacccaacctttactaattatattccccatgcaatacattctctattgt

SEQ ID NO: 12143 - DNA, 392 bp, Glycine max
  unsure at all n locations
  Clone ID: LIB3094-100-Q1-K1-A8
cttcttctctggttgattcggatctagagtcttcagtttctcctcgttgttcttcgcgtgtgtgttttcaatttcgattctttcgctaatttaataagatgtttgggagggcaccgaagaagagcgataatacgaggtactacgaaatcctcggcgtctccaagaacgcttcgcaggatgatctgaagaaggcttacaagaaagccgccattaagaatcaccccgacaagggcggtgatcccgagaagtttaaagagctggcgcaagcttatgaggttctgagtgaccctgagaagcgtgagatatatgatcagtatggtgaagatgcgcctaangaatgaatgggtggtggcggtgggccatgatccatttgatatcttttcatctttctt

SEQ ID NO: 12144 - DNA, 290 bp, Glycine max
  Clone ID: LIB3094-100-Q1-K1-B1
aatccagtcctggacaggcaaaggtgtttccaaagatttttgggcatgagttaagcctgggggatacaaaatctcagtctataactattagtttctccccaaaggtggaagatgatccgggtttcacttcagactcctatgaagttcaagcactatgggtgaaccatgcttatggaaattcttccaatgggactttatgtgaccgtaatgaaagaacattgtttcctcaattgaatcaaatgatggctgggaattttaatgctcaagcaagggtttcttgtctagatctc

SEQ ID NO: 12145 - DNA, 158 bp, Glycine max
  Clone ID: LIB3094-100-Q1-K1-B10
cccacgcgtccgagaaggcctgggcttagtttataagcataactgggtgaggaataaatagaagatttataaagatggcgtcgagctcataccttccgtcttggagggcggtggcgatcacttacataaccctctctttcttattgacggatctagtc

SEQ ID NO: 12146 - DNA, 425 bp, Glycine max
  unsure at all n locations
  Clone ID: LIB3094-100-Q1-K1-B11
cacatgcgctttctttctttctcccattccaattccggggttttgcgggggcatacacacacttacctctgtggtctatagctatagcacaagatatgggtggcagttattttggagaacctaactttggaaatgaaagagcaggtggttcttcttcgtcaagaaaagggaagaagagccacaactcagacaagccaaagcaaccacagagaggtcttggagttgctcaattggagaaaatcagattccatggctatcacccttctctgcacgctccttacccttctaatttttccaacgaagatccaagagtgcanatagcatattcatcggtgccatcatcttctttttcttactcatcatcatacgcagcttcctatggattccaacccaacatcatgatgggccctatccgatatcaaaaa

SEQ ID NO: 12147 - DNA, 409 bp, Glycine max
  Clone ID: LIB3094-100-Q1-K1-B12
ctctctgggcctccacttacgaatccattgaatatacaatcatgccggacgaccatcaccgtgtagagtattaggccggcggcggagccttcaaaccctaccctcagcatgccggtcccatcccaaagaacggatacattgccatcaaacgccgaccctgcaatgttgtgcaaattgcaacttgcaaacctgcaaaccacggccaccctcaacgtcactatggagaaatcgatatacccactgccaagaatcttgaggatattgcacactcttctcacaactgtgacggtcctcacgataatcgtactgattaccagctcattcaccttgcttaagatggatgccagaatccactcactgaaaatggtcacactaaagatgaacctaagctttccactgataagagtct

SEQ ID NO: 12148 - DNA, 375 bp, Glycine max
  Clone ID: LIB3094-100-Q1-K1-B3
cgacgcgtctagttttgatttcttaatcaaaaccaattcttttcttacaccaaaattctatatatagagctagatttttttaatatacattccaataccacacatatctactttcacaaccaacaccaaaaactctaaccttaaactaggaaaaggtaaatgcttaatctgctagttctactttatggatgttttaagaactttatcactttacatactcatactggttctgtgctttacttttacttttgatagacaaaatgtctctgtattcattttcattgttaccaagttcaaattgactgcgactgccttataaaaaaattaaaaaaaatttacttaaaattataaaaaaaaaaaattgggcgacccctt

SEQ ID NO: 12149 - DNA, 446 bp, Glycine max
  Clone ID: LIB3094-100-Q1-K1-B4
cccacgcgtccgagaaggcctgggcttagttgataagcataactgggtgaggaagaaagagggagagtgaagaagatggcgtcgagcggagcggtaccgttttggagggcggcggggatgacgtacataacatactcaaacatatgcgcgaatctgctcaggaattgcctcaaggaaccctacaaggccgaatccctctctcgtgagaagctccattttgttctctccaaatgggtcgacgccaagcctgaaaaacctactattcgttcagacaccccagagcagtgatctggaatagttggaagctataaatgcataaatctttgagatctggaagttcattgtcattttgaacctttctgtgatgtttaattcctttgtttttttctctccatgaaatggaacatgcactggattttgatttgcacggttaatctttgaataat

SEQ ID NO: 12150 - DNA, 351 bp, Glycine max
  Clone ID: LIB3094-100-Q1-K1-B6
cacacacacaaacatatgctacaaactccacttcttcaacacaaaaatccgaaatttgtgcgtgcaacacaaaaaaatgaaacctacaatcaccattctcttgttgtctctactacttctcataacttcaccctccttggcaacccgacccgcatccaaccctgatcaagtcaagcacaacaaaaacaacaaccaaggtggtggtgctggtgctggtgctggcgggttctttggccctggaggagggttcaacatacccggttttggaaacgggtttggaaatggcatcataggaagaggatacggatccgggtatggaggtccgaatgaggctcctctaaggtggtatca

SEQ ID NO: 12151 - DNA, 339 bp, Glycine max
  unsure at all n locations
  Clone ID: LIB3094-100-Q1-K1-B8
ccgggtccgaccgcagcgcgtgcgggctagcttttgattggcttgatgnaaaaccctatgtgattctctgacacnncagaattctggaagggagacggcggcttcnntccaaatctccatttccgaagagtaccacagatctacntggcaaaaccaaccaggaaagactctaatcttggaggaggaaagggtggatgcttgatttgctagttttgctttatggatgttttaggaactttattactttacatactttgttggttctgtgctttacttttggttttgatagacggtatgtctctgtatgcattttgattgtttccaagttttaattgactg

SEQ ID NO: 12152 - DNA, 435 bp, Glycine max
  unsure at all n locations
  Clone ID: LIB3094-100-Q1-K1-C1
ctgagttgcaagattcacttcaaattatgcgtttcgctgatcggttcctcatcacatggggcgacgtcgcagatcatcgcaattccttgattatttccttttgttgatacgcggaatcgcgcacacggtgctggtgtgtgcactgaggtagaaagaagaagattgaattgtaaacagcatgaattaccttcttggagctttcaagcctgcatgtaatgtcttgatcacgtttaatgatgggaagaaccggaagcaggttccgtttaaaaaagaaaatggtcaaatggtcacagtcccacttttccaaagtcaagaaaacattggtgggaagattacaatagaaccaatgcaagggaagaagattgatcacaatggtgtaaaagttgagctncttggacagatagagatgtattttgacagaggaaatttttatga

SEQ ID NO: 12153 - DNA, 261 bp, Glycine max
  Clone ID: LIB3094-100-Q1-K1-C10
cccctacacttttctctctcaaaacgacctcttcctctataaccgcatatctgctccttcctcccatccccttcttcccttcataggttatactactgaatccctgacccacacaaaacaaaacagcattactcctgatattccgccaactgttactgctattaagaaccctaactctaagattgtctatgatgatcacaaccataaaatatttcccccaggtgacccaagcaagacggcatttgcctacttcttacttac

SEQ ID NO: 12154 - DNA, 408 bp, Glycine max
  Clone ID: LIB3094-100-Q1-K1-C12
ccctgtgttccgccacttatgaatctattgattttacaatcatgccggacgaacagcaccagatggagttaaggccgacggcggagcctccaaaccctaccctcagcatgccggtcccatccgcacgaacggctacatcgtcaccaaacgacgaccctgcaaggttgcggaggatgcaacttgcaaaccggcaaagcacggtcacgctcagcgtcactctggagaaatcgatatacctactgccacgaaacctgaggatattgggccctcttgtcacaactgtgacgttcctcatctgaatcgtactggttacaagctcattcatcttgctgaagatggatgtccgagtccgcttactgaaagtggtcacactaacgatgaccttatgctatccactgaagagagtct

SEQ ID NO: 12155 - DNA, 391 bp, Glycine max
  unsure at all n locations
  Clone ID: LIB3094-100-Q1-K1-C3
tcttcttcttcaatattttcttttttcacaaancannacatcactgagaagaatgttttttataataggcagcccgccccctccattcttttttcaatttttcctatactactttcccacattttcctttgatcacatcaaatatgtcaatgctgtttcttacattcagcttcatctttacaattacacttttactgccttccatttcaataattcttacttttttttttcacttcatcatctacataatatattcttcctttaaatttttctttatacaatcacttctattttatttatttttcccaaaactctttatctattaatatatataacttttatttcttctttaacattaacaacacaaccttttcattctccaaaacaaatt

SEQ ID NO: 12156 - DNA, 446 bp, Glycine max
  Clone ID: LIB3094-100-Q1-K1-C6
ggcaccggtgaaatcagttatagtcttcttgtgagacaggaggggcacaaacggattagggggtcatgttcttggaatccacatggtcacgaatttgcgacaggttcaagggataagacagtgaaaatctgggccatagagagggagtctgtcaagcagcttatgtctttacctcaatttacgagtagtgtaacagcattatcttgggttggtctccatcatcggaagaataatggacttctagctgttggaatggaaaatggccaaatagagttgtggaatctgtcttataacagagcagatgatgggagcatagcagcaccaggtttggctgcttctcttgctgtacgtatagatccttttatatgccatgcgtctaccgtaaaccgtctagcatggaagaaaaatgaggatgatcaaacgagtatgcaacttgcttcatgtgg

SEQ ID NO: 12157 - DNA, 295 bp, Glycine max
  Clone ID: LIB3094-100-Q1-K1-A10
cttgatgatcccaacactttcggtaacaggattcacaggatgctgaagcttggactgagcggggatgaagatgctggtgaagcagatgctgacatgcctcctcttgaggacgctgatgcagatgctgagggtagcaagatggaagaagttgattaaatctgacttaattgcctgttacgtttttagaaacaatgattggagaaacagtctttttactatgttttatgttttttgaattttcgaaattttggaacgttggctagttaggtgccgtatgtagtagtttctttatggt

SEQ ID NO: 12158 - DNA, 359 bp, Glycine max
  Clone ID: LIB3094-099-Q1-K1-F12
cccacgcgtccggagggctcagaggaactgtgatgcgagtagggaccggtcgttgccggtgtttagtgttagagttgtgttgattgatgagagtgccgtgttgccgattccttctaatgaaatgtatgaagcggttgaagttgttacttaggttgtgtcgagtttggccccaccaaggaaggagttgcatattgttcctattgagaccgtttattcctcggattctggtgatgggaaggagaggataaccaaagtagtgaacacagtgattgatccaacgggaagggaggatgtattgctttgtcttcgaatgttggcgctacaaaaggttgcttctgaattttggtataacaggatca

SEQ ID NO: 12159 - DNA, 199 bp, Glycine max
  Clone ID: LIB3094-099-Q1-K1-F2
acgccacgcgtcgcggctgattaattgacgtatataataatcaattgctcacttatgaaaggcgtatgaggagactttggcacagcacaacctaccatccacaaagtggagattttgactcattgaccaacttagcgctgaaggaggcgaatgagttgatcgaagggctgccgaagaagttcaagggcgggagttctaa

SEQ ID NO: 12160 - DNA, 221 bp, Glycine max
  Clone ID: LIB3094-099-Q1-K1-F3
gttggatccttatgcaacgatctctgtccattttctctggatgatattgccgaggggattgagccactatgtcaagattcagctcccacttctcactccatgacattcactacaagtttgagcgggctttcgatcatgacgtctttagttggctcatttgaggagtctcttttatctggccggttcttatctggaaacaatagcaagactatcgatggttt

SEQ ID NO: 12161 - DNA, 421 bp, Glycine max
  Clone ID: LIB3094-099-Q1-K1-F6
gttgaattcttatgcaaagatttctgtccatcttctctggatgatattgccgagatgagtgggccactatgtcaagaatcagctcccacttctcactccatgagattcactagaagtttgagtgggctttcggtcaggaggtctttagttggttcatttgaggagtctcttttatctggccggttcttatctggaaacaatagcaagaaaatcgatggttttcttgctgtgctaagcattactggtgggaacttttctcctaaatctcagaagcttccattctctgttactagcgcggatggagattgctatctactgtattatgcatcaatagatcttgctggaaattcctcttcaaacaagttaagaggccaattgctgaaacgagggtttggaaaagatgattccccaaattgtaaaa

SEQ ID NO: 12162 - DNA, 333 bp, Glycine max
  Clone ID: LIB3094-099-Q1-K1-F7
cccacgcgtccgattgcattgacctggaaacaaaccttgcatcaataggagataaagatgggcttatgaatgccaggaaattatatgaatctgcactcgcaacttatgaccaaaatgtcagcttgtggcaagattactatcgcatggagaccaagatgggaacatcagaaaaggctaatgctatctattggcgtgcaaggaaaagactcaaagatgctagtgaatttgtcactgccacagatatgtgataatatttctaaattaccaccatggctattggaagtcaattttgaccacttcatttatttgggttttctacagaaatttcttttt

SEQ ID NO: 12163 - DNA, 373 bp, Glycine max
  Clone ID: LIB3094-099-Q1-K1-F9
gcgcccacgcttccttccacgcgtccttctacgctttcgcccactcgtccgtctccctgtttctggtcactatctctgtgcattcttctctcgctctctgccttccatcacactctgcatttcctttcccaagatagtttaagatggcagacactgacgatattcaacctcttgtttgtgacaatggaacacgaatggttaaggctggatttgctggagatgatgccccacgtgctgtgtttcccagcattgtatgtcttcctcgtcacactggtgtgatggttgtcattttccaaaaataatcatatgttggtgatgatgcacaatttaatatgtgtatttcgactctcaagttccccattgaacatggaat

SEQ ID NO: 12164 - DNA, 272 bp, Glycine max
  Clone ID: LIB3094-099-Q1-K1-G1
acgcccacgcgtcggaacccattgtactataaaaacactttgcgctattaagacataaacatggggttatgtacaccatcaaatcatatgaatctaacctctcaacctatgaccataatgacaacatgtagcaagattactatcacatgttaaccaccacggtaacataatatatagctaaagctatctattggcactcatggtaagcactccaaaatgcctagaaatatggcactgccacaaatatgagataatattactaaattactacc

SEQ ID NO: 12165 - DNA, 318 bp, Glycine max
  unsure at all n locations
  Clone ID: LIB3094-099-Q1-K1-G10
cgcgtgcggatagctactattgaagaagcaaaacgagttttcccactgttcggactcggngccaatgtggcccttgttttctctggtcggggagtcaaatacttttctaatctgaggcagaatttaggtcctggagttgatggttgggccatctctctgaaagcaatgatgagcatagttgtgggtatggggtatgcaatctgtttcctgtactggtgggtgaacaattatgttcctcttcctactcgtagcaagaagaagaaagagaagcccaaaatgggaacaatggagagcttgaaggtcttgggggcttcaaag

SEQ ID NO: 12166 - DNA, 248 bp, Glycine max
  Clone ID: LIB3094-099-Q1-K1-G3
acgcttgaatacattccttgtagttcatactgactgatgggttagaagatgacgttactgatcctaagactttccctcatgctccatctggcctactctgacgtggcatccacgattacaatagaggaggcaaatggtgtggatgatgccgaatattcctgaggaagctatagatatggttacccaggtcatggcggtggcggttatcctggccatggcggtggcaggtatcctgaccatggcggtcg

SEQ ID NO: 12167 - DNA, 373 bp, Glycine max
  Clone ID: LIB3094-099-Q1-K1-G5
acgcccacgcgtccgcacccgaggtattataagacgaaactgtgctatggatacattatttttcggtgagatagactaattaatctactctatctaacatatatcccttgtgtagtcattaatacgaattaggaggcattattataagtattagaagcagctattcttatttatatagatatattgtacccaggtcatggcggtggcggttatcctggccatggcggtggcggttatcctggccatggcggtggtggtggctatcctggtcatggtggtggccaccctggtcatggtggcggctacccttgccgtggtggaggatactgtaggcatggctgttgcggtggccggacatacaacggtgggttgc

SEQ ID NO: 12168 - DNA, 410 bp, Glycine max
  Clone ID: LIB3094-099-Q1-K1-G8
gttgaattcttatgcaaagatttctgtccatcttctctggatgatattgccgaggggagttggccactatgtcaagaatcagctcccacttctcactccatgagattcactagaagtttgagtgggctttcggtcaggaggtctttagttggttcatttgaggagtctcttttatctggccggttcttatctggaaacaatagcacgaaaatcgatggttttcttgctgtgctaagcattactggtgggaacttttctcctaaatctcagaagcttccattctctggtactagcgtggatggagattgctatctactgtattatgcatcattagatcttgctggaaattcctcttaaacaagttaagaggccaattgctgaaaccagggtctgaaaagatgattccccaa

SEQ ID NO: 12169 - DNA, 456 bp, Glycine max
  Clone ID: LIB3094-099-Q1-K1-G9
gataactactattgaagaagcaaaacgattctacccactgttcggactcggggccaatgtagcccttattttctctggccggacagtcaaatacttttctaatctgaggcagaatttaggtcctggagttgatggttgggccatctctctgaaagcaatgatgagcatagttgtgggtatggggtttgcaatctgtttcctgtactggtgggtgaacaattatgttcctcttcctactcgtagcaagaagaagaaggagaagcccaaaatgggaacaatggagagcttgaagttcttggtgtcttcaaagtacatcagagatcttgccactttagtggttgcttatggaatcagcatcaatcttgttgaggttacctggaagtctaagctcaaagctcagtttcctagtcccaacgagtacctctcttttatgggtgacttctcaactgcaactgg

SEQ ID NO: 12170 - DNA, 363 bp, Glycine max
  Clone ID: LIB3094-099-Q1-K1-H1
gaagttgcgagagtgaagaaatggcgcaagtcttggcattggatttggaggagctgcgccggctccacagcatcgccaaaagacctcgaaccctctctcttctctcctccgaaattcgtaacctcgaaaagttatcgtcagaggaagcttctgcgcagattccggcgccgatttcgaccggaactaaagtggcgccttcacctgcgctgaagtatgcggcactcgcgtcgttcagttgggaccaggatagtgacaaagttaagatatatgggttaatggagggaatcgatgagaataatgttggatccgagtttaagtccatgtccttcgatggtaagtccctgatgttcaagggaaggacta

SEQ ID NO: 12171 - DNA, 237 bp, Glycine max
  Clone ID: LIB3094-099-Q1-K1-H2
gacccacgcgtgcggttgaattcttatgcaaagatttctgcccattttctctggatgatattgcccacgtgatcggtccactatgtcaaggatcagctaccacttcttacttcatgacattcaacattattcactacttgctctcatcattaaagactgtagttggttcatttgaggagtctcttttatctggcctattcttatctggaaacaatagcatgaaaatctatggttttc

SEQ ID NO: 12172 - DNA, 363 bp, Glycine max
  Clone ID: LIB3094-099-Q1-K1-H3
gatttggatgctaatttttttgattagccataaatgcttggagagcccattgcaggtctgcgtttgctgcactatgaaggtcaagtttcggatcccttgaaaggattatatggagctggagctcatactgactatggtttaattacactgttagcaacagatgatgtctcgggtcttcaaatatgcaaagatagggatgctaaaccttaaaaatgggaggatgtaacaccattgaaaggagcaatcatagtgaatcttggggacatgccggagcgcttgaaccactgcgtttttaagtccacactgcacagagttctaggaaacggtcaaagaagatattctattgcatacttcttggagccc

SEQ ID NO: 12173 - DNA, 125 bp, Glycine max
  Clone ID: LIB3094-099-Q1-K1-H5
gaagttgctactgagaagaacgctttcactttttggcattggatttccattatcagggtgggcttcataccctatgcaagtcacctttaacattctctcttctgatcatctaaatccgtaacctc

SEQ ID NO: 12174 - DNA, 260 bp, Glycine max
  Clone ID: LIB3094-099-Q1-K1-H6
cagagtttgagtggacctgtctcttctactttttaccttggttattcactactcgtggccgttgcaatcatgttgtgaaccggcaccattggcttccttatgtcattctactttgtgcactacttgttctcatcagtaaagatagattgaggttcttgttgtcattgcatattaactatgaaaaaggttgattgatataacttgatcacattgcatagtagggcaacggatgtttaattcatttgccgattttatatttg

SEQ ID NO: 12175 - DNA, 228 bp, Glycine max
  Clone ID: LIB3094-099-Q1-K1-H7
cccacgcgtccgggttcttttcatggttgatgccattgatgaatatgctgttggccagctgagggaatttgagggcaagaagcttgtctctgccaccaaggagggtctcaaacttgacgagagtgaagatgagaagaagaagcaagaggagttgaaggagaagtttgacaacctatgcaaggtgatcaaggatgttttgggtgacaaggttgagaaagttgtagtctc

SEQ ID NO: 12176 - DNA, 273 bp, Glycine max
  Clone ID: LIB3094-099-Q1-K1-H8
gcggatttggatgctaatttttgtgatcagccataaatgcttggagagcccattgcggctctgggtttgctgcactatgagggtcaagtttcggatcccttgaaaggattatatggagctggagctcatactgactatggtttaattacactgttagcaacagatgatgtctcgggtctttaaatatgcaaagatagggatgctaaacctcagaaaatgggaggatgtagcaccattgaaggaagcattcatagtgaatcttggtgacatgct

SEQ ID NO: 12177 - DNA, 415 bp, Glycine max
  Clone ID: LIB3094-099-Q1-K1-F11
cccacgcgtccggagggctcagaggaacttctatgcgagtagggaccggtcgttgccggtgtgtggtgttggagttgtgtttattgatgagagtgccgtgttgccgattccttctaatgaaatggaggaagcggttgaagttgttagtgaggttgtgtcgagtttggccccaccaaggaaggagttgcatattgttcctattgagaccgtttattcctcggattctggtgatgggaaggagaggataaccaaggtagtgaacacagtgattgatccaacgggaagggaggatgtattgctctgtctgcgaatgttggcgctacaaaaggttgcttctgaatttggtataacaggatcattctggggtcatgcatttcgaggattgcttgccatgtcatttcagccactgtgaagg

SEQ ID NO: 12178 - DNA, 345 bp, Glycine max
  Clone ID: LIB3094-099-Q1-K1-D1
cgaagtggaacgacgtctcagggttggagtatcgccaaacaggccttgcaggagggggtgagtttgcctgtaaagttccctcagttctttactgggaaaagacgaccctggagagctttcttgttgtatggacctcctggaacgggaaaatcatatttagccaaggcagttgcaacggaagccgagtccacgtttttcagcgtttcttcatcagaccttgtttcaaagtggatgggtgaaagtgaaaagctggtttcaaaccttttcgaaatggctcgagaaagtgccccttctatcatatttattgacgaaattgattccctgtgtggtcagcgtggagaaagc

SEQ ID NO: 12179 - DNA, 388 bp, Glycine max
  Clone ID: LIB3094-099-Q1-K1-D10
cgcgtgggctcaggaggagaataaggatgtcttataggaagttcgagcacccaaggcacgggtgactgggatttctccccaggaagcgtgctgctcgtcacaggggaaaagtgaaggcattccccaaggatgacccatccaaggcacccaagctcactgcattcttgggttacaaggctggtatgactcacattgttagagaggtcgagaagccaggatcaaagcttcacaagaaggaaacatgtgagcctgttacaattattgagacccctccaatggttattggtggtgttgtgggttatgtgaaaactccccgtggtctccgaacattgaacactgtatgggctcagcacttgagtgaggaactggaacgtaggttttataagaa

SEQ ID NO: 12180 - DNA, 314 bp, Glycine max
  Clone ID: LIB3094-099-Q1-K1-D3
cccacgcgtccgcggacgcgtgggggtttttgtggattatagcgagctataatggctgcggggatagggggtttaattgctgggtttgatgttgactggactcttacagctcccaggaaggtggtcacaccggaaatgttgacattcatgcaagaactacgaaaggttgtaacggttggagttgttgggggttctgaccttataaagatatcagagcaacttggcagcacagttaccaatgagtatgattacgtattttctgagaatggtcttgtggctcacaaggaatgaaagctcattggaactcagaactt

SEQ ID NO: 12181 - DNA, 198 bp, Glycine max
  unsure at all n locations
  Clone ID: LIB3094-099-Q1-K1-D4
cgtcccgattagcgtgctanngtttgcctttattggtgtaccttttgttgggtctctatcccnntgctggatgccgtgcatctgagcggatggctcannaaaatcangnnatgaagaaagcagaagggannggcagatnactatgcagnntttctgggaatttnntctggaannnatggtgctnnngggataccctat

SEQ ID NO: 12182 - DNA, 316 bp, Glycine max
  Clone ID: LIB3094-099-Q1-K1-D6
ctgtttgcctattggtgttcttttttgtctctaccctgctgcatgccgcatctgtcgatttcaaaaatcagatgaagagcataaggaggcagaactatcagcttctgaattttctgtaaatggtgctgtgatactatctgctgctagcacagttgccagtacttttctcttagttcttgttgcttaatggggctacaagtcatttttctccacaattgcccttgcagcatcttcttctccccttggagtcattatctgtagcactggctgttcatggtgttgcaactttgctatctgtacttgggtgttctttact

SEQ ID NO: 12183 - DNA, 373 bp, Glycine max
  unsure at all n locations
  Clone ID: LIB3094-099-Q1-K1-D7
cccacgcgtccgcggacgcgtgggggtttttgtggataagagtgagctataatggctgccggganagcgggtttaattgctttgtttgatgttgacgggactcttacagctcccaggaaggtggtcacaccggaaatgttgacattcatgcaagaactacgaaaggttgtaacggttggagttgttgggggttctgaccttataaagatatcagagcaacttggcagcacagttaccaatgagtatgattacgtattttctgagaatggtcttgtggctcacaaggaaggaaagctcattggaactcaaagcttgaagtcattccttggtgaagaaaaactcaaggagtttattaactttacacttcattata

SEQ ID NO: 12184 - DNA, 172 bp, Glycine max
  Clone ID: LIB3094-099-Q1-K1-D9
aacaatatattcataaaccaaatacccatccattatctctaaattaatcatcacaatatcaaatataacactcctaaataccaactttaatctctctttaacaacatctacattcatctacaaataatatctactaacattacccaccatttatatcttactactacatatt

SEQ ID NO: 12185 - DNA, 189 bp, Glycine max
  Clone ID: LIB3094-099-Q1-K1-E1
tctgaatacattcactatactttatactgattgaagggattcaatatgtccttacggatcggaggccttttagtcatgcatcttgtggtctactctgacggagcatacacaaatacactacatgacgcaaatggagcacatgatgcctaatatgcacatgcaagcctataaggaggttacccatgctat

SEQ ID NO: 12186 - DNA, 403 bp, Glycine max
  unsure at all n locations
  Clone ID: LIB3094-099-Q1-K1-E10
gcttcctcctcttacgagcctttcctttcagtccattgattcggtgggtgcgggtgcagcgagaccgagctagaccctgatcggcgtcngcacaccgncggagaacaagatgattgtctgcgtcgccctcgtcggtcaccagaacaatccgctgtacatacagagctttacggaggccgatgatgctctcaagctccaccacatcgtccattgctcgctcgatgtggtcgacgagcgagtgaacaatcctaaaaagtctgggccgatgcttaatgagacgtttttgggactgctttatcctattgaaaactacaaagtatatggatatctgactaatacgaaggtgaaatttatcttggtgaccacggatctggatggtaaagatgccgatgtaaggaatttt

SEQ ID NO: 12187 - DNA, 76 bp, Glycine max
  Clone ID: LIB3094-099-Q1-K1-E12
gcttgctcctcttacgagcctttcctttcatttcattgattcggtgggtccggttccagcgaaaccgtcctaaacc

SEQ ID NO: 12188 - DNA, 266 bp, Glycine max
  Clone ID: LIB3094-099-Q1-K1-E2
acgcttttaatttaaaagaaaaagttcgaaaacatgtctattctgacttagaaggagaaatgcggtggagtaccgatgtgtaccatgcatcagaatttagatatagtaatgtccatatcttaccaaaaacaagtcatttatggattttatcaggaaaatcatacaggtccggttcagtctctttttcaatccgaaaagatcaagatcaaatgaacattcattatctttctactggagaaagagatttttgtaaccttttagcaagt

SEQ ID NO: 12189 - DNA, 404 bp, Glycine max
  unsure at all n locations
  Clone ID: LIB3094-099-Q1-K1-E3
tttcgtggctgcggaggacccttatagattcttcgactggaccattacctatggtgacattgatcccctaggagttaaacaacagggtattcttatcaatggccaattcccaggccctgaaatctattctgttaccaatgacaatttgatcattaacgtgcacaataacttgaccgagccgtttcttctatcatggaatggtgttcaacanaggagaaattcttatcaagatggagtttatggcaccacatgccccatccctcctgggaagaacttcacctacacacttcaagtcaaagatcanattggaagtttcttctatttcccatctcttgctttccacaaggcaactggtggttttggagccatcaaaatcctttacaggccaaggatccctgtcccgt

SEQ ID NO: 12190 - DNA, 360 bp, Glycine max
  Clone ID: LIB3094-099-Q1-K1-E4
cccacgcgtccgcccacgcgtccgcccacgcgtccgcggacgcgtgggcttcaacttggaggaccacgctaactaccctgattctgatcagattccttactttgaggatggtgattctgtgacatacaataatgagaaggaggggatcattgagtgcttgaaaaggaatgtgggtggtgatttagatagtgaggtttcttctctccctgattggataccaaccaaagtgatggccaccacttggcttgctgatgcacttgagtatgaactgtgggtgggatgtgatggttcctctgcttatagcatctattattctgatcttccctggcctatcggcaaggttctcttttggaagaaagc

SEQ ID NO: 12191 - DNA, 368 bp, Glycine max
  Clone ID: LIB3094-099-Q1-K1-E5
cgacccacgcttacgtttggatactctcactgacccttatacagtttttcatcgattccatatcctattgcggacggtacctttataatctaacttcgtcatcactacactgacgtagcaactcaccaataccttaaattctacttatagttccacatatcaatcccgatcattcacatgcacaataacttgaccgatccttatgttctatcacggaatggtattcaacaaaggacaaattcttatcaagatggagtttatggcaccacatgccccatccctcctgtgaagaacttcacctacacacttcaagtcaaagatcaaattggaagtttcttctattttcccatctcttgctttcaacaagc

SEQ ID NO: 12192 - DNA, 186 bp, Glycine max
  Clone ID: LIB3094-099-Q1-K1-E6
acgcccacgcgttcgaccacgcgtacgcccacgcataccttgactcttgggactcaacttgaatgaccacgctaactaccctgattctgatcagattccttactttgtatagtaatgaccatatgacatacaatactgagaatgaatggatcatagcatgcttgtcatgcaatgccggtggagact

SEQ ID NO: 12193 - DNA, 377 bp, Glycine max
  Clone ID: LIB3094-099-Q1-K1-E7
cttctccttctcaatcttgtaattctatttcctccaccataatgctgcgcaagcttgtgtcggggccacgcaagaacaagcctggcacagttcccgttcacctcaacgtctatgatctcaccccaatcaacggctatgcctattggcttggccttggagtctaccattctggggttcaagttcatggattggaatatgggtttggtgcgcacgagcacgacacaacggggattttcgaagtccaacccaaacactggcctgggttcactttcagaaagtcaattttcatcggaacaacagatctgggtccgaaagatgttcgagcattcatggagaagctggctcaagattactccggcaacacctatcatctcatt

SEQ ID NO: 12194 - DNA, 281 bp, Glycine max
  Clone ID: LIB3094-099-Q1-K1-E8
gtcggcgctgtggcggacgcgccggcggtggttgacgagaacacggacttcgacgtgctgagtcgactacgtgccgagcaacgctagaatcgccgtgattgatgctgtgacggcattgtccaacctagcgctgaaggaggccattgagttgatcgaagggttgccgaagaagttcaaggaatggatttcaaaggactaagcttgagatgcgaagaagcaactcgaagaagctggtgccaagggtaccatcgcttaaacactgtctagctgcagcatatatg

SEQ ID NO: 12195 - DNA, 424 bp, Glycine max
  Clone ID: LIB3094-099-Q1-K1-E9
gcgcagaacagggactcactctcttcgtttcggcactctcggtggctttcatcttctcgcgttgtgaagatgtacacatcgaggaagaaaattcacaaggataaggatgctgagccaactgaatttgaggaatcagttggacaggcattgtttgatctagaaaataccaacaatgagctgaaaagtgatctgaaagatttatacataaactcagctgtccaaattgatgtttctggcaaccgaaaggctgtggttatccatgtcccctacagactaaggaaaggattccggaagattcatgtcaggcttgtgagagaacttgagaaaaagtttagtggaaaagatgtaatcttgattgccaccaggaagatagtaaggccaccaaagaaagggtctgctgttcagcgcccacgcaccaaaacac

SEQ ID NO: 12196 - DNA, 364 bp, Glycine max
  Clone ID: LIB3094-099-Q1-K1-F1
ggcggcactgtggcagacgcgccggcggcgtttgaggagaagacggacttcgacgtggtgagcgcagaagcaccgatcaacgctcgaatcgtcacgataacggctatgatctcaccgacaaacacagctctgcctaatgccaaggacttgaacgactccattccgaagaacatcatcgatggtattacaaaggactaaggctcactatgccaacaatcaactcgaaaaatctggagccaacgctaccattgcttatacactgactaactgcaagatatatgttctgcttcctctattgttggttgcaaatgagttcaccatttcactggaatatcattttcattttgtctggatttcaactttt

SEQ ID NO: 12197 - DNA, 383 bp, Glycine max
  Clone ID: LIB3094-099-Q1-K1-F10
cccacgcgtccgcacgttccgagttttctgatcgctcatagagagttcgacgcggcggttgcgagaagaagattgcaagatgaagttcaacatcgcgagtcccaccactggatgccagaagaagctcgagatcgacgacgatcagaaactacgagcattttgggacaagaggatctcacaggaggtcagcggagatgcacttggtgaggaatttaagggctatgtcttcaaaattactggaggttgtgacaaacaaggattcccgatgaaacagggagtgcttactcctggtcgtgttcgacttttgcttcacaggggaactccttgcttccgtggatatggaaagcgtaatggagaacgtaggagaaagtctggtcgtgggt

SEQ ID NO: 12198 - DNA, 245 bp, Glycine max
  Clone ID: LIB3094-099-Q1-K1-C9
atcaccctgccgacccacgcatgcgcccacgcttactcctccctctccatactactatcctattcaaacaatgtctcaaaggttacgtgcttttttcaccaaaaatcttccctactctaataacaccattacaaatatctcccattttcatgtcttcctctaaaaacttctactttctattcctactcttctatacctcatcacacaattcatacccttactcaatttatactactaaactctct

SEQ ID NO: 12199 - DNA, 279 bp, Glycine max
  Clone ID: LIB3094-098-Q1-K1-H6
cccacgcgtcctctcatgacgataataatctaaactctcactttattcaaccacccattacctaaaagctaagtttatatccactaacccatcccccatacatttcaaaagtgaatacattccccaactatgacccatccaattcacccaacctcactacattcattttttacaattctcttatcactcacattcttatatacctctaaactccaatatcaaatctatcacacctaatgattcatgtcaatcctataacaactatttacacccctccaa

SEQ ID NO: 12200 - DNA, 396 bp, Glycine max
  Clone ID: LIB3094-099-Q1-K1-A1
cggacgcgtgggcggacgcgtgggttatcatccgcagctgcttttattcgcaccgcaaacggtgagccatggccgtcggaaagaacaagcgcatctccaaggggaagaagggtggcaagaagaaggcagctgatccctttgccaagaaggattggtatgacattaaggctccttctgtttttcaagtgaaaaatgttggcaaaaccctcgtctctcgtactcagggtaccaagattgcttctgaaggactcaagcatagagtgtttgaggtctccttggctgatcttcaaggggatgaggatcatgcattcaagaagattaggttgagagctgaagatgtgcaagggaagaatgttctgacaaatttctggggaatggatttcacaacagacaagc

SEQ ID NO: 12201 - DNA, 425 bp, Glycine max
  unsure at all n locations
  Clone ID: LIB3094-099-Q1-K1-A10
gcaagtgtaacccaaaaccctagcggcgcctgctttcttcgttcgtcttttgcatcagccatgangatggagtctcaggtgaagcatgctcttgttgtcaaagttatgggtcgtactggatccagaggacaggtgactcangttagagtgaagtttttggatgatcagaaccgtcatatcatgaggaatgttaaaggaccagtgagagaaagagacattctcaccctactcgagtctgaaagggaagcaagaaagttgcgctagagggtatntttttcttgatctttatggtagttagttggtgctaaaggttatagcaccctgtcttggtgtcttggatctattttcattcaaattatgggttgaatttttggaatgttggagtttaatatatgattttgaattatggccttaaaatttggaat

SEQ ID NO: 12202 - DNA, 98 bp, Glycine max
  Clone ID: LIB3094-099-Q1-K1-A11
ccaacttaaaaagcaccagacgtatccttacacattttgcactgccaaaactcttgtttctcacaatataatccatattcaacctacaattatttctc

SEQ ID NO: 12203 - DNA, 186 bp, Glycine max
  Clone ID: LIB3094-099-Q1-K1-A12
gaagttgcgagagtgaagaaatggcgcaagacttggcattggatttggaggagcttcgccggctccacagcatcgccaaaagacctcgaaccctctctcttctctcctccgaaattcgtaacctcgaaaggttatcgtcaaaggaagcttctgcccaaattccggcgccaatttcgcccggaccta

SEQ ID NO: 12204 - DNA, 214 bp, Glycine max
  Clone ID: LIB3094-099-Q1-K1-A2
ctcgagcatccgaacactttcgatggcaggttccattgatgaatatgctgttggccaactggaggagtttaagctcaagaagcttgtgtttgcctgcatggaggtgatgacacttgtccagagtctgaatgtgacgagaaggcatgaggagatgaaagataacttagacgactgatgacgggtgagaaacgatgattggagagacagtcttttt

SEQ ID NO: 12205 - DNA, 289 bp, Glycine max
  unsure at all n locations
  Clone ID: LIB3094-099-Q1-K1-A4
atggaacactttcggtaacaggtttcacttgatgctgaagcttggactgagcagttnatagtagatgctggtgaagcagatgctgacatgcctcctcttgaggacgctgatgcagatgctgagggtagcaagatggaagaagttgattaaatctgacttaattgcctgttacgtttttagaaacaatgattggagaaacagtctttttactatgttttatgttttttgaattttcgaaattttggaacgttggctagttaggtgccgtatgtagtagtttctttatggt

SEQ ID NO: 12206 - DNA, 407 bp, Glycine max
  Clone ID: LIB3094-099-Q1-K1-A5
gttcgacccacgcgtacgcccacgcgtacgggttcttttcatggttgatgccatttatgaatatgctgttggccagctggaggagtttgagggcaagaagcttgtctctgccaccaaggagggtctcaaacttgacgagagtgaagatgagaagaagaagcaagaggagttgaaggagaagtttgacaacctatgcaaggtgatcaaggatgttttgggtgacaaggttgagaaggttgtagtctctgaccgtgttgttgattcaccatgctgtctggtgactggagaatacggttggactgcaaacatggaaaggatcatgaaagctcaagccctaagggacaacagcatggcaggatacatgtcaagcaggaagacaatggagatcaaccctgagaacccaatta

SEQ ID NO: 12207 - DNA, 296 bp, Glycine max
  Clone ID: LIB3094-099-Q1-K1-A6
cttgatgatcgcaacactttcggtaacaggtttcacaggatgctgaagcttggactgagcgttgatgaagatgctggtgaagcagatgctgacatgcctcctcttgaggacgctgatgcagatgctgagggtagcaagatggaagaagttgattaaatctgacttaattgcctgttacgtttttagaaacaatgattggagaaacagtctttttactatggtttatggtttttgaattttcgaaatattggaacgttggctagttaagtgccctatgtaagaggttctttatgggt

SEQ ID NO: 12208 - DNA, 424 bp, Glycine max
  Clone ID: LIB3094-099-Q1-K1-B1
cattttctggcgtaaccaaccctgacactccttcttcttcgatgcctaactgggtgaggaagaaagggagagagtgaagaagatggcttccagctgcacgacaccgttttgcacggcggcggggatgacgtacataacatactcaaacatatgcgcgaatctgctcaggaattgcctcaaggaaccctacaaggccgaatccctctctcgtgagaagctccattttgttctctccaaatgggtcgacgccaagcctgaaaaacctactattcgttcagacaccccagagcagtgatctggaatagttggaagctataaatgcataaatctttgagatctggaagttcattgtcattttgaacctttctgtgatggttaattctttgtttttttctcttcatgaaatggaacatgcactggattt

SEQ ID NO: 12209 - DNA, 332 bp, Glycine max
  Clone ID: LIB3094-099-Q1-K1-B10
tcggaagggtccagagtaaaaaaatgtctcaagatattgcattggatttctatgatcttctccggctccgggatcatatccaaaagacctctaaccctatctcttctctcctcctaaattcataacctcgaaaagttatcatcagattaatcttctactcacattcctgcgcccatttctatctttactaatatttctccttcacctactcattattatgctgcactctcattattcatttaataccattatagttacatagataacatatatgttttaatcgaggtaatccatcacaataattttgaatcctattttaagtctatatcatt

SEQ ID NO: 12210 - DNA, 255 bp, Glycine max
  Clone ID: LIB3094-099-Q1-K1-B12
ttttattcatccattcatacactaccacctagataacacaacacttaacaatttacattactcattacacttacttaatcctcaatctatccaaattcttcaaccatgtcattttcttctgcatctgctttctccaaacttatactatttccccattcttcaacttcttcccttatcttcacaccctttcgttccttcaacaacaacctttaactattccctttcttctacttctttcttcaacccaacaacctt

SEQ ID NO: 12211 - DNA, 368 bp, Glycine max
  unsure at all n locations
  Clone ID: LIB3094-099-Q1-K1-B4
gcgtccacgcgtncgtcaagcattgcattcctcttgattagtagtttgatttgtgcttgagatgggagttctgccaaatcaagaggggttttaagatcatagtgtgtgttttgcaacaatggctaagttctttgctgctatgatcttggcactctttgccatttccatacttcaaacagtggtaatggctgctaatgaacaaggaggccacttgtatgacaacatgagcaaatatggaagtggaagtgtcaagagttaccaatgcccatcacaatgctcgaggagatgtacccagactcagtaccacaagccctgcatgtttatccttcagaagtgctgcaggacatgcctgtgtgtccccccgggta

SEQ ID NO: 12212 - DNA, 140 bp, Glycine max
  Clone ID: LIB3094-099-Q1-K1-B5
acataacatactcaaacatatactcaaatctcctcaccaattgcctcaacgaaccctacaactccaaatacctctctcattaaaacctccattacattctcttcaaatctttctacacccatcctaaaaaacctactatt

SEQ ID NO: 12213 - DNA, 407 bp, Glycine max
  Clone ID: LIB3094-099-Q1-K1-B8
tcgatgaaatcagagtgaggtttgacatgccggttcttgtcaaggaagatgttaaggtatcaggggagggtgatatgcttgttataaaaggtggccacaaaagtgaacaagaacatggtggagatgattcttggtcaagcaggacctatagttcctatgatacccgtttaaagctgccggataattgcgagaaggacaaggttaaggcagagttgaaaaatggtgtgctttatatcaccattcctaagaccaaggttgaacgtaaggttattgatgtccaagttcagtgagatatgcttgggctttgtattatgcaacacgggtttttaccatgtttttacgtttttaacatatatacacccattattaaggttaaatattttgtattaagcgtagagaagtttaaa

SEQ ID NO: 12214 - DNA, 301 bp, Glycine max
  Clone ID: LIB3094-099-Q1-K1-C1
gacccactcgtacgcccacgcgtccgattttaactgtgtttgtgtgacaaacttgaaaagtactttatggtataagtttaactcaactttgctatttataatctactattcatcttaataagctaaacttaccatacttaattgctaatctaaattcccttgaaaccaattacctgcatttgtcaaaattttcccactattatatccaccattactaatcataattaacccatatttcaatatataataattccctttcattcttgacattcaaattttacaatttaaccaatttaaatca

SEQ ID NO: 12215 - DNA, 295 bp, Glycine max
  Clone ID: LIB3094-099-Q1-K1-C4
tcaaaattcttctgcctttccctacttattctttctctcaacctatttagcttaagtcaggttttgaccaatgactagcggttttggtgaatcaactacatcttctgcacctatcccatcatgctcagataacattttaaactatgcctttgattttcaattcaacatattcttcaatttgtcacaagaccctttgatcacactctgttgtcacctattctagattcacaattccttatatttttctccatcatcactcccattctcataattgacctatttctattcccttttt

SEQ ID NO: 12216 - DNA, 142 bp, Glycine max
  Clone ID: LIB3094-099-Q1-K1-C5
atgaaatcgagtaggtttgacatgccgttcttttcaggaagatgttaagtatcaggggacggtgatattctagatataaaaggtgcccacaaaattgaacatgaacattttggatatgattcttggtcaatcaggacctata

SEQ ID NO: 12217 - DNA, 328 bp, Glycine max
  Clone ID: LIB3094-099-Q1-K1-C6
cccacgcgtccgtcaaaattcttctgcctttccctactaattctttctctcaaccgatttggctgaaggaggtgtttggccaatgacgagtggttttggtgaatcaacgagagcgtctgcaccgagcccatcatgctcggggaacagttcaaacgatgccggtgattttgaatgcaacatatgcttcgatttggcgcaagaccctgtgatcacactctgtggtcacctattctgttggccatgcctttataggtggctccaccattactcccattctcaggaatgcccctgtttgcaaggccctttgtcatgaaagagaaattgggtt

SEQ ID NO: 12218 - DNA, 324 bp, Glycine max
  Clone ID: LIB3094-099-Q1-K1-C7
cccacgcgtccgtcaagcattgcatccctcttgatttgtagtttgttttgtgctttagatgagagtgtgtgccaaatcaagaggggttttaagatcatagtgtgtgttttgcaacaatggctaagttctttgctgctatgatcttggcactctttgccatttccatacttcaaacagtggtaatggctgctaatgaacaaggaggccacttgtatgacaacaagagcaaatatggaagtggaagtgtcaagagttaccaatgcccatcacaatgctcgaggagatgtagccagacccaataccacaagccctgcatgtttttct

SEQ ID NO: 12219 - DNA, 281 bp, Glycine max
  Clone ID: LIB3094-098-Q1-K1-H5
ctcaggaggagaataaggatgtctcacaggaatgttcgagcacccaaggcacgggtcactgggatttctccccaggaagcgtgctgctcgtcacaggggaaaagtgaaggcattccccaaggatgacccatccaaggcacccaagctcactgcattcttgggttacaaggctggtatgactcacattgttagagaggtcgagaagccaggatcaaagcttcacaagaaggaaacatgtgagcctgttacaattattgagacccctccaatggttattggtg

SEQ ID NO: 12220 - DNA, 361 bp, Glycine max
  Clone ID: LIB3094-098-Q1-K1-E3
cccacgcgtccgagaaggcctgggcttagttgataagcataactgggtgaggaagaaagagagagagtgaagaagatggcgtcgagcggagcggtaccgttttggagggcggcggggatgacgtacataacatactcaaacatatgcgcgaatctgctcaggaattgcctcaaggaaccctacaaggccgaatccctctctcgtgagaagctccattttgttctctccaaatgggtcgacgccaagcctgaaaaacctactattcgttcagacaccccagagcagtgatctggaatagttggaagctataaatgcataaatctttgagatctggaagttcattgtcattttgaacctttct

SEQ ID NO: 12221 - DNA, 408 bp, Glycine max
  unsure at all n locations
  Clone ID: LIB3094-098-Q1-K1-E4
ctacctctcaagtttttgaagtatagagatggcagagacattcctatttacctcagagtcagtgaacgagggacaccctgacaagctctgtgaccaaatctctgatgctgtcctcgacgcttgcctcgaacaggacccagacagcaaggttgcctgcgaaacatgcaccaaaaccaacttggtcatggtcttcggagaaatcacgaccaaggccaatgttgactacgagaagatagtgcgtgacacctgcaggaacatcggctttgtctcaaacgatgtgggactggatgccgacaactgcaaggtcctcgtcaacattgagcagcagagccctgatattgctcaaggtgtacacggncacctnaccaaaaaacctgaagaaattggtgctggtgaccagggtcacat

SEQ ID NO: 12222 - DNA, 105 bp, Glycine max
  Clone ID: LIB3094-098-Q1-K1-E9
gtcgttcatgataaatttgggcaaaattccaacattgagctatagttttaaattcgatatagaaattccaacattgttattttaacaattaaagcattatgtttt

SEQ ID NO: 12223 - DNA, 404 bp, Glycine max
  Clone ID: LIB3094-098-Q1-K1-F11
caagatcctgtttccttatactcttatctcactaaaactttctagcttgctaaggcttgggtttacttacattgatatttatcaattcatgattttatgaagcttttctctccgttttacttgacatgttttgcgttgttaattgggtggttctgattcgtgtcatgactgttgcctctcaggtttgctgaagcctaagcaacgttttggggattgttggaaaagcacggtgcccataatatttctctcataaattctatggtcatggtttctaattgcccactagtggttccttcaaattttaaaatatcttttgaatttatttttgcttcacaattgtgatgattaatttgagttgggttcgttttaatttgagtctatccttttgttaaataacaattttt

SEQ ID NO: 12224 - DNA, 440 bp, Glycine max
  unsure at all n locations
  Clone ID: LIB3094-098-Q1-K1-F12
ctacctctcaagtttttgaagtatagagatggcagagacattcctatttacctcagagtcagtgaacgagggacaccctgacaagctctgtgaccaaatctctgatgctgtcctcgacgcttgcctcgaacaggacccagacagcaaggttgcctgcgaaacatgcaccaaaaccaacttggtcatggtcttcggagaaatcacgaccaaggccaatgttgactacgagaagatagtgcgtgacacctgcaggaacatcggctttgtctcaaacgatgtgngactggatgccgacaactgcaaggtcctcgtcaacattgagcagcagagccctgatattgctcanggtgtacacgggcacctnacccaaaaaacctgaagaaattggtgctggtgaccagngtcacatgtttggctatgccactgatgaaacccctgaa

SEQ ID NO: 12225 - DNA, 318 bp, Glycine max
  Clone ID: LIB3094-098-Q1-K1-F2
ctacgtctcaagtttttgaagtatagagatttcagttacattcctatttacctcagagtcggagaaggagggacaccctgacaggctctgtgaccaaatctctgatgctgtcctcgacgcttgcctcgaacaggacccagacagcaaggttgcctgcgaaacatgcaccaaaaccaacttggtcatggtcttcggagaaatcacgaccaaagccaatgttgactaccagaagatagtgcgtgacacctgcaggaacatcggctttgtctcaaacgatgtgggactggatgccgacaactgcaaagtccttgtcaacat

SEQ ID NO: 12226 - DNA, 269 bp, Glycine max
  Clone ID: LIB3094-098-Q1-K1-F4
acttagatgacttctgcggcctcggaacggctgctggaaaggctggaagttccaggatgtgggagcctctaaagcattcatctaagatgtctcgaagagataggagccttggaaaatcatctgtaaggtcctacacggatgaaactatggaacaacaaagctggataagattggctgatgatctatttgatcctgtgattgcacgacttcccattgccacatgtttctgcttgcgatctgtatgccaacgatggaactccttgctgact

SEQ ID NO: 12227 - DNA, 425 bp, Glycine max
  Clone ID: LIB3094-098-Q1-K1-F7
tttgaatacattccttgtagtttatactgaaatgatgggtttgaagatggcgttactgatcctaggcctttccctcatgctccttttggtctcctctgaggtggcatccacgaatacaaaagaggaggcaaatggagtggatgatgccaaatatcccggtggaagctatggagggggttacccaggtcatggcggtggcggttatcctggccatggcggtggcggttatcctggccatggcggtggtggtggctatcctggtcatggtggtggccaccctggtcatggtggcggctaccctggccgtggtggtggatactgtaggcatggctgttgcggtggccggacatacaacggaggttgcagaaagtgctgctattacgctggcgaagctgttgctgcacaaactcaagataggactcacg

SEQ ID NO: 12228 - DNA, 370 bp, Glycine max
  Clone ID: LIB3094-098-Q1-K1-F9
cgcaagatcctgtttcctgatacactgaggctcacttaaagctttctgagcttgggtaaggctttgtatttcttacattgataatttataaattcatgattttatgaaacttttctctccgttttacttgacatgttttgcgttgttaattgggtggttctgattcgtgtcatgactgttgcctctcaggtttgctgaagcctaagcaacgttttggggattgttggaaaggcaccgtgcccataatatttctctcataaattctatggtcatggtttctaatgcgccactgtgggttcctcaaatttttagatagctcttgaatgtattttgctggacatggtgatgatgatttgagtttgggttgttt

SEQ ID NO: 12229 - DNA, 345 bp, Glycine max
  Clone ID: LIB3094-098-Q1-K1-G1
gcttttctcatgtttaatttatgcgatcagcttccgggtggagacttgatattagaaacccgtgcaaatatgccaaacttaagagagtcacatcatgaaaatgatttcaagggtggaagtggaatgtattctatatcagccttggacatggtttctaacttgggatttgtatttggagcaagttcaaacaactcaaatgagagtaggattgctgtgggtgaaatatctgttggagaaatgactgaattggaaagagcggttaaagaatctaagaacaatcataaaaaggtcatatctgcacaagccacagttgatggtgttaaagttgatggtattgacactaat

SEQ ID NO: 12230 - DNA, 385 bp, Glycine max
  Clone ID: LIB3094-098-Q1-K1-G10
gcttcctcctcttacgagcctttcctttcagtccattgattcggtgggtgcgggtgcagcgaaaccgagctagaccctgatcggcgtcggcacaccgtcggagaacaagatgattgtctgcgtcgccgtcgtcggtcaccagaacaatccgctgtacatacagagcttcacggaggccgatgatgctctcaagctccaccacatcgtccattgctcgctcgatgtggtcgacgagcgagtgaacaatcctaaaaagtctgggccgatgcttaatgagacgtttttgggactgctttatcctattgaaaactacaaagtatatggatatctgactaatacgaaggtgaaatttatcttggtgaccacggatcttgatgttaaagat

SEQ ID NO: 12231 - DNA, 307 bp, Glycine max
  Clone ID: LIB3094-098-Q1-K1-G11
ctttgctctgaaaaaacatgttgagggttgctgctagaaggctctcttcttctctgtcatcgtcttctccgttgcggcccaatcacgccgcttccgcttttctctctcgaaacgacgtcgtcgtcgatgaccgcagatctgctccttcctcccatccccttcttcccttcagaggttatgctactgaatccctgatccacacaaaagaaaacagcattactcctgagattccgccaactgttactgctgttaagaaccctacttctaagattgtctatgatgatcacaaccatgaaagatttccccc

SEQ ID NO: 12232 - DNA, 224 bp, Glycine max
  Clone ID: LIB3094-098-Q1-K1-G12
ctagatcgcgatctataactagccaattctactcttatcttctagccctctgccgcgtggtgagggtgtaacatggcgtgctctaccaactgctgagcttagtgactcaaatgcaacacatgtagcatgttgtgatgtgagggtgtttcatccagtgttcaaggtttaccgttgagccaccgtgttctccgtccccgttttcacccagaaggtgtttgaagaca

SEQ ID NO: 12233 - DNA, 437 bp, Glycine max
  Clone ID: LIB3094-098-Q1-K1-G4
ctcccaaactcattcttcaccttctaaacaaacgcaggaggcaacatggcatttcttgtttgcattacaaaagacggggctaactaatcttccaatatatggcaactgagagtccaattagaatctctgaagctgggagtaaatggccgtctcttaaggaagctgcaacttttggctcgccatcccgtcacatggcaacagaggatctgggtatatttttaaatggccataggtttcatggcagtggaaaggatgcagtacccaaccgcagtggcagtgcacctccgagcatggaaggctcatttctggccatagaaaacttgttatcccagaacaccaccaggaatgcgagctggggatctcggaacagagctatgcaaaaatatgatagtggtaaagggtcttttcatttgtcacaaggaactcttgcaacacac

SEQ ID NO: 12234 - DNA, 276 bp, Glycine max
  Clone ID: LIB3094-098-Q1-K1-G5
ttcaaaacaatccatgcaatcaattctcatttatagactcgaagattacatcacggataagtgtcctttacctaatgacactactttactaatatgatttgacatgcacaaatacaatagattctatatcagccttggacaatgccaataactccggatataactttggagcaagttcacccaactcaaatgatagcaggaattctcgccattgaaatatctggatatacaaatcactgaatttgaaagagcgtattaagaacactaagaacaatc

SEQ ID NO: 12235 - DNA, 364 bp, Glycine max
  Clone ID: LIB3094-098-Q1-K1-G8
acgctccgaaactgattcttcaccttctaaacattctcttttgcaacatggcatttcttgattgcgttagctaagatctgactaactaatgttccaatatatggcaactgatagtccaattagaatctctgaagctgggagtaaatggccgtctcttaaagaagctgcaacttttggctcgccatcccgtcacatggcaacataggatctgggtatatttttaaatggccataggtttcatggcaatggaaaagatgcattacccaaccgcagtggcagtgcacctccgagcatggaatgctcatttctggccatataaaacttgttatcccagaacaccaccaagaatgccaactttggatct

SEQ ID NO: 12236 - DNA, 452 bp, Glycine max
  unsure at all n locations
  Clone ID: LIB3094-098-Q1-K1-H12
tttgaatacattccttgtagtttatactgaatgatgggtttgaagatggcgttactgatcctaggcctttccctcatgctccttttggtctcctctgaggtggcatccacgaatacaaaagaggaggcaaatggagtggatgatgccaaatatcccggtggaagctatggagggggttacccaggtcatggcggtggcggttatcctggccatggcggtggcggttatcctggccatggcggtggtggtggctatcctggtcatggtggtggccaccctggtcatggtggcggctaccctggccgtggtggtggatactgtaggcatggctgttgcggtggccggacatacaacggaggttgcagaaggtgctgctataacgctggcgaagctgntgctgcacaaactcaagataagactcacgattaagacggatgcagtctacttaatta

SEQ ID NO: 12237 - DNA, 449 bp, Glycine max
  Clone ID: LIB3094-098-Q1-K1-H2
cggccgacccacgcgtgcgctccgaaactcattcttcaccttctaaacaatcgcatgaggcaacatggcatttcttgttggcttggttaagacggggctaactaatcttccaatatatggcaactgagagtccaattagaatctctgaagctgggagtaaatggccgtctcttaaggaagctgcaacttttggctcgccatcccgtcacatggcaacagaggatctgggtatatttttaaatggccataggtttcatggcagtggaaaggatgcagtacccaaccgcagtggcagtgcacctccgagcatggaaggctcatttctggccatagaaaacttgttatcccagaacaccaccaggaatgcgagcttgggatctcggaacaaagctatgcaaaaatatgatagtggtaaaggggcttttcatttgcacagggaactcttggca

SEQ ID NO: 12238 - DNA, 192 bp, Glycine max
  Clone ID: LIB3094-098-Q1-K1-E1
cccaggcatacgatttcctatctatgcaacgtatagtttcatcaaatctcaaccccttatcagcgaggtacatatttacaaaaaactacccaattacattatgttcttgtaacctcctcaacccactctaagtcgtgaccttttaattatgaaagaattatacaacaaattcttcaataagaaattactatc

SEQ ID NO: 12239 - DNA, 413 bp, Glycine max
  unsure at all n locations
  Clone ID: LIB3094-098-Q1-K1-B5
cccacgcgtccgctctcctctctcttcggctttctctttctctctctttcagatttgtgtcggtctcatctttctctctccggaagggcaaaccctaaagaccgtttgcacccaccaaggatcgtagtggcgttcagatcgtggggttttcgttttgcggcgattagatcgattgtcatggatgatgatgtgttgaacatgcccaattggggttattacgaacccttcagagggggacatcttggccttcagctcatgcctggtatgactgaacgggacacaaagccatttttgcctggtcaggatcctgctcatgtaatgggtgctaatggaactttttaccctcgagattgcgttgtttccgaggcaccaatgccattgaactatgtcagagatagntggataaaccagag

SEQ ID NO: 12240 - DNA, 330 bp, Glycine max
  Clone ID: LIB3094-098-Q1-K1-B7
tcttctgagagaacactaagtcaagtttcatttgatatatatgctgctcaatgcaaaaattgcttgaaatggagagagattgatacacaggaagagtatgaagagatttgaagtaaagttgctgatgaaccttttctttgcagcataaaggctaatagttcctgtgatgaacctggtgatattaaatatgattcctctcggacatgggtgattgacaagcctaacctgccaaagactccacatggttttaagaagagcttggtgcttaaaaaagattacttcaaattggactcttactacattacacctgcaggcttaaaactgtaaacc

SEQ ID NO: 12241 - DNA, 421 bp, Glycine max
  Clone ID: LIB3094-098-Q1-K1-B9
cccacgcgtccgagaaggcctgggcttagttgataagcataactgggtgaggaagaaagaaagagagtgaagaagatggcgtcgagcggagcggtaccgttttggagggcggcggggatgacgtacataacatactcaaacatatgcgcgaatctgctcaggaattgcctcaaggaaccctacaaggccgaatccctctctcgtgagaagctccattttgttctctccaaatgggtcgacgccaagcctgaaaaacctactattcgttcagacaccccagagcagtgatctggaatagttggaagctataaatgcataaatctttgagatctggaagttcattgtcattttgaacctttctgtgatgtttaattcctttggttttttctctccatgaaaggaacatgcactggaatttgat

SEQ ID NO: 12242 - DNA, 260 bp, Glycine max
  Clone ID: LIB3094-098-Q1-K1-C1
acaaggcgtacttatcagcactgtccatgattttaatagtttgaaagtctttatgcctcaagttatgactccatcctattctaagagaacactaagtcaggattcagttgatatatatgctgctcattgcaaaaattgcttgaaattgtagagagattgatacacaagattaagtttgaagagattttaaataaacctactgacgaaccctttctttgcagcataaaggcttttaattcctgcaattaacctgatgatat

SEQ ID NO: 12243 - DNA, 139 bp, Glycine max
  Clone ID: LIB3094-098-Q1-K1-C10
cccacgcgtcctaccacgcctgcgcttaaattgtatgcacaacacggatagtaacgtcaagggtcatttatgattacgtcctgcagcttatcactaccatctaacacagcgatagtgataacgttcataacatactcta

SEQ ID NO: 12244 - DNA, 390 bp, Glycine max
  Clone ID: LIB3094-098-Q1-K1-C11
aaacggccttgtcgaccacaccaaatattatttttataaaaaagcataaaagcacagagagacgtaaataagggaaaatgaaacattctgaagtcatattttcacacttgattaaaggctgtcgtcccttgtgacggatgcgtgtcttgctaatacctttcctgtgcgtaaaaacaactcccgaactattcacacttaaagttcgtagaccacaccttttcaattttcccgacgctttcctcaaataaaagttggtggcgactccgcgcatttacctttcatggaaaacgcacttgttattccagcattgtccttcctgtaaagggtacgttgcgacagtacttgaccttccgctaatggtaggttccttaattgaattaactaataaca

SEQ ID NO: 12245 - DNA, 356 bp, Glycine max
  Clone ID: LIB3094-098-Q1-K1-C2
ttttatctttattccactgaatagaacatgagcatataaatggataccctttatattatctagctttatattatctataaagggtaaagatatccgatgtgaatctatttgtttagttttctatcggtatgtatataggtgaataatccaacatgcctttttgtgaagtaaaaaaactaccctcgatccatgcctcaaaagggttgataataagtaaaaaaaatcaatgaattcatgataaaacccttctgcgtttttttattataaatttttttgtcaataaagggatcaaggggttgggggatcaaatggtaaagttcttttgttggtaaattggaggattagaaacatgacta

SEQ ID NO: 12246 - DNA, 110 bp, Glycine max
  Clone ID: LIB3094-098-Q1-K1-C3
ttattccacttaatcaaacaagatcacttttatagataccctctatattatctagtctagttcttatcttttcagggcaaacacacccttttcgcatttatctatctaaa

SEQ ID NO: 12247 - DNA, 108 bp, Glycine max
  Clone ID: LIB3094-098-Q1-K1-C4
ttaagacttactccatcatcaattcccacttttcattttttcctcacccaacgctctttaagcaaaagttattctacattctgcctacggccattctctgacccaata

SEQ ID NO: 12248 - DNA, 415 bp, Glycine max
  unsure at all n locations
  Clone ID: LIB3094-098-Q1-K1-C5
cttttctctgaaaaaacatgttgagggttgctgctagaaggctctcttcttctctctcatcgtcttctccgttgcggcccaatcacgccgcttccgcttttctctctcgaaacgacgtcgtcgtcgatgaccgcagatctgctccttcctcccatccccttcttcccttcagaggttatgctactgaatccctgatccacacaaaagaaaacagcattactcctgagattccgccaactgttactgctgttaagaaccctacttctaagattgtctatgatgatcacaaccatgaaagatttcccccaggtgacccaagcaagagggcatttgcctacttcgtacttacaggtggtaggtttgcttatgcctctgtggtccgtctncttgtcctcaagtttgtgctaagcatgtc

SEQ ID NO: 12249 - DNA, 338 bp, Glycine max
  Clone ID: LIB3094-098-Q1-K1-C6
cttttctctgaaaaaacatgtagagggttgctgctagaaagctctcttcttctctgtgatagtcttctccgttgcggcccaatcacgccgcttccgcttttctctctcgaaacgactacctcgtcgatgaccgcagatctgctccttcctcccatccccttcttcccttcacaggttatgctactgaatccctgatccacactaatgaaaacagcattactcctgagattccatcaactgctactgctgttaagaaccctacttctaagattgtctatgatgatcacaaccatgaaagatctcccccaggtgacccaagcaagatggcatttgcctac

SEQ ID NO: 12250 - DNA, 333 bp, Glycine max
  Clone ID: LIB3094-098-Q1-K1-C9
cccacgcgtccgaccacgcgtgcggaagaatggaatataccttacggatggtgggatcaagaggcatttgggattgcatagtgcggctggtgacgaacatggaagacaaagagagtgagagagagaataatcttcgctttatgtcaatggcacgaagcaagggtttttacagaagtgagcaacgacgccagatatgagaaaagtgagtttatttggggtcatatctgtaaaaagtggttctgtaattataccctataattcaagagtgaagaaacaagggtgggatggaaatataaatagtacaatctggtcctagtggaggcttaccatttg

SEQ ID NO: 12251 - DNA, 381 bp, Glycine max
  Clone ID: LIB3094-098-Q1-K1-D1
cccacgcgtccgcggacgcgtgggttgaaaacgacccgtttcctccctcgcacggatccacgcgaaatctgagattccttcgaattggtaactctctttcagtttcaagttggaaactttttcgattttcgctttctggaggtgtgaattgttgtttgaaagtcacaagcaatggtgaaggacactgcgtattatgacatattaggtgtcaattatgatgcatctgctgcagagatcaagaaagcttattatgtcaaggctagaattgttcaccccgataaaaatcctgaggatcctaaggccgcagaaaactttcagaaacttggtgaggcttaccaggttttaagtgatcctgggaagcgtgcggcatatgatgagcat

SEQ ID NO: 12252 - DNA, 313 bp, Glycine max
  Clone ID: LIB3094-098-Q1-K1-D10
cccacgcgtccgcccacgcgtccgcactttctctctctataactctttctcacccgctagggtttccttttcatcgcatcttgagtttgcaacctcgtcttgtgatttccatggagggtgctgggatggaagagaataatattattaatgatgatgataataataacaagtctgaggcgcatttgacttctgccgctgcttttgtggagggtggaattcaggacgcttgtgatgatgcttgcagtatatgccttgaagctttctgtgatagtgatcctttcacggtgacgagctgcaagcatgagtttcatct

SEQ ID NO: 12253 - DNA, 198 bp, Glycine max
  Clone ID: LIB3094-098-Q1-K1-D11
gacccacgcgtaccccaggcatcctccaacacctcccactttttctctctaaactctttctcacccgctattgtttcattttcaacgcatcttgaacatacaacctcttcttaacatttccatacaaaattctcttatagaatagaactatattattaatgaaaactataataataacaaatctgaagcgcatttaac

SEQ ID NO: 12254 - DNA, 440 bp, Glycine max
  unsure at all n locations
  Clone ID: LIB3094-098-Q1-K1-D3
cggacgcgtggggtttcctagtatgcaaggtaaagaatcagcaaatttcaaccccggatccgcgagtaacatgttgacaaaagtctaccgagttgcattttgttcttgtaacctcctcaacccactggaggtcgtgatctgtaaattttgagtgaattatacaacaaattcttgaaaaagaaatgattttctcttctgagctgctgcttattgatcgatgaatccagctgcaattattttcgaagatggcaataaaatctcttctgcggtgttatctctttgactgaattccaaattttgtaagtataatagttggctatgaaagagactgtaccaagaagcatagtgtgagagtcagagatcagttgttaagtatgagatgtgagaacatttgtttgatgtatatttgctaaatagaagtgcanaagatgattatagat

SEQ ID NO: 12255 - DNA, 376 bp, Glycine max
  Clone ID: LIB3094-098-Q1-K1-D4
ctttggtctgagaaaacatgttgagggttgttgctataaggctctcttcttctctctcatcgtcttggccgttgcggcccaatcacgccgcttccgcttttctctctcgaaacgacgtcgtcgtcgatgaccgcagatctgctccttcctcccatccccttcttcccttcagaggttatgctactgaatccctgatccacacacaagaaaacagcattactcctgagattccgccaactgttactgctgctaagaaccctacttctaagattgtctatgatgatcacaaccatgaaagatttcccccaggtgacccatgcaagagggcatttgcctacttcgtacttacaggtgggaggtttgcttatgcctctgt

SEQ ID NO: 12256 - DNA, 345 bp, Glycine max
  Clone ID: LIB3094-098-Q1-K1-D6
ctttgctctgaaaaaacatgttgatgtttgtttctagaaggctctcttcttctctagcatagtcttctccgttgcggcccaatcacgccgcttccgcttttctctctcgaaacgacgtcgtcgtcgatgaccgcagatctgctccttcctcccatccccttcttcccttcagaggttatgctactgaatccctgatccacacaaaagaaaacagcattactcctgagattccgccaactgttactgctgttaagaaccctacttctaagattggctatgatgatcacaaccatgaaagatttcccccatgtgacccaagcaagatggcatttgcctacttcgtac

SEQ ID NO: 12257 - DNA, 339 bp, Glycine max
  Clone ID: LIB3094-098-Q1-K1-B4
cgcggggctgctccgtaccagtgtcactgctttaatttgagagaaaactctgcaaacatgtgtgtgtgtcatgacctccttacaggtgatgagcttctctcggactccttccgttacaatgaaattgagaatggaatgctgtgggaagttgaggggaagtgggttgttaagggagcagttgatgttgacattggtgcaaacccttctgctgagggtggagaagatgagggagtcgatgacgcagctgttaaggttgttgacattgttgatacattcagacttcaggagcaacccgcttttgataagaaacagtttgttaccttcatgaagaggtttatc

SEQ ID NO: 12258 - DNA, 312 bp, Glycine max
  Clone ID: LIB3094-098-Q1-K1-D7
cccacgcgtccgccacgcgtccggtttctggtggaggatccaacttcagagcaattcatgaggcctccaaaaggggatcacttcatggagatgttcttgtgttggtcacaaataaaagtgattgtggaggtgcggagtatgcaagaaataatggtatcccagttatactgtaccatatatcaaaggatgaatctaatccaagtgaccttggtgatacactaaggaaatttgaggttgattttattcttttagctggataccttaaacttataccagtggaattgatccgagcttacaaaagatctatattca

SEQ ID NO: 12259 - DNA, 230 bp, Glycine max
  Clone ID: LIB3094-098-Q1-K1-D9
cccacgcgtccgacaacgcgtgcgcttaattggtatgtaccttacggatagtaggatcaagggacatttgagattgcatagtgcagctgatcactaccatggaagacagcgacagtgatagcgagcataacatactctttctgacactcgcactatgcaaggatttgtacagaagtgagctacgacgccagatatgataatcgtgagaagattcgttgtcatatttgcaa

SEQ ID NO: 12260 - DNA, 293 bp, Glycine max
  Clone ID: LIB3094-097-Q1-K1-G8
cccacgcgtccgcccacacatatcaaagactcttccacatcaacatttatattcacagcataggttgtatttatgactgaaacatcccataaccacctcactgctaaaatcattcaactcatttccctttacatgcttcaacacagtttgtatttgctcattatcatcctggaacacccatctattacaacaacagctacaatctaaatgcgatcgtcaacacataccaacttccattacacaactatactagatgtatccagacccaataccacatatcctgcataatattc

SEQ ID NO: 12261 - DNA, 296 bp, Glycine max
  Clone ID: LIB3094-097-Q1-K1-H1
gtttttgtgtctatccattccatttctttccaacacacactttctctctctatctctctctgtctctctctctggttgtctttcattttgttcattgttgttgatgatgtcacgcgccgccgtgttattacacgcgcaggaggaggaggaggaggaggaggaggagtgtagtacttcgacgtcgtcgtcgatcgggaggaacagcgacgtgtcgtcggagagatcaatggaggaaggagaaaacgaggtggaaagtgcctaccatggacctttgcatgccatggaaactttggaag

SEQ ID NO: 12262 - DNA, 285 bp, Glycine max
  Clone ID: LIB3094-097-Q1-K1-H10
gttctagatcgcgatctagaactagccaattcactctttttcttctcgccctctgccgtgggaggagtttgtaacatggctgctctaccaacggcggagcttagtgacgcaaatgcaacacatgtagcaagttgtgatgtgagggtgttgcatccagtgttcaaggtttacggtggggccaccgcgttctccggccccgttgtcaccgtgaaggtgtttgaagacaacgtgttggtgagggagcttcttgagacgaaaggcgaaggaagagtattgggttgtgat

SEQ ID NO: 12263 - DNA, 409 bp, Glycine max
  Clone ID: LIB3094-097-Q1-K1-H2
ttttatctttattccactgaatagaacatgagcatataaatggataccctttatattatctggcttgatattatctatagagggtaaagatatccgatgtgaatctatttgtttagttttctatcggtatgtatataggtgaataatccaacatgcctttttgtgaagtaaaaaaactaccctcgatccatgcctcaaaagggttgataataagtaaaaaaaatcaatgaattcatgataaaacccttctgcgtttttttattataaatttttttgtcaataaagggatcaaggggttgggggatcaaatggtaaagttcttttgttggtaaattggaggattagaaacatgactattgctttccaattagctcgttttgcattaattgctatttcatttattttattg

SEQ ID NO: 12264 - DNA, 348 bp, Glycine max
  unsure at all n locations
  Clone ID: LIB3094-097-Q1-K1-H3
cccacgcgtccgctcgagaatatgacccgtcctaaaatttacgaaacataattatttattatgtatgatatataatgagaggaacataaacgaacaatcagatgctgctagtcatttggataataaacaacattaggatttaggcatatcacatgatcgctttacttataatttagggatatcagctcaataccacatgattcaagtaatattaccaaaatcaaagccttatcctacaagatgcggtcagctacatgggtcatgacgtcattcggcaagtttagaaaccaaagtgtagcaaacggaaaaaaagtacacttttncttacagaggtatcccatatgacac

SEQ ID NO: 12265 - DNA, 387 bp, Glycine max
  Clone ID: LIB3094-097-Q1-K1-H5
aaactgaagaaggtgaagagaccactgaaggcactggattatctgcttggcgaatgtgaggacaggccgcctcaagaatttcaagaattttgcccgaaatttaagaacgattatcaacaaaattgcccgaatgccgcgtatgaagcagtttgcccgttactgaagcaagcgattcaaatatgttgccagaaacacgcataactctgcaagccacggtgggcgtttggatgtgcttttagttaccactttctctcttggatttgcttacgtattgctccttttgtattagtggctcctgtcccaccttgctttggacttgagcttttatatttctgattgttcaatgtctgttgggtgtgctttccaacctgtggtgactttccggtt

SEQ ID NO: 12266 - DNA, 258 bp, Glycine max
  Clone ID: LIB3094-097-Q1-K1-H6
ttatcctctatactaattgtctggctttcattcacgagaggttcagaaattctacccgaaacttaataactattatcatcataattgcccaaatacctcaattaaaccacattcccctttactaaatcaaacaactaccatatatccacacatacacacattactttataagccacaataatcatttaaatcatcatataaccaccactctctctcttataattacttacttattccttcttttgaactagtggctcc

SEQ ID NO: 12267 - DNA, 429 bp, Glycine max
  unsure at all n locations
  Clone ID: LIB3094-097-Q1-K1-H8
cagagtttgagtggacctgtctcagctaccctttaccttggttattcactactcatggccagtgcaatcatgttgtcaaccggcaccattggcttccttatgtcattctactttgtgcactacttgttctcatcagtaaagatagattgaggttcttgttgtcattgcatattaactatgaaaaaggttgattgatataacttgatcacattgcatagtagggcaacggatgtttaattcattgtctgattttatattgcgatgggatctgcagtttgttctccttctgcctgtttcccaaagtagtgtactcattcaagtattcaactagtgtttgagatcatgtttcaagtattttgttcaagtttcttaagagggtgtaatcaaactcttatctcatttcaatactttagaanaattgtgttggat

SEQ ID NO: 12268 - DNA, 351 bp, Glycine max
  Clone ID: LIB3094-098-Q1-K1-A1
cagagtttgagtggacctgtctcagctaccctttaccttggttattcactactcatggccattgcaatcatgttgtcaaccggcaccattggcttccttatgtcattctactttgtgcactacttgttctcatcagtaaagatagattgaggttcttgttgtcattgcatattaactatgaaaaaggttgattgatataacttgatcacattgcatagtagggcaacggatgtttaattcattgtctgattttatattgcgatgggatctgcagtttgttctccttctgcctgtttcccaaagtagtgtactcattcaagtattcaactagtgtttgagatcatgtttcaa

SEQ ID NO: 12269 - DNA, 105 bp, Glycine max
  Clone ID: LIB3094-098-Q1-K1-A11
gtcgttcatgataaatttgggcaaaattccaacattgagctatagttttaaattctatatacaaattccaacattgttattttaacaattaaggcataatgtttt

SEQ ID NO: 12270 - DNA, 434 bp, Glycine max
  unsure at all n locations
  Clone ID: LIB3094-098-Q1-K1-A12
ggcggcgctgtggcggacgcgccggcggtgtgttgaggagaagacggagttcgacgtggtgagcgaggaggtgccgagcaacgctcgaatcgcggtgattaaggcggtgagggcattgacgaacctagcgctgaaggaggcgaaggagttgatcgaagggttgccgaagaagttcaaggaagggatttcaaaggacgaagctgaagatgcgaagaagcaactcgaagaagctggtgccaaggttaccattgcttaaacactgtttagctgcagcatatatgttctgcttcttcttttgttggttgtagttgagttcaccagtacactgtaatttcatttccattttgtctggatttcaatcttttatttgtaatgaggaaatatgagttcttattnttatattattttttttaatgcgtatgangtgtttgttg

SEQ ID NO: 12271 - DNA, 208 bp, Glycine max
  Clone ID: LIB3094-098-Q1-K1-A3
cggacgcgtgggacgtgagatacaggtttgttgtggatgtcaaaggcagcaaacttgtcgagcagtaaaagaaagaaagtatactactagcacgacacacgcaacatccatccttccatcatgaagagtctggaaaagttattaattaattgagaactaaagctgtatttgttgttcactctaaaaaagaagctgtgttttgtttatt

SEQ ID NO: 12272 - DNA, 391 bp, Glycine max
  Clone ID: LIB3094-098-Q1-K1-A5
cgcgtcgctgctccgtaccagtttcactgcataaatttgagagaaaactctgcaaacatgtgggtttatcaggacctccttacaggtgatgagcttctctcggactccttccgttacaatgaaattgagaatggaatgctgtgggaagttgaggggaagtgggttgttaagggagcagttgatgttgacattggtgcaaacccttctgctgagggtggagaagatgagggagtcgatgacgcatctgttaaggttgttgacattgttgatacattcagacttcaggagcaacccgcttttgataagaaacagtttgttaccttcatgaagaggtttatcaagaatttgactcccaagctcgatgcataagaatcaagagttgtttaagaag

SEQ ID NO: 12273 - DNA, 420 bp, Glycine max
  Clone ID: LIB3094-098-Q1-K1-B1
gaaaaacaagagcaaattgggatcgaagaatttgaagaacaccacaagcaagatgcatgttggtgtggtgctcaacacgcaatcctactgcagaggcctagaacctccttcatcttctccttccgtcgtttccaacaagggaacaaggactttgagtttcaggaggctgctgctgcgtccttctcttgggattcatttatcgcgtagctttgctttaaagtgtgttgttactccgaacccagctgtggaattgccattaactgctgaaaatgtagaaagtgtattggatgaaattcgaccctatctcattgcagacggtgggaatgtggctttacatcaaattgatggcaatgttgtgcgcttgaagctacagggcgcatgtggttcctgtccaagttctgttaccaccatgaaaatggg

SEQ ID NO: 12274 - DNA, 105 bp, Glycine max
  Clone ID: LIB3094-098-Q1-K1-B10
gtcgttcatgataaatttgggcaaaattccttcattgagctatagttttaaattgtatatacaaattccaacattgttattttaacaattaaagcattatgtttt

SEQ ID NO: 12275 - DNA, 410 bp, Glycine max
  Clone ID: LIB3094-098-Q1-K1-B11
cccacgcgtccgggcggagtgtcggcggctgtgtccaagacagctgcggctccagtcgaacgagttaagttgctcatccaaaaccaggatgaaatgatcaagagtggtcggttgtctgaaccatacaaaggaattggcgattgtttcactcgaaccatgaaggatgaaggggtgattgctctttggagaggaaacactgctaatgttatcagatacttccttactcaggctctgaattttgcttttaaggattatttcaagaggcttttcaacttcaaaaaggataaagatggctactggaaatggtttgctgggaatttagcatctgggggggctgctggggcttcctccctcttgtttggctattctttggactatgcccgaacacgtttagcaaatgatgcaaaggc

SEQ ID NO: 12276 - DNA, 190 bp, Glycine max
  Clone ID: LIB3094-098-Q1-K1-B12
aaacaccattgtcgaccacaccaaaattaaatacataaactagcataatagcacagatagacataatacagggaaagtaaaacattctgaagtcatatttgcacacttgattaaaggctgtcgtcccttgtgacggatgctttaggtgctaataccttacctgtgcgtaaaaacaacttccgaactattc

SEQ ID NO: 12277 - DNA, 70 bp, Glycine max
  Clone ID: LIB3094-098-Q1-K1-B2
agaaaatgtaattttcagcactgtccaggaaatttaaggattgtaattctttatgcctcatgttattatt

SEQ ID NO: 12278 - DNA, 200 bp, Glycine max
  Clone ID: LIB3094-097-Q1-K1-G7
acttcccaatatttatctttaattttactgtgcgggcaaaaaaccattggcttgtttatacatcaatggtgggtacaccatctatgtttaaattcattatttgccctacaatgttattaataactttaattacacttttttgattgattcaatccacaatttttaatgtaaattcttgactttcaaagtttttttttaat

SEQ ID NO: 12279 - DNA, 416 bp, Glycine max
  Clone ID: LIB3094-098-Q1-K1-B3
cccacgcgtccggaaaagggaagtaacttatgtgaataatatgaagggcggtcaagaaatcgcaaaaacaccgtcctcttctaagagaacactaagtcagggttcagttgatatatatgctgctcagtgcaaaaattgcttgaaatggagagagattgatacacaggaagagtttgaagagattagaagtaaagttgctgaggaaccttttctttgcagcagaaaggctaatagttcctgtgatgaacctggtgatattaaatatgattcctctcggacatgggtgattgacaagcctaacctcccaaagactccacaaggttttaagaggagcttggtgcttataaaagattactccaaattggacgcttactacatcacacctgcaggcaaaaaactgagaacccgcaatgaga

SEQ ID NO: 12280 - DNA, 421 bp, Glycine max
  Clone ID: LIB3094-097-Q1-K1-E12
ggcggcgctgtggcggacgcgccggcggtggttgaggagaagacggagttcgacgtggtgatcgaggaggtgccgagcaacgctcgaatcgcggtgattaaggcggtgagggcattgacgaacctagcgctgaaggaggcgaaggagttgatcgaagggttgccgaagaagttcaaggaagggatttcaaaggacgaagctgaagatgcgaagaagcaactcgaagaagctggtgccaaggttaccattgcttaaacactgtttagctgcagcatatatgttctgcttcttcttttgttggttgtagttgagttcaccagtacactgtaatttcatttccattttgtctggatttcaatcttttatttgtaatgaggaaatatgagttcttatttttatattattttttttaatgcgtatg

SEQ ID NO: 12281 - DNA, 199 bp, Glycine max
  Clone ID: LIB3094-097-Q1-K1-E4
cccacgcgtccgtttttaaatatcataacaaatatggaatattatactatgcataagctggagattgaattgatatgagtggaaattcacgaaaatcacatatactactacatggaaaataaaagctcgattttttacattttcgagaagaaaaaataacccctcttaaaatacacaaagacaaccctaaacataacat

SEQ ID NO: 12282 - DNA, 404 bp, Glycine max
  unsure at all n locations
  Clone ID: LIB3094-097-Q1-K1-E6
cccacgcgtccgtcaagcattgcatccctcttgatttgtagtttgttttgtgctttagatagaagttctgccaaatcaagaggggttttaagatcatagtgtgtgttttgcaacaatggctaagttctttgctgctatgatcttggcactctttgccatttccatacttcaaacagtggtaatggctgctaatgaacaaggaggccacttgtatgacaacaagagcaaatatggaagtggaagtgtcaagagttaccaatgcccatcacaatgctcgaggagatgtagccagacccaataccacaagccctgcatgtttttctgtcagaagtgctgcaggacatgcctgtgtgtgcccccggngtattatggtaataaagctgtgtgcccttgctacaacaact

SEQ ID NO: 12283 - DNA, 434 bp, Glycine max
  Clone ID: LIB3094-097-Q1-K1-E7
gatttgaagcctgatttgccaagggaagcagaacgaatcaaacagtgcaagggtagggtatgtgcattacaagatgagccagaagttcatagggtatggttgccttttgatgatgcaccaggattagcaatggctagagcatttggagatttttgcttgaaggaatatggtgtgatttctataccagaattttctcatcggctgctaacagacaaagatcagttcattgttcttgcctcagatggggtctgggatgttttgagcaatgaagaggtggttaggatagtatcttcagcgccaactcgatcatcagcagcgaggactctggtggattccgcagctcgtgagtggaaacttaaatatcctacttcaaaaatggatgactgtgcagttgtgtgcctatttttggatggaaaaatggcctcagaatctga

SEQ ID NO: 12284 - DNA, 339 bp, Glycine max
  Clone ID: LIB3094-097-Q1-K1-E9
gaaatgtgaaagccttatcatacagtgtttgcaagatgccaaggtagaagttgaagaagtagatgatgtgataattgtaggcggatgttcttacatcccgagggtgaaaaatcttgttactaacgtatgtaaaggcaaggaactttataaaggcatgaatcctttagaagctgctgtttgcggtgcagcagtggaaggagctattgcttcaggcgtcaatgatccctttgggaacttggacttgttaactatccaagctacacctcttgccattgggattcgagctgatgggaacaagtttgtccctgtaattccgagggatactacaatgccagcacg

SEQ ID NO: 12285 - DNA, 361 bp, Glycine max
  Clone ID: LIB3094-097-Q1-K1-F10
gaaaaacatgagcaaattgggatcgaagaatttgaagaacaccacacgcaagatgcatgttggtgtggtgctcaacacgcaatcctactgcagaggcctagaacctccttcatcttctccttccgtcgcttccaacatgggaacaaggactttgagtttcatgaggctgctgctgcgtccttctcttgggattcatttatcgggtagctttgctttaaagtgtgctgttactccgaacccaactgtggaattgccattaactgctgaaaatgtagaatgtgtattggatgaaattcgaccctatctcattgcagacagtgggaatgcggctttacatcaaattgatggcaatggtatgcgc

SEQ ID NO: 12286 - DNA, 340 bp, Glycine max
  unsure at all n locations
  Clone ID: LIB3094-097-Q1-K1-F11
cgaagatgccttcttcgctgattacgctgaggctcaccaaaagctttctgagcttgngtaagtcttgatatttcttacattgataatttataaattcatgattttatgaagcttttctctccgttttacttgacatgttttgcgttgttaattgggtggttctgattcgtgtcatgactgttgcctctcaggtttgctgaagcctaagcaacgttttggggattgttggagaggcacggtgcccataatatttctctcataaattctatggtcatggtttctaatgcgccactgtgggttcctcanatttttagatagctnttgaatgtattttgcttga

SEQ ID NO: 12287 - DNA, 400 bp, Glycine max
  Clone ID: LIB3094-097-Q1-K1-F2
actctcctattacactttctctttacatttatcatatatcacatcatccttaggtaagttttaaattttagcaaggcttcactacttaatttctacaaatatcaaatatccccctttctcttttattcaaaccatatttcatattttcaccaaattttttttaccaacatttctaatatcacaattcacaaaccccatataataaaatctaaaataaatcctttaaaatttcattttttacaaatacaatttaatcaaaaatttaatcatataatatctatctctttcaatacattattatatgctattttaaactctttcttcttatatttctttcaaaatttctcttttaaaaatatcaaatactttttcacctaatattacatttaataatttttat

SEQ ID NO: 12288 - DNA, 332 bp, Glycine max
  Clone ID: LIB3094-097-Q1-K1-F3
gaagttgcgagagtgaagaaatggcgcaagacttggcattggatttggaggagcttcgccgcgtccacagcatcgccaaaagacctcgaaccctctctcttctctcctccgaaattcgtaacctcgaaaagttatcgtcagaggaagcttctgcgcagattccggcgccgatttcgaccggaactaaagtggcgccttcacctgcgctgaagtatgcggcactcgcgtcgttcagttgggaccaggatagtgacaaagttaagatatatgtgttaatggagggaatcgatgagaataaggttgaatccgagtttaagtcgatgtcattcgat

SEQ ID NO: 12289 - DNA, 413 bp, Glycine max
  unsure at all n locations
  Clone ID: LIB3094-097-Q1-K1-F4
cccacgcgtccggggcgattcgcggcggagattcgagatccgtggaagaagcagcgcgtgtggctggggacgttcgattccgccgaggatgccgcgcgggcttacgacaaggctgcccgatccttccgcgggcccaaggccaagaccaatttcccctccttccccggcccgacggaccaccactcctcgcagcagattccgccgctctaccaggcccacgggctttccaccaagttcgagcccgcccaggtgaaccggcccaccaccagcggcatgagcagcaccgtggagtccttcagcgggcctagggttcccccctcctgctnctcctctcgcaagccccttgtggttgttaaccctatcatccctctcgacgacgacgacgacgattgccacagcgattgcgactcttc

SEQ ID NO: 12290 - DNA, 204 bp, Glycine max
  Clone ID: LIB3094-097-Q1-K1-F5
acgcccacgcgtccgtttttaaatatcattacaaatatggaatattatactatgcataaggtggggatttaattgatatgagcggaaactcacgaaaatcacatatactactacatggaaaataaaaactcgattttttacattttcgagaagaaaaaataacccctcttaaaatacacaaagacaaccctaaacataacatac

SEQ ID NO: 12291 - DNA, 355 bp, Glycine max
  Clone ID: LIB3094-097-Q1-K1-F6
cccacgcgccgcccacgcgtccgccccagaaatatcatatatcgtatcatccttaatgataagctttattttgtgtcaattttgcactgtttaatttctacaaatatcaaagatcccccttcctcttttagtcaaaccatatttcatatttgcaccaaattttttttaccaagatttgtaagatcacaattcacaagccccagagaagaaaagggaaaataaatccttgaaagtttcatttttgacaaatacagttgaagcaaaattgaattaggtaatagttatccttcaaggacatagggagggctatataaacctttcttctgatgttggtgtgaaaagtgctttgtgaaaa

SEQ ID NO: 12292 - DNA, 372 bp, Glycine max
  Clone ID: LIB3094-097-Q1-K1-F8
cccacgcgtccgtccacgcgttcgcccacgcgtccggcgtcactctcactcagaccggtttgcgcattgggttcttcaaaccgctttttttctcgaaccgggcggcggcggcgcttgcggcggcactcgattgagttgtagaatgcgagtgatcggattccgaaatggcttcgaacccttcgcttctccctgagatcggacccgatggtctcgctaaagaagctcccgtcatcggctacaccgagaagatcatcgaagcagaacagcttcaattgcagaaatacattcaagaaaactattctaaaattcgtgatgtggagcgtgagcttgcaaatctttcacttgagatgaaacttacagctgagcccgaaa

SEQ ID NO: 12293 - DNA, 197 bp, Glycine max
  Clone ID: LIB3094-097-Q1-K1-F9
aaattacatttgtcctttataaattcatcattttattaaacttttctctcccttttaccttacatatttttccttcttaaattttttgttctcaatcctttcattactctttcctctcaaattttcttaaaccttaaccacctttttttgatttttttataaacacccttcccataatatttctctcataaaatcta

SEQ ID NO: 12294 - DNA, 193 bp, Glycine max
  Clone ID: LIB3094-097-Q1-K1-G11
attctttcttccaatcccttttttccttcaaaaaattatcctcctaaatcccttatcaacacaaataaaaccatcttttctcctaaaattcccccaacttttactccttttaaaaaccctacttttaaaattttctatttataatacaaccattaaaaaatttccccaagttacccaaacaaaaatgcatttt

SEQ ID NO: 12295 - DNA, 354 bp, Glycine max
  Clone ID: LIB3094-097-Q1-K1-G2
ctgagttgcaagattcacttcaaattatgcgtttcgctgatcggttcctcatcacatcaaaggacgtcgcagatcatcgcaattccttgattatttccttttgttgatacgcggaatcgcgcacacggtgctggtgtgtgcactgaggtagaaagaagaagattgaattgtaaacagcatgaattaccttcttggagctttcaagcctgcatgtaatgtcttgatcacgtttaatgatgggaagaaccggaagcaggttccgtttaaaaaagaaaatggtcaaatggtcacagtcccacttttccaaagtcaagaaaacattggtgggaagattacaatagaaccaatgcaagg

SEQ ID NO: 12296 - DNA, 326 bp, Glycine max
  Clone ID: LIB3094-097-Q1-K1-G3
cccacgcgtccggactgcccaagatgtatcgacaatgttacggtgcgggcaaaaaaccatcatctttgtgatcaacaatggtggatacaccatcgaggttgaaattcatgatgggccgtacaatgtgattaagaactggaattacactgggttgattgatgcaatccacaatggtgaagggaaatgctggactgccaaggtgttctgtgaagaggagctagttgaagcaattgccacagccacaggacccaagaaagactccttatgcttcattgaggtgattgttcataaggatgacaccagtaaagaattgcttgaatggggct

SEQ ID NO: 12297 - DNA, 439 bp, Glycine max
  Clone ID: LIB3094-097-Q1-K1-E10
cggacgcgtggggtaaggaagaaagaagatgagcagcaactcaggaaaagtggtgtgtgtgactggtgcttctggtttcattgcttcatggatcatcaaactgcttctccaacgtggttacactgtcagggccactgttcgcgacccatctaaacccgaaaaggttgatcacttgctcaaacttgatggtgcaaaggagaggctacatctctttaaggcagatctgctggaagaaagttcctttgactctgcttttgagggttgtgatggtgtctttcatactgcttcacccgttcatttcattggtactgatccacagaatcagttaattgatccagcgattaaaggaacccttaacgttgttaaatcatgtgccaaatcgccatctgtgaaacaagttattttaacttcttctggtgcttgccgtttatataatgga

SEQ ID NO: 12298 - DNA, 377 bp, Glycine max
  Clone ID: LIB3094-097-Q1-K1-G4
atttgaaggttgttttgtgcttatagataaaagttctgccaaatcaagaggggttttcagagcatagggtgtgtgtgtgtgttaaacaatggctaagttctttgctgctatgatcttggcactcattgccatttccatgcttcaaacagtggttatggctgctaatgagcaaggaggccacttgtatgacaacaagagcaaatatggaagtgggagtgtcaagagataccaatgcccatcacaatgctcgaggagatgtagccagacccaataccacaagccctgcatgtttttctgtcagaagtgctgcaggaaatgcctgtgtgtgcccccggggtattatggtaataaagctgtgtgcccttgctacaacaact

SEQ ID NO: 12299 - DNA, 257 bp, Glycine max
  Clone ID: LIB3094-097-Q1-K1-B2
atcccaacactttcagttacaggtttcactttatgctgaagcttggactgatcagtgatgtttaaactttcagagcggatgctcacatgcctcctcttgaggactcttatgcatattctgatggtagcaagatggaataagttgattaaatctgacttaattgcctgttacgtttttataaacaatgattggagaaacattctttatactatgttttatgttttttgaattttctaaaattttaaacgttggctatt

SEQ ID NO: 12300 - DNA, 418 bp, Glycine max
  unsure at all n locations
  Clone ID: LIB3094-097-Q1-K1-B4
cccacgcgtccgtcaagcattgcatccctcttgatttgtagtttgttttgtgctttagataagaagttctgccaaatcaagaggggttttaagatcatagtgtgtgttttgcaacaatggctaagttctttgctgctatgatcttggcactctttgccatttccatacttcaaacagtggtaatggctgctaatgaacaaggaggccacttgtatgacaacaagagcaaatatggaagtggaagtgtcaagagttaccaatgcccatcacaatgctcgaggagatgtagccagacccaataccacaagccctgcatgtttttctgtcagaagtgctgcangacatgcctgtgtgtgcccccgggtattatggtaataaagctgtgtgcccttgctacaacactgaaagaccaaggaag

SEQ ID NO: 12301 - DNA, 105 bp, Glycine max
  Clone ID: LIB3094-097-Q1-K1-B6
gtcgttcatgataaatttgggcaaaattccaacattgagctatagttttaaattctgtatacggattccaacattggtattttaacaattaaagcattatggttt

SEQ ID NO: 12302 - DNA, 119 bp, Glycine max
  Clone ID: LIB3094-097-Q1-K1-B7
acccacgcgtacggtcgtgcatgataaatttttgcaaaattccatcattgacctatagttttaaattctgtatacgttattataacattgttgttttgacaattaaagcattatgtttt

SEQ ID NO: 12303 - DNA, 210 bp, Glycine max
  Clone ID: LIB3094-097-Q1-K1-C1
atcccaacactatccgaacatgattcatttatgctcaagcttgcacttatcagtgatgattacactgacgaggcggatgctcacataccttctatttacgactctgatacagatgctaaaagtaacaaaatcgaagaagttgatcaaatcttacttaatctctctatacttttttacaaacaatcattatacaaacaatctttttactat

SEQ ID NO: 12304 - DNA, 416 bp, Glycine max
  unsure at all n locations
  Clone ID: LIB3094-097-Q1-K1-C11
cccacgcgtccgcccacgcgtccgcccaatcttcactgaaccgcaccgcttccatttcatggcgttcgttcactacttgctctcagttcccaacaaacccatcgctctcgtcgacgatttcctcacactgtttaaacctctctcccactctccgccccaaaactcactattctccaggctccgcagaatcgctcacaaagctaaggcgaagccgcaggagctggaagtaactgtggcgagtgatgcgtttacgcaattcaagcatctgcttctgcctattacggataggaatccctatctctctgagagtacaagacaagctatagcaaccacctctgctntagctaaaaagtatggagctgacattactgnnntgtgtattgacgaacagcagaaagagtcactgcctgagcatg

SEQ ID NO: 12305 - DNA, 371 bp, Glycine max
  Clone ID: LIB3094-097-Q1-K1-C2
cccacgcgtccgcgagcttcagcaatggtgtacgtcaaggctcagaaatcaaaagcctacttgaagagatatcaagtcaagttcaagagaagaagagagggaaaaaccgattaccgtgccaggattcggttgattaatcaggacaagaacaaatataacactccgaaataccgatttgtggttcgctttagcaacaaggacattgttgcacaaataatatctgctagcattgccggcgatttagttcttgctacagcatattcacatgagctgccacgatatggtcttgaagtaggacttacaaattatgcagcagcttattgcactggtctcctgttggcccgaagagtcctcaaaacacttgaaatgga

SEQ ID NO: 12306 - DNA, 338 bp, Glycine max
  Clone ID: LIB3094-097-Q1-K1-C3
cgcgtacgcccaggcatccgctagcttcagcaatggtgttcgtctaggctcataaatcaaaagcctactggaatagttatcaagtcaagttcaagagaagaagagagtgaaaaaccgattaccgtgccatgattcggttgattaatcatgacaagaacaaatataacactccgaaataccgatttgtggttcgctttagcaacaatgacattgttgcacaaataatatctgctatcattgccggctatttaattcttgctacagcatattcacatgagctgccactatatggtcttgaagtatgacttacaaattattcaccagcttattgcactggt

SEQ ID NO: 12307 - DNA, 142 bp, Glycine max
  Clone ID: LIB3094-097-Q1-K1-C4
cccacgcgtccgtcagaaaacatcataccactcatacaaaatcatactatccaccaacacaggatacgtttaaaattaacggaggccaaccaaattcacatatacaaccacatcgaaaacaccaaccccattatacacatta

SEQ ID NO: 12308 - DNA, 393 bp, Glycine max
  unsure at all n locations
  Clone ID: LIB3094-097-Q1-K1-C5
gttttctattcgattcgacccatacttcttcaaatcgccatctcatcctttctcacgaaccgattacaaagactatggcgagcgcgggcaagtttccaagtccgactcccccatcgataatagaagtgaagaagccgccgccggcgaccataatctctggaccctctggaccctctggaacctctggagccttatacaactatgctgggaatgggaatagcaagacccaaactaagaatggaaaccttcttggcaaccgtcttggcaatgaaaagtgacaacaatcagaacaagaaaaagactttcaagtgaaaactcactcacttactngcttcttggacagacagtttcatttcatagctttggtgaatagtacatacatgatgatgctct

SEQ ID NO: 12309 - DNA, 312 bp, Glycine max
  Clone ID: LIB3094-097-Q1-K1-C6
gttgtgtttcatgtttgctaagtataatggcaaaatgaacaggcctagcagtggaggggacctccaatcaatgggggctgaagcatcttgtaatcctccaatactccgtaggaatgcttcttcctcttcaaatattagtggccttgcttcgcaaacctatcctacaaattcagttcctctgaagcgcacaaccagctggtcttttgacgaaaagcttcttatacagtctctctataaaggtctggcttttgtgtcaaaaacctattccattgtgctatatttgcgggatgttgataggctcgtatataaatc

SEQ ID NO: 12310 - DNA, 275 bp, Glycine max
  Clone ID: LIB3094-097-Q1-K1-C7
tttcatgtttgctaactattttggtttaatgaacatgcctatcactacatgaaacgttcaattaaaaggggcggcagcatctttcaatccttcaatactccataataatgcttcttcctcttcaaatattacttacctttcttctcaaacctatcctacatattcattttctcttaaactcacaaccatcttatctttttactaaaagcttcttatacattctctctataatattcttactattttatcaaaaacctatcccattgtactatatt

SEQ ID NO: 12311 - DNA, 412 bp, Glycine max
  Clone ID: LIB3094-097-Q1-K1-C8
gttgccgggctctaccgtggtttcaacatctcatgtgttggaatcatcgtgtatcggggtctgtactttggattgtatgattctgttaaaccagttgtcctcacagggtcattgcaggatagcttttttgccagctttgcccttggatggctcatcaccaatggtgcaggtcttgcatcatacccaatagacactgttagaagaagaatgatgatgacctctggtgaagctgtcaagtacaagagctccttggatgcattcacacagatcctcaagaatgagggtgccaagtccttgttcaagggtgccggtgccaacatcctccgtgccgttgccggtgctggtgtgcttgctggttatgacaagttgcaggttcttgtgttcggcaagaagtacggctctggtggggctt

SEQ ID NO: 12312 - DNA, 249 bp, Glycine max
  Clone ID: LIB3094-097-Q1-K1-C9
tccaataccaacataaacctatcaacagttatctcttgtcttaaccatacaaaaaaattttctattatttcactccaaccattaattattaaccagtaattgctcttttcataccaaacacttctaatgttatcatatacttccctactcatactctaaatttttcttttaacaattatttcaacatgcttttcaacttccaaattgataaacatttctactttaaatagcttgctcccaatttaccat

SEQ ID NO: 12313 - DNA, 289 bp, Glycine max
  Clone ID: LIB3094-097-Q1-K1-D2
ccttgtctaccacaccaattttaattacatatataatcataaaatcacaaggacacgtttaatttcaaagatgggacatccttaagtcatatttgcacactttattaaatgctgtcgtcccttgttacttatgcttgttgttctaataccttccctgttcttaaaaacaactccctaactattcacacttaaagttcttataccacaccttttcaattttccctactctttcctcaaataaaatttattgtctactcctctcattttcctttcatggaaaactcacttt

SEQ ID NO: 12314 - DNA, 370 bp, Glycine max
  Clone ID: LIB3094-097-Q1-K1-D3
cccacgcgtccgtcaagcattgcatccctcttgatttgtagtttgttttgtgctttagatagaagttctgccaaatcaagaggggttttaagatcatagtgtgtgttttgcaacaatggctaagttctttgctgctatgatcttggcactctttgccatttccatacttcaaacagtggtaatggctgctaatgaacaaggaggccacttgtatgacaacaagagcaaatatggaagtggaagtgtcaagagttaccaatgcccatcacaatgctcgaggagatgtagccagacccaataccacaagccctgcatgtttttctgtcagaagtgctgcaggacatgcctgtgtgtgcccccggggtattat

SEQ ID NO: 12315 - DNA, 201 bp, Glycine max
  Clone ID: LIB3094-097-Q1-K1-D4
cccacgcgtccgtttttaaatatcataacaaatatggaatattatactatgcataagctggagattgaattgatatgagtggaaattcacgaaaatcacatatactactacatggaaaataaaagctcgattttttacattttcgagaagaaaaaataacccctcttaaaatacacaaagacaaccctaaacataacatat

SEQ ID NO: 12316 - DNA, 329 bp, Glycine max
  Clone ID: LIB3094-097-Q1-K1-B11
gcgcccacgcgttcttacggagtgtcttctgctttgtccaagacagctgcggctccaggcgaaggttttaagttgctcatgcaaaaccacgatgaaatgatcaagagtggtcggttgtctgaaccatacaaaggaattggcgattgtttcactcgaaccatgaaggatgaacgggtgattgctctttggagaggaaacactgctaatgttatcagatacttccctactcaggctctgaattttgcttttaaggattattttaagaggcttttcaacttcaaaaaggataaagatggctactggaaatggtttgcttgcaatttatcatc

SEQ ID NO: 12317 - DNA, 453 bp, Glycine max
  unsure at all n locations
  Clone ID: LIB3094-097-Q1-K1-D6
aaacacccttgtcgaccacaccaaaattaaaaacataaaaaagcataaaagcacaagaagacgtaaaaaagggaaaataaaacattttgaagtcatatttgcacacttgattaaaggctgtcgtcccttgtgacggatgcgtggggtgctaataccttccctgtgcgtaaaaacaactcccgaactattcacacttaaagttcgtagaccacaccttttcaattttcccgacgctttcctcaaataaaagttggtggcgactccgcgcattttcctttcatggaagacgcacttgtgagtcccgcatcgccctcccgtcaaagggtaggtngcgacagtacttgcccttccgccgaagggtaggttccttaattgaattaactattaccaaaagtgaaactaaggctaaaataaactcacaaatcaagctttgtccataaaaatcacttaaaa

SEQ ID NO: 12318 - DNA, 340 bp, Glycine max
  Clone ID: LIB3094-097-Q1-K1-D7
taattacataaaaaatcatactttcactaggagacgttccaaatcaaaaagggtcataatatcatcatatgtgcacaccaacaataactcagtccttccctgctattaactcttcactctctaccatcttcattcttcaaacaatcaacatccctgctaatcaacaaagaggccacttacctcacaacaataacaaatattgcactttaaatatcaaaaattaccaatgcccatcacaaatctccatgatatgtaaccagacccaataccacaagccctgcatcgttttctgtcaaaagtgctgcaacacattcctttcttttccctcagggtattatcc

SEQ ID NO: 12319 - DNA, 351 bp, Glycine max
  Clone ID: LIB3094-097-Q1-K1-D8
caccgtcacttttccttaacggcgaagctatcgccgaagggcacaaccgtcattccgactcggaaccgtttcttctatcctccactctccccatcccaataacaaagagaggaatcgaagtctgttccgttctgatcagaaagggaataacggtaacggagatatggggcttctgtctaacagagtaactagagagagcctgaaaccaggggatcacatctactcttggaggactgcttacatatacgctcatcacggcatttatgtcggcgatgacaaagtcattcacttcactagacatgggcaagaagtaggaaccggtactgcactagatcttcttcctaatcagtc

SEQ ID NO: 12320 - DNA, 362 bp, Glycine max
  unsure at all n locations
  Clone ID: LIB3094-096-Q1-K1-F1
gttccaagaagtgttagagtggaaagacctgctgattaggtttttacaatttgccaattgcggttccttgatgtcagcactctacatgctgctctgccagattccactgctgttagaatcatctcaaattctcgtttgtatacacgtaaatcacttatctattagtaggattttaatgtatttcaaatatttgtataagtagaaatttctttctgtcatctggttttggttcaattatgtaggtggtttaacattcatagctgcatgaccaccaagttctcaaatactgtanatagctgcaaaaaatatatccaacaacataaataacaaaaataaattcgcattttacatcggntctaggg

SEQ ID NO: 12321 - DNA, 343 bp, Glycine max
  Clone ID: LIB3094-096-Q1-K1-F2
cgcgtgcggccggctctagggctgaccctcctgcagagtctgagttttacgacggagttcgacgtactagtccagggggagcttatcaacgctctactcctggtgattaaggcactgagggcattgacgaacctaacgctggacgatgctaccgactagaacgcatggatccctaaacacttcaaggaatggatttcatatgaccaagctgaagatgcgaagaagcaactggcagaatctattgccaatgtctaccattgtttaaacacatgattagctgacagcatctatcgaactgcttattctttagatatttgtacttgatttcagcacttcactgtaa

SEQ ID NO: 12322 - DNA, 267 bp, Glycine max
  unsure at all n locations
  Clone ID: LIB3094-096-Q1-K1-F5
aaactgaagaaggtgaagagaccactgaaggcactggattatctgcttggcgaatgtaagggcaggccgcctcaagaatttcaagaattttgcccgaaatttaagaacgattatcaacaaaattgcccgaatgccgcgtatgaagcagtttgcccgttactgaagcaagcgattcanatatgttgccagaaacacgcataactctgcaagccacggtgggcgtttggatgtgcttttagttaccactttctctcttggatttgctta

SEQ ID NO: 12323 - DNA, 61 bp, Glycine max
  unsure at all n locations
  Clone ID: LIB3094-096-Q1-K1-F7
aaacggaagnaagtgaagagaccattgaaggtttctggattatctgcttggcgaatggaag

SEQ ID NO: 12324 - DNA, 337 bp, Glycine max
  unsure at all n locations
  Clone ID: LIB3094-096-Q1-K1-G1
gttgaattcttatgcaaagatttctgtccatcttctctggatgatattgccgagatgagttggccactatgtcaagaatcagctcccacttctcactccatgagattcactagaagtttgagtgggctttcggtcaggaggtctttagttggttcatttgaggagtctcttttatctggccggttcttatctggaaacaatagcaagaaaatcgatggttttcttgctgtgctaagcattactggtgggaaactttctnctaaatctcagaagcttccattctctggtactagcgtggatggagattgctatctactggattatgcatcaatagatc

SEQ ID NO: 12325 - DNA, 511 bp, Glycine max
  unsure at all n locations
  Clone ID: LIB3094-096-Q1-K1-G12
ggcgcggaccgccgtgggcntnngtttttgaatcttcanngttggtgccangctgtcancggagctgtggcgttgcgagaatntgatgtactgtgcgacgtatatggnnatcctaaagagccaatcnnntatatttacataannattccactgggaactatcgcgagaaatgatggtgaaaccgnngtaggcatggagaccagaatgtgttttgccatnatgatnnngcaatgatgcagttgaaaanatgagatacacacatgtggcggttggatctgctatanggtcanagcctgtttgctttactttcagcagggtcttccgggtaaaacgctttatgatgccacatgctaaagccatgattcagcagcctcgtattccttcctctgggttgatgcctgcaagtgatgttcttattcgtgcaaaggatgtgataattaacagggacaatctggttaaactactggccaaacacacgggaaattcagaggaaacaagtgctaatgtgatg

SEQ ID NO: 12326 - DNA, 418 bp, Glycine max
  unsure at all n locations
  Clone ID: LIB3094-096-Q1-K1-G2
cctaaacataaactgaatttcccaaatccccttcccaattttcaccaaaacctaatactccgaaaccaatcttcgatcatggccgccgaatcacaacctcaactaatcgtacgttctatccattttatttgctttccatccttattattctattttccatgtgttggtttgaattttcagaatgagactattctatttccgacatgtttgttgttatctacggttttgctttgattggttttttttggaatgagagtattctattgttcaggttttgtttatttatctagggtttgaatttgattgaaattccaggatgagattctatttgccatgttttgtttatttatctaggttttgaaattgattgaatnttcaggaagagagaagagaggagcaagaacttaagtacctggaa

SEQ ID NO: 12327 - DNA, 350 bp, Glycine max
  Clone ID: LIB3094-096-Q1-K1-G3
gtcgaccacgcgtccgcctaagcataaactgaatttcccaaatcccttttccatttttcaccaaaacctaatactccggagccggtcttcgatcatggccgccgaatcacaacctcaactaatcgtacgttctatccatgctatttgctttccatccttattattctattttccatgtgttggttcgaatgttcagaatgagactattctatttccgacatgtctgttgctatctacggatttgctttgattgcgttttttttggaatgagagtatactatggttcaggtttctgctatttatctaaggttttgaatttgattgaaattccagggatgagattctatttg

SEQ ID NO: 12328 - DNA, 433 bp, Glycine max
  unsure at all n locations
  Clone ID: LIB3094-096-Q1-K1-G7
cagagtttgagtggacctgtctcagctaccctttaccttggttattcactactcatggccattgcaatcatgttgtcaaccggcaccattggcttccttatgtcattctactttgtgcactacttgttctcatcagtaaagatagattgaggttcttgttgtcattgcatattaactatgaaaaaggttgattgatataacttgatcacattgcatagtanggcaacggatgtttaattcattgtctgattttatattgcgatgggatctgcagtttgttctccttctgcctgtttcccaaagtagtgtactcattcaagtattcaactagtgtttgagatcatgtttcaagtattttgttcaagtttctttagaaaggttgtatttcaaactctcatctcatttcaatactttagaaaaatgatggtagatt

SEQ ID NO: 12329 - DNA, 243 bp, Glycine max
  Clone ID: LIB3094-096-Q1-K1-G8
gcgctcaggcgtccgcgtttccaaatattcacattttagaagaacaatagttctctccctagaagctcatgatatgctagataagccatccttaggagcaatatatccgtcctcttcaatctattagcagaaggtgtgttgcgtattagaccatagtctttttgtcattgctgtttcccatacaacgcagtgtagcctgtgagagcatcagcaatcacatggtgatcagaatatcattcaagc

SEQ ID NO: 12330 - DNA, 398 bp, Glycine max
  Clone ID: LIB3094-096-Q1-K1-H12
gcgctccgcactccgtcttcatcaatttgcatcaccaccgctccaacacaggggaagaggagggagatccttcacgttcagggagggcaatgcgggaaccagatcggttcgaagttctgggaagtggtgtgcgacgagcacggcatagatccgacggggaagtacgtcggaaactcagatctacaactcgagcgcgtgaacgtgtactacaacgaagcttcctgcgggcggtttgtcccacgcgcagtgctgatggacctggagcccggaaccatggacagcgtgcggactgggccgtacgggcagatattccggcccgacaacttcgtgttcgggcagtccggcgcgggcaacaactgtgccaaggggcactacacggagggcgccgagctcatcga

SEQ ID NO: 12331 - DNA, 176 bp, Glycine max
  Clone ID: LIB3094-096-Q1-K1-H2
tttctatactgcaaaaacactcaataccaacctctaaaaaaacaatccctcactttaatcttacaacatctccacattgatccataatactccttcaaactcattcaacactcctcctccacacctcctttaatcgcacccaaaatctccacaaaggaccataactctatcaccac

SEQ ID NO: 12332 - DNA, 463 bp, Glycine max
  unsure at all n locations
  Clone ID: LIB3094-096-Q1-K1-H6
attgaatcaacgtatccaatcatcatcatcacatcacgacgacgacgacgacgcatgattgtggtctttctctgctccaaaaaaactgaatcccaatcgcgaagaaaagaatccctcgcttggatcttgcaacatcgccagagggatccatgatactcctgcagtctcattcaagattcctgctccagaccttgttgaatcgggcccaaaatctcgagaaaggagttgaactggatcaccactgggttgagtttgatgatgttcgatatcatattcaggtgtcaatgaagaatcctcatgttttgttgctatcagtatcgttgcctactccttcttcagaaactatttttgtctgtggacttccttttggagccattgaagcaataaaagctgcatatggtaatcttgtgcanattcttgatcctncaagggatggctntaatctcacattaaaaataaatct

SEQ ID NO: 12333 - DNA, 397 bp, Glycine max
  unsure at all n locations
  Clone ID: LIB3094-096-Q1-K1-H7
cggaaccaccgtttctctctctctcacgcacacatggtgctgccactgtcactcttgtcttgtcctttctgcttcgccgattctctatttttgcgcgcaatcgattgtatgctttgggccagtcgttaatgataacttgaggtctggatgatgctttctgattggttgtttacatattgtaattcagaatgtggaactttgcatcgaattgcattgctggaactgtgggactgaaaaatgattcatagcctactcattctgcttcggaatgttctgatgatgaagactctgntataggcagagaggaagggctggaatgcccaatatgctgggaatctttcaatattggtgaaaatgtgccctatgttatatggtgtggccacaccctttgtaaaaa

SEQ ID NO: 12334 - DNA, 451 bp, Glycine max
  Clone ID: LIB3094-096-Q1-K1-H8
gcgcggaaccaccgtttctctctctcttacgcactcatggtgctgccactgtcactcgtgtctggggctttctgcttcgccgattctctatttttgcgcgcaatcgattgtatgctttgggccagtcgctaatgataacttgaggtctggatgatgctttctgattggttgtttacatattgtaattcagaatgtggaactttgcatcgaattgcattgctggaactgtgggactgaaaaatgattcaaagcctactcattctgcttcggaatgttctgatgatgaaaactctgttataggcagagaggaagggctggaatgcccaatatgctgggaatctttcaatattgttgaaaatgtgccctatgttatatggtgtggccacacccttttgaaaaattggatcctcggactgcagtgggctgttgtgaaatttccaacactgcctgt

SEQ ID NO: 12335 - DNA, 460 bp, Glycine max
  unsure at all n locations
  Clone ID: LIB3094-096-Q1-K1-E8
cccacgcgtccgcccacgcgtccggttggtattgaggggaatgttggctggctcgaggcttgtcacaaaggaggttcacagtggatggaactataaggcttcggaccaggcttcattcccctcaaaagtacttccttcatttgtttatacttcaaacttcaaaccacaagatcataggtgtagctacgtacctagctagcttctctctttattttgaaggatctctctacacacacgtcatgtgtgtggttgagaacttgagatgtttccttgcaaaggtgangttgagaggaatgttgtctggctcgaggtcatggaggaagaggagagtactgagatcagtgaaagtttccaatgggaaattaccctcttaacacacacacagaanaaatgattctcggaccaggcttcattccccccacccaacttttgctttctattcctttcagtttctttctct

SEQ ID NO: 12336 - DNA, 368 bp, Glycine max
  Clone ID: LIB3094-097-Q1-K1-A6
cccacgcgtccgggaagatggtgctttcggaggaggaaatgggtcgtctgtaccgggtaaggaagacggtgatgcaaatgcttcgggacaggggttttctggtgggtgacttcgagatcaacatgtcgaagcatgagttcaagtccaagtacggcgagcacatgaagcgcgaggacctggtcatcaacaagtccaagaaggacaactccggcgaccagatctacgtcttcttccccgacgagcccaaggtcggcgtcaagaccatgaagacctacaccaaccgcatgaactccgaaaacgtctatagagccatcctcgtcacccagaccaacctcacccccttcgcccgcacctgcatcagcgaaatc

SEQ ID NO: 12337 - DNA, 426 bp, Glycine max
  Clone ID: LIB3094-096-Q1-K1-C3
cccacgcgtccgattttaactgtgtgtgtgtgacaaacgtgaaaagtacttttttttatgaggttaactcaactttgctatttataatctactatgcagctgagaagctaaacttgccatacttaagtgcttatctgaattcccttggaaccaattaccggcatggggcaaattttgccactgggggatccaccattaggaagcagaatgaaaccatatttcaatatggaataagtcctttctctcttgacattcagattgtgcaatttaaccagtttaaagcacgcaccaaacaactctatgaagaagccaaggccccacatgaaaagagcaagcttccagtgcctgaggagttctctaaggctctctacacatttgacattggtcaaaatgatctctctggtgggtttaggaagatgaattttg

SEQ ID NO: 12338 - DNA, 117 bp, Glycine max
  Clone ID: LIB3094-096-Q1-K1-C4
cccaggcgtccgattttaactgtgtgtgtgttacaattgtgaaaagtactccaaactatgagggtaaggtaactttgctaatgggcatctactattccactgacaagcttaacttgc

SEQ ID NO: 12339 - DNA, 422 bp, Glycine max
  unsure at all n locations
  Clone ID: LIB3094-096-Q1-K1-C5
cccacgcgtccgcccacgcgtccgctcgctttatcttcccttcccttcatctccgcttcaaaataatatcctcctctctatctctgttcgaaacaagtccaacaccagcaacacactgcttcaatctcaatcgggcacattgagaaatggttttgagtaatgggaaaactgaggcaccattgccaagtagtaatgggggaggtgctgagattgataacaatgagaagaagcccttcaagatcttcgtagggtatgaccctcgcgaagatcttgcctatgaggtatgtcgccactccatcttgaaaaggtcttcaatccctgttgagatcataccaattaagcagtcagatctgaggaaaagtggtttgtattggcgtgagaggggccagtttgagagcactgagttctncttttcaagattc

SEQ ID NO: 12340 - DNA, 453 bp, Glycine max
  Clone ID: LIB3094-096-Q1-K1-C6
ctcggtttctgagatctagctgagaaaccctccactctcgagtccaaactctcctcctacgcaaaatggatgcaagggcatcatcttcttcagcttcctcgattcttttccttgcagcaattgtagctgcttatttctattcatcagaagcagctgtgtccaaaggatcttttgaggacaatttcagcataatgtggtctgaggaccattttactacctctaaagatggacagatctggtatctctcactagacaaagacacaggatgtggatttcaaacaaaacaacgctacagatttgggtggttcagtatgaagctgaagttggtagcaggtgactctgctggtgttgtgacagcttattatatgtgctcagaaaatggtgcgggaccagaaagagatgagcttgattttgagtttttggggaacagaacaggagagccttatttgattc

SEQ ID NO: 12341 - DNA, 310 bp, Glycine max
  Clone ID: LIB3094-096-Q1-K1-C7
cttttctctgaaaaaacatgttgagggttgcagctagaaggctctcttcttctctctcatcgtcttctccgttgcggcccaatcacgccgcttccgcttttctctctcgaaacgacgtcgtcgtcgatgaccgcagatctgctccttcctcccatccccttcttcccttcagaggttatgctactgaatccctgatccacacagaagataacagcattactcctgagattccgacaactgttactgctgttaagaaccctacttctaagattggctatgatgatcacaaccatgaaagatttcccccaag

SEQ ID NO: 12342 - DNA, 148 bp, Glycine max
  Clone ID: LIB3094-096-Q1-K1-C8
ctcggctctgaaaaaacatgttgagggccgttgctagaaggctctcttcttctctgtcatcgtcttctccgttgcggcccaatcacgccgcttccgcttttctctcaaacgacgcgtcgcatgaccgaactgctctcccatccttttc

SEQ ID NO: 12343 - DNA, 395 bp, Glycine max
  unsure at all n locations
  Clone ID: LIB3094-096-Q1-K1-D1
cggacgcgtgggagaacctattttcactgttttttgaagaaattgtatcccagctatctggagtgtcctcgctcgtatgataagttgcgctttgatccaagtaaaccaaaatgcaggctgttagttacacatgatgactatagtataacgtccaaacttccaagggagagaacttctgttgttaccatacttagggatccagttgaccgtgtttttagtacttatgaattctcaatagaggttgcagctagatttttgtgcatncaaacttgacgtncgcacaaagatggcttacgcctagctctagactaaagagtagccactgatattgcctggagatctggtcatgatgaggagactattgtagaagagctagtcagagggactgatatatg

SEQ ID NO: 12344 - DNA, 363 bp, Glycine max
  Clone ID: LIB3094-096-Q1-K1-D10
ctcaggaggagaataaggatgtctcacaggaagttcgagcacccaaggcacgggtcactgggatttctccccaggaagcgtgctgctcgtcacaggggaaaagtgaaggcattccccaaggatgacccatccaaggcacccaagctcactgcattcttgggttacaaggctggtatgactcacattgttagagaggtcgagaagccaggatcaaagcttcacaagaaggaaacatgtgagcctgttacaattattgagacccctccaatggttattggtggtgttgtgggttatgtgaaaactccccgtggtctccgaacattgaacactgtatgggctcagcacttgagtgaggaactgaaa

SEQ ID NO: 12345 - DNA, 416 bp, Glycine max
  Clone ID: LIB3094-096-Q1-K1-D3
tgaagtggaacgacgtcgcagggttggagagtgccaaacaggccttgcaggaggctgtgattttgcctgtaaagttccctcagttctttactgggaaaagacgaccctggagagctttcttgttgtatggacctcctggaacgggaaaatcatatttagccaaggcagttgcaacggaagccgagtccacgtttttcagtggttcttcatcagaccttgtttcaaagtggatgggtgaaagtgaaaagctggtttcaaaccttttcgaaatggctcgagaaagtgccccttctatcatatttattgacgaaattgattccctgtgtggtcagcgtggagaaggcaacgagagtgaagcttcaagacggattaaaacagagcttctggtgcaaatgcaaggtgtaagacacaatgat

SEQ ID NO: 12346 - DNA, 52 bp, Glycine max
  Clone ID: LIB3094-096-Q1-K1-D4
ggaaggggaacgacgtcgcagggttggagagtgccatacaggcctggcagga

SEQ ID NO: 12347 - DNA, 448 bp, Glycine max
  Clone ID: LIB3094-096-Q1-K1-D5
cccacgcgccgcccacgcgtccgccccagaaatatcatatatcgtatcatccttaatataagctttattttgtgtcaattttgcactgtttaatttctacaaatatcaaagatcccccttcctcttttagtcaaaccatatttcatatttgcaccaaattttttttaccaagatttgtaagatcacaattcacaagccccagagaagaaaagggaaaataaatccttgaaagtttcatttttgacaaatacagttgaagcaaaattgaattaggtaatagttatccttcaaggacataaggagggctatataaacctttcttctgatgttggtgtgaaaagtgctttgtgaaaaaggacaaaggcttgttcagcgatcataacattgaagattttgtattcacacgtatgaagagggataataatattggtggtgtctcgattgaaat

SEQ ID NO: 12348 - DNA, 450 bp, Glycine max
  Clone ID: LIB3094-096-Q1-K1-D6
cccacgcgccgcccactcttccgcttcagtatgatcatatatcgtatcatccttagagataagctttattttgtgtcaattttgcactgtttaatttctacaaatatcaaagatcccccttcctcttttagtcaaaccatatttcatatttgcaccaaattttttttaccaagatttgtaagatcacaattcacaagccccagagaagaaaagggaaaataaatccttgaaagtttcattcttgacaaatacagttgaagcaaaattgaattatgtaatagttatccttcaaggacatagggagggctatataaacctttcttctgatgttggtgtgaaagtggctttgtgaaaaaggacaaaggcttgttcagcgatcataacattgaagaatttgtattcacacgtatgaagagggataataatattggtggtgtctcgattgaaatg

SEQ ID NO: 12349 - DNA, 325 bp, Glycine max
  Clone ID: LIB3094-096-Q1-K1-E1
tcaagtggaacgacctcgcatgcttgcagagtgccatttacgccttgcccgaagctgtgaggctcccgtgtaagttccctcaggtctttactgggaaaacacgaccctgcagagctttcttgatgtatggaccttctggaacgggaaaatcatatttagccaaggcagtgtcaacggaagccaagtacacgttatgcactgtatcactatcagaacttggttcaaagtggacggcacaaagtgaaaagctggactcaaaccttttcgaaatgactcgagagagtgccccttctatcatacttactgacaaaattgattccctgtg

SEQ ID NO: 12350 - DNA, 112 bp, Glycine max
  Clone ID: LIB3094-096-Q1-K1-E11
gcttgctcctcttacgagcctttcctttcagtccattgattcggtgggtccgggtccacggaacccgacctagaccctgatcggggtcggaccaccgccggagaccaggatg

SEQ ID NO: 12351 - DNA, 381 bp, Glycine max
  unsure at all n locations
  Clone ID: LIB3094-096-Q1-K1-E2
gcttcctcctcttacgagcctttcctttcagtccattgattcggtgggtgcgggtgcagcgaaaccgagctagaccctgatcggcgtcggcacaccgncggagaacaagatgattgtctgcgtcgccgtcgtcgggcaccagaacaatccgctgtacatacagagcttcacggaggccgatgatgctctcaagctccaccacatcgtccattgctcgctcgatgtggtcgacgagcgagtgaacnaatcctaaaagtctgggccgatgcttaatgagacgtttttgggactgctntatcctattgaaaactacanagtatatggatatctgactaatacgaaggtgaaaattatcttggtgaccacggatctggatgttaa

SEQ ID NO: 12352 - DNA, 354 bp, Glycine max
  unsure at all n locations
  Clone ID: LIB3094-096-Q1-K1-E3
tttgaatacattccttgtagtttatactgaaagatgggtttgaagatggcgttactgatcctaggcctttccctcatgctccttttggtctcctctgaggtggcatccacgaatacaaaagaggaggcaaatggagtggatgatgccaaatatcccggtggaagctatggagggggttacccaggtcatggcggtggcggttatcctggccatggcggtggcggttatcctggccatggcggtggtggtggctatcctggtcatggtggtggccaccctggtcatggtggcggctaccctggcccgtgtggtggatactgtangcatggcttgtgcngtggcccgacatacaac

SEQ ID NO: 12353 - DNA, 298 bp, Glycine max
  Clone ID: LIB3094-096-Q1-K1-E5
ggctacttttgattgcttgatgaaaacctatggattcctgacaccagaattctggaaggagactcgcttctccaaatctccattccaagagtacacagatctactggcaaaaccaacaggaaagactctaatcttggaggaggaaagggtggatgcttgatttgctagttttgctttatggatgttttaggaactttattactttacatactttgttggttctgtgctttacttttggttttgatagacggtatgtctctgtatgcattttgattggttccaaagtttaattgactgc

SEQ ID NO: 12354 - DNA, 130 bp, Glycine max
  Clone ID: LIB3094-096-Q1-K1-E6
cccacgcgtccgcccacgcgtccggtgattgaagctagttagaacaagatgttgcagctactctacactgcgattttctccgaaatgcttttgattctcacgctcgtcttcaaaaccccctgagaaaaac

SEQ ID NO: 12355 - DNA, 367 bp, Glycine max
  Clone ID: LIB3094-096-Q1-K1-E7
cccacgcgtccgcccacgcgtccggtgattgtatctagttacaacaagatgttgcagctacgctacactgcgattttctccgaaatgcttttgattctcacgctcgtcttcaaaaccccactgagaaaactcgtcatcggttccctcgatagtgtgaagcgcggtcgcggtcccgtggtggattccaccgggggcgccacattgatgcggcttctcgctttgagcctctacagcatgggcaagatccagcaacgcaccctcgaggccggcatattcaaccccaccgaccaagtccctatgtccaagcacatgctcgaagcttctctcatggggtttctgctgatactctctctgatgattgatagat

SEQ ID NO: 12356 - DNA, 374 bp, Glycine max
  Clone ID: LIB3094-096-Q1-K1-C2
acctttcactctcgagtccaaactctccgcctacggtaaatttatgcaagggcatgatcttcttcagcttcctcgattcttttccttgcagcaattgtagctgcttatttctattcatcagaagcagctgtgtccaaaggatcttttgaggacaatttcagcataatgtggtctgaggaccattttactacctctaaagatggacagatctggtatctctcactagacaaagacacaggatgtggatttcaaacaaaacaacgctacagatttgggtggttcagtatgaagctgaagttggtagcaggtgactctgctggtgttgtgacaacttattatatgtgctcagaaaatggtgccggaccagaaagaga

SEQ ID NO: 12357 - DNA, 283 bp, Glycine max
  Clone ID: LIB3094-095-Q1-K1-G4
gccacgcgtacctgcacgcgttctaaaaaaaaagatgtgatccggcgcgtacattctggaggggggcatatagaggatcgaagtgattttaaggccttttttattcatgcatccacacacttgcgctagagaactcaacactgaacaatttacattgctcattacacgaacataatcctcaaactattcaaaatctccaccctttgccgtttcatctagaaccttattctcctaacctatactattcccacaatcgttaacattttcccttattttcacaccc

SEQ ID NO: 12358 - DNA, 320 bp, Glycine max
  unsure at all n locations
  Clone ID: LIB3094-095-Q1-K1-G5
cccacgcgtncgcccacgcgtccgcttttgcaagctcaatttcggaactgaataattgcccgatatataggaatttactgtcttttttcttactttttttaatacttccaattccatatgtattatgctcggaatttctggaaaaaaaaaagctttgaaattgagctgatttttctttctttccttcaagaatcacatgtattttatatttatatttattcaaactgttttaacgacgtgctaactcttctgaaacccttgcccttcgcttattctccactatatatagccttaatcgcaagaacaggacaattctgaag

SEQ ID NO: 12359 - DNA, 383 bp, Glycine max
  Clone ID: LIB3094-095-Q1-K1-G6
gcgcccacgcgtccgcccacgcgtccggtgattgaagctagttagaacaagatgttgcagctaggctgcactgcgattttctccgaaatgcttttgattctcacgctcgtcttcaaaaccccactgagaaaactcgtcatcgtttccctcgatagtgtgaagcgcggtcgcggtcccgtggtggtttccaccgtgggcgccacattgatggtggttctcgcttcgagcctctacagcatggccaagatccagcaacgcaccctcgaggccggcatagtcaaccccaccgaccaagtcctcatgtccaagcacatgctcgaagcttctctcatggggtttctgctgttcctctctctgatgattgatagattgcaccattacat

SEQ ID NO: 12360 - DNA, 465 bp, Glycine max
  Clone ID: LIB3094-095-Q1-K1-G9
ggaaatacccgggccgacgcgacgcgtccgctcaaaacttgtcttccccctctctcctcctcggaacgccattcgcatgcagttctcgcacgggagactgcacaattatatttcaaagcgcaacccatttcaacatttcatcatttttctcgtgtaaccatcccctcacccacgaacccatcccatgaatttcccaaaatgccctcaacccagaaccccctcttctccttcctcctacattccaccccaccgtacccaactgcaccctcgcatgatctccctctactcttcttctttcttcttccttaaaatatccaaatccaaccaccaaacccacaacccccaattccttttggttttttttccccttcttttttttaaccccccctttcttttttaactttttttcaacggccttcaactttacttcttccccaaatttgccgacttccgcccctacttctt

SEQ ID NO: 12361 - DNA, 431 bp, Glycine max
  Clone ID: LIB3094-095-Q1-K1-H1
cagagtttgagtggacctgtctcagctaccctttaccttggttattcactactcatggccattgcaatcatgttgtcaaccggcaccattggcttccttatgtcattctactttgtgcactacttgttctcatcagtaaagatagattgaggttcttgttgtcattgcatattaactatgaaaaaggttgattgatataacttgatcacattgcatagtacggcaacggatgtttaattcattgtctgattttatattgcgatgggatctggaagttggtcttcttctgccttgttcccaaagtagtgtactcattcaagtattcaactagtgtttgaaatcatgtttcaagtattttgttcaaggttctttaaaaagttgtaattcaaactctcatctcatttcaatactttagaaaaatgatggtagat

SEQ ID NO: 12362 - DNA, 383 bp, Glycine max
  unsure at all n locations
  Clone ID: LIB3094-095-Q1-K1-H10
aaaaaaaaaaaaacgccgccctaacggccataancttcaaactaccactttttttatcaaacaaaccaatcctccccgtttttttaaaaaaacttccccccnccaaaacattttacttactaaccaaacaattccctcttatacactataacaaatcacccttttaaccaactcttctttcctatccttttaaaaacccctttattatcttcactatccaaaatcttctcctacactacccttttatccttcctcacattactctttaatttttcccccacaatttattctacccaaatttaaaaactttccaacttttatttatttctaataaaacttttctcctctttatatctcatttatcctttatttctccttttaca

SEQ ID NO: 12363 - DNA, 296 bp, Glycine max
  Clone ID: LIB3094-095-Q1-K1-H12
cggacgcgtggggtcactattcctccagcctccacctgctgaaagaaactcctaattgtcgggggttgtaaagaaaagaactgaaaacactgacactgttattctctgaattttctcaccatctacaactgaagttttaaccaatatggaaactgaaaagtctaatgtttcaaaggctgaagaatttaaactccttgccaatgaagtgttcaatgctcgaaaatactcccaagccattgatctatatacacaagcaattgagctgaacagtcaaaatgcaggttacttttctaatc

SEQ ID NO: 12364 - DNA, 271 bp, Glycine max
  unsure at all n locations
  Clone ID: LIB3094-095-Q1-K1-H2
cccacgcgtacgnccacacatacaaaatgactaacataattatttcaaatctatctcactcctttnaatcccgcctaattataaacaggctcgccctccctccaacctnnataacnctcacaataataaccctaatctcgaaataactactcatccaaaaccttgtcattattaaactcaacactatcattaacacttctttaattctatcacccacattattaaaattactaaatcctaatattatcttcacaaacctacaccaaaacca

SEQ ID NO: 12365 - DNA, 205 bp, Glycine max
  unsure at all n locations
  Clone ID: LIB3094-095-Q1-K1-H4
aaaaaaaaattttttaataaaaaataaaaaaaaaaatatttcgttatattataaaaagcccggcccccccccnaaaaaaaaaaaataaaaatatcaaacccaaatctaactctatttaaaaaaaaacaaaataaatcaatcaatttaaaataaaataaaaaaaaaaaaaataaaatcaaaaaacccccctctaactattttacat

SEQ ID NO: 12366 - DNA, 145 bp, Glycine max
  Clone ID: LIB3094-095-Q1-K1-H5
aaaattcctccccccactcaaaaacacaaattcatattaaatatttctcaaaaaaaaaaaaaaaattcacaaccactctaaaatatcccatcttactccacaccttcattcaacattcatatctcatctataatcccacctaaat

SEQ ID NO: 12367 - DNA, 452 bp, Glycine max
  unsure at all n locations
  Clone ID: LIB3094-095-Q1-K1-H6
gggggggaaaggaaaaaaaatgaaaaatataataattttttttttttatanaaaaaataaaacctttcgttttttttaaaaaaaaggtccgcccaccttaaaattttatttttttaaatttttttccattttctaacttaattttttaccattttatcactcttaactcctctttttttttattcttaattattaaaacatctttcccattatattttccctttctctattcttctcttctcctccttcatcttatttacacaatctttttatcttatcttttataatatattttttttttacatttattcctttctccatcttttctttccttatttttttactactcatataatatcccattttattctctctcatatttattttaatttatctcttacttcttttattttcttaatacttctttatctatctatttcaccaattttctt

SEQ ID NO: 12368 - DNA, 501 bp, Glycine max
  unsure at all n locations
  Clone ID: LIB3094-095-Q1-K1-H9
aaaaaaaaattttttttnaaaaaaaaaaaaaaaataaaaaaatttgtttttttttaaaaaaaatgtgttgggccccaaaaaaaaataaaaattttattaaattaaatttactataattcaataaattatagaaaatattactaatatataataatttaattaaatatatttaattttaaattattctttttataaaaatatttttttttatttgtaaaaaaattttaatataataattcgtatttgataaaatactattaatttattttattaataaatttattaattttaattatataaaataaataaaatatatatttaaattaatattttaatattttttataaaaattataattttttattaaatatataatataatattaatttattaaaatataatatttataattatttttctatatttaaaaaaataatatatataaataaatcattttatataaatattttatataaatttaattatatatacttatattaa

SEQ ID NO: 12369 - DNA, 132 bp, Glycine max
  Clone ID: LIB3094-096-Q1-K1-A6
cccacgcgtccggcgaaaacccccaactccaacctctgttcatcgtctaccgcgctttctttgcaaccagaactatgattaaagctttttaaggtaaaggaaaagcagagagaacttgcagaaaatgcaagt

SEQ ID NO: 12370 - DNA, 196 bp, Glycine max
  Clone ID: LIB3094-096-Q1-K1-A8
aaaaaaaaaaaaaaaaaaaaaaaaaaaaaaaataaaaaaaaaaaaaaaaaaaaaaaaaaaaagggaaaatttaaaaaaaaatatgcgtaaataaaaaatattataaaaaaaaaaatttttgtttttaaaaaaaaataaatttaaaaatattataaaaaaaaaaaaaagggcccccctttaaaaacacccaatttta

SEQ ID NO: 12371 - DNA, 274 bp, Glycine max
  Clone ID: LIB3094-096-Q1-K1-B1
gataactactattgaagaagcaaaacgattctacccactgttcggactcggggccaatgtagcccttattttctctggccggacagtcaaatacttttctaatctgaggcagaatttaggtcctggagttgatggttgggccatctctctgaaagcaatgatgagcatagttgtgggtatggggtttgcaatctggttcctgtactggtgggtgaacaattatgttcctcttcctactcgtagcaagaaagaagaaggagaagcccaaaatggg

SEQ ID NO: 12372 - DNA, 62 bp, Glycine max
  Clone ID: LIB3094-096-Q1-K1-B11
cccacgcgtccgcccacgcgtccgaaagatattagatgtgatcccgggtgccgtccttccaa

SEQ ID NO: 12373 - DNA, 237 bp, Glycine max
  Clone ID: LIB3094-096-Q1-K1-B5
actagtcatccatcaagcatagctttcccatttatttgtctcttgtccaatgcagcacataggaagctctgccaaatcaagaggggacttttcataatatgaggcagaatttaaacaactgcataagatctttctgccatcactctgacacctcttatcatcatcatacttcatacagcgttaacaacctctatacaacactgatgcctcttctattacaaccctatcactactcgt

SEQ ID NO: 12374 - DNA, 314 bp, Glycine max
  Clone ID: LIB3094-096-Q1-K1-B6
cggacgcgtgggttatcctaagtctttgggaatagtgctgcaatggcttcaagtcaggaggaggtgacccttttgggagctactggaagcccatttgtgtgcagggttcatattgccctcaagttgaagggagttcaatacaaatatgtcgaagaaaatttgaggaacaagagtgaactgcttctcaaatccaacccagttcacaagaaggttccagtgtttattcacaatgagaagcccatagcagagtctcttgtgattgttgaatacattgatgagacatggaagaccaaccccatcttgccttctgatcc

SEQ ID NO: 12375 - DNA, 264 bp, Glycine max
  Clone ID: LIB3094-096-Q1-K1-B7
ttatcacccagcaagaaaaaagaaaatcgaagaggaagagcaaggacacaacacaaagaagcagaagaagacatggcgttgcagtggctgattctcacttacgtggtcgcagctgaggctgccgtggccattctgctaacccttcccacgcccaaactcctaagggaccgtttcgcctctctcgtttccctcattcttcaacccgcgcttttcattgtcccctttgcggggttccaactccttgatatatactggaaaaatgag

SEQ ID NO: 12376 - DNA, 289 bp, Glycine max
  Clone ID: LIB3094-095-Q1-K1-G3
ttttgattttctggatccgtgtttttgagatgagtgtatgaatttaccgattgtttttcagatgaggttatcgttgaggcatgctttggtgtttgtgttaatcggggcgttgtggaacttgcaaagggcagagggtatccgatttgtgatagacagagacgagtgtttctcccatgatgtgaagtacgaaggtgacactggtcatgtctctttcggtggtattaaagctgattctccctggcattaccgcgacaaaagtgtcgatcttgtggtaaaaggaaccttttgg

SEQ ID NO: 12377 - DNA, 272 bp, Glycine max
  Clone ID: LIB3094-096-Q1-K1-B9
acactcattcgtgcaaattcaatggtaggatctctattgcgacttatgtatgcatgcgatatggcatctaagcgattgtggaacgagcttacagatcagtagacggatccttccacatcttgcactgccagaactgttgctgctgaagacatgatccattggcaagctacaattatggttcctgcagacagtccatatgcaagacgcgtactgatagtgaccattcatagccgtgcagactatacgtttaaggcaaccaacgctgcattcag

SEQ ID NO: 12378 - DNA, 203 bp, Glycine max
  Clone ID: LIB3094-096-Q1-K1-C1
ttcccttccttcatcttcggtctcggaaaaatttcccccgggcaatgcctgtccaaaccaagcccacccccaccacacccctgtttaaacttcaaccggccccattagaaaatggttttaagtatggggaaacctgagcccccattgccaagtattattgggggaggtcctaaaatggttaacattgagaaaaaccccttcaa

SEQ ID NO: 12379 - DNA, 435 bp, Glycine max
  Clone ID: LIB3094-095-Q1-K1-D3
gaaaaaaagggcggacccacgcgtccgcattctcctctctgaattcctcttattctttttatttggagagtattgatatatcaaggtggtatatatcaatagccaaggaggatatgcagatttctataattttcattgttagcaacattatgctgcttttcacttcaacatttgccaaaactgctagtcctccctctctgaacccaactccaacaccagccccggcaccaaacttcgtgaacctcactgaattactcagtgttgctggtccgtttcacaccttccttggataccttgagtccactaaagtgattgacacttttcaaaaccaaaccaacaacactgaaaaaagaattaccatctttgttcctaaagacaatgtcttcaatgctataaaaaaaactaccctattcaacctcacctttaaccaactta

SEQ ID NO: 12380 - DNA, 434 bp, Glycine max
  unsure at all n locations
  Clone ID: LIB3094-095-Q1-K1-D4
ggcggcgctgtggcggacgcgccggcggtggttgaggagaagacggagttcgacgtggggagcgangaggtgccgagcaacgctcgaatcgcggggattaaagcggggagggcattgacgaacctaacgctgaaagaagcgaaagaattgatcgaaaggttgccgaaaaagttcaaggaaaggatttcaaaggacgaaacttaagatgcgaaaaaacaactcgaaaaaactggtgccaaaggtaccattggttaaacactggttaactgcaacatatatggtccgcttcttcttttggtgggtggaagtgaagtcaccaagacactggaatttcaattccattttggccggaattcaatcttttatttggtatgaagaaatatgaaggcctaattttaatataatttttttaaatgcggatgacgggtttgttg

SEQ ID NO: 12381 - DNA, 148 bp, Glycine max
  Clone ID: LIB3094-095-Q1-K1-D8
gcgtccgctcaggaggagaataaggatgtctcacaggatgttctagcacccaaggcacgggtcacttgcatttcttcccaagaagcgggctgctcttacaagggaaaaagtaaagccattccccaaggataacccatccaaggcaccc

SEQ ID NO: 12382 - DNA, 273 bp, Glycine max
  Clone ID: LIB3094-095-Q1-K1-E10
tcttacatcccaatatttaaaaatcttcttactaacatatgtaaaagcaaagaactatataaaaacatgaattctttagaagctccttttttccgtgcagcaatcaaaggagctattacttcatgcatacaatatccactatccaacttgaacttaataactatccaaactacaccttttcccattcacattcaacctcatcttaacaagtttgtccctgtaattcccatacatactacaataccagcactcaaagaactatctttcacaact

SEQ ID NO: 12383 - DNA, 316 bp, Glycine max
  unsure at all n locations
  Clone ID: LIB3094-095-Q1-K1-E12
aaaaaccaccccacccgtccaatcaactccaatttttagctccctccctcctttttctttacttctcttctcattctccttctcgccttctaatcactccctccagctccncanatctacattttccctcgttttctgcatctgcatttcatagattcagttctcatccaaaaattcacgttcaccaaatacccattccttcttcctgctaacaccgacaaacccaaaatcttaataccaccaccaccaccaccacctattctaaatcgcaatcacacacgcttcttcctctctacctcaccaacaccctcttctt

SEQ ID NO: 12384 - DNA, 345 bp, Glycine max
  unsure at all n locations
  Clone ID: LIB3094-095-Q1-K1-E3
aagagaangaatttattctggacaccttgtttcacttattgtattaatcgaatgctgggaggttttactaaaataagatgtgtggaaaagtgcatggaaaagggccagaaaattaccaaactaatatacaatcaaatatggttgttaaatcttatgaaaagtgaatttacccaaggacaagagcttctaaaaccatcttccacccggtttgcctttaactttgctactttacaaaactttcttgaacaatcaatttgtcttaaaaaaaatttttttttccaacaaatgaatttaatccaaattttccagctcaaataaagggaaagaggtggaaaaataagtttt

SEQ ID NO: 12385 - DNA, 350 bp, Glycine max
  Clone ID: LIB3094-095-Q1-K1-E5
gtttggtgtaactgcatgctctttgccattgttgatggagtttgcctttagatttttgaggggcccatatagttatacaatttcattttagggtcttgttgactagtgttcctagactattggttaaggaactaaaaggagaagtttttaatatgtaaatcataggaaagtataaaaaaaaatcatgaagaacgcaattttatgccttccaataaaaaaccttagttccttaacccgtgtcctcgggacacttgttagcatttgccttcattttatatgtatcattaaattattataattgaaaaaaataaggcctactttttgacgtcattttattcattttattaagg

SEQ ID NO: 12386 - DNA, 358 bp, Glycine max
  unsure at all n locations
  Clone ID: LIB3094-095-Q1-K1-E6
aaaaaaccgggtcggccgacgcgtacgcccacacctacctntgtactcataacaaattttattcccagaaacactgatatcccgccgctgatattttaaatgttcaccacctatcanaaccaccaaactacaatctccattcaacttttcgaaaacgaaatgaatctcacaaaagattacctccttcttatgaaatttgatctttcttgaatttctccaaccccaaagtatacgcctcaaattaaaaccacctttcaaattcattccaactgcattctaaatttgaaagcaaaaaacaatggcacttgttaatcaaaaaatatcaccattacaaacgaaaacctacttcttaaccaac

SEQ ID NO: 12387 - DNA, 354 bp, Glycine max
  unsure at all n locations
  Clone ID: LIB3094-095-Q1-K1-E7
gtccggatcccgggtcgacgagcctccccaacctccgaccctggtgctattgaaccttggcaactttcaactttgttcttttattactgtgaattcnacagttagaccatgttggtgngtgtatttgctctnaaaggttgtttactgcttttgttttctttttctcttcttttttgtnttctttttagctttctttattttttatataatttctttttttttttaattttatctttttcttttctattatttttatttttttatatttttttttgtggttgtttttttttattcattattttttatttttatcacttattttatttctttttcatttttatattttaaattttt

SEQ ID NO: 12388 - DNA, 112 bp, Glycine max
  Clone ID: LIB3094-095-Q1-K1-E9
aaaaaaaccggccgcggaaaaaaaagggaaaaaaaatgaaaataaaaaaattttttataaaaaaaaaaaaaaaaaaaaaacccgcccctgttttaaaaacgctgggcccccc

SEQ ID NO: 12389 - DNA, 115 bp, Glycine max
  Clone ID: LIB3094-095-Q1-K1-F10
aaaaaaaaaaaaccgcagcaacaacattcttaaaatttaacaaacttttttttcaacaccaacaaatccaatcgctctttttaaaaaaatccccccccaaaacaacaaaaacata

SEQ ID NO: 12390 - DNA, 296 bp, Glycine max
  Clone ID: LIB3094-095-Q1-K1-F11
cgcttgatgatcccaacactttcggaacaggtttcacaggatgctgaatcttgtactgagcctgcctgaagatgctggtgaagcagatgctgacatgcctcctcttgaggacgctgatgcagatgctgagggtagcaagatggaagaagttgattaaatctgacttaattgcctgttacgtttttagaaacaatgattggagaaacagcctttctactatagaacatgttttctgaatcctcgaaattttggaacgttggctagttaggcgccgtatgtagtagtttctttatggt

SEQ ID NO: 12391 - DNA, 434 bp, Glycine max
  Clone ID: LIB3094-095-Q1-K1-F2
cccacgcgtccgggaacagaagcttttccagatttgggtaaacactgccagcaccgcgattgcagccagctcgattttcttcctttcacctgcgacggttgccaacagatcttttgtttggaacacagatcctacaagtcccacgcgtgcctgaaatccgaccacaacagcagaaaggttgttgtttgcgaagcatgttccatgtccatcgagaccaccggccatgtgggacaagacgaggaggcaatcttgcagaagcacctcaagtctggtaattgtgaccctaccaagaagaagaaaccaatttgtcccgtcaagcgttgcaaggagggtttgacgttttccaacaccaacacatgtaaaacttgccacattaaagtgtgccttaagcatcggtttcctgcttatcatgcctgtaacaaaagaactttaac

SEQ ID NO: 12392 - DNA, 280 bp, Glycine max
  unsure at all n locations
  Clone ID: LIB3094-095-Q1-K1-F3
aaaaaaacaccacctcccccacctctnaacataactttccaatttgtaaacactccacacccattctgccttttatttttcttcacctcacgttccaacaacttttttttaacacatatctacaatcaccttcctaaatcaccacaactctaatttttttttttctaacaattttatttcatttaacactatccattttacacacaatatcaaatttcataacaccttattttttattttccctaccataataaaaaccaatttttccctcatctttcta

SEQ ID NO: 12393 - DNA, 378 bp, Glycine max
  Clone ID: LIB3094-095-Q1-K1-F4
aaaaaccgggccgaccgcacgcgtccgtaaactcaaaaatgtaccttcatattctttttacacggaggataaacaaccattcatccgcactctttatatgattcctggcccacttcacgtcaccggtaacttctttcatatatactttagctcataaaactataaatacactagagctatccataaatgctctaaaagaaatccaaatgctattgtactcagacattccacctcatcctcaagaacaccttaattgcttaacaacccctctaaccacaaagccaacccaatgcatttatccaatatgtatcatcaaacaaatatcattgaaatatacaatttcaacatatttacgatttactacatactacaatataa

SEQ ID NO: 12394 - DNA, 362 bp, Glycine max
  unsure at all n locations
  Clone ID: LIB3094-095-Q1-K1-F6
ccgtccgnngtttggtgtaacctgcatntgtctctttgcacatatgttagataggagtattgccctttaagatttttggagtgtgcccatataagttatacgaatttcacttttaaggagtcttgtttgacttagttgttccttagactaattggttaaaggaacctaaaaaggagaagatttttaatattgtaacatcattaggaacagtatataacaaaaaatcgatgaaagaaccgcacatttgtatgtcctcgtccaataaaaaaaaccttgagttccttaaacccnngtgtcctcgcggacacattgttaagcactttgcccttcatttttatattgtgatcattaagattaattat

SEQ ID NO: 12395 - DNA, 220 bp, Glycine max
  unsure at all n locations
  Clone ID: LIB3094-095-Q1-K1-F7
cccacacatcctnccacacaatcaaccacactatcgatcacgcatcaacaaacccacctcgttgcatttaataagtggcttacaactatccanagtatactacaaaaaacttccataaagtgacaatttcccataaacaactctatccacatcatcgacacccatctaattcacaaactctttctccaaaaccactttcacctctacaccatttacaaca

SEQ ID NO: 12396 - DNA, 257 bp, Glycine max
  unsure at all n locations
  Clone ID: LIB3094-095-Q1-K1-F8
aaaaaaaaccaatcgacccgacgcgtccactcaaaaaanaanttaaacaataaaattttttatggatcacaccacataaaaaaaacccgctgattcttaaaaaactccctccaccccccaanacaaacaaaaatcaacatttattaactcaaaattcctattaaccccttcaattcagaaaatcgacttacacataaaacccaaacctttttaacaaaatcactgtctaatataataacttaacaaccatcttaaaa

SEQ ID NO: 12397 - DNA, 382 bp, Glycine max
  Clone ID: LIB3094-095-Q1-K1-D2
cattctcctctctgaattcctcttattcatgaatttggagagtattgatatatcaagggaggataaaccagtagccaaggaagatatggagttttctatgattttcattgttagcaacattatgctgcttttcagttcagcatttgccaaaactgctagtcctccctctctgagcccaactccagcaccagccccggcaccagacttcgtgaacctcactgagttactcagtgttgctggtccgtttcacaccttccttggataccttgagtccactaaagtgattgacactttccaaaaccaagccaacaacactgaagaaggaattaccatctttgttcctaaggacagtgccttcaatgctataaagaaaactacccta

SEQ ID NO: 12398 - DNA, 83 bp, Glycine max
  Clone ID: LIB3094-095-Q1-K1-G10
cccatcccattcccaccactcaaaccataacaactcacatcgctaccatcgaacacacatcatttttcacaaaatcactcaca

SEQ ID NO: 12399 - DNA, 232 bp, Glycine max
  unsure at all n locations
  Clone ID: LIB3094-095-Q1-K1-G11
cccacacatccncccacacatncactttttttatctcaatttcaaaacttaataattccccgctatatataaaaatactctcttttttcttactttttttaatacttcccattccatatatattatccttccaaattttttacaaaaaaaacactttttaattaaactcttttttctttttttcctttcaaaatccaacccttttaataattataattaaatcaactttttt

SEQ ID NO: 12400 - DNA, 348 bp, Glycine max
  unsure at all n locations
  Clone ID: LIB3094-095-Q1-K1-G12
cccacgcctccccccacncntncgctttttcaatctcaatttcggaacttaataattcccgcctatatataaatttactgtcttttttcttactttttttaatacttccaattccatatgtattatgctcggaatttctggaaaaaaaaaagctttgaaattgacctgatttttctttctttccttcaaaaatcacatgtattttatatttatatttattcaaactgttttaacgacgtgctaactcttctgaaacccttgcccttcccttattctccactatatatagccttaatcgcaagaacaggacaattctgaaaaaaaaaaatgcttttttccagtcctatc

SEQ ID NO: 12401 - DNA, 382 bp, Glycine max
  Clone ID: LIB3094-095-Q1-K1-B3
atcagttcttctttcctcaaccttctttcttcttatatatcgaacatggctaagtatgattcaagtgggaaaagctcttccatgactgctatagccttcctgtttatccttctaatcacttatacaggcacaacagatgcacaatccggggtatgttatggaagacttggcaacaacttaccaacccctcaagaagttgtggccctctacaatcaagccaacattcgcaggatgcgaatctacggtccaagcccagaagtcctcgaagcactaagaagttccaacattgagcttttgctagacattccaaatgacaacctcaaaaacctagcatctagccaagacaatgcaaacaaatgggtgcaagacaacatcaaaaact

SEQ ID NO: 12402 - DNA, 325 bp, Glycine max
  Clone ID: LIB3094-095-Q1-K1-B4
cccacgcgtccgattgaatatccatggttctcttagttcttttatccattaaaaaactgtggattaatatttctaagaagaactatagtagttgaaagatatcttttgcaaatatgcatatttaactgagggtggtataacttggtccttccctcaaaaaaaaaaaaaaaaggaaggaaaagaacctattagcctccttcattggatatattacatctattaggaggaaattctaccggttcagagaattgaaaaattatctaaattaaaggccgcgggctcacatttcttattttggtgaccgaatcaagggggtaaatttgat

SEQ ID NO: 12403 - DNA, 444 bp, Glycine max
  Clone ID: LIB3094-095-Q1-K1-B5
cgttgatccgcattcgagccctagatttcaatctagggtttcattgcactctaattccatattctaactctgctttcattcgattcagggggaattaaattgtttctatatttttttttcaatttttcacaaattagaaatcgataaagaaaatggtgagggtgttgagaagctgcattcaatcgacattgaagctggtaaactcggtaattgggatggccgggctagccatgattctatactccgcatggatgattagggtttggcagaggaagatgggtgagcttccctttggtcacgattctgattacccacctccgtggttcatttacacatttcttgggcttggagttgcgttctgtgtaatcacttgtttaagtcatgttgctgctgaaactgctaatggcttgtgcctgtatttgtatataagatttggtggtttgc

SEQ ID NO: 12404 - DNA, 313 bp, Glycine max
  Clone ID: LIB3094-095-Q1-K1-B6
cccacgcgtccgcccacgcgtccgcccacgcgtccgcggacgcgtggggttctatagggtcgtacctctgtgtccttgagttctaaggagacaagaacctacgtctggtggatgaatcatgaccgtgtgatcagagcgtgattaacggcccgggtgagtttctctttggagtagtctcatctttggctgtagaggatcgttcttaggacacttccatgtgcctgggaatggtcatacggttgtctgacagaccaaaaaagaaaaaaagacaaaaaagtgattaaaatgaagattggtcacgattctgattacc

SEQ ID NO: 12405 - DNA, 217 bp, Glycine max
  unsure at all n locations
  Clone ID: LIB3094-095-Q1-K1-B8
cagcaaattttcaaaccccggatccagtnagtaacatgtgtgacgaaaagtcgtaccgagttgcannttttgttcttgtaaccctccttcaacccacttggaggtgcgtgaatctgtannaattttgagtgaaattataccaacaacattctgttgaaaaagaaatgaattttcttctttctgagctcgctgcttannttgatcgantcgaatccag

SEQ ID NO: 12406 - DNA, 410 bp, Glycine max
  Clone ID: LIB3094-095-Q1-K1-B9
tcggccacgccttccgtcttaatttaatcctccttttgttcaaacactctttctcatggcatcagggaagaagattaggatcggcatcaacggatttggaaggattggccgtttggtggccagggttgcccttcaaaggaatgatgttgaacttgttgctgtcaacgatcctttcatcaccactgattacatgacatacatgttcaagtacgacaccgttcatggccagtggaagcattttgatgtgaaggtgaaggactctaagacccttctctttggtgagaagcccgtcaccgtttttggaatcaggaaccctgaagaaattccatggggtgaggttggtgctgattatgttgttgagtcaactggtgtattcactgacaaggacaaggctgctgctcacttgaaag

SEQ ID NO: 12407 - DNA, 92 bp, Glycine max
  unsure at all n locations
  Clone ID: LIB3094-095-Q1-K1-C1
acacccacacntacaatttaccaaatatccactttatacaaaaacaataatcccatcccccctgcctcattataaacgcgacaagccccccc

SEQ ID NO: 12408 - DNA, 339 bp, Glycine max
  unsure at all n locations
  Clone ID: LIB3094-095-Q1-K1-C11
gttcttaaaaaacctcaatcctcctatcataattcttgttcatggagaaactaattctgctcttattctcaagcagaagctcataanacaatttgctgatcgcaacactaaaattcttactccaaaaaactgtcaatctcttcaaatgtatttcaattcgcagaaaatggcaaaaaccataattaagctgcctcaaaaaacaccaaaatttgatcaaactgtcaataatattcttgtaaaaaaatgcttcacatatcatattatcccagctcatgatctccatgtcttttcacaactatcaacaacaaacattactcaaaagattaccatcccttattc

SEQ ID NO: 12409 - DNA, 351 bp, Glycine max
  Clone ID: LIB3094-095-Q1-K1-C2
cccacgcgtccgcccacgcgtccgatcaaagtttcacttcagccttatccggtttaggggggcggtttttgacccaacctttgacgtatcgaaaccttaagtttcggatcaggtctgagcaatctggttggtagaacctttggtcttagagagtcaagttttatgtctgaattagacgatcaaattcctactgccttcgatccttttgctgatgcaaatgctgatgactcgggtgctgggtcaaaagagtatgtgcatattcgcgtacagcagcgaaatggaaagaaaagcctgacaaccgttcaaggattgaaaaaagaattcaactattacaagatacttaaagatgtt

SEQ ID NO: 12410 - DNA, 252 bp, Glycine max
  unsure at all n locations
  Clone ID: LIB3094-095-Q1-K1-C3
cccacacatccnaccacgcctacaattaatttataaccataaccttatccnaaatattctgccatttttaaaaacaacccttcccccataacaacaccaaatttcaaatcaactcttatcactcacattacatacaccaacatatcccccaaaatccataattatttccttaattaacccttcaaatcctaattcccttcttcctaaaaactccactttattctcctaaaaatagtccacccccaaaccaaa

SEQ ID NO: 12411 - DNA, 302 bp, Glycine max
  Clone ID: LIB3094-095-Q1-K1-C4
ccttaaatgacttctggggccttgtaatggcagcttggaaatcttggaagttccaggagggggggccctttaaagcttccttttaaaaagttttgaaaaaataggacccttggaaaatattttggaagggcctccagggttgaacctttggaccaccaaattgggaaaaaattgcctggggatttttttgagcctgggattgcccaacttcccattgccccatttttttgtttcccttttgattgccaccgatggaattccttgttgacttttaaaagtttttttaaacattgggctcaagt

SEQ ID NO: 12412 - DNA, 405 bp, Glycine max
  unsure at all n locations
  Clone ID: LIB3094-095-Q1-K1-C5
aaaaanaggggcggcccacgcgtccgcccacccacccnccacncctnccncccatatatatcatatatcctatcatccttaatctcgcctttattttacaccaactttccactcattaatctctacaaatatcaaaaatcccccttcctcttttaatcaaaccatatttcatatttacaccaaattttttttaccaaaatttataagatcacaattcacaatccccatacaataaaatgtaaaataaatccttaaaaatttcatttttcacaaatacactttaaacaaaattgaattacataaaaattatccttcaaacacataaccaacgctatataaacctttcttcttatcttttctaaaaacctctttttcaaaaaaaacaaaccctttttcacctatcat

SEQ ID NO: 12413 - DNA, 445 bp, Glycine max
  Clone ID: LIB3094-095-Q1-K1-C6
cagaattcaaaacccagatgcactccaacatgttctgaggaaagctgaggagtatctgggcgcagtgcctcctgaaactccctactcagaatttgagcacaagttccaggagattggtttggagagagggtggggtgacaacgcagagcgtgttcttgagtcaattcaacttctcttggatcttcttgaggcccctgacccttgcacccttgaaactttccttggaagaattcctatggtcttcaatgttgtcattctttctccccatggttactttgcccaagataatgtcttgggataccctgacactggtggccaagttgtttacattttggatcaagttcgtgctttggaaaacgagatgctccatcgcattaagcaacaaggattggacattgtacctcgtattctcattatcacccgtcttcttcccgatgcaatcgga

SEQ ID NO: 12414 - DNA, 274 bp, Glycine max
  Clone ID: LIB3094-095-Q1-K1-C7
cccccaaaataaaaattacctttctttccatatttctccttcaaacgaatgatcttcaacttctcgctttcaacaatcctttcatcaccacttattacatgacatacatgttcaagtaccacacccttcattcccaatttaaacattttaatcttaaccctaacgactctaatacccttctctttcattaaaaccccctcacccttttttaaatcaataaccctcacgaaattccatttcattaaattcctcctcattattttcctccatcaac

SEQ ID NO: 12415 - DNA, 254 bp, Glycine max
  unsure at all n locations
  Clone ID: LIB3094-095-Q1-K1-D1
atacgcggacccctanactgacacatacacactattgcctcaaaacagacctaaacaccatcttgttcattttctaacaccgaatatgcaacaaagannaaaccaacacaaacactaacaataataacaagaataaatcatttgcttatacccttacatcttcttccattacaattaccatctgacaaaaatcacattcacttcccaagacattcatcaattataacttcattctaacttcacttaatcttcat

SEQ ID NO: 12416 - DNA, 432 bp, Glycine max
  unsure at all n locations
  Clone ID: LIB3094-095-Q1-K1-D10
ttaaccaaacaaatatcttgtttttttaaccaaaccaaaaaaaactctcttcgcttgtttttttaccaggacctccttacaaataatgagcttctctctgactccttcctttacaaagaaattgataatggaatgctgtaggaagttgacgggaagtcggttattaaactaacagtttatgtaaacattaatgcaaacccttctactaagcgtttaagaaaaaattaagcaattgatcattcatctagaaacgttgttgacattgttgacacattcacacttcantatcaacccccattcgataaaaaacaatttgctaccttcatgaaaaagattatcaaaaattttactccccatctttatgcaaaacaacaagaagtttttaaaaaacacantcacgtaacaactaaataccctctctctaagattaaa

SEQ ID NO: 12417 - DNA, 204 bp, Glycine max
  unsure at all n locations
  Clone ID: LIB3094-095-Q1-K1-D11
aaaaaaaaaaaaanaccgcccgcacgcgtaccaacaccttcaatatctaactaaaaaccatttttttttaaccatcccttctaattccaattcgtgcttttaataaaaacctccccctccaaaaatctacatttactctaactttctccatctccattacatattatacacaaaacatcaaaaaattaacattcaccaaatact

SEQ ID NO: 12418 - DNA, 455 bp, Glycine max
  Clone ID: LIB3094-095-Q1-K1-D12
cccacgcgtccgggtggagtcatgacaaagttgattcccagaaacactgttatcccaaccaagaaatctcaggtgttcaccacctatcaggaccagcagactacagtctccattcaggttttcgaaggcgagaggagtctcacaaaggattgccgccttcttgggaaatttgatctgtctggaattcctccagccccaaggggtacgcctcaaattgaagtgaccttcgaagttgatgccaacggcattctaaatgtgaaggcagaagacaagggcactggtaaatcagaaaagatcaccattacaaacgaaaagggacgtcttagccaggaagaaattgagagaatggttcgcgaagcagaggagtttgcagaggaagacaagaaggtgaaagaaaggatcgatgctcgcaacagtcttgaaacctatgtatacaacatgaagaaccagatcag

SEQ ID NO: 12419 - DNA, 426 bp, Glycine max
  Clone ID: LIB3094-095-Q1-K1-B2
tttgaatacattccttgtagtttatactgaaagatgggtttgaagatggcgttactgagcgtaggcctttccctcatgctccttttggtctcctctgaggtggcatccacgaatacaaaagaggaggcaaatggagtggatgatgccaaatatcccggtggaagctatggagggggttacccaggtcatggcggtggcggttatcctggccatggcggtggcggttatcctggccatggcggtggtggtggctatcctggtcatggtggtggccaccctggtcatggtggcggctaccctggccgtggtggtggatactgtaagcatggctgttgcggtggccggacatacaacggaggttgcaaaaggtgctgctataacgctggcgaagcttgtgctgcacaaactcaagataagactcacgat

SEQ ID NO: 12420 - DNA, 307 bp, Glycine max
  Clone ID: LIB3094-094-Q1-K1-G12
caaaccctcttgccatcctctccaaaactcatatcataactttgcatcacatacacggggactcttacaagcgatcacaggtcgttttgaacacatgtttactcactctgattagggctcctgttcgttgtgaccctttcgtagagttctaattccgtactcgttcatattaccctctacaatgctatgcacattttgaactcgctcaccttaccgtcacaattgtaacaattgttttctgaaatacacgacctgtgacactactacacttgcccttatgttgcatactcacctatgactgctgatt

SEQ ID NO: 12421 - DNA, 362 bp, Glycine max
  Clone ID: LIB3094-094-Q1-K1-G2
tccaattcgacctaggcgtacgcgtacgcgtacgcttcacaacacccgtgaccgaacccaaattggattccacagaatagagcagggcctctagtctgagatattataatatttattacagcatctacaggtgtggttgtaacagtaattgtgattgctacatgtaacatcattatctcatgcaccatgtgaatagtgggttcttgccctgaaaatagtagttattgcatttattgattatagctgctttcagcccttacagttaactctgtacctatttatgtattctagatgatcaagtagatcggcaattgggcaaagtcctaatgtccaagcacatgctcaaagataatgtcatgcgg

SEQ ID NO: 12422 - DNA, 437 bp, Glycine max
  Clone ID: LIB3094-094-Q1-K1-G3
aaactgaagaaggtgaagagaccactgaaggcactggattatctgcttggcgaatggggggacaggccgcctcaagaatttcaagaattttgcccgaaatttaagaacgattatcaacaaaattgcccgaatgccgcgtatgaagcagtttgcccgttactgaagcaagcgattcaaatatgttgccagaaacacgcataactctgcaagccacggtgggcgtttggatgtgcttttagttaccactttctctcttggatttgcttacgtattgctccttttgtattagtggctcctgtcccaccttgcttttggacttgagctttttatatttctgattgttcaatgtctgttgtgtgtgctctccaacctgtggtgactttccggtttattcctgtggctgtttcttgtaggcctttcgacctccagtattaaat

SEQ ID NO: 12423 - DNA, 388 bp, Glycine max
  Clone ID: LIB3094-094-Q1-K1-G6
ccacgcgtccgaccacgcgttcgctgactgaagctagttacaacaagatgctgcaggtgctctacactgcgattttctcctaaatgcttctgcttctcacgctcgtcttcaaaacacccactagagaataactcacacatcgacatccctcgatagtgtcgaaccgcggactcggtcccctggcggcttccaccgtgggcgccacattgatggaggatctcgcttctagcctctacagcatggccaagatccagcaactcaccctcaaggcctccatagtcaaccgcaccgaccaagtcctcatgtccaagcacatgctcgaagcttctctgatgggctttctgctggtcctatctctgatgattcatacattgcaccattacataat

SEQ ID NO: 12424 - DNA, 127 bp, Glycine max
  Clone ID: LIB3094-094-Q1-K1-G7
attccggtcttggagcttccaacttttggtctgagttgatattgactggacaccgggatgatgcacaaattgctcttgcaatgtgcccaactgaaccctatgttctttcaggaagaaaaggccaaac

SEQ ID NO: 12425 - DNA, 298 bp, Glycine max
  Clone ID: LIB3094-094-Q1-K1-G9
caacatcaatttatttcacaaatatttacattaatcttactcattccaatttcaagcactgtttacaatctatgcgttccacaccttcaacctttcactcttcttttatattaccatcattcaactccaacttcttttcttaatcttcacatcttctcatatttcattttcatctctaatctatattcctttcatactccttcactcccataattctattccatcttatacaccatcttctatcactttctcctccccctactattctctcaatcaactttccatttttcttcatttt

SEQ ID NO: 12426 - DNA, 199 bp, Glycine max
  Clone ID: LIB3094-094-Q1-K1-H1
cttcttctctggttgattcggatctagagtcttcagtttctcctcgttgttcttcgcgttcctgttttcaatttcgattctttcgttaatttaataagatgtttgggagggcaccgaagaagagcgataatacgaggtactacgaaatcctcggcgtctccaaagacgcttcgcaggatgatctgaaaaaaggcttaca

SEQ ID NO: 12427 - DNA, 413 bp, Glycine max
  Clone ID: LIB3094-094-Q1-K1-H10
acgctcacgcgtccgtcgagaattgacccgcctaaaattacgaaacataattatttgtatggatgatatataatgagaggaacataaacgaacaatcatatgctgctagtcatttggataataaacaacattaggatttaggcatatcacatgatcgctttacttataatttatggatatcagctcaataccacatgattcaagtaatattaccaaaatcaaagccttatcctacaagatgcggtcagctacatgggtcatgacgtcattcggcaagtttagaaaccaaagtgtatcaaactggaaaaaagtacactacacattacagaggtatcccatatgacacattaactctgaaatagtatagtataccatagtattaatcagcggaatatacaatttcttacatgaca

SEQ ID NO: 12428 - DNA, 175 bp, Glycine max
  Clone ID: LIB3094-094-Q1-K1-H12
ccgtgctaacctcacaatgaggctctataattaagcctcctacgatcaaattaggaatcgtttcaattctaaatcagggggcatctaaaagggaattcttaactacactgaagatgatatggtctccaccaactttatagtcgatagcatatcaagtatttttgattcaaacgct

SEQ ID NO: 12429 - DNA, 274 bp, Glycine max
  Clone ID: LIB3094-094-Q1-K1-H6
ttcccgctggacccactcgtcccttcttctctgttgattcggatctattatcttcagtttctcctcgttgttgttcagtttcctgttttcaattgggattctttcgttaatttaataagatgtttgggagggcacctaataataccgataatacgaggtactactaaatcctcggcgtctccaaaaacgcttctcatgatgatctgaacaaggcttacaataaagcctccattaagaatcacccctacaagggcggttatccctataattttaa

SEQ ID NO: 12430 - DNA, 436 bp, Glycine max
  Clone ID: LIB3094-094-Q1-K1-H8
atcacccagcaagaaaaaagaaaatcgaagaggaagagcaaggacacaacacagagaagcaaaagaagacatggcgttgcagtggctgattctcacttacgtggtcgcagctgaggctgccgtggccattctgctaacccttcccacgcccaaactcctaagggaccgtttcgcctctctcgtttccctcattcttcaacccgcgcttttcattgtcccctttgcggggttccaactccttgatatatactggaaaaatgagcatcggttgatgtgtacctctgaagtttgtactgctgcggaaagagatcgatatgagaaatctatatacaaagctcagaggaatgtaatactgtgtgttacagcatgtcttctctactggtctatcagccgcatttgcaagtatcagaaggaaatccagagtctggaggaaggg

SEQ ID NO: 12431 - DNA, 376 bp, Glycine max
  Clone ID: LIB3094-095-Q1-K1-A2
tttttctcccttttagggtaaaaatatttccatttccatttcctctctctcagtttggaggaatcttaagctatgggaaagtcttacccaaccgtgagcgctgattaccagaaggccgttgagaaggcgaagaagaagctcagaggcttcatcgctgagaagagatgcgctcctctaatgctccgtttggcatggcactctgctggaacttacgacgtgagctcgaagaccggtggtcccttcggaaccataaagcacccctccgaactcgctcacggcgctaacaacggtcttgacatcgctgttaggcttttggagccactcaaagcggagtttcctattttgagctacgccgatttctaccaattggctggcg

SEQ ID NO: 12432 - DNA, 87 bp, Glycine max
  unsure at all n locations
  Clone ID: LIB3094-095-Q1-K1-A3
gcgacgctcacgcgnntccgcggaccgcccgtgggtttttcttttcaaatnntcccgtgaagaagaccacttcagaaagaaatgagg

SEQ ID NO: 12433 - DNA, 329 bp, Glycine max
  unsure at all n locations
  Clone ID: LIB3094-095-Q1-K1-A4
cccacgcgtccgcccacgcgtccgccagtcaccaacaaaacaaaatccaatggcgccgtctgtcgcaatcaacggcgctttccccagcgccagagtcactcctccttccgtcaccggccgattcgccgccgtctacagcgaggtccaaaacagccgcatcgaccacgcccttccttttccctncgttctcaaaaaccctttcatcatcgtcgacggtccccaaagctccgccgccggcaaccctggtctcgctccctcccattcactacttcaattttccgtcgacaattaggtctacgtaattttgatattggtatgaatattattat

SEQ ID NO: 12434 - DNA, 138 bp, Glycine max
  Clone ID: LIB3094-095-Q1-K1-A5
cggacgcgtgggtttttcttcaaattcccgttaagagacactcagaaagatgaagttctggtggatgcatgctttggggggtgggttaatcggggcgttgtggaacttgcaaagggcagaaggtattcgatttgtgat

SEQ ID NO: 12435 - DNA, 315 bp, Glycine max
  unsure at all n locations
  Clone ID: LIB3094-095-Q1-K1-A6
cccacgcgtncgatgacctacatgctttgataagtccaacaccacaggggacacccctgcccctagctctgttgggaaagtccaagaatgctctactctccactttcttgtttcttgatcaatttgtgtggcttggcagaacaggcatctaccagaataaagagcgcaccgaactaattggccggatatctctttactgttggttgggatcctcggtgtgtgccaccttggttgagcttggggagcttggaagactctctgcatcaatgaagaagttagagaaagatctcaagaacaagaattaatacgatgatg

SEQ ID NO: 12436 - DNA, 114 bp, Glycine max
  unsure at all n locations
  Clone ID: LIB3094-095-Q1-K1-A8
aaccttaantttaanaacacgttttttcaatctccttaataaaacctaaaaattcgttcctttaaaaaacgcgcgcccccccaacaaacaaattcctacttccttccatccttt

SEQ ID NO: 12437 - DNA, 387 bp, Glycine max
  unsure at all n locations
  Clone ID: LIB3094-094-Q1-K1-G11
gcttcctcctcttacgagcctttcctttcagtccattgattcggtgggtgcgggtgcggcgaaaccgagctagacgcctgatcggcgtcggcacaccgccggagaacaagatgattgtctgcgtcgccgtcgtcggtcaccagaacaatccgctgtacatacagagcttcacggaggccgatgatgctctcaagctccaccacatcgtccattgctcgctcgatgtggtcgacgagcgagtgaacaatcctaaaaagtctgggccgatgcttaatgagacgttnttgggactgctttatcctattgaaaactacaaagtatatggatatctgactaatacgaaggtgaaatttatcttggtgaccacngatctggatgttaaagatg

SEQ ID NO: 12438 - DNA, 445 bp, Glycine max
  Clone ID: LIB3094-095-Q1-K1-B1
cccacgcgtccgcgtttccaaatattcacataagagaagaacaatagttctctccctaggggctcatgatatgctagataagccatccttaggagcaatatatccgtcctcttcaatttattagcagaaggtgtgttgcgtattagaccatagtctttttgtcattgttgtttcccaacaacgcagtttagcctttgagagcatcagcaatcacatggtgatcagaatatcattcagcaattgaagatcagtggcatcaggcataggctagcaagcaatgatatggctttcttcccagcaaatttcatgctacaaacacctcaccaagatgaccatcaacctccaccttcactcaactcaattataacttcatgtgcacctcaagagtaccatggtggaagagcatcctttcttggcaagagatctatgtcattttcagggattg

SEQ ID NO: 12439 - DNA, 339 bp, Glycine max
  Clone ID: LIB3094-095-Q1-K1-B10
ccaacccttccgcccacccgtccggtgaaatcaaaaccctaataataaaaaaatggccacacgttgaagcttctcttctctccaaaccttcccttctctccaaaccttccctcccattcccattcccgttcctctctccgaaccactccccattctccctctccttcccccccatgcgccgcgtcctctccacaccgttatgctgcaccttctgcccctccgaacccaatctcagcccctccgaaccggaacacgaagccggttcagccaacaccgaagagccgggtataaattcaaccgaagaaagtgcagcttcggtttcagattcgggtttggaag

SEQ ID NO: 12440 - DNA, 228 bp, Glycine max
  unsure at all n locations
  Clone ID: LIB3094-095-Q1-K1-B11
atccattcatcaaaacatattaataccttacaccaaaaaatnaacccgccctttaacaaatctccacaccaacantacacataaatacttccataacattcaaaatacactttatatatccaaaacaaaacccattatgcttcatcatctaatacatcattacttatctcttaacacactttattatccaacatacttaattccaaacccactatactaccctattaa

SEQ ID NO: 12441 - DNA, 321 bp, Glycine max
  Clone ID: LIB3094-095-Q1-K1-B12
ctcaactcccatttctagctccctccctccctctgcttttcttctcttctcattttccttcgaacctcctaatctctccctccagcttctgggttctccattttccctcgttttctgcatctgcatttcgtagattcagttctcatcggaaaatggacgttcaccgaagacccattccttcttccggcgaacaccgacaaacccagaagctgaagaccaccaccaccaccaccaccgattcgaaatcgcaatcgcaggcgcttctgcctctctacctcaccaacgccctcttcttcggggtgttcttctccgtcgcgtact

SEQ ID NO: 12442 - DNA, 433 bp, Glycine max
  Clone ID: LIB3094-094-Q1-K1-D5
tcgcccacgcgtccggcgaaaacccccaactccaacctctgttcatcgtctaccgcgctttgttttgaaccagaactatgattaagctttttaaagtaaaggaaaagcagagagaacttgcagaaaatgcaagtggcggaccacctgttaagaagcaaagtgctggagagttgcgtcttcacaaagatataagtgagctgaatctaccaaaatcatgtaccatgcaattccccaatggcaaagatgatctgatgaactttgaagtttcaattcgacctgatgatggatattacttaggtggcacatttttgttttcctttcaagtgtctcccatctatccacacgaagcaccaaaggttaagtgtaagacaaaggtctatcatccaaatattgacttggaaggaaatgtttgtctcaacatcttacgagaaga

SEQ ID NO: 12443 - DNA, 408 bp, Glycine max
  Clone ID: LIB3094-094-Q1-K1-D6
cccacgcgtccgcccacgcgtccgctcgctttatcttcccttcccttcatctgcgctgcaaaataatatcctcctctctatctctgttcgaaacaagtccaacaccagcaacacactgcttcaatctcaatcggccacattgagaaatggttttgagtaatgggaaaactgaggcaccattgccaagtagtaatgggggaggtgctgagattgataacaatgagaagaagcccttcaagatcttcgtagggtatgaccctcgcgaagatcttgcctatgaggtatgtcgccactccatcttgaaaaggtcttcaatccctgttgagatcataccaattaagcagtcagatctgaggaaaagtggtttgtattggcgtgagaggggccagtttgagagcactgagttct

SEQ ID NO: 12444 - DNA, 432 bp, Glycine max
  Clone ID: LIB3094-094-Q1-K1-E1
cttttctactttgagtcttcttgatccttctttttctccttgaactcaaacgtggcagatgaggtggttctgctagatttctggccaagtccatttgggatgagggtcaggattgcacttgctgaaaagggtatcaaatatgagtacaaagaagaggacttgaggaacaagagtcctcttctcctccaaatgaacccggttcacaagaagattccggttctcatccacaatggcaaacccatttgtgaatccctcattgctgttcagtacattgaggaggtttggaatgacagaaatcccttgttgccttctgacccttaccagagagctcatgctagattctgggctgattatgttgataagaagatatatgatcttggaaggaagatttggacatcaaaaggagaagaaaaagaagctgccaagaaggag

SEQ ID NO: 12445 - DNA, 315 bp, Glycine max
  Clone ID: LIB3094-094-Q1-K1-E12
cccactcatcctcacctacactcttcctcaactatctaatttctttcactatcgcacatccaacatttccgctcgttttcatttattctatccccaactatactcatatcactaccaaaaaaactaatctaatcaccacctattatgaccataaaactacaaactccatccaaaatttctaactccagactaacataacaactcattacagccttataccaaaatatcacatctactcaattactacagcctacatatacactcatcacatcattcataccttctaagacaaatccaaccactttactaaacata

SEQ ID NO: 12446 - DNA, 233 bp, Glycine max
  Clone ID: LIB3094-094-Q1-K1-E2
aattcctcatttcacacttgccatatcaaagaaaaagacatgttcatttgatcagagatacaggcattaatcacttcaatcattggtttcaaagcacaatctcgccatcattagtacactctaatcctctataattttatcaacacttttagcttattcattcaataatatcttcaattaagccaaaacttactcttatccatactattaatccatcctcaatctttaacttt

SEQ ID NO: 12447 - DNA, 215 bp, Glycine max
  Clone ID: LIB3094-094-Q1-K1-E3
attcccttctggacccactcatcctaagaatcaaataaagtactcatttctgtttctaaagcttaataatttctttatgtccgtatcatctataatttcgcagcatcatactaacaaattactcatatcatataataacatttcccattctctctcacaagccaaacatattcttctccttattactcaatctatctccctaattccctttcatc

SEQ ID NO: 12448 - DNA, 442 bp, Glycine max
  Clone ID: LIB3094-094-Q1-K1-E4
agggaagctggtggaaaagtctttactcagagtaaagagaataatgaaagtcaaagtggagagcaaagagatgagaaatcaccggtgaaactggatgacagtttacagaaaagagatggtttcactgcaagaaaagatgatccacctactatgaggaaaagacgtgcatttagggagaagaagatccctgcggattcagcagatgctaatccagcttcgatagtggaagtaaagccaagccatactgaccatcctccggaaaggaatgaaaggaaggatgaaagaagcagcaatcctcatcatctggatagacctgagaagcaaaatgcagagggcagagcacccaataagattgaagctagaagggatggtttttcatcaagagcaaggtatgggggcagtggaggcaataacaattacaggggaagagataaatttaatg

SEQ ID NO: 12449 - DNA, 339 bp, Glycine max
  Clone ID: LIB3094-094-Q1-K1-E6
atgaactactatgtgacaggacgatctttagtgctgctcttgatctataacagtccgggatgaattgcggctactgtatctcttgcctagtcaaagcccgatgcgtgtcatctttactcctactaacacgaatcccaactacttcaacagaacaacgacctgccactacacgacttcccctccctcgccaacgaacctgccaaacacaagaataacaaggcccatacctactgcctaaccgaattcaccatcaaacacgacacctcatttgactaccaagatcccgtattactcaccaccgttcctcgccagcgcaccgtcgaagagctctaacgcacc

SEQ ID NO: 12450 - DNA, 123 bp, Glycine max
  Clone ID: LIB3094-094-Q1-K1-E8
agaataatgaaagtcaaagtagatatgtttagttattaggggatcaccggtgtaaactgtgatgacagtttatcagaaaagtagatgtgtttcacttgctaagaaaagtatgtatccacctta

SEQ ID NO: 12451 - DNA, 148 bp, Glycine max
  Clone ID: LIB3094-094-Q1-K1-F1
ccattctaagcatgcatacacctttcttaaactcctcttgatcaaacaaaaaaaaacacatcaaattcaccacattgtctttacttcaaatattatcaacacaaatttttctttttaaccctttacacttaaaaaatatctcaaaaac

SEQ ID NO: 12452 - DNA, 435 bp, Glycine max
  Clone ID: LIB3094-094-Q1-K1-F10
ctgagttgcaagattcacttcaaattatgcgtttcgctgatcggttcctcatcacatgaaaggtcgtcttagatcatcggaattccttgattatttccttttgttgatacgcggaatcgcgcacacggtgctggtgtgtgcactgaggtagaaagaagaagattgaattgtaaacagcatgaattaccttcttggagctttcaagcctgcatgtaatgtcttgatcacgtttaatgatgggaagaaccggaagcaggttccgtttaaaaaagaaaatggtcaaatggtcacagtcccacttttccaaagtcaagaaaacattggtgggaagattacaatagaaccaatgcaagggaagaagattgatcacaatggtgtaaaagttgagctcttggacagatagagatgtattttgacagatgaaatttttatgac

SEQ ID NO: 12453 - DNA, 436 bp, Glycine max
  Clone ID: LIB3094-094-Q1-K1-F5
gcgccatatcgcgtatctttctctgttctattcctacgatggagttttggggtgccgaggttaaggttggtgagtctgttaaggtagatccagccgaattcgaggcatgcatacacctttctcaggctgctcttggtgaggcaaagaaagacaaatcaaatgaaccagttgttctctacttgaaagttggtcaacagaaatttgtcttgggaaccctttccagggagaaaattcctcaaatacctctggaattggttttggaaaaggagtttgagctttcccacaactcaaagaatgccagtgttcatttctgtggatacaaggcattttatgatgctggcgatgatagcgaggaggatgaatttactgatagcgaagaggatgttccattgcttaaagcagagaatggaaaacctgaaacaaaagctgaagagtt

SEQ ID NO: 12454 - DNA, 415 bp, Glycine max
  Clone ID: LIB3094-094-Q1-K1-F6
cccacgcgtccgagaaggcctgggcttagttgataagcataactgggtgaggaagagagaaagagagtgaagaagatggcgtcgagcggagcggtaccgttttggagggcggcggggatgacgtacataacatactcaaacatatgcgcgaatctgctcaggaattgcctcaaggaaccctacaaggccgaatccctttctcgtgagaagctccatttggttctctccaaatgggtcgacgccaagcctgaaaaacttactattcgttaaaacacccaaaagcatggacctggattagttggaactcttaaatgcataaatctttgagatctggaagttcattgtcattttgaacctttctgagatgtttaattcctttgtttttttctctccatgaaatggaacatgcactgga

SEQ ID NO: 12455 - DNA, 443 bp, Glycine max
  unsure at all n locations
  Clone ID: LIB3094-094-Q1-K1-F7
tcgcccacgcgtccgcccacgcgtccgcagggaagttgtggaagttgttgggcgttctcaggggtggccacagtggaagcaataaacaagatagtgacagggaagtttgtgtccttatctgaacaagaacttgtggactgtgacagagcctacaatgaaggatgcaatggtggccttatggactatgcattcgaattcatcattcaaaatggaggcattgacacagacaaagattacccataccgtggctttgatggcatctgtgatccaactaagaaaaatgcaaaggttgtgaacattgatgggttcgaggatgttccaccgtatgatgagaatgccttgaagaaagctgtcgctcatcaacccgtaagcattgctattgaagcctctggcagagatttgcaactntatcaatcgggtgtatttactggtaaatgtgggac

SEQ ID NO: 12456 - DNA, 436 bp, Glycine max
  Clone ID: LIB3094-094-Q1-K1-F9
cggacgcgtgggtttttcttcaaattcccgtgaagagacactcagaaagatgaggttgtcggggatgcatgctttggtgtttgtgttaatcggggcgttgtggaacttgcaaagggcagagggtatccgatttgtgatagacagagacgagtgtttctcccatgatgtgaagtacgagggtgacactgttcatgtctctttcgttgttattaaggctgattctccctggcattacggcgacgaaggtgtcgatctcgtggtaaagggaccttctggcgagcaaattcaagattttcgggacaagaccagtgagaagtttgactttgtggctcacatattcggtgtccataaattctgcttcaccaacaagtctccttatcatgaaactgtcgattttgatgtacatgtttggtcatttttctgactttgagcaaca

SEQ ID NO: 12457 - DNA, 264 bp, Glycine max
  Clone ID: LIB3094-094-Q1-K1-G1
catcacatcaataccctcaattaatcttccttatatcatcctaaacatattaactctctcacaatatacactttcaaatactatcttttacttaaacactactcatattacactatcaattccaaaaatacctttactacactcaacaacatcacatacctaatctatcatactatttattaacctacttatattattctatctattactaacatacatttcatcaaatacctattacctattcactaaacttcactcaataaa

SEQ ID NO: 12458 - DNA, 429 bp, Glycine max
  Clone ID: LIB3094-094-Q1-K1-G10
gaccgacgcgtacgcttttctctgaaaaaacatgttgagggttgcagctagaaggctctcttcttctctgtgatcttcttctccgttgcggcccaatcacgccgcttccgcttttctctctcgaaacgacgtcgtcgtcgatgaccgcagatctgctccttcctcccatccccttcttcccttcagaggttatgctactgaatccctgatccacacaaaagaaaacagcattactcctgagattccgccaactgttactgctgttaagaaccctacttctaagattgtctatgatgatcacaaccatgaaagatttcccccaggtgacccaagcaagagggcatttgcctacttcgtacttacaggtggtaggtttgcttatgcctctgtggtccgtctccttgtcctcaagtttgtgctaagcatgtc

SEQ ID NO: 12459 - DNA, 445 bp, Glycine max
  Clone ID: LIB3094-094-Q1-K1-D4
gtcatatgctccaagtgcactggtaagggttctaagtctggtgcttcgatgaagtgtgcgtggttgtcaaggaactggtatgaaggtttctataagacatcttggcccgtccatgattcagcagatgcagcatgcttgcaatgaatgcaagggtactggagaaaccatcaacgacagagatcgctgcccacagtgcaagggagaaaaggttgtgcaggagaaaaaagtccttgaagttattgtggaaaagggaatgcagaacgggcagaagattacattccctggcgaagctgatgaagcgccagacacaattactggggatattgtctttgtccttcagcagaaggaacatcccaaattcaaaagaaaggctgaagatctttttgtagagcacattttgtcccttactgaagccttatgtggcttccaaattgtgctgactcac

SEQ ID NO: 12460 - DNA, 297 bp, Glycine max
  Clone ID: LIB3094-094-Q1-K1-A9
gaaaaataaaaatcaaaggactttggttaatgctgcttctgcttcatcatcgtcagggtatatattctgctactgtgtcttctgcgtggtcaaatccctgctcgtgttctctctattcctatgaacacgaatcctaactccttcaacagaacaactacaagccactctcctacttcccctccctcgccgccttcgcttccaaacccaagaagaataatgcccatacctacttcctcgccgaattcaccttcaaaccctacaccttcttttccgaccaaaatcccttcatccttccca

SEQ ID NO: 12461 - DNA, 324 bp, Glycine max
  unsure at all n locations
  Clone ID: LIB3094-094-Q1-K1-B1
ccactcatccactcaccaatctcactttacgacaatcatactttntctatctaccctctaacgacgtctagtaacatttaacaggaccaggacaccaacacacgagattagctactcaaatactacatctgtaacaagttattatataatggtattccatccaaagttcaaggtttacagtttggccaaccacctctccatccccacattcacccaaaaccttcttcaaaacaactagtataatatgagacattcttaagaccaacatctaatgaagattacatttttcacacattcaaactaccttatcatacccaattctat

SEQ ID NO: 12462 - DNA, 443 bp, Glycine max
  unsure at all n locations
  Clone ID: LIB3094-094-Q1-K1-B11
aaaaaatgggttcttcttcttctatgtggacggtgtgtgtgattttggcatcactggcctcggcagcactctgtgccaacccacgcaggccagtggatgtacaatttggccgaaactacgtgcccacatgggcctttgatcacatcaaatatttcaatggtggttctgacattcagcttcatcttgacaagtacactggtactggcttccagtccaaagggtcttacttgtttggtcacttcagcatgtacataaagatggttcctggagattctgctggcacagtcactgctntctatntatctttccaaaacgcggagcatgatgagatagactttgagttcttggggaacaagaacaggacaaccttacattctgcaaacaaatgtgttcaccggaagcaaaggtgatagagagcaaagaatctatctctggtttgatcc

SEQ ID NO: 12463 - DNA, 435 bp, Glycine max
  Clone ID: LIB3094-094-Q1-K1-B12
cccacgcgtccgagaaggcctgggcttagttgataagcataactgggtgaggaagaaggaaggatagtgaagaagatggcgtcgagcggagcggtaccgttttggagggcggcggtgatgacgtacataacatactcaaacatatgcgcgaatctgctcaggaattgcctcaaggaaccctacaaggccgaatccctctctcgtgagaagctccattttgttctctccaaatgggtcgacgccaagcctgaaaaacctactattcgttcagacaccccagagcagtgatctggaatagttggaagctataaatgcataaatctttgagatctggaagttcattgtcattttgaacctttctgtgatgtttaattcctatgtttttttctctccatgaaatggaacatgcactggattttgatttgcacggttaat

SEQ ID NO: 12464 - DNA, 436 bp, Glycine max
  Clone ID: LIB3094-094-Q1-K1-B2
gttctagatcgcgatctagaactagccaattcactctttttcttctcgccctctgccgggggaggagtttgtaacatggctgctctaccaacggcggagcttagtgacgcaaatgcaacacatgtagcaagttgtgatgtgagggtgttgcatccagtgttcaaggtttacggtggggccaccgcgttctccggccccgttgtcaccgtgaaggtgtttgaagacaacgtgttggtgagggagcttcttgagacgaaaggcgaaggaagagtattggttgttgatggaggaggaagcttgaggtgtgcattggtgggagggaatttggcactgattgcacataacatgggttgggctgggattgtggtgaatggctgcatcagagatgtggatgagatcaatgcaagtgatattggcgtcagagccttggcttctc

SEQ ID NO: 12465 - DNA, 440 bp, Glycine max
  unsure at all n locations
  Clone ID: LIB3094-094-Q1-K1-C10
cccacgcgtccgcggacgcgtgggggtttttgtggataagagtgagctataatggcggccaggagaccgggtttaattgctttgtttgatgttgacgggactcttacagctcccaggaaggtggtcacaccggaaatgttgacattcatgcaagaactacgaaaggttgtaacggttggagttgttgggggttctgaccttataaagatatcagagcaacttggcagcacagttaccaatgagtatgattacgtattttctgagaatggtcttgtggctcacaaggaaggaaagctcattggaactcagagcttgaagtcattcttggtgaagaaaagctcaaggagtttattaactttacacttcattatattgctgattnggacatccncattaagaggggaacatttatggagttccngtatgggatgctgaatgtc

SEQ ID NO: 12466 - DNA, 433 bp, Glycine max
  Clone ID: LIB3094-094-Q1-K1-C2
cggacgcgtgggattttgtaattgtaaggatcaataagttgtttgtttttacttgatggactacaaaaatgctccacaactcataagatacttgtacccaaaagataacctttgtacattctgtgagaaaatcgatgacgaagtgcccaactaaactttattcccaggacttaattggttttatgcccatctttgaactttgttctcgagactgaaaacatattttttcttctgctgcaggtagtattaagcatctttggtccaccttcaagatgttcaatcattgagcaagaggaagatcgttcatcaacctcttcatagctgtaaactactcattggacgatgggatgtccgcaagtagtgcagaagcatctgtaaagtacagaaatttataggcgaaacagaagataggaaatacagcaattttgacata

SEQ ID NO: 12467 - DNA, 440 bp, Glycine max
  Clone ID: LIB3094-094-Q1-K1-C4
tctccgactcgtccgcgtttccaaatattcacataatataagaacaatagttctctccctagaaaggtatgatatgctagataagccatccttaggagcaatatatccgtcctcttcaatttattagcagaaggtgtgttgcgtattagaccatagtctttttgtcattgttgtttcccaacaacgcagtttatcctttgagagcatcagcaatcacatggtgatcagaatatcattcagcaattgaagatcagtggcatcaggcataggctagcaagcaatgatatggctttcttcccagcaaatttcatgctacaaacacctcaccaagatgaccatcaaccttcaccttcactcaactcaattataacttcatgtgcacctcaagagtaccattgtggaagagcatcctttcttggcaagagatctatgtcattttc

SEQ ID NO: 12468 - DNA, 420 bp, Glycine max
  Clone ID: LIB3094-094-Q1-K1-C6
attcccggctggaggcactcatgcgcccactcgttcttccactcgttcggattaaaggaatataccttactcatggtggaatcaagaattttttgggattgcatactgctgctggtgaccaatatggaagacaaagacagtgagagagagaaaaatcttcgctttatgtcaatggcacgaatcatgggtttttacagaagtgagcaacgacgccagatatgagaaaagtgagtttatttggggtcatatttgtaaaaagtggttttgtaattataccctctaattcaagagtgaagaaacaagggtgggatggaaatataaatagtacaatttggtcctagtggtggcttaccctttggcctctttttctaattcataattttttttaaaatatataaaagtggtgtgatatgtttactt

SEQ ID NO: 12469 - DNA, 419 bp, Glycine max
  Clone ID: LIB3094-094-Q1-K1-C7
ttttgattttctggatccgtgtttttgagatgagtgtatgaatttaccgattgtttggcagatgaggttatcgttgaggcatgctttggtgtttgtgttaatcggggcgttgtggaacttgcaaagggcagagggtatccgatttgtgatagacagagacgagtgtttctcccatgatgtgaagtacgagggtgacactgttcatgtctctttcgttgttattaaggctgattctccctggcattacggcgacgaaggtgtcgatctcgtggtaaagggaccttctggcgagcaaattcaagaatttcgggacaagaccagtgagaagtttgactttgtggctcacatatccggggtccataaattctgctttaccaacaagtctccttatcatgaaactgtcgattttgatgtacatg

SEQ ID NO: 12470 - DNA, 243 bp, Glycine max
  Clone ID: LIB3094-094-Q1-K1-C8
tccttctaactcctctataccttactcaatctttctatatctaccatagatagttttcttttatcactctacatccctaatttcacatcatataaaccatctacacccaacaaacaccaaacttgctttcataatctcaaaatttcacttctaaactattaaatccattccctttacaatcatgattaaaacattcctcctatatcctattactaaatcctttacacttttacattattatcc

SEQ ID NO: 12471 - DNA, 417 bp, Glycine max
  unsure at all n locations
  Clone ID: LIB3094-094-Q1-K1-C9
ctgttctactttgagtcttcttgatccttctttttctccttgaactcaaacatggcggatggggtggttctgctagatttctggccaagtccatttgggatgagggtcaggattgcacttgctgaaaagggtatcaaatatgagtacaaagaagaggacttgaggaacaagagtcctcttctcctccaaatgaacccggttcacaagaagattccggttctcatccacaatggcaaacccatttgtgaatccctcattgctgttcagtacattgaggaggtttggaatgacaganatcccttgttgccttctgacctttaccagagagctcangctagattctgggctgattatgttgataagaagatatatgatctttggaaggaggattttgacatcaaaaggtgaagaaaaaga

SEQ ID NO: 12472 - DNA, 428 bp, Glycine max
  unsure at all n locations
  Clone ID: LIB3094-094-Q1-K1-D1
tatcttccctttccctttcatctggcgcttgcaaaatatatatcactcctgctctgagtctctgttcgaaacaagtctcaacactcagcaaccacaaactgcttcannatctcaatcgggcaccatttgagaaatcggttttgagtaatgtggaaaactgaggcatccattgccaagtatgtaatgggtggaggtgcctgagattgataacaatgagaagaagcccttcaagatcttcgtagggtatgaccctcgcgaagatcttgcctatgaggtatgtcgccactccatcttgaaaaggtcttcaatccctgttgagatcataccaattaagcagtcagatctgaggaaaagtggtttgtattggcgtgaaaggggccagtttgagagcactgagttctccttttcaagattcttgaccccttgcc

SEQ ID NO: 12473 - DNA, 282 bp, Glycine max
  Clone ID: LIB3094-094-Q1-K1-D11
cacgcatcctacaaaatttcttcacactatcatgttttatttatctcccacatactttgtaactacggtttgtttattaaataatcttctctgctcttcatgacctcctttaaatttctcatacacactctcaaaaatacttccacaccatataattaacccttattctttctttgaatctcttctctaaaactttcctacacttaatccaacacctatcacaattaccaggcttcaacacattatctttatctatactaacactgttataaatttatatta

SEQ ID NO: 12474 - DNA, 444 bp, Glycine max
  unsure at all n locations
  Clone ID: LIB3094-094-Q1-K1-D12
ctgagttgcaagattcacttcaaattatgcgtttcgctgatcggttcctcatcacatgaaaggacgtcgcagatgatcgcaattccttgattatttccttttgttgatacgcggaatcgcgcacacggtgctggtgtgtgcactgaggtagaaagaagaagattgaattgtaaacagcatgaattaccttcttggagctttcaagcctgcatgtaatgtcttgatcacgtttaatgatgggaagaaccggaagcaggttccgtttaaaaaagaaaatggtcaaatggtcacagtcccacttttccaaagtcaagaaaacattggttggaagattacaatagaaccaatgcaagggaagaagattgatcacaatggtgtaaaagttgagctccttggacagatagagatgtattttgacagangaaatttttatgactttacttc

SEQ ID NO: 12475 - DNA, 327 bp, Glycine max
  Clone ID: LIB3094-094-Q1-K1-D2
tttgaatacattccttgtagtttatactgaaagatgggtttgaaaattgccttactgggcctaggcctttcccttatgctccttttggtctccctctgaggtggcatccacgattccaaaaaaggaggcaaatggattggataatgccaaatttcccgttggaagctatgaagggggttaccaagttaatggcgttgccggttatcctggcaatggcggtgccggtatatcctgcaatggcggggggggtgtatatccggcatatgggggtgcacactcttcatatgggggggtatactctgcccggtgggggatactctatgcata

SEQ ID NO: 12476 - DNA, 255 bp, Glycine max
  Clone ID: LIB3094-094-Q1-K1-A8
actttccaacttactttcaacaataccatccaagtatcacttctatacaaaagcttattcaattcactattcaatcttataacctatcctcattttttttccaatcactatttaatctacaacattcttcaaaaccaataatatcatctctatctaattcaaacacccttcttttctaaactcaaaacttacatttctattctaactcttaacaccaattaccccaaaaagcattttactctctattttctaaac

SEQ ID NO: 12477 - DNA, 395 bp, Glycine max
  Clone ID: LIB3094-093-Q1-K1-E3
cccacgcgtccgctctattcttcaagcaaactcttcgtctcagatctctctttctctctctgtaggggttccgtttctctctctgctatttatgatcactctctgacgcgcttctgtcaccaaatcaagtgcttccgtctcttccccttcttctctgattggaaggattcgtgtggtcggagatggtggtttcggggccaatcacgccggggcaggtgtctttcttgctgggggttattccagtttttgtttcatggatatattcagagtacttagagtacaagaaactctcatctcctcccaaagttcattcagatgctagtcttgaagagttggggaaagatgcaattaaggaagatgatcgggccattttgctggaatcagggcttacaaga

SEQ ID NO: 12478 - DNA, 282 bp, Glycine max
  Clone ID: LIB3094-093-Q1-K1-E8
aacgaccctatatacactgcacttgtctacatttaacttctcctactactttcttcatctgatctcatcacaaatcttccataaaaacttttgcaaataaactgtcaagtacccttttttcaatcatcctgcgttttgataccctcgttttcaaccacatgtgacatgtaccaaccaaaaacttacatttaccactcacacattctcctaccctgttacctcaattgacttcaccaaccaagtcatatacatttcatatcccaccatgtcaacattctcttt

SEQ ID NO: 12479 - DNA, 353 bp, Glycine max
  Clone ID: LIB3094-093-Q1-K1-F12
ctcttcctcttctcgttccatgtatccctcataaataaccttccaatccaacaacctcatcctcacactcacacatacacacatctaaactcttatcatccctaccatctcttcaaatctcatcctcaattaactcaactactttcacaaaaacccaccaacttctttcatctcttatccaataccttattacaagttccattttctagcaaccaatattttacctgctaataatccttatactacatcatcattcctatttcactatacactttcctccatatcatctctttaaacctcccaacataaccattataactatacactttcattcataaacattaacaaccaat

SEQ ID NO: 12480 - DNA, 386 bp, Glycine max
  Clone ID: LIB3094-093-Q1-K1-F2
tcttgcttcaccactttccgtatccctcagcttcacgacaacaatggatttcacttaccctgcacttgtctccattttccttctcctactacttccttctctgatctcatcacaaatctgccagaaaaactgtggcaaagaaactgtcaagtacccttttggcagtggtcctggttgtggagaccctcgtttccaaccacatgtgacatgtagcaaccaaaagctcacattcaccactcacacaggctcctaccctgttacctcaattgactacaccaaccaagtcatatacatctcagatcccaccatgtcaacatgctcttgcactgtccctagcaaagggcttggccttaactgggatgcaccatttacctttgctgatagca

SEQ ID NO: 12481 - DNA, 399 bp, Glycine max
  Clone ID: LIB3094-093-Q1-K1-F3
cccacgcgtccgcccacgcgtccgctcgctttatcttcccttcccttcatctccgcttcaaagataatatcctcctctctatctctgttcgaaacaagtccaacaccagcaacacactgcttcaatctcaatcgggcacattgagaaatggttttgagtaatgggaaaactgaggcaccattgccaagtagtaatgggggaggtgctgagattgataacaatgagaagaagcccttcaagatcttcgtagggtatgaccctcgcgaagatcttgcctatgaggtatgtcgccactccatcttgaaaaggtcttcaatccctgttgagatcataccaattaagcagtcagatctgaggaaaagtgttttgaattggcgtgagaagggccaagttgagagc

SEQ ID NO: 12482 - DNA, 403 bp, Glycine max
  Clone ID: LIB3094-093-Q1-K1-F5
cgcaccagtttcaccgcacgaatatcttgttgtttggagcgatccgagaaaaactctgtaagcatgttggtttaccaggacctccttacaggtgatgagcttctctctgactccttccgttacaaggaaattgagaatggaatgctgtgggaagttgaggggaagtgggttgttaaaggagcagttgatgtagacattggtgcaaacccttctgctgagggtggaggagaagatgagggagttgatgatgcagctgttaaggttgttgacattgttgacacattcagacttcaggagcaacccgcattcgataagaagcagtttgttacctttatgaagaggtttatcaagaatttgacttccaagctcgatgcagagcaacaggagttgtttaagaagcaca

SEQ ID NO: 12483 - DNA, 420 bp, Glycine max
  Clone ID: LIB3094-093-Q1-K1-F8
cgcgtgcgggcggggctgtggcggacgcgccgtcggtgtatgaggagaagacggagttcgacgtggaggggcgatttgtgccgagcaacgctcgaatcgcggtgattaaggcggtgagggcattgacgaacctagcgctgaaggaggcgaaggagttgatcgaagggttgccgaagaagttcaaggaagggatttcaaaggacgaagctgaagatgcgaagaagcaactcgaagaagctggtgccaaggttaccattgcttaaacactgtttagctgcagcatatatgttctgcttcttcttttgttggttgtagttgagttcaccagtacactgtaatttcattttcaatttgtctggatttcaatcttttatttgtaatgaggaaatattagttcttaattgtataattatctttttt

SEQ ID NO: 12484 - DNA, 320 bp, Glycine max
  Clone ID: LIB3094-093-Q1-K1-F9
cccacgcgtccgcccacgcgtccgcttttgcaagctcaatttcggaactgaataattgcccgatatataggaatttactgtcttttttcttactttttttaatacttccaattccatatgtattatgctcggaatttctggaaaaaaaaaagctttgaaattgagctgatttttctttctttccttcaagaatcacatgtattttatatttatatttattcaaactgttttaacgacgtgctaactcttctgaaacccttgcccttcgcttattctccactatatatagccttaatcgcaagaacaggacaattctgtag

SEQ ID NO: 12485 - DNA, 323 bp, Glycine max
  Clone ID: LIB3094-093-Q1-K1-G5
cgcaccagtttcaccgcacgaatatcttgttgtttggagcgatccgagaaaaactctgtaggcatgttggtttaccaggacctccttacaggtgatgagcttctctctgactccttccgttacaaggaaattgagaatggaatgctgtgggaagttgaggggaagtgggttgttaaaggagcagttgatgtagacattggtgcaaacccttctgctgagggtggaggagaagatgagggagttgatgatgcagctgttaaggttgttgacattgttgacacattcagacttcaggagcaacccgcattcgataagaagcagtt

SEQ ID NO: 12486 - DNA, 404 bp, Glycine max
  Clone ID: LIB3094-093-Q1-K1-H1
ctgcagcatgcaaaagaagtggttccagatgctctagcttcacttccataggttgcaatgcggctatgcagtgagatgctgatgctgaactcttttttcagtgcctattaggtcattacttttcagtacttgaaaagattttatgcacggagaagtttttggtagtattaatatttgattacattgtaaatttacaacgttatatgtatatacactaactctcttcagcaacatgtgcaaaaaaaaaaaaaaaacctacttattagtagagcccttgggtatcaaacacttatgtgcaaaaagtggagtaatctaacatcacaatatcattttggcatcctatttaccatgtccttcaagctcataggatagcacatttaagtgtgccagccattccatatatt

SEQ ID NO: 12487 - DNA, 203 bp, Glycine max
  Clone ID: LIB3094-093-Q1-K1-H2
tgatgctcaactcttttttcaatgcctattaagtcattactttttattacttgaaaagattttatgcacagattaattttttgataatattaatatttgattacattgtaaaatttacaacgtaatatgtatatacactaactctcttcacaacatgtgcaaaaattaaatattaacctaactataactttatccatttatta

SEQ ID NO: 12488 - DNA, 201 bp, Glycine max
  Clone ID: LIB3094-093-Q1-K1-H5
ctccatatttattaattttacttccatacctttcaatgcgggctatggttagattatcatgattctgaactctttattcatttcctattatgtcattacttatcagtacttaaaaataatttatgctactataacttttacttactattaatatttcattacattctaaatttacatcttcatatttatatacactaactc

SEQ ID NO: 12489 - DNA, 364 bp, Glycine max
  Clone ID: LIB3094-093-Q1-K1-H8
cacctttgttcactcttcttctcttgcggtttgggttttagcgcagcttcttctagatttggtgaatatgggtaaggaaaaggttcacatcagtattgtggtcattggccatgtcgactctgggaaatccactaccactggtcacctgatttacaagcttggaggcattgacaagcgtgttattgagaggtttgagaaggaagctgttgatatgaacaagaggtctttcaagtatgcctgggtgctggacaaacttaaggctgatcgtgaaagatgaatcaccattgatattgctttgtggaagtttgaaacaacaaagtattattgcacagttattgaagcccctggacattaggattttcat

SEQ ID NO: 12490 - DNA, 119 bp, Glycine max
  Clone ID: LIB3094-094-Q1-K1-A10
gtaatgtaggtgttccaagcttcaaggtaggtaataatgttaggtccaagtagatatgtgattgagttgtaatacaatgattctaatatcctatctccaccattcatattaatatttgc

SEQ ID NO: 12491 - DNA, 449 bp, Glycine max
  Clone ID: LIB3094-094-Q1-K1-A11
ctctctgctcctagggtttctccttcgagtgagggaaatggctcccaaaccgcctagtgcgggtctgtttgttggactgaacaagggtcacgtcgtcaccaagaaggaattgcccccacgcccctcagatcgtaaggggaaaacaagcaagagggtgcactttgtgaggaacctcataagagaggttgctggttttgcaccctatgaaaagcgtataactgagttgctgaaggttgggaaggataagagggcactgaaggttgcaaagagaaagcttggaacccacaaacgtgcaaagaagaagcgtgaggaaatgtccagtgttctcaggaagatgagggcttgtggtgctggagacaagaagaaataagtcttatttatttactcttttccagaatcactagatggacctgtgtattgatggacgagctttcatattttttgctttg

SEQ ID NO: 12492 - DNA, 319 bp, Glycine max
  unsure at all n locations
  Clone ID: LIB3094-094-Q1-K1-A12
attcccgctggacgcacgcatccnctggatgatcccaacactttctctaactggattcacaggatgctgaaacttgtactggtcagttttgaatatgcgggtgaagcacatgctcacattcctcctcttgaagacgctgatgcatatgctgaaggtatcaagatcgaagaagttgattaaatctgacttaattgcctgttacttttttataaacaatgattgtagaaacaaactttttactatgttttatgttttttgaattttcgaaattttgcaacgctggctatttagatgccgcatgtattaattactttatcgt

SEQ ID NO: 12493 - DNA, 423 bp, Glycine max
  Clone ID: LIB3094-094-Q1-K1-A4
ttctccttctcaatcttataattctatttccttcaccataatacttctcaatcttaagtcagtttcattcaaaagacaatcctaacacatttcccgttcacctcaacatctataatctcaccccaatcaacttctatacctatttacttatccttcaactctaccattctactgttcaacttcatctattttaatattcttttatatctcactatcactacacaactttcattttctaaatccaacccaaacactacccttttttcactttcacaaattcaattttcattctaacaacatatctatctcctatatatcttctatcattcatttataactttctcattatttactccttaacacctattatctcattttcaacaaattcaaccattttttctaaccatatttttttcaaattta

SEQ ID NO: 12494 - DNA, 408 bp, Glycine max
  Clone ID: LIB3094-094-Q1-K1-A7
tcagagacgcatgtgcagacttcccattccaatttccaagtttttcaaagaaggtggatggtgagcatggagcatttgccatgagaattggtgtccaacgtgctctcaaagttaccatcaaaggtgttgcttctatgcaagtgcgtgtgcaagtcctggatcgatctcataaccgatcctcattttgtttccaattactatgttgtctacaacagtcttcaaagccaagaggagcatctcttggtaattcgaagaccctatttttctggcctcaaaacttacatttctggtctttcttggaacaccaatgaccccaaaaagcatgttacttctgatgttctaaaccctccctatgaatacaactctgaccacaaatactggaccgaaatcttgggcctggcaatggca

SEQ ID NO: 12495 - DNA, 407 bp, Glycine max
  Clone ID: LIB3094-093-Q1-K1-E12
gaggatttgggattgggaaggcgagggattgcgctgcgtctcttcctcttctcgttcgatgcatccctcattcataatcttccaatccaacaacctcagcctcacactcacacatacacacatctgaacgcgtatcgtccctcccatggcttcaaagcgcatcctcaaggagctcaaggacttgcagaaagacccaccaacttcttgcagcgctggtccagtagctgaggacatgttccattggcaagcaacgattatgggtcctgctgatagtccttatgctggaggtgtattcctagtcactattcactttcctccggattatcctttcaaaccttccaaggttgcctttaggactaaggtgtttcatccgaacatcaacagcaatggtagcatttgtcttgata

SEQ ID NO: 12496 - DNA, 202 bp, Glycine max
  Clone ID: LIB3094-092-Q1-K1-H7
cccactcgtccggcaaacatgtccacctcaacaactcttttttttgcttatcccttccctacctccgggcactgtatccctctcttatacttcaccaaaaccctaatctctacctttatccatattacctttcttttcacaccctacaacgaatccttacttccaaaaaactattccccttttctccaaactcttcttcttc

SEQ ID NO: 12497 - DNA, 298 bp, Glycine max
  Clone ID: LIB3094-093-Q1-K1-A2
ggctacttttgattgcttgatgaaaacctatggattcctgacaccagaattctggaaggagactcgcttctccaaatctccattccaagagtacacagatctactggcaaaaccaacaggaaagactctaatcttggaggaggaaagggtggatgcttgatttgctagttttgctttatggatgttttaggaactttattactttacatactttggtgggtctgggctttacttttggttttgatagacggtatgtctctgtatgcattttgattgtttccaagttttaattgactgc

SEQ ID NO: 12498 - DNA, 442 bp, Glycine max
  Clone ID: LIB3094-093-Q1-K1-A6
cggacgcgtggggtttcctagtatgcaaggtaaagaatcagcaaatttcaaccccggatccgcgagtaacatgttgacaaaagtctaccgagttgcattttgttcttgtaacctcctcaacccactggaggtcgtgatctgtaaattttgagtgaattatacaacaaattcttgaaaaagaaatgattttctcttctgagctgctgcttattgatcgatgaatccagctgcaattattttcgaagatggcaataaaatctcttctgcggtgttatctctttgactgaattccaaattttgtaagtataatagttggctatgaaagagactgtaccaagaagcatagtgtgagagtcagagatcagttgttaagtatgagatgtgagaacatttgttgaatgtatattgctaaatagaagtgcaaaagaatggaatttttttt

SEQ ID NO: 12499 - DNA, 384 bp, Glycine max
  Clone ID: LIB3094-093-Q1-K1-B12
cgggccgacccacgcgtgcgcccaggcgttctgtgaagctggatcattccttcgcggaatcgatgtgaaccgttgacctttgatggtttattgcgaagaggaagcaggtgtttcatcttcaaacagcacggtttctagcgtcagtggaaagcgcatcgagagggaaaccaatggataagataacgacacagacagagcttgttccaaaagcatcaatagcgacgaagaagatgctgaaacctctataatgaaacttagactcttcaaagatcattcaattgtcctggaagagagcttcaaagaacacaacactcttaaccctcttagtaaaacttcacatgccaattaattttttctgtcctgtatcataaacatagtattctc

SEQ ID NO: 12500 - DNA, 420 bp, Glycine max
  Clone ID: LIB3094-093-Q1-K1-B3
ggagattctgatttgttctctcagatctgagcttaccgtcgccggaatccaactcaacctgggtcggattcttgggtatcatcgcatcgccattcgttttagcctctcaataagagattttagttcgcttcaaattcgaggtttgatttgaagttgaaagttggaatagcttaactgttgtgtaaaacaaccaacacacacgagcatgggaagccaagacaacaacgtagaattgtcatccaattcatttctagcttacaaatctgctaaggtgtttgttgctggtcaccggggtcttgttggctcggccattggtcgcaagctcacccaacttgggttcactaatctagtcttgcgctcccatgccgagcttgatctcactcgacaatctgatgttgaagccttctttgcttatgaaaa

SEQ ID NO: 12501 - DNA, 154 bp, Glycine max
  Clone ID: LIB3094-093-Q1-K1-B5
aataataaaatttaattcccctccaaatccaagcttgaatttaaccctaaaacttgaattaccttacctgtgcggaaaaccacccaccccccccaaccttggaaacccataccaccacctaaaaatgccatcccaatcaattctaacttaccaa

SEQ ID NO: 12502 - DNA, 236 bp, Glycine max
  Clone ID: LIB3094-093-Q1-K1-B7
ttaaccccttaattaaaaaatttaaatccctttaaaatccaagttttaatttaaaattaaaatttgaaaaacctaacctttttgtaaaacaacccacacacaccaaccttggaaacccaaaccaccaccttaaaattgcaatccaattaattctaacctaccaaaactcttaagggtttttttctctgcacccgggtcctttttgcctcggccattggcccaacctaccccaactt

SEQ ID NO: 12503 - DNA, 263 bp, Glycine max
  Clone ID: LIB3094-093-Q1-K1-C1
atctctcatatctcttcttattttctccccaatccaactcaacccgggtccgattctttttataaacacatggccattctctttaacctctcaataaaagaatttaaatcgcttcaaataccaagttttaattaaaaattaaaattttaataacttaactgttgtgtaaaacaacccacacacaccaacctttgaaaccaagacaacaccccataatattcaaccaaatcaattctaacttacaaaacttctaaaatgttttt

SEQ ID NO: 12504 - DNA, 329 bp, Glycine max
  Clone ID: LIB3094-093-Q1-K1-C12
cccacgcgtccggtgaagctggatcattccttcgcggaatcgatgtgaaccgtggaccttcgttggttgattgcgaagaggaagcaggtgtttcatctccaaacagcacggtttctagcgtcagtggaaagcgcatcgagagggaaaccaatggagaagaaaacgacacatacagagcttgttccagaggcatcatcagcgacgaagaagatgctgaaacctctataaagaaacttatactctccaaagatcagtcaattggcctggaagaagagcttcaaagaacacaacacttttaaccccgtaagtaaacgtacacatgccaatta

SEQ ID NO: 12505 - DNA, 120 bp, Glycine max
  Clone ID: LIB3094-093-Q1-K1-C7
ttttttttctttttttttttttttttttttttttttttttttttctttttttttttttttttctttttttttttattttttttcttttttttttttttttttttattttttttttttttt

SEQ ID NO: 12506 - DNA, 284 bp, Glycine max
  Clone ID: LIB3094-093-Q1-K1-C8
cacaggcttactatacctatctcatttactttttaccttgattattcactactcaggaccagtgtaattataatgtcaaccggcaccattatcttccttatatcaatctacattaagcactacttgatctcatcaataaacatatatatacgatcttgatgtcattgcatattaactatgaaaaatgttgattgatataacttgatcacatttcataatattacaacttatgtataattcaatgacttattatatattaataattaatctacatttagttcttc

SEQ ID NO: 12507 - DNA, 390 bp, Glycine max
  Clone ID: LIB3094-093-Q1-K1-D12
aaaaaaggttcatagttgatatctccagcttaacgatgaagtttgaagatctggcacaagggtgcatgtcttaaatactgtcctacaccactcgtgctgatgtatgcatgctctctctggcttccaaagcctttcattccgcggctgaagccaacactgcgtgcgattgcttcctaccctctgatatgtcctctatcatcttcccttcttcttccgttccttcctttcggtctattaaggatctctatctctatctatccgatctgcccaccatcatcaatcaaggtataaatagttatcaattggagaatctgactgggaacatgtgttacatgctctccggtagagatctgagcattatatggggcgacactactcattattgggagt

SEQ ID NO: 12508 - DNA, 390 bp, Glycine max
  unsure at all n locations
  Clone ID: LIB3094-093-Q1-K1-D3
ctcccaaactcattcttcaccttctaaacaaacgcaggaggcaacatggcatttcttgtttgcattacaaaagacggggctaactaatcttccaatatatggcaactgagagtccaattagaatctctgaagctgggagtaaatggccgtctcttaaggaagctgcaacttttggctcgccatcccgtcacatggcaacagaggatctgggtatatttttaaatggccataggtttcatggcagtggaaaggatgcagtacccaaccgcagtggcagtgcacctccgagcatggaaggctcatttctggccatagaaaacttgttatcccagaacaccaccaggaatgcgagcttgggatctcggaacagagctatgcanaaatatgata

SEQ ID NO: 12509 - DNA, 423 bp, Glycine max
  Clone ID: LIB3094-093-Q1-K1-D5
cccacgcgtccgcccacgcgtccgccagtcaccaacaaaacaaaatccaatggcgccgtctgtcgcaatcaacggcgctttccccagcgccagagtcactcctccttccgtcaccggccgattcgccgccgtctacagcgaggtccaaaacagccgcatcgaccacgccctccctctcccctccgttctcaaaaaccctttcatcatcgtcgacggtccccaaagctccgccgccggcaaccctggtctcgctccctcccattcactacttcaattttccgtcgacaattagttctacgtaattttgatattgttatgaatattattatgtgccaatagagctgtgcactcttaggtccattatcctttatttgtcttttaacaataatagataaatatgtataatagtttaagggacattct

SEQ ID NO: 12510 - DNA, 409 bp, Glycine max
  Clone ID: LIB3094-093-Q1-K1-D6
cccacgcgtccgattgcattgacctggaaacaaaccttgcatcaataggagataaagatgggcttataaatgccaggaaattatatgaatctgcactcgcaacttatgaccaaaatgtcagcttgtggcaagattactatcgcatggagaccaagatgggaacatcagaaaaggctaatgctatctattggcgtgcaaggaaagtactcaaagatgctagtgaatttgtcactgccacagatatgtgataatatttctaaattacgaccatggctattggagttcaattttgaccacttcatttatttggtttttctacagaaatttcttttcgaccagtctagtctagactcaaatttgtttttctttccaagaagtgagggatagagctttcctccttttcccaaaa

SEQ ID NO: 12511 - DNA, 442 bp, Glycine max
  Clone ID: LIB3094-093-Q1-K1-D7
cccacgcgtccgtcaagcattgcatccctcttgatttgtagtttgttttgtgctttagatagaagttctgccaaatcaagaggggttttaagatcatagtgtgtgttttgcaacaatggctaagttctttgctgctatgatcttggcactctttgccatttccatacttcaaacagtggtaatggctgctaatgaacaaggaggccacttgtatgacaacaagagcaaatatggaagtggaagtgtcaagagttaccaatgcccatcacaatgctcgaggagatgtagccagacccaataccacaagccctgcatgtttttctgtcagaagtgctgcaggacatgcctgtgtgtgcccccggggtattatggtaataaagctgtgtgcccttgctacaacaactggaagaccaaggaaagatgacccaagttgccctttttt

SEQ ID NO: 12512 - DNA, 226 bp, Glycine max
  Clone ID: LIB3094-093-Q1-K1-D8
gcgtccagtctaacgacaacataggcttttagattatccaacatgccatacatgacgcggatagggtgactattaagatcactctgttctttactatcaaaagaccaccctaccaagctttcttcttgtatctacctccctaaactataaaatcatatatatccacatcatttacaactaatgctatatacacacttaccattaattcattatcagaccctactta

SEQ ID NO: 12513 - DNA, 318 bp, Glycine max
  Clone ID: LIB3094-093-Q1-K1-E1
ctccgaaactcagtcttcaccttctaaacaatctcctttgcaacatggcatttcttgcttggaatagaaaatactgcgcttgctaatcttccaatatatggcaactgagagttcaattagaatctttgaaactgggattaaatggccctcttttaaggaagctgctacttttggctcgccattccgtcacattgcaacaaaagatcagggtatatattttaaaaggccatcagtttcatggcattggaaaggattcattacccaatcgcattggcaatgcaccttccaacattgcaagctcatttctgggcatataaa

SEQ ID NO: 12514 - DNA, 353 bp, Glycine max
  Clone ID: LIB3094-093-Q1-K1-E11
cccacgcgtccgtccagttcatacttcatcctattattactttccctctttgcattccaaagggccagtgttgatgttgcacagcaaacaccaacaactgtgacagagaatgaaacaacgactgaggtaaccaagattgaggaaactaccccagaacagccagccaccgaggttactgccccagaaacagtcaacgaagaagcaaaagaggaagcagcagttgagactaatgaggcaacagaagttacagaggaagggaaggctgagaaaacagaagaagaagaagaagtgaaagaagagactaaagaaaccgaatcagcaccaatggaagaagagaagcaggaagagaacaa

SEQ ID NO: 12515 - DNA, 386 bp, Glycine max
  Clone ID: LIB3094-092-Q1-K1-H6
cggacgcgtggggtttcctagtatgcaaggtaaagaatcagcaaatttcaaccccggatccacgagtaacatgttgacaaaagtctaccgagttgcattttgttcttgtaacctcctcaacccactggaggtcgtgatctgtaaattttgagtgaattatacaacaaattcttgaaaaagaaatgattctctcttctgagctgctgcttattgatcgatgaatccagctgcaattattttcgaagatggcaataaaatctcttctgcggtgttatctctttgactgaattccaaattttgtaagtataatagttggctatgaaagagactgtaccaagaatcatagtgtgagagtcagagatcaggtgctaagtatgagatgtgag

SEQ ID NO: 12516 - DNA, 449 bp, Glycine max
  Clone ID: LIB3094-092-Q1-K1-F11
cccacgcgtccgcccacgcgtccgcttttgcaagctcaatttcggaactgaataattgcccgatatataggaatttactgtcttttttcttactttttttaatacttccaattccatatgtattatgctcggaatttctggaaaaaaaaaagctttgaaattgagctgatttttctttctttccttcaagaatcacatgtattttatatttatatttattcaaactgttttaacgacgtgctaactcttctgaaacccttgcccttcgcttattctccactatatatagccttaatcgcaggaacaggacaattctgaagaaaaaaaatgcttgtttcgggtgctatcagcgacgttttggtggtgcttccgccttcgacatctcttagactcccggaatttcgccatttgcatgttttttgcggttctgacgccaaggtttttgtttc

SEQ ID NO: 12517 - DNA, 418 bp, Glycine max
  Clone ID: LIB3094-092-Q1-K1-F2
ttttgattttctggatccgtgtttttgagatgagtgtatgaatttaccgattgtttttcagatgaggttatcgttgaggcatgctttggtgtttgtgttaatcggggcgttgtggaacttgcaaagggcagagggtatccgatttgtgatagacagagacgagtgtttctcccatgatgtgaagtacgagggtgacactgttcatgtctctttcgttgttattaaggctgattctccctggcattacggcgacgaaggtgtcgatctcgtggtaaagggaccttctggcgagcaaattcaagaatttcgggacaagaccagtgagaagtttgactttgtggctcacaaatccggggtccataaattctgctttaccaacaagtctccttatcatgaaactgtcgattttgatgtacat

SEQ ID NO: 12518 - DNA, 387 bp, Glycine max
  Clone ID: LIB3094-092-Q1-K1-F4
cgcaccagtttcaccgcacgaatatcttgttgtttggagcgatccgagaaaaactctgtaagcatgttggtttaccaggacctccttacaggtgatgagcttctctctgactccttccgttacaaggaaattgagaatggaatgctgtgggaagttgaggggaagtgggttgttaaaggagcagttgatgtagacattggtgcaaacccttctgctgagggtggaggagaagatgagggagttgatgatgcagctgttaaggttgttgacattgttgacacattcagacttcaggagcaacccgcattcgataagaagcagtttgttaccttcatgaagaaggttatcaagaatttgactcccaagctcgatgcataacaacaggag

SEQ ID NO: 12519 - DNA, 438 bp, Glycine max
  Clone ID: LIB3094-092-Q1-K1-F6
ttctgatttggtggatccgtgtttttgagattagtgtatgaatttaccgattgtttttcaggggagggtatcgttgaggcatgctttgctgtttgtgttaatcggtgcgttgtggaacttgcaaagggcagagggtatccgatttgtgatagacatagacgagtgtttctcccatgatgtgaagtacgagggtgacactgttcatgtctctctcgttgttattaaggctgattctacctggcattacttgcaccaaagtgtcgatctcatggtaaagggaccttctggcgagcaaattcaataatttcgggacaagaccagtgagaagtttgactttgaggctcacaaatccggggtccataaaatctgcttcaccaacaagtctgcttatcatgaaactgcatattttgacgtacatgttggtcacttctattactt

SEQ ID NO: 12520 - DNA, 399 bp, Glycine max
  Clone ID: LIB3094-092-Q1-K1-F8
ctcaccattgtgaccgaactaatatcttgctttatttagcgatccgacaaaaactctttaggcaggtttgtttaccaggacctccttactagttataaacttctctctgactactttcattacaatgaaatcgataatagaatgctcttggaagttaagaggaagtgacttgttaaactaacaacatacgtagacacatgtacatactctattactgacgaacattgttatctataattagtggattatgcacttgtattttgtgattaacaggcttgaacagatttacgttatacttacttctcatggcatttacttcacttgggctcgttgtcaaagcatagttttccacccacacatactttgactactggaatcgacagctacttgatggctttc

SEQ ID NO: 12521 - DNA, 310 bp, Glycine max
  Clone ID: LIB3094-092-Q1-K1-F9
gaggatttgggattgggaaggcgagggattgcgctgcgtctcttcctcttctctttcgatgcatccctcattcataatcttccaatccaacaacctcagcctcacactcacacatacacacatctgaacgcgtatcgtccctcccatggcttcaaagcgcatcctcaaggagctcaaggacttgcagaaagacccaccaacttcttgcagcgctggtccagtagctgaggacatgttccattggcaagcaacgattatgggtcctgctgatagtccttatgctggaggtgtattcctagtcactattcac

SEQ ID NO: 12522 - DNA, 438 bp, Glycine max
  unsure at all n locations
  Clone ID: LIB3094-092-Q1-K1-G12
caaccatggccgactcatctcaagaccttgaccaacttctcgatagtgctttggatgatttgcagtccttcaacctcaatcctccccctccaagtggggaagcaactgcgaatagcaagaaggagagtccttctttgccgtcgggggttcaaggattgggcatgggtttacccgatttgagaacgaagaaaaaggggaaacagaaggcttccaaagacagccacgtgtcggaggcgctcaacaagctcagggagcagaccaaagaggctgtgaaggggctggagtctatatccncacccactgccgatgatttaggtaaggatgccttgatggaagattgggtcaaacaatttgagcagcttgctggctctcaggacatggaatctattgtggagaccatgatgcaataacttctgtccaaagagattcttcatgaac

SEQ ID NO: 12523 - DNA, 376 bp, Glycine max
  Clone ID: LIB3094-092-Q1-K1-G2
gtaaaagtttggtgtgaggtgtgagtgttctgcacgcaccgaatcaacaataatttctcagacagggttgtaaaagaaacacattagactaggcagataactatggctgtacattctgattcggcttcatccgagaagaaatcaagcaatggagtgaatgagttgctgacttttaatgctgagaacatgcaaagcaacatgaaaattatctattacagccgaacatttttatctataattggtggagttgttgctggtattttgggatttacaggcttgaaaggatttgtgttttacttacttctcatggcatttacttcacttgggctcgtgggcaaagcaaagttttccacccacacatactttgactcctgga

SEQ ID NO: 12524 - DNA, 453 bp, Glycine max
  Clone ID: LIB3094-092-Q1-K1-G7
caaccatggccgactcatctcaagaccttgaccaacttctcgatagtgctttggatgattttcagtccttcaacctcaatcctccccctccaagtggggaagcaactgcgaatagcaagaaggagagtccttctttgccgtcgggggttcaaggattgggcatgggtttacccgatttgagaacgaagaaaaaggggaaacagaaggcttccaaagacagccacgtgtcggaggcgctcaacaagctcagggagcagaccaaagaggctgtgaaggggctggagtctatatccccacccactgccgatgatttaggtaaggatgccttgatggaagattgggtcaaacaatttgagcagcttgctggctctcaggacatggaatctattgtggagaccatgatgcatcaacttctgtccaaagagattcttcatgaaccaatgaaagaaatag

SEQ ID NO: 12525 - DNA, 430 bp, Glycine max
  Clone ID: LIB3094-092-Q1-K1-G8
gaggagatatatgtacctaaacgaagagatcttgaaagagaatccaaacatgtgtgcttacgtggcaccttctttggatgctaggcaagacatggtggtggtagaggtaccaaagctagggaaagaggctgcagtaaaggccataaaggagtggggccagccaaagtcaaagattacccacttgatcttctgcaccaccagtggtgttgacatgcctggtgctgattaccaactgaccaaacaattgggccttcgcccctatgtgaagaggtatatgatgtaccaacaaggttgctttgcaggtggcacggttcttcgtttggccaaggatttggctgagaacaacaagggtgcacgtgtgcttgatgtctgttctgagatcactgcagtcacattccgtggaccaagtgacactcaccttgatagtctt

SEQ ID NO: 12526 - DNA, 354 bp, Glycine max
  unsure at all n locations
  Clone ID: LIB3094-092-Q1-K1-H12
tttgaatacattccttgtagtttatactgaaagatgggtttgaagatggcgttactgatccgaggcctttccctcatgctccttttggtctcctctgaggtggcatccacgaatacaaaagaggaggcaaatggagtggatgatgccaaatatcccggtggaagctatggagggggttacccaggtcatggcggtggcggttatcctggccatggcggtggcggttatcctggccatggcggtggtggtggctatcctggtcatggtggtggccaccctggtcatggtggcggctaccctggccgtggtggtggatactgtangcatgggctgtgcggtggccggacatacaac

SEQ ID NO: 12527 - DNA, 317 bp, Glycine max
  Clone ID: LIB3094-092-Q1-K1-H2
acgcggacgcatcaggtatactaagccttgagagacaggaagagcacacacgcattatcggttccggggcacgtaattcgcatgctcaccaagacatggcagtggcagaggtaccaaacctagagaaagaggctccagtaaagggcatatgtcaagcaggtcatgcaacgacctcgattacccactagagcttcagcaccatcactggtggtgacataccagcggatgaataccgaatgaccaaacaattgaaccttaaatggtcgtgaacaggtatatgatcgtgccctacaacccagctttacatgtggatcata

SEQ ID NO: 12528 - DNA, 461 bp, Glycine max
  unsure at all n locations
  Clone ID: LIB3094-092-Q1-K1-H3
gcaaacatgtccaccgcaacaactcacgtgctcgcttatcccttccctacctccggtgacgtgatccctctcttagacttcaccaaaaccctagtctctcgcggcgtccatgtcaccgttctggtcacaccctacaacgaagccttacttccaaaaaactattcccctcttctccaaacgcttctcctccccgaacctcagttcccgaacccgaagcaaaacaggctcgtatccatggtaaccttcatgcggcaccaccactacccgatcattatggactgggcccaggcccagcccattcctcctgcggctattatatcagatttcttcctcggttggacccacctnctcgcacgtgacctncacgtgccgcgcgtagtctttctccccttccggcgcctttgcgctctccgtctnctactccctctggcgcgacgccccccanaacgacaacccggaag

SEQ ID NO: 12529 - DNA, 448 bp, Glycine max
  unsure at all n locations
  Clone ID: LIB3094-092-Q1-K1-H5
gcaaacatgtccaccgcaacaactcacgtgctcgcttatcccttccctacctccggtcacgtgatccctctcttagacttcaccaaaaccctagtctctcgcggcgtccatgtcaccgttctggtcacaccctacaacgaagccttacttccaaaaaactattcccctcttctccaaacgcttctcctccccgaacctcagttcccgaacccgaagcaaaacaggctcgtatccatggtaaccttcatgcggcaccaccactacccgatcattatggactgggcccaggcccagcccattcctcctgcggctattatatcagatttcttcctcggttggacccacctcctcgcacgtgacctccacgtgccgcgcgtagtcttctccccctccggcgccttcgcgctctccgtctnctactccctctggcgcgacgccccccaaaacg

SEQ ID NO: 12530 - DNA, 450 bp, Glycine max
  Clone ID: LIB3094-092-Q1-K1-F10
cccacgcgtccgcccacgcgtccgcttttgcaagctcaatttcggaactgaataattgcccgatatataggaatttactgtcttttttcttactttttttaatacttccaattccatatgtattatgctcggaatttctggaaaaaaaaaagctttgaaattgagctgatttttctttctttccttcaagaatcacatgtattttatatttatatttattcaaactgttttaacgacgtgctaactcttctgaaacccttgcccttcgcttattctccactatatatagccttaatcgcaggaacaggacaattctgaagaaaaaaaatgcttgtttcgggtgctatcagcgacgtttttgtggtgcttccgccttcgacatctcttagacttccggaatttcgccatttgcatgtttttgcggtttctgacgcccaagggttttgttct

SEQ ID NO: 12531 - DNA, 322 bp, Glycine max
  unsure at all n locations
  Clone ID: LIB3094-092-Q1-K1-C10
gaaaaccctagctagtagtctcagttcgtttgagagagaaaaaatggcagagggtctcgttgtccgcggaaccatgcgcgcccacaccgacgtcgtgacggcgattgccactcccatcgacaactccgacatgatcgtgacggcgtcgcgcgacaaatccatcattctctggcacctcaccaaggaggacaagacctacggtgtcccccgccgncgnctcaccggacattctcacttcgtccaggacgtcgtcctctcatccgacggtcagttcgccctctccggctcctgggacggcgagctccgnctctgggacctcgcg

SEQ ID NO: 12532 - DNA, 418 bp, Glycine max
  Clone ID: LIB3094-092-Q1-K1-C4
gttctagatcgcgatctagaactagccaattcactctttttcttctcgccctctgccgtgggaggagtttgtaacatggctgctctaccaacggcggagcttagtgacgcaaatgcaacacatgtagcaagttgtgatgtgagggtgttgcatccagtgttcaaggtttacggtggggccaccgcgttctccggccccgttgtcaccgtgaaggtgtttgaagacaacgtgttggtgagggagcttcttgagacgaaaggcgaaggaagagtattggttggtgatggaggaggaagcttgaggtgtgcattggtgggagggaaattggcactgattgcacataacatgggttgggctgggattgtggtgaatggctgcatcagagatgtggatgagatcaatgcaagtgatattggcg

SEQ ID NO: 12533 - DNA, 333 bp, Glycine max
  Clone ID: LIB3094-092-Q1-K1-C5
cccacgcgtccgcccacgcgtccgcagggaagttgtggaagttgttgggcgttctcaacggtggccacagtggaagcaataaacaagatagtgacagggaagtttgtgtccttatctgaacaagaacttgtggactgtgacagagcctacaatgaaggatgcaatggtggccttatggactatgcattcgaattcatcattcaaaatggaggcattgacacagacaaagattacccataccgtggctttgatggcatctgtgatccaactaagaaaaatgcaaaggttgtgaacattgatgggttcgaggatgttccaccgtatgatgagaat

SEQ ID NO: 12534 - DNA, 451 bp, Glycine max
  unsure at all n locations
  Clone ID: LIB3094-092-Q1-K1-C8
atcaaaatttcaaaataaacttaaaatggcttaaacagatcgtgcaccctacaaagcaagtgcatatatattagtgacattagagtgcaaatgtgagcaagatccataccacagaaactgaggcaactatatcatacatcattattccagcatctgcaagggcaaggctagcacatgatatgacaactgggagatcacctgcaacacactcactaatactattacctgctataaaattaagattttgccaaaaggtttcaattacataggatcattcatcatcttccattataaaattcaaaggaatatttcagcctctcaaacaaatccactacgaaccagactaccataaatgaccacatcttgatatctacatttaaggtgtccataaaaaacttctaaattatagaaaattgaggcaagcatcatatgtacatgacatncattaata

SEQ ID NO: 12535 - DNA, 409 bp, Glycine max
  unsure at all n locations
  Clone ID: LIB3094-092-Q1-K1-D1
cccacgcgtccggtcgcaagagagacaggtcagcctacttttcccgccacgacgccgccaagcgccgcctccccttgccggagcccgcggaggaggagacgcctacgatgagaccggcgccgccgtccgcggtggtcgtgatgggcctcccccaggactgctccgtcctcgatctcaagtcccgattcgagatctacggcgccatctcccgcatccgcatcgaccgcgacgccgtcggatacatcacctaccggaccaaggactccgncgacgctgccatcgccgncggcctcgaccccaccttcggaatcaccgttaactctaaaatggttcaagtgttgtgggcaacggaccctctagccatgtggagggaaagagtnggtaatagcaggaacaaaggttctatgtc

SEQ ID NO: 12536 - DNA, 299 bp, Glycine max
  unsure at all n locations
  Clone ID: LIB3094-092-Q1-K1-D12
cccacgcgtccgagaaggcctgggcttagttgataagcataactgggtgaggaagaaagagagagagtgaagaagatggcgtcgagcggagcggtaccgttttggagggcggcggggatgacgtacataacatactcaaacatatgcgcgaatctgctcaggaattgcctcaaggaaccctacaaggccgaatccctctctcgtgagaagctccattntgttctctccaaatgggtcgacgccaagcctgaaaaacctactattcgttcagacaccccagagcaatgatctggaatagt

SEQ ID NO: 12537 - DNA, 460 bp, Glycine max
  unsure at all n locations
  Clone ID: LIB3094-092-Q1-K1-D3
gttgccgggctctaccgtggtttcaacatctcatgtgttggaatcatcgtgtatcgtggtctgtactttggattgtatgattctgttaaaccagttgtcctcacagggtcattgcaggatagcttttttgccagctttgcccttggatggctcatcaccaatggtgcaggtcttgcatcatacccaatagacactgttagaagaagaatgatgatgacctctggtgaagctgtcaagtacaagagctccttggatgcattcacacagatcctcaagaatgagggtgccaagtccttgttcaagggtgccggtgccaacatccttcgtgccgttgccggtgctggtgtgcttgctggttatgacaagttgcaggttcttgtgttcggcaagaagtacccgctctgtggggcttaagttctaatgctgagtcagtactaatatntgtttttagatggcgatg

SEQ ID NO: 12538 - DNA, 446 bp, Glycine max
  Clone ID: LIB3094-092-Q1-K1-D9
cccacgcgtccggtgaagctggatcattcctccgcggaatcgatgtgaaccgtttaccttgtgtggttgattgcgaagaggaagcaggtgtttcatctccaaacagcacggtttctagcgtcagtggaaagcgcagcgagagggaaaccaatggagaagaaaacgacacagacagagcttgttccagaggcatcatcagcgacgaagaagatgctgaaacctctagaaagaaacttagactctccaaagatcagtcaattgtcctggaagagagcttcaaagaacacaacactcttaaccccgtaagtaaacgtacacatgccaattaattttttttgtcctgtatcagagacatagtatcctctgatctactggatcatatattaatctcactcacgatgtataggtgcgattgatcatagaaaattttgtacacaatgtgaatc

SEQ ID NO: 12539 - DNA, 422 bp, Glycine max
  Clone ID: LIB3094-092-Q1-K1-E1
gttgtgtgcaacccattggggaagtctggaggtgccctcatccagcaatttatgatattgacgttttgggtcactagctaattcaaccccatacttgggaggagtgcttctgctgattgtttctgcctggctagcagcggcaaaatccttggatacccaatttactgcattgcgtaaagaggaagaactcgagaaagagatggaacgagcagccgccgtcaagataccagtggtggctgagactgagagtggaaatggttctcttgcaactggttcaccactgaatccatcctcaggtgactcctcaagcagtccatctgaagcctcaactcctcgcaattaaaatgtgccttctttctgtgagaaattgcctcacagaatgagcaaatagagctcttttgagagcagtgttaggtgaaact

SEQ ID NO: 12540 - DNA, 265 bp, Glycine max
  Clone ID: LIB3094-092-Q1-K1-E11
ttccgtccatttcatacttcatcctattatttctttcccattctacattccactaggtccgcgtcttatttttattcatctctcgccaaccactcttacccacactcaaacaactactcatactaccacaataccattaactacacacattcctatactcactattttattattctctaacactttccctataccatccaaaaactgtttcaatttctaacagattctgcacatcttcttcttttaaataaaactattatttact

SEQ ID NO: 12541 - DNA, 477 bp, Glycine max
  unsure at all n locations
  Clone ID: LIB3094-092-Q1-K1-E12
ggaattcttcggggtcgatcccacgtcgtcgcgaaaataatggggttgcgttcnnttcttctaaatgtggatcgtgtgtgttgtgaaattttggcattcaaactggcctggtgcagnggggctctgttgccaactccaacgcagggctcatgtggatggtaccaatnnttggccgaatacttatcgtgtcccacattgtgtcctttgatcatcatcnnaaatatttcaatggggtggttcntttgacattcagcttcatncttgaccaagtacccactggtactgnngcttccagtccaaaaggggtcttaacttggtttggtcacttttcagcatgtacccataaagaaatggttcctggagaattcttgctggcacaagtcacttgctttctatttatcnttcccaaatacgcggagcatgatgaagatagaactttgagttctttggggaaacagatcaaggacaacccttaca

SEQ ID NO: 12542 - DNA, 376 bp, Glycine max
  Clone ID: LIB3094-092-Q1-K1-E4
gttaatctttccggccttgacctctctaaactggatttatcttatgttgatttcagctatgcttgggttaaaaacgtgtttttttcacgagcaaaccttcaatgtgcaaagtttcgagatgttgatgccgagggctccatctttcacaatgcaactttgcgtgaatgtgaatttactgcggcaaatcttcgtggtgctttattggctggtgcatgccttcagagtgcaaatctacaagatgcttgcttagtagactctagcttctgtggagcagatctgcgtactgcacatctacagaatgcagatcttaccaatgccaatctagagggagccgtcctagaaggagctaatttgaaaggtgcaaaactgaacaaag

SEQ ID NO: 12543 - DNA, 459 bp, Glycine max
  Clone ID: LIB3094-092-Q1-K1-E6
attctttcctacttacgcatcttcgattttcttttctcaacctgtttcttcttatgtttcagtagggtttctatattttttcttttttttttcctcagtgccttttttcccccagaaattcataaattcgtggaagttcgaggctcgatttgtgcattgaattggtgccgcatttactctacgaattgaacaaggtggcatgatgcgatgagatgatgttctatgagggtattctcagtgtaacactctgaatttgaagtaaaatgttcagtccaagcatggattctgcaagggatgcgagtggtgtggcagggaccgtgctaattcccatgcggtttgtgtggccgtacgggggaagaagtgtgtatctaagtggttctttcacgcggtggtctgaacttctacaaatgtcgcctgtggaaggcttgccaactgtgtttcaagtattcatagcttggg

SEQ ID NO: 12544 - DNA, 469 bp, Glycine max
  Clone ID: LIB3094-092-Q1-K1-E8
cggaccgacccggcgtccgtttagacttgctggacccgacctctctaaactagatttataatataccgattgcatctaaggttggcttataatcgaggcatgctcacgagcaaaccttaaacgggccaatgtgcaacttgtagatgccaaaggctccatctttcacaatgcaactatacgagaatgttaatccacagcggaaaatctacgttgagcactattatctgtctcatgccttcataaagcctaactactacaggcattactactacaaactagctgatctcgatgcgtaactgacctcttggcaagcaaattcaacaatttttacacaagaccagttagaagtttgactttgtggctcacaaatccggagtccataaattctgctttaccaacaagtcttcttatcatgaaactgtcgattttgatgtacatgttggtcacttctcttactttgagcaacatg

SEQ ID NO: 12545 - DNA, 455 bp, Glycine max
  Clone ID: LIB3094-092-Q1-K1-E9
aaaaaaggttcatagttgatatctccagcggaacgatgaagtttgaagatttggcagaaggatgcatggcaaaaatactgtcctacaccactcgtgcggatgtatgcaggctttctctggtttccaaagcctttcattccgcggctgaagccaacactgtgtgggattgctttctcccctctgatttgtcctctatcatctccccttcttcttccgttcctccctttcgctctattaaggatctctatctctatctctccgatcgtcccaccatcatcgatcaaggtataaagagttttcaattggagaagcggactgggaacaagtgttacatgctttccgctagagatctgagcattatatggggtgacactactcattattgggagtggacaaccctaccagagtccaggttcgaagaagttgctaggcttcgagctgtgtgttggtttgac

SEQ ID NO: 12546 - DNA, 259 bp, Glycine max
  Clone ID: LIB3094-092-Q1-K1-C1
acgaaacagccttgtcgaacacaccaaaattaatttcatttaccagcataatagcacacatagagggtctgttgggaatatataacattttgaattaatatttactcactacgattaaaggctgtcatacctagagactgatgctttgtatactaataccttccctgtgcgtaacagcaactatcaaacttttcacacttaatttatgtttaccacaccatttcaatattccctacactattttcaattaaaatacctt

SEQ ID NO: 12547 - DNA, 410 bp, Glycine max
  Clone ID: LIB3094-091-Q1-K1-H2
tcgaatactttcgttattctcttattcatccttctcttctgaataatccagatcggtttctggccttttctccgtcacgcttttcgtgaccggatctgtatggatttgatccagatctacacgccgatggtggttttggccgggtctttcatagatctggtgcgtagaggctcagatctacggtaccgaggtgtgtgattcatgttcgtcttgcttttggaatctgtttcgtagaaagtcgtttggtcttgcatatggcatggctcttgaggtatttttttgcaggtacaacagagaatcgatgacaagaacgcagatccgacggtagatccagccgattccgcttgttcgatcgctacagacccctgtatcggatcattaagcagcgtgtttcgcgcgttttacacgtg

SEQ ID NO: 12548 - DNA, 245 bp, Glycine max
  Clone ID: LIB3094-091-Q1-K1-H3
ggcgtccggccagctctaccgtggctttacatattatgtcttgtaatcatcatatcgggactcgctactttggattcgacgatgctgcacttccattcatggcttcaagggcaatgcttgatagcattgggggccactctggcccttggattggtatcaccactggtgcttgatcctgcctcatagcctctattgactccaagtttaaggctgatcatggctagaatccatgctaaggttttaac

SEQ ID NO: 12549 - DNA, 405 bp, Glycine max
  unsure at all n locations
  Clone ID: LIB3094-091-Q1-K1-H4
ntggcgcnnnnngggcgnncgtctagcgtcacgaattcctaaccacacttgccatatcaaaggaaagagcgtcaacatcagatcaaagatacaacatggaggcacttcaatcatgggtttcaaagcacaagctcgccagcattggggcactctgggcctctggaattggagcaacacttgtggcttattcatgcaaaaagtctccaatgaagccaagtctaaggcttatccatgctaggatgcatgctcaggctctaactntagcagtgctatccggtgcagctgcttatcattattatgagaaacgtgatgttcagccaaaccagaggcagattatattattcctgctcccaatgtcacccagatggttgaatatgaacttcaatgtgccttctaaaaattaaa

SEQ ID NO: 12550 - DNA, 88 bp, Glycine max
  Clone ID: LIB3094-091-Q1-K1-H5
cggacgcgtgtggtttcctagtatgcaaggtaaagaatcagcaaatttcaaccggggatccgggactaacatgttgacaaaagtctac

SEQ ID NO: 12551 - DNA, 166 bp, Glycine max
  Clone ID: LIB3094-091-Q1-K1-H6
acccactcgtccgatcctttcgaacactcgtccgcccatcgtcctaattcctcaaccacacttgccatatcaaagagaagagcgtcaacatcagatcaaagatacaacattcagactacttaatcatctattcaaaactacaaactcaccaccattttggcactct

SEQ ID NO: 12552 - DNA, 140 bp, Glycine max
  Clone ID: LIB3094-091-Q1-K1-H7
ccactcgacccactcgtcctcccacgcatccgcttacctattctccaaaattactacatcaacacatttcaacccgaaatccgcgactatcatgttaccattaatctacctacattcattttcttctactaaccttctta

SEQ ID NO: 12553 - DNA, 268 bp, Glycine max
  Clone ID: LIB3094-091-Q1-K1-H8
cggacgcgtgggctgagaaaccctccactctcgagtccaaactctcctcctacccaaaatggatgcaagggcatcatcttctttaacttcctcgaatctttttccttgcacaaattgtacctgcttatttctattcatcaaaagcacctgtgtccaaaggatcttttaaggacaatttcagcataatgtggcctgaagaccatcttactacctctaaagatggacagatctgctatctttcactatacagagacacacgatgcggatt

SEQ ID NO: 12554 - DNA, 412 bp, Glycine max
  unsure at all n locations
  Clone ID: LIB3094-091-Q1-K1-H9
gtttggtgtaactgcatgctctttgccattgttgatggagtttgcctttagatttttgagttgcccatatagttatacaatttcattttagggtcttgttgactagtgttcctagactattggttaaggaactaaaaggagaagtttttaatatgtaaatcatangaaagtataaaaaaaaatcatgaagaacgcaattttatgccttccaataaaaaaccttagttccttaacccgtgtcctcgggacacttgttagcatttgccttcattttatatgtatcattagattattataattgaaaaaaataggggcctactttttgacgtcattttattcattttattagggggcatcaaatactttcacttggtggcagtgtttgtcaaaattgtacacaatttgtattttg

SEQ ID NO: 12555 - DNA, 457 bp, Glycine max
  Clone ID: LIB3094-092-Q1-K1-A11
cccacgcgtccgagaaggcctgggcttagttgataagcataactgggtgaggaagaaagaaagagagtgaagaagatggcgtcgagcggagcggtaccgttttggagggcggcggggatgacgtacataacatactcaaacatatgcgcgaatctgctcaggaattgcctcaaggaaccctacaaggccgaatccctctctcgtgagaagctccattttgttctctccaaatgggtcgacgccaagcctgaaaaacctactattcgttcagacaccccagagcagtgatctggaatagttggaagctataaatgcataaatctttgagatctggaagttcattgtcattttgaacctttctgtgatgtttaattcctttgtttttttctctccatgaaatggaacatgcactggattttgatttgcacggtaaatcttgtaataatacaagtttaaa

SEQ ID NO: 12556 - DNA, 299 bp, Glycine max
  Clone ID: LIB3094-092-Q1-K1-A2
aaacacccttgtcgaccacaccaaaattaaaaacataaaaaagcataaaagcacaaaaagacataaaaaagggaaaataaaacattttgaagtcatatttgcacacttgattaaaggctgtcgtcccttgtgacggatgcgtggggtgctaataccttccctgtgcgtaaaaacaactcccgaactattcacacttaaagttcgtagaccacaccttttcaattttcccgacgctttcctcaaataaaagttggtggcgactccgcgcattttcctttcatggaagacgcacttgtgag

SEQ ID NO: 12557 - DNA, 402 bp, Glycine max
  unsure at all n locations
  Clone ID: LIB3094-092-Q1-K1-A3
agaaaacctaagcttagaattagaaacaaagaaaagaagaaaggaaagaattgatcgttgagaatgcagggaggaaagaaagcgggagagtccattaaggaaacagctacaaacattggtgcttctgccaaggctggcatggagaagaccaaggccactgtccaagagaaggcagaaagaatgacagcacgtgatccggtgcaaaaggagttggcaacccaaaagaaagaggcaaagatgaaccaggcggagctggacaagcaggcggcgcgtcagcataacacggcggccaaacagtccgccaccacggctgggcacatgggacatggccaccacaccaccggaaccgggactggaaccgncacgtattccaccaccggggaatatggtcagcccatgggg

SEQ ID NO: 12558 - DNA, 64 bp, Glycine max
  Clone ID: LIB3094-092-Q1-K1-A7
aaggaaacagctacaaacattggtgcttctgccaaggctggcatggagaagaccaaggccactg

SEQ ID NO: 12559 - DNA, 468 bp, Glycine max
  Clone ID: LIB3094-092-Q1-K1-A9
atggctcccaaaccgcctagtacgggtctgtttgttggactgaacaagggtcacgtcgtcaccaagaaggaattgcctccacgcccctcagatcgtaaggggaaaacaagcaagagggtgcactttgtgaggaacctcataagagaggtagccggttttgcaccctatgaaaagcgtataactgagttgctgaaggttgggaaggataagagggcactgaaggttgcaaagagaaagctcggaacacacaaacgcgcaaagaagaagcgtgaggaaatgtccagtgttctcaggaagatgagggctggtggtgctggagacaagaagaaataagtcttatttactgttttccagattcactagatggacctgtgtattgatggacgagctttcatatttttgctttggttcaattagtttacttcaagattttgtttgagatatatggtttgcttaactgagacatga

SEQ ID NO: 12560 - DNA, 397 bp, Glycine max
  unsure at all n locations
  Clone ID: LIB3094-092-Q1-K1-B2
cccacgcgtccgcccacgcgtccggtttcgttacgttctgcttcgcgtggaccaacaagaagtgtaagttttcattcaatggccagcgctcagctctcagcaatatcttcgtcgatctctacggcgtcgtttgaagggcttcgaccttcggctgttcagtttgcttccgcgggcagaattagaattggcaatctctcccaaaggtctttccggngcttgggtgtcaaagccgncaccgttgttgcccccaaatacaccgcgattaagcctctgggagacagaatgctggataaaattaaaggagccgaagagaaaacttgaggtgggattttgcttccatcaactgctcaaacgaagcctcaagggggtgaggtggttgctggtggagaaggaaaga

SEQ ID NO: 12561 - DNA, 461 bp, Glycine max
  Clone ID: LIB3094-092-Q1-K1-B4
aaacacccttgtcgaccacaccaaaattaaaaacataaaaaagcataaaagcacaaaaagacataaaaaagggaaaataaaacattttgaagtcatatttgcacacttgattaaaggctgtcgtcccttgtgacggatgcgtggggtgctaataccttccctgtgcgtaaaaacaactcccgaactattcacacttaaagttcgtagaccacaccttttcaattttcccgacgctttcctcaaataaaagttggtggcgactccgcgcattttcctttcatggaagacgcacttgtgagtcccgcatcgccctcccgtcaaagggtaagttgcgacagtacttgcccttccgccgaagggtaagttccttaattgaattaactaataacaaaagtgaaactaaggctaaaataaactcacaaatcaagctttggccataaaaatcacttaaaaaccatttt

SEQ ID NO: 12562 - DNA, 463 bp, Glycine max
  Clone ID: LIB3094-092-Q1-K1-B5
actaattgtgcttatccttattgagagaaaaaatggccaaatcaatcaaattctttgagttgaacacaggggccaagattccttctcttgggttagggacttggcaagctgaacctggtgttgtagctgaagctctcaccacagccattcaggttggatacaggcatattgactgtgctagtgcgtataagaatcaagcagagattggttctgctcttaagaagctttttgatgatggtgtggtgaagcgtgaggacttatggatcacttccaaactctggtgttcagatcatgcaccagaagatgtgccaaaagcattggataaaacattacaggaattgcaacttgactatcttgacctctatctgatccactggccagtccgcatgaaaagtggaacatttggactcaataaagaatatcttgagcaaccagacattcccaatacatggagagcaatgga

SEQ ID NO: 12563 - DNA, 131 bp, Glycine max
  Clone ID: LIB3094-092-Q1-K1-B6
aataaccgatcgacccactcatacgactaattgtccttatccttattgatttacattattgccaaatcaatccaattctacgagttgaacacattatccaacattcctactctatattaacacactttact

SEQ ID NO: 12564 - DNA, 456 bp, Glycine max
  Clone ID: LIB3094-092-Q1-K1-B9
cccacgcgtccgcccacgcgtccgcccacgcgtccgcggacgcgtgggcttcaacttggatgaccacggtaactaccctgattctgatcagattccttactttgaggatggtgattctgtgacatacaataatgagaaggaggggatcattgagtgcttgaaaaggaatgtgggtggtgatttagatagtgaggtttcttctctccctgattggataccaaccaaagtgatggccaccacttggcttgctgatgcacttgagtatgaactgtgggtgggatgtgatggttcctctgcttatagcatctattattctgatcttccctggcctatcggcaaggttctcttttggaagaaagcttattgggtaaagcagaaacatgggataagtgaagagaatgtagaagtaaaggaagaagagatttatgggagagcaaactctgcatatgatgctct

SEQ ID NO: 12565 - DNA, 459 bp, Glycine max
  Clone ID: LIB3094-091-Q1-K1-H12
gcgtccgcagagtttgagtggacctgtctcagctaccctttaccttggttattcactacgcatggcgattgcaatcatgttgtcaaccggcaccattggcttccttatgtcattctactttgtgcactacttgttctcatcagtaaagatagattgaggttcttgttgtcattgcatattaactatgaaaaaggttgattgatataacttgatcacattgcatagtagggcaacggatgtttaattcattgtctgattttatattgcgatgggatctgcaggttgttctccttctgcctgtttcccaaagtagtgtactcattcaagtattcaactagtgtttgagatcatgtttcaagtattttgttcaagtttctttagaaggttgtaattcaaactctcatctcatttcaatactttagaaaaatgatgttagattaaaaaaaaaaaaaagggcgg

SEQ ID NO: 12566 - DNA, 343 bp, Glycine max
  Clone ID: LIB3094-091-Q1-K1-E6
ccgcttcaatcgtttctttattctctcatttattcatttcatttaaataatccatatctgttccttggaatctttctataacgctattcctgacccaatctctctgaaaacaatataattttatacgtcaacctcctctttcaccaaaacaatcctctatacatacacaacttcactcaaacctattatacttttaagcttcaccacatttaccattgctctctcaaatttgtccaccaacgagttaacaatcctaaaaaatcttgaccaattcttaatgaaacgttttttgtactgctttaacctatttaaaactacaaagtatattgatatctgactaata

SEQ ID NO: 12567 - DNA, 441 bp, Glycine max
  Clone ID: LIB3094-091-Q1-K1-E7
cttccgccacgcgtccgcccacgcgtcctcaaaaattacaacaccaatctcacccatttgaaaaaaaggccgttagtgttactattcgtaaaatggccactcttgttctttaccaattctttctcaaactcttgctcctaatttcagtctttcagctttcctttgctgctaggagactcaaccagctggttcaggaccagtcacagttactccattaccacaacggtcctcttctatacggcaaaatcgccgtgaacctaatctggtatggtcacttcaaaccatcccaaaaggccatcatcaccgatttcgttacctcactgtcatccccatcgtctcagagcagccagccatctgttgccacgtggtggaaaaccacggagaagtactaccaccttagttccaagaacaagaatgctgcttctttctcttctctatcac

SEQ ID NO: 12568 - DNA, 368 bp, Glycine max
  Clone ID: LIB3094-091-Q1-K1-F1
agggggcctatgcggagaaaccctacactctttagtgcttcatctactacaacacaaaatggatacaagcgcatcatctactccatattgctctatactgttccttgcatcaactgtagctgcttaattctattaatcatatacaactgcgatcacaggaccttttaaggacactttcaacatcatgtggtctgagtaccatgacactacctataatgctaaacacatcttgtatcatccactaaacccagtcacagagtgtgtattacagacactacaaccctacatatccagatgtttcaatacgaaactgacgttagcactacgtgactctgcagtagatgtgacatcttatactctgctctcat

SEQ ID NO: 12569 - DNA, 257 bp, Glycine max
  Clone ID: LIB3094-091-Q1-K1-F2
gacccactcgtccgattgcgcgcgctctaccgtggtttcaacatcttatgtgttttaatcatcgtctatcaaagtggatacttgggcatttattattctcataatactatttgtcctcacagcgccattgcatgatatcttatttgccacctttacccttgaacgtctcatcatcaatgatccatctcttgcatcatacccaatatacactgatataagaagaatcatcatcacctctgattaatctgtcaagtaca

SEQ ID NO: 12570 - DNA, 408 bp, Glycine max
  Clone ID: LIB3094-091-Q1-K1-F4
cccacgcgtccggtcgcaagagagacaggtcatcctacttttcccgccacgacgccgccaagggccggcgccccttgccggagcccgcggaggaggagacttctacaatgagaccggtgccgccgtccgcggtggtcgtgatgggcctcccccaggactgctccgtcctcgatctcaagtcccgattcgagatctacggcgccatctcccgcatccgcatcgaccgcgacgccgtcggatacatcacctaccggaccaaggactccgccgacgctgccatcgccgccggcctcgaccccaccttcggaatcaccgttaactctaaaatggttcaagtgttgggggcaacggaccctctaaccatgtggaggggaagaagtgggttatagcagggaacaaaggttctat

SEQ ID NO: 12571 - DNA, 239 bp, Glycine max
  unsure at all n locations
  Clone ID: LIB3094-091-Q1-K1-F5
atttgttgctgcaggaattcacagcccggcctgatatagcagatgattgtttgttgttggcgtcaaggtgtattcgctactgtcctcaactgtttattccctcgtctgtttttccttcattagtggattgctctatgattgggatcacagtacaacatagggaggcttcgaattccatanttgcattcttggctgacatttttgaatctgcgaaatcctctgtgggggagcaatttata

SEQ ID NO: 12572 - DNA, 302 bp, Glycine max
  Clone ID: LIB3094-091-Q1-K1-F6
cggacgcgtgggcagacttcccattccaatttccaagtttttcaaagaaggtgagtgatgagcatggagcatttgccaggagaattggtgtccaacgtgctctcaaggttaccatcgaaggtgttgcttctatgcaagtgcgtgtgcaagtcctggttcgatctcataaccgatcctcattttgtttccaattactatgttgtctacaacagtcttcaaagccaagaggagcatctcttggtaattcgaagaccctttttttctggcctcaaaacttaacattcctggtcttcttggaacac

SEQ ID NO: 12573 - DNA, 436 bp, Glycine max
  Clone ID: LIB3094-091-Q1-K1-F9
tctgttcattattatgtgcagtcacacatttaaattaatgaatatcgtgagcgtataatgttgccttctgcatcaaagaagcaggggcgacctattaccacttgtataaaggttttagacatgactggtctgaagttatcagccctgaatcagattaagttgctaactattatatcatccattgatgatctgaactaccctgagaagacaaatacttattacattgtaaatgctccatacatattttctgcttgttggaaggttgtaaagccacttttacaagagaggacaagaagaaaaatacaggtgttaccaggttgtggacgagatgagctattgactatcatggattactcgtctctaccacatttctgtcgaagagaaagctctggatcatccagacattctgagagtggtagtgaaaaatgctattcct

SEQ ID NO: 12574 - DNA, 377 bp, Glycine max
  unsure at all n locations
  Clone ID: LIB3094-091-Q1-K1-G1
gttggggggctctaccgtggtttcaacatctcatgtgttggaatcatcgtgtatcgtggtcggtactttggattgtatgattctgttaaaccagttgtcctcacagggtcattgcaggatagnctttttgccagctttgcccttggatggctcatcaccaatggtgcaggtcttgcatcatacccaatagacactgttagaagaagaatgatgatgacctctggtgaagctgtcaagtacaagagctccttggatgcattcacacagatcctcaagaatgagggtgccaagtccttgttcaagggtgccggtgccaacatccttcgtgccgttgccggtgctggtgtgcttgctggttatgacaagtttgcaggttc

SEQ ID NO: 12575 - DNA, 373 bp, Glycine max
  Clone ID: LIB3094-091-Q1-K1-G3
agccttccgccacgcgtccgtgacccccttacttcaggagctccaggccaggatcctccgctaccacaagagactctggcctatgccaaccccaaccttgacgacgccatcaagattctccccttcgagttcgtagcccttgaggcctgtctggaggccgcttgtagcgtcttggaaaacgaggctaagactttggagcaggaggctcatacggccttggacaagctcacctgcaagatcagtactctcaatttggaacgcgttcgtcaaatcaagagccgattagtcgccatcactggccgtgttcagaaggtcagggacgaactgtagcacctgctcacgacgactatgatatggctgagatggatctctc

SEQ ID NO: 12576 - DNA, 66 bp, Glycine max
  Clone ID: LIB3094-091-Q1-K1-G4
acccgtccacgcggcctgcggggaacctggatcattccttcgcggaatcgatgtgaaccgtttacc

SEQ ID NO: 12577 - DNA, 345 bp, Glycine max
  Clone ID: LIB3094-091-Q1-K1-G5
cccacgcgtccgcgtttccaaatattcacataagagaagaacaatagttctctggctagaagctcatgatatgctagataagccatccttaggagcaatatatccgtcctcttcaatttattagcagaaggtgtgttgcgtattagaccatagtctttttgtcattgttgtttcccaacaacgcagtttagcctttgagagcatcagcaatcacatggtgatcagaatatcattcagcaattgaagatcagtggcatcaggcataggctagcaagcaatgatatggctttcttcccagcaaatttcatgctacaaacacctaaccaagatgaccatcaacctcca

SEQ ID NO: 12578 - DNA, 264 bp, Glycine max
  Clone ID: LIB3094-091-Q1-K1-G6
cccacgcgtccgcttttcgctaccagttacttccctctttcatttcttatatctgctaagtgaaatcaaaagggtgaatctgaatggtttttgctgttagtttctctcaaagcctccttctgtgcaagccatcatcatcatcatcatcatatcaggtcaagtgttgctcacggtcacagaacaaagaagccacgtcacatattcaaacaaagaaacggtgcttgaggtgcaacaccctttactcagatgaagataattccccac

SEQ ID NO: 12579 - DNA, 121 bp, Glycine max
  Clone ID: LIB3094-091-Q1-K1-G7
cccactcgtccgcacacgcctcccgcgccaccatacacacgtctttctacttttcccaccaccactcctacaagggctcttctggccttttctaatccctcagacgatcatacgactacta

SEQ ID NO: 12580 - DNA, 394 bp, Glycine max
  Clone ID: LIB3094-091-Q1-K1-G8
ggcttgctcctcttacgagcctttcctttcagtccattgattcggtgggtgcgggtgcagcggaaccgatctagaccctgatcggcgtcggcacaccgccggagaacaagatgattgtctgcgtcgccgtcgtcggtcaccagaacaatccgctgtacatacagagcttcacggaggccgatgatgctctcaagctccaccacatcgtccattgctcgctcgatgtggtcgacgagcgagtgaacaatcctaaaaagtctgggccgatgcttaatgagacgtttttgggactgctttatcctattgaaaactacaaagtatatggatatctgactaatacgaaggtgaaatttatcttggtgaccacggatctggatgttaaagatgcggatgt

SEQ ID NO: 12581 - DNA, 397 bp, Glycine max
  unsure at all n locations
  Clone ID: LIB3094-091-Q1-K1-G9
gntgggtgtaactgcatgctctttgccattgttgatggagtttgcctttagaggtttgaggtgcccatatagttatacaatttcattttaaggtcttgttgactagtgttcctagactattggttaaggaactaaaaggagaagtttttaatatgtaaatcataggaaagtataaaaaaaaatcatgaagaacgcaattttatgccttccaataaaaaaccttagttccttaacccgtgtcctcgggacacttgttagcatttgccttcattgtatatggatcattagattattataattgaaaaaaatagggcctactttttgacgtcattttattcattttattaagggtcatcaaatactttcacttggtggcagtgtttgtcaaaaatggaca

SEQ ID NO: 12582 - DNA, 346 bp, Glycine max
  unsure at all n locations
  Clone ID: LIB3094-091-Q1-K1-H1
gttgccgggctctaccgtggtttcaacatctcatgtgttggaatcatcgtgtatcgtggtctgtactttggattgtatgattctgttaaaccagttgtcctcacagggtcattgcaggatagcttttttgccagctttgcccttggatggctcatcaccaatggtgcaggtcttgcatcatacccaatagacactgttagaagaagaatgatgatgacctctggtgaagctgtcaagtacaagagctccttggatgcattcacacagatcctcaagaatganggtgccaagtccttgttcaaggggtgccgtgccaacatcctncgtgccgttgccgtgctggtgt

SEQ ID NO: 12583 - DNA, 364 bp, Glycine max
  Clone ID: LIB3094-091-Q1-K1-H10
ccggtcgaccacgcgtccggtttggtgtaactgcatgctctttgccattgttgatggagtttgcctttaggtttttgagttgcccatatagttatacaatttcattttagggtcttgttgactagtgttcctagactattgggtaaggaactaaaaggagaaatttttaatatggaaattataggaaagtatttaaaaaaatcatgaagaacgcaattttatgccttccaataaaaaaccttagttccttaacccgtgtcctcgggacacttggtagcatttgccttcattttatatgtgtcaatttgattattataattgaaaaaaatatggcctactttttgacgccattttaatcatttta

SEQ ID NO: 12584 - DNA, 397 bp, Glycine max
  Clone ID: LIB3094-091-Q1-K1-H11
cccacgcgtccgcccacgcgtccggtgattgaagctagttagaacaagatgttgcagctggtctacactgcgattttctccgaaatgcttttgattctcacgctcgtcttcaaaaccccactgagaaaactcgtcatcgtttccctcgatagtgtgaagcgcggtcgcggtcccgtggtggtttccaccgtgggcgccacattgatggtggttctcgcttcgagcctctacagcatggccaagatccagcaacgcaccctcgaggccggcatagtcaaccccaacgaccaaggtctcatgtccaaacacatgcttgaagcttctcttatggggtttctgctggtcctctctctgatgattgatagattgcaccattacataagagagctttggtcac

SEQ ID NO: 12585 - DNA, 294 bp, Glycine max
  unsure at all n locations
  Clone ID: LIB3094-091-Q1-K1-E4
gttgccgggctctaccgtggtttcaacatctcatgtgttggaatcatcgtgtatcgtggtcgggaccttggaatggtataatcctgttaaaccagttgtcctcacagggtcattgcaggatagcttttttgccacctttgcccttggatggctcatcaccaatggtgcaggtcttgcatcatacccaatagacactgttagaagaagaatgatgatgacctctggtgaagctgtcaagtacaagagcttcttggatgcattcacacagatcctcangaatgagggtgccaagtc

SEQ ID NO: 12586 - DNA, 136 bp, Glycine max
  Clone ID: LIB3094-091-Q1-K1-B3
aaaattacaacaccaatctcactcattgcaaaatagagccattattattactattcttaaaatatccactcttgttctttaccaattctttctcaaactctttctcctaatttcaatcttttaactttccttttct

SEQ ID NO: 12587 - DNA, 338 bp, Glycine max
  Clone ID: LIB3094-091-Q1-K1-B4
cggacgcgtgggcagacttcccattccaatttccaagtttttcaaagaaggtgagtgatgagcatggagcatttgccaggagaattggtgtccaacgtgctctcaaggttaccatcgaaggtgttgcttctatgcaagtgcgtgtgcaagtcctggttcgatctcataaccgatcctcattttgtttccaattactatgttgtctacaacagtcttcaaagccaagaggagcatctcttggtaattcgaagaccctttttttctggcctcaaaacttacatttcctgttcttcttggaacaccaatgaccccaaaaagcatgtttcttctgatgttct

SEQ ID NO: 12588 - DNA, 436 bp, Glycine max
  Clone ID: LIB3094-091-Q1-K1-B5
cccacgcgtccgcccacgcgtccgcaaaaattacaacaccaatctcacccattgcaaaaagaggccgttagtgttactattcgtaaaatggccactcttgttctttaccaattctttctcaaactcttgctcctaatttcagtctttcagctttcctttgctgctaggagactcaaccagctggttcaggaccagtcacagttactccattaccacaacggtcctcttctatacggcaaaatcgccgtgaacctaatctggtatggtcacttcaaaccatcccaaaaggccatcatcaccgatttcgttacctcactgtcatccccatcgtctcagagcagccagccatctgttgccacgtggtggaaaaccacggagaagtactaccaccttgagtccaagaacaagaatgctgcttcttctctttctctatcac

SEQ ID NO: 12589 - DNA, 292 bp, Glycine max
  Clone ID: LIB3094-091-Q1-K1-B6
cgctcgaccgtggtttcaacatcttatgtgttgtaatcatcgtgtatcgtggtcggtacttggggattgtatgattctgctaaaccatttgtcctcacaggctcattgcatgatatcttatgtgccagctctgcccttggatggctcatcaccaatggtgcatcgtcttgcatcatacccaatagacactgttagatgaagaatgatgatgacctctgatgaacctgtcaagcacaagagctccttggatgcattcacacagatcctcaagaatgagggtgccaagtgcttg

SEQ ID NO: 12590 - DNA, 380 bp, Glycine max
  unsure at all n locations
  Clone ID: LIB3094-091-Q1-K1-B8
cccaggcgtccgggcgcaagagagacaggtcttcctacttttcccgccacgacgccgccaagcgcctgcgccccttgccggagcccgcggaggaggagacgtctacgatgagaccggtgccgccgtccgcgttggtcgtgatgggcctcccccaggactgctccgtcctcgatctcaagtcccgattcgagatctacggcgccatctcccgcatccgcatcgaccgcgacgccgtcggatacatcacctaccggaccaaggactccgncgacgctgncatcgccgacggcctcgaccccacctttggaatcaccgttaactctaaaatggttcaagtgttgggggcaacggaccctctagccatgtggagggaaggagtt

SEQ ID NO: 12591 - DNA, 226 bp, Glycine max
  unsure at all n locations
  Clone ID: LIB3094-091-Q1-K1-C10
gcgaatggatcgngaaaatgatcagtttccagtacgacacggacgtgaccacatggggccctggggagaggctgttccaggtggagtacgctatggaggcagtgaagcagtgcttcgcggcgataaggctccgatcgaatacccacgtggtccctcgaatgcgtcaacaatgccaactccaaactctcctcaaaccagaagaaaatcttcaagggcaacaatcaca

SEQ ID NO: 12592 - DNA, 358 bp, Glycine max
  Clone ID: LIB3094-091-Q1-K1-C2
gcgcccacgcgtccgcgtttccaaatattcacataagagaagaacaatagttctctcgctagaaagtcatgatatgctagataagccatccttaggagcaatatatccgtcctcttcaatttattagcagaaggtgtgttgcgtattagaccatagtctttttgtcattgttgtttcccaacaacgcagtttagcctttgagagcatcagcaatcacatggtgatcagaatatcattcagcaattgaagatcagtggcatcaggcataggctagcaagcaatgatatggctttcttcccagcaaatttcatgctacaaacacctaaccaagatgaccatcaacctccaccttcactca

SEQ ID NO: 12593 - DNA, 363 bp, Glycine max
  unsure at all n locations
  Clone ID: LIB3094-091-Q1-K1-C3
gttgccgggctctaccgtggtttcaacatctcatgtgttggaatcatcgtgtatcgtggtcggtacttgggattgtatgattctgttaaaccagttgtcctcacagggtcattgcaggatagcttttttgccagctttgcccttggatggctcatcaccaatggtgcaggtcttgcatcatacccaatagacactgttagaagaagaatgatgatgacctctggtgaagctgtcaagtacaagagctccttggatgcattcacacagatcctcaagaatgagggtgccaagtccttgttcaagggtgccggtgccaacatcctncgtgccgttgccggtgctggtgtgcttgctggttatgac

SEQ ID NO: 12594 - DNA, 159 bp, Glycine max
  Clone ID: LIB3094-091-Q1-K1-C6
cgacggcttcgtcagcctcctgttttcagtacctgcaacttacctctttcatttattatatcggctcagtgagatcaaacgggtgaatctgaatggactccgctgatagtttctcttaaagcctccttctgtgcaagccatgattataatcatcatcat

SEQ ID NO: 12595 - DNA, 299 bp, Glycine max
  Clone ID: LIB3094-091-Q1-K1-C8
cggacgcgtggggtttcctagtatgcaaggtaaagaatcagcaaatttcaaccccggatccgcgagtaacatgttgacaaaagtctaccgagttgcattttgttcttgtaaccttctcaacccactggaggtcgtgatctgtaaaatttgagtgaattatacaacaaattcttgaaaaagaaatgattttctcttctgagctgctgcttattgatccatgaattcagctgcaattattttcgaagatggcaataaaatcttttctgcggtgttatctctttgactgaattccaaatttt

SEQ ID NO: 12596 - DNA, 445 bp, Glycine max
  Clone ID: LIB3094-091-Q1-K1-C9
aaatgttcattttccagtacgacacggacgtgaccacatggagccctgcggggaggctgttccaggtggagtacgctatggaggcggtgaagcagggctcggcggcgatagggctccgatcgaagacccacgtggtcctcgcatgcgtcaacaaggccaactccgaactctcctcgcaccagaagaagatcttcaaggtcgacaatcacatcggcgtcgccatcgctggcctcaccgccgatggcccgcgtcctctcccgctacatgagatccgaatgcatcaactataattacacctacgagtcgccgctccccgtcggcagactagtcgttcagctcgccgataaggctcaagtttgcacacagcggtcttggaaacgtccttatggggttggactcctggtagctggattagatgaatcaggagctcacctctattacaact

SEQ ID NO: 12597 - DNA, 54 bp, Glycine max
  unsure at all n locations
  Clone ID: LIB3094-091-Q1-K1-D1
cccacgcgtncggtcgcaagagagacaggtcagcctacttttcccgtcacgacg

SEQ ID NO: 12598 - DNA, 84 bp, Glycine max
  Clone ID: LIB3094-091-Q1-K1-D2
ttccctgatctacccactcgtccgacgactcctcgcctcataaaccctccactctcgaatccaaactcttctcctacccaaaat

SEQ ID NO: 12599 - DNA, 131 bp, Glycine max
  Clone ID: LIB3094-091-Q1-K1-D4
ccgctcgtcttcaatcctttcgttattctcttattcatccttctcttctgaataatccatatctcgtttcttggctaatctccaacactcttttacccaccccatctctatatatattatccatatctaca

SEQ ID NO: 12600 - DNA, 236 bp, Glycine max
  Clone ID: LIB3094-091-Q1-K1-D5
aattcctgttcgacccacccgtccgtccacgcctccggtcgcaagagatacaggtttttcctacttttcccgtcactatctcctcaagtcgccttcgacccttacctatagccctttttctcattagactctctactatgaataccactacctcctttctctcatgatctataacgtcctaccacattacttctacatccttaatctcaagtccctattcaagaactacagaccca

SEQ ID NO: 12601 - DNA, 347 bp, Glycine max
  unsure at all n locations
  Clone ID: LIB3094-091-Q1-K1-D6
ctactcatctcattaccttatccatcctcaccataccacttcgcaggatgggccacctccaatacaccttcctccactctcatccttatcagctattatccctacctacttctattcatcaaaaacaactgtttcccaaatatctttttaacacaatttcatcctaatgcggtcctagacccatttaactacctctaaagatggacagatctggtatctctcactagacaaagacacaggatgtggatttcaaacaaaacaacgctacagatttgggtngttcagtatgaagctgaagttggtagcaggtgactcttgctgtgtgtgacagcttattatatgtgctc

SEQ ID NO: 12602 - DNA, 284 bp, Glycine max
  Clone ID: LIB3094-091-Q1-K1-D7
ccaggcgtctcaccgcgattacctttttgtgacaatctcttggtaagggtcaaaaggagcaggtgttcattttccaaccactacggtttctaccgtcaggggaaaccccaccgagagggaacccatgggagagtaaaccgccccagcccaagcttgttccaaaggcttcatcaccgccaaagaagatgctgaaacctctagaaggaaccttaaactctccaaggatcagtcaatggtcctggaaaagagcttcaaggaccacaacattcttaaccccgtaggta

SEQ ID NO: 12603 - DNA, 376 bp, Glycine max
  Clone ID: LIB3094-091-Q1-K1-D8
gcttgctcctctaactatcttattcatccttctcttctgaataatccagatctgtttctgcccttttctccgtaacgcttttcgtgaccggatctgtatggatttgatccaaatctacacgccgatggtggttttggccgggtctttcatagatctggtgcgtagaggctcagatctacggtaccgaggtgtgtgattcatgttcgtcttgcttttggaatctgtttcgtagaaagtcgtttggtcttgcatatggcatggctcttgaggtatttttttgcaggtacaacagagaatcgatgacaagaacgcagatccgacggtagatccagccgattccgcttgttcgatcgctacagacccctgtatcggatca

SEQ ID NO: 12604 - DNA, 238 bp, Glycine max
  Clone ID: LIB3094-091-Q1-K1-E1
aatcgacccacgcgtgcgcccaggcgtccggggaagctcgatcattccttcgcggtttttatgtgaaccgtttaccttgggtatattggatactttgaattgtatgattctgttaaaccagtttttttcacatgttcattgcaggatatcttttttgccagctttgcccttgtatggctcatcaccaatggtgcaggtcttgcatcatacccaatagacactgatagaagaagaatga

SEQ ID NO: 12605 - DNA, 349 bp, Glycine max
  Clone ID: LIB3094-091-Q1-K1-B2
atttgttgctgcaggaattcacattccggcctgatatagcagatgattgtttggtgttggcgtcaatgtgtattcgctactgtcctcaactgcttattccctcgtctgtttttccttcattagtggattgctctatgattgggatcacagtacagcatacggaggcttcgaattccatattgcatttcttggctgacatttttgatcttgccaattcctctgtgggggagcaatttataccaataagagatagtgtaataattcctcgaggtgccagcatcaccagaattttgttgcttcattaacgggagcacttcctaaatctcgagtggatgtggtatcttataca

SEQ ID NO: 12606 - DNA, 452 bp, Glycine max
  unsure at all n locations
  Clone ID: LIB3094-091-Q1-K1-E12
tttgaatacattccttgtagtttatactgaaagatgggtttgaagatggcgggactgatgctaggcctttccctcatgctccttttggtctcctctgaggtggcatccacgaatacaaaagaggaggcaaatggagtggatgatgccaaatatcccggtggaagctatggagggggttacccaggtcatggcggtggcggttatcctggccatggcggtggcggttatcctggccatggcggtggtggtggctatcctggtcatggtggtggccaccctggtcatggtggcggctaccctggccgtggtggtggatactgtangcatggctgttgcggtggccggacatacaacggaggttgcaaaaggtgctgctataacgctggcgaagctgttgctgcacaaactcaagataagactcacgattaagacgatgcagttctacttaatta

SEQ ID NO: 12607 - DNA, 368 bp, Glycine max
  Clone ID: LIB3094-091-Q1-K1-E2
cctcttacgaggcctttcctttcagtccattgattcggtgggtgcgggggcagcgagaccgatctagaccctgatcggcgtcggcacaccgccggagaacaagatgattgtctgcgtcgccgtcgtcggtcaccagaacaatccgctgtacatacagagcttcacggaggccgatgatgctctcaagctccaccacatcgtccattgctcgctcgatgtggtcgacgagcgagtgaacaatcctaaaaagtctgggccgatgcttaatgagacgtttttgggactgctttatcctattgaaaactacaaagtatatggatatctgactaatacgaaggtgaaatttatcttggtgaccacggatctgg

SEQ ID NO: 12608 - DNA, 149 bp, Glycine max
  Clone ID: LIB3094-091-Q1-K1-E3
cccacgcgtccgcccagcgtccgaattcctcaaccacacttgccatatcaaagaaaagagcgtcaacatgagatcaaagatacaacatggaggcacttcaatcatgggtttcaaagcacaagctcgccagcattggggcactctgggcc

SEQ ID NO: 12609 - DNA, 332 bp, Glycine max
  Clone ID: LIB3094-090-Q1-K1-G8
gcgtccacgcgttcgggtcaattgaccgaagcagttcggcttcgtccttacactgttgtactgggtgatgggattgataaagcccatcctgatgtgttcaacatgatgcttcagatcctggaagatggaagactaacagacagtaaaggcagaacagtggatttcaagaacacacttcttataatgacatcaaatgtttgaagcagtgtgattgataaaggatgccgcaaaattggatttgatctggattacgatgagaaggatagcaattataacagaatcaagaacctggtaactgatgagctaaaacaatacttcaggcctaatttttg

SEQ ID NO: 12610 - DNA, 417 bp, Glycine max
  unsure at all n locations
  Clone ID: LIB3094-090-Q1-K1-G9
attcgtagcgcgaagaatggtgagaatggaagaaaaggcaaaagctgagcggaaggagataggtatgaccgagacttggttgaaaaagcaccgtcttctttacaatggaacccctaaaactcactctattattagcattcgcgatggcaccatcaacactgcttccttcaaaacatggctcgcacaggattacttgttcgttcgggcgttagtaccatttgtggctagagtgctgataaaagcggagaaggaatcatatcgcactggtgacatggaactcatattgcggggcatggcttctctggaagatgagatttcatggctcaagacatatgcccacangtgggggaattcactttctgacggtgttacttaacaggctaacaaaaactattgtgggttgctggaaagtttaat

SEQ ID NO: 12611 - DNA, 119 bp, Glycine max
  Clone ID: LIB3094-090-Q1-K1-H1
gtaatgtaggtgttccaagcttcaaggtaggtaataatgttaggtccaagtagatgtgtgagtgagttgtaatacaatgattctaatatcctatctccaccattcatattaatatttgc

SEQ ID NO: 12612 - DNA, 253 bp, Glycine max
  Clone ID: LIB3094-090-Q1-K1-H11
cccacgcgtccgcccacgcgtccgcccacgcgtccgcggacgcgtggggttctataggctgggacctctgtgtccttgagttctaaggagacaggaacctacgtctggtggatgaatcatgaccgtgtgatcagagcgtgattaacggcccgggtgagtttctctttggagtagtctcatctttggctgtagaggatcgttcttaggacacttccatgtgcctgggaatggtcatacggttgtctgacagacc

SEQ ID NO: 12613 - DNA, 344 bp, Glycine max
  Clone ID: LIB3094-090-Q1-K1-H3
ggcgccacgcgtccgagatgagtaacatcaccatctcggatctgtgtccctcctttgaggcaaaagtgatgagttgcatggtggtgctgcttccaacctctctcacgctcacaagggtgacccttgtctcgttttaacggctgatcccaagcctcgtcttcgttggactcatgacttgcatgaacgcttcgttgatgcggtcacgcaacttggtggagctagtagttctggatgttatctgcataagctacaccaaaagcaatcattctgactatgaatgtcaagggtttgactctgtttcatttgaagagtcatcttcataaatacaggcttggtaagcaatc

SEQ ID NO: 12614 - DNA, 419 bp, Glycine max
  Clone ID: LIB3094-090-Q1-K1-H4
cccacgcgtccggagagtttgagtttcaccctttgattgaaggtttcggtgctcggtgcttttctgggtcccatcatcttctcatgctttctgattcaataatttgaatgcgtgtatcgctattcactctgtttttttaggatttctttttcaatgctggatagtttgctggaacgatctttttaatttgatgtttgtttttctaatacttcactcagatcgacgttcataaactgttttagtccttttgacgcacattcacaagttagggtttttgttagtaccatctgccccaccagtcatttcgtgctttaccagttatcttatctgggaatatctgctatgccattctaagattaagaatataaaaaaaaattgttgacagagatgtcaacgtatgacaatgttggtggtgggaa

SEQ ID NO: 12615 - DNA, 284 bp, Glycine max
  Clone ID: LIB3094-090-Q1-K1-H5
cccacgcgtccggctcaattgaccgatgcagttccacgtcgtacttacactgctgtactgggtgatgagatataaaaagcccatccttacttcttcaacactatgctacacatcctggaatacccttacctacatacactactgacacaacactctatttcaagaacacatcttcacatacttacatccatatgttgaagcagtcacgcatgataaaggaagctcgcaaatctggatgtgatctgcataacgcatcaccaagatcactcatataacactattaa

SEQ ID NO: 12616 - DNA, 401 bp, Glycine max
  Clone ID: LIB3094-090-Q1-K1-H7
gaacgcgaacacagattcattcacctaccgttcctacccttctctctctcgccgcctcttcgtcttcctctcgcatgctccttctctgaaccaaaccaatccattattcatttgaatcttcttatacatcccaaaaaaacccaataaaaaaggggtctttagaaggttctggttgatgggtaggagaggaatcaagctattcgatgaaaaaaggaacgggcttttttcaaattccaattttgggtctcaatggggtggtgttagaagtgatggtgttcaagaccctgtgaatttggctgtgtatgcaagcattagtcaaatgggaatggggtttggtgttcaagaaccaaacccttcttcttcttcttctgatggtgataattcccaacacaacggtggca

SEQ ID NO: 12617 - DNA, 411 bp, Glycine max
  Clone ID: LIB3094-090-Q1-K1-H8
cccacgcgtccggggttctactctttgtccgctgtcgacggccggaaacaccacggtctggatttgcaggagatcgagacggttctcaccgacgttaaagctgacaacgttaaggttataccagttcccaagcactgctattgggctgatttcatggtactcgccactggcaggtccacctggcacgtcaagaacatcgcccaagccctaatttacaaggctaagcagaaacagagaggagttgaacgaatgatgctaccaagtgtggaatgtcaagcacgaagaaagtggatcgtcattgactctggtaaagtgatagttcatgcactcgatgaataggctagagcttactacaatttgtagggtctttggaccccaaggacaattctaaatgaacgtgaagaggattta

SEQ ID NO: 12618 - DNA, 237 bp, Glycine max
  unsure at all n locations
  Clone ID: LIB3094-090-Q1-K1-H9
cggacgcgtgggagaacctattttcactgttttttgaagaaattgtatcccagctgtctggggtgtcctcgctcgtatgataagttgcgctttgatccaagtaaaccaaaatgcangctgttagttacacatgatgactatagtataaacgtccaaactttccaaggaaaaaaacttctgttgttaccatacttagggatccagttgaccgtgtttttagtacttatgaaatctcaa

SEQ ID NO: 12619 - DNA, 422 bp, Glycine max
  Clone ID: LIB3094-091-Q1-K1-A12
aagaaaaagggaaaaacgcaagaaaaatagaggaagatcgatcgagatctccctcgcgtgtgtctcagttgaagaaattaaaaagcagaactagagtaactcaacggtctcagaattttcagggttttcagtacttccatattttttcttccggatttgagttggaagaagatcgaagaggtttctagttgcttcaattgttcctctgggtggtggagacttgttatatttttaaaatattgacaattcgaaatgccaaaggagagaagggatagatctttgtcacatgaaagtagcagagcatcaccttacccaagtagctctagtcgtgttggaagatctgctcttaaagagtcagaggagaatgttaaagaatgggaagaagctaagtgtccagtgtgcatggaacacccttacaatgc

SEQ ID NO: 12620 - DNA, 91 bp, Glycine max
  Clone ID: LIB3094-091-Q1-K1-A3
cccacgcgtccgcgtttccaaatattcacatattagaagaacaatacttctcgccctagaagctcatgatatgctatataatccatcctta

SEQ ID NO: 12621 - DNA, 375 bp, Glycine max
  Clone ID: LIB3094-091-Q1-K1-A4
acgacccactcgaccgacgacgcctattcggagaaaccctacactctataccccattactctactactacccaaaatgggtgcaacggcatcatctacttcatcttcctctaaactgttcattgcatcaactgtagctccttaattctattcatcatatacaactgtgatcacagtaccttataaggacaatttcaacatcatattgccttactaccatgacactacctataatgataaacacacctcgtatcagcaactaatcccagacacagaaagtgtactaaatactcaacatccctacataaccagatttttcattactaaactaacattagcactacctaacatctcagtagattgtgacatcttatac

SEQ ID NO: 12622 - DNA, 183 bp, Glycine max
  Clone ID: LIB3094-091-Q1-K1-A5
ctttgtgtactttgagtcttcttgatccttctttttctccttgaactcaaacatggcagatgaggtggttctgctagatttctggccaagtccatttgggatgagggtcaggattgcccttgctgaaaagggtatcaaatatgagtacaaagaagaggacttgaggaacaagagtcctcttct

SEQ ID NO: 12623 - DNA, 395 bp, Glycine max
  Clone ID: LIB3094-091-Q1-K1-A6
ggcgcaaccatggccgactcatctcaagaccttgaccaacttctcgatagtgctttgggggatttggagtccttcaaccttaatcctcccccttcaagtggggaagcaactgcgaatagcacgaaggagagtccttctttgccgtcgggggttcaaggattgtacatgggtttacccgatttgagaacgaacaaaaaggggaaacagaaggcttgcaaagacagccacgtgtctgaggcgctcaacaagctcatggagcataccaaagaggctgtgaaggggctggagtctatatccgcacccactgccgatgatgtaagtaacgatgcctcgatggaagatcgggtcaaacaatctgagcagcttgctggctctcaagacatggaatctattgt

SEQ ID NO: 12624 - DNA, 123 bp, Glycine max
  Clone ID: LIB3094-091-Q1-K1-A8
attcgacgctgcaggaatccacagaccggcctgatatagcagatgattgttttctgtcggcggcaaggtgtattcgctactgacctcaactgcttattgcctcgtcggaggatacttcattag

SEQ ID NO: 12625 - DNA, 331 bp, Glycine max
  Clone ID: LIB3094-091-Q1-K1-B1
cccacgcgtccgcccagcgtccgaattcctcaaccacacttgccatatcaaagaaaagagcgtgcaacatgagatcaaagatacaacatggaggcacttcaatcatgggtttcaaagcacaagctcgccagcattggggcactctgggcctctggaattggagcaacacttgtggcttattcatgcaaaaagtctccaatgaagccaagtctcaggcttatccatgctaggatgcatgctcaggctctaactttagcagtgctatccggtgcagctgcttatcattattatgagaaacgtgatgttcagccaaaaccagaggcagattata

SEQ ID NO: 12626 - DNA, 452 bp, Glycine max
  Clone ID: LIB3094-091-Q1-K1-B11
tgttgacctcacagtgaggctggagaaggaagcctcctacgatgaaattaaaaatgctagcaaggaggaatcagagggcaagttgaagggaattcttggttacactgaagatgatgtggtctccaccgactttgtgggcgatagcagatcaagtatttttgatgcaaaggctggaattgcattgaataagaactttgtgaagcttgtctcttggtatgacaacgagtggggatacagctcacgtgtcattgacctgcttgtattcgttgccaagaagtctttttaaggttgtactgaaaaaaaagtagcttgtctagacattatgtgctggtgtctagctgcgatttagtgtcttcttgctcgggcagaaatgagaagtttgaataaatcggtttcgggaaccggtgttgttaccctggtaggagcattaagctttttttggtgtctcttct

SEQ ID NO: 12627 - DNA, 444 bp, Glycine max
  Clone ID: LIB3094-091-Q1-K1-B12
cccacgcgtccggacagaagagagcgtcctagtcgcaaccctaataagaagaaccacagcgtcaagcgagtgacatccaccagccatgggtcgtatgcacagccgcggtaagggtatatcctcttctgctttgccctacaaaaggacaccccctagctggctcaagatctcttcgcaagatgtggaagaaaatatctgcaagtttgcgaagaagggtttgaccccgtctcagattggtgtcattcttcgagattctcacggtattgctcaggtcaacagcgtcactggcagcaaaatccttcgcatcctcaaagctcacgggcttgcgcctgaaattccagaggatctttaccatttgattaagaaggcagtttcaattaggaagcatcttgagaggaacaggaaggacaaggactccaagttcaggttgattcttgttgagag

SEQ ID NO: 12628 - DNA, 347 bp, Glycine max
  Clone ID: LIB3094-090-Q1-K1-G7
gctcccactcatcccatattattaacttcaccatttcttatcatattccctccttttagctaaagttgattattatcatggtactgctcattccaacctctcttactctcacaagtcttacccttttctctatttaacctcttatcccaaacctcctcttctttctactcataactttcatcaactcttcttttattcattcacgcatcttattatatctaataattctttatgttatcttcataatctacaccaaaatcaatcattcttactattaatttcaatatttttacttcttcttcattttaataatcatattcataaattcagtctttttaatcaatctt

SEQ ID NO: 12629 - DNA, 380 bp, Glycine max
  Clone ID: LIB3094-090-Q1-K1-E6
gaaatgtgaaagccttatcatacagtgtttgcaagatgccaaggtagaagttgaagaagtagatgatgtgataattgtaggcggatgttcttacatcccgagggtgaaaaatcttgttactaacgtatgtaaaggcaaggaactttataaaggcatgaatcctttagaagctgctgtttgcggtgcagcagtggaaggagctattgcttcaggcgtcaatgatccctttgggaacttggacttgttaactatccaagctacacctcttgccattgggattcgagctgatgggaacaagtttgtccctgtaattccgagggatactacaatgccagcacggaaagagctagttttcacaactactcatgacaatcaaactg

SEQ ID NO: 12630 - DNA, 294 bp, Glycine max
  unsure at all n locations
  Clone ID: LIB3094-090-Q1-K1-E9
aagagaangaatttattctggacaccttgtgccacttattgtattaatcgaatgctggaaggttttactaaaataagatgtgtggaagagtgcatggaaaaggaccagaaaattaccaaactaatatacaatcaaatatggttgttaaatcttatgaaaagtgaatttaccgagggacatgagcttctaaaaccatctgccacccggtttgcctctagctttgctactctacagagcttgctggatcatcgagttggtctcagaagaatgattctttccaacaaatggatttca

SEQ ID NO: 12631 - DNA, 311 bp, Glycine max
  Clone ID: LIB3094-090-Q1-K1-F10
gttgaatcgttaaaatgttcataaaccagttctactcttacgttaccacatggatccctgggaagggttttaatccagatggagtacgctattgaagctgtgaatcatggctcttctgctatacggctccgatctaatacccacttggtcctcgcatgcttcaacaatgccaactcctaactctcctctcaccagaataagatcttcaaagtctacaatcacatcgtcgtctccatcgctgtcctcaccgccgattgccccgtcctctccccctacatgaaatccgaattcatcaactataattacaccta

SEQ ID NO: 12632 - DNA, 245 bp, Glycine max
  Clone ID: LIB3094-090-Q1-K1-F11
cttcggccacgcgttcggccacgcgttcgcgagaacttagaatagaatactcgtcccacaccgaatgttcttctctctctgctctcatcacttcatatattcgcaatttctctttcaccgtgaaaccctagacccaactgcgagcgcggagccaagccatgtccctcaaccggcttctcttcgtgggccggcgcttcgatcggcgggccttcggcctcttcttccttcgatccctctctggcttc

SEQ ID NO: 12633 - DNA, 301 bp, Glycine max
  Clone ID: LIB3094-090-Q1-K1-F12
cattctcctctctgaattcctcttattcaggaatttggagagtattgatatatcagaggtaggataaaccagtagccaaggaagatatggagttttctatgattttcattgttagcaacattatgctgcttttcagttcagcatttgccaaaactgctagtcctccctctctgagcccaactccagcaccagccccggcaccagacttcgtgaacctcactgagttactcagtgttgctggtccgtttcacaccttccttggataccttgagtccactaaagtgattgacacttttcaaaa

SEQ ID NO: 12634 - DNA, 461 bp, Glycine max
  Clone ID: LIB3094-090-Q1-K1-F2
cccacgcgtccggtcgcaagagagacaggtcagcctacttttcccgccacgacgccgccaggcgccgcctccccttgccggagcccgcggaggaggagacgcctacgatgagaccggcgccgccgtccgcggtggtcgtgatgggcctcccccaggactgctccgtcctcgatctcaagtcccgattcgagatctacggcgccatctcccgcatccgcatcgaccgcgacgccgtcggatacatcacctaccggaccaaggactccgccgacgctgccatcgccgccggcctcgaccccaccttcggaatcaccgttaactctaaaatggttcaggtgttgtgggcaacggaccctctagccatgtggagggaaggagttggtaatagcaggaacaaaggttctatgtcaaagcttgtgcgtgctgaggtacctttgagcaagcatggaagaggtaacaga

SEQ ID NO: 12635 - DNA, 467 bp, Glycine max
  Clone ID: LIB3094-090-Q1-K1-F3
cccacgcgtccgcccacgcgtccgcccacgcgtccgcccacgcgtccgcggacgcgtgggggttcggtgaataagtgtcgtttaaagatgcagagtctgcaacagaaggcttccgaatggagcggtgtttccatagacgacgctttcggcatcgacgacaccaatctcttccagaaactcggcctccaaaccttcattaacctctccaccaatttctacaacagggtttacgatgacgaggaagaatggtttcgttcaatattcgcgaattctgagaaggagaatgccattcaaaaccaatacgagttcttcgtgcagcgaatgggtggtcctcctctcttttctcagagaagaggacatcctgctctaattgctcgacatcgaccatttcctgtcacgcatcaagcttgaaagagggtgttacatcacatgcaacatgcattagacagtactacagatatagatga

SEQ ID NO: 12636 - DNA, 205 bp, Glycine max
  Clone ID: LIB3094-090-Q1-K1-F5
ttcccaatttatcatacttttcatatactactctttcttcatctactacaccaattctttccataaactctttcttcaaaccttcattaacctctccaccaatttctacaacattttttactataactattaataatttattcattcaatattctctaattctaatatatataattccattcaaaaccaatactaatttcttctt

SEQ ID NO: 12637 - DNA, 413 bp, Glycine max
  Clone ID: LIB3094-090-Q1-K1-F8
gttctagatcgcgatctagaactagccaattcactctttttcttctcgccctctgccgtgggaggagtttgtaacatggctgctctaccaacggcggagcttagtgacgcaaatgcaacacatgtagcaagttgtgatgtgagggtgttgcatccagtgttcaaggtttacggtggggccaccgcgttctccggccccgttgtcaccgtgaaggtgtttgaagacaacgtgttggtgagggagcttcttgagacgaaaggcgaaggaagagtattggttgttgatggaggaggaagcttgaggtgtgcattggtgggaaggaatttggcactgattgcacataacatgggttgggctgggattgtggtgaatggctgcatcaaagatgtggatgagatcaatgcaagtgatat

SEQ ID NO: 12638 - DNA, 418 bp, Glycine max
  Clone ID: LIB3094-090-Q1-K1-F9
cccacgcgtccgcccacgcgtccgctagaacttataatagaatactcgtcccacaggcaatgttcttctctctctcctgtcatcacttcatatattcgcaatttctcttccaccatgaaaccctatacccaactgcaatcgctcatccaagccatgtccctcaaccacctcctctccttctccccccgatccaaacctccaacctccaccctctcatccctcccatccctctcttcctcaccctccactttcgctacctccgcctcctcctctccaacccatctttcccccaccatcatgatctacgaccgctccttccactccgtaaaatccaagctccagcagctcaaaaaccccaaccccctctacctcaaacatggatacccccttaccaccctctattaccacacactcatac

SEQ ID NO: 12639 - DNA, 446 bp, Glycine max
  Clone ID: LIB3094-090-Q1-K1-G10
cccacgcgtccggcttcctctgccgcttcctcccccgcggcctccccaagcacctgggctgggccgtcgtcggcgtcggcctctcctacctctccttcggcttctcctccaacctccacttcctcgtccccatgttccttggctacgccttcatgctcctctatcgtcctcgatgcggcatcctcaccttcttcctcggatttggctacctcattggctgccacgtgtattacatgagcggtgatgcatggaaggaaggtggcatcgatgccactggggctttaatggttttgacgctcaaggttatctcctgtgcggttaattacaacgatggtttgctgaaagaggagggtttgcgtgaggctcagaagaagtaccgtttgatcaagttgccttccttgattgagtacattggttactgcctctgctgtggaagtcactttgct

SEQ ID NO: 12640 - DNA, 372 bp, Glycine max
  Clone ID: LIB3094-090-Q1-K1-G11
accaccccttcaacaacctatgccgattgcttacacgcacgctgctcaaacacctacgctcgaacaccttcgatctcctcacttgctaccacacttctccgtcctactccaacctccacttcatcactcgctcttccatccctccgataacatgcacctctatcttcaccgatgccagctcatcaactaataactctaaactctatccaagatcaaaccatgctcatgttataaaatcaaagatacgactgaaaatggtatatttgctgccaattgggaatattctgcatcagaagccaattcttcaaatctgaataacagaacaagcctacgcatgtctcaacaagcaatgaatgcaattagtcacatatc

SEQ ID NO: 12641 - DNA, 434 bp, Glycine max
  unsure at all n locations
  Clone ID: LIB3094-090-Q1-K1-G12
acggttgaatcgtgaaaatgttcagaaaccagttcgacacggacgtgaccacatggagnccctgggggaggctgttccaggtggagtacgctatggaagcggtgaagcagggctcggcggcgatagggctccgatcgaagacccacgtggtcctcgcatgcgtcaacaaggccaactccgaactctcctcgcaccagaagaagatcttcaaggtcgacaatcacatcggcgtcgccatcgctggcctcaccgncgatggccgcgtcctctcccgctacatgagatccgaatgcatcaactataattacacctacgagtcgccgctccccgtcggcagactagtcgttcagctcgccgataaagctcaggtttgcacacagcggtcttggaaacgtccttatggggtttgactcctggtagctggattagatgaa

SEQ ID NO: 12642 - DNA, 371 bp, Glycine max
  Clone ID: LIB3094-090-Q1-K1-G2
cactccttcttttcaatttacctttttatttcctctttgtccttacactcttttactttgtaatggttattataaaacccattcttacatcttcaacattatccttcaaatcctcaaaaatttaagacttacacactattaagtcataacattcaatttcaaaaacacacttcttataattacattaaatttttcaaacaattttatttataaaagattcctccaaaatgtattttatcttcattactattaaaaatataccatttataacataatcaatatccttataacttattaacttaaacaattctttataccataatttttcaatagattttattaaattattttcttcatgcattttacaaaac

SEQ ID NO: 12643 - DNA, 145 bp, Glycine max
  Clone ID: LIB3094-090-Q1-K1-G4
gcgacctgtagacctatttactgtttttgaagaaattgatcccactgttggagtgtctgctcgatgataagttgcgcttgatccagtaacccatgcaatctgtagttacacatatactatagtataacgttcaactacaggtgag

SEQ ID NO: 12644 - DNA, 394 bp, Glycine max
  unsure at all n locations
  Clone ID: LIB3094-090-Q1-K1-G6
gcgcccacgcgtccgcacgttccgagttttctgatcgctcatagagagttcgacgcggcggttggagaagaagattgcaagatgaagttcaacatcgcgagtcccaccactggatgccagaagaagctcgagatcgacgacgatcagaaactacgagcattttgggacaagaggatctcacaggaggtcagcggagatgcacttggtgaggaatttaagggctatgtcttcaaaattactggaggttgtgacaaacaaggattcccgatgaaacagggagtgcttactcctggtcgtgttcgacttttgcttcacaggggaactccttgcttccgtggatatggaaggcgtaatggagaacgtangagaaagtctgttcgtgggtgcattgtca

SEQ ID NO: 12645 - DNA, 446 bp, Glycine max
  unsure at all n locations
  Clone ID: LIB3094-090-Q1-K1-E11
cccacgcgtccgggtggagtcatgacaaagttgattcccagaaacactgttatcccggccgagaaatctcaggtgttcaccacctatcaggaccagcagactacagtctccattcaggttttcgaaggcgagaggagtctcacaaaggattgccgccttcttgggaaatttgatctgtctggaattcctccagccccaaggggtacgcctcanattgaagtgaccttcgaagttgatgccaacggcattctaaatgtgaaggcagaagacaagggcactggtaaatcagaaaagaatcacctttccaaacgaaaggggacgctttacccgggaggaaattgagagaatggttcgcgaagcanaggagtttgcagaggaagacaagaaggtgaaggagaggatcgatgctcgcaacagtcttgaaacctatgtatacaacatgaaga

SEQ ID NO: 12646 - DNA, 394 bp, Glycine max
  Clone ID: LIB3094-090-Q1-K1-B8
cccacgcgtccgcccacgcgtccggaagaaaggaatataccttacggatggtggaatcaaggagcatgtgggattgcatagtgcgggtggtgacgaagatggaagacaaagagagtgagagagagaaaaatcttcgctttatgtcaatggcacgaagcaggggtttttacagaagtgagcaacgacgccagatatgagaaaagtgagtttatttggggtcatatttgtaaaaagtggttttgtaattataccctctaattcaagagtgaagaaacaagggtgggatggaaatataaatagtacaatttggtcctagtggtggcttaccctttggcctctttttctaattcagaattttttttaaatatataaaaagtgggtgatatgtttacct

SEQ ID NO: 12647 - DNA, 483 bp, Glycine max
  Clone ID: LIB3094-090-Q1-K1-B9
attcccgggccggcccaggcggacgcgtctgctcacgcctgggttaacctattttttctgttttttgaagaaattgtatcccagctagctggagtttactagctcgtatgataagttgcgctttgatccaagtaaaccaaaatgcaggctgttagttacacatgatgactatagtataacgtccaaacttccaagggagagaacttctgttgttaccatacttagggatccagttgaccgtgtttttagtacttatgaattctcaatagacgttgcagctagatttttggtgcatccaaacttgacgtccgcaacaaagatggctttacgcctaatctctaatactaaaggagtaagcacactgcatatctggccttggaagtatctggttccatggatgagggaagacctatttgctaagagagtagctaggtacagtatgcgactgaatatcattgaaagcaatgattcttatgacatgga

SEQ ID NO: 12648 - DNA, 447 bp, Glycine max
  Clone ID: LIB3094-090-Q1-K1-C10
cccacgcgctttctcacgcgttcgccccagaaatatcatatatcgtatcatccttaagagaagctttattttgtgtcaattttgcactgtttaatttctacaaatatcaaagatcccccttcctcttttagtcaaaccatatttcatatttgcaccaaattttttttaccaagatttgtaagatcacaattcacaagccccaaataagaaaaggggtaaatgaatccttgaaaggttcatttttgacaaatgcagttgaagcaaaattggattaggtaatagttatccttcaaggacataaggagggctatataaacctttcttctgatgttggtgtgaaagtggctttgtgaaaaaggacaaaggcttgttcagcgatcataacattgaagattttgtattcacacgtatgaagagggataataatattggaggtgtctcgattga

SEQ ID NO: 12649 - DNA, 341 bp, Glycine max
  unsure at all n locations
  Clone ID: LIB3094-090-Q1-K1-C11
cccacgcgtccgcccacgcgtccgaaaacagagtagcctacacgtatcagagagagggagagaagagagagaatatttctgttcgtgcagatagatagatagatggctcggagctccacaagaatgaaatgggtctccatcttcacacttctattcctctcccactcgcccctcacaaccttcgcagaagatgggctagtggcgaatggagattttgaggttagcccatcaagtgggttccctaacgaggcgattgtngagggccccagcgaggtcccaaactggaagtcaaacggcaacgttgagctagtggaatcggggcaaaaacagggtgggatgat

SEQ ID NO: 12650 - DNA, 463 bp, Glycine max
  Clone ID: LIB3094-090-Q1-K1-C12
ggccgagcgacgcgtccggctatttgtttgtgattctctctctttacactatccttgctctagtcttcctttgggggccttgccctttcttcgggcaaaggtgagtttccattttgcttccgagttgacttgctcaatatcccaggataaagtgtgtgttcttatgaaggctgcagtgctatggaggccatagattttatgctggagcttgattagataccaattttggtgaatcatcttgatagcttggtcttggaattttggtttgggggggtgatgaaaaaggttaatgggcgcccaaatttcaggagttggggtaataactgttaggttctatctgctgatcctatgtggcatggcttgtgggactgacagtgatatatcctgctggaaaagtgtaaagagaacacttgacgacccctacaattatttgcaatcctggaatttcgataacaatacagaa

SEQ ID NO: 12651 - DNA, 119 bp, Glycine max
  Clone ID: LIB3094-090-Q1-K1-C4
gtaatgtaggtgttccaagcttcaaggtaggtaataatgttaggtccaagtagatgtgtgggggagttgtaatacaatgattctaatatcctatctccaccattcatattaatatttgc

SEQ ID NO: 12652 - DNA, 448 bp, Glycine max
  unsure at all n locations
  Clone ID: LIB3094-090-Q1-K1-C9
cccacgcgtccgagaaggcctgggcttagttgataagcataactgggtgaggaagagagagggagagtgaagaagatggcgtcgagcggagcggtaccgttttggagggcggcggggatgacgtacataacatactcaaacatatgcgcgaatctgctcaggaattgcctcaaggaaccctacaaggccgaatccctctctcgtgagaagctccattttgttctctccaaatgggtcgacgccaagcctgaaaaacctactattcgttcagacaccccagagcagtgatctggaataagtgggaagctataaatgcatanatctttgagatctggaagttcattgtcattttgaacctttctgtgatgtttaattcctttgtttttttctctccatgaaatggaacatgcactggattttgatttgcacggttaatctttgtataata

SEQ ID NO: 12653 - DNA, 450 bp, Glycine max
  unsure at all n locations
  Clone ID: LIB3094-090-Q1-K1-D11
aaacacccttgtcgaccacaccaaaattaaaaacataaaaaagcataaaagcacaaggggagataaaaaagggaaaataaaacattttgaagtcatatttgcacacttgattaaaggctgtcgtcccttgtgacggatgcgtggggtgctaataccttccctgtgcgtaaaaacaactcccgaactattcacacttaaagttcgtagaccacaccttttcaattttcccgacgcttttctcanataaaagttggtggcgactccgcgcattttcctttcatggaagacgcacttgtgagtnccgcattcgcctcccgtcaaagggtaggttgcgacagtacttgccctcccgccgaagggtaggttccttaattgaattaactaataacaaaagtgaaactaaggctaaaataaactcacaaatcaagctttgtccataaaaatcactta

SEQ ID NO: 12654 - DNA, 443 bp, Glycine max
  Clone ID: LIB3094-090-Q1-K1-D12
tcgacccaacttccgaacacccttgtacaccacaccaaattttattacataaaaaagcataaaaccacaaatgtacgttttaaaaaaaaggataagccattttcaactcatattttcacactttattaaaacctttcatcccttttcactcatacctttttttctaataccttccctattcataaaaacaaactcccaactattcacacttaaatttcttacaccacaccttttcaatttttcccacactttcctcaaataaaaaatcattcctactccacacattttacttttatttaaaactcacttgtcattccctcatcttcctctcctcaaatgttaactttcaacaatactttaccctcccccaaaatattaacttccttaaattaattaactaataacaaaactcaaactaatgctaaaataaactcacaaatcaa

SEQ ID NO: 12655 - DNA, 439 bp, Glycine max
  unsure at all n locations
  Clone ID: LIB3094-090-Q1-K1-D2
cccacgcgtccggaaaagggaagtaacttatgtgaataatatgaagggcggtcaagaaatcgcaaaaacaccgtcctcttctaagagaacactaagtcagggttcagttgatatatatgctgctcagtgcaaaaattgcttgaaatggagagagattgatacacaggaagagtttgaagagattagaagtaaagttgctgaggaaccttttctttgcagcagaaaggctaatagttcctgtgatgaacctggtgatattaaatatgattcctctcggacatgggtgattgacaagcctaacctcccaaagactccacaaggttttaagaggagcttggtgcttagaaaagattactccaaattggacgcttactacatcacacctgcaggcaaaaaactgagaacccgcantgagattgctgcgtttctaaaagataat

SEQ ID NO: 12656 - DNA, 373 bp, Glycine max
  Clone ID: LIB3094-090-Q1-K1-D3
cggacgcgtgggcggacgcgtgggcactactgccgcagaagagaccgaaacgccggcttatgcatctccgaacaccgaatatggaagaaagaggaaaccaacacaaacacgaacaagaagaagaagaagaaatcgtttgcttagacgcgtcgttcttcgtcgatgacaattaccagctgacgaaattcacgttcggttcgcaagacattcagctcttctgtctgcattctgcttccactgattttgatttgacagggcagctggtttggccttgagccatgttgctgaatgagtatctttcaaaaaatgttaacctgcttcagggttgcactgccattgaattaggttctggtggtggtattaccggaatact

SEQ ID NO: 12657 - DNA, 410 bp, Glycine max
  Clone ID: LIB3094-090-Q1-K1-D4
atcgaaaccttaagtttcggatcaggtctgtatcaatctggttggtagaacctttggtcttagagagtcaagttttatgtctgaattagacgatcaaattcctactgccttcgatccttttgctgatgcaaatgctgatgactcgggtgctgggtcaaaggagtatgtgcatattcgcgtacagcagcgaaatggaaggaaaagcctgacaaccgttcagggattgaaaaaagaattcagctataacaagatacttaaagatgttaagaaagagttctgttgcaatggaacagttgttcaggacccagaactaggacaggttattcaacttcaaggtgatcagaggaagaatgtttctaccttcctggtccaggctggtatcgtgaagaaggagcatatcaagattcatg

SEQ ID NO: 12658 - DNA, 366 bp, Glycine max
  Clone ID: LIB3094-090-Q1-K1-D5
ctcaggaggagaataaggatgtctcacaggaagttcgagcacccaaggcacgggtcactgggatttctccccaggaagcgtgctgctcgtcacaggggaaaagtgaaggcattccccaaggatgacccatccaaggcacccaagctcactgcattcttgggttacaaggctggtatgactcacattgttagagaggtcgagaagccaggatcaaagcttcacaagaaggaaacatgtgagcctgttacaattattgagacccctccaatggttattgttggtgttgtgggttatgtgaaaactccccgtggtctccgaacattgaacactgtatgggctcagcacttgagtgaggaactgaaacgt

SEQ ID NO: 12659 - DNA, 374 bp, Glycine max
  Clone ID: LIB3094-090-Q1-K1-D6
cgcaccagtttcaccgcacgaatatcttgttgtttggagcgatccgagaaaaactctgtaagcatgttggtttaccaggacctccttacaggtgatgagcttctctctgactccttccgttacaaggaaattgagaatggaatgctgtgggaagttgaggggaagtgggttgttaaaggagcagttgatgtagacattggtgcaaacccttctgctgagggtggaggagaagatgagggagttgatgatgcagctgttaaggttgttgacattgttgacacattcagacttcaggagcaacccgcattcgataagaagcagtttgttaccttcatgaagaggtttatcaagaatttgactcccaagctcgatgc

SEQ ID NO: 12660 - DNA, 346 bp, Glycine max
  Clone ID: LIB3094-090-Q1-K1-D7
ggctacttttgattgcttgatgaaaacctatggattcctgacaccagaattctggaaggaggctcggttctccaaatctccattccaagagtacacagatctactggcaaaaccaacaggaaagactctaatcttggaggaggaaagggtggatgcttgatttgctagttttgctttatggatgttttaggaactttattactttacatactttgttggttctgtgctttacttttggttttgatagacggtatgtctctgtatgcattttgattgtttccaagttttaattgactgcaaaaaaaaaaaaacacaaaacaataaacaatatataaatacaactttt

SEQ ID NO: 12661 - DNA, 251 bp, Glycine max
  unsure at all n locations
  Clone ID: LIB3094-090-Q1-K1-E10
atgaaaaaggagactgagtcacgtgtttgctccacttattgaattaatacaatgcgggaagggtttacgaaaatgggatgtgtggaccagtgcatgtataatggctctaacattaccttactcatatactatcaattatggttgttaaatcttattaacagtgaactaacctatggacacgagcttctaaaactatttgacacccngattgtctgtagcttggctactctacatagcttactgcatcatcg

SEQ ID NO: 12662 - DNA, 310 bp, Glycine max
  Clone ID: LIB3094-090-Q1-K1-B7
gtgcgttcttagaagagctcaatcctcctaacataattcttggtcatggaaaagctaatgggatgggccagctcaagccgaagctcataagtcaatttgctgatcgcaacacttaaattcttacttcaaaaaactggcaatctggtgaaatgtatttcaattcgcagaaaatggccaaaaccatatggaagctggctgagaaaacaccacaagttggggaaactgtcaaagggttgcttgtaaaaaaaggctttacatatcagattatggcagctgatgatctccatgtcttttcacaactatcaacagc

SEQ ID NO: 12663 - DNA, 424 bp, Glycine max
  Clone ID: LIB3094-089-Q1-K1-H3
cccacgcgtccgatttattctataattggtgcctatgttataccaatcttagttccggaatgtcaattgaaaattactgtgaaaacaagtgccaaagccagaggtttgttgagtctttttttatagttttttttactctactctagagccattctaagtttctcttcgagtcctagcttgcttctatgtccttttcattgctttaattgttgaataatccttgaaaaattgtcttgttaaaactccattggtttagctttcatttcatttttttttagtctttggttattgcttgtctctttgtttccttgtttgtgagttgccacatagggaattggaaaggaggattggtgccatcccttgaagaatttgagtcaagaagcaaggggccaaccaccttaagagctattggactaagaagcac

SEQ ID NO: 12664 - DNA, 312 bp, Glycine max
  Clone ID: LIB3094-089-Q1-K1-H4
tcccactcgtcctcccactccttttattttttgaacaaaactactaaaccaacgtcttcttaatatgtatccattcccagttccaatttccttccaatcatctcttaaacaaactaatcctcaatacaatactatctaatctcataaactagtacagatacttataactaacctaccttcatatcatatccaatcacaattttgtctacaacattccatatatcacctaataaccattattaattaaccatacactattcaaaacttgccttaatccttacttcaatactccttcttctaacacatattacc

SEQ ID NO: 12665 - DNA, 236 bp, Glycine max
  Clone ID: LIB3094-089-Q1-K1-H5
cccacgcatctcaccactcgtcctcccacacatactactttatgaccaacaatcctctaacaacgggatgttgctaccattccattcacagaccatgccactcccatacaacgactcaacaaactactcaacaattaactactatctaatatcatacactttttaatgatacccataactgctttctaatcctaaagataaaatacatctgtcccattcctagaaaagcttgtcat

SEQ ID NO: 12666 - DNA, 395 bp, Glycine max
  Clone ID: LIB3094-089-Q1-K1-H6
caggttctgagctgaaaaagacattcctttatgacttccatgttgctaatgtgggaggattataccatgggcgggatggagcatgccaatccaatacaacgactcaattatggactcaacccttaactgtagagagaatggtcgccttttagatgttctccatatgtgcggtctaaacctcaagggaaaggactctgtgccattccttgaaaagcttgtcattgcagatgttagctgagcttgcccctggaactggttcaatgactgtcttcacaaatgaaaaaggatgggcaattgatgattcactgattaccaatgtgaaggatgatcacatatactaggttgagaatgctatatgtagggacaaatatctggctcatattgaggaacatatg

SEQ ID NO: 12667 - DNA, 240 bp, Glycine max
  Clone ID: LIB3094-089-Q1-K1-H7
cccactcatccacacacacattctcccacacaaccaatttcctacctcacccttccaatatacaagaccgacataatacaatcactggcagaactatcactctccaacactctaactcacataccatatatcaaatcaataccatctcttaaaacacaccaatgatactaacacctcatccacgacccatttattctcacaacaaactctactatcctctacccactactcattataaca

SEQ ID NO: 12668 - DNA, 341 bp, Glycine max
  Clone ID: LIB3094-089-Q1-K1-H8
acccactcatccaaccacacatcccatttattctataattttagtctatgttataccaatcttaattccggaatgtttattataaaattactgtcaaaacaagttccaataccataaatttcttaattcttttttcataattttttttactctactctagacccattctaagtttctcttctattcctagcttacttctatgtccttttcattgctttaattgctgaataatcctttaaaaatcttcttcttaaaactccattcctttagctttcatttcatttttttttactctttccttattacttttctcttatattccttccttttaaatttccaca

SEQ ID NO: 12669 - DNA, 342 bp, Glycine max
  Clone ID: LIB3094-090-Q1-K1-A1
aaacacccttgtcgaccacaccaaaattaaaaacataaaaaagcataaaagcacaaaaagacgtaaaagagggaaaataaaacattttgaagtcatatttgcacacttgattaaaggctgtcgtcccttgtgacggatgcgtggggtgctaataccttccctgtgcgtaaaaacaactcccgaactattcacacttaaagttcgtagaccacaccttttcaattttcccgacgctttcctcaaataaaagttggtggcgactccgcgcattttcctttcatggaagacgcacttgtgagtcccgcatcgccctcccgtcaaagggtaggttgcgacagtact

SEQ ID NO: 12670 - DNA, 440 bp, Glycine max
  Clone ID: LIB3094-090-Q1-K1-A10
cgaacgcgtgggagaacctatactcattgttttttgaagaaattgtatcccagctatgtgcgctttcctctctcgtatgattagtcacactcagatccatgtaaaccaaaatgcaagcttatatttacacatgacgactataatataacgtccaaacttccaagggagaaaacttctgctgataccatacttaaggatccaattgaccgaatttttagtacttatgaattctcaatagaggttgcagctagatttttggagcatacaaacttgacgtccgtaacaaatatggctttactcctaagctctaagactaaaggagtaagcacactggatatctggccttggaagtatctggttccatggatgagggaaaacctatttgctatgagagaatctacgtacaatacgggactgaatatcattgaaagcaatgattc

SEQ ID NO: 12671 - DNA, 197 bp, Glycine max
  Clone ID: LIB3094-090-Q1-K1-A12
catccaagaacaacaagaggaacactaacaatctttttttcttcagaagaccaatcttcctagggacggcttcattaaaaagcttggcgatcatttttacaatcctgcccttgaaaacgatgagtccaatactctctcgtcgttgaatactactcgtggtcacaaatttcttaataatgctcaacttactaacaaaa

SEQ ID NO: 12672 - DNA, 445 bp, Glycine max
  Clone ID: LIB3094-090-Q1-K1-A4
atcgaaaccttaagtttcggatcaggtctgagcaatctggttggtagaacctttggtcttagagagtcaagttttatgtctgaattagacgatcaaattcctactgccttcgatccttttgctgatgcaaatgctgatgactcgggtgctgggtcaaaggagtatgtgcatattcgcgtacagcagcgaaatggaaggaaaagcctgacaaccgttcagggattgaaaaaagaattcagctataacaagatacttaaagatgttaagaaagagttctgttgcaatggaacagctgttcaggacccagaactaggacaggttattcaacttcaaggtgatcagaggaagaatggttctaccttcctggtccaggctggtatcgtgaagaaggagcatatcaagattcatggtttctgagcggttggagtctcaagtgtcaagtctt

SEQ ID NO: 12673 - DNA, 350 bp, Glycine max
  unsure at all n locations
  Clone ID: LIB3094-090-Q1-K1-A5
cccacgcgtccgcccacgcgtccgcagggaagttgtggaagttgttgggcgttctgaacgggggccacagtggaagcaataaacaagatagtgacagggaagtttgtgtccttatctgaacaagaacttgtggactgtgacagagcctacaatgaaggatgcaatggtggccttatggactatgcattcgaattcatcattcaaaatggaggcattgacacagacaaagattacccataccgtggctttgatggcatctgtgatccaactaagaaaaatgcanaggttgtgaacattgatggtttcgaggatgttccaccgtatgatgagaatgccttgaagaagctgtc

SEQ ID NO: 12674 - DNA, 436 bp, Glycine max
  unsure at all n locations
  Clone ID: LIB3094-090-Q1-K1-A6
atggctcccaaaccgcctagtacgggtctgtttgttggactgaacaagggtcacgtcgtcagcaanagggaattgcctccacgcccctcagatcgtaaggggaaaacaagcaagagggtgcactttgtgaggaacctcataagagaggtagccggttttgcaccctatgaaaagcgtataactgagttgctgaaggttgggaaggataagagggcactgaaggttgcaaagagaaagctcggaacacacaaacgcgcaaagaagaagcgtgaggaaatgtccagtgttctcaggaagatgagggctggtggtgctggagacaagaagaaataagtcttatttactgttttccagattcactagatggacctgtgtattgatggacgagctttcatatttttgctttgggtcaattaggttacttcaagaatttggt

SEQ ID NO: 12675 - DNA, 298 bp, Glycine max
  unsure at all n locations
  Clone ID: LIB3094-090-Q1-K1-A7
ggctacttttgattgcttgatgaaaacctatggattcctgacaccagaattctggaaggagactcgcttctccaaatctccattccaagagtacacagatctactggcaaaaccaacaggaaagactctaatcttggaggaggaaagggtggatgcttgatttgctagttttgctttatggatgttttaggaactttattactttacatacttntgtggttctgtgctttacttttggttttgatagacgtatggctcttgattcattttgaatggttccaaggtttaaatgactggc

SEQ ID NO: 12676 - DNA, 420 bp, Glycine max
  unsure at all n locations
  Clone ID: LIB3094-090-Q1-K1-A9
cggacgcgtgggagaacctattttcactgttttttgaagaaattgtatcccagctggctggagtgtcctcgctcgtatgataagttgcgctttgatccaagtaaaccaaaatgcaggctgttagttacacatgatgactatagtataacgtccaaacttccaagggagagaacttctgttggtaccatacttagggatccagttgaccgtgtttttagtacttatgaattctcaatagaggttgcagctagatttttggtgcattcaaacttgacttgccgaacacaaataggttgactcctcacctattttacttaagagtaagcacactggatatctggccttggaagtatatggttccatggatgatggaagacctaattgctaggagagaagctaggtacaatangggactgaata

SEQ ID NO: 12677 - DNA, 443 bp, Glycine max
  Clone ID: LIB3094-090-Q1-K1-B10
acgcggacgcgtgggagaacctattttcactgttttttgaagaaattgtatcccagctgtgggggttgtcctcgctcgtatgataagttgcgctttgatccaagtaaaccaaaatgcaggctgttagttacacatgatgactatagtataacgtccaaacttccaagggagagaacttctgttgttaccatacttagggatccagttgaccgtgtttttagtacttatgaattctcaatagaggttgcagctagatttttggtgcatacaaacttgacgtccgcaacaaagatggctttacgcctaagctctaagactaaaggatgtagcacactggatatctggccttggaagtatctggttccatggatgagggaagacctatttgctaggatagaagctaggtacagtatgggactgaatatcattgaaagcaatgattc

SEQ ID NO: 12678 - DNA, 298 bp, Glycine max
  unsure at all n locations
  Clone ID: LIB3094-090-Q1-K1-B11
acgctcaccagtttcaccggaccaatatcttgttttttttaactatccaagaaaaactctatctggatgtttttttaccagtacctccttacacgtcattagcttctctctaactccttccgctacaagngaaattacacaatgagaatcgcatatgaataaactttaccaacaaatcgaattattaaaacgagcacttgatctatacattggtacaaacccttctacttacattttacgataagattatggatttcatcatccaccttataaacttctttacattgattacacattc

SEQ ID NO: 12679 - DNA, 208 bp, Glycine max
  Clone ID: LIB3094-090-Q1-K1-B12
cgcctacgctcatttcactcattcatctttgttcactcaatctcatcataatccttatggtcggtttaataagatgccgatcagaaacatcctcgtctcaaggcctgaaaaggccactcaccccaacacattgaaagcctctttggctgacttcatctcaaccttcatctatatattctccgactcacactcccgcatcgcctacaac

SEQ ID NO: 12680 - DNA, 350 bp, Glycine max
  Clone ID: LIB3094-090-Q1-K1-B4
agaaaatgtaattttcagcactgtccaggaaatttaaggattgtaattctttatgcgctcatgttattattaaaaaaaaaaaaaaaaaaaaaaaaaaaaaaaaaaaaaaaaaaaaaaaaaaaaaaaaaaaaaaaaaaaaaaaaaaaaaaaaaaaaaaaaaaaaaaaaaaaaaaaaaaaaaaaaaaaagggcgcccctttaaaagaatcaaagttaactaacccttgcatccaacgtaaaaccttttaaaaagggtaaccaaaattaaattaattgcccgtctttaaaaaactttgaaactgaaaaaaccttgccttaaccaaattaaatccctttgaagaaaatcccctt

SEQ ID NO: 12681 - DNA, 362 bp, Glycine max
  unsure at all n locations
  Clone ID: LIB3094-089-Q1-K1-F3
tttcccacatcacattctacaaaatgtaccgtttcattcaacctatggcaaccatanaaaaattcttttcaatttcctacatctttcaaaccccctcacacatactattcaattcaacttactcactccacatcaaactttttcataatttaatctattaaatccacaaacacacctcattctcaaaaatttcctatataatctcatctacaattacaaacctactttttttttaacttcttataaaatatattattcaatttatctcttttaataattctatctttatcatgtctcctttaattttattttattcacaataaattatcaactttttatttacttttaataaataaaaattt

SEQ ID NO: 12682 - DNA, 383 bp, Glycine max
  Clone ID: LIB3094-089-Q1-K1-F5
cccactcatccctttaataactacacatccctcactctttcacaccaaccttacaccaagcacaatggccaagctcctaactcccaaaacctatctcgtctcatattctaccctctctactctccatccatatcaccaacatccacttcgaatagcttttctataactcacagtaaaatcgattacataaaccacactaaactaaagatcataacttctctattcactgaaactacacctaatccaacgaaaacacacactcttatcacaaacttattcacctactatacacttactcaacttatcctatttcagctgagtacccctaattcaatatcactacatatacacttatacatcaactcactcttaatctcaaacac

SEQ ID NO: 12683 - DNA, 269 bp, Glycine max
  Clone ID: LIB3094-089-Q1-K1-F7
tcttattctcaaagttatccatcgtactcaatccacactacaactcactcaccttatactgaactttttccatcatcataaccatcatatcattatcaatattaaatcaccactcacacaaatacacattctcaccctactctagtcttaaatacaaccaacacaatttctctataacctattttcatcttcatctttattctacttacttctttcttaaatttataccaccccttcttattacctctaatctatcttcattcaaatta

SEQ ID NO: 12684 - DNA, 223 bp, Glycine max
  Clone ID: LIB3094-089-Q1-K1-F9
tcaaatatcattccaaatattatcactttattaacaatactcatctgcttctacttactaacccccctcacaatacgattccaattctcatccacattgtcaaacccatttatgaatccctcatttctcttcactacattcaataactctgtaattacacaaaatcccttctatccttcttacccttaccatataactcatactagattctagacttattatc

SEQ ID NO: 12685 - DNA, 428 bp, Glycine max
  unsure at all n locations
  Clone ID: LIB3094-089-Q1-K1-G1
gcaagtgtaacccaaaaccctagcggcgcctgctttcttcgttcgtcttttgcatcagccatgaggatggagtctcaggtgaagcatgctcttgttgtcaaagttatgggtcgtactggatccagaggacaggtgactcaggttagagtgaagtttttggatgatcagaaccgtcatatcatgaggaatgttaaaggaccagtgagagaaggagacattctcaccctactcgagtctgaaagggaagcaagaaggttgcgctagagggtatttttttcttgatctttatggtagttagttggtgctaaaggttatagcaccctgtcttggtgtcttggatctattttcattcaaattatgggttgaattttggatgtttggagtttaatatatgattttgaattatggcttanattttggattaaaaa

SEQ ID NO: 12686 - DNA, 399 bp, Glycine max
  Clone ID: LIB3094-089-Q1-K1-G10
gccacgccctcggtcaattcctattatttaataatctggagagtattgatatatcacgacaggttaaaccattaggcaggcaagatatacatttaactattattctcattgttagcatcattatgctactttacactaacatcatttgccaaaactgctactccaccatctctgatcccaacttcagcaccaacccctacaccagacttcgctaacctcactgagttactaagtcatgctcatccataccacaccttccttggatacctatactccactaaattgattcacacttaccataaccaacatatcatcactgactaaggactcaccatctttgttcctaaagacagactcttcactgctctacagaaaactaccctatacaacatcacctct

SEQ ID NO: 12687 - DNA, 445 bp, Glycine max
  Clone ID: LIB3094-089-Q1-K1-G11
ctttgacattcacattcagaacacaagcagaatgcagagaggcacgccggtgagaaagccagacacgaacacctccgatctcctcacttggtcggaaactcctccgccggattccgccgccgccgccaccactcgctctggccagccttccgatagaatcagtaaggttctccacggcggccagctcaccgacgaagaagctcagacgctagccaagagcaaaccatgctcagggtataaaatgaaagaaatgactggaagtggtatatttgctgccaatggggaagattctgcatcagaagccaattctgcaaatttgaataacagaacaagcatacgcatgtgtcagcaagcgatgaatggaattagtcagatatcattcagcactgacgaaagcatttctcctaaaaaacctacctcaatacctgaggtagcaaagcagcgt

SEQ ID NO: 12688 - DNA, 309 bp, Glycine max
  Clone ID: LIB3094-089-Q1-K1-G12
gttgaatcgtgaaaatgttcaaaaccacatccaacacggccttaaccacatgaaccctggggggaagcctgttcaagggggagtcccctttgaagccggtgaaccaggcttcgccgccaataggcttccaaccgaaaaccaacgtggtcctcgcatccttcaacaaggccaactccgaactttcttcgcaccagaagaagatcttcaaggtcgccaatcacatcggcgtcgccatcgctggcctaaccgccgatggccgcgtcctctcccgctacatgagatccgaatgcatcaactataattacacct

SEQ ID NO: 12689 - DNA, 104 bp, Glycine max
  Clone ID: LIB3094-089-Q1-K1-G2
atctcacaatatgcttcttcttaagtttcatgactcccactaaacacaaacgggtcgtacaacttaaccctgagagagccctaccattttccattttaaattca

SEQ ID NO: 12690 - DNA, 408 bp, Glycine max
  Clone ID: LIB3094-089-Q1-K1-G3
ttcagacttccttttcttatttccaagtttttcaaacaatgtggagttgttaacattaagcgttggccagcacaattgatgtccaacttgctctcaaccttaccatctaaaatattacttctatgcaaattcgtatgcaagtcctgattcaatctcataaccgatcctcattttgtttccaattactatgttttctacaacagtcttcaaagccaatatgatcatctcttggtaattcgaagaccctttttttctgtcctcaaaacttacatttctgctctttcttgtaacaccaatgaccccaaaaagcatgtttcttctgatgttctaaaccctccctatcaatacaactctgaccacaaatactgtaccgaaatctttgatcctttcaatttcatatacttttta

SEQ ID NO: 12691 - DNA, 420 bp, Glycine max
  Clone ID: LIB3094-089-Q1-K1-G4
acgcatgcgcggacgcgtgggcagacttcccattccaatttccaagtttttcaaagaaggtgagtggtgagcattgagcatttgccaggagaattggtgtccaacgtgctctcaaagttaccatctaaagtggtgcttctattccaattcctgtgccaatccctggttcgatctcataaccgatcctcattttgtttccaattactatgttgtctacaacagtcttcaaagccaagaggagcatctcttggtaattcgaagaccctttttttctggcctcaaaacttacattcctgttctttcttggaacaccaatgaccccaaaaagcatgtttcttctgatgttctaaaccctccctatgaatacaactctgaccacaaatactggaccgaaatcttgggtccttgcaatggcatata

SEQ ID NO: 12692 - DNA, 418 bp, Glycine max
  Clone ID: LIB3094-089-Q1-K1-G5
cggacgcgtgggcagacttcccattccaatttccaagtttttcaaagaaggtgagttgtgagcatggagcatttgccaggagaattggtgtccaacgtgctctcaaggttaccatcgaaggtgttgcttctatgcaagtgcgtgtgcaagtcctggttcgatctcataaccgatcctcattttgtttccaattactatgttgtctacaacagtcttcaaagccaagaggagcatctcttggtaattcgaagaccctttttttctggcctcaaaacttacatttctgttctttcttggaacaccaatgaccccaaaaagcatgtttcttctgatgttctaaaccctccctatgaatacaactctgaccacaaatactggaccgaaatcttgggtccttgcaatggcatatactttttag

SEQ ID NO: 12693 - DNA, 411 bp, Glycine max
  Clone ID: LIB3094-089-Q1-K1-G6
caccgcacgaatatcttgttgtttggagcgatccgagaaaaactctgtaaacatgtgggttgaccaggacctccttacaggtgatgagcttctctctgactccttccgttacaaggaaattgagaatggaatgctgtgggaagttgaggggaagtgggttgttaaaggagcagttgatgtagacattggtgcaaacccttctgctgagggtggaggagaagatgagggagttgatgatgcagctgttaaggttggtgacattgttgacacattcagacttcaggagcaacccgcattcgataagaagcagtttgttaccttcatgaagaggtttatcaagaatttgactcccaagctcgatgcagagcaacaggagttgtttaagaagcacatcgagggagcaactaaata

SEQ ID NO: 12694 - DNA, 398 bp, Glycine max
  Clone ID: LIB3094-089-Q1-K1-G7
attcccaccgcaacccacccatctcatctacccctgctcacactcaccattctttattacatctatttcactaatggtgggaagataacatcaaacatttgccataacattccaattcaatcctactcttaacttttccatctcaacctctataacttctattcactttcttacactttttctaattccaacttataaccgactctcactttgtctccaattattatacccattacttcatactctaaaccctacataaacatctcttcttaattctaaaactctttctttcactcctcaaaccttacatttatgatcttcctttgaacaccaattacccctaaaagcatattacttctaaatatctaaaccctacctatcaatacatctctacacac

SEQ ID NO: 12695 - DNA, 299 bp, Glycine max
  Clone ID: LIB3094-089-Q1-K1-G8
cgcgtccacagcgcacgaatatcttgctgatcgtttcgatccgagaaaaactctgtaaacatacggactgttcaatacctccttacgggtgacgagcttttctcttactccttccgttacaagctaattccaaatgacatgctactcaaagttgagggaaagtgttttattaacagagcagttaatttatacattattgcaaaccctcctgctgagaatgaaacataatatcactactctaatcatacagctaatcaagatgcttacacttgtgacacattcatacttcatcatcaacc

SEQ ID NO: 12696 - DNA, 133 bp, Glycine max
  Clone ID: LIB3094-089-Q1-K1-G9
cccacacatccgcccacacatcctctataacttagaatagaatactcgtcccacacgcaattttcttaactctctcctctcatcacttcatatattcgcaatttctcttccaccgtgaaaccctacacccaac

SEQ ID NO: 12697 - DNA, 427 bp, Glycine max
  Clone ID: LIB3094-089-Q1-K1-H1
gcctcagatgctgagctgaaaaagacagtcctttatgacttccatgttgctaatggagggagagatggtgccatttgctggatggagcatgccaatccaatacaaggactcaattatggactcaacccttaactgtagggagaatggtagcctttttgatgtttcccatatgtgcgggctaagcctcaagggaaaggactctgtcccattccttgaaaagcttgtcattgcagatgttgctgggcttgcccctggaactggttcgttgactgtcttcacaaatgaaaaaggaggggcaattgatgattcagtgattaccaaggtgaaggatgatcacatatacttggttgtgaatgctggatgtagggacaaagatctggctcatattgaggaacatatgaaggcattcaaggcaaaaggtggtgat

SEQ ID NO: 12698 - DNA, 68 bp, Glycine max
  Clone ID: LIB3094-089-Q1-K1-H11
tattacacatccttaatcccgaatatgaccctccctgtatctgaccatccagcgcagaaaatgtgaca

SEQ ID NO: 12699 - DNA, 390 bp, Glycine max
  Clone ID: LIB3094-089-Q1-K1-F2
agccacgcgtccgctggtctactttgagtcttcttgatacttatttgtctccttgaactcaaacatggcagatgatgtggttctgctagaggtctggccaaggccatttgggatgagggtcaagattgcacttgctgaaaagggtatcaaatatgagtacaaagaagaggacttgatgaacaagagtcctattttactccagatgaaccctgttcacaagaagattccgggtctcatccacaatggcaaacccatttgtgaatccctcattgctgatcagtacattgaagaagtttggaatgacagaaatcccttgtagccttctgacccttaccagagagctcatgctagattctgggctgattatgctgattagaagatatatgatct

SEQ ID NO: 12700 - DNA, 412 bp, Glycine max
  Clone ID: LIB3094-089-Q1-K1-D5
gaagttgccagagtgaacaaatcgcgctagacttggcattggatttagaggagcttggccacctccacagcatggccggaagacctcgaaccctctctcttctctcctccgaaattcgtaacctcgaaaagttatcgtcagaggaagcttctgcgcagattccggcgccaatttcgaccggaactaaagtggcaccttcacctgcgctgaagtatgcggcactcgcatcgttcagttgggaccaccatagtgacaaagctaagatatatgtgttaatggagggaatcgatgagaataacgttgaatccgagtttaagtcgatgtcattcgatgttaagttccatgatgttcaaaggaagaactaccgatgtgcaatatcataattgcacaatgagatactaccagaaaaatg

SEQ ID NO: 12701 - DNA, 366 bp, Glycine max
  Clone ID: LIB3094-089-Q1-K1-D6
tccctctggagccacacatcccgagacacctaatgtgaaataccactatttctttcattacattacttattccattaatgataggtttaatactagctatatctttatacccaacgtcacactctccccacatcaatcatcatcgtatgacattctccacattagtaactcagaataatccctctacacatacattaactataccgcagccgatcatacactaactctccaacacatcaaacattgctctctccatatggttaacaagctatttaacaatcataaacagtcttaatccaaacttaataatacctttctatcactgctttatcctattgaaaactacaaactatatgtatatctcac

SEQ ID NO: 12702 - DNA, 446 bp, Glycine max
  Clone ID: LIB3094-089-Q1-K1-D7
ggaataaccgggcgggagccacgcgtgcggcttcctcctcttactagcctttcctttcagtccattgattcagtgggtgcagctggggctaatccgagctagagccggatcagcgtctacacaccgtctgagaacaagatgattgtctgcttcgacgtcttcagtcaccagaacaatccgttgtacatacagagcttcactgaggccgatgatgctctcaagctccaccacatcatccattgctcgctcgatgtgatcgacgagcgagtgaacaattctaaaaagtcttggccgatgcttaatgatacgtttttgtgactgctatatcctattgaaaactacaaagtatatggatatctgactaatacgaaagtgaaatttatctaggtgaccacggatctggatgttaaagatgctcatggtaaagaatttttcaagatgttcca

SEQ ID NO: 12703 - DNA, 425 bp, Glycine max
  Clone ID: LIB3094-089-Q1-K1-D8
gagttccagaggttcaaccatacttctcttcttccctttacatccgcactgtttccggtcctacagccataatggttcgcattctgacggaaaatggcggagtggaacgcatggaggagatcatcagggaccatttggaccccatttcaaagcaagtgttggggatctggttggatcattgtgcttgtgccaagcgacaagttggagaggcagaaagagcttatcttaagaaaagggatggtctcattagaaacaagaccattgagattgatcttggttcaagctttcccagattgtttggtccagaagtagcaaaccgggtactggatgctatcaaggagtattttacagtctgagatgcaaatttatttggaattgttggatattctatgtattacatacacgtacctaatttgctgtgcaat

SEQ ID NO: 12704 - DNA, 345 bp, Glycine max
  Clone ID: LIB3094-089-Q1-K1-E1
ggctacttttgattgcttgatgaaaacctatggattcctgacaccagaattctggagggagactcgcttctccaaatctccattccaagagtacacagatctactggcaaaaccaacaggaaagactctaatcttggaggaggaaagggtggatgcttgatttgctagttttgctttatggatgttttaggaactttattactttacatactttgttggttctgtgctttacttttggttttgatagacggtatgtctctgtatgcattttgattgtttccaagttttaattgactgcaaaaaaaaataaatgcataaatctttaaaatctaaaaaatcattaac

SEQ ID NO: 12705 - DNA, 255 bp, Glycine max
  Clone ID: LIB3094-089-Q1-K1-E10
ttaaacacttatcaaatatgagtacaaataagatgacttgacgaacaatactcctcttctacttcaaatgaacccgcttcacaataagattcaccatctcatacacaatggcaaacccatttccaaatccctcattcctgttcactacatttatgaagtttgcaatgacataaatcccttgttgccttcttacccttaccacatagctcacactaaaatcttggcttattatctttataataatatatatgatct

SEQ ID NO: 12706 - DNA, 446 bp, Glycine max
  unsure at all n locations
  Clone ID: LIB3094-089-Q1-K1-E12
cccacgcgtccgaaagaaacagtgtttcatcatttgggtttcgcagaagagagagaaaccgagttgtagagagagaaactcgcagtcgcagacatgtcttccttcgatgccttcgccgacgacttgaacgtcaactcttcttccactcgccagcacgacgatgacgaggacaacttctctggctacggcggctactcctccttcaccggaggattctccgccgacggagatgtcgccgtcgatcactccgccgncgcgtcgccggagatctacggcttcactgattcgaatcccgcttactctcagtctcccttcgaatcggccaccgtagagaacgaaaacggaaacggatacggcgacggcgacggtgtttttgtctccgacggtccggtgcttccttcgncgacggagatggagccggaggaaggttacgctcttcgcgagtg

SEQ ID NO: 12707 - DNA, 422 bp, Glycine max
  Clone ID: LIB3094-089-Q1-K1-E2
gcttcctcctgttactagcctttgctttcagtccattgattcggtgggtgcagctggggcgaaaccgaggtagacccggatcggcgtcggcacaccgccggagaacaagatgattgtctgcgtcgccgtcgtcggtcaccagaacaatccgctgtacatacagagcttcacggaggccgatgatgctctcaagctccaccacatcgtccattgctcgctcgatgtggtcgacgagcgagtgaacaatcctaaacagtctgggccgatgcttaatgagacgtttttgggactgctttatcctattgaaaactacaaagtatatggatatctgactaatacgaatgtgaaatttatcttggtgaccacggatctggatgttaaagatgcggatgtaaggaattttttcaggaggcttcatgccg

SEQ ID NO: 12708 - DNA, 421 bp, Glycine max
  Clone ID: LIB3094-089-Q1-K1-E3
ggcggcgctgtggcggacgcgccggcggtggttgaggagaagacggagttcgacgtggtgagcgaggaggtgccgagcaacgctcgaatcgcggtgattaaggcggtgagggcattgacgaacctagcgctgaaggaggcgaaggagttgatcgaagggttgccgaagaagttcaaggaagggatttcaaaggacgaagctgaagatgcgaagaagcaactcgaagaagctggtgccaaggttaccattgcttaaacactgtttagctgcagcatatatgttctgcttcttcttttgttggttgtagttgagttcaccagtacactgtaatttcatttccattttgtctggatttcaatcttttatttgtaatgaggaaatatgagttcttatttttatattattttttttaatgcgtatg

SEQ ID NO: 12709 - DNA, 429 bp, Glycine max
  Clone ID: LIB3094-089-Q1-K1-E5
cgcgtccgagcggcggtgtagcgcacgctccaactttgtttgaggataacaccgaattcgacgtgggaagctaagttttaccgagcgacggtccaatcgcgctcattaatgctgtcagggcattgacgaacctatctcttaatgaagcaaaagagttgatctaatggttgccgtagaagttcaaggtaggtatttcaaaggacgaatctctagatgcgcagaagcaactctaagaagctgttgccaatgttaccattgcttaaacactggttagctgcagcatatatgttctgcttcttcttacgttggttgtagttgagttcaccaatacactgtaatttcatttccattttgtctggatttcaatcttttatttttaatgacgaaatatgagttcttattcttatattatcatatttaatgcatatg

SEQ ID NO: 12710 - DNA, 376 bp, Glycine max
  Clone ID: LIB3094-089-Q1-K1-E7
cttttctactttgagtcttcttgatccttatgagtctacttgaactcaaacagggcgggtgaagttgctctgctacatttctatccaagtccatttggcatgaaggtcatgattgcacttgctgaaaaaggtatcaaatatgattacaaagaagatgacttgaagaacaaaagtactgttttcctacgaatgaacccggtatacaagaagattactggtctaatccactatggcaaacccaattgctaatacactattgatgttcagtacatataagaagcttgtaatgacagaaatcccttgttgccttactgacccttaccagagagctcatgctagatgtctggctgacaatgttgattagaagatatatgat

SEQ ID NO: 12711 - DNA, 339 bp, Glycine max
  Clone ID: LIB3094-089-Q1-K1-E8
ctcgaatcgcggcgattaatgcggtgagggcattgacgaacctagcgctgaaggaggcgaatgagttgatcgaagggttgccgaagaagttcaaggaaggtatttcaaaggacgaatctgatgatgcgaagaagcaactctaagaagctggtgccaaggttaccattgcttaaacactgtttagctgcagcatatatgttctgcttcttcttttgttggttgtagttgagttcaccagtacactgtaatttcatttccattttgtctggatttcaatcttttatttgtaatgaggaaatatgagttcttatttttatattatcttttttaatgcgtatg

SEQ ID NO: 12712 - DNA, 354 bp, Glycine max
  Clone ID: LIB3094-089-Q1-K1-E9
aatagaacgagtttattctggacactttgagccacttattgtattaatcgaatgctgcaaggttttactaaaataagatgtgaggaagaatgcatagaaaagggccagaaaattaccaaactaatatacaatcaaatatggatgttaaatcttattaaaagtgaatttaccgagggacaggagcttttaaaaccatctgccacccgattagactctagctatactactctacatagcttgctatatcatcgagtttgtctcacaagaatgtttctttccaacaaatggatttcatccagattctccagctcaaatgacggtaaagaggtggaaacaatacttttgaatgtcaca

SEQ ID NO: 12713 - DNA, 189 bp, Glycine max
  Clone ID: LIB3094-089-Q1-K1-F11
tccacgcattcgtccacacctacgttataacttacaataaaatactcatcccacacgcaatggtcttatctctctcctctcatcacttcatatattcacaatttctcttccaccgttaaaccctagacccaactgccaacccctgatccaatccatgtccctcaaccacctcctatccgtgtcccacca

SEQ ID NO: 12714 - DNA, 386 bp, Glycine max
  unsure at all n locations
  Clone ID: LIB3094-089-Q1-K1-D4
gcttcctcctcttacgagcctttcctttcagtccattgattcggtgggtgcgggtgcggcgaaaccgagctagaccctgatcggcgtcggcacaccgtcggagaacaagatgattgtctgcgtcgccgtcgtcggtcaccagaacaatccgctgtacatacagagcttcacggaggccgatgatgctctcaagctccaccacatcgtccattgctcgctcgatgtggtcgacgagcgagtgaacaatcctaaaaagtctgggccgatgcttaatgagacgttnttgggactgctntatcctattgaaaactacaaagtatatggatatctgactaatacgnaagtgaaatttatcttggtgaccacggatctgggatgtaaagatg

SEQ ID NO: 12715 - DNA, 434 bp, Glycine max
  Clone ID: LIB3094-089-Q1-K1-F12
cattctactatgtgaataaaccagttaacacggacgtgaccacatggagccctagggggagtctgttccaggtggagtacgctatggaggcggtgaagcagggctcggcggcgatagggctccgatcgaagacccacgtggtcctcgcatgcgtcaacaaggccaactccgaactcttctcgcaccagaagaagatcttcaaggtcgacaatcacatcggcgtcgtcatcgctggcctcaccgccgatggccgcgtcctctaccgctacatgagatccgaatgcatcaactataattacacctacgagtcgccgctccccggcggcagactagtcgttcagctcgccgataaggctcaagtttgcacacagcggtcttggtaacgtccttatggggttggactcctggtagcttgattagatgaatcatgagct

SEQ ID NO: 12716 - DNA, 290 bp, Glycine max
  Clone ID: LIB3094-089-Q1-K1-B8
aattcgtaacctcgaaaagttatcgtcagaggaagcttctgcgcacattccggcaccgatttcgaccggaactaaagtggcaccttcacctgcactgaagtattctgcactcacgtcgatcagttgacaccatgatattgacaaacttaagatatatgtgttaatggagggaatcgattacaataaggctgaatccgagtttaagtccatgtcattcgatgttaagttccatgatgttcaatggaagaactaccgatgtgcaatatcaaaatttcacaatgagatagtac

SEQ ID NO: 12717 - DNA, 403 bp, Glycine max
  Clone ID: LIB3094-089-Q1-K1-B9
gcgttggcctcacagtgatgctggagaaggattcctcctacgatgaaattaaaaatgctatcgaggaggaatcagagggcaagttgaagggaattcttggttacactgaagatgatgtggtctccaccgactttgtgggcgatagcagatcaagtatttttgatgcaaaggctggaattgcattgaataagaactttgtgaagcttgtctcttggtatgacaacgagtggggatacagctcacgtgtcattgacctgcttgtattcgatgccaagaagtctttttaaggttgtactgaaaaaaaagtagcttgtctagacattatgtgctggtgtctagctgcgatttagtgtcttcttgctcgggcagaaatgagaagtatgaataaatcggtttcgggaac

SEQ ID NO: 12718 - DNA, 424 bp, Glycine max
  Clone ID: LIB3094-089-Q1-K1-C1
gctcggactcgtgggagtacctattttcattttattttgaagaaattgtatccccgctctgtttaatgtccgggctcgtatgataagatgcgctttgatccaagtaaaccaaaatgcatgctgttagttacacatgatgactatagtataacgtccaaacttccaagggagagaacttctgttgttaccatacttagggatccagttgaccgtgtttttagtacttatgaattctcaatagaagttgcagctagatttttggtgcattcaaactttacgtccgcaacaaagatggctttacgcctaagctctaagactaaaggagtaagcacacttgatatctggccttggaagtatctggttccatggatgacggaagacctatttgctatgagagaagctaggtacagtaagggactgaata

SEQ ID NO: 12719 - DNA, 227 bp, Glycine max
  Clone ID: LIB3094-089-Q1-K1-C10
atcagacctcacactttggctgcagaaggatgacttctacaattaaatacaaaatcctatagcggggtcatcaacatgcaagtcgaagggaatattagattacactccaaatgatttggtcttcaccgactttgtggaccattgctgatcaactataagcgatgcaaactctataatcacattaaatctgacctttacgaagcttgactcttggtatgacaaccaat

SEQ ID NO: 12720 - DNA, 380 bp, Glycine max
  Clone ID: LIB3094-089-Q1-K1-C11
gcggagtcactcgaaatcggcggagatggttgccatgaggtttcaccagtaccaggtggtgggaagggctcttccgggcgagtccgatgagcatcctaagatctaccgcatgaaactctgggccaccaacgaggtccgtgccaaatccaagttctggtattttttgagaaaattgaagaaggttaagaaaagcaatggacaagtgctagccatcaatgagatttttgagaagaatcctaccaagattaagaattatggaatttggctgccttatcagagccgcactggttatcacaatatgtacaaggaataccgagatacaactctgaatggtgcagttgagcatatgtacactgaaatggcatctcgtcataagggga

SEQ ID NO: 12721 - DNA, 448 bp, Glycine max
  Clone ID: LIB3094-089-Q1-K1-C12
cccacgcgtccggctccctctcctctcttctcttctgttcaaacaatgtcgcaaacgttgcgtgctttcgtcgccaaaaatcttggctgtggaatggcagaaggcaagtgtctcccatgttcaggtgtttctggaagaactgctgctgtatattcctactcttctctaggtcatcacagaattcattcccgtgtccaagttagaagactaaagtgtggctttaggggtgcatcttttgtatgtgaagcaaagaggaacccagatttctcaaggcaaaacaagcacgggtcctccagaagcagaaatcggaacagtgatgggagagacagctttgagagctttgacgacgatatgttttcattaaaaaatggaccgcctgtgtctctttcaacctcaggaaaattccaggccacttcagcccctggtcctagggagaaggagattgttg

SEQ ID NO: 12722 - DNA, 334 bp, Glycine max
  Clone ID: LIB3094-089-Q1-K1-C2
aggacgcgtctaagaacctattctcactgcttatcgactatattgaatcccatgctgggtgtacttatacaggctggcatgatcagatgtgctatgatccaacgaaaccaaactacaggctgcaatttacacattaacactatactataacgtgcaaactatcattgtataacaattcagtacataacatacatatggatgcactacaccgtgcattcacaacgtatgcattttcatgagacggtgcagcactctaagaccctcatctatgctgaaaatccccaaaacagatttctaaacgcctactctctgaaaattacatagtaagaacact

SEQ ID NO: 12723 - DNA, 351 bp, Glycine max
  unsure at all n locations
  Clone ID: LIB3094-089-Q1-K1-C3
acgcatcccatgactcgtccgggctaatttcatgatccgtttgtacacacactctctctcatagatgataggtttnaatattaggttctgacgtgaccagatctgcaatgatagaccactcactgaccacgctaccacttctaacgtctcatcatgaactcgctatgtgtactcaagcacccatgctcactgattacatgcaagacctaccaccgttccacatctttcatcaacccaaccaagcatttgcatgtaagctagagagcttcttcgaccctactcttcaagcataaactcgtctcaagatgatgaaccatgaactctgaagaaaatccaagtgatgaatttaat

SEQ ID NO: 12724 - DNA, 422 bp, Glycine max
  Clone ID: LIB3094-089-Q1-K1-C4
cccacgcgtccgcccacgcgttcgcaaaaattacaacaccaatctcacccatggaagaaaaggccgttagtgttactattcgtaaaatggccactcttgttctttaccaattctttctcaaactcttgctcctaatttcagtctttcagctttcctttgctgctaggagactcaaccagctgtttcatgaccagtcacagttactacattaccacaacggtcctcttctatacggcaaaatcgccgtgaacctaatctggtatggtcacttcaaaccatcccaaaaggccatcatcaccgatttcgttacctcactgtcatccccatcgtctgagagcagccagccatctgttgccacgtggtggaaaaccacggagaagtactaccacctgagtcccaagaacaagaaggctgcttcttct

SEQ ID NO: 12725 - DNA, 411 bp, Glycine max
  Clone ID: LIB3094-089-Q1-K1-C6
cccacgcgtccgttctaatctcattctccttctgttcaaacactctctctcatggcagcaggtaagaagattaggatcggcatcaacggatttggaaggattggccgtttggtggccagggttgcccttcaaaggaatgatgttgaacttgttgctgtcaacgatcctttcatcaccactgattacatgacatacatgttcaagtacgacaccgttcatggccagtggaagcattttgatgtgaaggtgaaggactctaagacccttctctttggtgagaagcccgtcaccgtttttggaatcaggaaccctgaggaaattccatggggtgaggttggtgctgattatgttgttgagtcaactggtgtattcactgacaaggacaaagctgctgctcacttgaagggtggt

SEQ ID NO: 12726 - DNA, 399 bp, Glycine max
  Clone ID: LIB3094-089-Q1-K1-C7
ggctgaagcacaactacgagaccagcatggcaaccctgtcccactcaccgatgaatggggtaatccggttatcttaactgacgagcgcggtaatcccgtccaactcactggtgtcgctaccaccgctaccggcacagcaggttctgggtttgggtcctatggtaccggtgcttacggtggtggtgcaagtgcaaccaccgttgcagatcttttggcaacccaaccaaggagtggcagggaggctagagagcttcgtcgttcctgcagttcaagctctagctcgtctgaggatgatgggcaaggtgggaggaggaagaagggagtgaaggattaaatacaagagaaactaccaagggtaggaggagggaatcataataaagagcatgcacacacaacaac

SEQ ID NO: 12727 - DNA, 427 bp, Glycine max
  Clone ID: LIB3094-089-Q1-K1-C8
cccacgcgtccggactgcccaagatgtatcgacaatgttacggtgcgggcaaaaaaccatggtctttctgatcaacaatggtggatacaccatcgaggttgaaattcatgatgggccgtacaatgtgattaagaactggaattacactgggttgattgatgcaatccacaatggtgaagggaaatgctggactgccaaggtgttctgtgaagaggagctagttgaagcaattgccacagccacaggacccaagaaagactccttatgcttcattgaggtgattgttcataaggatgacaccagtaaagaattgcttgaatggggctcaagggtttctgctgccaatagccgtcctcccaatcctcagtaatcttcagaatttatcctatgactaaattgctgcagttgccctttagctctatgaaag

SEQ ID NO: 12728 - DNA, 461 bp, Glycine max
  Clone ID: LIB3094-089-Q1-K1-C9
cttccgcccaccagtttcaccgcccgaatatctggttgttggaaccatcccagaaaaactctttggagatggttgtttaccaaggaactcttacaagtgatgagcttctcttttactcctttccgtacaaggaaattgacaatggaatgctttgggaagttgaagggaagtgggtttgtaaaggagcagttgatgtagacattggtgcaaacccttctgctgagggtggaagagaagatgagggagttgatgatgcagctgttaaggttgttgacattgttgacacattcagacttcaggagcaacccgcattcgataagaagcagtttgttaccttcatgaagaggtttatcaagaatttgactcccaagctcgatgcagagcaacaagagtttgttaagaagcacatcgagggagcaactaaatacctgctctctaagattaaagatttccaatttttt

SEQ ID NO: 12729 - DNA, 389 bp, Glycine max
  Clone ID: LIB3094-089-Q1-K1-D1
cgcatcccgagacatctaaagcgaaattccactacttttatcgctattctacttatttcaccaatggataggcttaatcactatctctgtttgtacacccacggtcatcttctgccactcaatcctgtcgctacacattgtcacgtcacaacattttctggttcggcacatatgttaccagatcactacaggtgtcctacaatgacctcaaccagaacagaaatctcgtgtaccacaccaaggtataagctcgattcattatgacttccattactaatacaaaccatcaaatccttgcctatcgatcctttactacttcggaatttgaagctagaagtgtcagataagttaccacagaaattactagcttttggcagacaaactttcat

SEQ ID NO: 12730 - DNA, 342 bp, Glycine max
  Clone ID: LIB3094-089-Q1-K1-D11
cccacgcgtccgaaagaaacagtgtttcatcatttgggtttcgcagaagagagagaaacccgtttcgagagagagaaactcgcagtcgcagacatgtcttccttcgatgccttcgccgacgacttgaacgtcaactcttcttccactcgccagcacgacgatgacgaggacaacttctctggctacggcggctactcctccttcaccggaggattctccgccgacggagatgtcgccgtcgatcactccgccgccgcgtcgccggagatctacggcttcactgattcgaatcccgcttactctcagtctcccttctaatcggccaccgtagagaacgaaaac

SEQ ID NO: 12731 - DNA, 194 bp, Glycine max
  Clone ID: LIB3094-089-Q1-K1-D12
ctttttcactcccacacgacatacaatacactttcttctaaaccctactctacttaccgatattctacccacataattccactcatcactctcactttctctaaacactcttactattcaatcccttacttatctccttcaatcgccacctaacaacaaaactaaactatacccactctactttttttatctca

SEQ ID NO: 12732 - DNA, 426 bp, Glycine max
  Clone ID: LIB3094-089-Q1-K1-B7
cggacgcgtgggagaacctattttcactgttttttgaagaaattgtatcccagctatgtggagtgtcctggctcgtatgataagttgcgctttgatccaagtaaaccaaaatgcaggctgttagttacacatgatgactatagtataacgtccaaacttccaagggagagaacttctggtggtaccatacttagggatccagttgaccgtgtttttagtacttatgaattctcaatagaggttgcagctagatttttggtgcatccaaacttgacgtccgcaacaaagatggctttacgcctaagctctaagactaaaggagtaagcacactggatatctggccttggaagtatctggttccatggatgagggaagacctatttgctaggagagaagctaggtacagtaggggactgaatatcatt

SEQ ID NO: 12733 - DNA, 387 bp, Glycine max
  Clone ID: LIB3094-089-Q1-K1-A11
attccgccagacctaaccaacgcgaacacgattcattcacctaccgttcctacccttcttctctcgccactcttggtcttggtctaacatgctccttctctgaaccaaaccaatccattattcatttgaatcttcttatacatcccaaaaaaacccaatataaaaggtgtctttagaacgttctggttgatggctaggagaggaatcaagctattccatgaataaaggaacggtcttttttcaatttccaattttgggtctcaatgaggtggtgttagaggtgatcgtgttcaagaccctgtgaatttggctgtgtatgcaagcattagtcaaatgggaatggcgtttgctgttcaagaaccaaacccttcttcttcttcttctgat

SEQ ID NO: 12734 - DNA, 442 bp, Glycine max
  Clone ID: LIB3094-089-Q1-K1-A12
atccacgaggacgaagaggaagacgaagaattggttgtggttcggaggaccagtgttcggagtagcggtttggtgaacaagcttggggatgattttgacagggttgccctggaaaacgatgagtccaatacggtgtcgtcgttgaagacgactcgtggtcggaaatttgttaagaatggtgaacttgggaacaaaactgtggttgaagtagctgaacaatcaaacaccaaaggaaagaagagtgcaagtgaagcctagaagaaccctggggttagaacttcttccagattggctaaacgtgtgtccaatcaaacgtcttgtaattagatgtttgataaaattgtggttttccttttccttttattattgtccaattagccattctgtgtatgtttcaagatttagggtttgttcaacaattggtattttgcagtaagtcata

SEQ ID NO: 12735 - DNA, 421 bp, Glycine max
  Clone ID: LIB3094-089-Q1-K1-A3
aaactgaagaaggtgaagagaccactgtaggcactggattatctgcttggcgaatgtgagggcaggccgcctcaagaatttcaagaattttgcccgaaatttaagaacgattatcaacaaaattgcccgaatgccgcgtatgaagcagtttgcccgttactgaagcaagcgattcaaatatgttgccagaaacacgcataactctgcaagccacggtgggcgtttggatgtgcttttagttaccactttctctcttggatttgcttacgtattgctccttttgtattagtggctcctgtcccaccttgcttttggacttgagctttttatatttctgattgttcaatgtctgttgtgtgtgctctccaacctgtggtgactttccggtttattcctgtggctgtttcttgtaggcctttcg

SEQ ID NO: 12736 - DNA, 425 bp, Glycine max
  Clone ID: LIB3094-089-Q1-K1-A4
cattcgtattgtcgtagagaaagaaattcctagctcaccgtttcaagatgcagatctgcgttaagaccctcactggtgagaccatcactctcgaagtcgagagttcagataccatagacaatgtaaaggccaaaattcaagacaaggaagggatcccaccagatcagcaacggctcatttttgctggcaagcagcttgaggatggacgtacccttgctgattataacatccaaaaggagtccactctccacttggttcttcgtctccgtggtgggatgcaaatctttgttaagaccttgacgggaaagacaatcacccttgaggtcgagagctccgacaccattgacaacgttaaggctaagattcaggacaaagagggtatccctccagatcaacagaggctgatctttgctggaaagcagctt

SEQ ID NO: 12737 - DNA, 362 bp, Glycine max
  Clone ID: LIB3094-089-Q1-K1-A5
ttttatttgaagacccataacagaccactttttgctctgcattatctgcttgtctaatgtgtgagtgtccttctcaagaaggacaagaatttttaccgcaatttaacaacgattatcaacaaacatcaccgaatgccgcgtatgaagcagcttgcccgttactgaatcaagcgattcaaatatgttgccagaaacactcataactctgcaacgccactgatggcgtttggatatgcttttagttaccactttctctcttggattagcttacctattgctccttttctattagtggctcctgtcccaccttgcttttggacttgagctttgtatatttctgattgttcaatgtctagtgtgtg

SEQ ID NO: 12738 - DNA, 228 bp, Glycine max
  Clone ID: LIB3094-089-Q1-K1-A6
gtgaatgcgtataatacgattctagagaaatttgcgccaacatgcagtgtgtgtacagcaccgtcatattgtcgacgacggacgagctcctagtcgtcggctgccgaactacgtcctcgaagacgacggcagaggagctgtagacgcgcttcgaggagaagaacctctgcgacgtgtcctgagaagtctgagagcacgtccggctggattatacccaccacatcgagt

SEQ ID NO: 12739 - DNA, 428 bp, Glycine max
  Clone ID: LIB3094-089-Q1-K1-A7
tggaccgacgcgtccgaaactgatgaaggtgaagagtaccactgttggctctggattatctgcttggcgaatgtgaggagatgccttctcaggaatgtcgagaattttgcccgaaatttaagaacgattatcaacaaaattgcccgaatgccgcgtatgaagcagtttgcccgttactgaagcaagcgattcaaatatgttgccagaaacacgcataactctgcaagccacggtgggcgtttggatgtgcttttagttaccactttctctcttggatttgcttacgtattgctccttttgtattagtggctcctgtcccaccttgcttttggacttgagctttttatattgctgattgttcaatgtctgatgtgtgtgctctccaacctgtggtgactttccggcttattcctgtggcttggtcttgt

SEQ ID NO: 12740 - DNA, 346 bp, Glycine max
  Clone ID: LIB3094-089-Q1-K1-A8
atgcagacgaatgagttgagaccactgtatgttccgcataaacggcttgtctaatgtggggcgttttcttgtcaacaagggcagaacttttggccgacatctaacaaccattgtcaacaaaaatgaccgaatgccagctatgaaacaggttccccgatactaacccatgcgacataaacatggaggccgaaacacacgtacatctgcattatacccaccacaactagacgtccttttaggtaccaacctttgatttcaatgaatatacgtattgcttcttttagattaccctctacaattccacaaagctgaaacaacagcacttactgtactactgaatcaatca

SEQ ID NO: 12741 - DNA, 430 bp, Glycine max
  Clone ID: LIB3094-089-Q1-K1-B1
cccacgcgtccggtactacaacactttctatatttattgtccattctctctcacgcagtccgtaattgcttcttgctttgatcgattcattcggtgatcggtgatcggtgatcagtggtttggtgttgttgatagaaaaatgcattccagccctttgcttcttgaggaacccattaggatggcatccattcttgagccatccaagcctactttctttccagctatgacaaaaattgttggcacacttggtctaaagtcacgatcagttgatacaatttcccgttgccttgatgcaggaatgtctgtggcaaggtttgacttctcatggggtgatccagaataccatcaagagacattggaaaatttgagagttgctatcaaaagtaccaagaaactctgtgcggttatgctagatactgtgggtcctgaa

SEQ ID NO: 12742 - DNA, 400 bp, Glycine max
  Clone ID: LIB3094-089-Q1-K1-B10
atcgtgagaggggcagtagccgagattccgtgagttgcacaaatgaagacgattctttccggcgagaccatgaacatcccggacggcgtgagcatcaaagttcatgccaaggtcatcgaagttgacggcctccgcggaaaattggtgcgagacttcaagcatttgaatctcgattttcagctcattactgacgaaaacggtaaaagaaagctgaaaatccacgcgtggtttggttctcggaaaacatccgccgccatttcgaacgccttgagccacgtggagaatcttatcaccggcgtcaccaagggctaccgctacaaaatgagggttcgttgatgcccattttcccatcaacgcatgcatcggcaacagctacaagtctattgagatccgaaatttc

SEQ ID NO: 12743 - DNA, 422 bp, Glycine max
  Clone ID: LIB3094-089-Q1-K1-B12
cccacgcgtccggtgatttcagtgagtgatcggtgttcacttgatctcatcataatcgtcagcgtgaattgaagaagatgccgatcagaaacatcgccgtcggaaggcctgaagaggcgactcaccccgacacgttgaaggcggctttggctgagttcatctcaaccttcatcttcgtgttcgccggctcaggctccggcatcgcctacaacaagctcaccgacaacggcgctgccacccctgccgggcttatctccgcctccatcgcccatgcattcgccctcttcgtcgccgtctccgtcggcgccaacatctccggcggccacgtcaaccccgccgtcaccttcggcgccttcgtcggcggcaacatcaccttcctccgcggcatcgtctacgtcatcgcccagctcctcggctccatc

SEQ ID NO: 12744 - DNA, 415 bp, Glycine max
  Clone ID: LIB3094-089-Q1-K1-B3
tctgaagttgcgagagtgaagaaatggcgcaagacttggcattggatttggaggagcgtcggcgcctccacagcatcgccaaaagacctcgaaccctctctcttctctcctccgaaattcgtaacctcgaaaagttatcgtcagaggaagcttctgcgcagattccggcgccgatttcgaccggaactaaagtggcgccttcacctgcgctgaagtatgcggcactcgcgtcgttcagttgggaccaggatagtgacaaagttaagatatatgtgttaatggagggaatcgatgagaataaggttgaatccgagtttaagtcgatgtcattcgatgttaagttccatgatgttcaagggaagaactaccgatgtgcaatatcaaaattgcacaatgagatagtaccggagaaatg

SEQ ID NO: 12745 - DNA, 415 bp, Glycine max
  Clone ID: LIB3094-089-Q1-K1-B4
gtcttctcacttcgtcaaaaccaaccaaacccctccccaattctcaagccaacgatggcttccttcaagagcaagtaccaagatgaactcattgccaatgctgcttacattggcaccccagggaagggtatccttgctgctgatgagtcaactggtacaattggcaagcgattggccagcattaatgtcgagaatgttgaagcaaataggcgtgctcttcgtgaactcctattcaccacacctggtgcttttgagtgcctcagtggtgtgatcttgtttgaggaaaccctataccaaaagacagcttcaggaaaacccttcgtagagttgatgaaggaaggaagagttctccctggtatcaaggttgacaagggcacagtagagcttgcaggaactaatggggagactactactc

SEQ ID NO: 12746 - DNA, 366 bp, Glycine max
  Clone ID: LIB3094-089-Q1-K1-B5
ctcatcacttggcataacatttcaaagagcgtcgggttctccacaacgtcttcaatgcacctctaacccattctcttctctcctccaaaattcgtaacctctaaaagatatccctacagtaagcttctgcgcatattccaccacctatttccaccgtaactaaactgtcgccttcacctactcttaactatgcaccactcacatcaatcaattgctaccatcatattgacacacttaagatatatccgttaatgcatgcaatcgattaaaataaatctgaatccgagtttaactcgacatcattcgatgctaagtaccatcatgttcaaaggaagaactaccgatcttcaatatcaaaattccaca

SEQ ID NO: 12747 - DNA, 449 bp, Glycine max
  Clone ID: LIB3094-089-Q1-K1-B6
ggaattccggctgcgcgcacgcgtccgccgacgcgtccggtactacaacactttctatatttattgtccattctctctcacgcagtccgtaattgcttcttgctgtgatcgattcattcggtgatcggtgatcggtgatcagtggtttggtgttgttgatagaaaaatgcattccagccctttgcttcttgaggaacccattaggatggcatccattcttgagccatccaagcctactttctttccagctatgacaaaaattgttggcacacttggtctaaagtcacgatcagttgatacaatttcccgttgccttgatgcaggaatgtctgtggcaaggtttgacttctcatggggtgatccagaataccatcaagagacattggaaaatttgagagttgctatcaaaagtaccaagaaactctgtgcggttatgctagatactgtgg

SEQ ID NO: 12748 - DNA, 444 bp, Glycine max
  Clone ID: LIB3094-089-Q1-K1-A10
gaacgcgaacacagattcattcacctaccgttcctacccttctctctctcgccgcctcttggtctgcctctcgcatgctccttctctgaaccaaaccaatccattattaatttgaatcttcttatacatcccaaaaaaacccaataaaaaaggggtctttagaaggttctggttgatgggtaggagaggaatcaagctattcgatgaagaaaggaacggtcttttttcaatttccaattttgggtctcaatggggtggtgttagaggtgatggtgttcaagaccctgtgaatttggctgtgtatgcaagcattagtcaaatgggaatggggtttggtgttcaagaaccaaacccttcttcttcttcttctgatggtgataattcccaacacaacggtggcatgagcatgagaatgaggattccgtgcaccgagttgtacgttcg

SEQ ID NO: 12749 - DNA, 216 bp, Glycine max
  Clone ID: LIB3094-088-Q1-K1-F8
tctctccatctactatctctcttttccatctcttccaccaatatcttcttcaaaaatcttttctattacattttctaaaatctattttttaaatcatattataaaaaacatcataacctaacttcttaatacaaccacacctcttatcaatacaattcaaactctaattacaaatttattcataccacttattattacctattctatactattttc

SEQ ID NO: 12750 - DNA, 345 bp, Glycine max
  Clone ID: LIB3094-088-Q1-K1-G1
acgcccacgcgtccgaccacgcgtccgctcgctttatcttcccttcccttcatctccgcttcaaagaatatcctactctggagtggctggtcgaaacaagtccaacaccagcaacacactgcttcaatctcaatcgggcacattgagaaatggttacgagtaatgcgaaaactgaggcaccattgccaagtagtaatggcggaggcgctgagattgataacaatgagaagaagcccttcaagatcttcgtcgggcatgaccctcgcgaagatcttgcctatgaggtatgtcgccactccatcttgaaatggtcttcaatgcctgatgagatcataccaattaagc

SEQ ID NO: 12751 - DNA, 381 bp, Glycine max
  Clone ID: LIB3094-088-Q1-K1-G10
ctattttttttcggtgctccatgcttagcatcccgtgctacccatgcctcccatcgttgggagccggcacagcatttccacctgcccgtgcattactcccgccgcccccgatcacatcagtgtccgccctagctcctcaatgtgtttcttgtgtacccgagccagtggtgcaggttcagtcatatcccgtcttcgtatccggccctccggctgaagccccgagggtggatgtcaaagtggtggatcggcaaggccaggactgcggctaccttcagcaggagctcacgcatgtgctgctccagctgcacaccgaccagctggaggaggagcggcagctgcagcaagtggccgacctcagcgggaagctgcgctacattcaag

SEQ ID NO: 12752 - DNA, 290 bp, Glycine max
  Clone ID: LIB3094-088-Q1-K1-G11
cgaaccactttctaaatcatatctccatttaaataatatattttacttttcgcgacaggttcatttactaatcatgtttgtcatccattatttctcttttccaatacagttattactccttttgatctcatcaaacttcttctacataccattaattccaacctctacattctcaatataaaaatccaaccctacaatattatcttttactgctttttactattttattcctaacaattaccactttccttcttacttttcaacttatttaacttcttacgatattcccc

SEQ ID NO: 12753 - DNA, 342 bp, Glycine max
  Clone ID: LIB3094-088-Q1-K1-G12
acgcgtccgatttatctcgtgaccatttcatccgggattcatcatgtcttccccgacatcttcactgagtgcaggtgcaacattggcatgtttggggctgtgctgacgttccatattttcttccacaagctgaacgagattgctatcctgagtgctttcaatttttgcgtggctatcaccatcactgtggtggtgtgctactagtcagatgtttggaggaaccccaacgcacatactgatatcatcaacatcatccatgaccagtatacctaatacatcttgattgcgttccccaacattgcatttgcgttctgcatgccagtacattcttccaccaattta

SEQ ID NO: 12754 - DNA, 325 bp, Glycine max
  Clone ID: LIB3094-088-Q1-K1-G2
aattcccgaccgacgcgtccgcttctcgtagctcatcgaaaatgcaagcttttctacgaagaatctcaacagccacaatctcgacatctaatcaattcgacgctcttccatccattattgccgatcaatttccgactactagactgccattctcgagccttaagtcccggatctgcgaaaacgaatatctcaagccccattaccctgtattactttcggatgtcctgacattgataacactgacatgaagccctttaagatcttcttattttattaccctctctaatatcttgcctattaattatttttcctctccatcttttaa

SEQ ID NO: 12755 - DNA, 224 bp, Glycine max
  Clone ID: LIB3094-088-Q1-K1-G5
acactttaatcttcaaaatcttcacaaaccaattctacacagacttaaccacatgaaaccgtagaactactctaaaccagatctactcctctatacatacactcaaccaacacattacttcaactacactccaatcgaatacccacttcttcctatcatacctcaacaattccaactcctaactatcctagcaccagaagaacatcttcaacttccacaatcac

SEQ ID NO: 12756 - DNA, 316 bp, Glycine max
  Clone ID: LIB3094-088-Q1-K1-G6
ggcggcgctgtggcggacgcgccggcggtggttgaggagaagacggagttcgacgtggtgatcgaggaggtgccgagcaacgctcgaatcgcggtgattaaggcggtgagggcattgacgaacctagcgctgaaggaagcgaaggagttgatcgaagggttgccgaagaagttcaaggaaagggatttcaaaaggacgaaactgaagatgcgaaaaaagcaactcgaaaaaagctggtgccaaaggtaccattgcttaaacactgtttagctgcagcatatatgtcctgcttcttcttttgttggttgtagttgag

SEQ ID NO: 12757 - DNA, 401 bp, Glycine max
  Clone ID: LIB3094-088-Q1-K1-G7
cccacgcgtccgcccacgcgtccggaagaaaggaatataccttacggatggtggaatgaagaagcatttgggattgcatagtgcgggtggtgacgaagatggaagacaaagagagtgagagagagaaaaatcttcgctttatgtcaatggcacgaagcaggggtttttacagaagtgagcaacgacgccagatatgagaaaagtgagtttatttggggtcatatttgtaaaaagtggttttgtaattataccctctaattcaagagtgaagaatcaatggttggcatggaaaatataaatagtacaatttggtcctagtgtggcctaacctttgggcctttttttttaattaagaattttttttaattttttaaaagtggggtgataggttaacttaaaaa

SEQ ID NO: 12758 - DNA, 200 bp, Glycine max
  Clone ID: LIB3094-088-Q1-K1-G8
cccacgcctccgcccacacctccggaagatagtaatatacacttacggattctacagagcaagaaccatttgtaactcgcagtacgctcgtatctcactaatataaacgacaaatacattgacagacacaacactttcgattcataacaatttcaccaaacagttgcctttacagaacaaagcatctactccaaatatca

SEQ ID NO: 12759 - DNA, 287 bp, Glycine max
  Clone ID: LIB3094-088-Q1-K1-H1
acgcccacgcgtccgcccacgcgtccgctcgctttatcttcccttcccttcatctccgcttcaaagtaatatcctactctcgatcgctgttcgaaacaagtccaacaccagcaacacactgcttcaatctcaatcgggcacattgagaaatggttttgagtaatgggaaaactgaggcaccattgccaagtagtaatgggggaggtgctgagattgataacaatgagaagaagcccttcaagatcttcgtatggtatgaccctcgcgaagatcttgcctatgaggta

SEQ ID NO: 12760 - DNA, 323 bp, Glycine max
  Clone ID: LIB3094-088-Q1-K1-H10
ctattttttttcggccgttgcggccggcctctggcggtgtgccgcccggtacatggccagattccgttccaacttcatccgctgcccgtctgccccaccgggcggcgacccttccccatggtcaccgccgacggtctgatcggcaactccctgctggccctcagctcggcttggatgccccgctgaggcgccaggccggggctgctggccgaccccaacgacctgccggcccccgccgagccccggacccggcaagggcccagttgaaagtgggcttcgagtaccgcatgatagcgccccgacctccggctgatgatggaccc

SEQ ID NO: 12761 - DNA, 212 bp, Glycine max
  Clone ID: LIB3094-088-Q1-K1-H11
gtgcatgtggcggtgatgtttgcgctgcactcttcattgccatcgcactgcttccccgacggacgaggtgggcttcgtggcggacatcggcttctaggtcccgaaactgggcaccacgctggcgcacgcgacgcacgtcctgatgggcttcttcagcatgtctgttgtggacctgttgctcgtgatgtacatcccccacgtcttccaccggc

SEQ ID NO: 12762 - DNA, 186 bp, Glycine max
  unsure at all n locations
  Clone ID: LIB3094-088-Q1-K1-H2
acgcgtccgcccactcgtccgctcgctttattttcccttcccttcatctccacttcagaatgatatcctactatgtatgtctagccgaaacaagtccaacaccatcaacacactacttcaatctcaatcgntcacatttaaaaatgtttttgagtaatgggaaaacttatgcaccatttccaatta

SEQ ID NO: 12763 - DNA, 278 bp, Glycine max
  unsure at all n locations
  Clone ID: LIB3094-088-Q1-K1-H3
acgctcccaaactcattcttcaccttctaaacaaacgcaagaagcaacaatgcatttttttgttggctgtccaaaaaacggggctagctaatcttccatataatgcaaactgaaaagtccattaaaatcttttaaagctgggagtaaatggccgtctcttaaagaaagctgcaaactttttgctcgncatccccgtcacatgngcaacaagaagaatctgngtatatttttaaaatggccatagngtttcatggcagtggaaaaggatgcaataccca

SEQ ID NO: 12764 - DNA, 321 bp, Glycine max
  Clone ID: LIB3094-088-Q1-K1-H4
ttcaccttctaaacttactcaggaggcaacatggcatttcttgtagacagtacaaaatacggggctagctaatcttccaatatatggcaactgagagtccaattagaatctctgaagctgggagtaaatgaccgtctcttaaggaagctgcaacttttggctcgccatcccgtcacatggcaacagaggatctgggtatatttttaaatggccataggtttcatggcagtggaaaggattcagtacccaaccgcattggcaatgcacctaccagcattcaaagctcatttcttgccatagaaaactttgtatcccaaaaca

SEQ ID NO: 12765 - DNA, 393 bp, Glycine max
  Clone ID: LIB3094-088-Q1-K1-H5
aactcccacgcatcctacaaggcctgatcttagtttataagcataactacctcatgaagaaggagagatattttaaaagatggcgtcgaccctatcgataccgttttgtaggtcctcgctgatgacgtacataacatactcaaacatatgctcgaatcttctcacgaatttcctcaatgaaccctacaagtcctaatccctctctcgttaaaagctccattttgttctctccaaattgatcgacgcctatccttaaaaaactactattccttcaaaccccccaaaaccactatccttaattatttgtaacctttaattccttaattttttaaaaccttaactttcattgcaattttaaacttttctttatattttaattcctttttttttttc

SEQ ID NO: 12766 - DNA, 458 bp, Glycine max
  Clone ID: LIB3094-088-Q1-K1-F7
acgatcagacgatagacatcgcaagactttcatttccacagaccgtactcacaaatatgccaggactctcaacctatggcagccagagaaaaatgcttatgaatgggctacatctttgaaagcccctcacacagaagatgcaattcgacttactcaatccacagcaaactttttcataagtgaagctaggaaatccacaaacacacctgatgctcaaaaagtgcgagataatctcatctacaattacaaacctacttttggtggaacggctgggaaaggatatgatcaagtgtatctctttgaataattctatctgtaagaggtgtccttgaatttgattttatgcacaataaattatgaactggggatgtagcttgaagaaataaaaatttgtgcacagtgaatgttggaagatgcttaatttcaaggcaatggtcttcttatcaatgggttatatc

SEQ ID NO: 12767 - DNA, 254 bp, Glycine max
  Clone ID: LIB3094-088-Q1-K1-H7
acgcccacgcgtccgcccactcgtccggaagatttgaatataccttacggatggtggaatcagtaagcatttaaaattgcggagtgcgggtggtgacgaagatggaagacaaagagagtgagagagagaaaaatcttcgctttatgtcaatggcacgaagcacgggtttttacagaagtgaacaacgacgccagatatgagaaaagtgagtttatttggagtcatatttgtaaaaaagtggtattgaaatatac

SEQ ID NO: 12768 - DNA, 363 bp, Glycine max
  Clone ID: LIB3094-088-Q1-K1-H8
cccacgcgtccgaccacgcgtccgattttttgaacaaaaatcctaaaccaacctctggttgctacgtctccattcacagatgctgttactcccgatcgttgtttgcacaaactcagcctcaatccaatacgatctaatctgataaaatagtaaggatacttataactgttttcccttggtatcgtatttcatcatatgggtgtgtttaagttttcatctttcaccggattaacatgaagaattaaccatgctctaagtcaaaacttgtttcgctaaaaatcaattaactggtcctgttaaaaaatattgccttaatccttaaaacctgcaaatttgatatgcaccttcaattagtttccttct

SEQ ID NO: 12769 - DNA, 431 bp, Glycine max
  unsure at all n locations
  Clone ID: LIB3094-089-Q1-K1-A1
ctagagaattatcatacccttcaagatgaaaccgtacctacgtccaatattcctatggttccttatccttctcgaccaatccatttcggcgagtgctgctataaatattaatggtctgagaaacaaaattagagaagttctaaacaagcacccgagcatcaatcttccggcagataaactgaagaaggtgaagagaccactgaaggcactggattatctgcttggcgaatgtaaggacaggccgcctcaagaatttcaagaattttgcccgaaatttaagaacgattatcaacaaaattgcccgaatgccgcgtatgaagcagtttgcccgttactgaagcaagcgattcanatatgttgccagaaacacgcataactctgcaagccacggtgggcgtttggatgtgcttttagttaccactntctctctt

SEQ ID NO: 12770 - DNA, 305 bp, Glycine max
  Clone ID: LIB3094-088-Q1-K1-E10
gtctatttttgttcagatctcactcgcattcgctatgtggacgaagtaccttttcctgggagcgagatactcccatctggtctccggggcatggatagaccgcatacgtctgttgtgggacgagcacaaagagaaattactgcaccgctggaacgtgactgaggatctgacgcggttaaagtgcttcgctcataacgtggcccagatcaacaccttcaacgcacagtaggaggacagcgcgcagtactggctgaacaagttcgctcatctgtgccacgatgagttctgacgccagtacaccgggc

SEQ ID NO: 12771 - DNA, 303 bp, Glycine max
  Clone ID: LIB3094-088-Q1-K1-E12
acgcgtgcgcccacgcgtccgattttttttcgcaatggtgtggctgaatttattcttgtggtggagcagggcggggtggctgccggcgggcgccgccctcctccccgggccgcccaccgggttctcggtgtccggcgtggcgtggcgagacgacgacgtcaacggggcactggaccagtccgagaccctgctgagcggggtccgggtgtacctgcgccgctgcggtgacccgatgcccattacccccgtgcagaccaccgacatgtccggcacgttccggttcaccggcgtgacggcggacac

SEQ ID NO: 12772 - DNA, 415 bp, Glycine max
  unsure at all n locations
  Clone ID: LIB3094-088-Q1-K1-E2
tctcggccggcgcgtacgcccaggcgtccgataaggcctgagcttagttgattatcataactgggtgaggaagaacgagagggagtgaataanatggcgtggagcggagcggtaccgtttttgagggctgcggagatgacgtacataacatactcaaacatatgcgcgaatctgctcaggaattgcctcaaggaaccctacaaggccaaatccctctctcgtgagaagctccattttgttctctccaaatgggtcgacgccaagcctgaaaaacctactattcgttcagacaccccatagcagtgatctggaatagttggaagctataaatgcataaatctttgaaatctggaagttcattgtcattttgaacctttctgtaatgattaattcccttggttttttctctccatta

SEQ ID NO: 12773 - DNA, 128 bp, Glycine max
  unsure at all n locations
  Clone ID: LIB3094-088-Q1-K1-E3
ttccaattctaaattcctaaaaactacatccaatccttcttctaaactccatttttctctcaaattntccactccaaaccttaaaaacctactattcattcatacaccccaaatcaattatctctaat

SEQ ID NO: 12774 - DNA, 396 bp, Glycine max
  unsure at all n locations
  Clone ID: LIB3094-088-Q1-K1-E4
cgtacgcccaggcgtccganaaggcctgagcttagtttataagcataactggctgaggaagaaagaganagagttaataacatggcgtggagcggagcggtaccgttttggagggcggcggtgatgacgtacataacatactcaaacatatgcgcgaatctgctcaggaattgcctcaaggaaccctacaaggccgaatccctctctcgtgagaagctccattttgttctctccaaatgggtcgacgccaagcctgaaaaacctactattcgttcagacaccccagagcagtgatctggaatagttggaagctataaatgcataaatctttgagatctggaagttcattgtcattttgaacctttctgtgatgtttaattcctttggttttttctc

SEQ ID NO: 12775 - DNA, 223 bp, Glycine max
  Clone ID: LIB3094-088-Q1-K1-E5
cgacccactcatacacccacgcgtccaaaacaaacactatttcattattataacttcgcagaagataaacaagcccgatttctatataaagaaacgtcgcactcccatacatgtcttccttccatgccttcatcaactacttaaacaccaactcttcttccactcaccagcacgacaattactatgacaacttctctagctacaacagctactcctccttcac

SEQ ID NO: 12776 - DNA, 345 bp, Glycine max
  unsure at all n locations
  Clone ID: LIB3094-088-Q1-K1-E6
aattccccgtccgacccactcatactcacactcctacaatacatacactactccattattatcatttcacttaacatatctaagcacgactctatatcatacgcactcagacctcncacacctctctcttctctactccaaattcacaacctcaacattaatcttcttacaaaccttctccccacattccctctcccatttccacctgatccaaaatctacccttcatctaccctaaaatattccgccctctcatctttcatcttcgaccactataattacaaatttaacatatatctcttaatcaactcaatcaatcacaataactctcaatcctactttaaat

SEQ ID NO: 12777 - DNA, 363 bp, Glycine max
  Clone ID: LIB3094-088-Q1-K1-E7
caaagacatgcttatactggatgtagctcccctcactctcggaattgaaactgttgatggagtcgtgacaaaattaatggccagaaacactgttatcccaaccaagaaatctcaggtgttcaccacctatcaggaccatcagactacaatctccattcacgttttccaaggccagatgagtctcacaaaggattgccgccttcttgtgaaatttgatctgtctggaattcctccagccccaaggggtacgcctcaaattgaagtgaccttcgaagttgatgccaacggcattctaaatgtgaaggcagaagacaaaggcacttgtaaatcagaaaaaatcaccattacaaacgaaaaaggacg

SEQ ID NO: 12778 - DNA, 246 bp, Glycine max
  unsure at all n locations
  Clone ID: LIB3094-088-Q1-K1-E8
tttttatgaatttctgattntataccaagtacgtttaattcnttgaacaaacaaacaagtattttttcgtctttcttattctttagttatcatattcttagaaatattatcatgcatatgtcttctaattttccacagtcaatactgttgcatataaatcttttcactagttacatacacatatcagtatttcaattaatcttcttttattttacaggtaaaaattttggttattcttcttttttt

SEQ ID NO: 12779 - DNA, 354 bp, Glycine max
  Clone ID: LIB3094-088-Q1-K1-E9
tttcgattatttcttttctaattttttttctctcccttcccatttttacagagttcatggttacaatcaccacatcccgggcttaccattctcaacatcatttttctcttttattttatgccacacttgttttgtcttattcactacttttattaaacatttacccaacccttcatatccaacaccaatttttcaccttatccacctcttcctctttttccacttttcctcaatcaccaatttcacactctaactaccttcacattctctacgcttttctctatattcaaaatatacatatccctttctccactatccatcaacaatctcatcaaacaaatcacacccaacttt

SEQ ID NO: 12780 - DNA, 390 bp, Glycine max
  unsure at all n locations
  Clone ID: LIB3094-088-Q1-K1-F1
caaagacatccttctcctggatgtggctcccctcactctcggaattgaaactgttggtgggtcgtgacaaagttgaggcccagaaacactgttatcccaaccaagaaatctcaggtgttcaccacctatcaggaccagcagactacagtctccattcaggttttcgaaggcgagaggagtctcacaaaggattgccgccttcttgggaaatttgatctgtctggaattcctccagccccaaggggtacgcctcanattgaagtgaccttcgaagttgatgccaacggcattctaaatgtgaaggcagaagacaagggcactggtaaatcagaaaagatcaccattacaaacgaaaagggacgtcttagccaggaagaaattgagagaatg

SEQ ID NO: 12781 - DNA, 369 bp, Glycine max
  unsure at all n locations
  Clone ID: LIB3094-088-Q1-K1-F10
cggacgcgtgggtgcgattgctggacaagtccatgatgctgtgccggctggggggccgcgtcntggacagcacatgctccatgaaccccatcgaggacgaggccgtggtgctgcactgcctgctgcgggcccgtgggcggtacgagttgtgtgacacggcagggcaggcggccggcctccagtggagcgcggggctgacccgctggccggtgatgctgcaggacgggcagttggttgcttccttcgacgaagtgccagaggcagagaagaagcatgtctggaacacaatgttccccatccctgacgaggcagtggcgcgggcgttgcatctggaacgctgcatgcgcttnctgccccacgtacagaaca

SEQ ID NO: 12782 - DNA, 318 bp, Glycine max
  Clone ID: LIB3094-088-Q1-K1-F12
cggacgcgtgggtctttttttttgaaaatgtgaaggctttgcgggggatgccttccatcgtgcagggaaatgctgttcgggcggatgctgtcctggctccatcgctctttcgttccacaggcgtccgggaggcggtacccacctgcgggaaacgtctaaacggtggccggggcagtcaagtggagtggcgtacgcagaggcaaaccaatggatgccccgctccactgcatactgagggcaaaggttgtaggggacaagtcggggtgccactgtccctgtagttgcaggctgtttggggggtttgggggactatatctc

SEQ ID NO: 12783 - DNA, 342 bp, Glycine max
  Clone ID: LIB3094-088-Q1-K1-F2
cccacgcgtccgcgaaaccacgatggacaggtttttgatgaatttctgattggtgtgcctggtaggtaaaatgcgttgaacagacaaacaagtgttgtgtcgtctttctgagtgttgagttgtgataggctgagaaatatgagcatggatatggcttgtagtttgccgcagtcaagagtgttgcatggaggtctggggacgagttacagacacagatcagtatgtcagttaggctgctttgattttagagggagaggttttggttgtgcttcttttggggactcgagaagtgtttcaagactgcagaggagcaggatgaatgtttctgctttgtggaataat

SEQ ID NO: 12784 - DNA, 459 bp, Glycine max
  unsure at all n locations
  Clone ID: LIB3094-088-Q1-K1-F3
caacatctgaggatagagatggaaagactttcgtttccacagcacgtggtaggaaatatcccgtnactgtcaacctatggcggccagagaaaaatgcttttgaatgggctacatctttgaaagcccctcacacagaggatgcaattcgggttactcagtccacagcaaactttttcataagtgaagctaggaaatccacaaacacacctgatgctcaaaaagtgcgagataatctcatctacaattacaaacctacttttggtggaacggctgggaaaggatatgatcaagtgtatctctttgaataattctatctgtaagaggtgtccttgaatttgattttatgcacaataaattatgaactggggatgtagtttgaagaaataaaaatttgtgcacagtgatgtttgtaagatgcttaatttcagggcaatgttctgcttatcaatggtgtatatc

SEQ ID NO: 12785 - DNA, 255 bp, Glycine max
  Clone ID: LIB3094-088-Q1-K1-F4
aagacattcttcacatcaatttatacattttttttctcaaaatttaaactgttatccagttagtttcaaaaccaattccgaccaaccctattatcccaaccaataaatctcaattattcaccacctatcacaaccaacacactacaatctccattctaattttctaactctatataattctcacaaattatttcctccttctttacaaatccaatctatctctaattcctccatccccaaattttacacctaaaa

SEQ ID NO: 12786 - DNA, 350 bp, Glycine max
  Clone ID: LIB3094-088-Q1-K1-F5
gttcatttctacacatccctagctctgtcgttccgtcgttgacgatggcgtttcgggggcgaagccctgacctccgctgtctctttcttctctctctcttgtccatcgcttccgccaatgtcttcttcgaagagcgtttcgatgacgggtgggaaaatcgatgggttaaatcagattggaaaaaagatgagaacgtggctggggagtggaaccacacctctggtcaatggaatggagacgctaatgacaaaggtattcaaaccagtgaggattacagattctatgctatttcagctgagtaccctgaattcagcaacaagggtaagacactagtctttcaattttctggt

SEQ ID NO: 12787 - DNA, 364 bp, Glycine max
  unsure at all n locations
  Clone ID: LIB3094-088-Q1-K1-F6
gcggggcgtcacgtccacgcgtgtcgctaacaccactgatggacagtgttttttgatgacatttctcgattnggtgtgtcctggtagataataattgcgttgggcaggacagaacaagttgttgtgttcgtctgttctagagtgttgagtctgtgatcaggctttgagaaatactgagcataggatatnnggcttgatagtttggccgcatgtcaatgagtagttgcataggaaggatctggggcacgaagttacatgacacgagaatcagtagtgtcaagttaagtgctgcttttagatctttaagaagggagaaaggttttggttagtgctttctttttggggaccttcgagaaagtgtttc

SEQ ID NO: 12788 - DNA, 278 bp, Glycine max
  Clone ID: LIB3094-088-Q1-K1-E1
cccacgcgtccgagaaggcctgggcttagttgataagcataactgggtgaggaagaaagagagagagtgaagaagatggcgtcgagcggagcggtaccgttttggagggcggcggggatgacgtacataacatactcaaacatatgcgcgaatctgctcaggaattgcctcaaggaaccctacaaggccgaatccctctctcgtgagaagctccattttggtctcttcaaatgggtcgacgccaagcctgaaaaacctactatttggtcagacacccc

SEQ ID NO: 12789 - DNA, 291 bp, Glycine max
  Clone ID: LIB3094-088-Q1-K1-B1
gttctagatcgcgatctagaactagccaattcactctttttcttctcgccctctggcgtgggaggagtttgtaacatggctgctctaccaacggcggagcttagtgacgcaaatgcaacacatgtagcaagttgtgatgtgagggtgttgcatccagtgttcaaggtttacggtggggccaccgcgttcttcggccccgttgtcaccgtgaaggtgtttgaagacaacgtgttggtgagggagcttcttgagacgaaaggcgaaggaagagtattggttgttgatggagga

SEQ ID NO: 12790 - DNA, 321 bp, Glycine max
  Clone ID: LIB3094-088-Q1-K1-B10
agttttcgtacaagccattaagaggacaacatcaaaattctgtcttatgcacaactgcaggaactgagtcctcctggcaccatggaacaccactaggctcactctctaaaccccattcaccaaaccattccaggaacacaccaaattgaagacatgtaacaccagaacatggaacgtgcaaaccaatactacactgatatggccgacctcgatcaacagacaatggacgcacttgcaccatacattgaacttcactacaacatctttgaatatgatacagcaccatatgcataagaagtgacagaactcatctcatctgaa

SEQ ID NO: 12791 - DNA, 450 bp, Glycine max
  Clone ID: LIB3094-088-Q1-K1-B12
ggccgaccacgcgtgcgtccaaaagcacgggcttttcgcttcagttcttgacaacccgtcctggacttcaaatggatgtgcttgtaaagttgctgctgctgttttggattgggccagagatcacaaggctgctgtgtgcacacactggttccaacctctcgctgcggctggtgtccgtgaaggtcagacaggacaggtccacacttgcatggtgaattttggcccagatggaacacccatctgggagcttgaagggaagactttgctgaaaggtgaaacagatggaagttccttccccaatggtggtcttcgtgccacccacactgctggaagatacacgattttggacccttcctctccaatttttctgcgtggtgacacaatttactttccttcaatttttgtcacatggaagggtcactttgtggatgaaaagacttcttttcttcg

SEQ ID NO: 12792 - DNA, 274 bp, Glycine max
  Clone ID: LIB3094-088-Q1-K1-B4
tcccaaacctcctaataccgttctttttgtttgacttaacaaaggtcaccttgtcgggcttaaaaaattggctggacgccccttaaatcctaaagggaaaaccatccaaaaggttcacttttttaagaaccttattaaaaaagtaacccgtttttcaccctattaaaaacctattacttaatttcttaaagtttggaaagattaaaaggcacttaaagtttccaaaaaaaaacttcgaacacaccaaccccccaagaagaaaccttaagaaatt

SEQ ID NO: 12793 - DNA, 189 bp, Glycine max
  Clone ID: LIB3094-088-Q1-K1-B6
tcatactatcactcctaaacccattactactactcttttttattcacttaacattattatcatggagcgcctctatttaatagtctgcctccccttaaatctaaatttaaaacactcaataaactacactttcttaacaacctcataagacatttacccattttttcaccctattaatatcgtataact

SEQ ID NO: 12794 - DNA, 186 bp, Glycine max
  unsure at all n locations
  Clone ID: LIB3094-088-Q1-K1-B8
atggctcccaaaccgcctagtacgggtctgtttgttggactgaacaagggtcacgtggtcgccaanaaggaattgcctgcacgcccctcagatcgtaaggggaaaacaagcaagaaggtgcactttgtgaggaacctcataagagaggtagccggttttgcaccctatgaaaagcgtataactgag

SEQ ID NO: 12795 - DNA, 447 bp, Glycine max
  Clone ID: LIB3094-088-Q1-K1-C1
attctccaacttgataccgcgttcgctcactctctactcaacttcaattaatcaaatcccggacgttctctctcttgggttcaaatctcaattctattttggaaaatcagaatcaaagacagttaaaaatacagaacaaacatctcactcaacatcaacacttcagatctacgtttccactctcacaacaacgaaaaaggaaagaaaaaccgattctacagcgacaacaaggaacgaaagaacgatcgatttctcgaagcgccctcaaaatggcgcgtgcacccttcacttctttccccttcgtcctcattatccttctgtcaatcgtccacctttcgcactgcaagaccctcaaacgtgacgttaaagctttgaacgagatcaaggcttcgcttgggtggagagtggtgtatgcgtgggtcggtgatgacccttgtggagatgggg

SEQ ID NO: 12796 - DNA, 295 bp, Glycine max
  Clone ID: LIB3094-088-Q1-K1-C11
cttgatgatcccaacactttcggtaacaggattcacaggatgctgaagcttggactgagggttgatgaagatgctggtgaagcagatgctgacatgcctcctcttgaggacgctgatgcagatgctgagggtagcaagatggaagaagttgattaaatctgacttaattgcctgttacgtttttagaaacaatgattggagaaacagtctttttactatgttttatgttttttgaattttcgaaattttggaacgttggctagttaggtgccgtatgtagtagtttctttatggt

SEQ ID NO: 12797 - DNA, 283 bp, Glycine max
  Clone ID: LIB3094-088-Q1-K1-C2
attctgaagctgccagaccgaataaattgaccatgacttgacattggatttataggatcttggacgccttcacagcatcgccgaaagacctctaacactctctcttctctccttccaaatatcgtaacctctacaagttatcaccagagaaagcttatgcgcacattacatctccgatttcaacctgaactaacgtggcaccttcacctgcactgaagtatgctgcactcgcgtcactcaattgcgaccacaatagtgacacagtttagatatatgtcttaat

SEQ ID NO: 12798 - DNA, 411 bp, Glycine max
  Clone ID: LIB3094-088-Q1-K1-C3
ttttatctttattccactgaatagaacatgagcatataaatggataccctttatattatcgatctgtatattatctataaagggtaaagatatccgatgtgaatctatttgtttagttttctatcggtatgtatataggtgaataatccaacatgcctttttgtgaagtaaaaaaactaccctcgatccatgcctcaaaagggttgataataagtaaaaaaaatcaatgaattcatgataaaacccttctgcgtttttttattataaatttttttgtcaataaagggatcaaggggttgggggatcaaatggtaaagttcttttgttggtaaattggaggattagaaacatgactattgctttccaattagctgcttttgcattaattgctatttcatttattttattgat

SEQ ID NO: 12799 - DNA, 423 bp, Glycine max
  Clone ID: LIB3094-088-Q1-K1-C4
cccgtcccgacccgcgcgtcccgttcatctttattccactgaatacaacatgcacatattaacgtataccctatataatctcgatcgtcatctcatctatgacgggtgaccatatcccatgtgaatctattcattcaaatacctatccttatacatatatctcaataatctcaacattcctcattgtgaactacaaaaactaccctacatccatgcctcaccatggctgatcctaagctacaaagaccactcaattcatgataacacccttctgcgtgactctattataaattatctcgtccaccatggaatcaatgaccattcggaccaaaccgcttagatcttttcgtcatccattgcacgattacaaacatgaccattactttccaactaactgccatttcattaatttccctttcattt

SEQ ID NO: 12800 - DNA, 116 bp, Glycine max
  Clone ID: LIB3094-088-Q1-K1-C5
atcgctcctagagcgactaattcgggtatgttttgtggactgatcaagaggaacttggtgggctatatagaattggctggaggcctcttacattttgtggtgtatactagcaaaat

SEQ ID NO: 12801 - DNA, 141 bp, Glycine max
  Clone ID: LIB3094-088-Q1-K1-C6
gaagttgcgagagtgaagaaatggcgcaagacttggcattggatttggaggaacttggccggcttcacagcattgccgagagagctctaaccctctctcttctcttcttcgaaattcgtaacctcgaaaaggtatcgtcag

SEQ ID NO: 12802 - DNA, 266 bp, Glycine max
  Clone ID: LIB3094-088-Q1-K1-C7
gaagttgcgagagtgaataaatggctcaagacttgtcattggatttggaggaacttggccggctacacagcatcgccgagagacctctaaccctctctcttctctactccgaaattctgaacctctaaaagttatcgtcagaggaagcttgtgcgcatattacggcaccgatttcgaccggatctaaagctgcaccttcacctgcgcttaagtatgcggtactcgcgttcgtcatttgggaccactatagtgacaatattaaaata

SEQ ID NO: 12803 - DNA, 286 bp, Glycine max
  Clone ID: LIB3094-088-Q1-K1-C8
tcatacgaaagctcccaaaccgactaaatcgctcatgttttttcatctgaacaatagtaacttggacgcctacttataatcgcctgcagacctctaacactctctcttctatactcccaaatacttaccctctaaaaattactctcttacaaaactactccgcatattacctcaccaatatcaaccaactctaatacttcaccttcacctacactaaagtatactgcactctcctcattcagatctcaccacacatattcacaacattaaaatatctctattaatt

SEQ ID NO: 12804 - DNA, 276 bp, Glycine max
  Clone ID: LIB3094-088-Q1-K1-D10
cgtggggatcagcatggattgtacccggaagctcacccacctcaaccccgggcccagtgacattgccattggccaggccatcgagcccatccccatcagccgcatcgcatagggcgctggcatcctgccggaggagctgcgcctgtacggcaacacgaagggcaaggtggccctgacggtgctggaccgcctgcatgaccgacccaatgggcggtacgtcgtggtgacggggatcaacccgaccccgctgggcgagggcaagagcaccacctccgt

SEQ ID NO: 12805 - DNA, 308 bp, Glycine max
  Clone ID: LIB3094-088-Q1-K1-D12
cgacccacgcgtgcgcgactcgtgggcggactcgtgggcggactcttggtgttgctggcgcggtacgcccacggcgtgagtcagtactgaaagtacgggctgctgctggaggactagacggagcaccccatcatgttcgccacagtcctcgagcgcctgcgcaacgacttctaccgctgcccccaggccttcctgcacgagctggagtggctgttcgacacggtgcggcggcagcagcggtacgcctgaaaccatgtgttggcggagtccatgctgacccggctgctgatggccgtgaaggacattct

SEQ ID NO: 12806 - DNA, 255 bp, Glycine max
  Clone ID: LIB3094-088-Q1-K1-D2
gacccacccatacttaaacatccataccatacataccactacttttaactttattttacttatcacgtgaatcaagaacgcctcactaccatctcttttccaacccataatactccttcttccaaacaatccagtacaaacacattatcatgaacctaattatacatctatctccacatctactctaatataacccaattactctaatattaacatatctataacataaatactcacttaaacatacctataaaa

SEQ ID NO: 12807 - DNA, 279 bp, Glycine max
  Clone ID: LIB3094-088-Q1-K1-D6
atggctcccaaaccgcctagtacgggtctgtttgttggactgaacaagggtcacgtggtcggcaagaaggaattgcctccacgcccctcagatcgtaaggggaaaacaagcaagagggtgcactttgtgaggaacctcataagagaggtagccggttttgcaccctatgaaaagcgtataactgagttgctgaaagttgggaaggataagagggcactgaacgttgcaaagagaaagctcgggacacacaaacgcgcaaagaagaagcgtgaggaaatg

SEQ ID NO: 12808 - DNA, 243 bp, Glycine max
  Clone ID: LIB3094-088-Q1-K1-D8
gaagttgcgagagtgaagaaatggcgcaagacttggcattggatttggaggagcttggcggcctacacagcatcgccaaaagacctcgaaccctctctcttctctcctccgaaattcgtaacctcgaaaagttatcgtcagaggaagcttctgcgcagattccggcgccgatttcgaccggaactaaagtggcgccttcacctgcgctgaagtatgcggcactcgcgtcgttcagttgggacc

SEQ ID NO: 12809 - DNA, 180 bp, Glycine max
  Clone ID: LIB3094-087-Q1-K1-G6
accctacctaatcaaaaatcacccatccacacaaccacacattctcacccctacaacacattcctccacatactacccaatccataccttatctctacacttcttactacttcttaatctcaacaataccataattcacaataaaataatactaataattcaaatatattaattacttct

SEQ ID NO: 12810 - DNA, 295 bp, Glycine max
  Clone ID: LIB3094-087-Q1-K1-G8
gtccgttttcaatggaagtcatttctgctgggaggttgaatcccaacgctccgatgttcgtgccactcgcctatcggacggtggaggatttctccgaccagtggtgggacctcgttcactcctccccctggttccgcgactactggctccgcgagtgcttccaagatccccagttccaaaacgacgacgctttcgacttcgactttgacctagatctccaagatgaagatgaaagggaacgaaaggaagggaaagaggtggtgtcgttggggctgctgaaatggcgaagctgtgg

SEQ ID NO: 12811 - DNA, 194 bp, Glycine max
  unsure at all n locations
  Clone ID: LIB3094-087-Q1-K1-G9
ctatctctctaaatatcggtctggttctcttctctttcanttcctcaaacccatnttaacatcaaatcctnnatttttcctctatttattttacnctcnanactaatttactttacactattactacatatactattcacttccccttcacttntttacatcccaaaccttctctctcaatactacacaaaata

SEQ ID NO: 12812 - DNA, 285 bp, Glycine max
  Clone ID: LIB3094-087-Q1-K1-H1
agaaaaagaaaaatcaaaggacggtggtgagtgctgcttctgcttcatcatcatcagggaggaatggcggctactgtgtcttctgcgtggtcaaagcccggcgcgtgggctctcgattccgaggaacacgaagccgaactccttcaacagaacaacgacaagccactcgccgacttcccctccctcgccgccgccgctgccaagcccaagaagaagaaggcccagacctactccctcgccgaattcaccgccaaacccgacacctcctttgccgaccaagatccc

SEQ ID NO: 12813 - DNA, 423 bp, Glycine max
  unsure at all n locations
  Clone ID: LIB3094-087-Q1-K1-H11
gcttttctcatgtttaatttatgcgatcagcttccgggtggagacttgatattagagaccgttgcaaatatgccaaacttaagagagtcacatcatgaaaatgatttcaagggtggaagtggaatgtattctatatcagccttggacatggtttctaacttgggatttgtatttggagcaagttcaaacaactcaaatgagagtaggattgctgtgggtgaaatatctgttggagaaatgactgaattggaaagagcggttaaagaatctaagaacaatcataaaaaggtcatatctgcacaagccacagttgatggtgttaaagttgatggtattgacactaatttggctgtcatgaangagttactttttcctctaaatgaacttgcgaagtctcttcagtccttggcatattgggatgat

SEQ ID NO: 12814 - DNA, 315 bp, Glycine max
  unsure at all n locations
  Clone ID: LIB3094-087-Q1-K1-H12
aaaaaccgatcgaccacgcgtccgcggacgcctnnncaaacttnccattccaattttcaagtttttcaaanaangtgaatgatgcggttggatcatttgccaggagaattggtgtacaacgtgctctcaaggttaccatcgaaggtgttgcttctatgcaagtgcgtgtgcaagtcctggttcgatctcataaccgatcctcattttgtttccaattactatgttgtctacaacagtcttcaaagccaaaaggagcatctcttggtaattcgaagaccctttttttctggcctcaaaacttacatttttgttctt

SEQ ID NO: 12815 - DNA, 283 bp, Glycine max
  unsure at all n locations
  Clone ID: LIB3094-087-Q1-K1-H2
gcccacgcgaacganaaaaaaaaaaattaaaaaacaatgttgatttctccttctacttcatcatcatcagggtcgattttttaatactgtgtctctcccccaancaaaacccancccctnnnctctcnattccnanaaacactaatcctaactccttcaacataacaactacaanccactctccnacttcccctccctcaccnccncctcttccaatcccaaaaaaaaaaantcccatacctactccctcnccnaattcacctccaaaccctacacctccttt

SEQ ID NO: 12816 - DNA, 288 bp, Glycine max
  unsure at all n locations
  Clone ID: LIB3094-087-Q1-K1-H3
aaaaaaattaaaaaacaaattttttttactcctaacaactacatcatcatcccgctcgtttgttttaaactgnctctcctcccaaaacaaaacccancacatnaactctcaattcctaacaacacnaanccnaactccttcaacataacaacnacaatccactctcctacttcccctccctacaccccccctcttccaatcccaaaaataataatncccacacctactccctctccaaattcacctccaaaccctacaccttcttttcctaccaatatcccatcatcc

SEQ ID NO: 12817 - DNA, 343 bp, Glycine max
  Clone ID: LIB3094-087-Q1-K1-H4
ggcaaaattgcttgacaggatcagttgggattaatctcccacatagtttgtggttacaatggggtgagcaagtgatcttctctgtgcttgatgacctgcttgaaatttctcagacacactctcaaaaagacttccgcaacatagaaggaacccttgttcttgctttgaagctcttgtgtaaagttttcctccagttaatccaagacctatcacaattgccaggcttcaacaaattatggttggctgtactaagtcggttagaaatttatatgaaggtgaaagttaggggaaggagaagtgagaagcttcaagagcttgtgcctgagcttcttaaaaacacttt

SEQ ID NO: 12818 - DNA, 284 bp, Glycine max
  unsure at all n locations
  Clone ID: LIB3094-087-Q1-K1-H6
aaataatttcaangntggaagtggaatgtattctatatcagccttggacatggtttctaacttgggatttgtatttggagcaagttcaaacaactcaaatgagagtaggattgctgtgggtgaaatatctgttggagaaatgactgaattggaaagaacgtgtaaagaatctaaaaacaatcataaaaaggtcatatcttcacaagccacaggtgatggtgttaaaagttatggtattgacactaatttggctggcatgaaagaattacttttttcttttaaat

SEQ ID NO: 12819 - DNA, 221 bp, Glycine max
  Clone ID: LIB3094-088-Q1-K1-A1
cccacgcgttcgcggacgcattggcgaagcaatcgtaagtcagctgttctgtcccgcgggggcaggggacctgtcttggtggccaaacaacctcaaaaacattcatcaacgttcactattaatccattcatcattaagtcagaaaataagggtcgatttttttatccttggtttacttctgaaccatcatggacgtacccagttcctgggatgcccttctg

SEQ ID NO: 12820 - DNA, 289 bp, Glycine max
  Clone ID: LIB3094-088-Q1-K1-A10
cgccggcagctcgccccgcatggcccacccccccttcccaaacaccgcctggacccgcatgcagctggtgttctgcggtgcgctggagacctccaagctgaagcctgtcccatcctcttcctccctcttctccgacacgagcaacggtctgagcgtcgcccggagtgttgtgtacgaagggactctatctgctgggggttccttcgaatgtctgccccggcgggggtcccaccccttgtcccctggcgatgagaaggcgttgtactttcggtgtcgatcgttgggcggg

SEQ ID NO: 12821 - DNA, 392 bp, Glycine max
  Clone ID: LIB3094-088-Q1-K1-A11
gacccacgcatacgcccacgcgtcctcttttttctaattgctgtttttattgattgttttgaggatcagaactatgatcaatcttatgctccaaactctttctattgccaacaagttcctcaaagttacaataacaaaggctacaactacaatgaaatttatagttccttactacatgaattctctgcaccccaagttatagattcatcatcctataacacccttgatacctctccttttctggctcaagaagattatccattgtccatgatggaagaagaagatccaggctttcttggggaagagcttcattgtttggacctttaaaccacatgcaaaattgaaccaagccattccactgaaatgcctatttttaacacaactttcattat

SEQ ID NO: 12822 - DNA, 257 bp, Glycine max
  Clone ID: LIB3094-088-Q1-K1-A12
cgaccacgcgtgcatctgtatcgaacccttctccaaatttccgatcccaccgcagtcgcgtcctgctctgtgctgtaccctcggtgtgcgaaggccgcactacgaccggcacccccctgaaagcatcctgaagggcctggactctccccgcctcggctgcaccctgactccccgggcggacagtccttgaggccctcagcagacgcgttccgaacccccccccatggtgtcacgcgggaactggtttcgggtgctga

SEQ ID NO: 12823 - DNA, 427 bp, Glycine max
  Clone ID: LIB3094-088-Q1-K1-A2
caccaacgccaaacaagccctaaatctctcttctctttcttcttcttcctttaaccatgagggagatcttgcacgttcagggaggccaatgcggtaaccaaatcggttccaagttctgggaggtgatctgcgacgagcacggcatcgatcccaccggaaagtacaacgaggaaggcaacagcagcatccaactcgaaaggatcaatgtgtattacaacgaggcctctggcggaaggtacgttccccgtgccgtgcttatggatctcgaacctggaaccatggacagcatcagatctggcccctacggcaagatcttccgacccgacaacttcgtcttcggccagtccggcgccggtaacaattgggccaaaggtcattatactgaaggcgccgagctgatcgactccgttcttgacgtcgttcgcaa

SEQ ID NO: 12824 - DNA, 356 bp, Glycine max
  Clone ID: LIB3094-088-Q1-K1-A3
cccacgcgtgcgctgacgcatgttcgaaacaatcatatgtcgtctgttctgtcccgcgggggcaggggacctatcttggtcgaggagcaacctcaaaaacattcatcaacgttcactattaatccatccatcattaagtaagaaaataatgttcgatttttttatcttaaatctgcttctgatccatcatggatgagccaacttcctgcgatgcccttcacaaacaggcaccaaaacttgaagctcagtttgatgagcacatcaatccttatcgtaaaatggcttctacccatgtgtctacaaaagctgcctctccacaaagtgatctatagtctcttattgagcctttactcaaa

SEQ ID NO: 12825 - DNA, 236 bp, Glycine max
  Clone ID: LIB3094-088-Q1-K1-A5
cccacgcgttcgcggacgcgtgggcgaagcaatcgcaaagtcgctgttctgtcccgcgggagcagacgacctgtcttgatcgcccaacaaccctaaaaacattcatcaacggtcactattaatccattcatcattaagtcagaaaatcatgatcgattcttttatctttgatctgcttctgatccatcatggacgtgccgagttcctgggatgcccttcgcaaacaggcaagaaaa

SEQ ID NO: 12826 - DNA, 387 bp, Glycine max
  unsure at all n locations
  Clone ID: LIB3094-087-Q1-K1-G5
ccgactcaattttatcatacacaatgtacgtagataaagatgtcggttatcttatctgcagtgccaaccttntaaacanccctcaccctcaatgcaaggaagtcaccccacgccgcgacgaagccgtcgtgattctcacccgctacaacggcattgcctccgacgataggttcgccaatgccatgggcttcatgtctcaagaggttgcttctggctgtgctgaaatcctcangcaataccaggagttcgacaatgagaattaattacgtaattaatttcagtatattattaatctacttcctaatgtctcttgatgtggaatgttatctcgacattttcatattatcatgttatatatgttgatggaacgaccctgcttaaatttat

SEQ ID NO: 12827 - DNA, 347 bp, Glycine max
  unsure at all n locations
  Clone ID: LIB3094-088-Q1-K1-A6
gttctagatcgcgatctagaactagccaattcactctttttcttctcgccctctgccgtgggaggagtttgtaacatggctgctctaccaacggcggagcttagtgacgcaaatgcaacacatgtagcaagttgtgatgtgaaggtgttgcatccaatgttcaaagtttacggtggggccaacgcgttctccgggccccgtgtcaccgtgaaagtgttttgaagacaacgtgttggtgagggagcttcttgagacgaaaggcgaaggaggagtattggttgttgatggaggaggaagcttgaggtgtgcattggtgggagggattttgcactgatngcacataacat

SEQ ID NO: 12828 - DNA, 158 bp, Glycine max
  Clone ID: LIB3094-088-Q1-K1-A7
caccaacgtcaaacaacccatatatctctcttctatttcttcttcttcctttaaccattaggcaggtcttgcaccttcatggaggcccattctctaacccaatcctttccaacctctattaatccatctatccactagcacggacattgatcccacct

SEQ ID NO: 12829 - DNA, 268 bp, Glycine max
  Clone ID: LIB3094-088-Q1-K1-A8
gttctagatcgcgatctagaactagccaattcactctttttcttctcgccctctgcggtagaaggagtttgtaagatggctgctctaccaacggcggagcttagtgacgcaaatgcaacacatgtagcaagttgtgatgtgaaggtgttgcatccaatgttcaaagtttacggtggggccaccgcgttctcccgccccgttttcaccctgaaagtgtttgaaaaacaacgtgtttgtgaaggaacttctttaaaactaaaagccaaag

SEQ ID NO: 12830 - DNA, 209 bp, Glycine max
  Clone ID: LIB3094-087-Q1-K1-E10
tttattacctaaaaaaataaacataaaatcatattcccatacatataaattatataccaacaaaaaaaatatttaattactctattaaaaaaaaaataaaaatccatttttttgtaataaaaatactattccaattttaataataataaaaaaaaaaaaaatccccccccttttaaaaatacataactaccttcgccctacaatcccaa

SEQ ID NO: 12831 - DNA, 395 bp, Glycine max
  Clone ID: LIB3094-087-Q1-K1-E11
gaggaaatatatgtacctaaacgaaaagatcttgaaagagaatccaaacatgtgtgcttacgtgggaccttctttggatgctaggcaagacatggtggtggtagaggtaccaaagctagggaaagaggctgcagtaaaggccataaaggagtggggccagccaaagtcaaagattacccacttgatcttctgcaccaccagtggtgttgacatgcctggtgctgattaccaactgaccaaacaattgggccttcgcccctatgtgaagaggtatatgatgtaccaacaaggttgctttgcaggtggcacggttcttcgtttggccaaggatttggctgagaacaacaagggtgcacgtgtgctttgtgtctgttctgagatcactgcaatcacat

SEQ ID NO: 12832 - DNA, 337 bp, Glycine max
  unsure at all n locations
  Clone ID: LIB3094-087-Q1-K1-E2
aaaaaaaaaaaacggaccgacccacacgaccggannaaaaataaataccaaaacaaatttatttaaacacacaatccaaacatatccctctccctttttttaaaatttccatcccacccaaaacataataancctaaaaataccaaaactatccacaacaaacataattataactccatatattactttcaaccatcccatttataaaccacacaccaacataacatatacaccaccaatacaactccacatacctccacctaattaccaattaaccaaaaaataaatactctaacactatactattatctaaaaaacccaccaacaaatttttcaa

SEQ ID NO: 12833 - DNA, 263 bp, Glycine max
  Clone ID: LIB3094-087-Q1-K1-E5
gaatgataaggtatatgaacaatccttaacagatacttctacaagatgttctatttgttcggagaaaaaaattcgctcaaaaaaaacgcgaaaatattttaatcgtaacttagaggatttgttacgtagaaaaagaaagatagattcatattcccatacatataaattatataggaacaaaaaaaatcttggattactttttgaaaaaaaagtagaaatccatttttttggagtaaaaatactattccaattataataataag

SEQ ID NO: 12834 - DNA, 370 bp, Glycine max
  Clone ID: LIB3094-087-Q1-K1-E7
gtccgttttaatctaattctccttctgttcaaacactctttctcatggcatcaggtaggaagattaggatcggcatcaacggatttggaaggattggccgtttggtggccagggttgcccttcaaaggaatgatgttgaacttgttgctgtcaacgatcctttcatcaccactgattacatgacatacatgttcaagtacgacaccgttcatggccagtggaagcattttgatgtgaaggtgaaggactctaagacccttctctttggtgagaagcccgtcaccgtttttggaatcaggaaccctgaggaaattccatggggtgaggttggtgctgattattgttgtgagtcaactgtgtatcactgaca

SEQ ID NO: 12835 - DNA, 234 bp, Glycine max
  unsure at all n locations
  Clone ID: LIB3094-087-Q1-K1-E8
aacactctctctcataacatctcgtccgttttattaaaatcnccatccccccatttaaaaaaatttaccatttaaataaccaaaattccccttcaaaaaaataatcttcaactttttcctatcaactatcctttcatcaccactnattacattacatacattttcaaatacaacaccattcattnccaataaaaacatttttatattaaattaaacaactctaatacccttctc

SEQ ID NO: 12836 - DNA, 414 bp, Glycine max
  Clone ID: LIB3094-087-Q1-K1-F1
cccacgcgtccgctcgagaatatgacccgtcctaaaatttacgaaacataattattgattagttatgatatataatgagaggaacataaacgaacaatcagatgctgctagtcatttggataataaacaacattaggatttaggcatatcacatgatcgctttacttataatttagggatatcagctcaataccacatgattcaagtaatattaccaaaatcaaagccttatcctacaagatgcggtcagctacatgggtcatgacgtcattcggcaagtttagaaaccaaagtgtagcaaacgggaaaaaagtacacttctccttacagaggtatcccatatgacacaataactctgaaatagtatagtataccatagtcttaatcagcggaatatacaatttcttacatgac

SEQ ID NO: 12837 - DNA, 337 bp, Glycine max
  Clone ID: LIB3094-087-Q1-K1-F10
ctcaactaccctttaccttggttattcactactcatggccggtgcaatcatgttgtcaaccggcaccattggcttccttatgtcattctactttgtgcactacttgttctcatcagtaaagatagattgaggttcttgttgtcattgcatattaactatgaaaaaggttgattgatataacttgatcacattgcatagtagggcaacggatgtttaattcattgtctgattttatattgcgatgggatctgcagtttgttctccttctgcctgtttcccaaagtagtgtactcattcaagtattcaactagtgtttgagatcatgtttcaagtattt

SEQ ID NO: 12838 - DNA, 354 bp, Glycine max
  unsure at all n locations
  Clone ID: LIB3094-087-Q1-K1-F11
tttgaatacattccttgtagtttatactgaaagatgggtttgaagatggcgttactgatcgtaggcctttccctcatgctccttttggtctcctctgaggtggcatccacgaatacaaaagaggaggcaaatggagtggatgatgccaaatatcccggtggaagctatggagggggttacccaggtcatggcggtggcggttatcctggccatggcggtggcggttatcctggccatggcggtggtggtggctatcctggtcatggtggtggccaccctggtcatggtggcggctaccctggccgtggtggtggatactgtangcatggcttgtgcggtggccggacatacaac

SEQ ID NO: 12839 - DNA, 406 bp, Glycine max
  Clone ID: LIB3094-087-Q1-K1-F12
cccacgcgtccgcccagcgtccgaattcctcaaccacacttgccatatcaaagaaaagaggatcaacatcagatcaaagatacaacatggaggcacttcaatcatgggtttcaaagcacaagctcgccagcattggggcactctgggcctctggaattggagcaacacttgtggcttattcatgcaaaaagtctccaatgaagccaagtctcaggcttatccatgctaggatgcatgctcaggctctaactttagcagtgctatccggtgcagctgcttatcattattatgagaaacgtgatgttcagccaaaaccagaggcagattatattattcctgctcccaatgtcacccagatggttgaatatgaacttcaatgtcctttctaaaaattaaaaataaaact

SEQ ID NO: 12840 - DNA, 468 bp, Glycine max
  Clone ID: LIB3094-087-Q1-K1-F2
ggaaaaaccgggccgaccgcacgcgtccgcccacgcctccgctcgataatatgactcgttctaaaatttacgaaacataattatttctgctttatgatatataaggagaggaacataaacgaacaatcagatgctgctagtcatttggataataaacaacattaggatttaggcatatcacatgatcgctttacttataatttagggatatcagctcaataccacatgattcaagtaatattaccaaaatcaaagccttatcctacaagatgcggtcagctacatgggtcatgacgtcattcggcaagtttagaaaccaaagtgtagcaaaacgggaaaaaagtacacttctccttacagaggtatcccatatgacacaataactctgaaatagtatagtataccatagtcttaatcagcggaatatacaatttcttacatgacaaaggacagccactgatcccaaac

SEQ ID NO: 12841 - DNA, 415 bp, Glycine max
  unsure at all n locations
  Clone ID: LIB3094-087-Q1-K1-F3
ccacgcgaacggccacgcaaccactcaaaaaaaaaattctttctaaaatntacnaaacataattatctgttctttttnttatataattagacccccataaacnaacaatcaaatccttctaatcatttctataataaacaacattaacatttactcatatcacattatcactttacttataatttacncatatcaactcaataccacattattcaattaatattaccaaaatcaaanccttatcctacaatattctatcaactacattactcataacatcattccacaactttacaaaccaaattttatcaaaccttaaaaaactacacttctccttacaaaaatatcccatatcacacaataactcttaaatactatacaataccatattcttaatcaaccaaatatacaattt

SEQ ID NO: 12842 - DNA, 411 bp, Glycine max
  unsure at all n locations
  Clone ID: LIB3094-087-Q1-K1-F5
caaccatggccgactcatctcaagaccttgaccaacttctcgatagtgctttggatgattggcaggccttcaacctcaatcctccccctccaagtggggaagcaactgcgaatagcaagaaggagagtccttctttgccgtcgggggttcaaggattgggcatgggtttacccgatttgagaacgaagaaaaaggggaaacagaaggcttccaaagacagccacgtgtcggaggcgctcaacaagctcagggagcagaccaaagaggctgtgaaagggctggagtctatatccccacccactgccgatgatttaggtaaggatgccttgatggaagattgggtcaaacaatttgagcagcttgctggctctcangacatggaatctattgtggagaccatgatgcatcaac

SEQ ID NO: 12843 - DNA, 421 bp, Glycine max
  Clone ID: LIB3094-087-Q1-K1-F7
tccgcccattcgtccgaacacatatgcatcctttctctcactccattccatttccgggatttggcggttggatacatacacttacctctctggtctctagctatagcacaagatatgggtagcagttattttggagaacctaactttggaaatgaaagagcaagttgttcttcttcgtcaagaaaagggaagaagagccacaactcagacaagccaaagcaaccacagagaggtcttggagttgctcaattggagaaaatcagattacatggctatcacccttctctgcacgctccttacccttctaatttttccaacgaagatccaagagtgcaaatagcatattcatcggtgccatcatcttctttttcttactcatcatcatacgcaagcttctatggatcccaccccacatcatgat

SEQ ID NO: 12844 - DNA, 337 bp, Glycine max
  unsure at all n locations
  Clone ID: LIB3094-087-Q1-K1-G12
cgcaccantttcaccgcacgaatatcttgttgtttggagcgatccgagaaaaactgtgtgggcatgttggtttaccaggacctccttacaggtgatgagcttctctctgactccttccgttacaaggaaattgagaatggaatgctgtgggaagttgaggggaagtgggttgttaaaggagcagttgatgtagacattggtgcaaacccttctgctgagggtggaggagaagatgagggagttgatgatgcagctgttaaggttgttgacattgttgacacattcagacttcangagcaacccgcattcgataagaagcagtttgttaccttcatga

SEQ ID NO: 12845 - DNA, 375 bp, Glycine max
  Clone ID: LIB3094-087-Q1-K1-G3
ctctgctgcgtttgcttctcctccacccatccacaaacgaacacacactttgattgagagtggggcgtgttcgcacaaagacagtgaagaagtcctcgcggcaagtgatcgagaggtactactctcgcatgacgctggacttccacacgaacaagaaggttctggaagaggtggccatcattccctccaagaggctccgcaacaagatcgcgggattctccacccacctcatgaagcggatccagaagggtcccgtacgtggaatctccctcaagctgcaagaggaggagcgcgagcgccgcatggacttcgtccccgatgtctccgccatcagaaccgaccagatcgaggtcgacaaggaaacgctcgacatgc

SEQ ID NO: 12846 - DNA, 378 bp, Glycine max
  unsure at all n locations
  Clone ID: LIB3094-087-Q1-K1-G4
gtacacgaagaaggggtacaccgactcaaccggagcatacacaatgtacgtggatgaggatgacgcgagatcagatctgcagtgccaagcttgtaagcagccctcaccctcaatgcaaggaagtcaccccaggccgcgacgaagccgtcgtgattctcacccgctacaacggcattgcctccgacgataggttcgccaatgccatgggcttcatgtctcaagaggttgcttctggctgtgctgagatcctcangcaataccangagttcgacaatgaggaataattacgtaattaatttcaggatattattaatctacttcctaatgtctcttgatgtggagtgttatctcgacattttcanntatatcatgtatata

SEQ ID NO: 12847 - DNA, 297 bp, Glycine max
  Clone ID: LIB3094-087-Q1-K1-E1
gaggagatatatgtacctaaacgaatatatcttgaaagagaatccaaacatgtgtgcgtcgctggcaccttatttggatgctacgcaagacatggtggtggtagaggtaccaaagctagggaaagaggctgcagtaaaggccataaaggagtggggccagccaaagtcaaagattacccacttgatcttctgcaccaccagtggtgttgacatgcctggtgctgattaccaactgaccaaacaattgggccttcgcccctatgtgaagaggtatatgatgtaccaacaaagttgctt

SEQ ID NO: 12848 - DNA, 367 bp, Glycine max
  Clone ID: LIB3094-087-Q1-K1-B11
gttgggtgtaactgcatgctctttgccattgttgatggagttggcctttagatttttgaggtggcgatatagttatacaatttcattttacggtcttgttgactagtgttcctagactattggttaaggaactaaaaggagaagtttttaatatgtaaatcataggaaagtataaaaaaaaatcatgaagaacgcaattttatgccttccaataaaaaaccttagttccttaacccgtgtcctcgggacacttgttagcatttgccttcattttatatgtatcattagattattataattgaaaaaaatagggcctactttttgacgtcattttattcattttattaggggtcatcaaatactttca

SEQ ID NO: 12849 - DNA, 267 bp, Glycine max
  unsure at all n locations
  Clone ID: LIB3094-087-Q1-K1-B4
aaaaaaacaaccgacccacgcgaaaggntttaaaaaaaattaataaaaaaactctttcatacaacaaaataactttcctacccgctcgctttattttaaaatcactcccccccccaaaacaaaaaanttaataaaaaaatccttatattacccaacacaatactctacaaccacacccacctttcatcaccattctaaattactaatattcccttaccaatcaccctacctaacaataactcacccaaaaataaaaattttttaaac

SEQ ID NO: 12850 - DNA, 363 bp, Glycine max
  unsure at all n locations
  Clone ID: LIB3094-087-Q1-K1-B5
cccacgcgtccgctctattcttcaagcaaactcttcgtctcagatctctctttctctgtctgtagggtttccgtttctctctctgctatttatgatcactctctgacgcgcttctgtcaccaaatcaagtgcttccgtctcttccccttcttctctgattggaaggattcgtgtggtcggagatggtggtttcggggccaatcacgccggggcaggtgtctttcttgctgggggttattccagtttttgtttcatggatatattcagagtacttagagtacaagaaactctcatctcctcccaaagttcattcagatgctagtcttgaagagttggggaaggatgcaataanggaagatgatc

SEQ ID NO: 12851 - DNA, 228 bp, Glycine max
  Clone ID: LIB3094-087-Q1-K1-B6
atataacaaaactattttttcaaaaaaataaattacaaatttttcatttttaatatcattaaaactataaaaaaaaactattattaacacaattttatcccttacaataaaaaaacttacttacttaaatcctatccttacaacactttttaacataacccttcatcttatatttatcattaaattaatataattcaaaaaaataaatccatttttattacaccattt

SEQ ID NO: 12852 - DNA, 397 bp, Glycine max
  Clone ID: LIB3094-087-Q1-K1-B9
ctttctgcttcgtcgttcacttcaaaatccaaaaacagtctaaaaaagaataataataaacgagcgggttaccaagattctgttgagaagaagagcaatgccgtccaacgattccgattcgccgatgaagatcgtacatggcgacgctggttacatactcgaagacgttcctcacttcaccgactacattccaaatcttcctacgtatccgaatccgcttcgatccaatcctgcttactcggttgttaagcagtatttcgtgcacatggacgacactgttcctcagaaggttgttgttcacaaggatagtccaagaggtatacattttcgacgtgcagggcctcggcaaaaagtatactttaaatcggatgaagtgcatgcatgcattgtcacgtgt

SEQ ID NO: 12853 - DNA, 366 bp, Glycine max
  unsure at all n locations
  Clone ID: LIB3094-087-Q1-K1-C1
aaaaaaccggaccgacccacacgtccgcccacccctccntcaaaattcttctttctttccctaccaattctttctctcaaccctgttgttttanttataaatcttcccaatcacaaaaaaatttgntaaatcaacaaaatcttttgcaccaaccccatcattctcttacaacatttcaaacaatcccgttaattttaaatccaacatatccttcaatttatcccaaaaccctgtaacaaactttttagataactatatattattccattcctttatatatttctccacaattactctcatattcaaaaataccctcttttcaaaaccctttttcacaaaaataaaaatttttttctttttataaaa

SEQ ID NO: 12854 - DNA, 183 bp, Glycine max
  Clone ID: LIB3094-087-Q1-K1-C11
cccacgcgtccgtcaaaattcttctgccttcccctaccaattctttctctcaaccgatttatctgagtgaggggtttggccaatgacgagtggttttggtgaatcaacgagagcgtctgcaccgagcccatcatgctcggggaacagttcaaacgatgccggtgattttgaatgcaacatatg

SEQ ID NO: 12855 - DNA, 227 bp, Glycine max
  unsure at all n locations
  Clone ID: LIB3094-087-Q1-K1-C4
aaangtggaaaaaaatttaattaaaaaaaaaaaaaaaaacnccgccaagctatatttttaaaangacgggcccgccccnnnaaaanaaaaaaaaaaaaaaaaaaaaaaaaaaaanaaaaaaataacaaacacataaaaaacaaacaaatacaacaacaaaacaaaaaatcaaaaataaaacaactaaaaaaaaaaaaaacaaaaaaaacaaataacaaacaaccaac

SEQ ID NO: 12856 - DNA, 280 bp, Glycine max
  Clone ID: LIB3094-087-Q1-K1-C5
aaacacccttgtcgaccacaccaaaattaaaaacataaaaaagcataaaagcacaaaaagagataaaaaagggaaaataaaacattttgaagtcatatttgcacacttgattaaaggctggcgtcccttgggacggatgcgtgggggggctatacctttcctgggcctaaaaaccacttccggactatttacacttaaaggttcgaaaacacccccttttcaattttcccacccctttcttaaaataaaagtggggggcaactccggcctttttctttta

SEQ ID NO: 12857 - DNA, 437 bp, Glycine max
  Clone ID: LIB3094-087-Q1-K1-C6
ctttttcagaacaagagggcattggatctgttaattctgccaaaatgtctcaaattggcggatttttatttatttttttgtgatttttgacgttgaatttggttgcaggaattccgacggggcgattctccggtcgtcggccggcgagactaggaaatcggcgtcgccggagaaggaggaccggtactacacgacgcggggttcggcggaggagaacggcaaggtcaccggcgacggcaacaacggcgaggaacgtgccctagtttggcccaagctctacatcactctctcaagcaaggaagaaagaggaagactttctcgccatgaagggttgtaagcttcctcagcgacccaaaaagagagccaaaatcatccaaagaagcttacttttggtgagtcctggggcgtggttgtctgatatgtgccaagaaagatat

SEQ ID NO: 12858 - DNA, 233 bp, Glycine max
  unsure at all n locations
  Clone ID: LIB3094-087-Q1-K1-C8
cccacgcgtncncccacgcgtccgctccaaaaagaagaagaaacttaatcgatcatcacttgacttggctaatacatcatggcagacgagacccagaacaagtatgagagctctgaggttgaggtccaggatcgtggtgtttttgactttctcggtaagaaaaaggatgaagaagacaagcctcatcctcaggaggaggtcatcgccaccgagtttcaaaaagtcactgtctc

SEQ ID NO: 12859 - DNA, 405 bp, Glycine max
  unsure at all n locations
  Clone ID: LIB3094-087-Q1-K1-D1
aaaaaaaacggaccgaccgcacaacataacggaaaaaaaacncaatttttattacttttttttaccaccaaaaaaaaaaaaaaactctgcctttttaaaaaaacacacccccccananaaaaannttanttctactcaaaaaatacaaaacaaacaacacattgtctttatcttctttcctcttcaaagtccaattattttttaccttaatacatctctcttaccaacaatttaatcaatattaactttattatccacctcctacaaaaacactcaaacctaaaattcattcctttacacatcctcctccatactcaaatttaccctcaaatttcctaaaattaacttaaatatttaaattcctattcctattccctacaaaaaaactttttaaaaattcttttc

SEQ ID NO: 12860 - DNA, 389 bp, Glycine max
  Clone ID: LIB3094-087-Q1-K1-D11
cccacgcgtccactttctttctttcttcttttttctgccgaggaaaagaaagaaatagagggatgtgaaaaaaacacagcgtcctagatttcctcttctctgcttcggaagaaagagaaaacaaacaaaacaatggcgttcgcttctttcctcggcagagtcctcttcgcttctgtcttcatactctctgcttaccaacaatttaatgaatatggagttgatgggggacctgctacaaaagcactcagacctaagtttgatgcctttacacatcgggtgcattctcaagtgggctttcaaattccagagattaatctgaaatttttaattgctggggctattgctctgaagggtcttggaagggttcttttcatatttggcagctcttt

SEQ ID NO: 12861 - DNA, 371 bp, Glycine max
  Clone ID: LIB3094-087-Q1-K1-D3
ctgagttgcaagattcacttcaaattatgcgtttcgctgatcggttcctcatcacatggggcgacgtcgcagatcatcgcaattccttgattatttccttttgttgatacgcggaatcgcgcacacggtgctggtgtgtgcactgaggtagaaagaagaagattgaattgtaaacagcatgaattaccttcttggagctttcaagcctgcatgtaatgtcttgatcacgtttaatgatgggaagaaccggaagcaggttccgtttaaaaaagaaaatggtcaaatggtcacagtcccacttttccaaagtcaagaaaacattggtgggaagattacaatagaaccaatgcaaggggaagaagattgatcac

SEQ ID NO: 12862 - DNA, 195 bp, Glycine max
  unsure at all n locations
  Clone ID: LIB3094-087-Q1-K1-D4
aaaaaaccggaccgacccacgcgtacgctntttnacaacaanaacttaaaattattttttaatctnatcaaatcctcataacctccgccttttttttaaatcatcccccccccttcaacattnacatttatttatacactatataccccaccaattttcctttctttcccctaaataaaaaaaaaattaatttat

SEQ ID NO: 12863 - DNA, 307 bp, Glycine max
  Clone ID: LIB3094-087-Q1-K1-B10
cccacgcgtccaattttttctataattggtgcctatgttataccaatcttagttccgaagtgtcggttgaaaattactgtgaaaacaagtgccaaagccagaggtttgttgagtctttttttatagttttttttactctactctagagccattctaagtttctcttcgagtcctagcttgcttctatgtccttttcattgctttaattgttgaataatccttgaaaaattgtcttgttaaaactccattggtttagctttcatttcatttttttttaagctttgggtattgcttggctctttggttc

SEQ ID NO: 12864 - DNA, 253 bp, Glycine max
  Clone ID: LIB3094-087-Q1-K1-D5
acacggcgctggtgtgtgcactgaggtagaaagaagaagattgtattggaaacagcatgaattaccttcttggagctttcaagcctgcatggaatgtgtcgatcacgtctaatgatgggaagaaccggaagcaggttccgtgtaaaaaaaaaaatgggacaatggtcacagtcctactgttgggggggggggaaaacatttggtggaaaaatacaatataacccatgcgagggaagaagattgatcaacacgg

SEQ ID NO: 12865 - DNA, 307 bp, Glycine max
  Clone ID: LIB3094-087-Q1-K1-D7
gttaatcctgaaaaatgggtttgaaaatggcgttactgatccgaggcctttccctcatgctccttttggtctcctctgaagtggcatccacgaatacaaaagaggaggcaaatggagtggatgatgccaaatatcccggtggaagctatggagggggttacccaagtcatggcggtggcggttatcctggccatggcggtggcggttatcctggccatggcggtggtggtggctatcctggtcatggtggtggccaccctggtcatggtggcggctacccttgccgtggtggtggatactgtaagca

SEQ ID NO: 12866 - DNA, 328 bp, Glycine max
  Clone ID: LIB3094-087-Q1-K1-D8
gaaaccaagaagtagtgagaagaagggagagaatggaggaaaaggcaaaagctgagcagaggaagataggtatgaccgagacttggttgaagaagcaccgtcttctttacaatggagccactagacaccctcttattattagcattcgcgatggcaccatcaacactgcttccttcaaaacatggctcgcacaggattacttgttcgttcgggcgtttgtcccatttgtggctagtgtgctgataaaaaccgtggaaggaatcagattgcagtggtgacatggaagtcatattggggggcatggcttctctggaggatgagatttcat

SEQ ID NO: 12867 - DNA, 333 bp, Glycine max
  Clone ID: LIB3094-087-Q1-K1-D9
cccacgcgtccgcccacgcgtccgctcgctttatcttcccttcccttcatctccgcttcaggaaactgtcctcctctctatctctgttcgaaacaagtccaacaccagcaacacactgcttcaatctcaatcgggcacattgagaaatggttttgagtaatgggaaaactgaggcaccattgccaagtagtaatgggggaggtgctgagattgataacaatgagaagaagcccttcaagatcttcgtagggtatgaccctcgcgaagatcttgcctatgaggtatgtcgccactccatcttgaaaaagtcttcaatccctgttgagatcatac

SEQ ID NO: 12868 - DNA, 283 bp, Glycine max
  unsure at all n locations
  Clone ID: LIB3094-086-Q1-K1-E10
ttcgcttcgtcctttacgagcctttcctttcagtctcattgattcggtgggtgcggtgcagcgagccgactagaccctgatcggcgtcggacaccgtcggagaacaagatgattgtctgcgtcccgtcgtcgtcaccagacaaatcgctgacatacagagcttacngangccgatgatgctctaagcttcaccacatcgtccattgctcgctcgatgtggtcgacgagcgagtgaacaatcctaaaaagtctgggccgatgcttaatgagacgtttttgggac

SEQ ID NO: 12869 - DNA, 297 bp, Glycine max
  Clone ID: LIB3094-086-Q1-K1-E3
gcttcctcctcttacgagcctttcctttcagtccattgattcggtgggtgcgggtgcagcgaaagcgagctagaccctgatcggcgtcggcacaccgtcggagaacaagatgattgtctgcgtcgccgtcgtcggtcaccagaacaatccgctgtacatacagagcttcacggaggccgatgatgctctcaagctccaccacatcgtccattgctcgctcgatgtggtcgacgagcgagtgaacaatcctaaaaagtctgggccgatgcttaatgagacgtttttgggactgcttta

SEQ ID NO: 12870 - DNA, 301 bp, Glycine max
  Clone ID: LIB3094-086-Q1-K1-E4
gagaacactttcatcgactgctcagaccactattgaaattgattctctatacgagggaatgtgatggctactccactgttactcgtgccagatttgaggagctcaacatggatctcttcaggaaatgtatggagccggtggagaaatgtttgagggatgctaagatggacaaaagaagtgttgatgatgttgtccttgttggtggttctaccagaattcccaaggttcaacaactgctgcaggacttctttaatggaaaagagctttgcaggagcattaatcccgatgaggctggtgcata

SEQ ID NO: 12871 - DNA, 278 bp, Glycine max
  Clone ID: LIB3094-086-Q1-K1-F1
cccttatctttctctcttctctctccccgctctaaccctaactccctaccctattccgctttcggtcatccatcatggaaagggggaaggtccagacccgattttaaaaaacccatgcccaacttgctgggaataaaaaaggcgcccgcacccagaactaggaacccccccgaaaggggaaagccagcaaagatcctaacaagccaaagaggcctccaagtgctttcttcggtttcatgtaattataatatattggtatctctacgaatcatttgact

SEQ ID NO: 12872 - DNA, 150 bp, Glycine max
  unsure at all n locations
  Clone ID: LIB3094-086-Q1-K1-F9
gtccggcttccgcctcttacgagcctttcccttcagtttatagatccggtgggtgcgggtgcagcgaagccgagcggtaccctgatcggcgtctgcacaccgncggagaacaagatgattgtctgcggcgcccgcgtcgggcaccagaac

SEQ ID NO: 12873 - DNA, 277 bp, Glycine max
  Clone ID: LIB3094-086-Q1-K1-G10
tgcccacgcgtcctatttattctataattggtgcctatgttataccaatcttagttccgaaatttgaattgaaaattactgtgaaaacaagtgccaaagccagaggtttgttgagtctttttttatagttttttttactctactctagagccattctaagtttctcttcgagtcctagcttgcttctatgtccttttcattgctttaattgttgaataatccttgaaaattgtcttgtttaaaactccatggtttaacctttaattcaatttttttt

SEQ ID NO: 12874 - DNA, 322 bp, Glycine max
  Clone ID: LIB3094-086-Q1-K1-G2
acgcgtccgcccacgcgtccgaaaagatgaaggattcacagaagatgaacatactactaatcaaaatttgcaagaattaggtcagttggagatggacagttctactattgcttttgtgcaaagattgagttcggagtcccccttgcatttttccaacagtttatttagcccttcggacagctagtccaccattccagccagatccccagttcagcattctaaatcaaaaccaaaacaccgacctaccaagtcagcctcttgttcagtttcttctgccactacacctgaaaaaacatgcacggggaattaagtagattctttt

SEQ ID NO: 12875 - DNA, 304 bp, Glycine max
  Clone ID: LIB3094-086-Q1-K1-G5
cccacgcgtccgcccacgcgtccggatgataggaatataccttacggatggtggaatcaagaagcatttgggattgcatagtgcggatggtgacgaagatggaagacaaagagagtgagagagagaaaaatcttcgctttatgtcaatggcacgaagcaagggtttttacagaagtgagcaacgactccagatatgagaaaagtgagtttatttggggtcatatttgtaaaaagtggttttgtaattataccctctaattcaagagtgaagaaacaagggtgggatgggaatttaaatagtaca

SEQ ID NO: 12876 - DNA, 280 bp, Glycine max
  Clone ID: LIB3094-086-Q1-K1-G8
cccacgcgtccgcacgttccgagttttcttatcgctcatagagagttcgacgcggcggttgcagaagaagattgcaagatgaagttcaacatcgcgagtcccaccactggatgccagaagaagctcgagatcgacgacgatcagaaactacgagcattttgggacaagaggatctcacaggaggtcagcggagatgcacttggtgaggaatttaagggctatgtcttcaaaattactggaagttgtgacaaacaaggatttccgatgaaacagggagtgc

SEQ ID NO: 12877 - DNA, 169 bp, Glycine max
  Clone ID: LIB3094-086-Q1-K1-H2
cccacgcgtccgcccacgcgtccgacttactgccatgtccatggattctatggccacttccatcggagtctcggtccccgtgctccgcttgctcctctgcttcgacgccaccgggcccctcagcttgctctgccgctttctaccccgagggcttcccaagcacctctac

SEQ ID NO: 12878 - DNA, 310 bp, Glycine max
  Clone ID: LIB3094-086-Q1-K1-H3
gcttcctcctcttacgagcctttcctttcattccattgattcggtgggtgcgggtgcagcgaaaccgagctagaccctgatcggcgtctgcacaccggcggagaacaagatgattgtctgcgtcgccgtcgtcggtcaccagaacaatccgctgtacatacagagcttcacggaggccgatgatgctctcaagctccaccacatcgtccattgctcgctcgatgtggtcgacgagcgagtgaacaatcctaaaaagtctgggccgatgcttaatgagacgtttttgggactgctttatcctattgaaaac

SEQ ID NO: 12879 - DNA, 79 bp, Glycine max
  unsure at all n locations
  Clone ID: LIB3094-086-Q1-K1-H5
tgtggacctcacagtgaggctggagtttgtttcctcctacgantaaattaaaaatgcgatggaggacgaatcagagggc

SEQ ID NO: 12880 - DNA, 171 bp, Glycine max
  Clone ID: LIB3094-086-Q1-K1-H6
gtttggtgtaactgcatgctctttgtcattgttgatggagtttgcctttagatttttgagttgcccatatagttatacaatttcattttaaggtcctggtgactagggttctagactatgggtaaaggactaaaggataagttgttaattatgtaattcattagaaggtat

SEQ ID NO: 12881 - DNA, 412 bp, Glycine max
  Clone ID: LIB3094-086-Q1-K1-H9
aaaaaaaaaaaaaaaaaaaaaaaaaaaaaaaaagaaaaaaaaaaaaaaaaaaaaaaaaaaaaaaaaaaaaaaaaaaaaaaaaaaaaaaaaaaaaaaaaaataaaaaaaaaaaaaaaaaaaaaaaaaaaaaaaaaaaaaaaaaaaaaaaaaaaaaaaaaaaaaaaaaaaaaaaaaaaaaaaaaaaaaaaaaaaaaaaaaaataaaaaaaaaaaaaaaaataaaaaaaaaaaaataaaaaaaaaaaataaaaaaaaaaaaaaaaaaaaaaataaaaaaaaaataataaaaaaacaaaaaaaaataaaaaaaacaaaacaaaaaaaacaaaaaaaaaaacaaataaaaaacaaaaaaaaaaaaaaaaacaaaaaaataaaaaaaaaaaaaaaaaaaaaaaaaaaaaaaaaaaaaa

SEQ ID NO: 12882 - DNA, 242 bp, Glycine max
  Clone ID: LIB3094-087-Q1-K1-A12
tttcctttgtcttggctgtgactccaaagttcacgcagccaacaagcttgcctctcgccatgctcgtgtttgggtttgtgaagtctgtgagcaagctccggctcatgtaacctgtaaggctgacgctgccgctctctgcctcacttgcgaccacgatattcactctgctaatccgctcgcacgtcgtcatgaacgtgttccagttacgcctttctacgacacattcaactctgacaactcac

SEQ ID NO: 12883 - DNA, 318 bp, Glycine max
  unsure at all n locations
  Clone ID: LIB3094-087-Q1-K1-A2
aaaaaaaaaaaaaaaacaaaanaaaaaaaaaaaaataaaaaaaataaaaaaaaaaaaaaacaaaaaataaaaaaaaaaaaaaaaaaatacaaaaaaaaaaaacaaaacaaaaaaacaaaaaaaaaaacataaaaaaacaaaaaaaaaaaaaaaacaaaaaaaaaaaaaaaaaaaaaaaaaaaaaaaaaaaaaaaacaaaaattcaaagacaaaaaaaaaaataaaaaaaaaaaaaaaaaaaaaaaaaaaaaaaaaaaaaaaaaaaatataaaaaaacaaaaaaacaaaaaaacaaaaaaaaaaaaaaaaaaaaaaaaa

SEQ ID NO: 12884 - DNA, 397 bp, Glycine max
  Clone ID: LIB3094-087-Q1-K1-A3
ctagttctagatcgcgagcggcgccctttttttttttttttacactacgaagaaatgatctgcataaaattgaagtacacatcattaacaagattccaccggatcagcagcgtcttatcttcgcagggaagcagcttgaggatggacgcacgcttgcagattataatattcagaaggagtccacgcttcaccttgtcctcaggctccgtggtggtgatttctagttcagttgaatcttgctaatgagatgtttcagttctaataataatttctctttcctttttccaatttctcttgtcgccttacgctccgtggtgtccctgtctagtttcggtactggggaatttttgtaaagatgtgtacttccattttaattaatataattcttcggtttggt

SEQ ID NO: 12885 - DNA, 411 bp, Glycine max
  Clone ID: LIB3094-086-Q1-K1-D3
ggcggcgctgtggcggacgcgccggcggttgttgaggagaagacggagttcgacgtggtggtcgaggaggtgccgagcaacgctcgaatcgcggtgatttaaggcggtgagggcattgacgaacctagcgctgaaggaggcgaatgtgttgatcgaagggttgccgaagatgttcaaggaagggatttcaaaggacgaagctgaagatgcgaagaagcaactcgaagaagctggtgccaaggttaccattgcttaaacactgtttagctgcagcatatatgttctgcttcttcttttgttggttgtatgttgagtttaccaggtcaactgtaatttcatttccattttggtctgggatttaatcttttatttggaatgagggaatatgagtgcctaattgtaatattaatt

SEQ ID NO: 12886 - DNA, 334 bp, Glycine max
  Clone ID: LIB3094-087-Q1-K1-A4
cccacgcgtccgcccacgcgtccgcaaaaattacaacaccaatctcacccatttcaaaaaggggccgttagtgttactattcgtaaaatggccactcttgttctttaccaattctttctcaaactcttgctcctaatttcagtctttcagctttcctttgctgctaggagactcaaccagctggttcaggaccagtcacagttactccattaccacaacggtcctcttctatacggcaaaatcgccgtgaacctaatctggtatggtcacttcaaaccatcccaaaaggccatcatcaccgatttcgttacctcactgtcatccccatcgtctc

SEQ ID NO: 12887 - DNA, 376 bp, Glycine max
  Clone ID: LIB3094-087-Q1-K1-A5
cccacgcgtccgcttttctctaatggctggagttttgattgttttgaggatcaaaacgatggtcaagcttttcctccaaactctttctcttgccaacaagttcctcaaagttacaataacaaaggctacaactacaatgaaatttatagttccttactacatgaattctctgcaccccaagttatagattcatcatcctataacacccttgatacctctccttttctggctcaagaagattatccattgtccatgatggaagaagaagatccgggctttcttggggaagagcttcattgtttggaccttcaaaccacatgcaaaatggagccaagccattccactgaaatgcctattttcaacacaacttcatcat

SEQ ID NO: 12888 - DNA, 335 bp, Glycine max
  Clone ID: LIB3094-087-Q1-K1-A6
cgcaaattcaaaggaggatctctcttgcgttttctctaggttttcgctatggcgtcgaagggaattttgaaggagcttaaggatttgcagaaggatcctccaacatcttgcagtgccggtcctgttgttgctgaagatatgttccattggcaagctacaattatgggtcctccagacagtccctatgcaggaggtgttttcctagtgaccattcatttccctccagattatccctttaagccacccaaggttgcattcaagacaaaggttttccacccaaatataaatagcaatggaagcatttgccttgatatattgaaggagcagtggagccc

SEQ ID NO: 12889 - DNA, 313 bp, Glycine max
  unsure at all n locations
  Clone ID: LIB3094-087-Q1-K1-B1
aaaaanaaaccgacccacgcatccggttttntataactacattttctttaccattttttatgcaacacccctttaaatcctgcccgtgcccatataaatatacaattgcatttaacaactttcttaattatttttctaaactatttccttaagaactaaaaataaaaatttttaatattttaattattttaaaatattaaaaaaaatcattaaaaactcaattttattccttccaataaaaaaccttaattccttaacccctatcctccccacactttttaaacaatttcccttattttatatatgtcacatt

SEQ ID NO: 12890 - DNA, 165 bp, Glycine max
  unsure at all n locations
  Clone ID: LIB3094-085-Q1-K1-F11
gcgtgcggaacgcgaacacaaattcattcaccttccgttcctacccttctctctctcnccacctcttcttgttgctctctcatgctccttctctcaaccaaaccaatccattattcatttgaatcttcttatacatcccaaaaaaacccaataaaaaaagggtct

SEQ ID NO: 12891 - DNA, 254 bp, Glycine max
  unsure at all n locations
  Clone ID: LIB3094-085-Q1-K1-F12
cgtgcggaacttctaacacaaattttttcatttaccattcctatccttctctctntnnccaagccttagtcttactctcacatgctccttctctgaaccaaacccatccattattcattttaatcttcttatacatcccaaaaaaacccaatcaaaacactgtccttacaaacttctctttatccctaaaaaacaatcaaacctttccattaaaaaaagaaccccctttttttaaattcccaattttggtctca

SEQ ID NO: 12892 - DNA, 238 bp, Glycine max
  Clone ID: LIB3094-085-Q1-K1-F2
catctccaaacatcacaagattctagcatcagtaataaagcgcacccagagggaaaccaatcgacaagaaaacgacacatacataccttgttccataggcatcatccaccactaagaatattctcaaacctctacaaaaaaactcacactctccaaagatcaaccaattatcctggaagagagcttcaaataacacaacactcttaaccccccaagtcaacacacacaccccaattaa

SEQ ID NO: 12893 - DNA, 307 bp, Glycine max
  Clone ID: LIB3094-085-Q1-K1-F3
gttaatctttccggccttgacctctctaaactggatttatcttatgttgatttcagctatggttggcttaaaaacgtgtttttttcacgagcaaaccttcaatgtgcaaagtttcgagatgttgatgccgagggctccatctttcacaatgcaactttgcgtgaatgtgaatttactgcggcaaatcttcgtggtgctttattggctggtgcatgccttcagagtgcaaatctacaagatgcttgcttagtagactctagcttctgtggagcagatctgcgtactgcacatctacagaatgcagatc

SEQ ID NO: 12894 - DNA, 341 bp, Glycine max
  Clone ID: LIB3094-085-Q1-K1-F4
gatactaaatgaccccataaaggcaatatcttataattcaaaattttttctaaattaaaaaggtgagtcatacctttcatgaagcagcatacgccaatagacaaagggaaagtgaagttatcaaaattcaacttctcctttttaaaagtctgattgcggtgcttaaaaaatttgttttttcaacaccaaacccaaaccctacttagatttcattctttctttcttcacacattcacataatcatctctctctcactttctgtgaggaactgacaatttgtcaccaactttaactttactacttacttgtccaattaactatttcattttcatatgccaaaa

SEQ ID NO: 12895 - DNA, 330 bp, Glycine max
  Clone ID: LIB3094-085-Q1-K1-F6
gaacgcgaacacagattcattcacctaccgttcctacccttctctctctcgccggctcttggtcttcctctcgcatgctccttctctgaaccaaaccaatccattattcatttgaatcttcttatacatcccaaaaaaacccaataaaaaaggggtctttagaaggttctggttgatgggtaggagaggaatcaagctattcgatgaagaaaggaacggtcttttttcaatttccaattttgggtctcaatggggtggtgttagaggtgatggtgttcaagaccctgtgaatttggctgtgtatgcaagcattagtcaaatgggaatggg

SEQ ID NO: 12896 - DNA, 366 bp, Glycine max
  Clone ID: LIB3094-085-Q1-K1-F8
cccacgcgttcgtccacgcgtccggtgattgaagctagttagaacaagatgttgcagctacgctacacggcgattttctccgaaatgcttttgattctcacgctcgtcttcaaaaccccactgagaaaactcgtcatcgtttccctcgatagtgtgaagcgcggtcgcggtcccgtggtggtttccaccgtgggcgccacattgatggtggttctcgcttcgagcctctacagcatggccaagatccagcaacgcaccctcgaggccggcatagtcaaccccaccgaccaagtcctcatgtccaagcacatgctcgaagcttctctcatggggtttctgctggtcctctctctgatgattgataga

SEQ ID NO: 12897 - DNA, 346 bp, Glycine max
  unsure at all n locations
  Clone ID: LIB3094-085-Q1-K1-F9
ctagttagaacaagatgtttcttcttcgctacacggcgattnncnccgaaacgcttttgattctcacgctcgtcttcaaaaccccactgagaaaactcgtcatcgtttccctcgatagtgtgaagcgcggtcgcggtcccgtggtggtttccaccgtgggcgccacattgatggtggttctcgcttcgagcctctacagcatggccaagatccagcaacgcaccctcgaggccggcatagtcaaccccaccgaccaagtcctcatgtccaagcacatgctcgaagcttctctcatggggtttctgctgttcctctctctgatgattgatagattgcaccattacat

SEQ ID NO: 12898 - DNA, 310 bp, Glycine max
  unsure at all n locations
  Clone ID: LIB3094-085-Q1-K1-G1
ggggcgaccgaggcgtgcggttaatctttccttcctttacctttcttatcttcatttatctcatattaatttcaggcttggttgtattaaaaacgtgcccccctcaccaccataccttcaatttncaaagttccaagatattaataactaggactccatctttcacaatgcaactttccacaaatgtgaatttactgcctcaaatcttcatggttctttattaacatatgcatgccttcacatttcacatctacaagatacttgcttattatactctatcttctgttgagcagatcttcatactgcacat

SEQ ID NO: 12899 - DNA, 195 bp, Glycine max
  Clone ID: LIB3094-085-Q1-K1-G10
cccacgcgtccgtgaaaatggaaggcaccattgattgataacccagatttcaaggatgaccgcgaccgctatgttttccccaacttgaagtacgtggggattgaattgtggcaggtgaaatctggtactttgtttgacaatgtcttaattactgatgatcctgagtatgctaagcagctggttggaagaaacatg

SEQ ID NO: 12900 - DNA, 306 bp, Glycine max
  Clone ID: LIB3094-085-Q1-K1-G4
gcttcctcctcttacgagcctttcctttcagtccattgattcggtgggtgcgggtgcagcgaaaccgagctagaccctgatcggcgtcggcacaccgccggagaacaagatgattgtctgcgtcgccgtcgtcggtcaccaaaacaatccgctgtacatacaaagcttcacggaggccgatgatgctctaagctccccacatcgtcattgtcgctcgatgggcgacagcagtgacaatctaaaaagctgggcgagcttatgagacgttgggacgctatctatgaacacaagatatggtatctgcta

SEQ ID NO: 12901 - DNA, 371 bp, Glycine max
  unsure at all n locations
  Clone ID: LIB3094-085-Q1-K1-G5
atctntctttcttttttctctaatctttcctatctcgtgagaactgttttttttttatcttacccattcccacaaccatcctccaacatctttcatttcctctcctcttctttcttaaaatatattccattcacaaactacaattattgttcctccacacaatccctattcatgaaattttttcctattgaccattcatttccctccatattatccctttaaaccacccaaaatttcattcattacaaaatttttccacccaaatataaatagcaaatttaaaccatttcccttcatttaatttaactaaccaatttaacccctcctctaacccatttaccaataatttttcctttcaattttatttcccc

SEQ ID NO: 12902 - DNA, 303 bp, Glycine max
  Clone ID: LIB3094-085-Q1-K1-G6
cgcaaattcaaaggaggatctctcttgcgttttctctaggttttcgctatggcgtggaagcgaattttgaaggagcttaaggatttgcagaaggatcctccaacatcttgcagtgccggtcctgttgttgctgaagatatgttccattggcaagctacaattatgggtcctccagacagtccctatgcaggaggtgttttcctagtgaccattcatttccctccagattatccctttaagccacccaaagttgcattcaggacaaaggttttccacccaaatataaatagcaatggaagcatt

SEQ ID NO: 12903 - DNA, 201 bp, Glycine max
  Clone ID: LIB3094-085-Q1-K1-G7
acgcctgcggccacgccttcggacttgccaaaatgtatcgaccatggttccgggcgggcaaaaaaacatcgtgtttgtgatcaacaatggtggatacaccatcgaaggtgaaattcatgatgggcccgacaatgtgattaaaaactggaattacactgggttgattgatgcaatccacaatggtgaaaggaaatgctggac

SEQ ID NO: 12904 - DNA, 442 bp, Glycine max
  Clone ID: LIB3094-085-Q1-K1-G8
cggggggggaggcgttctactgcccaattgtatcttcaatgtttctgcgcgggcaaaaaaccatcgtctttcgtatcatcaatggtggatacaccatccacgttgaaattcatgatgggccgtacaatgtgattaagaactggaattacactgggttgattgatgcaatccacaatggtgaagggaaatgctgtactgccaaggtgttctgtgaagaggagctagttgaagcaattgccacagccacaggacccaagaaagactccttatgcttcattgaggtgattgttcataaggatgacaccagtaaagaattgcttgaatggggctcaagggtttttgctgccaatatccgtcctcccaatcctcagtaatcttcagaatttatcctatgactaaatttctgcagttgccctttatctctatgaaagtgagaatcatt

SEQ ID NO: 12905 - DNA, 391 bp, Glycine max
  Clone ID: LIB3094-085-Q1-K1-H1
gaacgcgaacacagattcattcacctaccgttcctacccttctctctctcgccgcgtcttggtcttcctctcgcatgctccttctctgaaccaaaccaatccattattcatttgaatcttcttatacatcccaaaaaaacccaataaaaaaggggtctttagaaggttctggttgatgggtaggagaggaatcaagctattcgatgaagaaaggaacggtcttttttcaatttccaattttgggtctcaatggggtggtgttagaggtgatggtgttcaagaccctgtgaatttggctgtgtatgcaagcattagtcaaatgggaatggggtttggtgttcaagaaccaaacccttcttcttctttttctgatggtgataattcccaacac

SEQ ID NO: 12906 - DNA, 306 bp, Glycine max
  unsure at all n locations
  Clone ID: LIB3094-086-Q1-K1-A1
gttccaagaagtgttagagtggaaagacctgttgattaggtttttacaatttgccaattgcgattccttgatgtcagcactctacatgctgctctgccagattccactgctgttagaatcatctcanattctcgtttgtatacacgtaaatcacttatctattagtaggattttaatgtatttcaaatatttgtataagtagaaatttctttctggcatctgggttttggttcaattatgtaggtgggttaacattcatagctgcatgaccacccagttctcaaatactgtaaatagcttgcaaaa

SEQ ID NO: 12907 - DNA, 200 bp, Glycine max
  Clone ID: LIB3094-086-Q1-K1-A4
atggctcccaaaccgcctagtacgggtctgtttgttggactgaacaagggtcacgtcgtcaccaagaaggaattgccttcacgcccctcagatcgtaaggggaaaacaagcaagaaggtgcactttgtgaggaacctcataagagaaggaacccgttttggaccctattaaaagcctataactgaattgctgaaaggttg

SEQ ID NO: 12908 - DNA, 260 bp, Glycine max
  Clone ID: LIB3094-086-Q1-K1-A7
cccacgcgtccggacaattctgagttctgatgatataaagcaagcactatttagaagcgcaggatatggtggacgatatttgtgaaaatagaagagaggtgcaaaataacacagaaagtgcaccatagctaggggagagtttttgagtttctgatcatagtgatatccattgatttacaagccaatctagccggatttcgtttttcttagtgtaagacaataattgatttcttcaacatgatgcctattgtaacattttc

SEQ ID NO: 12909 - DNA, 279 bp, Glycine max
  Clone ID: LIB3094-086-Q1-K1-B4
ggctgaagcacaactacgagaccagcatggtaactctgtcccactcaccgatcaatacggtgatcgggttatcttaactgacgagcgcggtaattccgtccaactcactggtgtcgctaccaccgctaccggcacagcatgatctgggtttgggtcctatggtaccggtgcttacggtggtggtgcaagtgcaaccaccggtgcatatgctttggcaacccaaccaaggatgggcatggaggctagagagctttgttgttcctccagttcaagctctat

SEQ ID NO: 12910 - DNA, 125 bp, Glycine max
  Clone ID: LIB3094-086-Q1-K1-C1
aaacacccttgtcgaccacaccaaaattaataacataaaaaagcataaaagcacaaaaaggcatgaaaaagggaaaataaaccattttgaagtcatatttgacaacttgattaaaggctgtcgtc

SEQ ID NO: 12911 - DNA, 324 bp, Glycine max
  Clone ID: LIB3094-086-Q1-K1-C3
gagtgccagaggttcaaccatacttctctttttccctttacatccgcactgtttcctctcggaggccataatggttcgcattctgacggaaaatggcggagtggaacgcatggaggagatcatcagggaccatttggaccctgtttcaaagcaagtgttggggatctggttggatcattgtgcttgtgccaagcgacaagttggagaggcagaaagagcttatcttaagaaaagggatggtctcattagaaacaagaccattgagattgatcttggttcaagctttcccagattgtttggtccagaagtagcaaaccgggtact

SEQ ID NO: 12912 - DNA, 264 bp, Glycine max
  Clone ID: LIB3094-085-Q1-K1-C2
cccttatctttctctcttctctctccccgcccaaaccctaactccctaccctatggcgctggctctcatccatcatgaaaggaggaaagtccaagaccgaatctaagagagccgatgccaaacttgctgtgaataagaagggcgccgccaccaagactaggaaacccgccggaaaggggaaggcagcgaaagatcctaacaagccaaagaggcctccaagtgctttctttcgtttcatgtaattataatatattggtatctcta

SEQ ID NO: 12913 - DNA, 453 bp, Glycine max
  Clone ID: LIB3094-085-Q1-K1-C3
gcgcccttatctttctctcttctctctccccgcccaaaccctaactccctaccctatgccgcttgctgtcatccatcatgaaaggaggaaagtccaagaccgaatctaagagagccgatgccaaacttgctgtgaataagaagggcgccgccaccaagactaggaaacccgccggaaaggggaaggcagcgaaagatcctaacaagccaaagaggcctccaagtgctttcttcgttttcatgtaattataatatattgttatctctacgattcatttgacttccgatgcgctctcttatctttcctccgaataattttatcgtcaaaacttttatccttgtccaattgtaagtccacgcgttctttacctgttggtggttggttacctcgattgctttattgttaaaattatgttttttgagtatgctagatctagcttatgcttcgtgaaac

SEQ ID NO: 12914 - DNA, 160 bp, Glycine max
  Clone ID: LIB3094-085-Q1-K1-C4
cccacgcgtccgccacgcgtccggtttctggtggaggatccaacttcagagcaattcatgaggcctccaaaaggggatcacttcatggagatgttcttgtgttggtcacaaataaaagtgattgtggaggtgcggagtatgcaagaaataatggtatccc

SEQ ID NO: 12915 - DNA, 162 bp, Glycine max
  Clone ID: LIB3094-085-Q1-K1-C5
aaacagttttcacccataccttctcactttattaaaagctgtccgcccttgttaccgatgcgctgagtactaatacctttcctgtgccttaaaacaacttcctaactattcacactttaagttcgtagaccacaccttttcaaattttccaacgcttttctc

SEQ ID NO: 12916 - DNA, 310 bp, Glycine max
  Clone ID: LIB3094-085-Q1-K1-C6
aacaatttgttgggcaaatttgagctatctggcattcctcctgcacccaggggtgttcctgagattacagtgtgctttgacattgatgccaatggtatcttgaatgtctctgccgaagataaaaccactggccagaaaaataagatcactatcaccaatgacaagggtagattgtcaaaggaagatattgagaagatggttcaagaggctgagaagtacaagtctgaggatgaagagcacaagaagatggtgatggcaaaaacgctttggaaaactatgcataccacatgaggaacaccgtgaaggatga

SEQ ID NO: 12917 - DNA, 423 bp, Glycine max
  unsure at all n locations
  Clone ID: LIB3094-085-Q1-K1-C8
gcaagtgtaacccaaaaccctagcggcgcctgctttcttcgttcgtcttttgcatcanccatgaggatggagtctcaggtgaagcatgctcttgttgtcaaagttatgggtcgtactggatccagaggacaggtgactcaagttagagtgaagtttttggatgatcagaaccgtcatatcatgaggaatgttaaaggaccagtgagagaaggagacattctcaccctactcgagtctgaaagggaagcaagaaggttgcgctagagggtatttttttcttgatctttatggtagttagttggtgctaaaagttatagcaccccgtcttggtgtcttggatctattttcattcaaaatatgggttgaattttggatggttgggggttaatatatgattttgaattatggcttaaattttggatt

SEQ ID NO: 12918 - DNA, 429 bp, Glycine max
  unsure at all n locations
  Clone ID: LIB3094-085-Q1-K1-C9
cgcgtgcggaagtgtacccaaaaccctancggcgccttctttcttcgttcgtcttttgcatcanccagcaggatgtagtctcangtgaagcatgctcttgttgtcaaagttatgggtcgtactggatccagaggacaggtgactcatgttagagtgaagtttttggatgatcagaaccgtcatatcatgaggaatgttaaaggaccagtgagagaaggagacattctcaccctactcgagtctgaaagggaagcaagaaggttgcgctagagggtatttttttcttgatctttatggtagttagttggtgctaaaggttatagcaccctgtcttgttgtcttggatctattttcattcaaattatgggttgaattttggatgtttggagtttaatatatgattttgaattattgcttaaattttggatt

SEQ ID NO: 12919 - DNA, 363 bp, Glycine max
  unsure at all n locations
  Clone ID: LIB3094-085-Q1-K1-D10
gcctaaaatgctgacctgaaaaaaacagtcctttatgacttccatgttgctaatggagggaagatggtgccatttgctggatggagcatgccaatccaatacaaggactcaattatggactcaacccttaactgtagggagaatggtagcctttttgatgtttcccatatgtgcgggctaagcctcaagggaaaggactctgtcccattccttgaaaagcttgtcattgcagatgttgctgggcttgcccctggaactggttcgttgactgtcttcacaaatgaaaaaggaggggcaattgatgattcagtgattaccaaggtgaaggatgatcacatatactnggttgtgaaatgctgatgt

SEQ ID NO: 12920 - DNA, 331 bp, Glycine max
  unsure at all n locations
  Clone ID: LIB3094-085-Q1-K1-D11
cgtacgattttaaaccctccaaccttantttttattctatacttgttcaccctttattctcggctctagcaaacatcaaccatggcttcaacaataaccttggtgacatccaccttgctctttctttctttcactttgtcatgtgctattgacacctccaccatcaccaactacaccgacaatgaagtcatgaccatgtacgaagagtggttggtgaagcaccaaaaagtgtacaatgggttgagagagaaagacaaaaggttccaagttttcaaaaacaacttggggttcatacaagagcacaacaacaaccagaacaacacttacaaac

SEQ ID NO: 12921 - DNA, 333 bp, Glycine max
  Clone ID: LIB3094-085-Q1-K1-D5
ttctgaacttaaaaaaacatacctttattacttacatttttctaatttaatgaagaggatggcattttctaaatggagcatgccaatccaatacaaggactcaattatttactcaacccttaactgtaaggagaatagtagccttttttatttttcccatatgtgccgtctaagcctcaaaggaaaagactctttcccattccttgaaaagcttgtcattgcagattttgcttggctttccccttgaactggttcgttgactgtcttcacaaatgaaaaaggaggggcaatttatgattcaatgattaccaaggttaaagatgatcacatata

SEQ ID NO: 12922 - DNA, 184 bp, Glycine max
  Clone ID: LIB3094-085-Q1-K1-D6
ctttcaaaccctccaaccttagtttcaattctaaacttgttcaccctttattctctcctcttgcaaacatcaaccatggcttcaataataaccttggtgacatccaccttgctctttctttctttcactttgtcatgtgctattgacaccttcaccattaccaactacaccgacaatgaggtca

SEQ ID NO: 12923 - DNA, 394 bp, Glycine max
  unsure at all n locations
  Clone ID: LIB3094-085-Q1-K1-D7
gcgcaaagacatncttctcctggatgtggctcccctcactctcggaattgaaactgttggtggagtcatgacgaaagttgattcccagaaacactgttatcccaaccaagaaatctcaggtgttcaccacctatcaggaccagcagactacagtctccattcaggttttcgaaggcgagaggagtctcacaaaggattgccgccttcttgggaaatttgatctgtctggaattcctccagccccaaggggtacgcctcaaattgaagtgaccttcgaagttgatgccaacggcattctaaatgtgaaggcagaagacaagggcactggtaaatcagaaaagatcaccattacaaacgaaaagggacgtcttaaccaggaagaaattgagagaat

SEQ ID NO: 12924 - DNA, 377 bp, Glycine max
  unsure at all n locations
  Clone ID: LIB3094-085-Q1-K1-D8
gcgtcttgttaggttacctcttttacatttgtgtttctagttcatatattngcggctgacaccgagaagtgaagcaggaaaaaaacaaaaaggagcagatgggtagctcaggtttctcatggaaattggcggatcatccaaagcttccaaagggtaagactgtggctgttgtggtattggatggttggggagaggccacacccaatgagtacaactgcatccacaaggctgaaacaccctgcatggattcacttaaaaagggtgctcctgaacggtggagattggtcagggctcatggtactgctgtaggacttccaacaaaagatgacatgggcaataatgaagttggtcacaatgcccttggggctggtcgcata

SEQ ID NO: 12925 - DNA, 339 bp, Glycine max
  unsure at all n locations
  Clone ID: LIB3094-085-Q1-K1-D9
tacctctttnacatttatttttctagttcatatatnnacnnctnacaccgggaaagatagcttttaaaaaacaaaacgcacctcatggttccctcaagtttctcatggaaattggcggatcatccaaatcttctaatttttaagactgnggctgttgtggtattttatggctgaggagaggccacacccaatgagtacaactgcatccacaatgcttaaacaccctgcatggattcacttaaaaagggtgctcctgaacggtggatattggtcaaggctcattgtacttctttaggacttccaacagaagatgacattgtcaatagttaattttttcac

SEQ ID NO: 12926 - DNA, 218 bp, Glycine max
  unsure at all n locations
  Clone ID: LIB3094-085-Q1-K1-E12
gcgtgtgggcatactaaaaacccagatgggtcagttcaattcacagcaggcaagactaaanttggtgatagtattgattgtgcaattaaaataataactgttgcggtcaccatcgtagtggttgcagtaccagaggggctcccattagctgttactttaactctggcctactcgatgagaaagatgatggcagataaagccttggtaaagaggctttc

SEQ ID NO: 12927 - DNA, 202 bp, Glycine max
  unsure at all n locations
  Clone ID: LIB3094-085-Q1-K1-E5
cccacgcctcctctnacacattttttttttttttcataanantgacctataataagatccagtatactctttttaattcctttcctccatcctcaccttactcttacatctaccattaaaatcctcacacctcaaatctttacattcatgcaataactaccaaattttttaactgttttaatttttaaaatttcccacctta

SEQ ID NO: 12928 - DNA, 313 bp, Glycine max
  Clone ID: LIB3094-085-Q1-K1-E7
gcgcccacgcgtccgctactctgttcctcagattcaacaccaccttgcgtggcgccaatgggaaaagcctgggacatcggagccgttccgttcaacgccgacgggtggggtccgccggacaacgcgacctcaggcagcaacaacaacaacctccctctgaacgtccccttcgcccccttctcccgctccgacaaattgggccgcatcgccgactggacccgcaacttcaacaatccgacccgctccaagaaccccgccgatgccgtcttcgacttcgccaacgacgactcctttcccgccttcggcgacgacg

SEQ ID NO: 12929 - DNA, 271 bp, Glycine max
  unsure at all n locations
  Clone ID: LIB3094-085-Q1-K1-E8
cctcaaatttaacaccatcctttgtggcgccaatgnnaagagccttggacattttatccgttccgttcaacccccacattttgtgtccttctgacaacgcgacctcatgcatcaacaacaacaacctccctctgaacgtccccttcgcccccttctcccgctccgacatattgttccgcttctccgactgtacccttaacttcaacaaatccaccccctccaaaaaccccgccgatgccgtcttcgacttttccaacgacgacttctttcc

SEQ ID NO: 12930 - DNA, 373 bp, Glycine max
  Clone ID: LIB3094-085-Q1-K1-F1
cccacgcgtccgcggacgcgtgggggtttttgtggataagagtgagctataatggctgccgggagaccgggtttaattgctttgtttgatgttgacgggactcttacagctcccaggaaggtggtcacaccggaaatgttgacattcatgcaagaactacgaaaggttgtaacggttggagttgttgggggttctgaccttataaagatatcagagcaacttggcagcacagttaccaatgagtatgattacgtattttctgagaatggtcttgtggctcacaaggaaggaaagctcattggaactcagagcttgaagtcattccttggtgaagaaaaactcaaagaagttattaactttacacttcattata

SEQ ID NO: 12931 - DNA, 187 bp, Glycine max
  unsure at all n locations
  Clone ID: LIB3094-085-Q1-K1-C11
acaatttnttttgcaaatttaatctatctttcattcctcctgcacccannggtgggcctagtattacattttactttcacattcattccaatcntatcttgaatttctcttcccaaaataaaaccactttccacaaaaataaaatcactatcaccaattacaaaggtagattttcaaaagaaaatat

SEQ ID NO: 12932 - DNA, 119 bp, Glycine max
  Clone ID: LIB3094-084-Q1-K1-D8
gtaatgtaggtgttccaagcttcaaggtaggtaataatgttaggtccaagtagatatgtgagtgagttgtaatacaatgattctaatatcctatctccaccattcatattaatatttgc

SEQ ID NO: 12933 - DNA, 363 bp, Glycine max
  Clone ID: LIB3094-084-Q1-K1-F12
caaagacatccttctcctggatgtggctcccctcactctcggaattgaaactgttggtggagtcatgacaaagttgattcccagaaacactgttatcccaaccaagaaatctcaggtgttcaccacctatcaggaccagcagactacagtctccattcaggttttcgaaggcgagaggagtctcacaaaggattgccgccttcttgggaaatttgatctgtctggaattcctccagccccaaggggtacgcctcaaattgaagtgaccttcgaagttgatgccaacggcattctaaatgtgaaggcagaagacaagggcactggtaaatcagaaaagatcaccattacaaacgaaaagggacg

SEQ ID NO: 12934 - DNA, 397 bp, Glycine max
  Clone ID: LIB3094-084-Q1-K1-F2
atcgaaaccttaagtttcggatcaggtctgagcaatctggttggtagaacctttggtcttagagagggaagttttatgtctgaattagacgatcaaattcctactgccttcgatccttttgctgatgcaaatgctgatgactcgggtgctgggtcaaaggagtatgtgcatattcgcgtacagcagcgaaatggaaggaaaagcctgacaaccgttcagggattgaaaaaagaattcagctataacaagatacttaaagatgttaagaaagagttctgttgcaatggaacagttgttcaggacccagaactaggacaggttattcaacttcaaggtgatcagaggaagaatgtttctaccttcctggtccaggctggtatcgtgaagaaggagcata

SEQ ID NO: 12935 - DNA, 381 bp, Glycine max
  unsure at all n locations
  Clone ID: LIB3094-084-Q1-K1-F5
cccacgcgtncgnccacgcgtncgcaaacttgatataattgagggacaatctgcctcagaatgtggcacaaactcatggcctgatttatctttatccactgcggctaaaactgatcaaggttccctgggtgctgctgatgtatctaaaactttaggtgaaattagcaaatttatttcagcaaagagagactacacagcttgaaaaggatgtagaaaagcaaggtgattttgtcaactatgcctgggataacataagaagctttgatgatcttgatcgaattttcagcaatgatgacgaccctatatttggccatgtaagtcttgagaattctgatgagcttgggtcttccaaagacgtgagtaacagcacagtacccatac

SEQ ID NO: 12936 - DNA, 292 bp, Glycine max
  unsure at all n locations
  Clone ID: LIB3094-084-Q1-K1-G10
ggggcccacccaggcttgctcaaatacatcctttttcttaatatttctcttctcactctcacaattcaaactcttgcaccttgttttttattaaatgatccccaccaacactnctatcccaaccaataaatctcacttgttcaccacctatcaccaccaacatactacattcttcacttcacttttctaaagccataaaactctcacaaataattcccatcttcttttcaaatctcatctgtctcaaattcctccaaccccaaaccatacacctcaaatctaatctaccttt

SEQ ID NO: 12937 - DNA, 414 bp, Glycine max
  unsure at all n locations
  Clone ID: LIB3094-084-Q1-K1-G4
cccacgcgtncgctcgagaatatgacccgtcctaaaatttacgaaacataattatttattaggtatgagatataatgagaggaacataaacgaacaatcagatgctgctagtcatttggataataaacaacattaggatttaagcatatcacatgatcgctttacttataatttaaggatatcagctcaataccacatgattcaagtaatattaccaaaatcaaagccttatcctacaagatgcggtcagctacatgggtcatgacgtcattcggcaagtttagaaaccaaagtgtagcaaacgggaaaaaagtacacttctccttacagaggtatcccatatgacacaataactctgaaatagtatagtataccatagtcttaatcagcggaatatacaatttcttacatgac

SEQ ID NO: 12938 - DNA, 317 bp, Glycine max
  unsure at all n locations
  Clone ID: LIB3094-084-Q1-K1-G5
ggcttctcctcttacgagcctttcctttcagtccattgattcngtgggtgcgggtgcagcgaaaccgagctagaccctgatcggcgtcggcacaccgccggagaacaagatgattgtctgcgtcgccgtcgtcggtcaccaaaacaatccgctgtacatacagagcttcacggaggccgatgatgctctcaagctccaccacatcgtccattgctcgctcgatgtggtcgacgagcgagtgaacaatcctaaaaagtctgggccgatgcttaatgagacgtttttgggactgctttatcctattgaaaactacaaag

SEQ ID NO: 12939 - DNA, 421 bp, Glycine max
  Clone ID: LIB3094-085-Q1-K1-A12
gtcttatgctccaagtgcactggtaagggttctaagtctggtgcttcgatgaagtgtgctgggtgtgaaggaactggtatgaaggtttctataagacatcttggcccgtccatgattcagcagatgcagcatgcttgcaatgaatgcaagggtactggagaaaccatcaacgacagagatcgctgcccacagtgcaagggagaaaaggttgtgcaggagaaaaaagtccttgaagttattgtggaaaagggaatgcagaacgggcagaagattacattccctggcgaagctgatgaagcgccagacacaattactggggatattgtctttgtccttcagcagaaggaacatcccaaattcaaaagaaaggctgaagatctttttgtagagcacattttgtcccttactgaagccttatgtg

SEQ ID NO: 12940 - DNA, 222 bp, Glycine max
  unsure at all n locations
  Clone ID: LIB3094-085-Q1-K1-A2
agaaaacctaagcttagaattagaaacaaagataagatgataggaaagaattgatcgttgagaatgcanggaggaaagaaaagcgggagaatccattaagggaaacagctacaaacattggtgcttctgccaaggctggcatggagaaagaccaaggccactgtccaagagaaggcagaaagaatgacagcacgtgatccggtgcaaaaggagttggcaacc

SEQ ID NO: 12941 - DNA, 286 bp, Glycine max
  Clone ID: LIB3094-085-Q1-K1-A3
cccacgcgtccgggagaagcagaatgagcataagcaatggcgccgaagaagccgagaaccacgacaaggaaccctgatttggttagggggattggcaagtattcgaggtcgcagatgtaccacaagaggggcatttgggccatcaaggccaaaaacagtggcgttttgccccgccacgatcccaagcccaagcccgaggccccggcccagaagccgcccaagttctaccccgcggacgatgttaagaagcccctcgtcaacaagcacaagcccaaacccgcgaaac

SEQ ID NO: 12942 - DNA, 113 bp, Glycine max
  Clone ID: LIB3094-085-Q1-K1-A4
tattcaataaacaaaaatttctattattcaacattttcctcttatccctaatacctttttttatcattttttttccctccttttttttacacacccaaaaaactcttttttaa

SEQ ID NO: 12943 - DNA, 367 bp, Glycine max
  Clone ID: LIB3094-085-Q1-K1-A5
gaggagatatatgtacctaaacgaagagatcttgaaagagaatccaaacatgtgtgcttacatggcaccttctttggatgctaggcaagacatggtggtggtagaggtaccaaagctagggaaagaggctgcagtaaaggccataaaggagtggggccagccaaagtcaaagattacccacttgatcttctgcaccaccagtggtgttgacatgcctggtgctgattaccaactgaccaaacaattgggccttcgcccctatgtgaagaggtatatgatgtaccaacaaggttgctttgcaggtggcacggttcttcgtttggccaaggatttggctgagaacaacaagggtgcacgtgtgcttgtt

SEQ ID NO: 12944 - DNA, 383 bp, Glycine max
  Clone ID: LIB3094-085-Q1-K1-A6
gaagttgcgagagtgaagaaatggcgcaagacttggcattggatttggaggagctgcgccggctccacagcatcgccaaaagacctcgaaccctctctcttctctcctccgaaattcgtaacctcgaaaagttatcgtcagaggaagcttctgcgcagattccggcgccgatttcgaccggaactaaagtggcgccttcacctgcgctgaagtatgcggcactcgcgtcgttcagttgggaccaggatagtgacaaagttaagatatatgtgttaatggagggaatcgatgagaataaggttgaatccgagtttaagtcgatgtcattcgatgttaagttccatgatgttcaagggaagaactaccgatgtgcaatatcaaaa

SEQ ID NO: 12945 - DNA, 202 bp, Glycine max
  Clone ID: LIB3094-085-Q1-K1-B10
cgtcggtcaccaaaacaatccgctgtacatacaaagcttcacggaggccgatgatgctctcaagctccaccacatcgtccattgctcgctcgatgtggtcgacgagcgagtgaacaatcctaaaaagtctgggccgatgcttaatgagacgtttttgggactgctttatcctattgaaaactacaaagtatatggatatctg

SEQ ID NO: 12946 - DNA, 285 bp, Glycine max
  Clone ID: LIB3094-085-Q1-K1-B3
agaaaacctaagcttagaattagaaacaaagaaaagaagaaaggaaagaattgatcgttgaaaatgcagggaggaaagaaagcgggagagtccattaaggaaacagctacaaacattggtgcttctgccaaggctggcatggagaagaccaaggccactgtccaagagaaggcagaaagaatgacagcacgtgatccggtgcaaaaggagttggcaacccaaaagaaagaggcaaagatgaaccaggcggagctggacaagcaggcggcgcgtcagcataacacg

SEQ ID NO: 12947 - DNA, 247 bp, Glycine max
  Clone ID: LIB3094-085-Q1-K1-B5
ctgatcggggtcggcccaccgccaccgaacaagatcattgtgtgtgtctgcgtcgtcggtcaccagaacaataccctttgcatacacatcttcacggtagccgatgatgctcttaagctccaccacatcgcccattgctcgctcgatgtggtcgacgagcgagtgaacaatcctaaaaagtctgggcccgggctcaatgagacggttttgggactgcgttattctattggaaactacaaaggatatg

SEQ ID NO: 12948 - DNA, 417 bp, Glycine max
  Clone ID: LIB3094-085-Q1-K1-B6
cccacgcgtccgctcgagaatatgacccgtcctaaaatttacgaaacataattatttattagttatgatatataatgagaggaacataaacgaacaatcagatgctgctagtcatttggataataaacaacattaggatttaggcatatcacatgatcgctttacttataatttagggatatcagctcaataccacatgattcaagtaatattaccaaaatcaaagccttatcctacaagatgcggtcagctacatgggtcatgacgtcattcggcaagtttagaaaccaaagtgtagcaaacgggaaaaaagtacacttctccttacagaggtatcccatatgacacaataactctgaaatagtatagtataccatagtcttaatcagcggaatatacaatttcttacatgacaaa

SEQ ID NO: 12949 - DNA, 303 bp, Glycine max
  unsure at all n locations
  Clone ID: LIB3094-085-Q1-K1-B9
ccatgttgcntaattangaggataagccattttcttnatggaccatcccaatccaatacaatgactcaattattgactcaacccttaactgtagggagaatggtagcctttttgatgtttcccatatgtgcgggctaatcctcaaaggaaaggactctgtcccattccttgaaaaacttgtcattgcagatgttgctgggcttgcccctggaactggttcgttgactgtcttcacaaatgaaaaaagaagggcaattgatgattcaatgattaccaatgttaaaagattatcacatatacttt

SEQ ID NO: 12950 - DNA, 371 bp, Glycine max
  Clone ID: LIB3094-085-Q1-K1-C1
gcggcgccatatcgcgtatctttctctgttctattcctacgatggagttttggggtgcggaggtgaaggttggtgagtctgttaaggtaaatccagccgaattcgaggcatgcatacacctttctcaggctgctcttggtgaggcaaagaaagacaaatcaaatgaaccagttgttctctacttgaaagttggtcaacagaaatttgtcttgggaaccctttccagggagaaaattcctcaaatacctctggaattggttttggaaaaggagtttgagctttcccacaactcaaagaatgccagtgttcatttcttgggatacaaagcattttatgattcttgcgatgatagcgaggaggatgaatttact

SEQ ID NO: 12951 - DNA, 94 bp, Glycine max
  Clone ID: LIB3094-085-Q1-K1-C10
caaatttaaatccttaaaaaggcttaaaggcccaaaaggacataaaagggggaaaataaaacattttgaagtcatatttgcacacttgattaaa

SEQ ID NO: 12952 - DNA, 422 bp, Glycine max
  unsure at all n locations
  Clone ID: LIB3094-084-Q1-K1-D5
cccacgcgtncgcccacgcgtnncgccacgcgtnncgccacgcgtncgtctncctctttctggtcactagctctgtgcattcttctctcgctctctgccttccatcacactcggcatttcctttcccaagatagtagaagatggcagacactgaggatattcaacctcttgtttgtgacaatggaacaggaatggttaaggctggatttgctggagatgatgccccacgtgctgtgtttcccagcattgtaggtcgtcctcgtcacactggtgtgatggttggcatgggccaaaaagatgcatatgttggtgatgaggcacaatctaagaggggtattttgactctcaagtaccccattgaacatggaatngtgagcaattgggatgatatggaaaaagattggcatcataccttctataat

SEQ ID NO: 12953 - DNA, 284 bp, Glycine max
  Clone ID: LIB3094-084-Q1-K1-A7
actttctcaaaagggtatcaaatattactacaaagaatagtactttagaaacaaaagtcctcttcttctccaaatgaaccccgttcacaaaaagattccttttctcatccacaatggcaaacccattttttaatccctcattgctgttcagtacatttatgatgtttggaatgacaaaaatcccctttttgccttctgacccttatccaaaaacttaaactaaaattcttaacttaatattcttcataaaaagataatatcatccttctaacgaaaaatttttt

SEQ ID NO: 12954 - DNA, 401 bp, Glycine max
  Clone ID: LIB3094-084-Q1-K1-A9
attgctgctgtttgcctattggtgtactttggggtctctaccctgctggatgcctcatctagcgatggccaaaaatcagatgaagagcagaaggaggcagaactagcagtttctgaattttctggaaatggtgctgggatactatctgctgctagcacagttgccagtacttttctcttagtttttgttgctgaatggggcgacaagtcatttttctccacaattgcccttgcagcagcttcttctccccttggagtcatagctggagcactggctggtcatggtgttgcaactttgctagctgtacttgggggttctttacttgggacgtatttgtcagagaaggttattgcctacatcggaggtgttctctttctcgtctttgccgcaataaccttatt

SEQ ID NO: 12955 - DNA, 396 bp, Glycine max
  Clone ID: LIB3094-084-Q1-K1-B1
ctctcttccttctttctctttacctcgtcattggcattgccagtggcgttcaaaccaagaccttccagttgcagaggaaactgcagcatggcaccccggagtgcctcctcccccaatcaagaaaggagaaaggcgctattatactggaaatgaaggacagaggtgagtgctcagagtcagagagaaaaggtgattgggttgagaaacagttggtactggatggtctccacgttcgttcaattcaaaatcacattcgaaaaaggacctctagtagccaaattgcagattcctcggaaacccaagttccattaacttctggcataaaattccaaactctaaactacattgtgacaatgggattgggtagccagaacatgagcgtgatagtagacactg

SEQ ID NO: 12956 - DNA, 271 bp, Glycine max
  Clone ID: LIB3094-084-Q1-K1-B10
cgcaaaaacgcattgtgtttctctctttccgtggcgtagatctgagcagtttgggaaaccctaactgctctcaccactctctttgctttttttcctctccgatcaacgacctctttcgtcgccctaagtcatggcaggacttgcacccgagggatcacagtttgatgctcgtcaatatgataccaagatgaatgagttgcttacatctgatggacaggattttttcacatcttatgatgaggtttatgacagttttgatgctattggcttg

SEQ ID NO: 12957 - DNA, 296 bp, Glycine max
  Clone ID: LIB3094-084-Q1-K1-B12
ggctacttttgattgcttgatgaaaacctatggattcctgacaccagaattctggaaggagactcgcttctccaaatctccattccaagagtacacagatctactggcaaaaccaacaggaaagactctaatcttggaggaggaaagggtggatgcttgatttgctagttttgctttatggatgttttaggaactttattactttacatactttgttggttctgtgctttacttttggttttgatagacggtatgtctctgtatgcattttgattgtttccaagttttaattgact

SEQ ID NO: 12958 - DNA, 338 bp, Glycine max
  Clone ID: LIB3094-084-Q1-K1-B2
attcaagaactcatgatagattgacgcatggatcctgacagcaaaaaatttggtggagggccaagagaattgacaggtgctgtggatctattaaatcacttccaattactcccacattttgagtttttctgcaagaggccacttcctgtttcaatttcagatgcacactatttatacaatgtagtaggtgacatagaaatcagaaaaggagatgggatgcagttggatcaacttattcaagatacatctttgtccagtggttctaattatcatatacaacctttggacctcgatattctaaaggaggcttttcaactcaaggaaactgttcccattga

SEQ ID NO: 12959 - DNA, 227 bp, Glycine max
  Clone ID: LIB3094-084-Q1-K1-B3
cagaacagggactcactctcttcgcagcggcactctcggtggctttcatcttctcgggttggcaagagtgtacacaatcgggaagaaaattcacaaggataaggatgctgggccaacttaatttgagggatcagttggacaggcatttgttgatctagaaaataccaacaatgagcttgaaagtgatcttgaagatttatacataaactcagctgtccaaattgatg

SEQ ID NO: 12960 - DNA, 344 bp, Glycine max
  unsure at all n locations
  Clone ID: LIB3094-084-Q1-K1-B4
cggacgcgtggggtcactattcctccagcctccacctgctgaaagaaactcctaattgtcaattgttgtaaagaaaagaactgaaaacactgacactgttattctctgaatnttctcaccatctacaactgaagtttaaccaatatggaaactgaaaagtctaatgtttcaaaggctgaagaatttaaactccttgccaatgaagtgttcaatgctcgaaaatactcccaagccattgatctatatacacaagcaattgagctgaacagtcaaaatgcagtttacttttctaatcgtgcctttgcccatcttcggtttgaggaatatggtagtgcaatacaaga

SEQ ID NO: 12961 - DNA, 356 bp, Glycine max
  unsure at all n locations
  Clone ID: LIB3094-084-Q1-K1-B5
cccacgcgtncgncacgcgtncggtttctggtggaggatccaacttcagagcaattcatgaggcctccaaaaggggatcacttcatggagatgttcttgtgttggtcacaaataaaagtgattgtggaggtgcggagtatgcaagaaataatggtatcccagttatactgtaccatatatcaaaagatgaatctaatccaagtgaccttgttgatacactaaagaaatttgaggttgattttattcttttagctggatacctcaaacttataccagtggaattgatccgagcttacaaaagatctatattcaacattcatccatcacttcttccagcttttggaggcaagggattc

SEQ ID NO: 12962 - DNA, 297 bp, Glycine max
  Clone ID: LIB3094-084-Q1-K1-B7
ggctacttttgattgcttgatgaaaacctatggattcctgacaccagaattctggaaggagactcgcttctccaaatctccattccaagagtacacagatctactggcaaaaccaacaggaaagactctaatcttggaggaggaaagggtggatgcttgatttgctagttttgctttatggatgttttaggaactttattactttacatactttgttggttctgtgctttacttttggttttgatagacggtatgtctctgtatgcattttgattgtttccaagttttaattgactg

SEQ ID NO: 12963 - DNA, 161 bp, Glycine max
  Clone ID: LIB3094-084-Q1-K1-B9
cttttctactttgagtcttcttgatccttctttttctccttgaactcaaacatggcagatgaggtggttctgctagatttctggccaagtccatttgggatgagggtcaagattgcacttgctgaaaagggtatcaaatatgagtacaaagaagaagactt

SEQ ID NO: 12964 - DNA, 421 bp, Glycine max
  Clone ID: LIB3094-084-Q1-K1-C1
ggcggcgctgtggcggacgcgccggcggtggttgaggagaagacggagttcgacgtggtgatcgaggaggtgccgagcaacgctcgaatcgcggtgattaaggcggtgagggcattgacgaacctagcgctgaaggaggcgaaggagttgatcgaagggttgccgaagaagttcaaggaagggatttcaaaggacgaagctgaagatgcgaagaagcaactcgaagaagctggtgccaaggttaccattgcttaaacactgtttagctgcagcatatatgttctgcttcttcttttggtggttgtagttgagttcaccagtacactgtaatttcatttccattttgtctgggattcaaatctttatttgtaatgaggaaatatgaggtcctaattttataataatttttttaatgcgtatg

SEQ ID NO: 12965 - DNA, 54 bp, Glycine max
  unsure at all n locations
  Clone ID: LIB3094-084-Q1-K1-C10
cccacgcgttcgcccacgcgtncgtccacgcgtccgcggacgcgtggggttcta

SEQ ID NO: 12966 - DNA, 412 bp, Glycine max
  Clone ID: LIB3094-084-Q1-K1-C12
cccacgcgtccgagaaggcctgggcttagttgataagcataactgggtgaggaagaaagaaagagagtgaaaaagatggcgtcgagcggagcggtaccgttttggaaggcggcggggatgacgtacataacatactcaaacatatgcgcgaatctgctcaggaattgcctcaaggaaccctacaaggccgaatccctctctcgtgagaagctccattttgttctctccaaatgggtcgacgccaagcctgaaaaacctactattcgttcagacaccccagagcagtgatctggaataagttgaagctataaatgcataaatctttgagatctggaaagtcattgtcattttgaacctttctgtgatgtttaaattcctttgggtttttctctccatgaaatggaacatgcac

SEQ ID NO: 12967 - DNA, 375 bp, Glycine max
  unsure at all n locations
  Clone ID: LIB3094-084-Q1-K1-C2
cccacgcgtncggcttgcgctcttgccgttcacgagcactntatgaagggctgaaggtagctgcaacatctgatctgatgctgggatatctggatttcttccttggtggggatgagaaaagacctgatctgcctcctcgtctttatcaaagatttcccatgtctataatttttgggggagatggaagttacatgagtcctttctctattcacagtgataatattcttactagcatcatgagtcagtctgttccaccaactatatggtatcgattagtggctggtcttaatgctcaactacgattggttcgccgtggacatctaaaaataacttttggtcctgttatcagctggcttgatgtatatgcaaacccta

SEQ ID NO: 12968 - DNA, 383 bp, Glycine max
  Clone ID: LIB3094-084-Q1-K1-C6
cccacgcgtccgcccacgcgtccgattttttgaacaaaaatcctaaaccaacctcttcttgcgacgtcgccattcacagttgctgttcctcccggtcgttgtttgcacaaactcagcctcaatccaatacgatctaatctgataaaatagtaaggatacttataactgttttcccttggtatggtatttcatcatatgggtgtgtttaagttttcatctttcaccggataaacatgaagaattaaccatgctctagtcaaaacttgttttgctcaaaattcaataacttggtctgcttaaagatattggcttgatccctcacacctgcaaaattgaatggcaccctcaatttggtttcttcttctatcccttctgttcctttc

SEQ ID NO: 12969 - DNA, 322 bp, Glycine max
  Clone ID: LIB3094-084-Q1-K1-C8
cggacgcgtgggcggacgcgtgggcggacgcgtgggaaaaaacaaaacactgggcctggggaccccgctcactctcaaggtacttcccactgttcccattttatgcccgtactaatctgacccttttagtggcatagattgaggtacaattacaaaagcatattacccgtatcatatcctttctgctgcaaacccccccccccccaaacacactgcgttatttttttcaacaacttctcttctcttgtactactagctagatagatactaaagcttttctatttatttatttatttcccggcactgagttgagttaattttt

SEQ ID NO: 12970 - DNA, 362 bp, Glycine max
  unsure at all n locations
  Clone ID: LIB3094-084-Q1-K1-A5
ggcggcgctgtggcggacgcgccggcggtggttgaggagaagacggagttcgacgtggtgagcgaggaggtgccgagcaacgctcgaatcgcggtgattaaggcggtgagggcattgacgaacctagcgctgaaggaggcgaaggagttgatcgaagggttgccgaagaagttcaaggaagggatttcaaaggacgaagctgaagatgcgaagaagcaactcgaagaagctggtgccaaggttaccatngcttaanacactgttagctgcagcatatatngtctgcttcttctttgggtggttggagttgagttcaccagtacacttgaatttcatttccattttgtctggatttcaatctt

SEQ ID NO: 12971 - DNA, 432 bp, Glycine max
  unsure at all n locations
  Clone ID: LIB3094-084-Q1-K1-D12
cagagtttgagtggacctgtctcagctaccctttaccttggttattcactactcatggccagttgcaatcatgttgtcaaccggcaccattggcttccttatgtcattctactttgtgcactacttgttctcatcagtaaagatagattgaggttcttgttgtcattgcatattaactatgaaaaaggttgattgatataacttgatcacattgcatagtagggcaacggatgtttaattcattgtctgattttatattgcgatgggatctgcagtttgttctccttctgcctgtttcccaaagtagtgtactcattcaagtattcaactagtgtttgagatcatgtttcaagtattttgttcaagtttctttagaaggttgtaattcaaactctcatctcatttcaatactttagaaaaatgatgntagat

SEQ ID NO: 12972 - DNA, 325 bp, Glycine max
  unsure at all n locations
  Clone ID: LIB3094-084-Q1-K1-D4
cacgcgtccgcccacgcctacgatttttttaacaaatatcctaaaccaacctcttcttgggtcgtgttcattcacagatgctgttcctcccggtcnttgtttgcacaaactcancctcaatccaatacgatctaatctgataaaatagtaaggatacttataactgttttcccttggtatgctatttcatcatatggctgtgtttaagttatcatctctcaccggataaacatgaagaattaaccatgctctattcaaaactttttttgcttcaaattcaataaccttgtcttcttaaaaatattgactcgatccctcacacctt

SEQ ID NO: 12973 - DNA, 138 bp, Glycine max
  unsure at all n locations
  Clone ID: LIB3094-083-Q1-K1-B7
ccgggccgaccgcacgcgtccgaccacgcgtncnncacacatncggtttctgtttgaggatccaacttcataacaggtcatgcgtcctactttataagatcacttgcttganataatcttgtgttgctcacaaataaa

SEQ ID NO: 12974 - DNA, 77 bp, Glycine max
  Clone ID: LIB3094-083-Q1-K1-B9
gaaaaagaggcgcaagatgagtggtatggtttctgggaaggtgaagtggttcaatgatcaggaggggtttggattca

SEQ ID NO: 12975 - DNA, 433 bp, Glycine max
  unsure at all n locations
  Clone ID: LIB3094-083-Q1-K1-C1
gaaaanaaaaaaaaaatttaaatttttaaaaagaaaaaaaaaaagggaaaatgaaattttaaaaaaaagggaaaaaaanaaataaaaataanatnaaaaaataaaaaaaaatataattttaaaaaaaattaaaaaaaaaattaataattaaaaaaaataaaaaaaggaaaattaaaatttaatataaaaaaatataaatgaaaaaataaaaataaaaaaaaataaattaaaattaataaaaaataaaattaaaaataaaaataattattataaaaaattaaaataaattataataaataaatatatataataaaaattaaataaataaataattataataattaaattattaaaaataaatataaaaaaataataaataaatatattaaaatataaataattttaatattatataaaatatttattttattat

SEQ ID NO: 12976 - DNA, 474 bp, Glycine max
  unsure at all n locations
  Clone ID: LIB3094-083-Q1-K1-C11
aaaattttaattaaaaaaattaaaaaaaaaatttgtatttttaaaataaaaaaaaattaanaaaaacttgataaaattaaaaaaaaaaaatgtggtttaataaaaaaaaaaaaaaataaatataataattatataaataattaattaaaataaaaaaataaataaaatataaatctataaaataaaaatttaaattatatttataataaaaaatataaaaaaaaaaaataaaaaaatatatataaaaaaaaaaaaaaaaaaaatataaatttaaataaatatataaaatatattttaataataaaaataataaattaaaattataatttaaaaatatttatttttattaaaaatttatataatttaatttataattattaacaaataaattttatattataatatataaatattattaaaatataattataataatataatatattttaaataatatatataaaattttatata

SEQ ID NO: 12977 - DNA, 384 bp, Glycine max
  Clone ID: LIB3094-083-Q1-K1-C12
cccacgcgtccgccaaaaccgaaaagaagaaaaacgctgaaatccccaaaatcgaaaagaagaaaaccaaaagcgctgaaatccctctaaccgatggcaaaacgaagagggatagagaaatcgccaaagaggagaacaagaagaagactaagaaacccaagctcagcaatggcacttcaaaacagcgagacgagggatccaaaaagggagtagcagaaggaaaaggagaagaggggaaaatgaacgtgtttccgatgaatcgcatcagaacgatgattaaaggcgaagatcccgatatgcgtgtttctcaagaagcattgttggccatcaacaacgctgtggagaagttccttgagcaattctcgcacgaagcttatgcttttt

SEQ ID NO: 12978 - DNA, 462 bp, Glycine max
  Clone ID: LIB3094-083-Q1-K1-C2
ccgggacgaccacgcgtgcgctagagaattatcatacccttcaagatgaaaccgtatttacgtccaatattcctattattccttatggttctcgaccaatccatttcggcgagtgctgctataaatattaatggtctgagaaacaaaattagagaagttctaaacaagcacccgagcatcaatcttccggcagataaactgaagaaggtgaagagaccactgaaggcactggattatctgcttggcgaatgtaaggacaggccgcctcaagaatttcaagaattttgcccgaaatttaagaacgattatcaacaaaattgcccgaatgccgcgtatgaagcagtttgcccgttactgaagcaagcgattcaaatatgttgccagaaacacgcataactctgcaagccacggtgggcgtttggatgtgcttttagttaccactttctctcttggatttgctta

SEQ ID NO: 12979 - DNA, 254 bp, Glycine max
  Clone ID: LIB3094-083-Q1-K1-C8
ccaatagtatcttgaatgtctctgccgaaaataaaaccactggccagaaaaataagatcactatcaccaatgacaagggtatattgtcaaaggaagatattgagaatatggttcaagaggctgaaaagtacaagtctgatgatgaaaatcacaagaagaagtgttaagccaaaaacgctttggaaaactatgcatacaacatgaagaacaccgttaaagattaccagattggtgaaaaacttgaccccgctgac

SEQ ID NO: 12980 - DNA, 421 bp, Glycine max
  unsure at all n locations
  Clone ID: LIB3094-083-Q1-K1-D2
cccacgcgtncgggaacataagcttttcctgttttgggtaaacactgccagcaccgcgattgcaacgcggctcgattttcttcctttcacctgcgacggttgccaacagatcttttgtttggaacacagatcctacaagtcccacgcgtgcctgaaatccgaccacaacagcagaaaggttgttgtttgcgaagcatgttccatgtccatcgagaccaccggccatgtgggacaagacgaggaggcaatcttgcaaaagcacctcaagtctggtaattgtgaccctaccaagaagaagaaaccaatttgtcccgtcaagcgttgcaaggaggttttgacgttttccaacaccagcacatgtaaaacttgccacattaaggtgtgcctcaagcatcgnttccctgctgatcatgcctgtagc

SEQ ID NO: 12981 - DNA, 149 bp, Glycine max
  Clone ID: LIB3094-083-Q1-K1-D8
ctctgctgcgtttgcttctcctccatccatccacaaacgaacacacactttgattgagaatggggcgtgttcgcacaaagacagtgaagaagtcctcgcggcaagtgatcgagaggtactactctcgcatgacgctggacttccacacg

SEQ ID NO: 12982 - DNA, 141 bp, Glycine max
  Clone ID: LIB3094-083-Q1-K1-D9
gaagttgcgagagtgaagaaatggcgcaagacttggcattggatttggaggagcttcgccggctccacagcatcgccaaaagacctcgaaccctctctcttctctcctccgaaattcgtaacctcgaaaagttattgtcag

SEQ ID NO: 12983 - DNA, 348 bp, Glycine max
  unsure at all n locations
  Clone ID: LIB3094-083-Q1-K1-E11
cccacgcgtccgtccacgcgtccgttcacgcgtccgcggacgcgtggggttctataggctcgtacctctgtgtccttgagttctaaggagacaggaacctacgtctggtggatgaatcatgaccgtgtgatcagagcgtgattaacggcccgggtgagtttctctttggagtagtctcatctttggctgtagaggatcgttcttaggacacttccatgtgcctgggaatggtcatacggttgtctgacagaccaaaaaagaaaaaaagacaaaaaagtaataaaaaagatggaannnnnaanaataattaaataaaaaaataaaaatgggaaaaaattatttattaat

SEQ ID NO: 12984 - DNA, 444 bp, Glycine max
  unsure at all n locations
  Clone ID: LIB3094-083-Q1-K1-E12
aaaaaaaatttataattttacaaaaaaaaaannaaaaaaaacccagacttttaaataaaaacgtgggccgccaaaaaaaaaaaaaaaaaaattgataaataaaaataacaaaataaaaaaaacataaaaaaaaatacaattaaaaaaaaactaaaaaaaaaaaaaaaaaaataatataaaaaaataaaaaaaaaacaaaatcaaaaaaattataaataaataatactaattatactttatataacaatataaattaaaaaaattacaaaaaatataattaaaaaaaaacaattaaattaaaataaatatcaaaatataataaaattaaaaaaacataatcaaaaaaaaaaataataaaaaattaataaaattatccataacaatataataaaaaatataattgcttatctttataaaaaaataataaaaataaataaaaatatt

SEQ ID NO: 12985 - DNA, 275 bp, Glycine max
  Clone ID: LIB3094-083-Q1-K1-E4
aaaaaaaaataataaaaaaaaaatataaaaaataaaaattaaaaaaaaaaataaaaaaaaaaaaaaaaaaataaaaaaataataaaaaaactataataataaattaaaaaaataaaaaaaaaaaaataaaaaaaaaaaaaaaaaaataaaaaactaaaaataaaaaaaaaattaaatttaaaaaaaaaataaaaaaaaattaaataaaaaaataaaaaaaaaaaacaattaaaaaaaaaaaaaaataaaaaaataaaaaaaaaacttaataaaaa

SEQ ID NO: 12986 - DNA, 282 bp, Glycine max
  Clone ID: LIB3094-083-Q1-K1-E6
aaaaaaaaagggaccgcaaaaaaaaaaaaaaaaacaaacaacaaaaaaaaaaaaacaaaaaaaaaaaaaaaaaagcaacaaaaaaaaactaaaaaaaaaaaaaaaaaaaaaacaaaaaaaaaaaaaaaccacaaaaaaaaaactccccaacaaaaaaaaaaacaaaccctcaaaaaaaaaaaaaacaaaaaaaaaaaaattcaaaaacaaaaaaaaaaagaaaaaaaaaaaaaaaaagcccccctaaaaaaaaaaataaaaaaatcaaaaaaaaaaaaacaa

SEQ ID NO: 12987 - DNA, 129 bp, Glycine max
  Clone ID: LIB3094-083-Q1-K1-E7
gaagttgcgagagtgaagttatggcgcatgatttggcattggatttggaggagcttcgccggctccacagcatcgccaaaagacctcgaaccctctctcttctctcctccgaaattcgtaacctcgaaa

SEQ ID NO: 12988 - DNA, 269 bp, Glycine max
  Clone ID: LIB3094-083-Q1-K1-E8
caacagagtaatatgcaaaagctcagggacggaacccaagagcaagttctggagactgatgatatcattatctgggggatgaatagtcatcttcccttcatattaaagcagttaaataagtatcaagaatttgctgttctcttaagcacagctacagctaggtaaatggttcaaacaaggaggcagaaaatccttcttatgtctgatcttccaagaaaacagattgatagaatagcagacaatattgcaaaagatttaaatcatattga

SEQ ID NO: 12989 - DNA, 383 bp, Glycine max
  Clone ID: LIB3094-083-Q1-K1-E9
attgctgctgtttgcctattggtgtactttggggtctctaccctgctggatgcctcatctggcgatggccaaaaatcagatgaagagcagaaggaggcagaactagcagtttctgaattttctggaaatggtgctgggatactatctgctgctagcacaagtgccagtacttttctcttaatttttggtgctgaatggggcgacaagtcatttttcttcacaattgcccttgcagcaacttcttcttcccttggagtcataactggagcactggcttgtcattgtgttgcaactttgctagctgtacttgggggttctttacttgggacctatttgtcagagaaagttattgcctacatcggaggtgttctctttctcgtctt

SEQ ID NO: 12990 - DNA, 284 bp, Glycine max
  unsure at all n locations
  Clone ID: LIB3094-083-Q1-K1-B4
cctaaacaactctntctnttcttccttcgctcgntgttctccctcgcgtagatcgacaatggcggagacagagacgtttgctttccaagctgagatcaaccagctcctcagtctcatcatcaacaccttctactccaacaaggagatttttcttcgtgaactcatcaacaacgcctccgatgctttggacaagattcgatttgagagtttgacagataagagcaagctcgatgctcaaccaaagntgttcattcatattatttcagacaagactaacaatacac

SEQ ID NO: 12991 - DNA, 207 bp, Glycine max
  unsure at all n locations
  Clone ID: LIB3094-083-Q1-K1-F1
acgacccacgcgttcgaccacgcgtncggactgcccaagatgtatcgtcaatgttacggtgcgggcaaaaaaccatgatctttgtgatcaacaatggtggatacaccatcgaggttgaaattcatgatgggccgtacaatgtgattaagaactggaattacactgggttgattgatgcaatccacaatggtgaaaggaaatgcttga

SEQ ID NO: 12992 - DNA, 155 bp, Glycine max
  Clone ID: LIB3094-083-Q1-K1-G3
aacattttgaagtcatatttgcacacttgattaaaggctgtcgtcccttgtgacggatgcgtggggtgctaataccttccctgtgcgtaaaaacaactcccgaactattcacacttaaagttcgtagaccacaccttttcaattttcccgacgct

SEQ ID NO: 12993 - DNA, 238 bp, Glycine max
  unsure at all n locations
  Clone ID: LIB3094-083-Q1-K1-H10
cccactcgtncgcccacgcgtncggaagaattgatataccttacggatggtggaatcaagaagcatntgggattgcatagtgcgggtggtgacaaaaatgaggacaagagagggaggggggggaaaatcttcggtttattgtaattggaccaaacaaggggttttaccaaaatgggccacgacccccgatattaaaaaagggaggttatttgggggcatatttgtaaaaagtgggttt

SEQ ID NO: 12994 - DNA, 355 bp, Glycine max
  Clone ID: LIB3094-084-Q1-K1-A1
cttttctactttgagtcttcttgatccttctttttctccttgaactcaaacatggcagatgaggtggtgctgctagatttctggccaagtccatttgggatgagggtcaggattgcacttgctgaaaagggtatcaaatatgagtacaaagaagaggacttgaggaacaagagtcctcttctcctccaaatgaacccggttcacaagaagattccggttctcatccacaatggcaaacccatttgtgaatccctcattgctgttcagtacattgaggaggtttggaatgacagaaatcccttgttgccttctgacccttaccagagagctcaggctagattctgggctgattatg

SEQ ID NO: 12995 - DNA, 181 bp, Glycine max
  Clone ID: LIB3094-082-Q1-K1-F8
cacacgccttctcttacttcaagtattgaacttcagctacttctacatataatggacatgagtgacgattaaattcacatccgtattgaaacaattgcccatgaagaccctaagaagcccactaccactacccatctaatccacattcttctaagcatatactaacctttaatttagagat

SEQ ID NO: 12996 - DNA, 189 bp, Glycine max
  Clone ID: LIB3094-082-Q1-K1-F9
aaaatatatctcttacacatatacatatataactgatgttaatataacttaatacttccctcaaaacaaaataaattataaacaaaaacaacctattaaccttcttcatttcatatattacatctataatcactaaaatctaccttatcaaaaaatttaacacatatcaaaataaaaatcattcatatt

SEQ ID NO: 12997 - DNA, 312 bp, Glycine max
  Clone ID: LIB3094-082-Q1-K1-G1
tccacgcctccggcgatttcagtcagctattttctgatcccagctcctatcatactcaatggggatcgggtgaataaaatgccgctcataaacatcaccgattgaccgcctgaacacgcaaaataccactaccccttgccagctgatctacatgaattcatttcaaacttcactcttcacttcgatcatctcagacttcagcataccactacaatcatactcagcgactacggcaactgccaacactatcagactaacttgcagctccatctcccatgcattcaccctatattaccccgtctcacattgaac

SEQ ID NO: 12998 - DNA, 244 bp, Glycine max
  Clone ID: LIB3094-082-Q1-K1-G11
cgcacgcgtccgattgaatatccatggttcttatagatctgtcatccattctaaaacggtaggttaatatatctaagaggaactgtaatagctggaagatctcataggcctatctgcatatgcaactgacggtgctataacttggacccttactgctgaaaaaatgcgtcttaacgaagatgtacctattatccatctaccttggatatgttccatgcaatacgccgttggtataaatgatcag

SEQ ID NO: 12999 - DNA, 443 bp, Glycine max
  Clone ID: LIB3094-082-Q1-K1-G4
cccacgcgtccgagaaggcctgggcttagttgataagcataactgggtgaggaagaaagaaagagagtgaagaagatggcgtcgagcggagcggtaccgttttggagggcggcggggatgacgtacataacatactcaaacatatgcgcgaatctgctcaggaattgcctcaaggaaccctacaaggccgaatccctctctcgtgagaagctccattttgttctctccaaatgggtcgacgccaagcctgaaaaacctactattcgttcagacaccccagagcagtgatctggaatagttggaagctataaatgcataaatctttgagatctggaagttcattgtcattttgaacctttctgtgatgtttaattcctttggttttttctctccatgaaatggaacatgcactggattttgatttgcacggttaatcttggaat

SEQ ID NO: 13000 - DNA, 364 bp, Glycine max
  Clone ID: LIB3094-082-Q1-K1-G5
cccacgcgtccggcttgcgctcttgccgttcacgagcactttatgaagggctgaaggtagctgcaacatctgatctgatgctgggatatctggatttcttccttggtggggatgagaaaagacctgatctgcctcctcgtctttatcaaagatttcccatgtctataatttttgggggagatggaagttacatgagtcctttctctattcacagtgataatattcttactagcatcatgagtcagtctgttccaccaactatatggtatcgattagtggctggtcttaatgctcaactacgattggttcgccgtggacatctaaaaataactttttgtccctgtatcagctggcctgatgtata

SEQ ID NO: 13001 - DNA, 442 bp, Glycine max
  Clone ID: LIB3094-082-Q1-K1-G6
gccacgcgtcgaaaggcctggctattgatagcttactggtgaggaagaagaggaagggagaaatggctgagcggagcggtaccgttttggaggcggcggggatgacgtacataacatactcaaacatatgcgcgaatctgctcaggaattgcctcaggaccctacaaggccgaatccctctctcggagaagctcatttgttctctcaaatgggtcgacgccaagcctgaaaaacctactattcgttcagacaccccagagcagtgatctggaatagttggaagctataaatgcataaatctttgagatctggaagttcattgtcattttgaacctttctgtgatgtttaattcctttgtttttttctctccatgaaatggaacatgcaactggatttgatttgcacggttaatcttgtaataatacaagtttaaacgaatga

SEQ ID NO: 13002 - DNA, 461 bp, Glycine max
  unsure at all n locations
  Clone ID: LIB3094-082-Q1-K1-G7
cccacgcgtccgagcagcgcaagcacgcacgcattctgtgtgttgtggtttctctgagttccgagtggactcagttacggagcaataatgagtcaggaatcgtttatatatagcttcgtggctcgtgggacgatggtgttggctgagtacacggagttcactggaaacttccctgccattgcagctcagtgtcttcagaagcttccatcttccaacaacaagttcacttacaactgtgaccaccacaccttcaatttcctagttgaagatggttatgcttactgtgttgttgccaaggaatctngtagcaagcagatctctattgctttccttgaacgtgtcaaagctgacttcaagaaaagatatggnggtgaaaagcagatacagctattgcccagagtctgaacaaggagtttggaccaggtatgaaagagcacatgaagtacatcatcgatcatgct

SEQ ID NO: 13003 - DNA, 463 bp, Glycine max
  Clone ID: LIB3094-082-Q1-K1-G8
cccacgcgtccgagaaggcctgggcttagttgataagcataactgggtgaggaagaaagagggagagtgaagaagatggcgtcgagcggagcggtaccgttttggagggcggcggggatgacgtacataacatactcaaacatatgcgcgaatctgctcaggaattgcctcaaggaaccctacaaggccgaatccctctctcgtgagaagctccattttgttctctccaaatgggtcgacgccaagcctgaaaaacctactattcgttcagacaccccagagcagtgatctggaatagttggaagctataaatgcataaatctttgagatctggaagttcattgtcattttgaacctttctgtgatgtttaattcctttggtattttctctccatgaaatggaacatgcactggattctgatttgcacagttaatcttgtaataatacaagtttaaacgaatg

SEQ ID NO: 13004 - DNA, 155 bp, Glycine max
  Clone ID: LIB3094-082-Q1-K1-G9
cccacgcgtccgattgaatatccatggttctcttagttcttttatccattaaaaaactgtaggttaatatttctaagaagaactatagtagttgaaagatatcttttgcaaatatgcatatttaactgaagttgctattacttggtcctttcctt

SEQ ID NO: 13005 - DNA, 378 bp, Glycine max
  Clone ID: LIB3094-082-Q1-K1-H1
cccacgcgtccgcagactcgtgggttgaaattgacccgtttcctccctcgcacggatccacgcgaagtctgagattccttcgaattgttaactctctttcagtttcaagttggaaactttttcgattttcgctttctggaggtgtgaattgttgtttgaaagtcacaagcaatggtgaaggacactgcgtattatgacatattacgtgtcaattatgatgcatctgctgcatagatcaagaaagcttattatgtcaaggctagaattgttcaccccgataaaaatcctgaggatcctaatgccgtacaaaactttcagatactcggtgaggcttaccaggttttaagtgatcctgtgaagcgtccggcatatgatgag

SEQ ID NO: 13006 - DNA, 462 bp, Glycine max
  Clone ID: LIB3094-082-Q1-K1-H2
gcgcccacgcatccgcatacgcgtgggttgaaatctacccttttcctccctctcacggatccaggcgaaagctgatattccttcgaattgttaactctctttcagtttcaagttggaaactttttcgattctcgctttctggaagtgtcaattgttgtttgaaagtcacaagcaatggtgaaggacactgcgtattatgacatattacgtgtcaattatgatgcatctgctgcagagatcaagacagcttattatgtcaaggctagaattgttcaccccgataaaaatcctgaggatcctaacgccgtacaaaactttcagaaacttggtgaggcttaccaggttttaagtgatcctgggaagcgtgcggcatattatgagcatgtaaaggagggagtaccacaagattccatgattgaccctacaactgtatttggaatgatttttggaagtgaatttttt

SEQ ID NO: 13007 - DNA, 422 bp, Glycine max
  Clone ID: LIB3094-082-Q1-K1-H5
ccacgcctccgctctattctacatacaaactcttcctctcagaactctctttctgtctctgtagaattctcaattctctctctgctatttattatcactctcttactcgcttctttcaccaaatcaaatgcttacgtctcttccccttcttctcttatttgaaagattcttgttgtctcaaaaattggtatctgtgccaatcacacctctgcaagtgtctttcttgctgttggttattccacaatttgtttcatcgatatattcatagtacttatagtacaaaaaactcttattttctcccaaaatcatttatattctactcctttatagtttaggaaggattccatttaagaatattatcttgccaattttctttaatcaaggcttacaatatcatcattatctaaattccattcaccatc

SEQ ID NO: 13008 - DNA, 352 bp, Glycine max
  Clone ID: LIB3094-082-Q1-K1-H7
cccacgcgtccgctctattcttcaagcaaactcttcgtctcagatctctctttctctctctgtagggtttccgtttctctctctgctatttatgatcactctctgacgcgcttctgtcaccaaatcaagtgcttccgtctcttccccttcttctctgattggaaggattcctgtggtccgagattgtggtttcggggccaatcacgcccgggcaagtgtctttcttgcctgggggtattccaagttttggttcaagggtatattccaaggtcctaaaggtccaggaacctttaatttcttcccaaggtcaatccagatcctggcctggaaaagttggggaaggatccattta

SEQ ID NO: 13009 - DNA, 210 bp, Glycine max
  Clone ID: LIB3094-082-Q1-K1-H8
cccacgcgtccgcccacgcgttcgaaaaaaatgggttcttcttcttccatatggaccgtgtgtttgattttggcatcactggcctctgcagcactctgtgccaaccctcgtagaccagtggatgtacaatttggccgaaactacctgcccacatgggcctttgatcacattaaatactctaatggagggtctgacattcaacttcatctt

SEQ ID NO: 13010 - DNA, 244 bp, Glycine max
  Clone ID: LIB3094-082-Q1-K1-H9
cgtgcaaagatggggatgtggcactcttctttgttcttttaggtaccggaaagaccactcttgggacggatcacaatatgtatctggtgggagatgatgaacactgttggggtgacaatggtgtcttcaacattgaatgtggttgctatgccaaatgcattgacctctcacgggagaaagagccagatatttggaatgcaatcaggtttggcacagtgttggaaaacgtggtgtttgatgagca

SEQ ID NO: 13011 - DNA, 55 bp, Glycine max
  Clone ID: LIB3094-083-Q1-K1-B1
aaaaaagaccggggaaaaaaaaaaaagggaaaaaaaaaatttaaattaaaatttt

SEQ ID NO: 13012 - DNA, 186 bp, Glycine max
  Clone ID: LIB3094-083-Q1-K1-B10
gcccacgcgtccgcttttctacttggtcttctgacctttttttctcctgaactcaaacatggcgatgggtggtcgctgattcggccagtcattggatgaggcagatgcctgctgaagggttcaattgatcaagaaagctgagacgatcttttctcaagaccgtaagaatcgttatccaggaccatg

SEQ ID NO: 13013 - DNA, 403 bp, Glycine max
  Clone ID: LIB3094-082-Q1-K1-F7
cactcttcttctcttgcggctagggttttagcgcagcttcttctagatttaaggaagatgggtaaggaaaaggttcacatcagtattgtggttattggccatgttgactctgggaagtccactaccactggccacctgatctacaagcttggaggcattgacaagcgtgttattgagagatttgagaaggaagctgctgagatgaacaagaggtctttcaagtatgcctgggtgcttgataagcttaaggctgagcgtgaaagaggaatcacaattgatattgccttgtggaagtttgaaaccaccaagtactattgcacagtcattgatgcccctggacacaaggatttcatcaagaacatgatcactgggacatcccaagcttactgtgctggtcttatca

SEQ ID NO: 13014 - DNA, 320 bp, Glycine max
  Clone ID: LIB3094-083-Q1-K1-B2
cccacgcgtccgtcaagcattgcatccctcttgatttgtagtttgttttgtgctttagataagagttgtgccaaatcaagaggggttttaagatcatagtgtgtgttttgcaacaatggctaagttctttgctgctatgatcttggcactctttgccatttccatacttcaaacagtggtaatggctgctaatgaacaaagaggccacttgtattacaacaagagcaaatattgaagtggaagtgtcaagagttaccaatgcccatcacaatgctcgaggagatgtaaccagacccaataccacaagccctgcatgtttt

SEQ ID NO: 13015 - DNA, 172 bp, Glycine max
  Clone ID: LIB3094-082-Q1-K1-D9
gtcatatgctccaagtgcactggtaagggttttaaagctggtgcttcgatgaaatgggctgggtgtcaacgaactgctatgaaagtttctatcaaacatctttgcccgttcacatattcaagtgatgcttccatcatgcaacgtatgcaagggctctttagaaaccattaac

SEQ ID NO: 13016 - DNA, 253 bp, Glycine max
  Clone ID: LIB3094-082-Q1-K1-E1
tcttctacatcgccatctataactagccaacttactctttaactcttctcctcactacaattggagcagtgtgcatcatcttcttcaccttcctctattcttctactttcctcaattgcaactccttattcctattcatcagaaacacctttatccaaaagatctttttattacaatttcatcataatttgttcttaagaccattttactacctctaaaaatttacatatcttttatctctcactatacaaat

SEQ ID NO: 13017 - DNA, 288 bp, Glycine max
  Clone ID: LIB3094-082-Q1-K1-E10
gccacgtggtgtgacaagcattcacagcctgagctcgaactgtacatgtaccgcaaaatggatgcgcggacatgatcttctttagcgtcctcaactgtttatccttgcagcaagtgtagctgcatatgtgtattcgtcataagcatgtgagcacagaggatcttttgaggacaatttaagcctaatgtggtctgaggaccatcatactacctctagcgatggacagatctggtgtgtctcactagacaaagacacaggatgtggatttcacacaaagcaacgctacag

SEQ ID NO: 13018 - DNA, 320 bp, Glycine max
  Clone ID: LIB3094-082-Q1-K1-E11
atttggtgctgcaggaattcacagccttgcctgatatagcagatgattgttttttggtggcggcaatgtgtattcgctactgtgctcaactgtttattccctcgtctgtttttccttcattagtggattgctctatgattgggatcacagtacagcatatggaggcttcgaattccatattgcatttcttggctgacatttttgatcttgcgaattcctctgtgggggagcaatttataccaataagagatagtgtaataattcctcgaggtgccagcatcaccagaatttttgttgctttattaaccggagcactttct

SEQ ID NO: 13019 - DNA, 273 bp, Glycine max
  Clone ID: LIB3094-082-Q1-K1-E12
tttacacacattcttagaaacccttcactcatgatttcaaactctactgctacccaaaatggggtgcgcgttcattatattttttaagcgttctcaaatttttttccttgcagcaattgcagctgcttatgtctattcatcagaagcagctgaataccaaaggaacattttgatgacaatttcaccataatgtggtctgatgaccattatactacctcttaagatggacagatctggtatctctcactagacaaagacacacgatgtagattt

SEQ ID NO: 13020 - DNA, 442 bp, Glycine max
  Clone ID: LIB3094-082-Q1-K1-E2
gcgtgttgacctcacagtgaggctggataaggattcctcctacgatgaaattaaaaatgctatcgatgaggaatcagagggcaagttgaagggaattcttggttacactgaagatgatgtggtctccacctactttgtgggcgatagcagatcaagtatttttgatgcaaaggctggaattgcattgaataagaactttgtgaagcttgtctcttggtatgacaactagtggggatacagctcacgtgtcattgacctgcttgtattcgttgccaagaagtctttttaaggttgtactgaaaaaaaagtagcttgtctagacattatgtgctggtgtctagctgcgatttagtgtctttttgctcgggcagaaatgagaagtatgaataaatctgtttttggaaccgggtttgttaaccctttaagagcattaaactttttt

SEQ ID NO: 13021 - DNA, 273 bp, Glycine max
  Clone ID: LIB3094-082-Q1-K1-E3
atctgcttataaaccctccactctttagctttactctcctccacccaaatggagctgttcatcatcttcttcagcttcctctattcttttccttgcaacaattgtatctgcttatttctattcatcataagcatctgtgtccaaaggatcttttgaggacaatttcatcataatgtggtctgatgaccattttactacctctaaatatggacagatctggtatctctcactatacaaatacacatgatttgtatttcaaacaaaacatctcta

SEQ ID NO: 13022 - DNA, 311 bp, Glycine max
  Clone ID: LIB3094-082-Q1-K1-E4
tgttgacctcacagtgaggctggataaggattcctcctacgatgaaattaaaaatgctatcgaggaggaatcagagggcaagttgaagggaattcttggttacactgaagatgatgtggtctccaccgactttgtgggcgatagcagatcaagtatttttgatgcaaaggctggaattgcattgaataagaactttgtgaagcttgtctcttggtatgacaacgaatggggatacagctcacgtgtcattgacctgcttgtattcgttgccaaaaagtctttttaaggttgtactgaaaaaaaagtagctt

SEQ ID NO: 13023 - DNA, 174 bp, Glycine max
  Clone ID: LIB3094-082-Q1-K1-E5
ttcgacatcacaatctataactatccaatttactctttatcttctctccctctggctaaggataaatcttaaacatgcctgctctaccaacttcatatcttacttactcaaattcaacacatttatcaatttataatattaaactcattcatccaatattcaatatttactttt

SEQ ID NO: 13024 - DNA, 326 bp, Glycine max
  Clone ID: LIB3094-082-Q1-K1-E6
tgttgacctcacagtgaggctggagaaggaagcctcctacgatgaaattaaaaatgctatcaaggaggaatcagagggcaagttgaagggaattcttggttacactgaagatgatgtggtctccaccgactttgtgggcgatagcagatcaagtatttttgatgcaaaggctggaattgcattgaataagaactttgtgaagcttgtctcttggtatgacaacgagtggggatacagctcacgtgtcattgacctgcttgtattcgttgccaagaagtctttttaaggttgtactgaaaaaaaagtagcttgtctagacattatgt

SEQ ID NO: 13025 - DNA, 374 bp, Glycine max
  unsure at all n locations
  Clone ID: LIB3094-082-Q1-K1-E7
attacccgggctcgactcgcacgccgtcgcgtgttgactactcacagtgaggcatggagtaaggtatgtctctcctatctatgtaaattataaaatggctatcggaggaggtatatcagacgggcaatgttgcataggcgaacttcttgagttacatctgtaagaatgatgttggtcttccactcgacttgttgtgggccgattagcatgatcacagtacttttttgattgcaaatggcctgtgaattgcatttgaatatagaacctttgtgaaagctnttgtctcttggtattgacaatcgatgtgggtgataccagctcactgtgtcaattgactcttgcttgtatttcgtttgccaatgaagttcttttta

SEQ ID NO: 13026 - DNA, 371 bp, Glycine max
  Clone ID: LIB3094-082-Q1-K1-E8
tgttgacctcacagtgaggctggataaggtttcctcctacgatgaaattaaaaaggctatcgaggaggaatcagagggcaagttgaagggaattcttggttacactgaagatgatgtggtctccaccgactttgtgggcgatagcagatcaagtatttttgatgcaaaggctggaattgcattgaataagaactttgtgaagcttgtctcttggtatgacaactagtggggatacagctcacgtgtcattgacctgcttgtattcgttgccaataagtctttttaaggttgtactgaaaaaaaagtagcttgtctagacattatgtgctggtgtctagctgcgatttagtgtcttcttgctcgggcagaaa

SEQ ID NO: 13027 - DNA, 397 bp, Glycine max
  Clone ID: LIB3094-082-Q1-K1-F10
atccaagaggaagaagaggaagaagaagaatgtgttgtggttcggaggaccagtgttcataagagcggcttggttaataagcttggggatgatttttacagggttgtcctggaaaacgatgaatccaatacggtgtcgtcattaaagacgacttgtggtcggaaattgtttaagaatggtgaactttggaacaaaacggtggtttaagtacctgaaaaatcaaacacctaatgaaagaagagtgcaagtgaagtctacaagagcccttgggttagaactttttccagattggctaaacgtgtgtccaatcaaacgtcttgtgattagatgtttgataaaattgcggttcttcttttccttttattattgtccaattagccattctgtgtatgtttca

SEQ ID NO: 13028 - DNA, 322 bp, Glycine max
  Clone ID: LIB3094-082-Q1-K1-F11
cccacgcgtccgattgaatatccatggttcttttagttcttttatccattaaaaaaggctagattaatatttctaagaagaactatagtagttgaaagatatcttttgcaaatatgcatatttaactgaggttgttataacttgttccttccctcaaaaaaaaaaaaaatatgaagaaaaagaaccctattaccctccttcattggatatattacatctataaggagtaaattctaccggttcagagaatagaaaattaatcaaaataaaagtcagcagtctaacatctctaattttggtgacaaattcaaggggttaaatt

SEQ ID NO: 13029 - DNA, 454 bp, Glycine max
  Clone ID: LIB3094-082-Q1-K1-F12
atccaagaggaagaagaggaagatgaagaatgtgttgtggttcggaggaccagtgttcgcaagagcggcttggtgaacaagcttggggatgattttgacagggttgccctggaaaacgatgagtccaatacggtgtcgtcgttgaagacgactcgtggtcggaaattggttaagaatggtgaacttgggaacataacggtggttgaagtagctgacaaatcatacacctgaggaaagaagagtgcaagtgaagccgagaagagccctggggttagaacttcttccagattggctaaacgtgtgtccaatcaaacgtgttgtaattagatgtttgataaaattgtggttgtccttttccttttattattgtccaattagccattctgtgtatgtttcaagatttatggtttgttcaacaattggcattttgcagtatgtcatacatgaatgaatg

SEQ ID NO: 13030 - DNA, 242 bp, Glycine max
  Clone ID: LIB3094-082-Q1-K1-F3
ctccactcctgctcactcttcttctctttccactacttttacatctcatcttcttctagatttaaaggggatttgttaataaaaaattcacatcaatactttttttattttccatgtttactcttttaattccactaccacatttccaccttatctacaatcttagatgcatatacaaacttattatttaaatattttataaaaaatcttcttatatttacaatatatctttcaattattcc

SEQ ID NO: 13031 - DNA, 151 bp, Glycine max
  Clone ID: LIB3094-082-Q1-K1-F4
tttcagtttattgatttttgttcacttgatctcatcatagtcatcggcgtcaattgaaaaagatgccgatcataaacatcgccgtccgaaggccctaaaaagccacttaccccgacacgtttaaagccgcctttgctgaattcaatctaac

SEQ ID NO: 13032 - DNA, 352 bp, Glycine max
  Clone ID: LIB3094-082-Q1-K1-D4
cggacgcgtgggcagacttcccattccaatttccaagtttttcaaagaaggtgagtgatgagcatggagcatttgccaggagaattggtgtccaacgtgctctcaaggttaccatcgaaggtgttgcttctatgcaagtgcgtgtgcaagtcctggttcgatctcataaccgatcctcattttgtttccaattactatgttgtctacaacagtcttcaaagccaagaggagcatctcttggtaattcgaagaccctttttttctggcctcaaaacttacatttctgttctttcttggaacaccaatgaccccaaaaagcatgtttcttctgatgttctaataccctcctatg

SEQ ID NO: 13033 - DNA, 461 bp, Glycine max
  Clone ID: LIB3094-082-Q1-K1-F5
gtcatatgctccaagtgcactggtaagggttctaagtctggtgcttcgatgaagtgtgctgggtgtcaaggaactggtatgaaggtttctataagacatcttggcccgtccatgattcagcagatgcagcatgcttgcaatgaatgcaagggtactggagaaaccatcaacgacagagatcgctgcccacagtgcaagggagaaaaggttgtgcaggagaaaaaagtccttgaagttattgtggaaaagggaatgcagaacgggcagaagattacattccctggcgaagctgatgaagcgccagacacaattactggggatattgtctttgtccttcagcagaaggaacatcccaaattcaaaagaaaggctgaagatctttttgtagagcacattttgtcccttactgaagccttatgtggcttccaatttgtgctgactcacttggatggccgtcagct

SEQ ID NO: 13034 - DNA, 426 bp, Glycine max
  unsure at all n locations
  Clone ID: LIB3094-082-Q1-K1-F6
cccacgcgtccggtgatttcagtgagtgatcggtgttcacttgatctcatcataatcgtcggcgtcaattgaagaagatgccgatcagaaacatcgccgtcggaaggcctgaagaggcgactcaccccgacacgttgaaggcggctttggctgagttcatctcaaccttcatcttcgtgttcgccggctcaggctccggcatcgcctacaacaagctcaccgacaacggcgctgccacccctgccggcctcatctccgcctccatcgcccatgcattcgccctcttcgtcgccgtctccgtcggcgccaacatctccggcggccacgtcaaccccgccgtcaccttcggcgccttcgtcggcggcaacatcaccttcctncgcggcatcgtctacgtcatcgcccagctcctcggcttcatcgtcg

SEQ ID NO: 13035 - DNA, 53 bp, Glycine max
  Clone ID: LIB3094-082-Q1-K1-B11
ctagactactatgagtcctctcaaatcttatcttaccgcctgcactcaaacac

SEQ ID NO: 13036 - DNA, 219 bp, Glycine max
  Clone ID: LIB3094-082-Q1-K1-B3
cagaggttgagtggacctgtctcaactaccttttaccttgggtattcactactcatggccagttcaattataatttcaaccggcaccattgacttccttatgtcattctactttttgcactacttgttctcatcaataaaaaatgatttaagttcttgttgtcatttcctattaactattaaaaaagtttatttatataacttgatcacatttcatatt

SEQ ID NO: 13037 - DNA, 349 bp, Glycine max
  Clone ID: LIB3094-082-Q1-K1-B4
gttgtgtgcaacccattggggaagtctggagtgtgccctcatccagcaatttatgatattgacttttgggtcactagctaattcaaccccatacttgggaggagtgcttctgctgattgtttctgcctggctagcagcggcaaaatccttggatacccaatttactgcattgcgtaaagaggaagaactcgagaaagagatggaacgagcagccgccgtcaagataccagtggtggctgagactgagagtggaaatggttctcttgcaactggttcaccactgaatccatcctcaggtgactcctcaagcaatccatctgaagccttaacttctcgcaattaaaatgtg

SEQ ID NO: 13038 - DNA, 346 bp, Glycine max
  Clone ID: LIB3094-082-Q1-K1-B7
agtggtcctgtctcatctaccctttaccttggttattcactactcatgtccagtgcaagcatgttgtcaaccggcaccattggcttccttatgtcattctactttgtgcactacttgttctcatcagtaaagatagattgaggttcttgttgtcattgcatattaactatgaaaaaggttgattgatataacttgatcacattgcatagtatgtcaacggatgtttaattcattgtctgattttatattgcgatgggatctgcagtttgttctccttctgcctgtttcccaaagtagtgtactcattcaagtattcaactagtgttttgagatcatgtttcaagta

SEQ ID NO: 13039 - DNA, 172 bp, Glycine max
  Clone ID: LIB3094-082-Q1-K1-B8
gcggttgtgtgcaacccattgttgaagtctggattttccctcatccagcaatttatgatattgacgtttggttcactatctaattgaaccccatacttgtgaggagtgcttctgctgattgtttctgcctttctagcatcgtcaaaattcttggatacccaatttactgcat

SEQ ID NO: 13040 - DNA, 427 bp, Glycine max
  Clone ID: LIB3094-082-Q1-K1-B9
ggagattctgatttgttctctcagatctgagcttaccgtcgccggaatccaactcaacctgggtcggattcttgggtatcatcgcatcgccattcgttttagcctctcaataagagattttagttcgcttcaaattcgaggtttgatttgaagttgaaagttggaatagcttaacttgtggtgtaaacaacccacacacacgaacatggaaagccaggacaacaacgtagaaattgtcattcaattcatttctagcttacaaatctgctaaggtgtttgttgctggtcaccggggtcttgttggctcggccattggtcgcaagctcacccaacttgggttcactaatctagtcttgcgctcccatgccgagcttgatctcactcgacaatctgatggtgaagcctctttgcttatgaaaaaccctga

SEQ ID NO: 13041 - DNA, 431 bp, Glycine max
  unsure at all n locations
  Clone ID: LIB3094-082-Q1-K1-C1
cagagtttgagtggacctgtctcagctaccctttaccttggttattcactactcatggccgttgcaatcatgttgtcaaccggcaccattggcttccttatgtcattctactttgtgcactacttgttctcatcagtaaagatagattgaggttcttgttgtcattgcatattaactatgaaaaaggttgattgatataacttgatcacattgcatagtanggcaacggatgtttaattcattgtctgattttatattgcgatgggatctgcagtttgttctccttctgcctgtttcccaaagtagtgtactcattcaagtattcaactagtgtttgagatcatgtttcaagtattttgttcaagtttctttaagaagttgtaattcaaactctcatctcatttaatactttaaaaaaatgatgttaggat

SEQ ID NO: 13042 - DNA, 298 bp, Glycine max
  Clone ID: LIB3094-082-Q1-K1-C10
aaaaaaggttcatagttgatatctccagcggatcgatgaagtttgaagatttggcagaaggatgcatggcaaaaatactgtcctacaccactcgtgcggatgtatgcaggctttctctggtttccaaagcctttcattccgcggctgaagccaacactgtgtgggattgctttctcccctctgatttgtcctctatcatctccccttcttcttccgttcctccctttcgctctattaaggatctctatctctatctctccgatcgtcccaccatcatcgatcaaggtataaagagttt

SEQ ID NO: 13043 - DNA, 155 bp, Glycine max
  Clone ID: LIB3094-082-Q1-K1-C11
caactgcccgtttccttttgttaggaaaatatatgccaaaagaaaaccagtattaatataatgaacgggtagttgaatagtgtctacgttcaattgtgcattctcaattatcattctttcttcctcttttcttttatgcttaaaaaataagcttt

SEQ ID NO: 13044 - DNA, 201 bp, Glycine max
  Clone ID: LIB3094-082-Q1-K1-C12
acgcaactgcccgttgacatctgcaacgaatctattagcatagaggatacgactgtaagaggcagtgagcgaaatgctgaactacaccaatcgtgcagaggtctgcatgctttatcatgctttcaaagcctttcattccatgcttagaagccaacactgtgtgggattgcatgaacccctctgacttattctctatcatct

SEQ ID NO: 13045 - DNA, 256 bp, Glycine max
  Clone ID: LIB3094-082-Q1-K1-C2
catagattgagtgtacctgtctcatctaccttttaccttggttattcactactcatgaccagtgcaaggatgttgtcaaccggcaccattggcttccttatgtcattctactttgtgcactacttgttctcatcagtaaagatagattgaggttcttgttgtcattgcatattaactatgaaaaaggttgattgatataacttgatcacattgcatagtatgtcaacggactgttaattcattgtctgattatata

SEQ ID NO: 13046 - DNA, 302 bp, Glycine max
  Clone ID: LIB3094-082-Q1-K1-C3
cccacgcgtccgccaaaaccgaaaagaagaaaaacgctgaaatccccaaaatcgaaaagaagaaaaccaaaagcgctgaaatccctctaaccgatggcaaaacgaagagggatagagaaatcgccaaagaggagaacaagaagaagactaagaaacccaagctcagcaatggcacttcaaaacagcgagacgagggatccaaaaagggagtagcagaaggaaaaggagaagaggggaaaatgaacgtgtttccgatgaatcgcatcagaacgatgattaaaggcgaagatcccgatatgcgt

SEQ ID NO: 13047 - DNA, 387 bp, Glycine max
  Clone ID: LIB3094-082-Q1-K1-C4
ggagattctgatttgttctctcagatctgagcttaccgtcatcggaatccaactcaacctgggtccgattctcgcttatcatcctataaccgatcgctttagcctatcaatagaggaatctagctcgatgagaactcgaggattgctttgaaacccaaactcagcaatggctcttctgtacagcgagacgagggatccaaacaggcagtagcagacggaaaagcaaaagaggggtaaatgaacgtgcttccgatgaatcgcatcagaacgatgattaagggcgaagatcccgatattcgtgtttctcaggaagcattgttggccatcaacaacgctgtggagaaatttcttgagcaattctcgcaagatgcttattgcttttgtgtt

SEQ ID NO: 13048 - DNA, 274 bp, Glycine max
  Clone ID: LIB3094-082-Q1-K1-C5
gcgtacggcaaaaccgaaaagaacaatatcgcttaaatccccaaaatcgaaaagacggagaccgaaagctctgaaatccctctaaccgatggcaaaacgaatagggatagagaaatcgccaaagacgagaacaagaagaagactaagaaacccaagctcaacaatggcacttcaaaacagcgagacgagggatccaaaaagggagtagcacaatgaaaaggagaagaagggaaaatgaacgtgtttccgatgaatcgcatcagaacgatgatta

SEQ ID NO: 13049 - DNA, 217 bp, Glycine max
  Clone ID: LIB3094-082-Q1-K1-C6
acccacgcgtgcggcatactctgagtcgttctctcagatctgattttacctttaccggaatccaactcaacctagtacacgattcttttttatcatcgcatcaccattaccattagtccactcactatgataatttatttctcttcaaattccatattctatatgaattaaaaacttataatagcataaactcaacttactaactctaccacttaca

SEQ ID NO: 13050 - DNA, 338 bp, Glycine max
  Clone ID: LIB3094-082-Q1-K1-C7
tgcgcccacgcgtcctccaaaacctaaaagaagattaacgctttaatccccaaaatcgaaatgaaggaaaccgtaagctcttaaatccctctaaccgatggcaaaactaatagggatagataaatcgccaaagattataacaagaataatactaataaacccaagctcatcaatgtcacttcaaaacatctagactagggatccaaaaagggagtatcacaatgaaaaggagaagattggaaaatgaacgtgtttcctatgaatctcatcataactattattaatggctaagatcccgatatgcttttttttcatgaagcattgttggccatcaacaa

SEQ ID NO: 13051 - DNA, 115 bp, Glycine max
  Clone ID: LIB3094-082-Q1-K1-C8
gcggcatattctgaggtgttctctcagatctgagtttaccttttcctgaatccaactcaacctgggtcttgttcatttttaacatcgcatcgccattcgctttaacctctcaata

SEQ ID NO: 13052 - DNA, 283 bp, Glycine max
  Clone ID: LIB3094-082-Q1-K1-D12
gtcatatgctccaagtgcactggtaagggttcttaatctggggcctccattaaatgggcctggttgtaaaggaactggtttaaaggttcctttaaaacatcttggcccgcccttaatttaaccattgcaccatgcttgcaatgaatgcaagggtcctggaaaaaccatcaacgacggaaatcgctgcccccagtgcaagggagaaaaggttgtgcaggagaaaaaagtccttgaagtttttgtggaaaagggaatgcagaacgggcagaaaattacattccct

SEQ ID NO: 13053 - DNA, 201 bp, Glycine max
  Clone ID: LIB3094-082-Q1-K1-B10
ggagattctgatttgttctctcagatctgagcttaccgtagccggaatccaactcaagctagtgcggatacttgagtatgatcgcatcgacattcagtataacctctcaataagagattttacatcacttcaaatacgagcgacgacttgaagttcaaagtttgaatatcttaaccggtgtgtataacaaccaacacacac

SEQ ID NO: 13054 - DNA, 344 bp, Glycine max
  Clone ID: LIB3094-082-Q1-K1-D2
cgaccgacgcgtgcgctgacgcgtgggtttcagaggcaccgaatgttcttacttttgcattaaagagatttcagtcgtgtaagtttgttaagctcaacaagcctattcaatttcctgaaatacttaacttggcacctttcatgagcgggactagtgataaatcacccatatacagattgtatggggtagttgttcacttagatatcatgaatgctgccttttcgggtcactatgtgtgctatgtgaagaatatccaaaacaagtggttcaaggttgatgacagtgtggtgacagctgttgaattggatagagtctttacctaaagaacatatatgcttttctat

SEQ ID NO: 13055 - DNA, 319 bp, Glycine max
  Clone ID: LIB3094-081-Q1-K1-F6
caagaaatgaaagatgctctggttaagaaattgaaagaccaactatttgttgccagagctgattatcctagccttgcaaaactcccagcaaatgataaattgtctcgccaactgaaacagaatatacaggagatggagcacatgcttagtgaatctaccacagatgctgatcttccaccagtggctgaaagttattcaaagaagatggaaaaaacaataaccagggtaaaatcaattcctgtggtttgcgacaatgtggacaagaaattgagacacatatttgatttgactgaggatgaagccaacttccacatgaaac

SEQ ID NO: 13056 - DNA, 263 bp, Glycine max
  Clone ID: LIB3094-081-Q1-K1-G1
ctcatgatgtgaatgaggctgatctacaggatgcacgagctcctaaggcacgttggattgggtgttctcaatatgaagcgtgctgctagttaaatgagaaaggtgaaagggcaccgaaggatagcgattagacgacgcactagcaaactgtattcgtgtgcaacaaggctgggaaggatgaccttgatagagctgacgagaaaccacgaattaagaatcacacgaacgaaacctgtgatcctgatacaattaaagagaccgct

SEQ ID NO: 13057 - DNA, 282 bp, Glycine max
  Clone ID: LIB3094-081-Q1-K1-G10
gttgaatcgtgaaaatgttcagaaaccagtacgacacggacgtgaccacatggagccctgcggggaggctgttccaggtggagtacgctatggaggcggtgaagcagggctcggcggcgatagggctccgatcgaagacccacgtggtcctcgcatgcgtcaacaaggccaactccgaactctcctcgcaccagaagaagatcttcaaggtcgacaatcacatcggcgtcgccatcgctggccttaccggcgatggccgcgtcctctcccggtacatgagat

SEQ ID NO: 13058 - DNA, 193 bp, Glycine max
  Clone ID: LIB3094-081-Q1-K1-G11
tcgtcacaaccttcacttcctcacattttaatacttctcgttcaacactatatcaaacggctctttctttcttttccaaaaatctttcccttagaaagccataaagcaagtccctcccatgttcacatttttcttgaaaaacccctaatttatatttctactcttctctatctcattacaaaattcatttccc

SEQ ID NO: 13059 - DNA, 289 bp, Glycine max
  Clone ID: LIB3094-081-Q1-K1-G12
cccacgcgtccggacagaagagagcgtccttttcgcaaccctaataagaagaaccacagcggcaagcgagtgacatccaccagccatgggtcgtatgcacagccgcggtaagggtatatcctcttctgctttgccctacaaaaggacaccccctagctggctcaagatctcttcgcaagatgtggaagaaaatatctgcaagtttgcgaagaaaggtttgaccccgtctcagattggtgtcattcttcgagattctcacggtattgctcaggtcaacagcgtcacttgc

SEQ ID NO: 13060 - DNA, 356 bp, Glycine max
  Clone ID: LIB3094-081-Q1-K1-G2
ttttatctttattccactgaatagaacatgagcatataaatggataccctttatattatcgatctgtatattatctataaagggtaaagatatccgatgtgaatctatttgtttagttttctatcggtatgtatataggtgaataatccaacatgcctttttgtgaagtaaaaaaactaccctcgatccatgcctcaaaagggttgataataagtaaaaaaaatcaatgaattcatgataaaacccttctgcgtttttttattataaatttttttgtcaataaagggatcaaggggttgggggatcaaatggtaaagttcttttggtggtaaattggaggattagaaacatgacta

SEQ ID NO: 13061 - DNA, 303 bp, Glycine max
  Clone ID: LIB3094-081-Q1-K1-G3
cccacgcgtccgcgtttccaaatattcacataagagaagaacaatagttctctccctagaagctcatgatatgctagataagccatccttaggagcaatatatccgtcctcttcaatttattagcagaaggtgtgttgcgtattagaccatagtctttttgtcattgtggtttcccaacaacgcagtttagcctttgagagcatcagcaatcacatggagatcagaatatcattcagcaattgaagatcagggggatcaggcataggctatcaagcaatgatatggctttcttcccagcaaat

SEQ ID NO: 13062 - DNA, 189 bp, Glycine max
  Clone ID: LIB3094-081-Q1-K1-G4
cttcttctctggttgattcggatctagagtcttcagtttctcctcgttgttcttcgctttgctgtggtcaatttcgattctttcgttaatttaataagatgtttgggagggcaccgaagaagagcgataatacgaggtactacgaaatcctcggcgtttccaagaacgcttcgcaggatgatctgaaaa

SEQ ID NO: 13063 - DNA, 408 bp, Glycine max
  Clone ID: LIB3094-081-Q1-K1-G8
cgacccacgcgttcgcccacgcgttcgcgtatccaaatattcacataatagaagaacaatagttctctcgctagaggctcattatatgctagataagccatccttaggagcaatatatccgtcctcttcaatttattaacataaggtgtgttgcgtattagaccatagtctttttgtcattgttgtgtcccaacaacgcagtttagcctttgagagcatcagcaatcacatggtgatcagaatatcattcagcaattgaagatcagtggcatcaggcataggctagcaagcaatgatatggctttcttcccagcaaatttcatgctacaaacacctcaccaagatgaccatcaaccttcaccttcactcaactcaattataacttcatgtgcacctcaagagtaccat

SEQ ID NO: 13064 - DNA, 268 bp, Glycine max
  Clone ID: LIB3094-081-Q1-K1-H3
tctctctctctctcactttgtcctccaaactcaagtgtcggaaagtttgcttcttgtccactctgaatcaccctatttattttgggtctctcatctttcttcttccttccaagttgtttttggtgttggtgttggtgttgaattgagttgagaagaaaagaagaggtcatagacacacacacaagacatgtctgctgatgagtcagctgaacacaacaacatcagaggagtaccaactcatggtggacgctatggtcagtacaatatc

SEQ ID NO: 13065 - DNA, 433 bp, Glycine max
  Clone ID: LIB3094-081-Q1-K1-H4
gcttcctcctcttacgagcctttcctttcagtccattgattcggtgggtgcgggtgcagggaaaccgagctagaccctgatcggcgtcggcacaccgccggagaacaagatgattgtctgcgtcgtcggcgtcggtcaccagaacaatccgctgtacatacagagcttcacggaggccgatgatgctctcaagctccaccacatcgtccattgctcgctcgatgtggtcgacgagcgagtgaacaatcctaaaaagtctgggccgatgcttaatgagacgtttttgggactgctttatcctattgaaaactacaaagtatatggatatctgactaatacgaaggtgaaatttatcttggtgaccacggatctggatgttaaagatgcggatgtaaggaattttttcaggaggttccatgccgcatatgtagat

SEQ ID NO: 13066 - DNA, 244 bp, Glycine max
  Clone ID: LIB3094-081-Q1-K1-H6
tcggcttcctcctcttacgagcctttcctttcagtccattgattcggtgggtgcgggggcagcgaaaccgagctagaccctgatcggcgtcggcacaccgccggagaacaagatgattgtctgcgtcggcggcagcggtcaccagaacaatccgctgtacatacagagcttcacggaggccgatgatgctctcaagctccaccacatcgtccattgctcgctcgatgtggtcgacgagcgaatg

SEQ ID NO: 13067 - DNA, 320 bp, Glycine max
  Clone ID: LIB3094-081-Q1-K1-H8
tctgtctctctctcactgcgtcctccaaactcaagtgtcttaaagtttgcttcttttccggtctgaatcaccctatttattttgggtctctcatctttcttcttccttccaagatggttttggtgttggtgttggtgttgaattgagttgagaagacatgcagaggtcatagacacacacacatgacatgtctgctgatgagtcagctgaacacaacatcatcagaggagtaccaactcatggcggacgctatgttcagtgcactatctatggcaatctcttcgaagttcccagaaagtatgtccctactatccgccctg

SEQ ID NO: 13068 - DNA, 279 bp, Glycine max
  Clone ID: LIB3094-081-Q1-K1-H9
cccacgcgtccggctccctctcctctcttctcttctgttcaaacaatgtcgcaaacgttgcatgctttcgtcgccaaaaatcttggctgtggaatggcagaaggcaagtgtctcccatgttcaggtgtttctggaagaactgctgctgtatattcctactcttctctaggtcatcacagaattcattcccgtgtccaagttagaggactaaagtgtggctttaggggtgcatcttttgtatgtgaagcaaagaggaacccagatttctcaaggcaaaac

SEQ ID NO: 13069 - DNA, 370 bp, Glycine max
  Clone ID: LIB3094-082-Q1-K1-A1
ggctgaagcacaactacgagaccagcatggctaccctgtcccactcaccgatcaatacggtgatccggggatcttaactgacgagcgcggtaatcccgtccaactcactggtgtcgctaccaccgctaccggcacagcacgttctgggcttgggtcctatcgtaccggtgcttacggcggtggtgcaatgtacaaccaccgttgcagatcttttggcaacccaaccaaagattgacagggaggctagacagcttcgtcgtacctccagtctaagctctatctcgattgaggatgattggcaacgtgggaagatgaagaaggtagtgaaggataatattcaagagctactaccaatggtagtacgaaggaa

SEQ ID NO: 13070 - DNA, 327 bp, Glycine max
  unsure at all n locations
  Clone ID: LIB3094-082-Q1-K1-A10
gtgctgtgctctgaggggccatagtttgggattctttgaaccctaatctccacccaaacccggtttcccgggaaattgccttggaaaagaaagagcgaagaggaaaatgcagaatcacaggctgaagcagcagcagcagcagcaacaacaagctcttatgcagcaagctcttctccaacaacagtctctctaccaccctggcctccttgctcctcctcagattgaaccatatccaagtggaaatttgcctcctggttttgatccaagtacttgccgcagtgtgtatgttgggaacatncgtacacaggtaactgagccgcttttgca

SEQ ID NO: 13071 - DNA, 296 bp, Glycine max
  unsure at all n locations
  Clone ID: LIB3094-082-Q1-K1-A12
gtgctgtgctctgaggggccatagtttgggatcctttgaaccctaatctccacccaaacccagtttggcgggaaattgccttggaaaagaaagagcgaagaggaaaatgcagaatcacaggctgaagcagcagcagcagcagcaacaacaagctcttatgcagcaagctcttctccaacaacagtctctctaccaccctggcctncttgctcctcctcagattgaaccatatccaagtggaaatttgcctcctggttttgatccaagtacttgccgcagtgtgtatgttgggaaca

SEQ ID NO: 13072 - DNA, 193 bp, Glycine max
  Clone ID: LIB3094-082-Q1-K1-A2
cctttctcactctcaaatcaatactctgatcccgttatcttaacagactagcgcggtaaacccatccaacataactttatcgctaccatcaatacactcacatcatattctctatttgctttcaatcataccgctacttaccttcaacagttcaatttcaaccatcgatacatatcttttttcaacccaacca

SEQ ID NO: 13073 - DNA, 283 bp, Glycine max
  Clone ID: LIB3094-082-Q1-K1-A3
gctgaagcacagctactacacagcatggctaccctgtcccactcaccgatcaatacagtgatcccgttatcttaactgacgagcgcggaaaacccatccaactcactgatatcgataccaccaataccttcacatcacattctcaatatgctctcaatcataccgctacttacaacaatcatgcatgtacaaccaccgatccatatcttttgtcaacctaaccaaatattcacatagaaactagacagcttctttctatctacatactaagctctatctctat

SEQ ID NO: 13074 - DNA, 149 bp, Glycine max
  Clone ID: LIB3094-082-Q1-K1-A5
aactttattactttacatactttatcttctgtcttacttttgttttatatacttattatcttcatcattttatttttccaattttaattgactcatttgagaccataaatataaaaaaaagtctacctctctatatatccaacttacta

SEQ ID NO: 13075 - DNA, 399 bp, Glycine max
  Clone ID: LIB3094-081-Q1-K1-F5
cccacgcgtccgcccacgcgtccgaaaaaaatgggttcttcttctttcatatggaccgtgtggttgattttgcaatacttggcctttgaagaactttgggcaaaccttggtaaacagtggatgtaccatttggcccgaactacctgcccacaatggcctttgatcacatcaaatacttcaatggaagttctgacattcaacttcatcttgacaagtacactggtactggctttcagtccaaagggtcatacttggttggtcacttcagcatgtacataaagatggttcctggagattcagctggcacagtcactgctttctatttatcttcccaaaatgcggagcacgacgagatagactttgagttctttgggaacagaacaggacacccttacattt

SEQ ID NO: 13076 - DNA, 385 bp, Glycine max
  Clone ID: LIB3094-082-Q1-K1-B1
caaaattatgacagttctttcactctttttccatttcacgccttccatttccattatcgattctgtgtcaatccgcggtagacatctcttctttccaaatgtctactttaaagttcaacaacagctcatgtacctccacccccaactgataatattcatctatctctattctatcaacttgttctatcacactcttttatacaagccctacatcttatcatctctacttctattcctaacattcctcttatgtcatccctacatcattccttagctagtaatttttcttcatatcaacgcaatctcttttcaacttcttcactgaaaaaacatcttaatctttccactgcttatatctcatttatatcttactttatctccaaca

SEQ ID NO: 13077 - DNA, 77 bp, Glycine max
  Clone ID: LIB3094-081-Q1-K1-B7
caccgctccaacacaggggaaggtgaagggagaccttcacgttcagggagggcaatgcgggaaccagatcgggtcga

SEQ ID NO: 13078 - DNA, 361 bp, Glycine max
  Clone ID: LIB3094-081-Q1-K1-B8
cccacgcgtccgtcaagcattgcatccctcttgatttgtagtttgttttgtgctttagatgaaagttctgccaaatcaagaggggttttaagatcatagtgtgtgttttgcaacaatggctaagttctttgctgctatgatcttggcactctttgccatttccatacttcaaacagtggtaatggctgctaatgaacaaggaggccacttgtatgacaacaagagcaaatatggaagtggaagtgtcaagagttaccaatgcccatcacaatgctcgaagagatgtagccagacccaataccacaagccctgcatgtttttctgtcagaagtgctgcatgacatgcctgtgtgtgcccccg

SEQ ID NO: 13079 - DNA, 306 bp, Glycine max
  Clone ID: LIB3094-081-Q1-K1-C1
ctccgcactccgtcttcatcaatcagcatcaccaccgctccaacacaggggaaaatgagggagatccttcacgttcagggagggcaatgcgggaaccagatcggttcgaagttctgggaagtggtgtgcgacgagcacggcatagatccgacggggaagtacgtcggaaactcagatctacaactcgagcgcgtgaacgtgtactacaacgaagcttcctgcgggcggtttgtcccacgcgcagtgctgatggacctggagcccggaaccatggacagcgtgcggactgggccgtacgggcagata

SEQ ID NO: 13080 - DNA, 280 bp, Glycine max
  Clone ID: LIB3094-081-Q1-K1-C10
gaagttgcgagagtgaagaaatggcgcaagacttggcattggatttggaggagctgggccggcttcacagcatcgccaaaagacctcgaaccctctctcttctctcctccgaaattcgtaacctcgaaaagttatcgtcagaggaagcttctgcgcagattccggcgccgatttcgaccggaactaaagtggcgccttcacctgcgctgaagtatgcggcactcgcgtcgttcagttgggaccaggatagtgacaaagttaagatatatgtgttaatgga

SEQ ID NO: 13081 - DNA, 233 bp, Glycine max
  Clone ID: LIB3094-081-Q1-K1-C11
cacacacacaaacatatgctacaaactccacttcttcaacacaaaaatccgaaatgtgtgctccaacacaaaaaaatgaaacctacaatcaccattctcttggtgtctctactacttctcataacttcacccttcttggcaacccgacccgcattcaaccctgatcaagtcaagcacaacaaaaacaacaaccaaggtggtggtgcttgtgctggtgctggcgggttcttttg

SEQ ID NO: 13082 - DNA, 277 bp, Glycine max
  unsure at all n locations
  Clone ID: LIB3094-081-Q1-K1-C12
tcggcaagtgtaacccaaaaccctagcggcgcctgctttcttcgttcggcttttgcaggagccatcaagattgagtctcaagtgaagcatgctcttggtggcaaaggtatgggtcggactggatccaaaggacaagtgactcaggttagagtgaagttttggatgatcagaacctcatatcatgaggaatggtaaaggaccagtgagagaaagagacattctcaccctactcgagtctgaaagggaagcangaaggttgccctagagggtatttttt

SEQ ID NO: 13083 - DNA, 244 bp, Glycine max
  Clone ID: LIB3094-081-Q1-K1-C2
cccacgcgtccgcccacgcgtccggataaatggaaaacattagtgcacaccgcagcaatcgcccttcaacaaaggaggggagagccagtacctcacgagctcttggacagggttttggctgctcatgctttctggtctcagcaccaagccaagcaacatggcaagcatcaagctggaccaggaacctagaagattacagaagcctcagctgaaagaccttgtgtgtgttgaaggtgagaaggtg

SEQ ID NO: 13084 - DNA, 238 bp, Glycine max
  Clone ID: LIB3094-081-Q1-K1-C3
atcaggactccgactacaccaattttcatcttcaccgctccaacacaggcgaaagtgatggggatccttcatgttcagggagggcaatgctggaaccagatcgagacgaaggtctggtaaattgtgttctacgagcacggcatagatccgacggtcaaggactgtggaaactcagatctacatcttgagcgcgtgaacgatgactacaacgaagcttcctgcgggcggttaagtgcca

SEQ ID NO: 13085 - DNA, 367 bp, Glycine max
  unsure at all n locations
  Clone ID: LIB3094-081-Q1-K1-C7
cttttctactttgagtcttcttgatccttctttttctccttgaactcaaacatggcagatgaggtggttctgctagatttctggccaagtccatttgggatgagggtcaggattgcacttgctgaaaagggtatcaaatatgagtacaaagaagaggacttgaggaacaagagtcctcttctcctccaaatgaacccggttcacaagaagatntccgttctcatccacaatggcaaacccatttgtgaatccctcattgctgttcagtacattgaggaggtttggaatgacagaaatcccttgttgccttctgacccttaccagagagctcangctagattctgggctgattatgttgataagaaga

SEQ ID NO: 13086 - DNA, 279 bp, Glycine max
  Clone ID: LIB3094-081-Q1-K1-D10
cccacgcgtccgcccacgcgtccgcaaaaattacaacaccaatctcacccatttgaaaaaaaggccgttagtgttactattcgtaaaatggccactcttgttctttaccaattctttctcaaactcttgctcctaatttcagtctttcagctttcctttgctgctaggagactcaaccagctggttcaggaccagtcacagttactccattaccacaacggtcctcttctatacggcaaaatcgccgtgaacctaatctggtatggtcacttcaaacca

SEQ ID NO: 13087 - DNA, 264 bp, Glycine max
  Clone ID: LIB3094-081-Q1-K1-D11
aattccacccacgcgtcacgcactcttccactccttaccacactcactacttttaaatttcaacaccactcttactacattcagaactgtcaccaccttcttacattccatcaacttctatcctactcctttacctacactcaatttaacacttgctttcaatttcaatctttaaacaatccttttcttttatcaaacacacttatttacattaccaccaaccacttcttactactttaccacaacataactactttatcactc

SEQ ID NO: 13088 - DNA, 280 bp, Glycine max
  Clone ID: LIB3094-081-Q1-K1-D12
cccacgcgtccgggaaaatggaaggcaccattgattgataacccagatttcaaggatgaccccgacctctatgttttccccaacttgaagtacgtggggattgaattgtggcaggtgaaatctggtactttgtttgacaatgtcttaattactgatgatcctgagtatgctaagcagctggttgaagaaacatggggcaagcacaaggatgctgagaaggcagcatttgaggaggccgagaagaagagggaagaggaggaatcaaaggatgacccagttg

SEQ ID NO: 13089 - DNA, 280 bp, Glycine max
  unsure at all n locations
  Clone ID: LIB3094-081-Q1-K1-D3
atggctcccaaaccgcctagtacgggtctgtttgttggactgaacaagggtcacgtgttcgccaanaaggaattgcctccacgcccctcagatcgtaaggggaaaacaagcaagagggtgcactttgtgaggaacctcataagagaggtagccggttttgcaccctatgaaaagcgtataactgagttgctgaaggttgggaaggataagagggcactgaaggttgcaaagagaaagctcggaacacacatacgcgcaaagaagaaccgtgaggaaatgt

SEQ ID NO: 13090 - DNA, 273 bp, Glycine max
  Clone ID: LIB3094-081-Q1-K1-D4
ctcttcttctctcgcggctaggcttttagctcagcttcttctagatttaaggaagattgggcaggaaaaggttcacatcagcattgcggtcattggccatgtcaactctgggaaatccactaccactggtcacctgattacaagcttggacgcattgacacgcgagttattgcgaggttcgagaaggaagctgcttagatgaacaagaagtccaccaagtattcctgggtgctggacaaactcaaggctgctcgctaaagaggaaccaccatt

SEQ ID NO: 13091 - DNA, 218 bp, Glycine max
  Clone ID: LIB3094-081-Q1-K1-D5
acgatcgtgagaggggcagtagccgagattccgtgagttgcaaaaatgaagacgattctttccgccgagaccatgaacatcccggacggcgtgagcatcaaagttcatgccaaggtcatcgaagttgacggcccccgcggaaaattggtgcgagacttcaagcatttgaatctcgattttcagctcattactgacgaaaacggtaaaagaaagctgaa

SEQ ID NO: 13092 - DNA, 132 bp, Glycine max
  Clone ID: LIB3094-081-Q1-K1-D8
gtcgatcatgataaatttgggcattattcttacattgatctatagttttaaattgtatatgcatattccaacattggtattttaacaattaaagcattatgttttaaacttgaaaaaaaatatttataatga

SEQ ID NO: 13093 - DNA, 279 bp, Glycine max
  Clone ID: LIB3094-081-Q1-K1-D9
cccacgcgtccgcgcgtcgctgctccgtaccagtttcactgcataaatttgagagagaactctgcaaacatgttggtttatcaggacctccttacaggtgatgagcttctctcggactccttccgttacaatgaaattgagaatggaatgctgtgggaagttgaggggaagtgggttgttaagggagcagttgatgttgacattggtgcaaacccttctgctgagggtggagaagatgagggagtcgatgacgcagctgttaaggttgttgacattgtt

SEQ ID NO: 13094 - DNA, 167 bp, Glycine max
  Clone ID: LIB3094-081-Q1-K1-E10
attcccgtgtctacccactcatcctatcactcccaaaccctctactacttatcactattttcaacttatacaatttttaagaaatctcttataacataattacctcatcaccatttatatacaaattataaaactatcattaacttacacctttacatttaccttat

SEQ ID NO: 13095 - DNA, 270 bp, Glycine max
  Clone ID: LIB3094-081-Q1-K1-A9
cccacgcgtccgcccacgcgtccgtagggaagttgtggaagttgttgggcgttctgaacggtggccacagtggaagcaataaacaagatagtgacagggaagtttgtgtccttatctgaacaagaacttgtggactgtgacagagcctacaatgaaggatgcaatggtggccttatggactatgcattcgaattcatcattcaaaatggaggcattgacacagacaaagattacccataccgtggctttgatggcatctgtgatccaact

SEQ ID NO: 13096 - DNA, 276 bp, Glycine max
  Clone ID: LIB3094-081-Q1-K1-E11
cggacgcgtggggtttcctagtatgcaaggtaaagaatcagcaaatttcaaccccggatccacgagtaacatgttgacaaaagtctaccgagttgcattttgttcttgtaacctcctcaacccactggaggtcgtgatctgtaaattttgagtgaattatacaacaaattcttgaaaaagaaatgattttctcttctgagctgctgcttattgatcgatgaatccagctgcaattattttcgaagatggcaataaaatctcttctgcggtgttatc

SEQ ID NO: 13097 - DNA, 105 bp, Glycine max
  Clone ID: LIB3094-081-Q1-K1-E2
gtcgttcatgataaatttgggcaaaattccaacattgagctatagttttaaattgtatatgcaaattccaacattgttattttaacaattaaagcattatgtttt

SEQ ID NO: 13098 - DNA, 278 bp, Glycine max
  Clone ID: LIB3094-081-Q1-K1-E9
atggctcccaaaccgcctagtacgggtctgtttgttggactgaacaagggtcacgtggtcaccaagaaggaattgcctccacgcccctcagatcgtaaggggaaaacaagcaagagggtgcactttgtgaggaacctcataagagaggtagccggttttgcaccctatgaaaagcgtataactgagttgctgaaagttgggaaggataagagggcactgaaggttgcaaagagaaagctcggaacacacaaacgcgcatagaagaagcgtgaggaaat

SEQ ID NO: 13099 - DNA, 193 bp, Glycine max
  Clone ID: LIB3094-081-Q1-K1-F1
ctcaggaggagaataaggatgtctcacaggaagttcgagcacccaaggcacgggtgactgggatttctccccaggaagcgtgctgctcgtcacaggggaaaagtgaaggcattccccaaggatgacccatccaaggcacccaagctcactgcattcttgggttacaaggctggtatgactcacattgttagag

SEQ ID NO: 13100 - DNA, 107 bp, Glycine max
  unsure at all n locations
  Clone ID: LIB3094-081-Q1-K1-F11
tgcacgtactcggtctcgtgaattcccgggntcgactccacgtcgtctcgcgcccatgccctgttctnntggagctacattacntnnctcgtcctggatnnttgata

SEQ ID NO: 13101 - DNA, 324 bp, Glycine max
  Clone ID: LIB3094-081-Q1-K1-F2
cccacgcgtccgcccacgcgtccgcccaatcttcactgaaccgaaccgcttccatttcatggcatgggttcactacttgctctcagttcccaacaaacccatcgctctcgtcgacgatttcctcacactggctaaacctctctcccactctccgccccaaaactcactattctgcaggctccgcagaatcgctcacaaagctaaggcgaagccgcaggagctggaagtaactgtggcgagtgatgcgtttacgcaattcaagcatctgcttctgcctattacggataggaatccctatctctctgacagtacaagacatgctat

SEQ ID NO: 13102 - DNA, 260 bp, Glycine max
  Clone ID: LIB3094-080-Q1-K1-A10
accacgccttctaccaaacttattacaaattctacaactcccgtatatattagctctgtttaaagacccaagacgcggcttataaaaatattcctacatcaaacattataatcatcaagcacctttaacaacgtcttaaacaaccataacaccctataaccaaaaccccaattacaattcgttcactgcccataatggaaactacatcaaacacactagtaagatcacctgctgataaacctaatatgcactataacaac

SEQ ID NO: 13103 - DNA, 473 bp, Glycine max
  unsure at all n locations
  Clone ID: LIB3094-080-Q1-K1-A9
cccacgcgtccgcccacgcgttttccgaaacctattacaaattttccagttcccgtatctatcgggactgtttaaagaacgaatacacgggaaagaaaaatggtgctagaacaagcagtatcatcatcaagcaccttgaggaacgttttcaccaatcccaaaaccctaatttcaaaaccccaattccaagtcgccgcttccccttcatggaaaccacagcagccgcgctgggaagggtggctggggataaacttgaagtgctccatgacaacaacaacaacgccatcatcataccctaagccctcggagattccgtggcagaaggaactctgcaactccgtcaacctcatcggcaacgtcgcccgccccgtcgaaatcaaatacctcccctccggcaaggtcgtcgcctggacccgnctctacgtcaagaaaagcgccacacaatcatcgcccataaacctcactttctggga

SEQ ID NO: 13104 - DNA, 364 bp, Glycine max
  Clone ID: LIB3094-080-Q1-K1-C10
ctgcgaggagcctccagagaagaaggtccctctcactatcgagaacacgaggaagctcgacttagccgttttcaagcccgatgacgaagagttatttgctggaaatgatgctgatgaatttggtccaattttgaatcagcaacaaactcccaagatattaatcaccacttgccgcttccattctactaggggacctgcttttatatcagagttgctttcagttataccaaatgcacattacttcaagagaggaacatatgatctgaaaaagattgtagaatatgcaaagaagaacgacttcacttctattatagttgttcacaccaatcgtagggaaccagatgctcttttaatcataggtgta

SEQ ID NO: 13105 - DNA, 447 bp, Glycine max
  unsure at all n locations
  Clone ID: LIB3094-080-Q1-K1-C11
ctccatagaatatacgtccctcttactatcgagaacactacggggctctatcatgccattttcaaaccccatnacgaccagttattttctccaaatcatgcttattaatttcctccaatttttaatcatcaacaaactcccaatatattaatcaccacttgcctcttacattctactatgttaccttcttttatatcagatttactttcacttataccaaatgcacattacttcaatatatcaacatattatctgaaaaatattatagaatatgcaaataataactacttcacttctattataattgttcacaccaatcttatgtaaccatattctcttttaatcataagtctacctgattgtcctactcctcatttcaaactctctaaacttttttttcacaactaaatcaataataattaaattccaaccttcaccaaccccaac

SEQ ID NO: 13106 - DNA, 483 bp, Glycine max
  unsure at all n locations
  Clone ID: LIB3094-080-Q1-K1-C9
ctgcgaggagcctccagagaagaaggtccctctcactatcgagaacacgaggtgactcgtctagaccgtttgcaagcccgatgacgaagagttatttgctggaaatgatgctgatgaatttggtccaattttgaatcagcaacaaactcccaagatattaatcaccacttgccgcttccattctactaggggacctgcttttatatcagagttgctttcagttataccaaatgcacattacttcaagagaggaacatatgatctgaaaaagattgtagaatatgcaaagaagaacgacttcacttctattatagttgttcacaccaatcgtagggaaccagatgctcttttaatcataggtgtacctgatgggcctactgctcatttcaagctctcgaaacttgttttgcgcaaggatatcaagaatcatggaaatccaaccggtcacaagcccgagcttgnattgaataacttcacaacact

SEQ ID NO: 13107 - DNA, 216 bp, Glycine max
  unsure at all n locations
  Clone ID: LIB3094-080-Q1-K1-D10
acacaatttcaaaatanacattaacaacacaccaatttcgaaacatattaaccaccacaaggaccccaactaaaccctatatacaaacactacaaatcacaaaacaaaacaattaaacaaaattaaacaccataatacacaaaaatccacatactccaacaacaactaataaactaacaaacaaaactcaaaatcttaacacaacaatcacaaaac

SEQ ID NO: 13108 - DNA, 379 bp, Glycine max
  Clone ID: LIB3094-080-Q1-K1-E10
cccacgcgtccggttgtgttcgttcctctgaagtctggagtggtggagcttggttcgtttgacagcgtgccttgagagcattgtgttgcggaaatggtcaggacagcatttggggaatccagtcctggacaggcaaaggtgtttccaaagatttttgggcatgagttaagcctgggggatacaaaatctcagtctataactattagtttctccccaaaggtggaagatgatccgggtttcacttcagactcctatgaagttcaagcactaggggtgaaccatgcttatggaaattcttccaatgggactttaagtgacggtaatgaaggaacattgtttcctcaattgaatcaaatgatggctgggaattttaatgctc

SEQ ID NO: 13109 - DNA, 167 bp, Glycine max
  unsure at all n locations
  Clone ID: LIB3094-080-Q1-K1-E11
tactgatcctaagcctttttcgcatacttcttaaagcctcctgtcatgttacattcactaatacaaaanattaatcaaatttagttgattattccaaatatccctgnttaaactatgtagggtcttacccaagtcatgngcagttctgttatccttgccatagcttt

SEQ ID NO: 13110 - DNA, 441 bp, Glycine max
  Clone ID: LIB3094-080-Q1-K1-E12
cacgcgtccgccgacgcgtacggttgtgttcgttcctctgatgtctggagtggttgagcttggttcgtttgaaagggtgccttggaagcattgtgttgcggaaatggtcaggacagcatttggggaatccagtcctggacaggcaaaggtgtttccaaagatttttgggcatgagttaagcctgggggatacaaaatctcagtctataactattagtttctccccaaaggtggaagatgatccgggtttcacttcagactcctatgaagttcaagcactaagggtgaaccatgcttatggaaattcttccaatgggactttaggtgacggtaatgaaggaacattgttttctcaattgaatcaaatgatggctgggaattttaatgctcaagcaaaggttccttgtctagatctcggtaatgaagactcatcatcaattca

SEQ ID NO: 13111 - DNA, 234 bp, Glycine max
  Clone ID: LIB3094-080-Q1-K1-G12
tcctcagtctcatcatcaacaccttctactccaacaaggagattttccttcgtgaactcatcagcaactcctccgatgctttggacaagattcgatttgaaaatttgacatataagagcaaactcgattctcagccagagttgttcattcatattattccagacaagactaaccatacacttaccattttttacaattgtatttgcattaccaaaacttatttggtgaacaact

SEQ ID NO: 13112 - DNA, 80 bp, Glycine max
  Clone ID: LIB3094-080-Q1-K1-H10
aagaccacatcataaaatatttcaaggttaagtggaatgattctatatatccttaacatggttctaacttggattctatt

SEQ ID NO: 13113 - DNA, 449 bp, Glycine max
  Clone ID: LIB3094-080-Q1-K1-H9
gctttgctcatgtttaatttatgcgatcagcttccgggtggagacttgatattggaaacccttgcaaatatgccaaacttaagagagtcacatcatgaaaatgatttcaagggtggaagtggaatgtattctatatcagccttggacatggtttctaacttgggatttgtatttggagcaagttcaaacaactcaaatgagagtaggattgctgtgggtgaaatatctgttggagaaatgactgaattggaaagagcggttaaagaatctaagaacaatcataaaaaggtcatatctgcacaagccacagttgatggtgttaaagttgatggtattgacactaatttggctgtcatgaaggagttactttttcctctaaatgaacttgcgaagtctcttcagtccttggcatattgggatgatccacgggagtctttaatgttttggtt

SEQ ID NO: 13114 - DNA, 52 bp, Glycine max
  Clone ID: LIB3094-081-Q1-K1-A1
cccacgcgtccggcactcgacgcatacatttatcggttaaatctgatacatg

SEQ ID NO: 13115 - DNA, 280 bp, Glycine max
  Clone ID: LIB3094-081-Q1-K1-A11
cccacgcgtccgccaaaaccgaaaagaagaaaaacgctgaaatccccaaaatcgagaagaagaaaaccaaaagcgctgaaatccctctaaccgatggcaaaacgaagagggatagagaaatcgccaaagaggagaacaagaagaagactaagaaacccaagctcagcaatggcacttcaaaacagcgagacgagggatccaaaaagggagtagcagaaggaaaaggagaagaggggaaaatgaacgtgtttccgatgaatcgcatcagaacgatgattaa

SEQ ID NO: 13116 - DNA, 248 bp, Glycine max
  Clone ID: LIB3094-081-Q1-K1-A12
gcgcaggggatatatgtacctaaacgaacagattttgaaatagaatccaaacatgtgtgcttacgtggcagggtctttggatgctaggcaagacatggccgtagtagaggtaccaaagctaggaaaagaggctgcagtaaaggccataaaggagtggagccagccaaagtcaaagattacccacttgatcttctgcaccaccagtggtgttgacatgccttgttctgattaccaactgaccaaacaat

SEQ ID NO: 13117 - DNA, 347 bp, Glycine max
  Clone ID: LIB3094-081-Q1-K1-A2
ctagacgctgccatcgatcggctatttcttatacatggcggagcatcacgaacgctagggagtgaagggtgagtccttgttggagaagatttctgggaagatccacgaccacgattcctagtcttcttctgattccgacaacgacaaaaccagcgccactgattcctgtaagtctaatgatttcaggcttttcggcagagaaaagcccattcatcatgttcttggcggtggaaaaccggctgatgtttatctatggagaaacaagaagatatccgcatcgacactcggagttgcgaccgctatatgggttctgtttgaattgcttgagtaccacctcctgactttgg

SEQ ID NO: 13118 - DNA, 334 bp, Glycine max
  Clone ID: LIB3094-081-Q1-K1-A4
cccacgcgtccgcccacgcgtccgcccacgcgtccgcggacgcgtggggttctataggctggtacctctgtgtccttgagttctaaggagacaggaacctacgtctggtggatgaatcatgaccgtgtgatcagagcgtgattaacggcccgggtgagtttctctttggagtagtctcatctttggctgtagaggatcgttcttaggacacttccatgtgcctgggaatgggcatacgggtgtctgacagaccaaaagagaaacaaagacctaacagtaattacactggaggaggcgaccgctatgtgggatctgtatgaattgctggagaacc

SEQ ID NO: 13119 - DNA, 380 bp, Glycine max
  Clone ID: LIB3094-081-Q1-K1-A5
acgcacgcgtccggccacgcgttcgtcaagcattgcatccctcttgatttgtagcatgttttgtgctttagatagaaattgtgccaaatcaagaggggttttaagatcatagtgtgtgttttgcaacaatggctaagttctttgctgctatgatcttggcactctttgccatttccatacttcaaacagtggtaatggctgctaatgaacaaggaggccacttgtatgacatcaagagcaaatatggaagtggaagtgtcaagagttaccaatgcccatcacaatgctcgaagagatgtagccagacccaataccacaagccctgcatgtttttctgtcagaagtgctgcacgacatgcctgcgtgtgcccgcggggtat

SEQ ID NO: 13120 - DNA, 357 bp, Glycine max
  Clone ID: LIB3094-081-Q1-K1-A8
cccacgcgtccgcccacgcgtccggtgattgaagctagttagaacaagatgttgcagctaggctacactgcgattttctccgaaatgcttttgattctcacgctcgtcttcaaaaccccactgagaaaactcgtcatcgtttccctcgatagtgtgaagcgcggtcgcggtcccgtggtggtttccaccgtgggcgccacattgatggtggttctcgcttcgagcctctacagcatggccaagatccagcaacgcaccctcgaggccggcatagtcaaccccaccgaccaagtcctcatgtccaagcacatgctcgaagcttctctcatggggtttctgctgttcctctctctgatg

SEQ ID NO: 13121 - DNA, 406 bp, Glycine max
  unsure at all n locations
  Clone ID: LIB3094-079-Q1-K1-E1
cccacgcgtccgcgagcttcagcaatggtgtacgtcaaggctcagaaatcaaaagcctacttcgagagataggaagtcaagttcaagagaagaagagagggaaaaaccgattaccgtgccaggattcggttgattaatcaggacaagaacaaatataacactccgaaataccgatttgtggttcgctttagcaacaaggacattgttgcacaaataatatctgctagcattgccggcgatttagttcttgctacagcatattcacatgagctgccacgatatggtcttgaagtaggacttacaaattatgcagcagcttattgcactggtctcctgttggcccgaagagtcctcaaaacacttgaaatggattaggagtatgaaggaaatngtgaggctactggag

SEQ ID NO: 13122 - DNA, 391 bp, Glycine max
  unsure at all n locations
  Clone ID: LIB3094-079-Q1-K1-E12
cccacgcgtccggttgttttcgttcctctgaagtctggagtggtggagcttggttcgtttgaaatggtgcctggagagcanggtgttgtggaaatggtcaggacagcatttggggaatccagtcctggacaggcaaaggtgtttccaaagatttttgggcatgagttaagcctgngggatacaaaatctcagtctataactattagtttctccccaaaggtggaagatgatccgggtttcacttcagactcctatgaagttcaagcactaggggtgaaccatgcttatggaaattcttccaatgggactttaggtgacggtaatgaaggaacattgtttcctcaattgaatcaaatgatggcttggaattttaatgctcaagcaagggttc

SEQ ID NO: 13123 - DNA, 391 bp, Glycine max
  unsure at all n locations
  Clone ID: LIB3094-079-Q1-K1-E3
cccacgcgtccgcacgttccgagttttctgatcgctcatagagagttcgacgcggcggttgcaggagaagattgcaagatgaagttcaacatcgcgagtcccaccactggatgccagaagaagctcgagatcgacgacgatcagaaactacgagcattttgggacaagaggatctcacaggaggtcagcggagatgcacttggtgaggaatttaagggctatgtcttcaaaattactggaggttgtgacaaacaaggattcccgatgaaacagggagtgcttactcctggtcgtgttcgacttttgcttcacaggggaactccttgcttccgtggatatggaaggcgtaatggagaacgtangagaaagtctgttcgtgggtgcattgtca

SEQ ID NO: 13124 - DNA, 194 bp, Glycine max
  Clone ID: LIB3094-079-Q1-K1-E4
gcgcccacgcgtccgcacgctccaactttgctgatctctcatattcagatcgactcagcctactcagggaaataggccaatattaacaacaccatcgccagtcccaccactgaataccataccaagctccagatcaacaaccatcacaaactacgatcattcactgacaaaaccatctcacaggatgtcatcac

SEQ ID NO: 13125 - DNA, 427 bp, Glycine max
  Clone ID: LIB3094-079-Q1-K1-E5
caccaacgccaaacaagccctaaatctctcttctctttcttcttcttcctttaaccgtgagagagatcttgcacgttcagggaggccaatgcggtaaccaaatcggttccaagttctgggaggtgatctgcgacgagcacggcatcgatcccaccggaaagtacaacgaggaaggcaacagcagcatccaactcgaaaggatcaatgtgtattacaacgaggcctctggcggaaggtacgttccccgtgccgtgcttatggatctcgaacctggaaccatggacagcatcagatctggcccctacggcaagatcttccgccccgacaacttcgtcttcggccagtccggcgccggtaacaattgggccaaaggtcattatactgaaggcgccgagctgatcgactccgttctcgacgtcgttcgcaa

SEQ ID NO: 13126 - DNA, 389 bp, Glycine max
  unsure at all n locations
  Clone ID: LIB3094-079-Q1-K1-E6
gcgcaccagcgccaaacaagccctaaatctctcttctctttcttcttcttcctttaaccgtgannaagaatctttctacgttcagggagggcaatgcggtaaccaaatcggttccaagttctgggaggtgatctgcgacgagcacggcatcgatcccaccggaaagtacaacgaggaaggcaacagcagcatccaactcgaaaggatcaatgtgtattacaacgaggcctctggcggaaggtacgttccccgtgccgtgcttatggatctcgaacctggaaccatggacagcatcagatctggcccctacggcaagatcttccgtcccgacaacttcgtcttcggccagtccggcgccggtaacaattgggccaaaggtcattatactg

SEQ ID NO: 13127 - DNA, 319 bp, Glycine max
  unsure at all n locations
  Clone ID: LIB3094-079-Q1-K1-E7
ccatccagccacgcatgcgtaccagcgccaaacaagccctaaatttctcttttctatcttattcttcctttaaccagtaanagaggatcatgttcaattcaccgcaagccaatgtcctaacacaaatcgcctccaagaatctgcgaaagtgaactgcgacctagcacgccatancatcccaccgacaaagtacaacgaacgaatgcaacagcagaatccaacttgaaaggatcaatcagtattacaactacaaactctcccggaaggtacgctacacaagccattcttatggaactcgaacctgtaaccatggacagca

SEQ ID NO: 13128 - DNA, 332 bp, Glycine max
  Clone ID: LIB3094-079-Q1-K1-E8
caccagcgccaaacaagccctaaatctctcttttttttcttcttcttcctttaacggtgatacagatctttttacaaacacccatggcactgccctaaccaaatcacttccaaattctccaacgtgatctgctactagcacatcatcgatcccaccggaaagtacaactaggaatgcaacatcatcatccaactcgaaaggatcaatgtatattacaacgatgcctctgaccaaaggtacattcccccttccatgcttatgtatctctaacctgcaaccatggacaccattaaatctggaccctaccgcaagatcttcctttccgacaactt

SEQ ID NO: 13129 - DNA, 405 bp, Glycine max
  Clone ID: LIB3094-079-Q1-K1-F1
cccacgcgtccgagaaggcctgggcttagttgataagcataactgggtgaggaagaaagaaagagagtgaagaagatggcgtcgagcggagcggtaccgttttggagggcggcggggatgacgtacataacatactcaaacatatgcgcgaatctgctcaggaattgcctcaaggaaccctacaaggccgaatccctctctcgtgagaagctccattttgttctctccaaatgggtcgacgccaagcctgaaaaacctactattcgttcagacaccccagagcagtgatctggaatagttggaagctataaatgcataaatctttgagatctggaattcattgtcattttgaaaccttctgtgatgttaaattcctttgttttttctctccatgaaatggacatg

SEQ ID NO: 13130 - DNA, 409 bp, Glycine max
  Clone ID: LIB3094-079-Q1-K1-F11
taggaggcaatcatgtgaaggacgaggcaagattgaagtgttgtgggaggaaagatgcagaggtacgatcaccgcagtggaagcgcgaaacggtcctccccggctttccatttttttctcttctgatgaaattgtagttcatcccagttgctgattgagattgaatttaaattcgaaaaagcgtacttgtgccactgtacttttacagatctgcggctacgggctagcctatcgtatttttgcgtagatctagtgtccgtgaagcggttaccatttcaccactcaccactattcatctctgtcttctatattgatctgaaattgaagatggaaagcgaaaagacatcgtcagcaatatctgatgtgggagcatgggccatgaacgttgtcagcttcgtcggaattatta

SEQ ID NO: 13131 - DNA, 359 bp, Glycine max
  Clone ID: LIB3094-079-Q1-K1-F12
gggtccagccactcgtccgtaggagacaatcatctgagatactacgcaagttttaagtgttgtgggaggaaagaggcatatcagcaatcttcgcaatgtaatcgcgcaccgctcctccccggctttccatttttttctcttctgatgaaattttagttcatcccagttgctgattgagattgaatttaaattcgaaaaagcgtacttgtgccactgtacttttacagatctgcggctacgggctagcctatcgtatttttgcgtagatctagtgtccgtgaagcggttaccatttcaccactcaccactattcatctctttcttctatattgatctgaaattgaagatggaaagccaaa

SEQ ID NO: 13132 - DNA, 389 bp, Glycine max
  unsure at all n locations
  Clone ID: LIB3094-079-Q1-K1-F7
cccacgcgtccgagaaggcctgggcttagttgataagcataactgggtgaggaagaaagaaagagagtgaagaagatggcgtcgagcggagcggtaccgttttggagggcggcggggatgacgtacataacatactcaaacatatgcgcgaatctgctcaggaattgcctcaaggaaccctacaaggccgaatccctctctcgtgagaagctccattttgttctctccaaatgggtcgacgccaagcctgaaaaacctactattcgttcagacaccccagagcagtgatctggaatagttggaagctataaatgcataaatctttgagatctggaagtcatngtcattttgaacctttctgggatgtttatttccttggtttttttctc

SEQ ID NO: 13133 - DNA, 375 bp, Glycine max
  Clone ID: LIB3094-079-Q1-K1-F8
cccacgcgtccgccacgcgtccggtttctggtggaggatccaacttcagagcaatggatgagggctccaaaaggggatcacttcatggagatgttcttgtgttggtcacaaataaaagtgattgtggaggtgcggagtatgcaagaaataatggtatcccagttatactgtaccatatatcaaaggatgaatctaatccaagtgaccttgttgatacactaaggaaatttgaggttgattttattcttttagctggatacctcaaacttataccagtggaattgatccgagcttacaaaagatctatattcaacattcatccatcacttcttccagcttttggaggcaagggattctatggcatgaaagtgcaca

SEQ ID NO: 13134 - DNA, 365 bp, Glycine max
  unsure at all n locations
  Clone ID: LIB3094-079-Q1-K1-F9
tttgaatacattccttgtagtattatacctggaaagaatgggtattgaaggatgggcgttacctgatccctaacgcttttccggtcatgctccttttggtctactctgaggtggcatccacgaatacaaaagaggaggcaaatggagtggatgatgccaaatatcccggtggaagctatggagggggttacccaagtcatggcggtggcggttatcctggccatggcggtggcggttatcctggccatggcggtggtggtggctatcctggtcatggtggtggccaccctggtcatggtggcggctaccctggccgaggtggtggatactgtangcatggcttgtgcggtggccggacatacaac

SEQ ID NO: 13135 - DNA, 324 bp, Glycine max
  Clone ID: LIB3094-079-Q1-K1-G12
cctaagcgactctttctgttcttccttcgctcgttgttctccctcgcgtagatcgacaatggcaaagacagagaacgttgctttccaggctgagatcaaccagctcctcagtctcatcatcaacaccttctactccaacaaggagattttccttcgtgaactcatcagcaacgcctccgatgctttggacaagattcgatttgagagtttgacagataagagcaagctcgatgctcagccagagttgttcattcatattattccagacaagactaacaatacactgaccattgttgacagtggtattggcatgaccaaagctga

SEQ ID NO: 13136 - DNA, 449 bp, Glycine max
  unsure at all n locations
  Clone ID: LIB3094-079-Q1-K1-D9
gagttccagaggttcaaccatacttctcttcttccctttacatccgcactgtttcctctcctagagccataatggttcgcattctgacggaaaatggcggagtggaacgcatggaggagatcatcagggaccatttggaccccatttcaaagcaagtgttggggatctggttggatcattgtgcttgtgccaagcgacaagttggagaggcagaaagagcttatcttaagaaaagggatggtctcattagaaacaagaccattgagattgatcttggttcaagctttcccagattgtttggtccagaagtagcaaaccgggtactggatgctatcaaggagtattttacagtctgagatgcaaatttatttggaatnngtggatattctatgtattacatacacgtacctaanttgctgtgcaatctaatgaggcctcagtatttgctg

SEQ ID NO: 13137 - DNA, 335 bp, Glycine max
  unsure at all n locations
  Clone ID: LIB3094-079-Q1-K1-A4
gcgctcttgtctctctgtcggatttcttgcgcggtttatcatgggggatagtcagtattcgttttcgctcaccggatttagcccttctggaaagcttgttcagattgagcatgctttgacggctgtcgggtctggacaaacgtctttgggaattaaagctgcaaatggagttgtcattgctaccgagaagaaattgccatctatattggttgatgaagcatcagtccagaaaattcagttattaacaccaaatataggtgtcgtatatagtggcatgggtcctgattntcgagttttggttcggaaaagcagganacaagccgagcagtatcacc

SEQ ID NO: 13138 - DNA, 401 bp, Glycine max
  unsure at all n locations
  Clone ID: LIB3094-079-Q1-K1-A6
ggttgaaagactttgttggtgcaattggggaatccactatttccaaatcttctctggacccatgtcctattccaagtgttaagtcgggtgaagacttgcttgatgatctggaaacagaagagagagacaaatgctgtgaagcttatagtggtgattcggtttatgagctgaatgaagtggcagctgcaaagggatgtctggggcgtttccctgggggagaaatgatgggaattataaagaaattcattaacttagatgcgggaactgattaactaaggaagctaggacttgttatgagactntntcttttctcactctgaaatcaaagtgatttcagtttcagggtacaaaanatcaaatttttgaacttttgactaagtgtagaataagaagctttggtc

SEQ ID NO: 13139 - DNA, 332 bp, Glycine max
  unsure at all n locations
  Clone ID: LIB3094-079-Q1-K1-A7
actttgttggtgcaattggggaatccactatttccaaatcttctctgaacccatagcctatttcaagtgttaagtcggccgaagacttgcttgatgatctggaaacagaagagagagacaaatgctgtgaagcttatagtggtgattcggtttatgagctgaatgaagtggcagctgcaaagggatgtctggggcgtttccctgggggagaaatgatgggaattataaagaaattcattaacttagatgcgggaactgattaactaangaagctaggacttgttatgagactttttcttttcttactctgaaatcaaagtgatttcaatttc

SEQ ID NO: 13140 - DNA, 260 bp, Glycine max
  Clone ID: LIB3094-079-Q1-K1-A8
cacgcgtgcgtcttggaagactttgttgctccaattatcaatttcactatttacaaatcttctcaggacccaagacctatttcaaacggtaaatcggccgaagacttacctgatgatctccaaacacaagacagagacaaatgctttgaaacttataaccgcgaatcgatttatcatctcaaccaagaagcaactgccaactgatttctgtgacgaatccctagtccagaaaagataggaattatcaccaaattcattaa

SEQ ID NO: 13141 - DNA, 464 bp, Glycine max
  unsure at all n locations
  Clone ID: LIB3094-079-Q1-K1-A9
cggacgcgtggggtttcctagtatgcaaggtattgaatcagcaaatttcaaccccggatccactggtaacatgtggacaaaagtctaccgagttgcattttgttcttgtaacctcctcaacccactggaggtcgtgatctgtaaattttgagtgaattatacaacaaattcttgaaaaagaaatgattttctcttctgagctgctgcttattgatcgatgaatccagctgcaattattttcgaagatgggaataaaatctcttctgcggtgttatctctctgactgaattccaaattctgtaagtataatagttggctatgaaagagacttgtccaagaagcataatgtgagaagtagagatcagttgttaagtatgagatgtgagaacattttgtgaatggatattgctaaatagaaatgcanaagatgattatagattaaaaaaaaaaaaaagggcgggcgc

SEQ ID NO: 13142 - DNA, 319 bp, Glycine max
  Clone ID: LIB3094-079-Q1-K1-B2
tcgcccacgcgtccgcccacgcgtccgaaaaaaatgggttcttcttcttccatatggaccgtgtgtgttgatttgggcatcactggcctctgcagcactctgtgccaaccctcgtagaccagtggatgtacaatttggccgaaactacgtgcccacatgggcctttgatcacatcaaatacttcaatggaggttctgacattcagcttcatcttgacaagtacactggtactggcttccagtccaaagggtcatacttgtttggtcacttcagcatgtacataaagatggttcctggagattcagctggcacagtcact

SEQ ID NO: 13143 - DNA, 330 bp, Glycine max
  unsure at all n locations
  Clone ID: LIB3094-079-Q1-K1-B4
ccacccactcgtccggccaaagatgcnnagacgcctctcttctttattctctcattttcctgatataccactctttcagcctatctgaatatatatctcaatccagatcactaacactactctcgtaacactgttgtctccaacattgaacgtaactactatcccacatgcatctacctttcactcaaaaaatacccagatatttctaatacactcatttatctcacaatgttcaaaaaccctgtctttcattaccacgacccataatttgattactcttacaaatcattcacaaaaaatactcctgcttattatgctatacaattcatt

SEQ ID NO: 13144 - DNA, 366 bp, Glycine max
  unsure at all n locations
  Clone ID: LIB3094-079-Q1-K1-C11
tcacttcataatccatttcantctatttaataataataataaacacagaacttttcagaattcttttaagcccaanatcaatgccgtccaactattcccattctccgattaagatcttacattgcgactctggttacatactcgaagacgttcctcacttcaccgactacattccaaatcttcctacttatcctaatccacttcgatccaatcctgcttactcggttgttaagcattatttcttgcacanttactacactgttcctcataaagttgtttttcacaaatatattccaagaattatacattttctactttcatgtcctcttcacaaactatactttaaatctcattaactccaatcat

SEQ ID NO: 13145 - DNA, 357 bp, Glycine max
  unsure at all n locations
  Clone ID: LIB3094-079-Q1-K1-C2
gcaaacatgtccaccgcaacaactcacgtgctcgcttatcccttccctacctccggtcacgtgagccctctgttagacttcaccaaaaccctagtctctcgcggcgtccatgtcaccgttctggtcacaccctacaacgaagccttacttccaaaaaactattcccctcttctccaaacgcttctcctccccgaacctcagttcccgaacccgaagcaaaacaggctcgtatccatggtaaccttcatgcggcaccaccactacccgatcattatggactgngcccaggcccagcccattccttctgcggctattatatcagatntctttctcgggtggaccccacctctcgcacgt

SEQ ID NO: 13146 - DNA, 319 bp, Glycine max
  unsure at all n locations
  Clone ID: LIB3094-079-Q1-K1-C3
tccacctgcacacctcacctgctctcttatcccttccctacctccggtcacgtgagccctctgttanacttcaccaaggccctagtctctcgcggcgtccatgtcaccgttctggtcacaccctacaacgaagccttacttccaaaaaactattcccctcttctccaaacgcttctcctccccgaacctcaattcccgaacccgaaacaaaacaagctcgtatccatggtaaccttcatgccgcaccaccactacccgatcattattgactgggcccaggcccaacccattccttcttccgctattatatcaaatttct

SEQ ID NO: 13147 - DNA, 315 bp, Glycine max
  Clone ID: LIB3094-079-Q1-K1-C4
ccacctgaacaactcacctgctttcttatcccttccctacctccgttcacttaagacctatgttaaacttcaccaaacccctaccctctcgcggcttccatgtcacccttctcctcacaccctacaactaaaccttacttccaaaaaactattcccctcttctccaaactctactcctcccctaacctcagttccctaaccctaaccataacaatctcttatccatatcaaccttcattactcaccaccactaccctatcattattgactcatcccaatcccattccattcctactactactacttatatcaaat

SEQ ID NO: 13148 - DNA, 346 bp, Glycine max
  unsure at all n locations
  Clone ID: LIB3094-079-Q1-K1-C8
cgcaaattcaaaggaggatctctcttgcgttttctctaggttttcgctatggcgtcgaagcgagttttgaaggagcttaaggatttgcagaaggatcctccaacatcttgcagtgccggtcctgttgttgctgaagatatgttccattggcaagctacaattatgggtcctccagacagtccctatgcaggaggtgttttcctagtgaccattcatttccctccagattatccctttaagccacccaaggttgcattcaggacaaaggttttccacccaaatataaatagcaatggaagcatttgccttgatatatngaaggagcagtggagccctgctctaacca

SEQ ID NO: 13149 - DNA, 454 bp, Glycine max
  unsure at all n locations
  Clone ID: LIB3094-079-Q1-K1-D10
ggcggcgctgtggcggacgcgccggcggtggttgaggagaagacggagttcgacgtggtgatgagggaggtgcggagcaacgctcgaatcgcggtgattaaggcggtgagggcattgacgaacctagcgctgaaggaggcgaaggagttgatcgaagggttgccgaagaagttcaaggaagggatttcaaaggacgaagctgaagatgcgaagaagcaactcgaagaagctggtgccaaggttaccattgcttaaacactgtttagctgcagcatatatgttctgcttcttcttttgttggttgtagttgagttcaccagtacactgtaatttcatttccattttgtctggatttcaatcttttatttgtaatgaggaaatatgaggtcttatttttatattattttttttaatgcgtatgangtgtttgtttgaaaaaaaaaatnnntnnnna

SEQ ID NO: 13150 - DNA, 428 bp, Glycine max
  unsure at all n locations
  Clone ID: LIB3094-079-Q1-K1-D11
ctttctgcttcgtcgttcacttcagaatccaaaaacagtctaaaaaagaataataataaacaggggagttaccgggattctgttgagaagaagagcaatgccgtccaacgattccgattcgccgatgaagatcgtacatggcgacgctggttacatactcgaagacgttcctcacttcaccgactacattccaaatcttcctacgtatccgaatccgcttcgatccaatcctgcttactcggttgttaagcagtatttcgtgcacatggacgacactgttcctcagaaggttgttgttcacaaggatagtccaagaggtatacattttcgacgtgcanggcctcggcaaaaggtatactttannatcgatgaagtgcatgcatgcattgtcacgtgtggtggactctgccctgcctcaacactgtcat

SEQ ID NO: 13151 - DNA, 331 bp, Glycine max
  Clone ID: LIB3094-079-Q1-K1-D12
cgcgtccgctctcggcttcgtcgttcactccataatccatttacagtctaacaaagaataataatatacagagaagatatccgggacctctttagaacaacagcaatgcacgccaacaattcctattcgaccataaagatcatacatgccaacgctggttacatactctaagactttactcacttcaccgactacattccaaaccttcctacgtatacgaatacgcttctatccaatcctgcttactcggttgccaagcattatacactgcacatatacgacactgttcctcagaaagttgatgttcacaaggataatccaagacgcatac

SEQ ID NO: 13152 - DNA, 407 bp, Glycine max
  Clone ID: LIB3094-079-Q1-K1-D8
cccacgcgtccgattgaatatccatggttctcttagttcttttatccattaaaaagcgtctagaggaatatttctaagaagaactatagtagttgaaagatatcttttgcaaatatgcatatttaactgaggttgttataacttgttccttccctcaaaaaaaaaaaaaaaagaaagaaaaagaacctattagcctccttcattggatatattacatctataaggagtaaattctaccggttcagagaatagaaaaataatcaaaataaaagtcagcagtctcacatctctaattttggtgacagattcaaggggttaaatttgatccagaaggtgaatatgtgagacaatggctacctgagttggcaagattgccaactgagtggatcccatcatcttgggatgca

SEQ ID NO: 13153 - DNA, 228 bp, Glycine max
  Clone ID: LIB3094-079-Q1-K1-A3
aacataattatttattatccgtcatatagaatgattttaacagtcacgagccctcacatgctgctagtcatttgcataataaacaacattacgatttaggcatatcacatgatcgctttacttataatttagggatatcagctcaataccccatgattcaagtaatattaccaaaatcaaacccttatcctacaagatgctgtcagctacatgggtcatgacttcatt

SEQ ID NO: 13154 - DNA, 403 bp, Glycine max
  Clone ID: LIB3094-078-Q1-K1-G3
acatcttaggatatagattgaattactttcgtttccacaacacgtggtatgaaatgtccctgttctatttacctatggcaaccagacaaaaatgctttttaatgggctacatctttgaaagcccctcacacatatgattcaattcgggttactcaatccacagcaaactttttcataagtgaagctatgaaatccacaaacacaccttatgctcaaaaagttcgaaataatctcatctacaattacaaacctacttttggtggaactgcttttaaaagatatgatcaaatgtatctcttttaataattctatctgtaagaggtgtcctttaattttattttattcacaataaattatgaactttggatatattttgaataaaataaaaatttttcacatttat

SEQ ID NO: 13155 - DNA, 477 bp, Glycine max
  Clone ID: LIB3094-078-Q1-K1-G4
tttgaatacattccttgtagtttatactgaaagatgggtttgaagatggcgttactgatcctaggcctttccctcatgctccttttggtctcctctgaggtggcatccacgaatacaaaagaggaggcaaatggagtggatgatgccaaatatcccggtggaagctatggagggggttacccaggtcatggcggtggcggttatcctggccatggcggtggcggttatcctggccatggcggtggtggtggctatcctggtcatggtggtggccaccctggtcatggtggcggctaccctggccgtggtggtggatactgtaggcatggctgttgcggtggccggacatacaacggaggttgcagaaggtgctgctataacgcttgcgaagcttgtgctgcacaaactcaagataagactcacgattaagacgatgcagttctacttaattagtacttttgatattttaatttcatg

SEQ ID NO: 13156 - DNA, 472 bp, Glycine max
  Clone ID: LIB3094-078-Q1-K1-G5
caacatctgaggatagagatggaaagactttcgtttccacagcacgtggtaggaaatgtcccgggactgtcaacctatggcaaccagagaaaaatgcttttgaatgggctacatctttgaaagcccctcacacagaggatgcaattcgggttactcagtccacagcaaactttttcataagtgaagctaggaaatccacaaacacacctgatgctcaaaaagtgcgagataatctcatctacaattacaaacctacttttggtggaacggctgggaaaggatatgatcaagtgtatctctttgaataattctatctgtaggaagtgtccttgaatttgattttatgcacaataaattatgaactggggatgtagtttgaagaaataaaaatttgtgcacagtgatgtttgtaagatgcttaatttcagggcaatgttctgcttatcaatgtgttatatcttggtattgcccc

SEQ ID NO: 13157 - DNA, 393 bp, Glycine max
  Clone ID: LIB3094-078-Q1-K1-G9
cccacgcgtccgagaaggcctgggcttagttgataagcataactgggtgaggaagaaagagaaggagtgaagaagatggcgtcgagcggagcggtaccgttttggagggcggcggggatgacgtacataacatactcaaacatatgcgcgaatctgctcaggaattgcctcaaggaaccctacaaggccgaatacctctctcgtgagaagctccattttgatctctccaaatgggtcgacgccaagcctgaaaaacctactattcgttcagacaccccaaagcagtgatcttgaataagtggaagctataaatgcctaaatctttgagatccggaagttcaatgtcaatttgaacctttctgggatgttaaatcccttggttttttctcttca

SEQ ID NO: 13158 - DNA, 168 bp, Glycine max
  Clone ID: LIB3094-078-Q1-K1-H10
ggctgaagcacaactacgagaccagcatggcttaccctgtcccactcaccgatcaagacgaagatcctgttatcttaactgacgagcgcggtaatcccgtccaactcactggtgtcgctaccaccgctaccggcacagcaagttctgggtttgggtcctatggtaccg

SEQ ID NO: 13159 - DNA, 353 bp, Glycine max
  Clone ID: LIB3094-078-Q1-K1-H11
ataatgatgatattgaggttgaagttgtggagggtgttgatctttggttgaagattgaagatggggcatggttagatgttgatcaagaaccaattttatccagctactatttcagttccattttgtctcacaaatctttggagagtgccttggccaaccacctctccacaaatttgagcagcttgagccttccaagcagcaccctttttgaccttttcatgggtgttttggttgatgatggagatgatgacatcgtaggtgctgtgaaggatgatttgatagctgttaaggagagggaccctgcttgcataagttatgtgcattgcttgctgaatttcaagggttttttggca

SEQ ID NO: 13160 - DNA, 229 bp, Glycine max
  Clone ID: LIB3094-078-Q1-K1-H12
tcatattgaggttgacgttgtggttggtgttgaatgattccgttgattcaatgaaggctttgatagatgttgatcaagaaccaattttatccagctactatttcagttccattttgtctcacaaatcttttgagagtgccttgtccaaccacctctccacaaatttgaacagcttgagcctttcaagcatcaccctttttgaccttttcatgggtgttttggttgatga

SEQ ID NO: 13161 - DNA, 452 bp, Glycine max
  Clone ID: LIB3094-078-Q1-K1-H4
gaacgcgaacacagattcattcacctaccgttcctacccttctctctctcgccgcctgttcttgttcctctcgcatgctccttctctgaaccaaaccaatccattattcatttgaatcttcttatacatcccaaaaaaacccaataaaaaaggggtctttagaaggttctggttgatgggtaggagaggaatcaagctattcgatgaagaaaggaacggtcttttttcaatttccaattttgggtctcaatggggtggtgttagaggtgatggtgttcaagaccctgtgaatttggctgtgtatgcaagcattagtcaaatgggaatggggtttggtgttcaagaaccaaacccttcttcttcttcttctgatggtgataattcccaacacaacggtggcattagcatgaaaatgaggattccgtgcaccgagttgtacgttcggtacgtgc

SEQ ID NO: 13162 - DNA, 396 bp, Glycine max
  unsure at all n locations
  Clone ID: LIB3094-078-Q1-K1-H6
cggacgcgtgggcggacgcgtgggttatcatccgcagctgcttttattcgcaccgcaaacagtgagccagggccgtcggaaagaacaagcgcatctccaaggggaagaagggtggcaagaagaaggcagctgatccctttgccaagaaggattggtatgacattaaggctccttctgtttttcaagtgaaaaatgttggcaaaaccctcgtctctcgtactcagggtaccaagattgcttctgaaggactcaagcatagagtgtttgaggtctccttggctgatcttcaaggggatgaggatcatgcattcaagaagattaggttgagagctgaagatgtgcaagggaagaatgttctgacaaatttttggngaatggatttcacaacagacaagc

SEQ ID NO: 13163 - DNA, 429 bp, Glycine max
  Clone ID: LIB3094-078-Q1-K1-H7
cggacgcgtgggcggacgcgtgggttatcatcctcagctgcttttattcgcaccgcaaacagttgtccatggccgtcttaaagaacaagcgcatctccaaggggaagaagggtggcaagaagaaggcagctgatccctttgccaagaaggattggtatgacattaaggctccttctgtttttcaagtgaaaaatgttggcaaaaccctcgtctctcgtactcagggtaccaagattgcttctgaaggactcaagcatagagtgtttgaggtctccttggctgatcttcaaggggatgaggatcatgcattcaagaagattaggttgagagctgaagatgtgcaagggaagaatgttctgacaaattttctgggaatggatttcacaacagacaagcttaggtcattggtacgaaaatggcaaactctta

SEQ ID NO: 13164 - DNA, 396 bp, Glycine max
  Clone ID: LIB3094-078-Q1-K1-H8
cggacgcgtgggcggacgcgtgggttatcatccgcagctgcttttattcgcaccgcaaacagtgagccatggccgtcggaaagaacaagcgcatctccaaggggaagaagggtggcaagaagaaggcagctgatccctttgccaagaaggattggtatgacattaaggctccttctgtttttcaagtgaaaaatgttggcaaaaccctcgtctctcgtactcagggtaccaagattgcttctgaaagactcaagcatagagtgtttgaagtctccttggctgatcttcaaggggatgaggatcatgcattcaagaagattaggttgagagctgaagatgtgcaagggaagaatgttctgacaaatttcttgggaatggatttcacaacagacaagc

SEQ ID NO: 13165 - DNA, 420 bp, Glycine max
  Clone ID: LIB3094-078-Q1-K1-H9
aataaccgggccggccgcacgcgtccgcccaggcgtccgagaaggcctgggcttagtttataagcataactgggtgaggaagaaagaagtagagttatagaagatggcggggagcggagcggtaccgttttggagggcggcggggatgacgtacataacatactcaaacatatgcgcgaatctgctcaggaattgcctcaaggaaccctacaaggccgaatccctctctcgtgagaagctccattttgttctctccaaatgggtcgactccaagcctgaaaaacctactattcgttcagacaccccagagcagtgatctggaataagtggaagctataaatgcataaatctttgagatctggaagttcattgtcattttgaacctttctgtgatgttaaattcctttggtttttttctct

SEQ ID NO: 13166 - DNA, 467 bp, Glycine max
  unsure at all n locations
  Clone ID: LIB3094-079-Q1-K1-A1
cccacgcgtccgctcgagaatatgacccgtcctaaaatttacgaaacataattatttattatttgtgatatataatgagaggaacataaacgaacaatcagatgctgctagtcatttggataataaacaacattaggatttaggcatatcacatgatcgctttacttataatttagggatatcagctcaataccacatgattcaagtaatattaccaaaatcaaagccttatcctacaagatgcggtcagctacatgggtcatgacgtcattcggcaagtttagaaaccaaagtgtagcaaacgggaaaaaagtacacttctccttacagaggtatcccatatgacacaataactctgaaatagtatagtataccatagtcttaatcagcggaatatacaatntcttacatgacanaaggacagccactgatccccagacatattggcaagtaaaataaaggggaca

SEQ ID NO: 13167 - DNA, 381 bp, Glycine max
  unsure at all n locations
  Clone ID: LIB3094-079-Q1-K1-A10
cgccatgctgttcttggagctacaaactctcgtcctgatttgatattgactggacaccaagatgatgcagaatgtgctcttgcaatgtgcccaactgaaccctatgttctttcaggaggaaaggacaaaacagtggtgttgtggagtattgaagaccatataacatctgctgccacagactccaaatctggtgggtcaattatcaaacaaaactctaaatctggagaaggcaatgataaaactgctgatggccctactgttggaccacgaggcatttattgtgggcatgaggatacagttgaagatgtgactttctgcccatctagtgcacangagttctgtagtggtggagatgattcttgtctcatcttatgggatgca

SEQ ID NO: 13168 - DNA, 299 bp, Glycine max
  Clone ID: LIB3094-079-Q1-K1-A11
tcctccacccacgcgtccgcccacatgctgctcttggagctacaaactctcgttctgatttgatattgactggacaccaacatagtgcatattgagctcttgcaatgcccccaactgaaccctatgttctttcaggaggaaaggacaaaacagtgatcttgtggagtattgaagaccatataacatctgctgccacagactccaaatctggtgggtcaattatcaaacaaaactctaaatctgcaaaatgcaatgataaaactgctgatggccctactgttggaccacgaagcatttat

SEQ ID NO: 13169 - DNA, 433 bp, Glycine max
  unsure at all n locations
  Clone ID: LIB3094-079-Q1-K1-A12
ttcaagaacaatttattgcacaaatattgacaagaagcttactcaagccgatgtcaaacacttatgtgaatctagttgtggagaggttcaacggttgaggcttcttggagattaccatcattcaactcgaattgcttttgttgagttcacagtggctgagagtgcaattgcagctctaagctgtagtggggtgattctgggttcactgcccataagggtaagtccatcgaagacaccagttcgatcacgtgctcctcgccctactatgcactgaatcaactntccatgtttctggngttgattgctgctgagatatatttacatatatatatatacatagaaacagctgtgttctaaggaacatgtggcatttagttggtacttttgtcctcatgtcttacagtatggntactttgcttncccttggggaata

SEQ ID NO: 13170 - DNA, 201 bp, Glycine max
  Clone ID: LIB3094-078-Q1-K1-G12
cgaccgactcgtacgcccagacgtccaagaaggcctcagcttaatttataagcataactgaactaacaagagaaagatagatttaaaaagatggccagcaccggaacaaaaccactaagcaggccatctaaaaaaacctacataacacactcaaacatacaccctaataacctcactaaaagcctaaattaacccaacata

SEQ ID NO: 13171 - DNA, 334 bp, Glycine max
  Clone ID: LIB3094-079-Q1-K1-A2
tccagccactcgtgcgcccacgcgtccgctcgagaatatgacccgtcctaaaatttactaaacataattatttattattggtgatatggaatgatatgaacatacacgaacaatcagatgctgctagtcatttggataataaacaacattacgatttaggcatatcacatgatcgctttacttataatttagggatatcagctcaataccacatgattcaagtaatattaccaaaatcaaagccttatcctacaagatgcggtcagctacatgggtcatgacgtcattcggcaagtttagaaaccaaagtgtatcaaacgggaaaaaagtacac

SEQ ID NO: 13172 - DNA, 369 bp, Glycine max
  unsure at all n locations
  Clone ID: LIB3094-078-Q1-K1-E10
cccacgcgtccgctcgagaatatgacccgtcctaaaatttacgaaacataattatgtattgggtatgatatataatgagaggaacataaacgaacaatcagatgctgctagtcatttggataataaacaacattaggatttaggcatatcacatgatcgctttacttataatttagggatatcagctcaataccacatgattcaagtaatattaccaaaatcaaagccttatcctacaagatgcggtcagctacatgggtcatgacgtcattcggcaagtttagaaaccaaagtgtagcaaacgggaaaaaagtacacttctncttacagaggtatnccatatgacacaataactctgaaatagtatag

SEQ ID NO: 13173 - DNA, 436 bp, Glycine max
  Clone ID: LIB3094-078-Q1-K1-E11
cccacgcgtccgctcgagaatatgacccgtctctaaaatttacgaaacataattattgattagttatgatatataatgagaggaacataaacgaacaatcagatgctgctagtcatttggataataaacaacattaggatttaggcatatcacatgatcgctttacttataatttagggatatcagctcaataccacatgattcaagtaatattaccaaaatcaaagccttatcctacaagatgcggtcagctacatgggtcatgacgtcattcggcaagtttagaaaccaaagtgtatcaaacgggaaaaaagtacacttctccttacagaggtatcccatatgacacaattactctgaaatagtataatataccatagtcttaatcaacggaatatacaatttcttacattacaaaaggacaagcactgattcc

SEQ ID NO: 13174 - DNA, 358 bp, Glycine max
  Clone ID: LIB3094-078-Q1-K1-E4
accaaacttttcaatctcgtacacttatatattacttttattggggcatagttatattttactgattcaacaatacagataatgtctttttggttttaccatttccatttaagatggtgcttttcctcaatcaccttgtcacccaaccaaaatataacacccactttttgtaccaatattagttcctcatttaatttgtgtttccttactgttcaaaaatgttgtaacatactctcatttttgtccttcctaacaatacattatctcttgtctgtattctctaaattcttttatacccatttacaaacaatattataatgcaaatccaattctaactttcatttcttttgtttatata

SEQ ID NO: 13175 - DNA, 468 bp, Glycine max
  unsure at all n locations
  Clone ID: LIB3094-078-Q1-K1-E8
cccacgcgtccgaaaagagtaccaaacttttcaatctcgcacactgatatatgactgttgttggggcatatgtatatggtactgattcaacaatacagagaatggcttttgggttggaccatttccatttaagtgggtgcttggcctcagtcaccttgtcacccagccaaaatagaacacccactttttgtaccaatatgagttcctcattgaagtggggtttccgtactggtcaaaaatgttgtaacatactcgcatcttggtcctccctagcaatgcagtatcggttgtctgtatcctggaaatgctatgagaccggtttcacaagcaagatgatgaggcaagtccaatgctaacttgcatttctgtggtttatatacatgatgcagcatactcaagagtaaccttattggaatngagaatngattcaacgtttntctaactcaattaatggtgcaatgacgattt

SEQ ID NO: 13176 - DNA, 318 bp, Glycine max
  Clone ID: LIB3094-078-Q1-K1-E9
cccacgcgtccggttgttatcattcctctgacttatggagtcgtagcacttgtttggattagaatgattcctgatgagcagggacattagccaaactatcaggacctcatttgcagaatccagtcctcaacaatcaaaagtatttccaaagacattagcgcatgacttaaacctgagggatacaaaatctcaacctctaactataagttacatcaccaaagtcaaagacgatacccacttcactcgatactcctcttaagtccagacactatgcgtgaaccatgcttaccgaaattcttccaacgggactttaggtca

SEQ ID NO: 13177 - DNA, 414 bp, Glycine max
  Clone ID: LIB3094-078-Q1-K1-F10
cttctcatcattcattcatcttcgttctaagagccatgtctagcaccgttggccagaccatgaagtgcaaagctgcgattgcatgggaggctgggaagccgctggtgattgaagaagtggaggttgcgccaccgcaagccggtgaagtccgtttgaagatcctctacacctctctttgccacactgatgtttacttctgggatgcgaagggccagactccattgtttcctcgcatttttggccatgaagcttcggggattgtggagagcgtaagcgaaggtgtgactcatctgaaaccaggtgaccatgcccttcctgtgttcacaggagagtgtggagattgcgcccattgcaagtcagaggagagcaacatgtgtgagctactcaggatcaacaccgataggggtgtcatga

SEQ ID NO: 13178 - DNA, 353 bp, Glycine max
  Clone ID: LIB3094-078-Q1-K1-F11
cagaacagggactcactctcttcgcagcggcactctcggtggctttcatcttctcgggttgggaagatgtacacatcgaggaagaaaattcacaaggataaggatgctgagccaactgaatttgaggaatcagttggacaggcattgtttgatctagaaaataccaacaatgagctgaaaagtgatctgaaagatttatacataaactcagctgtccaaattgatgtttctggcaaccgaaaggctgtggttatccatgtcccctacagactaaagaaaggattccggaagattcatgtcaggcttgtgagagaacttgagaaaaagtttagtggaaaaagatgtaatcttga

SEQ ID NO: 13179 - DNA, 352 bp, Glycine max
  Clone ID: LIB3094-078-Q1-K1-F12
cagaacagggactcactctcttcgcagcggcactctcggtggctttcatcttctcgggttatcaagatgtacacatcgaggaagaaaattcacaaggataaggatgctgagccaactgaatttgaggaatcagttggacaggcattgtttgatctagaaaataccaacaatgagctgaaaagtgatctgaaagatttatacataaactcagctgtccaaattgatgtttctggcaaccgaaaggctgtggttatccatgtcccctacagactaaggaaaggattccggaagattcatgtcaggcttgtgagagaacttgagaaaaaagttaatggaaaagatgtaatcttga

SEQ ID NO: 13180 - DNA, 233 bp, Glycine max
  Clone ID: LIB3094-078-Q1-K1-F2
caaacttttcaatctcttacactcatatattacttttcatgcggcatagttatattttaatgattcaacaatccagataattctttttcttttaaccatttccatttaaataagttctctacctcaatcaccttttcacccatccaaaatataacacccactttttataccaatatcaattcctcatttaaatgtgatttccatacttgtcaaaaattttattacatactccc

SEQ ID NO: 13181 - DNA, 332 bp, Glycine max
  Clone ID: LIB3094-078-Q1-K1-F4
gaggtttttgtctgatgatgttggtaggtctagcaatcgagggcgagggcaagggcgatcttggcgaaattatgggaggaatggagcggatggtgatggcagaatgaggaagaatgggaatgggagaaggtttttgtccaataatgttgatcggtctagcggtggagaacagtcttctcctttgaattatgggggggatggaatgaatggtgatggtagattgaggaggaatgggaatgggaggagggttttgtctgatgaggatagtagcgatggacagcggtcttctcatttgagttatgggaggaatggactggatggtgatggtgatg

SEQ ID NO: 13182 - DNA, 462 bp, Glycine max
  unsure at all n locations
  Clone ID: LIB3094-078-Q1-K1-F6
ttttgattttctggatccgtgtttttgagatgagtgtatgaatttaccgattgtttttcagatgaggttgtcgttgaggcatgctttggtgtttgtgttaatcggggcgttgtggaacttgcaaagggcagagggtatccgatttgtgatagacagagacgagtgtttctcccatgatgtgaagtacgagggtgacactgttcatgtctctttcgttgttattaaggctgattctccctggcattacggcgacgaaggtgtcgatctcgtggtaaagggaccttctggcgagcaaattcaagaatttcgggacaagaccagtgagaagtttgactttgtggctcacaaatccggggtccataaattctgcttcaccaacaagtctccttatcatgaaactgtcgattntgatgtacatgttggtcacttctcttactttgagcaacatgcaaaagatgagca

SEQ ID NO: 13183 - DNA, 471 bp, Glycine max
  Clone ID: LIB3094-078-Q1-K1-F7
tctgttcattattatgtgcagtcacacattcaaattaatgaatatcgtgagcgtatagtcttgccttctgcatcaaagaagcaggggcgacctattaccacttgtataaaggttttagacatgactggtctgaagttatcagccctgaatcagattaagttgctaactattatatcatccattgatgatctgaactaccctgagaagacaaatacttattacattgtaaatgctccatacatattttctgcttgttggaaggttgtgaagccacttttacaagagaggacaagaagaaaaatacaggtgttaccaggttgtggacgagatgagctattgactatcatggattactcgtctctaccacatttctgtcgaagagaaggctctggatcatccagacattctgagagtggtagtgaaaaatgctattccttggatcatcccttccatcaagagctctacaatcac

SEQ ID NO: 13184 - DNA, 310 bp, Glycine max
  unsure at all n locations
  Clone ID: LIB3094-078-Q1-K1-G1
cattattatatacattcacttatccatattaattaatatcttcatcatatggtccttgtttatatttcaaanaaccaaggtccacctattaccacttatataaaatttttatacattactcatctaaaattattaacccttaatcatattaaatttctaactattatatcatccatttattatcttaactacccttaaaatacaaatacttattacatttttaaaacttcatacatattttcatactcttttaaatttatcaatcctatttttactaatatatacaatatataaaattacaatttattac

SEQ ID NO: 13185 - DNA, 297 bp, Glycine max
  Clone ID: LIB3094-078-Q1-K1-G10
cccacgcgtccgagaaggcctgggcttagttgataagcataactgggtgaggaagggagaagtagagttaaaaagatggcgtcgagcggatcggtaccgttttgtagggcggctgagattacgtacattacatactcaaacatatacgcgaatctgctcacgaattgcctcaaggtaccctacattgccaaatacctctctcgagagaagctccattttgatctctccaaattggtcaaccccaagcctgaaaaacctactattcggacagactccccataacagtgatctggaata

SEQ ID NO: 13186 - DNA, 263 bp, Glycine max
  Clone ID: LIB3094-078-Q1-K1-G11
acgcccaggcgtccgagaaggcctgggcttagtttataagcataactgggtgaggaagggagcagcagagtttaaaagatggcgtggcgcggagcggaaccgatttggaaggcggctgagatgacgtacataacatactcaaacatatgcgcgaatctgctcacgaattgccttaaggaaccctacaaggcccaatacctctcttgagagaagctccatttagatcactccaaatggcgtcgacgccaagtcctgaaaaacct

SEQ ID NO: 13187 - DNA, 479 bp, Glycine max
  unsure at all n locations
  Clone ID: LIB3094-078-Q1-K1-E1
atttgaaggttgttttgtgcttatagataaaagttctgccaaatcaagaggggttttcagatcgtagtgtgtgtgtgtgtgttaaacaatggctaagttctttgctgctatgatcttggcactcattgccatttccatgcttcaaacagtggttatggctgctaatgagcaaggaggccacttgtatgacaacaagagcaaatatggaagtgggagtgtcaagagataccaatgcccatcacaatgctcgaggagatgtagccagacccaataccacaagccctgcatgtttttctgtcagaagtgctgcangaaatgcctgtgtgtgcccccggggtattatggtaataaagctgtgtgcccttgctacaacaactggaagaccaaagaaggaggacccaagtgccctttgacttcaacttcatcaaattgttgcttttcactatatttttatcatctcccttgggccaatttaatgc

SEQ ID NO: 13188 - DNA, 423 bp, Glycine max
  Clone ID: LIB3094-078-Q1-K1-B4
cccacgcgtccgcccacgcgtccgcccacgcgtccgcggacgcgtgggcttcaacttggattacggaccctaactaccctgattctgatcagattccttactttgaggatggtgattctgtgacatacaataatgagaaggaggggatcattgagtgcttgaaaaggaatgtgggtggtgatttagatagtgaggtttcttctctccctgattggataccaaccaaagtgatggccaccacttggcttgctgatgcacttgagtatgaactgtgggtgggatgtgatggttcctctgcttatagcatctattattctgatcttccctggcctatcggcaaggttctcttttggaagaaagcttattgggtaaagcagaaacatgggataagtgaagagaatgtagaagtcaaggaagaagaga

SEQ ID NO: 13189 - DNA, 266 bp, Glycine max
  Clone ID: LIB3094-078-Q1-K1-B5
attcccgcatcggcccacgcatacacccacgcattcgcccacgcattcgctcacgcttcctcctacacaaaatcttcaactgggtaacggcaccctttcataccctgattctctaccagattcctaactttaaatatgctcattctatcacatacaataattataatgatgcgatcattgagtaacccaaaacgaatgtcaatcattattcaaatagctaagatactactttccctaattgaataccaaccaaagtgatttccacc

SEQ ID NO: 13190 - DNA, 481 bp, Glycine max
  unsure at all n locations
  Clone ID: LIB3094-078-Q1-K1-B6
cccacgcgtccgcgcgtcgctgctccgtaccagtttcactgcataaatttgagagaaaactctgcaaacatgttggtttatcaggacctccttacaggtgatgagcttctctcggactccttccgttacaatgaaattgagaatggaatgctgtgggaagttgaggggaagtgggttgttaagggagcagttgatgttgacattggtgcaaacccttctgctgaaggtggagaagatgagggagtcgatgacgcagctgttaaggttgttgacattgttgatacattcagacttcaggagcaacccgcttttgataagaaacagtttgttaccttcatgaagaggtttatcaagaatttgactcccaagctcgatgcanagaaacaagagttgtttaagaagcacattgagggagcaactaaatacctgctctctaaagataaggattttcagtttttttgttggggagagcatgaatgat

SEQ ID NO: 13191 - DNA, 304 bp, Glycine max
  Clone ID: LIB3094-078-Q1-K1-C1
cccacgcgttcgaaagaaacagtgtttcatcattagggtttcgcagaagagagagaaacccagggctagggagagaaactcgcagtcgcagacatgtcttccttcgatgcctatcacgacgacttgaacgtcaactcttcttacactcgccagcactacgatgaccatgacaacttatatggctacggcagctactcctgcttcaccggaggattctacgacgacggagatgtcgccgtcgatcactacggcatcgcgtacccggagatctacagattcactgattcgaatcccgcttactctc

SEQ ID NO: 13192 - DNA, 371 bp, Glycine max
  Clone ID: LIB3094-078-Q1-K1-C10
cccacgcgtccgcggacgcgtgggggtttttgtggataagagtgagctataatggcggccagtagactttgtctaattgctgtgtttgatgttgacgggactcttacagctcccaggaaggtggtcacaccggaaatgttgacattcatgcaagaactactaaaggttgtaaccgttggagttgttgggggttctgactcttataaagatatcagagcaacttggcagcacatttaccaatgagtatgattacttattttctgagaatggtcttgtggcttacaaggaagtaaagctcattgtaactcagagcttgaagtcattccttgttgaataaaagctcatggaatttattaactttacacttcatt

SEQ ID NO: 13193 - DNA, 407 bp, Glycine max
  Clone ID: LIB3094-078-Q1-K1-C11
caaccatggccgactcatctcaagaccttgaccaacttctcgatagtgctttggatgattgtgagtccttcaacctcaatcctcccccttcaagtggggaagcaactgcgaatagcaagaaggagagtccttctttgccgtccggggttcaaggattgggcatgggtttacccgatttgagaacgaagaaaaaggggaaacagaaggctttcaaagacagccacgtgtcggaggccctcaacaagctcaaggagcagaccaaagaggctgtgaaggggctggagtctatattcccacccactgccgatgatttaggtaaagatgccttgatggaagattgggtcaaacaatttgagcaacttgctggctctcaagacatggaatctattgtggagaccatgatgcat

SEQ ID NO: 13194 - DNA, 376 bp, Glycine max
  Clone ID: LIB3094-078-Q1-K1-C12
caacgatggccgactcatctcaagaccttgactcaacttctcgatagtgctttggatgattagcagtccttcaacctcaagccggcccctccaagtggggaagcaactgcgaatagcaagaaggagagtccttctttgccgtcgggggttcaaggattgggcatgggtttacccgatttgagaacgaagaaaaaggggaaacagaaagcttccaaagacagccacgtgtcggaagcgctcaacaagctcatggagcagaccaaagaagctgtgaaggggctggagtctatatccccacccactggcgatgatttaagtaaagattccttgatggaagaatgggtcaaacaatttgagcagcttgctggcctctaag

SEQ ID NO: 13195 - DNA, 458 bp, Glycine max
  Clone ID: LIB3094-078-Q1-K1-C4
cccacgcgtccgcccacgcgtccgcccacgcgttcgcggacgcgtgggcttcaacttggattacgaccctaactaccctgattctgatcagattccttactttgaggatggtgattctgtgacatacaataatgagaaggaggggatcattgagtgcttgaaaaggaatgtgggtggtgatttagatagtgaggtttcttctctccctgattggataccaaccaaagtgatggccaccacttggcttgctgatgcacttgagtatgaactgtgggtgggatgtgatggttcctctgcttatagcatctattattctgatcttccctggcctatccgcaaggttctcttttggaagaaagcttattgggtaaagcagaaacatgggataagtgaagagaatgtagaagtaaaggaagaagatttttatgggagagcaaactctgcatatgatgctcttg

SEQ ID NO: 13196 - DNA, 364 bp, Glycine max
  Clone ID: LIB3094-078-Q1-K1-C9
cccacgcgtccgcggacgcgtgggggtttttgtggataagagtgagctataatggctgcgaggagaccgggtttaattgctttgtttgatgttgacgggactcttacagctcccaggaaggtggtcacaccggaaatgttgacattcatgcaagaactacgaaaggttgtaacggttggagttgttgggggttctgaccttataaagatatcagagcaacttggcagcacagttaccaatgagtatgattacgtattttctgagaatggtcttgtggctcacaaggaaggaaagctcattggaactcagagcttgaagtcattccttggtgaagaaaagctcaggagtttattaactttacact

SEQ ID NO: 13197 - DNA, 375 bp, Glycine max
  Clone ID: LIB3094-078-Q1-K1-D1
cccacgcgtccgaaagaaacagtgtttcatcatttgggtttcgcagaagagagagaaacccatgtctagagagagaaactcgcagtcgcagacatgtcttccttcgatgccttcgccgacgacttgaacgtcaactcttcttccactcgccagcacgacgatgacgaggacaacttctctggctacggcggctactcctccttcaccggaggattctccgccgacggagatgtcgccgtcgatcactccgccgccgcgtcgccggagatctacggcttcactgattcgaatcccgcttactctcagtctcccttcgaatcggccaccgtagagaacgaaaacggaaacggatacggcgacggcgacggtgttttt

SEQ ID NO: 13198 - DNA, 281 bp, Glycine max
  Clone ID: LIB3094-078-Q1-K1-D10
ctcacgcttccgaaaaggcctatgctatagttcataagcataactctgtgaagactaaagaagtagacttacaaaaacagccttgagccaatcgctaccgacctgaacgtctatgatcataacctacataacatacttaaacatatgctcgaatttgctcactaatattctcaaggaaccctacatggactaatacctctctcgtgagaagctgcattctactctctccaaaatgttcgaagcccagcctgaaaaacctactattcgatcatacaccccat

SEQ ID NO: 13199 - DNA, 104 bp, Glycine max
  Clone ID: LIB3094-078-Q1-K1-D11
gaattcccggcccggcggacgcgtacgcttaggcttccgaaaatgacccggcttagattttaagcatcactctgagctatcggggatagtagattttcaaagac

SEQ ID NO: 13200 - DNA, 379 bp, Glycine max
  Clone ID: LIB3094-078-Q1-K1-D12
aaaaaaggttcatagttgatatctccagcggaacgatgaagtttgaagatttggcagaagggtgcatggcaaaaatactgtcctacaccactcgtgcggatgtatgcaggctttctctggtttccaaagcctttcattccgcggctgaagccaacactgtgtgggattgctttctcccctctgatttgtcctctatcatctccccttcttcttccgttcctccctttcgctctattaaggatctctatctctatctctccgatcgtcccaccatcatcgatcaaggtataaagagttttcaattggagaagcggactgggaacaagtgttacatgctttccgctagagatctgagcattatatggggtgacactactca

SEQ ID NO: 13201 - DNA, 323 bp, Glycine max
  Clone ID: LIB3094-078-Q1-K1-D3
aaatccttatcatacattttttactttatacttacttataacttaaataactacagaatttttttaaatttttacaaatcttcttacattcctactttcaaaaatctttttactaacttatattaaataccattaaccttataaactcattaatacttcaaaaacttctatattctctacactatttttaaacaactattactcttatacatcaattatccctttcaaaacttatactttttaactattcaatctacacctattatctattttattctaacttatcttaacaattttattcctctaaattccaatcatactac

SEQ ID NO: 13202 - DNA, 378 bp, Glycine max
  unsure at all n locations
  Clone ID: LIB3094-078-Q1-K1-D4
gaaatgtgaaagccttatcatacagtgtttgcaatatgccaaggtagaagttgaagaaataaatgatnttgtaattttatgcagatgttcttacatcccgaaggtgaaaaatcttgttactaacgtatgtaaaggcaaggaactttataaaggcatgaatcctttaaaagctgctgtttgcggtgcatcagtggaaagagctattgcttcaggcgtcaatgatccctttgggaacttggacttgttaactatccaagctacacctcttgccattgggattcgagctgatgggaacaagtttgtccctgtaattccgagggatactacaatgccaacacggaaggaactagttttcacaactactcatgacaatcaaac

SEQ ID NO: 13203 - DNA, 399 bp, Glycine max
  Clone ID: LIB3094-078-Q1-K1-D6
gaaatgtgaaagccttatcatacagtgtttgcaagatgccaaggtagaagttgaagaagtaaatggtgtgataattgtaggcggatgttcttacatcccgagggtgaaaaatcttgttactaacgtatgtaaaggcaaggaactttataaaggcatgaatcctttagaagctgctgtttgcggtgcagcagtggaaggagctattgcttcaggcgtcaatgatccctttgggaacttggacttgttaactatccaagctacacctcttgccattgggattcgagctgatgggaacaagtttgtccctgtaattccgagggatactacaatgccagcacggaaggagctagttttcacaactactcatgacaatcaaactgaggcgttgatccttgtcta

SEQ ID NO: 13204 - DNA, 291 bp, Glycine max
  Clone ID: LIB3094-078-Q1-K1-D9
ctcacgcgtccgaaaaggcctgtgctatagttgataagcataactgtgtgcggactagagagagagactgacgagaacggccttgagccaagcggtaccgacctgaacggctatgatcatgacgtacataacatacttaaacatatgctcgaatttgctcacgaatagtctcaaggaaccgtacatggactaatacatgtctcgtgagaagctgcattctgctctctgcaaatgggtcgacgccaagcctgaaaatcctactattcgacagacacccgatagcagtgatct

SEQ ID NO: 13205 - DNA, 477 bp, Glycine max
  unsure at all n locations
  Clone ID: LIB3094-078-Q1-K1-B3
ggaaaacgaccaaaacttcaactacaactcgcagcctcaggcttcgtacaaagttgcagttcttggtgctgctggagggataggtcagccactcgcgcttctcatcaagatgtcgcctctagtttccgacctgcatctctatgatattgcgaatgtcaagggagttgctgctgatatcagtcactgcaacaccccctcacaagtcagggatttcactggagcttctgagttggcgaattgtttgaaggatgtgaatgttgttgtcatacccgccggtgttccaaggaagcctggcatgactcgtgatgaccttttcaacatcaatgccggcatagtcagggacttggtttctgctgttgcggataatagccctgatgcttttattcaaatcatcagtaaccctgtgaactctaccgtgcctattgccgcanaagttttgaaaccagaaggtgtgtatgatcctaagaagctcttttg

SEQ ID NO: 13206 - DNA, 235 bp, Glycine max
  Clone ID: LIB3094-077-Q1-K1-H10
gcgctcagtcttcgtagctcatcacgtcatcactctaacatctcattatgtgctaacatcctgagcagtgtatgctctaaccggttcatggtcagaataacatgcatctgaactgcctagtacttatcgtgaatctttaccactttgctattacaatttacgacatgatgcaatcaaatatgttgaacaacgttctctatcaatccagatctatcatgctcccattagaactctg

SEQ ID NO: 13207 - DNA, 278 bp, Glycine max
  Clone ID: LIB3094-077-Q1-K1-H11
cccacgcgtccgcgacggtgacaactgtagtttgtgttctaaataaattcaattttacacagggggcgttgttcttaccttaggtcaatttattatttaggttactggcgggtctataaataaattttacacattggtaattttcctttcgtttctgaacttcgataaaatgagttttttgtccaaattgggttaatgcgtatatatagttatgagatttcttattgctaaaagtgtgattttttttatgtgttcatgatcttctatgtgggctttca

SEQ ID NO: 13208 - DNA, 362 bp, Glycine max
  Clone ID: LIB3094-077-Q1-K1-H2
gataactactattgaagaagcaaaacgattctacccactgttcggactcggggccaatgtaggccttatgttctctggccggacagtcaaatacttttctaatctgaggcagaatttaggtcctggagttgatggttgggccatctctctgaaagcaatgatgagcatagttgtgggtatggggtttgcaatctgtttcctgtactggtgggtgaacaattatgttcctcttcctactcgtagcaagaagaagaaggagaagcccaaaatgggaacaatggagagcttgaagttcttggtgtcttcaaagtacatcagagatcttgccactttagtggttgcttatggaatcagcatcaatc

SEQ ID NO: 13209 - DNA, 136 bp, Glycine max
  Clone ID: LIB3094-077-Q1-K1-H6
gataactactattgaagaagcaaaactattctacccactgttcagactctaagccaatatagcccttatgttctctttcctgacagtcaaatacttttttaatcttatgcataatttaagtcctttaatttatagt

SEQ ID NO: 13210 - DNA, 322 bp, Glycine max
  Clone ID: LIB3094-078-Q1-K1-A1
gtcatatgctccaagtgcactggtaagggttctaagtctggtgcttcgatgaagtgtgctgggtgtcaaggaactggtatgaaggtttctataagacatcttggcccgtccatgattcagcagatgcagcatgcttgcaatgaatgcaagggtactggagaaaccatcaacgacagagatcgctgcccacagtgcaagggagaaaaggttgtgcaggagaaaaaagtccttgaagttattgtggaaaagggaatgcagaacgggcagaagattacattccctggcgaagctgatgaagcgccagacacaattactggggata

SEQ ID NO: 13211 - DNA, 341 bp, Glycine max
  Clone ID: LIB3094-078-Q1-K1-A10
cgcgtccgttcaggaacaatttatggcacacatattgactagaagcttactcaagccgatgtcagacacgttttagtttctatttggggagggcttcaacggttgaagcctcttggagactaccattattcaactcgaattgcttttgttgagttcacagaggctgagagtgcaattgcagctctaagctcgtacggggtgattctgggctcactgcccataacggtaagtccatctcacacaccacttccatcacctgctcctcggcctactatgcactgaatcaacttttcatggttctgaccaagacgacggtgacataatttacatatatatatcta

SEQ ID NO: 13212 - DNA, 199 bp, Glycine max
  Clone ID: LIB3094-078-Q1-K1-A11
ctctgtctctctctctttcactctgcgcattcttttcgccgatccaatctgagtgagagtgggtattggcatggattcagcatttgcgagaacgagatccatgttcttcgcagcttcactccttctctacatattcgcagtcaccaccaccaccttgggatccctacacatctacgatcatgaacctttcagagaactc

SEQ ID NO: 13213 - DNA, 252 bp, Glycine max
  Clone ID: LIB3094-078-Q1-K1-A12
atcttgtctctctctttcactctgctcattcttttcgccgatccaatctgaatgaagatgtgtatatacatgcattcagcatttgccaaaacgagatccatcttcttcacaccttcactactcctcttcatattcgcagtcaccacacaccaacttctcatacatccacatctaccatcatgctcctttaaaaaactcggcaattcctacctcctcgcttgccgcaactaacgcatcttcacttcccaaccc

SEQ ID NO: 13214 - DNA, 347 bp, Glycine max
  Clone ID: LIB3094-078-Q1-K1-A2
caacacgcgatcacacaaacattcaccttccacttattccaacctatctcaaacacttcgttcaagctattttttaaaaaactcaacccctcaaacttctttcatattaccatcattcaactccaaacacttttttttaatccacaatattcttataattcaattacatctcttacatttttcttataattctaatctcacttaccattaatgttactccatccaatacaccaactccatcaccttctccttcccctactatacacttaatcaactttccattttttcttaatttattgcttcttacatatatttacatatatatatatacatataaacaactttat

SEQ ID NO: 13215 - DNA, 401 bp, Glycine max
  unsure at all n locations
  Clone ID: LIB3094-078-Q1-K1-A4
cccacgcgtccgcccacgcgttcgcccacgcgtccgcggacgcgtgggcttcaacttggattacgaccctaactaccctgattctgatcagattccttactttgaagatggtgattctgcgacatacaataatgagaaggatgggatcattgagtgcttgaaaaggaatgttggtggtgatttagatagtgaggtttcttctgtccctgattggataccaaccaaagtgatggccaccacttggcttgctgatgcacttgagtatgaactgtgagtgggatgtgatggttcctctgcttatagcatctattattctgatctttcctggcctatcggcaaggttctcttttggaaaaaagcttattgngtaaagcacaaacatgggataagtgaaaagaatg

SEQ ID NO: 13216 - DNA, 348 bp, Glycine max
  Clone ID: LIB3094-078-Q1-K1-A5
gttcttctaccttattttctttccctagtcaaggagattcatctctgcagcaagttgttttagaaaagataaaatgctgaagatttgctgcattggggctggatatgtggggggtccaacaatggcagtcattgcactgaaatgcccctcaattgaagtggctgttgttgacatctctaaatccaggattgcagcatggaacagtgaccagctccctatctatgagccaggccttgatgatgtggtgaagcaatgtcgtggcaagaaccttttcttcagcactgatgttgagaaacatgtctatgaggccgacatagtgttcgtctgcgtcaacaccccgacaaaaac

SEQ ID NO: 13217 - DNA, 482 bp, Glycine max
  unsure at all n locations
  Clone ID: LIB3094-078-Q1-K1-A6
ttcaagaacaatttattgcacaaatattgacaagaagcttactcaagccgatgtcaaacacttcgttgaagctatttgtggagaggttcaacggttgaggcttcttggagattaccatcattcaactcgaattgcttttgttgagttcacagtggctgagagtgcaattgcagctctaagctgtagtggggtgattctgggttcactgcccataagggtaagtccatcgaagacaccagttcgatcacgtgctcctcgccctactatgcactgaatcaactttccatgtttctggggttgattgctgctgagatatatttacatatatatatatacatagaaacagctgtgttctaaggaacatgtggcatttagttggtacttttgtcctcatgtcttacagtatggttactttgcttccccttggnggattatgggtctcttgtttagcttgtagtcggatcgaactttgaggatcttga

SEQ ID NO: 13218 - DNA, 134 bp, Glycine max
  Clone ID: LIB3094-078-Q1-K1-A8
aatccttcccctacaaatttgaaagcaactaccaatatccataaacaaaaacctttttttacgtcactatttcaaagatttcacattcgtttaccctcttttataaccaataaaaatggtaaacacaaatcttt

SEQ ID NO: 13219 - DNA, 327 bp, Glycine max
  Clone ID: LIB3094-078-Q1-K1-A9
aacaatttattgcacaaattttgacaagaagcttactcaagccgatgtcgaacacgtctttgaatctatttgtggagaggttcaacggttgaggcttcttggagattaccatcattcaactcgaattgcttttgttgagttcacagtggctgagagtgcaattgcagctctaagctgtagtggggtgattctgggttcactgcccataagggtaagtccatcgaaaacaccagttcgatcacgtgctcctcgccctactatgcactgaatcaactttccatgtttctggggttgattgctgctgagatatatttacatatatatata

SEQ ID NO: 13220 - DNA, 322 bp, Glycine max
  Clone ID: LIB3094-078-Q1-K1-B1
gtcatatgctccaagtgcactggtaagggttctaagtctggtgcttcgatgaagtgtgctggtggtcaaggaactggtatgaaggtttctataagacatcttggcccgtccatgattcagcagatgcagcatgcttgcaatgaatgcaagggtactggagaaaccatcaacgacagagatcgctgcccacagtgcaagggagaaaaggttgtgcaggagaaaaaagtccttgaagttattgtggaaaagggaatgcagaacgggcagaagattacattccctggcgaagctgatgaaacgccagacacaattactggggata

SEQ ID NO: 13221 - DNA, 353 bp, Glycine max
  unsure at all n locations
  Clone ID: LIB3094-078-Q1-K1-B10
cccacgcgtccgcccacgcgtccgcccacgcgtccgcggacgcgtgggcttcaactgggagggcaccctaactaccctgattctgatcagattccttactttgaggatggtgattctgggacatacaataatgagaaggaagggatcattgagtgcttgaaaaggaatgtgggtggtgatttaaatagtgagggttcttctcttcctgattggataccaaccaaagtgatggccancactttggcttgctgatgcacttgagtatgaactgggggtgggatgtgatggttcctctgcttatagcatctattattctgatcttccctggcctatcggcaagggtctcttttgga

SEQ ID NO: 13222 - DNA, 389 bp, Glycine max
  unsure at all n locations
  Clone ID: LIB3094-077-Q1-K1-G9
cccacgcgtccgagaaggcctgggcttagtttataagcataactgggtgaggaagaganaagtagagtttagaagatggcgtcgagcggagcggtaccgttttggagggcggcggggatgacgtacataacatactcaaacatatgcgcgaatctgctcaggaattgcctcaaggaaccctacaaggccgaatccctctctcgtgagaagctccattttgttctctccaaatgggtcgacgccaagcctgaaaaacctactattcgttcagacaccccagagcagtgatctggaatagttggaagctataaatgcataaatctttgagaactggaaagtcattgtcaattttaaacctttctgtgatgtttaatttccttggttttttc

SEQ ID NO: 13223 - DNA, 350 bp, Glycine max
  unsure at all n locations
  Clone ID: LIB3094-078-Q1-K1-B11
cccaggcgtccgcccacgcgtccgcccactcttccgctgacgcgtgggcttcaacgtntcagaccactttaactaccctgaggctgatcagattccttactttgaggatggtgattctgtgacatacaataatgagaaggaggggatcattgagtgcttgaaaaggaatgtggatggtgatttagatagtgaggtttcttctctccctgattggataccaaccaaagtgatggccaccacttggcttgcttatgcacttgattatgaactgtgggtgggatgtgatggttcctctgcttatagcatctattattctgaactttccttgcctatctgcaaggttttctttt

SEQ ID NO: 13224 - DNA, 145 bp, Glycine max
  Clone ID: LIB3094-078-Q1-K1-B12
cccaggcgtccgcccacgcgtccgcccacgctttcgcggacacatgggcttcaacgggtatgtccactttaactaccctgatggggatcagattccttactttgaagattgtgaatctgtgacctaccataatgaaaaagagggg

SEQ ID NO: 13225 - DNA, 462 bp, Glycine max
  Clone ID: LIB3094-078-Q1-K1-B2
caaccatggccgactcatctcaagaccttgaccaacttctcgatagtgctttggatgagtttcagtccttcaacctcaatcctccccctccaagtggggaagcaactgcgaatagcaagaaggagagtccttctttgccgtcgggggttcaaggattgggcatgggtttacccgatttgagaacgaagaaaaaggggaaacagaaggcttccaaagacagccacgtgtcggaggcgctcaacaagctcagggagcagaccaaagaggctgtgaaggggctggagtctatatccccacccactgccgatgatttaggtaaggatgccttgatggaagattgggtcaaacaatttgagcagcttgctggctctcaggacatggaatctattgtggagaccatgatgcatcaacttctgtccaaggagattcttcatgaaccaatgaaggaaatagcagaaaagt

SEQ ID NO: 13226 - DNA, 304 bp, Glycine max
  Clone ID: LIB3094-077-Q1-K1-D9
acgcataaacgtccatagtcgacacatccaacgtctctatccaaattgtagatcgtgcttaagagtacatgctctctattaccgttatacactactcttcacgttgtattccaacttcaactagtttccaaaacctttcattactttgctgaaaccatcaatgattgggaatgctttctcccatcttattaaccatgtataatctgcaactctactttccctcctccctttctctgtattaaggatctctatctctatctatcctatcgtatcaccattatcgatcaatgtatacatattcttc

SEQ ID NO: 13227 - DNA, 418 bp, Glycine max
  Clone ID: LIB3094-077-Q1-K1-E10
acgcccacgcgtacgctcgagaatatgacccgtcctaaaatttacgaaacataattatttattggttatgatatataatgagaggaacatatacgaacaatcagatgctgctagtcatctggataataaacaacattacgatttaggcatatcacatgatcgctttacttataattcagggatatcagctcaataccacatgattcaagtaatattaccaaaatcaaagccttatcctacaatatgcagtcagctacatgggtcatgacgtcattcggcaagtttagaaaccaaagtgtaacatacggtaaaaaagtacacttctgcttacagaggtatcccatatgacacaataactctgaaatattatagtataccatattcttaatcagcggaatatacaatctcttacatgaca

SEQ ID NO: 13228 - DNA, 416 bp, Glycine max
  Clone ID: LIB3094-077-Q1-K1-E11
cccacgcgtacgctcgagaatatgacccgttctaaaatttacgaaacataattatttattagttatgatatataatgagaggaacataaacgaacaatcagattctgctagtcatttggataataaacaacattatgatttatgcatatcacatgatcgctttacttataatttagggatatcagctcaataccacatgattcaagtaatattaccaaaatcaaagccttatcctacaagatgcggtcagctacattagtcatgacatcattcgtcaagtttagaaaccaaagtttaacaaacttgaaaaaagtacactttttcttacataagtatcccatattacacaatatactctaaatagtataatataccatagtcttaatcaactgaatttacaatttcttacattacaa

SEQ ID NO: 13229 - DNA, 353 bp, Glycine max
  Clone ID: LIB3094-077-Q1-K1-E12
attcgacccacgcgtacgcccacgcctacgctctagaatatgaccctgactaaaatttacaaaacataatcatttattatgaaagatatattatataatgagcataacctaaccatacaatcctattcttcatttcaataatatacaacactacaatttaatcatatcatataaacgatctacttataatttatgtatatcaattaaataccacataattcatgtaatatttcctacctcaaacacttactcttcatacaacattcagctacatacatcattaattacttcattcagcatatataccaacctatatctaacatacgggaaatacactcacttttacatacata

SEQ ID NO: 13230 - DNA, 440 bp, Glycine max
  Clone ID: LIB3094-077-Q1-K1-E2
cttttctctgaaaaaacatgttgagggttgcagctagaatgctctcttcttctctctcatcgtcttctccgttgcggcccaatcacgccgcttccgcttttctctctcgaaacgacgtcgtcgtcgatgaccgcagatctgctccttcctcccatccccttcttcccttcagaggttatgctactgaatccctgatccacacaaaagaaaacagcattactcctgagattccgccaactgttactgctgttaagaaccctacttctaagattgtctatgatgatcacaaccatgaaagatttcccccaggtgacccaagcaagagggcatttgcctacttcgtacttacaggtggtaggtttgcttatgcctctgtggtccgtctccttgtcctcaagtttgtgctaagcatgtctgccagtaaggatgttcttgctctg

SEQ ID NO: 13231 - DNA, 476 bp, Glycine max
  Clone ID: LIB3094-077-Q1-K1-E6
aaaaaaggttcatagttgatatctccagcggaacgatgaagtttgaagatttgggagaaggaggcatggcaaaaatactgtcctacaccactcgtgcggatgtatgcaggctttctctggtttccaaagcctttcattccgcggctgaagccaacactgtgtgggattgctttctcccctctgatttgtcctctatcatctccccttcttcttccgttcctccctttcgctctattaaggatctctatctctatctctccgatcgtcccaccatcatcgatcaaggtataaagagttttcaattggagaagcggactgggaacaagtgttacatgctttccgctagagatctgagcattatatggggtgacactactcattattgggagtggacaaccctaccagagtccaggttcgaagaagttgctaggcttcgagctgtgtgttggtttgacattactgggaggatgaacacc

SEQ ID NO: 13232 - DNA, 258 bp, Glycine max
  unsure at all n locations
  Clone ID: LIB3094-077-Q1-K1-E7
acttgctcctcttgcgagcctttcctttcagtccattgattcagtgggtgcggtttcaacgagacctatgtagaccttgatcggcgtctgcacaccgncggataacaagatgattgtctgcgtcgccgtcgtcggtcaccagaacaatccgctgtacatacagagcttcacggaggccgatgatgctctcaagctccaccacatcgtccattgctcgctcgatgtggtcgacgagcgagtgaacaatcctaaaaagtc

SEQ ID NO: 13233 - DNA, 348 bp, Glycine max
  unsure at all n locations
  Clone ID: LIB3094-077-Q1-K1-E9
cccacgcgtccgctcgagaatatgacccgtcctaaaatttacgaaacataattatttattagttatgatatataatgagaggaacataaacgaacaatcagatgctgctagtcatttggataataaacaacattaggatttaggcatatcacatgatcgctttacttataatttagggatatcagctcaataccacatgattcaagtaatattaccaaaatcaaagccttatcctacaagatgcggtcagctacatgggtcatgacgtcattcggcaagtttagaaaccaaagtgtagcaaacgggaaaaaagtacacttctncttacagaggtaatccatatgacac

SEQ ID NO: 13234 - DNA, 376 bp, Glycine max
  Clone ID: LIB3094-077-Q1-K1-F1
gcttcctcctcttacgagcctttcctttcagtccattgattcggtgggtgcgggtgcagcgggaccgaggtagaccctgatcggcgtcggcacaccgccggagaacaagatgattgtctgcgtcgccgtcgtcggtcaccagaacaatccgctgtacatacagagcttcacggaagccgatgatgctctcaagctccaccacatcgtccattgctcgctcgatgtggtcgacgagcgagtgaacaatcctaaaaagtctgggccgatgcttaatgagacgtttttgggactgctttatcctattgaaaactacaaagtatatggatatctgactaatacgaaggtgaaatttatcttggtgaccacggatctggat

SEQ ID NO: 13235 - DNA, 300 bp, Glycine max
  Clone ID: LIB3094-077-Q1-K1-F12
acgctcacgcttctcatcatataacatctgtactctaatttctaaatatatccactcttactgggccgtgaattttctaaccggaagtgaattaaatactcatgcttctgtagtgatctataaatgaagatgaatcattaccaaatctccattactctgtacgacgagactatatcagtttttttgacaaactgacgataactcctatatatacatcatgccatacttcattgtttaaaataatatttttacaagaagctctacatattgtatatagcctatgcaacagcatcactaatt

SEQ ID NO: 13236 - DNA, 271 bp, Glycine max
  Clone ID: LIB3094-077-Q1-K1-F7
gatagtttgagtgctcctgactcagctaccctttaccttggttattcactactggtggccggggaacacatgttgtcaaccagcaccattggctcacttatggcattctactttgtgcactacttggtcttatcaaagatgatagatcgtggatctagccttcattgcacattaactatgactatggctgattgatactacttgatcacattgcatgatacggcaaccaatgcataatccaatgaatgaaagcatcttgcgatggcatctg

SEQ ID NO: 13237 - DNA, 472 bp, Glycine max
  Clone ID: LIB3094-077-Q1-K1-F8
gttgttttcgttcctctgaagtctggagtggtggagcttggttcgtttgaaatggtgcctgaagagcagggtgttgtggaaatggtcaggacagcatttggggaatccagtcctggacaggcaaaggtgtttccaaagatttttgggcatgagttaagcctgggggatacaaaatctcagtctataactattagtttctccccaaaggtggaagatgatccgggtttcacttcagactcctatgaagttcaagcactaggggtgaaccatgcttatggaaattcttccaatgggactttaggtgacggtaatgaaggaacattgtttcctcaattgaatcaaatgatggctgggaattttaatgctcaagcaagggttccttgtctagatctcggtaatgaagactcatcatcaattcatgcagatgagcggaagcccaaaaaaagaggtaggaaacctgccaatgggagag

SEQ ID NO: 13238 - DNA, 346 bp, Glycine max
  Clone ID: LIB3094-077-Q1-K1-G10
gtcagtcttcatagctcataacgttattactcttacatatcatggtgtgctgacctgctgggcagggtgtgctctaaccggttcatggccagatgaacatgcatctgaactgcctagtacttatcgtggatctgtaccactttgctattactatttacgacgtgatgcactccaatatgttgaaaaacgctcactatcaatccagatctatcatgctcacattagagctctggctgaagctagctacaaggttttctccctattaaatcagagttctgggacaacatagggagctacagcagccgatggaagcaggggtgaattgcttgtagcagatgacgatgtt

SEQ ID NO: 13239 - DNA, 320 bp, Glycine max
  Clone ID: LIB3094-077-Q1-K1-G11
gtcagtcttaagcgctcaaaacgtccttactctaacatatcagtatgtgctggcatgctgggcaggagatgctctaaccggttcattgtcagattaacatgcatctgaactgtctagtacttatcatgaatctgtaccactttgctattacactttacgacttgatgcactccaatatgtagaaaaacgctcacaatcactccagatcgatcatgttcacactagaactttaaaagaagctgctaaaaaggtttgctccatctacaatcagagatctggaacagcatagggagctacagcagccaatggaaacagatgtg

SEQ ID NO: 13240 - DNA, 275 bp, Glycine max
  Clone ID: LIB3094-077-Q1-K1-G12
gtcactcttcatagatcatgacgtcattactctaacatctcattatatgcaatcttactgggcagtctttgctctaacctgtgcataattagatgcacatgcttctggactgtctattacttaacgtgaatcattaccactttgctattacactttacgactagatgcaatcaaatatttagaaaaatgctctctaatactatatatatatcatgagatcactaaatctttaaattaagctacttaaaaggtgttctccatcttcaatcagagct

SEQ ID NO: 13241 - DNA, 367 bp, Glycine max
  Clone ID: LIB3094-077-Q1-K1-G4
gatagctactattgaagaagcaaaacgattctacccactgttcggactcggtgccaatgtagcccttagtttctctggccggggagtcaaatacttttctaatctgaggcagaatttaggtcctggagttgatggttgggccatctctctgaaagcaatgatgagcatagttgtgggtatggggtttgcaatctgtttcctgtactggtgggtgaacaattatgttcctcttcctactcgtagcaagaagaagaaggagaagcccaaaatgggaacaatggagagcttgaagttcttggtgtcttcaaagtacatcagaaatcttgccacttttagtggttgctttatggaatcagcatcaatcttg

SEQ ID NO: 13242 - DNA, 144 bp, Glycine max
  Clone ID: LIB3094-077-Q1-K1-G8
gaactacccactcgtccgaatcactactattgaataatcataacgattctacccacttttcgcactcttcgccaatataggcctcatgttatctggccgtacagtcaaatacttttataatcttaggcaaaatctatgttctac

SEQ ID NO: 13243 - DNA, 476 bp, Glycine max
  unsure at all n locations
  Clone ID: LIB3094-077-Q1-K1-D8
gttctagatcgcgatctataactagccaatttactctttttcttctcgccctctggcgtgggaggagtttgtaacatggctgctctaccaacggcggagcttagtgacgcaaatgcaacacatgtagcaagttgtgatgtgagggtgttgcatccagtgttcaaggtttacggtggggccaccgcgttctccggccccgttgtcaccgtgaaggtgtttgaagacaacgtgttggtgagggagcttcttgagacgaaaggcgaaggaagagtattggttgttgatggaggaggaagcttgaggtgtgcattggtgggagggaatttggcactgattgcacataacatgggttgggctgggattgtggtgaatggctgcatcagagatgtggatgagatcaatgcaagtgatattggcgtcagagccttggcttctcatncactcagatccaacaaaaagcgcactggtgaaaagaa

SEQ ID NO: 13244 - DNA, 314 bp, Glycine max
  Clone ID: LIB3094-077-Q1-K1-B3
cccacgcgtccgcccacgcgtccggttggtattgaggggaatgttggctggctcgaggcttgtcacaaaggaggttcacagtggatggaactataaggcttcggaccaggcttcattcccctcaaaagtacttccttcatttgtttatacttcaaacttcaaaccacaagatcataggtgtagctacgtacctagctagcttctctctttattttgaaggatctctctacacacacgtcatgtgtgtggttgagaacttgagatgtttccttgcaaaagtgaagttgaaaggaatgttgtctggctcgaggtca

SEQ ID NO: 13245 - DNA, 475 bp, Glycine max
  Clone ID: LIB3094-077-Q1-K1-B4
cggacgcgtgggattttgtaattgtaaggatcaataagttgtttgtttttacttgatggactggaaaaatgctccacaactcataagatacttgtacccaaaagataacctttgtacattctgtgagaaaatcgatgacgaagtgcccaactaaactttattcccaggacttaattggttttatgcccatctttgaactttgttctcgagactgaaaacatattttttcttctgctgcaggtagtattaagcatctttggtccaccttcaagatgttcaatcattgagcaagaggaagatcgttcatcaacctcttcatagctgtaaactactcattggacgatgggatgtccgcaagtagtgcagaagcatctgtaaagtacagaaatttataggcgaaacagaagataggaaatacagcaattttgacatattcgtcccctaacttgtgtatcatggctcttgtacctattta

SEQ ID NO: 13246 - DNA, 315 bp, Glycine max
  Clone ID: LIB3094-077-Q1-K1-B6
aacatgcacccttaagagaaacgtatatcacatgacataactttatatactatggggaacgagttaacttttaacaaccactacacaaaactcatcaaaaagtataccattgtcaacaaagaaacacataaccatatcaaaattccgctagactaaatacgaaacattatttattctcatctgactactaacatatactctaatacacatcattctatcgtcgcataatctaattctctgaactcatactacataattcccaatgatatactcaaacaggataatatctttagcgccgacaccaatatctaccat

SEQ ID NO: 13247 - DNA, 184 bp, Glycine max
  Clone ID: LIB3094-077-Q1-K1-B9
ttttaaaaatgaatactattctttccagcgagtgtataatcatccattacacagtaatcatcacaatacatgccaacttcatctaattttaaatcccctacataaaattaatgcaacacttaaatcatttgaatctcgattttcaactcattactcactaaaactataaaaaaaatcttaaaat

SEQ ID NO: 13248 - DNA, 119 bp, Glycine max
  Clone ID: LIB3094-077-Q1-K1-C1
gttatgtaggttttccaagcttcaacgcatgtaataatgttaagtccaagtctatatatgagtgaatttgaatacaattattctaatatcctatatccaccattcatattaatatttgc

SEQ ID NO: 13249 - DNA, 293 bp, Glycine max
  unsure at all n locations
  Clone ID: LIB3094-077-Q1-K1-C10
atcgtgagaggggcagtatccgagattccgttagttgcaaaaatgaagacgattctttccggcnaaagcatgatcatcccggacggcgtgagcatcaaagttcatgccaaggtcatcgaaattgaaggcccccgcagaaaattggtgcgagacttcaagcatttgaatctcgattttcaactcattactgacgaaaacggtaaaagaaagctgaaaatcgacgcgtggtttggttctcggaaaacatccgccgtcattcgcaccgtcttgaaccacgtggagaatcttatcac

SEQ ID NO: 13250 - DNA, 370 bp, Glycine max
  Clone ID: LIB3094-077-Q1-K1-C11
acgctttcgcaaccatcgcctactcatctcaagttcgtgtccaacttctcgatagtgctttggagaattagcagtctttaaacctgaatccgcccgcttcaaatgtcataccaacttcaaatagcatgaaggacagtccttcttatccgtccgagactcaaagattgtgcatctgtatacccaattcattaacgacgaaaactgtgaaacagaacgcttcctaagacactcacttggtctatgcgctaaacaagctcatcattcacaccaaatagacctacaaggagcttgagattatatgcctacccactggctatcatttaagtatggattcctttattgaacattgtctcaaacaatttaagcatct

SEQ ID NO: 13251 - DNA, 383 bp, Glycine max
  unsure at all n locations
  Clone ID: LIB3094-077-Q1-K1-C12
tttgaatacattccttgtagtttatactgaaagatgggtttgaagatggcgttactgatccgaggggtttccctcatgctccttttggtctcctctgaggtggcatccacgaatacaaaagaggaggcaaatggagtggatgatgccaaatatcccggtggaagctatggagggggttacccaggtcatggcggtggcggttatcctggccatggcggtggcggttatcctggccatggcggtggtggtggctatcctggtcatggtggtggccaccctggtcatggtggcggctaccctggccgtggtggtggatactgtangcatggctgttgcggtggccggacatacaacggaggttgcagaaggtgctgctataacgc

SEQ ID NO: 13252 - DNA, 458 bp, Glycine max
  Clone ID: LIB3094-077-Q1-K1-C2
aattgtacccttaggagaaacgaaaatgacatgacatcctctgatctgatctgtgtggcgaggtcgcggttgacgacgactcagcgaagctgaactgagagtggagcttcgtccacagggaaacgcataagcatatcgaaattccggggaagaaagaaagaaacataatgtgttcttcggagactatcaacatcgctgcgagtacacagaaacttgatgttgataatcgaattgctctccgcttctactacagaatcgccgataatatcctcaaacaggctgatatctttcgtgcagagacaaatattgttgatctgtatatcatgctcctaagattttccagtttggtctccgagacaatacctcgtcaccgagattatagatcatcttcacaaggcaaaaaagaagctttgagaaagaaactgttacattctgtgaatgaactagagaaattgaaa

SEQ ID NO: 13253 - DNA, 346 bp, Glycine max
  Clone ID: LIB3094-077-Q1-K1-C4
caattgtacccttattagaaacgaaaatgacttgacatcctctgatctgatctatatttctaggtctctgtttactactactcagctaagctatacttatagtggaacttactccacagggaaacgcataaacatatcttaattcctgtgaagaaagaaagaaacataatgtgttcttcgtagactatcaacatcaatgctagtacacataaacttgatcttgataatcgaattgctctccgcttctactacataatctccgataatatcctcaaacaggctgatatcttttttgcataaacaaatattgttgatctgtatattatgctcctaaaatttttcagtt

SEQ ID NO: 13254 - DNA, 93 bp, Glycine max
  Clone ID: LIB3094-077-Q1-K1-C5
aattacccgggtccgagccgcacgcgtgccgcaatgggttactccttaggagtaaacttataaatgacttatgacatcctactgatcctgatc

SEQ ID NO: 13255 - DNA, 365 bp, Glycine max
  Clone ID: LIB3094-077-Q1-K1-C7
cccacgcgtccgcgacggtgacaactgtagttcgtgtacgaaataaattcaattgtacacattggccattttccttaccttaggtcaatttattatttaggttactggcggttttataaataaattttacacattggtcattttcctttcgtttctgaacttcgttaaaatgagttttttgtccaagttgggttaatgcgtatatatagtttttagatttcttattgctaaaagtgtgattttttttgtttgttctgtaacttctttgtgggcttccaatgtggaccccaaatttatgtactggttcggccgtatagccctttgttgtccactaaactacctttatgctgcgtgcctttgctatc

SEQ ID NO: 13256 - DNA, 370 bp, Glycine max
  Clone ID: LIB3094-077-Q1-K1-C8
tccacacatcctcaactataactactctatttactctactaaatatattcaattgtacacatgtgacattttaacaaccttatgtcaatcaattatttatcttactgacccatattataacataaatattacacatatgatcatattcctttccattctgaacttaattaaaacgattttttcatccaattctacttaattcttatatatattaattagatttcttacttctaaaagtttaattatcttcgttagacctataacttcttaatagtcttccaatttataccccaaatttatatactggttcattcgtataaccctattttgcccactaaactacctatatgcttcgtgctcttactatcaa

SEQ ID NO: 13257 - DNA, 305 bp, Glycine max
  Clone ID: LIB3094-077-Q1-K1-C9
atcatgagaacggcaatacccgctattacgttactttcaaaaattaagacaattctttccagcaacgccatattcatcccggacaccgtgagcatcaaagtctcattccaagatcatctaaattcaaggccccctctcaaaattgatgctagacttcaagcatttcaatctcgattttcatctcattactgacgaaaactctaaaaaaaaccttaaaatctacccatgaattgcatcacggaaaacatacaccaccattcacaccgtcttaaaccacattgataatcttatcaccggcatcacca

SEQ ID NO: 13258 - DNA, 193 bp, Glycine max
  Clone ID: LIB3094-077-Q1-K1-D10
tacaccactcataccaatctattcacacttcaactaattaccaaaacccttcattacatttctaaaaccaacaatgattctaaatacttactcccatctcataactcatctataatctccaattatacttttcatcctccctatcactctattaatcatctcaaactctatctatcccatcatcccaccatta

SEQ ID NO: 13259 - DNA, 137 bp, Glycine max
  Clone ID: LIB3094-077-Q1-K1-D11
taccaacttcctctctaaaaacttacccactctaaaatctaattaacatcattatttatcatcaatgatatatattaccagtacactattcgaacaataatctactccaaatcctattaattataaacaaccttaac

SEQ ID NO: 13260 - DNA, 183 bp, Glycine max
  Clone ID: LIB3094-077-Q1-K1-D12
acgctcacgcttaaaagatattaacgacatcactttcacatctaattatattcaatatttctcagcagtgtttgctcttaccataccatagtcaaacaatcatgcttcttaatcgccaattacttaattttaaacatctctaatttcccatatcaatccaacactatatgcaattactttttt

SEQ ID NO: 13261 - DNA, 431 bp, Glycine max
  Clone ID: LIB3094-077-Q1-K1-B2
aaatgtacgcttaagagtaacgaacacgacttttcatcctcttatctcatctatattgcgagctcaagtgagactactactcagcgatgctcaactgagagtatatcttcatccacacggtacctcatatacatatcttacattctataaagaaataatgaaacatcatgtgatcttaggagactatcaacatcgttgttagtactcaaatactagatcttgataatcgtattactctccgcttatactacataattagccataatattcttaaacatgctcatatctttcgtgcatagacaaatattgctgatctgtatatcatgctcctaaaattctccagtttggtcttctatacaataccttgtcaccgagattatatatcatattcacacttcataaaagaaacttttataaataaactgatatat

SEQ ID NO: 13262 - DNA, 454 bp, Glycine max
  Clone ID: LIB3094-077-Q1-K1-D2
caattgtacccttaggagaaacgaaaatgacatgacatcctctgatctgatctgtgtgtctaggtcactgttgactacgactcagcgaagctgaactgagagtggagcttcgtccacagggaaacgcataagcatatcggaattccggggaagaaagaaagaaacataatgtgttcttcggagactatcaacatcgctgcgagtacacagaaacttgatgttgataatcgaattgctctccgcttctactacagaatcgccgataatatcctcaaacaggctgatatctttcgtgcagagacaaatattgttgatctgtatatcatgctcctaagattttccagtttggtctccgagacaataccttgtcaccgagattatagatcatcttcacaaggcaaaaaagaagctttgagaaagaaactggtacattctgtgaatgagctagagaaat

SEQ ID NO: 13263 - DNA, 470 bp, Glycine max
  Clone ID: LIB3094-077-Q1-K1-D7
aaaaataggttcatagttgttatctccagctttacgatgaagtttgaagatttgggagaagggtgcatttcaaaaatactgtccgacaccactcgtgcggatgtatgcaggctttctctggtttccaaagcctttcattccgcggctgaagccaacactgtgtgggattgctttctcccctctgatttgtcctctatcatctccccttcttcttccgttcctccctttcgctctattaaggatctctatctctatctctccgatcgtcccaccatcatcgatcaatgtataaagagttttcaattggagaagcggactgggaacaagtgttacatgctttccgctagagatctgagcattatatggggtgacactactcattattggtagtggacaaccctaccagagtccaggttcgaagaagttgctaggcttcgagctgtgtgttggtttgacattactgggaggat

SEQ ID NO: 13264 - DNA, 436 bp, Glycine max
  Clone ID: LIB3094-075-Q1-K1-F5
gcttcctcctcttacgagcctttcctttcagtccattgattcggtgggtgcgggtgcagcggaaccgagctagaccctgatcggcgtcggcacaccgccggagaacaagatgattgtctgcgtcgccgtcgtcggtcaccagaacaatccgctgtacatacagagcttcacggaggccgatgatgctctcaagctccaccacatcgtccattgctcgctcgatgtggtcgacgagcgagtgaacaatcctaaaaagtctgggccgatgcttaatgagacgtttttgggactgctttatcctattgaaaactacaaagtatatggatatctgactaatacgaaggtgaaatttatcttggtgaccacggatctggatgttaaagatgcggatgtaaggaattttttcaggaggttccatgccgcatatgtagatgca

SEQ ID NO: 13265 - DNA, 332 bp, Glycine max
  Clone ID: LIB3094-075-Q1-K1-F7
tgctcctattacgagcctttcctttcattccattgattcctatcatacacttgcaagggtaaccttctaaacccttatggacgtattcacaccttcagagaacaatatcaatttctacatcaccaatcatctttcaccataacaatccgatctacatacaaaactttacctacgcccaatatactctaaaacttcaccacaatactcattgctccctccatatatactaacaatctattgaacaatcctaaaaaaatcttgccctatactttaataaaagtttttctgacttctttatcccatctaaaacctacaaattatattcatatctt

SEQ ID NO: 13266 - DNA, 427 bp, Glycine max
  unsure at all n locations
  Clone ID: LIB3094-075-Q1-K1-F8
ctcggttaacttatggaactattggtgggaggtttaagaaaggagaaaacccgtttgttgaggaggcgtatcagcgagtggcattggaccaactccttaagatagctggtattacagatgatgacttgttgattatgtcagatgttgacgagattccgagtgctcacactattaacctcttgaggtggtgtgacgacgtgccttcagtccttcatcttcagctgaagaactatctatactcctttgagtttctcatggatgatggcagctggagagcttctgttcacagatatcagagtggtaagactaggtatgcacattaccgncagtccgataacttattggcggatgctggttggcattgcaacttttgcttccgccatatcagcgatttcatctttaagatgaaagcgtacagtcataacga

SEQ ID NO: 13267 - DNA, 270 bp, Glycine max
  Clone ID: LIB3094-075-Q1-K1-G1
atcaggcttcagagctcataacgacattacttttacatctcattatatacaaacatgctgagcagcgtttgctctaacctgtgcatggtcagataaacatgcatctgaactgcctattacttaatgtgaatcattaccactttcctataacaatttacgacatgattcaatcaaatatttagaaaaatagttcactcatactacaaatctatcatgctcacattataactctaaattaagctattaaaaatgatttctccatctaaaatc

SEQ ID NO: 13268 - DNA, 362 bp, Glycine max
  Clone ID: LIB3094-075-Q1-K1-G2
aaacccgtttcttgagcagcgttatcatttaatggcattgggccaactccttaacatagctggtattacatatgatgacttgttgattatgtcagatgctgactagattccgagtgctcacactattaacctcttgacgtggtgtcactacgttccttcagtccttcatcttcaccttaagaactatctatactcctttgagtttctcatggatgatgtcactctttagagcttctgttcacagatatcatatttttaatactaggtatgcacattacctccagtcccataacttattgactgatgctggttgtcatttcatcatttgctttcgccatatcatctatatcatctttaaaatt

SEQ ID NO: 13269 - DNA, 138 bp, Glycine max
  Clone ID: LIB3094-075-Q1-K1-G7
gacccacgcgtgcgcccacgcgtccgccagttgacaacatcagttaaaatacaaattaactgcatgctaactcagaggcgttctatataacctgagatccataacaaataaaaaaaaaaaggacggcctatctataaa

SEQ ID NO: 13270 - DNA, 455 bp, Glycine max
  Clone ID: LIB3094-075-Q1-K1-G9
cagaacagggactcactctcttcgcagcggcactctcggtggctttcatcttctcgggggtggaagatgtacacatcgaggaagaaaattcacaaggataaggatgctgagccaactgaatttgaggaatcagttggacaggcattgtttgatctagaaaataccaacaatgagctgaaaagtgatctgaaagatttatacataaactcagctgtccaaattgatgtttctggcaaccgaaaggctgtggttatccatgtcccctacagactaaggaaaaggatccggaagaatcatgtcaagcttgggaaaaaacttgggaaaaaagttaatggaaaagatgtaatcttgattgccaccaagaagatagtaaggccaccaaagaaaggttctgctgttcaacgcccccgcaccagaacacttactgctgtacatgaggcaatgctggaagatat

SEQ ID NO: 13271 - DNA, 351 bp, Glycine max
  unsure at all n locations
  Clone ID: LIB3094-075-Q1-K1-H3
ataatgatgatattgaggttgaggttgtggttggtgttgatctttggttgaagattcaanagtaggcattgttagatgttgatcaagaaccaattttatccagctactatttcagttccattttgtctcacaaatctttggagagtgccttggccaaccacctctccacaaatttgagcagcttgagccttccaagcagcaccctttttgaccttttcatgggtgttttggttgatgatggagatgatgacatcgtaggtgctttgaaagatgatttgataacttgttaagagagggacccttgtttgattaaattatgtgccttggcttcttaaatttaaagggtttttt

SEQ ID NO: 13272 - DNA, 364 bp, Glycine max
  Clone ID: LIB3094-075-Q1-K1-H4
ataatgatgatattgaggttgaggttgtggttggtgttgatctttggttgaagagtcaatgtgaggtttggttagatgttgatcaagaaccaattttatccagctactatttcagttccattttgtctcacaaatctttggagagtgccttggccaaccacctctccacaaatttgagcagcttgagccttccaagcagcaccctttttgaccttttcatgggtgttttggttgatgatggagatgatgacatcgtaggtgctgtgaaggatgatttgatagctgttaaagagagggaccctgcttgcataagttatgtgcattgcttgcttaatttcaagggttttttggcatgtcaggctca

SEQ ID NO: 13273 - DNA, 274 bp, Glycine max
  Clone ID: LIB3094-077-Q1-K1-A10
atcgtgcgaggggcagtgaccgagattccgtttgttgtaaaaatgaagactatgctttccagcgagggtatgtacatccgggagggcgtgagcatcaaagtacatgccaaggtcatcgaagttgcaggcccccgcagaaaattggtgcgagacttcaagcatttgaatctcgattttcagctgattactgacgaatacggtaaaagacagcttcaaatcgacgcttggtttggatctcggaaatcatactgcatcattcgcaccgacttgagcc

SEQ ID NO: 13274 - DNA, 247 bp, Glycine max
  Clone ID: LIB3094-077-Q1-K1-A11
aaaatgaatactatgctttccagccagggtattaacaaccaggacacagagatcatcacagatcatgccaaggtcaacaaagattaaggcccccgcataaaattgctgcgagacttaaagcatttgaatctcgattctcagctcattactgacaaaaactgtaaaacacagcttaaaatcgacgcttacccagtatctcggaaatcatactacatcattcgcaccgacttgagccaattggataata

SEQ ID NO: 13275 - DNA, 376 bp, Glycine max
  Clone ID: LIB3094-077-Q1-K1-A3
cccacgcgtccgggaacagaagcttttccagatttgggtaaacactgccagcaccgcgattgcaaccagctcgattttcttcctttcacctgcgacggttgccaacagatcttttgtttggaacacagatcctacaagtcccacgcgtgcctgaaatccgaccacaacagcagaaaggttgttgtttgcgaagcatgttccatgtccatcgagaccaccggccatgtgggacaagacgaggaggcaatcttgcagaagcaccttaagtctggtaattgtgaccctaccaagaagaagaaaccaattagtcccgtcaagcgttgcatggaggttttgacgttttccaacaccagcacatgtaaaacttgccacatta

SEQ ID NO: 13276 - DNA, 452 bp, Glycine max
  unsure at all n locations
  Clone ID: LIB3094-077-Q1-K1-A5
caattttacccttaggagaaacgaaaatgacatgacatcctctgatctgatctgtgtggcggagtcgcccttgacgacgactcagcgaagctgaactgagagtggagcttcgtccacagggaaacgcataagcatatcggaattccggggaagaaagaaagaaacataatgtgttcttcggagactatcaacatcgctgcgagtacacagaaacttgatgttgataatcgaattgctctccgcttctactacagaatcgccgataatatcctcaaacaggctgatatctttcgtgcagagacaaatattngtgatctgtatatcatgctcctaagattttccagtttggtcttcgagacaataccttgtcaccgagattatagatcatcttcacaaggcanaaaagaagctttgagaaagaaactgttacattctgtgaatgagctagagaa

SEQ ID NO: 13277 - DNA, 448 bp, Glycine max
  unsure at all n locations
  Clone ID: LIB3094-077-Q1-K1-A8
gccagactgggttaagcaaattgctttaaaatttttgaagccagataagaaaactgctgaccgggttggatatacaaaaatgaaggccagcaccaatgttaggcatattgttcttccttgtactagttctgccagggcccaacttatcccagatattattcgctgctatagcagtggatgccggacaattgtatttaccgagacacaagaatgtgcttctcagcttgcagggatcttgaatggagcaaaagctctccatggtgacatacagcaatcaacacgtgaggttactctgtctggcttaggtctggaaattatgcattattgcacaatgtgcagctcgaggtcttgatatcaatgatgttcagttaattatccagtgtgaacccccacgagatgtagaagcctatatncatcgttctggacgcacaggaagagcangtaatac

SEQ ID NO: 13278 - DNA, 119 bp, Glycine max; identical to SEQ ID NO: 12932
  Clone ID: LIB3094-077-Q1-K1-B1

SEQ ID NO: 13279 - DNA, 348 bp, Glycine max
  unsure at all n locations
  Clone ID: LIB3094-077-Q1-K1-B10
atcgtgagaggggcagtagccgagattccgtgagttgcaaaaatgaagacgattctttccagcgagggcatgaacatcccggacggcgtgagcatcaaagttcatgccaaggtcatcgaagttgagggcccccgcggaaaattggtgcgagacttcaagcatttgaatctcgattttcagctcattactgacgaaaacggtaaaagaaagctgaaaatcgacgcgtggtttggttctcggaaaacatccgccgtcattcgcaccgncttgagccacgtggagaatcttatcaccggcgtcaccaaaggctaccgctacaaaaatgagggttcgttatgccccattttc

SEQ ID NO: 13280 - DNA, 394 bp, Glycine max
  Clone ID: LIB3094-075-Q1-K1-F4
gcttgctcctattacgagcctttcctttcagtccattgattccgtggatgctggtgcagcgaaaccaagctaaaccctgatcggcgtaggcacaccgtcggagaacaagatgattgtctgcgtcggcgacgtcggtcaccagaacaatccgatgtacatacagagcttcacggacgccgatgatgctctcaagctccaccacatcgtccattgctcgctcgatgtggtcgacgagcgagtgaacaatcctaaaaagatctggccgatgcttaatgagacgtttttgggactgctatatcctatcgaaaactacaaagtatatggatatctgactaatacgaaggtgaaatttatcttggtgaccactgatctggatgttaaagatgcggatgta

SEQ ID NO: 13281 - DNA, 289 bp, Glycine max
  Clone ID: LIB3094-077-Q1-K1-B11
atcgtgagagggtcagtatccgatattccgttagtttcaaaaatgaatacgattctttccagctaagtcatgtacatcccggacggcgtcagcatcaaagttcatgccaaggtcatcgaagtttatggccccctcagaaaattggtgctagacttcaagcatttgaatctcgattttcatctcattactgactaaaactgtaaaagaaagcttaaaatcgactcgttttttggttctctgataacatcctcctccattctcaccgccttgagccacttttagaatctta

SEQ ID NO: 13282 - DNA, 286 bp, Glycine max
  Clone ID: LIB3094-077-Q1-K1-B12
aacgtgagaggggcagtgacccggattcggcttgtcgtacaaatgaagactatgcttagcagagacgcgattaacatccacggcggggtgagcatcagagagtatgccaaggtcatcaaagttgacgatacccgtataaaattggtgcgagacttcaagcatttgaatctggattctcagctgactactgacatatacggtagtacacagctgcttagcgacgcttggtttgtgtctcggaaatcatactacatcattcgcaccgatttgagccaactggagaata

SEQ ID NO: 13283 - DNA, 456 bp, Glycine max
  unsure at all n locations
  Clone ID: LIB3094-075-Q1-K1-D1
acgcccacgcgtccgcttctctctctctctctctgctttacttgcttgaagcaatggccaaagggttgggatcagtgctgctgtttctcctcgtagctgtgagtaatgtgtttgctgtagagcttgaacttgaaactcttccaccctcttaccctcaccctcaccctgttcactcccccacaccagcacctcttcacccaccagcaaatgctcctcacccacaccaccaccaccaccaccaccaccctccagcaccagcacctgttccttcaccttctcaccacaattaccctcctacccatgcccctgctaagcctgctactcaccaccatcaccatcaccctcctgctcctgttaatccacctnctgttccggttcatcctccagttaaacctcctgttccggttcaccctccagttaaacctactgttccggctgaccctcctgttaaacctc

SEQ ID NO: 13284 - DNA, 444 bp, Glycine max
  unsure at all n locations
  Clone ID: LIB3094-075-Q1-K1-D2
cggcgaggagcctccagagaagaaggtccctcgcactatcgagaacacgagggaactcgacgagaccgtttgcaagcccgatgacgaagagttatttgctggaaatgatgctgatgaatttggtccaattttgaatcagcaacaaactcccaagatattaatcaccacttgccgcttccattctactaggggacctgcttttatatcagagttgctttcagttataccaaatgcacattacttcaagagaggaacatatgatctgaaaaagattgtagaatatgcaaagaagaaggacttcacttctattatagttgttcacaccaatcgtagggaaccagatgctctnttaatcataggtgtacctgatgggcctactgctcatttcaagctctcgaaacttgttttgcgcaaggatatcaagaatcatggaaatccaaccgg

SEQ ID NO: 13285 - DNA, 348 bp, Glycine max
  Clone ID: LIB3094-075-Q1-K1-D3
cccacgcgtccgcttctctctctctctctctgctgtacttgcttgaagcaatggccaaagggtagagttcagtgctgctggctctcctcctaacatacactaatgtgcttgctgtatagcttgtacttgaaactttttcaccctcataccctcaccctcaccctgttcactacgccacacaaacacctctttacccaccagcaaatgctgcacaaccacaccacaaccaccacgaccaccagtctccagtaccaacacctgttccttcaccttctcaccacaattactcttctacccctgtccctgctaagcctcataatcaccaccatcaccatcaccctatttctc

SEQ ID NO: 13286 - DNA, 419 bp, Glycine max
  Clone ID: LIB3094-075-Q1-K1-D4
gaatccagacgcttctatgtacgaacgagattatagagttaaaaaggttactactgggagggggcatagcctggagctgagctgacaaaactcccaaccccaacctcaaccttaacctctcctcactttcttttcaaccagaactatgattaagctttgtaaagtaaaggaaaaacagagagaactggcagaaaatgcgagtggcggaccacccgttaagaagcaaagtgcctgctagttgcgtcttcacaaagatataagcgagctgaatctaccaaaatcatgtaccatgcaattccccaatggcaaagatgacctgatgaactttgaagtttcaattcgacctgatgatggatattacttatgtggcacattttcgttttcctttcaagtgtcctcccattattcccatgaagcac

SEQ ID NO: 13287 - DNA, 447 bp, Glycine max
  Clone ID: LIB3094-075-Q1-K1-D5
gaatccaaacgcttctatggacgaaagagaaaatagagttaaaaaggttactactcagatggtgcagagcctggagctgagctgagaaaacccccaaccccaacctcaaccttaacctctcctcactttcttttcaaccagaactatgattaagctttttaaagtaaaggaaaaacagagagaactggcagaaaatgcgagtggcggaccacccgttaagaagcaaagtgccggcgagttgcgtcttcacaaagatataagcgagctgaatctaccaaaatcatgtaccatgcaattccccaatggcaaagatgacctgatgaactttgaagtttcaattcgacctgatgatggatattacttaggtggcacatttttgttttcctttcaagtgtctcccatctatccacatgaagcaccaaaggttaaatgcaagacaaaggtcta

SEQ ID NO: 13288 - DNA, 443 bp, Glycine max
  unsure at all n locations
  Clone ID: LIB3094-075-Q1-K1-D6
cccacgcgtccgcttctctctctctctctctgctttacttgcttgaagcaatggccaaagccttgggatcagtgctgctgttgctcctcgtagctgtgagtaatgtgtttgctgtagagcttgaacttgaaactcttccaccctcttaccctcaccctcaccctgttcactcccccacaccagcacctcttcacccaccagcaaatgctcctcacccacaccaccaccaccaccaccaccaccctccagcaccagcacctgttccttcaccttctcaccacaattaccctcctacccctgcccctgctaagcctactactcaccaccatcaccatcaccctcctgctcctgttaatccacctnctgttccggttcatcctccagttaaaccttctgttccggttcaccctccagttaaacctcctgttcccgctcaccctcct

SEQ ID NO: 13289 - DNA, 439 bp, Glycine max
  Clone ID: LIB3094-075-Q1-K1-D7
cgccatgctgttcttggagctacaaactcttgtcctgatttgatattgactggacaccaagataatgcagaatttgctcttgcaatgtgcccaactgaaccctatgttctttcaggaggaaaggacaaaacagtggtgttgtggagtattgaagaccatataacatctgctgccacagactccaaatctggtgggtcaattatcaaacaaaactctaaatctggagaaggcaatgataaaactgctgatggccctactgttggaccacgaggcatttattgtgggcatgaggatacagttgaagatgtgactttctgcccatctagtgcacaggagttctgtagtgttggagatgattcttgtctcatcttatgggatgcacgtgttggctctagccctgtggttaaggttgagaaagctcataatgctgatcttcact

SEQ ID NO: 13290 - DNA, 219 bp, Glycine max
  Clone ID: LIB3094-075-Q1-K1-E1
ttacgaaacataaatatttattcggtcaggatatataatcacgatgaacatactacgaacaatactatactcctagtcatttttataataaacaacattattaattacccatatcatattatcactctacttataatttaatgatatcacctcaataccacataattcaagtaatattaccaacctcaaaaccttatactacaacatgctatcacttac

SEQ ID NO: 13291 - DNA, 438 bp, Glycine max
  Clone ID: LIB3094-075-Q1-K1-E2
cgccatgctgttcttggttctacaaactcttttcctgatttgatattgactggacaccaagataatgcagaatttgctcttgcaatgtgcccaactgaaccctatgttctttcaggaggaaaggacaaaacagtggtgttgtggagtattgaagaccatataacatctgctgccacagactccaaatctggtgggtcaattatcaaacaaaactctaaatctggagaaggcaatgataaaactgctgatggccctactgttggaccacgaggcatttattgtgggcatgaggatacagttgaagatgtgactttctgcccatctagtgcacaggagttctgtagtgttggagatgattcttgtctcatcttatgggatgcacgtgttggctctagccctgtggttaaggttgagaaagctcataatgctgatcttcac

SEQ ID NO: 13292 - DNA, 295 bp, Glycine max; identical to SEQ ID NO: 11959
  Clone ID: LIB3094-075-Q1-K1-E3

SEQ ID NO: 13293 - DNA, 398 bp, Glycine max
  Clone ID: LIB3094-075-Q1-K1-E4
atatttttcgttttaaaatttacgaaacataattatgtattggtttatttatataatgagaggaacataaactaacaatcatattctgctagtcatttttataataaacaacattatgatttattcatatcacatgatcactttacttataatttatggatatcatctcaataccacattattcaagttatattaccaaaatcaaatccttatcctacattattcttatcatctacatttatcattacttcattactcaagtttaaaaaccaaatttttacatacttttaataaaattacacttctacttacatatttattctatattacacaataacttttaaatattatattataccatatttttaatcattctaatatacaatttcttacattac

SEQ ID NO: 13294 - DNA, 364 bp, Glycine max
  Clone ID: LIB3094-075-Q1-K1-E5
ccgaccgaccgacgcgtacgcccaggcgtccgctcgagaatatgacccgttttaaaatttacgaaacataattattgattagttatgatatataatgagagggacataaacgaacaatcagatgctgctagtcatttgtataataaacaacattatgatttattcatatcacatgatcgctttacttataatttacgtatatcaactcaataccacatgattcaagtaatattaccaaaatcaaagccttatcctacaagatgcggtcatctacattatttcatgacttcatttcttcaagtttataaaccaaagtgtatcaaacttgaaaaaaatacacttctaattacagaggtatcccatt

SEQ ID NO: 13295 - DNA, 299 bp, Glycine max
  Clone ID: LIB3094-075-Q1-K1-E8
gcgcttgatgatcccaacactttcggtaacaggtattcacaggatgctgaagcttggactgagcgttgaggaagatgctggtgaagcagatgctgacatgcctcctcttgaggacgctgatgcagatgctgagggtagcaagatggaagaagttgattaaatctgacttaattgcctgttacgtttttagaaacaatgattggagaaacagtctttttactatgttttatgttttttgaattttcgaaattttggaacgttggctagttaggtgccgtatgtagtagtttctttatggt

SEQ ID NO: 13296 - DNA, 337 bp, Glycine max
  Clone ID: LIB3094-075-Q1-K1-F10
cccacgcgtccggtgatttcagtgagtgatcggtgttcacttgatctcatcataatcgtcggcgtcaattgaagaagatgccgatcagaaacatcgccgtcggaaggcctgaagaggcgactcaccccgacacgttgaaggcggctttggctgagttcatctcaacctttaatttcgtgttcgccggctcaggcttcggcatcgcctacaacaagctcaccgacaacggcgctgtcacccctgccgggcttatcttcggcttcatcggccatgcattcgccctttttcgtcgccgtttccgtcggggccaacttttccggcgggccacttaaccccg

SEQ ID NO: 13297 - DNA, 453 bp, Glycine max
  Clone ID: LIB3094-075-Q1-K1-F11
gagttccagaggttcaaccatacttctcttcttccctttacatccgcactgtttcctcgggtacagccataatggttcgcattctgacggaaaatggcggagtggaacgcatggaggagatcatcagggaccatttggaccccatttcaaagcaagtgttggggatctggttggatcattgtgcttgtgccaagcgacaagttggagaggcagaaagagcttatcttaagaaaagggatggtctcattagaaacaagaccattgagattgatcttggttcaagctttcccagattgtttggtccagaagtagcaaaccgggtactggatgctatcaaggagtattttacagtctgagatgcaaatttatttggaattggtggatattctatggattacatacacgtacctaatttgctgtgcaatctaatgaggcctcagtatttgctgaaaa

SEQ ID NO: 13298 - DNA, 429 bp, Glycine max
  Clone ID: LIB3094-075-Q1-K1-F3
gcgttcggcttgctcctcttacgagcctttcctttcagtccattgattcggtgggtgcgggtgcaacggggaacctttctagaccctgatcggcgtcggcacaccgccggagaacaagatgattgtctgcgtcgccgtcgtcggtcaccagaacaatccgctgtacatacagagcttcacggaggccgatgatgctctcaagctccaccacatcgtccattgctcgctcgatgtggtcgacgagcgagtgaacaatcctaaaaagtctgggccgatgcttaatgagacgtttttgggactgctttatcctattgaaaactacaaagtatatggatatctgactaatacgaaggtgaaatttatcttggtgaccacggatctggatgttaaagatgccgatgtaaggaatttttttaggaggttccatgc

SEQ ID NO: 13299 - DNA, 446 bp, Glycine max
  Clone ID: LIB3094-075-Q1-K1-C7
cttctccttctcaatcttgtaattctatttcctccaccataatgctgcgcaagcttgtgtgagggccacgcaagaacaagcctggcacagttcccgttcacctcaacgtctatgatctcaccccaatcaacggctatgcctattggcttggccttggagtctaccattctggggttcaagttcatggattggaatatggttttggtgcgcacgagcacgacacaacggggattttcgaagtccaacccaaacactgccctgggttcactttcagaaagtcaattttcatcggaacaacagatctgggtccgaaggatgttcgagcattcatggagaagctggctcaggattactccggcaacacctatcatctcatttccaagaattgcaaccatttctgtaacgatgtttgtctcaaattgaccggaaagtcaatccctcgttgg

SEQ ID NO: 13300 - DNA, 362 bp, Glycine max
  Clone ID: LIB3094-074-Q1-K1-H9
gttgccgggctctaccgtggtttcaacatctcatgtgttggaatcatcgtgtatcgtggtgtgtactttggattgtatgattctgttaaaccagttgtcctcacagggtcattgcaggatagcttttttgccagctttgcccttggatggctcatcaccaatggtgcaggtcttgcatcatacccaatagacactgttagaagaagaatgatgatgacctctggtgaagctgtcaagtacaagagctccttggatgcattcacacagatcctcaagaatgagggtgccaagtccttgttcaagggtgccggtgccaacatcctccgtgccgttgccggtgctggtgtgcttgctggttatga

SEQ ID NO: 13301 - DNA, 416 bp, Glycine max
  unsure at all n locations
  Clone ID: LIB3094-075-Q1-K1-A10
cttttctactttgagtcttcttgatccttctttttctccttgaactcaaacatggcagatgaggtggttctgctagatttctggccaagtccatttgggatgagggtcaggattgcacttgctgaaaagggtatcaaatatgagtacaaagaagaggacttgaggaacaagagtcctcttctcctccaaatgaacccggttcacaagaagattccggttctcatccacaatggcaaacccatttgtgaatccctcattgctgntcaatacaatgtaggaaggttggaattgccagaaatccctggtggccttttgaccttaaccaaaaagttaagcttaaatcttggcctaatatggtgattagaagatatttgaacctggaaaggagaatttgaccttcaaaggagaagaaaaag

SEQ ID NO: 13302 - DNA, 399 bp, Glycine max
  Clone ID: LIB3094-075-Q1-K1-A3
cccacgcgtccggtgatttcagtgagtgatcggtgttcacttgatctcatcataatcgtcagcgtcgattgaagaagatgccgatcagaaacatcgccgtcggaaggcctgaagaggcgactcaccccgacacgttgaaggcggctttggctgagttcatctcaaccttcatcttcgtgttcgccggctcaggctccggcatcgcctacaacaagctcaccgacaacggcgctgccacccctgccggcctcatctccgcctccatcgcccatgcattcgccctcttcgtcgccgtctccgtcggcgccaacatctccggcggccacgtcaaccccgccgtcaccttcggcgccttcgtcggcggcaacatcaccttccttcgcggcatcgtctacgtca

SEQ ID NO: 13303 - DNA, 274 bp, Glycine max
  Clone ID: LIB3094-075-Q1-K1-A7
cacgctcggaatttcattgattatctttgttttttgatctatcataatcatcagaacagtttaattatataccgatcaggacatcacctcttaagtcctcaacatgctactcacccctacacttttaatgctactctatctcatttcatctcaaccttcatcttcatgttcaccctctcattctctctcatcaactacaacaatctcaccgacaacttctcatacaccccttccatcctaatcttcgactccatcacccatacattaaccctct

SEQ ID NO: 13304 - DNA, 439 bp, Glycine max
  Clone ID: LIB3094-075-Q1-K1-A8
cggacgcgtggggtttcctagtatgcaaggtaaagaatcagcaaatttcaaccccggatccgcgagtgacatgttgacaaaagtctaccgagttgcattttgttcttgtaacctcctcaacccactggaggtcgtgatctgtaaattttgagtgaattatacaacaaattcttgaaaaagaaatgattttctgttctgagctgctgcttattgatcgatgaatccagctgcaattattttcgaagatggcaataaaatctcttctgcggtgttatctctttgactgaattccaaattttgtaagtataatagttggctatgaaagagactgtaccaagaagcatagtgtgagagtcaaagatcagttgttaagtatgagatgtgagaacattttgtgaatgtatattgctaaatagaaattgcaaagatgaatatagat

SEQ ID NO: 13305 - DNA, 326 bp, Glycine max
  Clone ID: LIB3094-075-Q1-K1-A9
cccacgcgtccgtcaagcattgcatccctcttgatttgtagtttgttttgtgctttagatagaagttctgccaaatcaagaggggttttaagatcatagtgtgtgttttgcaacaatggctaagttctttgctgctatgatcttggcactctttgccatttccatacttcaaacagtggtaatggctgctaatgaacaaggaggccacttgtatgacaccaagagcaaatatggaagtggaagtgtcaagagttaccaatgcccatcacaatgctcgaggagatgtagccagacccaataccacaagccctgcatgtttttctgtc

SEQ ID NO: 13306 - DNA, 286 bp, Glycine max
  Clone ID: LIB3094-075-Q1-K1-B10
cccacgcgtccgttccagaacgccggcgaccgaacccgaattgaagtccagagaagacggcagtgccgcgagttacagcaataataatattaataacaacagcgacaggggtggcagtaacagtaatagtaattgtaacatggaacatcatcatcacagccaccatgtgaatagtgggttcttgccctgaaaatagtagttattgtatttatttattatagcttttttcttttcttttttttaactttgtacctttttatctcttcaagttgatcaaggagatcgg

SEQ ID NO: 13307 - DNA, 405 bp, Glycine max
  unsure at all n locations
  Clone ID: LIB3094-075-Q1-K1-B2
cccacgcgtccgcccacgcgtccgccgaaaccgattacaaattttccagttccctgatctagccgcgctgtggaaagaacgaagacacgggaaagaaaaatggtgctagaacaagcagtatcatcatcaagcaccttgaggaacgttttcaccaatcccaaaaccctaatttcaaaaccccaattccaagtcgccgcttccccttcatggaaaccacagcagccgcgctgggaagggtggctggggataaacttgaagtgctccatgacaacaacaacaacgccatcatcataccctaagccctcggagattccgtggcagaaggaactctgcaactccgtcaacctcatcggcaacgtcgccggccccgtcgaaatcaaatacctnccctgcggcaaggtcgtc

SEQ ID NO: 13308 - DNA, 442 bp, Glycine max
  Clone ID: LIB3094-075-Q1-K1-B4
acaggcacgtcactctcttcgcatcggcactctttttggctttcatcttctcgtgttgtgaagagatacacatctatgaagaaaatttacaaagataaagatgctgagccaactgaatttgaagaatcagttggacaggcattgtttgatctataaaataccaacaatgagctgaaaagtgatctgaaagatttatacataaactcagctgtccaaattgatgtttctggcaaccgaaaagctgtggttatccatgtcccctacagactaaagaaaggattccggaagattcatgtcaagcttgtgagagaactctagaaaaaatttattggaaaagatgtaatcttgattgccaccaccaagatatttatgccaccaaaaaaaggttctgctgttcagcgcccccgcaccagaacactcacttctgtacatgatgcaatgc

SEQ ID NO: 13309 - DNA, 446 bp, Glycine max
  Clone ID: LIB3094-075-Q1-K1-B6
cagaacagggactcactctcttcgcagcggcactctcggtggctttcatcttctcgggttgtcaagatgtacacatcgaggaagaaaattcacaaggataaggatgctgagccaactgaatttgaggaatcagttggacaggcattgtttgatctagaaaataccaacaatgagctgaaaagtgatctgaaagatttatacataaactcagctgtccaaattgatgtttctggcaaccgaaaggctgtggttatccatgtcccctacagactaaggaaaggattccggaagattcatgtcaggcttgtgagagaacttgagaaaaagtttagtggaaaagatgtaatcttgattgccaccaggaggatagtaaggccaccaaagaaaggttctgctgttcagcgcccccgcaccagaacactcactgctgtacatgaggcaatgct

SEQ ID NO: 13310 - DNA, 112 bp, Glycine max
  Clone ID: LIB3094-075-Q1-K1-B8
aatatacatgtgacacttgggtgctaacttgggattacgctatggccttagatgtaatctagaatgccaccatgatgtttgtaagggcacgcgatatgggacttgatgaaca

SEQ ID NO: 13311 - DNA, 452 bp, Glycine max
  Clone ID: LIB3094-075-Q1-K1-B9
gcctcagatgctgagctgaaaaagacagtcctttatgacttccatgttgctaatggagggaagatggtgccatttgctggatggagcatgccaatccaatacaaggactcaattatggactcaacccttaactgtagggagaatggtagcctttttgatgtttcccatatgtgcgggctaagcctcaagggaaaggactctgtcccattccttgaaaagcttgtcattgcagatgttgctgggcttgcccctggaactggttcgttgactgtcttcacaaatgaaaaaggaggggcaattgatgattcagtgattaccaaggtgaaggatgatcacatatacttggttgtgaatgctggatgtaaggacaaagatctggctcatattgaggaacatatgaaggcattcaaggcaaaaggtggtgatgtgtcatggcacatccatgatgagag

SEQ ID NO: 13312 - DNA, 449 bp, Glycine max
  Clone ID: LIB3094-075-Q1-K1-C1
tttgatacattccttgtagttaatactgaaagatgtttttgaagatggcgttactgatccgagggctttccctcatgctccttttggtctcctctgaggtggcatccacgaatacaaaagaggaggcaaatggagtggatgatgccaaatatcccggtggaagctatggagggggttacccaggtcatggcggtggcggatatcctggccatggcggtggctgttatcctggccatggcggtggtggtggctatcctggtcatggtggtggccaccctggtcatggtggcagctaccctggccgtggtggtggatactgtaggcatggctgttgctgtggccggacatacaacggatgttgcagaatgtgctgctataacgctggcgaagctgttgctgcacaaactcaagataagactcacgattaagacgatgcagttctacttaat

SEQ ID NO: 13313 - DNA, 258 bp, Glycine max
  Clone ID: LIB3094-075-Q1-K1-C3
tcacttcaccaattctaaacacaccccaattaacatctatgactataaacttccccttggaagctaccatatctgggtccaatgtcatgattgtaatatttattctggccacaccagcaccacacatcctggacattccaaattcaacccatatactggtcattgttgacttctccatagtcatattttattctaacaacacatctgtgttcgaaacatgtatccatcatttattgagaaactcgctcatacatatac

SEQ ID NO: 13314 - DNA, 390 bp, Glycine max
  Clone ID: LIB3094-075-Q1-K1-C4
caaccatggccgactcatctcaagaccttgtctcaacttctcgatagtgctttggatgattggcagtccttcaacctcaatcctccccctccaagtggggaagcaactgcgaatagcaagaatgagagtccttctttgccgtccggggttcaaggattgggcatgggtttacccgatttgagaacgaataaaaaggggaaacagaaggctttcaaagacagccacgtgtcggaggcgctcaacaagctcatggagcataccaaagaggctgtgaaggggcttgagtctatatccccacccactgccgatgatttaggtaaggatgccttgatggaagattgggtcaaacaatttgagcagcttgctggctctcaagacatggaatctatt

SEQ ID NO: 13315 - DNA, 312 bp, Glycine max
  Clone ID: LIB3094-075-Q1-K1-C5
caaccatggccgactcatctcaagaccttgtctcaacttctcgatagtgctttggatgattgtcagtccttcaacctcaatcgtccccctccaagtggggaagcaactgcgaatagcaagaaggagagtccttctttgccgtccggggttcaaggattgggcatgggtttacccgatttgagaacgaagaaaaaggggaaacagaaggctttcaaagacagccacgtgtcggaggcgctcaacaagctcatggagcagaccaaagaggctgttaaggggctggagtctatatccccacccactgcctatgat

SEQ ID NO: 13316 - DNA, 352 bp, Glycine max
  Clone ID: LIB3094-074-Q1-K1-H5
cggacgcgtgggcggacgcgtgggtcacaatctagggttttagaatttacccaaaagcctcgtccatggcagaagaagcagcactggaagtcgttgatcccaacaccgccgctgccgccgccgccgtggacatggacgtcgagaatgtcgaggccggcggcaacggcgccgagccgaaccagaagcgcgccagggaggaagaggagccccagggcggcgacgacgacgtttcgaagaagcagaaggtggacgaggaaaacgaaaagtccgtagaggaacaacgcttggagaagcgcgatgaacaagaagaagaaaaaggagaagaaaaagaagcagaaaaagaagaagaaga

SEQ ID NO: 13317 - DNA, 222 bp, Glycine max
  Clone ID: LIB3094-074-Q1-K1-F1
tctaactacttcaaatcctctcaccttatctacacattaacactacttaaaccctaaccaagcatggcttttttcaccttcaccgcaatgtccacttacaatctttactcctcctactccatctcctactttcccacccaccatctcaccaactcctaacttatttacaaacacaacctctccttctcaatctacaccataaccaattaatatcactttaac

SEQ ID NO: 13318 - DNA, 450 bp, Glycine max
  Clone ID: LIB3094-074-Q1-K1-F10
caaagacatccttctcctggatgtggctcccctcactctcggaattgaaactgttggtggagtcatgacaaagttgattcccagaaacactgttatcccaaccaagaaatctcaggtgttcaccacctatcaggaccagcagactacagtctccattcaggttttcgaaggcgagaggagtctcacaaaggattgccgccttcttgggaaatttgatctgtctggaattcctccagccccaaggggtacgcctcaaattgaagtgaccttcgaagttgatgccaacggcattctaaatgtgaaggcagaagacaagggcactggtaaatcagaaaagatcaccattacaaacgaaaagggacgtcttagccaggaagaaattgagagaatggttcgcgaagcagaggagtttgcagaagaagacaagaaggtgaaggagaggatcgatgc

SEQ ID NO: 13319 - DNA, 398 bp, Glycine max
  Clone ID: LIB3094-074-Q1-K1-F11
caaagacatccttctcctggatgtggctcccctcactctcggaattgaaactgttggtggagtcatgacaaagttgattcccagaaacactgttatcccaaccaagaaatctcaggtgttcaccacctatcaggaccagcagactacagtctccattcaggttttcgaaggcgagaggagtctcacaaaggattgccgccttcttgggaaatttgatctgtctggaattcctccagccccaaggggtacgcctcaaattgaagtgaccttcgaagttgatgccaacggcattctaaatgtgaaggcagaagacaagggcactggtaaatcagaaaagatcaccattacaaacgaaaagggacgtcttagccaggaagaaattgagagaatggttcgcg

SEQ ID NO: 13320 - DNA, 157 bp, Glycine max
  Clone ID: LIB3094-074-Q1-K1-F3
actactacccatcctttcacatcatcctcacattatcactccttacaccctaaccaacgatctgtcttattacctttacaccactgtcccctctcaaactctcttcctctttaaccatatcctccctatccacacacaaattcacaaccacctcact

SEQ ID NO: 13321 - DNA, 336 bp, Glycine max
  Clone ID: LIB3094-074-Q1-K1-F5
cgcaccagtttcaccgcacgaatatcttgttgtttggagcgatccgagaaaaactgtgtaggcatgttggtttaccaggacctccttacaggtgatgagcttctctctgactccttccgttacaaggaaattgagaatggaatgctgtgggaagttgaggggaagtgggttgttaaaggagcagttgatgtagacattggtgcaaacccttctgctgagggtggaggagaagaatgaggaggtgatgatgcagctggtaaaggtggtgacattggtgacacattcagaatttaagggcaacccgcattcgattagaaaccatttggtaccttcatg

SEQ ID NO: 13322 - DNA, 323 bp, Glycine max
  Clone ID: LIB3094-074-Q1-K1-F7
cggacgcgtgggttcaatgccaaccctgtcaattccatagatgcacagaactatatgttccggatcaaacatattatactcgaactacatcaattaaagtatcaatggcagaccaaaatgagccgagtgaggttaatatgcagattgggatcatgagggagaaacttaaagaaacactgccagtctcagttcaagaatttccttggaaaaaagctgaacatatactcctagacagactacttaatcttgcacaagagacagtgaagtggtctcttggactgagtttcatctttagctctgtatctgacgttgtatatacattc

SEQ ID NO: 13323 - DNA, 366 bp, Glycine max
  Clone ID: LIB3094-074-Q1-K1-F8
cccacgcgtccgcacgaaagccgggatctttcagaaaatggattcctattcgaagggtgcgtaaccgcatggataagctcacactaacccgtcaatttgggatccaattcggttccttaggaggtatcgggaaggaattttggaatgtaataatatcgattcatacagatacagaagaaagggttctctattgattcaaacgctctacctacgagatagggatagagaaagaggaaaaaaccgaggatttcacatagtacttttggtcgaaaaatcgatctgatttttttcgtacttttcgctcaatgatgaaatgggtcagattctacaggaccaaaccttgtgggagttaaaggatgatggaag

SEQ ID NO: 13324 - DNA, 226 bp, Glycine max
  unsure at all n locations
  Clone ID: LIB3094-074-Q1-K1-G1
gcgcgaactactccgaaaccgctcacgttatccacacatcaacactccttaaaccctaaccaacgatgncgttctttcaccttcaccgcaatgtccgcttgcaagctttcctcctccgccaacatcttctcctttcccacccaccgtcgcaccaacgccgtccttctgtccagactcaacctcgccgtcagggtctccgccatggccaaggaattgcacttcaaca

SEQ ID NO: 13325 - DNA, 458 bp, Glycine max
  unsure at all n locations
  Clone ID: LIB3094-074-Q1-K1-G10
cgcaccagtttcaccgcacgaatatcttgttgtttggagcgatccgagaagaactctgtagacatgttggtttaccaggacctccttacaggtgatgagcttctctctgactccttccgttacaaggaaattgagaatggaatgctgtgggaagttgaggggaagtgggttgttaaaggagcagttgatgtagacattggtgcaaacccttctgctgagggtggaggagaagatgagggagttgatgatgcagctgttaaggttgttgacattgttgacacattcagacttcaggagcaacccgcattcgataagaagcagtttgttaccttcatgaagaggtttatcaagaatttgactcccaagctcgatgcanagcaacaggagttgtttaagaagcacatcgagggagcaactaaatacctgctctctaagattaaagatttccaattttttgg

SEQ ID NO: 13326 - DNA, 329 bp, Glycine max
  Clone ID: LIB3094-074-Q1-K1-G12
taatatctggttttttggaaccatccgataggaactctttggacatttttatttaccaggacctgcttacacgtgatgagcttctttcttactccttccgttacaaggaaattgataatggaatgctgtgggaagttgatgggaagtgggttgttaaaggagcaattgatgtagacattgttgcaaacccttcttctgaaggtggatgataaaattacggatttcatgatgcaacttttaaagttgtttacatttgtgacacattcatacttcatgaacaacccgcatttgataataaacatttttgtaccctcattaatatgtttatc

SEQ ID NO: 13327 - DNA, 274 bp, Glycine max
  Clone ID: LIB3094-074-Q1-K1-G2
acgctctctgctcctagggtttctccttcgagtgagggaaatggctcccaaaccgcctagtacgggtcggtttgttggactgaacaagggtcacgtcgtcaccaagaaggaattgcccccacgcccctcagatcgtaaggggaaaacaagccaagagggtgcactttgtgaggaacctcataagagaggttgctggttttgcaccctatgaaaagcgtctaactgagttgctgaacgttgggaaggataagagggcactgaaggttgcaaagag

SEQ ID NO: 13328 - DNA, 329 bp, Glycine max
  Clone ID: LIB3094-074-Q1-K1-G3
cacgcgttcgcaactactccgaaccgctcacgttatccacacaacaacactccttaaaccctaaccaaccgtgggttcttccaccttcaccgcaatgtccgcttgcaagctttcctcctccgccgccatctcctccttccccacccaccgccgcaccaacgccgtccttctgtccagacgcatccgcgccgtcagggtctccgccatggccaaggagttgcacttcaacaaagactgcacctcaattaggaagctccagagcggtgtgaacaagctcgcggatctggttggggtcacgcttggtcccaagggaaggaatgttgttctcg

SEQ ID NO: 13329 - DNA, 284 bp, Glycine max
  Clone ID: LIB3094-074-Q1-K1-G4
cccacgcatgcggtatcctaatatgtaaggtacataatcaccaaatttcaaccacgcatcgtctagtaacatgttgacaaaagtctaccgagttgcattttgttctcctaacctccttaacccactggaggtcatgatcctgtacatatcagtgaattatacaacaaattcttgataaagaaatgattttctcttctgacctgctgcttattgatctatgaatccaccttcactgatattcaaagatggctataaaatatcttctgcagcgttatctctttgac

SEQ ID NO: 13330 - DNA, 280 bp, Glycine max
  Clone ID: LIB3094-074-Q1-K1-G5
tcgcgaactactgcgaaaccgctcactttatccacacaacaacactccttaaaccctaaccaaccgtggggttcttccaccttcaccgcaatgtccgcttgcaagctttcctcctccgccgacatctcctccttccccacccaccgtcgcaccaacgccgtccttctgtccagactcatccgctccgtcagggtctccgccatggccaaggagttgcacttcaacaaatacgtcacctcaattaggaagcttcaaagcggtgtgaacaagctcgcggatc

SEQ ID NO: 13331 - DNA, 233 bp, Glycine max
  Clone ID: LIB3094-074-Q1-K1-G6
cccacgcgtccgcgagcttcagcaatggtgtacgtcaaggctcagaaatcaaaagggtacgtcaagagatatcaagtcaagttcaagagaagaagagagggaaaaaccgattaccgtgccaggattcggttgattaatcaggacaagaacaaatataacactccgaaataccgatttgtggttcgctttagcaacaaggacattgttgcacaaataatatctgctagcattgc

SEQ ID NO: 13332 - DNA, 296 bp, Glycine max
  Clone ID: LIB3094-074-Q1-K1-G8
cggacgcgtggggtttcctagtatgcaaggtaaagaatcagcaaatttcaaccccggatccgcgagtaacatgttgacaaaagtctaccgagttgcattttgttcttgtaacctcctcaacccactggaggtcgtgatctgtaaattttgagtgaattatccaacaaattcttgaaaaagaaatgattttctcttctgagctgctgcttattgatcgatgaatccactgcaattattttcgaagatggcaataaaatctcttctgcggtgttatctctttgactgaattccaaatt

SEQ ID NO: 13333 - DNA, 433 bp, Glycine max
  Clone ID: LIB3094-074-Q1-K1-G9
tcgcgcagcagtttcaccgcacgaatatcttgttgtttggagcgatccgagaagaactctttagacatgttggtttaccaggacgtccttacaggtgatgagcttctctctgactccttccgttacaaggaaattgagaatggaatgctgttggaagttgaggggaagtgggttgttaaaggagcagttgatgtagacattggtgcaaacccttctgctgagggtggaggagaagatgagggagttgatgatgcagctgttaaagttgttgacattgttgacacattcagacttcaagagcaacccgcattcgataagaaacactttgttaccttcatgaataggtttatcaagaatttgacttccaagctcgatgcaaagcaacaggagttgtttaagaagcacatctaaggaacaacttaatacctgctct

SEQ ID NO: 13334 - DNA, 448 bp, Glycine max
  Clone ID: LIB3094-074-Q1-K1-E9
cccacgcgtccgcccacgcgtccgcagggaagttgtggaagttgttgggcgttctcaacgggggccacagtggaagcaataaacaagatagtgacagggaagtttgtgtccttatctgaacaagaacttgtggactgtgacagagcctacaatgaaggatgcaatggtggccttatggactatgcattcgaattcatcattcaaaatggaggcattgacacagacaaagattacccataccgtggctttgatggcatctgtgatccaactaagaaaaatgcaaaggttgtgaacattgatgggttcgaggatgttccaccgtatgatgagaatgccttgaagaaagctgtcgctcatcaacccgtaagcattgctattgaagcctctggcagagatttgcaactttatcaatccggtgtatttactggtaaatgtgggacaagtttag

SEQ ID NO: 13335 - DNA, 414 bp, Glycine max
  Clone ID: LIB3094-074-Q1-K1-H10
caaccatggccgactcatctcaagaccttgaccaacttctcgatagtgcggtggatgatggtcagtccttcaacctcaatcctccccctccaagtggggaagcaactgcgaatagcaagaaggagagtccttctttgccgtcgggggttcaaggattgggcatgggtttacccgatttgagaacgaagaaaaaggggaaacagaaggcttccaaagacagccacgtgtcggaggcgctcaacaagctcagggagcagaccaaagaggctgtgaaggggctggagtctatatccccacccactgccgatgatttaggtaaggatgccttgatggaagattgggtcaaacaatttgagcagcttgctggctctcaggacatggaatctattgtggagaccatgatgcatcaacttc

SEQ ID NO: 13336 - DNA, 369 bp, Glycine max
  Clone ID: LIB3094-074-Q1-K1-H11
cagaaagccgcttccatgagcgcgagcaacaaatggagagcaatgtcgcaccaccagcatgagcctctgtgcacgcgcacgcaccagatcggcgccctcctcctcgtggcgaccaccttcttcttcacgagaatgctttccaccttcacgctctccaccagcgtcgtccacgtgtcgcaaccccggttccagtgggggcagtcccagctatccctcaagatctacgtctaccaagaagacgaaatcgacggtttgaaggagctcttgcgcggaagggacgctaagatcacagacgaagcttgcctcaaaggccagtggggcagtcaggtgaaaatacacaagttacttctgcaatcgaaacaacggaca

SEQ ID NO: 13337 - DNA, 401 bp, Glycine max
  Clone ID: LIB3094-074-Q1-K1-B10
atggctcccaaaccgcctagtacgggtctgtttgttggactgaacaagggtcacgtcgtgagcaagaaggaattgcctccacgcccctcagatcgtaaggggaaaacaagcaagagggtgcactttgtgaggaacctcataagagaggtagccggttttgcaccctatgaaaagcgtataactgagttgctgaaggttgggaaggataagagggcactgaaggttgcaaagagaaagctcggaacacacaaacgcgcaaagaagaagcgtgaggaaatgtccagtgttctcaggaagatgagggctggtggtgctggagacaagaagaaataagtcttatttactgttttccagattcactagatggacctgtgtattgatggacgagctttcatattttt

SEQ ID NO: 13338 - DNA, 418 bp, Glycine max
  Clone ID: LIB3094-074-Q1-K1-B2
ctcttctcttcgctcctgcacttgttgtttctttgcccttcatggcatctcaggctagcctgctccttcaaaagcagctcaaagatctttgcaaaaaccccgtcgacggcttctctgccggtttggtcgatgaaaccaacatttttgaatggagtgtcaccataattgggccgcccgatactctctacgaggggggatttttcaatgctattatgagtttcccatccaattacccaaatagtccaccttcagtgaagttcacctcagagatatggcaccccaatgtatatcctgatggccgggtttgcatatcaattcttcatcctcctggtgaggatccaaatggttatgagcttgcaagtgagcgctggacacctgttcatacggtagagagtatagtattgagtatcatatcaat

SEQ ID NO: 13339 - DNA, 311 bp, Glycine max
  unsure at all n locations
  Clone ID: LIB3094-074-Q1-K1-B6
cctaaacaactctttctcttcttccttcgctcgttgttctccctcgcgtagatcgagaatggcggagacagagacgtttgctttccaggctgagatcaaccagctcctcagtctcatcatcaacaccttctactccaacaaggagattttccttcgtgaactcatcagcaacgccttcgatgctttggacaagattcgatttgagagtttgacagataagagcaagctcgatgctcagccagagttgttcattcatattattccagacaagactaacantacactgaccattgttgacagtggtattggca

SEQ ID NO: 13340 - DNA, 453 bp, Glycine max
  Clone ID: LIB3094-074-Q1-K1-C12
aaacacccttgtcgaccacaccaaaattaaaaacataaaaaagcataaaagcacaaaaagagataaaaaagggaaaataaaacattttgaagtcatatttgcacacttgattaaaggctgtcgtcccttgtgacggatgcgtggggtgctaataccttccctgtgcgtaaaaacaactcccgaactattcacacttaaagttcgtagaccacaccttttcaattttcccgacgctttcctcaaataaaagttggtggcgactccgcgcattttcctttcatggaagacgcacttgtgagtcccgcatcgccctcccgtcaaagggtaggttgcgacagtacttgccctcccgccgaagggtaggttccttaattgaattaactaataacaaaagtgaaactaaggctaaaataaactcacaaatcaaagctttgccataaaaatcacttaaaa

SEQ ID NO: 13341 - DNA, 286 bp, Glycine max
  Clone ID: LIB3094-074-Q1-K1-C2
cccacgcgtccgttccagaacgccggcgaccgaacccgaattgaagtccagagaagacaacgatgccgcgagttacagcaataataatattaataacaacagcgacaggggtggcagtaacagtaatagtaattgtaacatggaacatcatcatcacagccaccatgtgaatagtgggttcttgccctgaaaatagtagttattgtatttatttattatagcttttttcttttcttttttttaactttgtacctttttatctcttcaagttgatcaaggagatcgg

SEQ ID NO: 13342 - DNA, 359 bp, Glycine max
  Clone ID: LIB3094-074-Q1-K1-C7
gttgaattcttatgcaaagatttctgtccatcttctctggatgatattgccgagatgagtgggccactatgtcaagaatcagctcccacttctcactccatgagattcactagaagtttgagtgggctttcggtcaggaggtctttagttggttcatttgaggagtctcttttatctggccggttcttatctggaaacaatagcaagaaaatcgatggttttcttgctgtgctaagcattactggtgggaacttttctcctaaatctcagaagcttccattctctggtactagcgtggatggagattgctatctactgtattatgcatcaatagatcttgctggaaattcctcttcaaa

SEQ ID NO: 13343 - DNA, 217 bp, Glycine max
  Clone ID: LIB3094-074-Q1-K1-D1
atcatgtcccacttatcactccatgatattcactataagtttcactagtctttctatcatcaagtctttagttatttcattacaaaattctcttttatctgtccatttcttatctgtaaacaatatctttaaattcaattgatttaattgctatactaatcattactattatgaacttttctcctaaatctcataatcttccattctctattactaa

SEQ ID NO: 13344 - DNA, 423 bp, Glycine max
  Clone ID: LIB3094-074-Q1-K1-D12
cccacgcgttcgagaaggcctgggcttagttgataagcataactgggtgaggaagaaagagaggagagtgaagaagatggcgtcgagcggagcggtaccgttttggagggcggcggggatgacgtacataacatactcaaacatatgcgcgaatctgctcaggaattgcctcaaggaaccctacaaggccgaatccctctctcgtgagaagctccattttgttctctccaaatgggtcgacgccaagcctgaaaaacctactattcgttcagacaccccagagcagtgatctggaatagttggaagctataaatgcataaatctttgagatctggaagttcattgtcattttgaacctttctgtgatgtttaattcctttggttttttctctccatgaaatggaacatgcactggattttgat

SEQ ID NO: 13345 - DNA, 377 bp, Glycine max
  Clone ID: LIB3094-074-Q1-K1-D2
cacacacacacaaaacagaacacaacacatacacatacacatgttgttgatgagtggaggcggcaagaaacacagatccatcacacacatgaacaattgatctttgtcctttgtatataatttgattctaatttttggcactaagagagccactcaaggctctgggatgtactatacgccattcggggttctgattttcggcggagagaaggttcaagagacccagtgggagaaggagcgataagtaattcatattccattatctccatttctagatccttccattaactctcataggatcctccaatttcaattcaatcccttccgatatttcggagagagcatggctggtaaaggtttgaaagaaacaaagtcgc

SEQ ID NO: 13346 - DNA, 287 bp, Glycine max
  Clone ID: LIB3094-074-Q1-K1-D6
cccacgcgtccgttccataacgccggcgacttaacccgaattgaagtccagagaagacaacggatgccgcgagttacagcaataataatattaataacaacagcgacaggggtggcagtaacagtaatagtaattgtaacatggaacatcatcatcacagccaccatgtgaatagtgggttcttgccctgaaaatagtagttattgtatttatttattatagcttttttcttttcttttttttaactttgtacctttttatctcttcaagttgatcaaggagatcgg

SEQ ID NO: 13347 - DNA, 263 bp, Glycine max
  Clone ID: LIB3094-074-Q1-K1-D7
accacgccaacatctcaaacaccattccataaggaaatgctgagatatcaaaaacgcacggggtcatatatcaaatctcacgctcgacacatgactccccgactatccattaccctccctacagatcaaacattaatcaatacaagatcctatttaacactccatactacacacttaaaagcttactttatcacactaaacctttacagatattctatatccttctagactgtctaatatttacatctatctacatcacactt

SEQ ID NO: 13348 - DNA, 114 bp, Glycine max
  Clone ID: LIB3094-074-Q1-K1-D9
gaaaaaaaaaaaagccttttactttttttcttttgcatgatttgaatcttgattggaaaagcttcgaattggggtgttttacccatcaattcaattttaagccgtgccttcttc

SEQ ID NO: 13349 - DNA, 437 bp, Glycine max
  Clone ID: LIB3094-074-Q1-K1-E1
cccacgcgtccgcccagcgtccgaattcctcaaccacacttgccatatcaaagaaaagagcgtcaagatcagatcaaagatacaacatggaggcacttcaatcatgggtttcaaagcacaagctcgccagcattggggcactctgggcctctggaattggagcaacacttgtggcttattcatgcaaaaagtctccaatgaagccaagtctcaggcttatccatgctaggatgcatgctcaggctctaactttagcagtgctatccggtgcagctgcttatcattattatgagaaacgtgatgttcagccaaaaccagaggcagattatattattcctgctcccaatgtcacccagatggttgaatatgaacttcaatgtcctttctaaaaattaaaaattaaacttgtagggtcatgttattaagattaggagata

SEQ ID NO: 13350 - DNA, 353 bp, Glycine max
  Clone ID: LIB3094-074-Q1-K1-E10
ctcccacaccttcactcaatccccacaaggtttttccatttaatattattaaggttcaattcagatatctcttaaagctcttctggaaataaattctataccaatgcttcaattacaagaaccatctctataaaaattctctctccattatttttaatttttcagatctagtctttctctttaacttatttattaaccctttccattgttattgagatcattaatctaaaaaaactccacattgtgtatcaaatttgaatcaaaattaacacacacaatttaaaaactctaaatcttctcattaatatttaacttaatacacttactaaatctacatatcctcttaaactttc

SEQ ID NO: 13351 - DNA, 256 bp, Glycine max
  Clone ID: LIB3094-074-Q1-K1-E12
tcgcccacgcgttcgctcaatcccaaaggggtgtagcattgaattgggttgatgtgcaatgcggagatcacggaaagctcttctggaaagaagggctatacaggaggctacaagtgggaggaactatctgtataaagtttctctgtcgttggttttggttttgtggggtctggtcttcctcttcagcttatgtataagccatggccatggttatggagatcatgaatctagagaagttccagttggtgtatcaaat

SEQ ID NO: 13352 - DNA, 86 bp, Glycine max
  Clone ID: LIB3094-074-Q1-K1-E4
ttgcacttgctaaaaatgctatcaaatatcattacaaagaatattactttactaacaatagtcctcttctctaataatacactctt

SEQ ID NO: 13353 - DNA, 445 bp, Glycine max
  Clone ID: LIB3094-074-Q1-K1-A9
tcgcccacgcgttcgctcgagaatatgacccgtcctaaaatttacgaaacatagttatttattgtttatgatatataatgagaggaacataaacgaacaatcagatgctgctagtcatttggataataaacaacattaggatttaggcatatcacatgatcgctttacttataatttagggatatcagctcaataccacatgattcaagtaatattaccaaaatcaaagccttatcctacaagatgcggtcagctacatgggtcatgacgtcattcggcaagtttagaaaccaaagtgtagcaaacgggaaaaaagtacacttctccttacagaggtatcccatatgacacaataactctgaaatagtatagtataccatagtcttaatcagcggaatatacaatttcttacatgacaaaaggacagccactgatcccagacaat

SEQ ID NO: 13354 - DNA, 172 bp, Glycine max
  Clone ID: LIB3094-074-Q1-K1-E6
cccacaccgtcctctcgcttcatcaattctttacgaaaatgctcatatatcaaaaaggtactgcatcatatatcaaatctcactctacccaataacattcgtatccacctattacccttcacaaatatcattcattaatcaatacaataacatatttaacactccacaatac

SEQ ID NO: 13355 - DNA, 359 bp, Glycine max
  Clone ID: LIB3094-074-Q1-K1-E7
attttggttctctgtgtctctacgatcaggatccaacggtccaaaatggtcggggcgtgtgctgtttgttttcccaagttttagagctccaaaccttcagatccacctcattcgtctccagatcttccttcctggataacgttttcgggttcgagaaggcacttgtgttgtttttcgtacgaaatggagactaaacagagttcggtgacggttacgctcagttacggcgcgttgacgtgcgccgcggaatttctcgcgactttgctagcttctgctgtcgtcaaagcctcgcttttggccccggtgagtcactttctctggcttcgtgcctcttaaacctaggtttttttttttaggtc

SEQ ID NO: 13356 - DNA, 131 bp, Glycine max
  Clone ID: LIB3094-073-Q1-K1-F9
gccacgcatcctaaaacacaatctcatccagattttcttaaacacttccatcaccgtgattagtttcatactctattaccttcctttcacctgctacttttaccaacagatctctatattaaaacacacat

SEQ ID NO: 13357 - DNA, 241 bp, Glycine max
  Clone ID: LIB3094-073-Q1-K1-G10
ccacgcgtccggtttctggtggattatccaacttcagagcaattcatgcagcctgctattattgatcacttggtggagatgttcttgtgttggtcacaaataaaagtgattgtggaggtgcggagtatgcaagaaataatggtatcccagttatactgtaccatatatcaaaggatgaatctaatccaagtgaccttgttgatacactaatggaatttgaagttgattttattcttttagc

SEQ ID NO: 13358 - DNA, 304 bp, Glycine max
  unsure at all n locations
  Clone ID: LIB3094-073-Q1-K1-G11
cccacgcgtccgtcacgcgtccggattctggttgattatccaacttcatagcaattcatgcatcgatcgtnatttgatcacttgacggaaaccatcttgtcttgcccacaaataaaagtgattgtccagctcccaagtctccaagaattaatggtatcccaattttactgtaccatatatcaaaggttgaatctattccaagttaccttgttaatccactaaggaaattttaggttgatttcattcttttacctggatacctcaaactttttccattggaattgatcccagcttccaaaagatc

SEQ ID NO: 13359 - DNA, 199 bp, Glycine max
  unsure at all n locations
  Clone ID: LIB3094-073-Q1-K1-G12
cagaattcagaacccagatgcactccaacatgttctgaggaaagctgaggagtatctgggcgcaggagctcctgaaactccctactcagaatttgagcacaagttccaggagattggtttggagagagggtggggtgacaacgcanagcgtgttcttgagtcaattcaacttctcttggatcttcttgaggcccctgac

SEQ ID NO: 13360 - DNA, 419 bp, Glycine max
  Clone ID: LIB3094-073-Q1-K1-G2
atcgtgagaggggcagtagccgagattccgtgagttgcaaaaatgaagacgattgtgtccagcgagaccatgaacatcccggacggcgtgagcatcaaagttcatgccaaggtcatcgaagttgagggcccccgcggaaaattggtgcgagacttcaagcatttgaatctcgattttcagctcattactgacgaaaacggtaaaagaaagctgaaaatcgacgcgtggtttggttctcggaaaacatccgccgccattcgcaccgccttgagccacgtggagaatcttatcaccggcgtcaccaagggctaccgctacaaaatgaggttcgtttatgcccattttcccatcaacgcaagcttcggcaacagcaacaagtctattgagatccgaaatttccttgcgagaagaagtgagga

SEQ ID NO: 13361 - DNA, 438 bp, Glycine max
  Clone ID: LIB3094-073-Q1-K1-G3
atcgtgagaggggcagtagccgagattccgttagttgcaaaaatgaagacgattctgtccagggagaccatgaacatggcggagggcgtgagcatcaaagttcatgccaaggtcatcgaagttgagggcccccgcggaaaattggtgcgagacttcaagcatttgaatctcgattttcagctcattactgacgaaaacggtaaaagaaagctgaaaatcgacgcgtggtttggttctcggaaaacatccgccgccattcgcaccggcttgagccacgtggagaatcttatcaccggcgtcaccaagggctaccgctacaaaatgaggttcgtttatgcccattttcccatcaacgcaagcattggtacaagcaacaggtcttttgagatccgaaatttccttggcgagaagaatgtgaggaaagtcgacatgcttgat

SEQ ID NO: 13362 - DNA, 316 bp, Glycine max
  unsure at all n locations
  Clone ID: LIB3094-073-Q1-K1-G4
ctcacgtgtccgggaacagaagcttttcagatttgggtaacactgncaccggggatggaaccagctcgatattcttcctttcacctgcgacggttgccaacagatcttttgtttggaacacagatcctacaagtcccacgcgtgcctgaaatccgaccacaacagcagaaaaggttgttgtttgcgaagcatgttccatgtccatcgagaccaccggccatgtgggacaagacgaggaggcaatcttgcagaagcacctcaagtctggtaattgtgaccctaccaagaagaagaaaccaatttgtcccgtcaagcg

SEQ ID NO: 13363 - DNA, 344 bp, Glycine max
  Clone ID: LIB3094-073-Q1-K1-G5
ggctacttttgattgcttgatgaaaacctatggattcctgacaccagaattctggaaggagacgcgggtctccaaatctccattccaagagtacacagatctactggcaaaaccaacaggaaagactctaatcttggaggaggaaagggtggatgcttgatttgctagttttgctttatggatgttttaggaactttattactttacatactttgctggttctgtgctttacttttggttttgatagacggtatgtctctgtatgcattttgattgtttccaagttttaattgactgcaaaaaaaaaaaaggcaaacaatacgaaatcaaaatagatcaagatc

SEQ ID NO: 13364 - DNA, 345 bp, Glycine max
  unsure at all n locations
  Clone ID: LIB3094-073-Q1-K1-G6
ggctacttttgattgcttgatgaaaacctatggattcctgacaccagaattctggaaggagagtcgcttctccaaatctccattccaagagtacacagatctactggcaaaaccaacaggaaagactctaatcttggaggaggaaagggtggatgcttgatttgctagttttgctttatggatgttttaggaactttattactttacatactttgttggttctgtgctttacttttggttttgatagacggtatgtctctgtatgcattttgattgtttccaagttttaattgactgcaaaaaaaaaaaatgaatgnaaaactatcaaaagtactacatgacatc

SEQ ID NO: 13365 - DNA, 384 bp, Glycine max
  unsure at all n locations
  Clone ID: LIB3094-073-Q1-K1-G8
gggcccacgcgttcgttaacagaagcttttccagatttgggtaaacactgccatcaccgcnattgttaccatctcgattgggttcctttcacctgctacggttgccaacagatcttttgtttggaacacagatcctacaagtcccacgcgtgcctgaaatccgaccacaacagcagaaaagttgttgtttgcgaagcatttttccatgtccatcgagaccaccggccatgttggacaagactaggaagcaatcttgcaaaagcacctcaagtctggtaattgtgaccctaccaagaagaagaaaccaatttgtcccgtcaagcgttgcagggaggttttgacgttttccaacaccagcacatgtaaaacttgccacattaaagt

SEQ ID NO: 13366 - DNA, 326 bp, Glycine max
  unsure at all n locations
  Clone ID: LIB3094-073-Q1-K1-G9
cccacgcgtccgccacgcgtccggtttctggtggaggatccaacttcagagcaattcatgagacgctggaaaaggtgatcacttcatggagatgttcttgtgttggtcacaaataaaagtgattgtggaagtgcggaatatgcaagaaataatgggattccagntatactggaccatatatcaaaaggtgaatctaaatcaagtgaccctggtgattcacttagggaatttgaaggtgaatttaatcttttaacttgataccttaaacttattccaatggaattgatcccagcttaccaaagatctattttcaacattcattcatt

SEQ ID NO: 13367 - DNA, 101 bp, Glycine max
  unsure at all n locations
  Clone ID: LIB3094-073-Q1-K1-H11
tttttcttctctccctctgccgttcagagagtttnttacataactgggctaccaacngcngancttantgactcaaatgcaacacatgtagcaagttgtta

SEQ ID NO: 13368 - DNA, 337 bp, Glycine max
  Clone ID: LIB3094-073-Q1-K1-H2
cccacgcgtccgcccacgcgtccggccctctctttctctctctagaattctcagaggtgcggggcgagatgatgcagcagccaggacccggcatggcaccttccaccatgggccagcagccgccgcaacagtaccagcagcctccgccgcagcagcagcaaccctacgtcatgatgccgccgcaggcccaggccccgcaggccatgtgggcccccttcgcccagcctccgcctcagcagcagcccgccagcgccgacgaggtccgaaccctctggatcggggatctgcagtactggatggacgagaactatctctatacctgctttgctcacaccgg

SEQ ID NO: 13369 - DNA, 202 bp, Glycine max
  unsure at all n locations
  Clone ID: LIB3094-073-Q1-K1-H3
ccacgcgtccgcccacgcgtccggctcctctttttctctctctagaattctcaaagagccgagcgaaattatacgcggccaggacccngcatggcaccttccaccatgggccaacaaccgccgcaacaataccagcaaccttcgccgcaacagcaacaaccctacgtcatgatgccgccgcaagcccaagccccgcaagcca

SEQ ID NO: 13370 - DNA, 238 bp, Glycine max
  Clone ID: LIB3094-073-Q1-K1-H4
ggagattctgatttgttctctcagatctgatcttaccgtcgccggaatccaactcaacctgggtcggattcttgggtatcatcgcatcgccattcgttttagcctctcaataagagattttagttcgcttcaaattcgaggtttgatttgaagttgaaagttggaatagcttaactgttgtgtaaaacaaccaacacacacgagcatgggaagccaagacaacaacgtagaattgtca

SEQ ID NO: 13371 - DNA, 226 bp, Glycine max
  unsure at all n locations
  Clone ID: LIB3094-073-Q1-K1-H6
gcaaatcctgcttccacctctcatatctgattttaccgtctccggaatccaactcgacctgggtcanaattcttgggtgtcatggcatctccattcgttttatccattcaataacagattttagttcgcttcaaattccacgcttcatcttaacatcacaaccctaacttctgatctcttctcaagcacaacccccacacgccatcttggcacgctacgaccacac

SEQ ID NO: 13372 - DNA, 300 bp, Glycine max
  Clone ID: LIB3094-073-Q1-K1-H8
ggagagtctgatttgttctctcagatctgatcttaccgtcgccggaatccaactcaacctgggtcggattcttgggtatcatcgcatcgccattcgttttagcctctcaataagagattttagttcgcttcaaattcgaagtttgatttgaagttgaaagttggaatagcttaactgttgtgtaaaacaaccaacacacacgagcatgggaagccaagacaacaacgtagaattgtcatccaattcatttctagcttacaaatctgctaaggtgtttggtgctggtcaacggggtcttgg

SEQ ID NO: 13373 - DNA, 224 bp, Glycine max
  Clone ID: LIB3094-074-Q1-K1-A10
cccattttaaaatttactaaacatagttatttattagaaattatatatacatacacgaacataaactaacaatcaaaatcttcatatcatttctattataaacaacattataatttaaccatatcacatgatcactttacttataatatacctatatcatttcaataccacatcattcaattcatatcaccaaaatcaaatccttatactacaacaaactttca

SEQ ID NO: 13374 - DNA, 453 bp, Glycine max
  Clone ID: LIB3094-073-Q1-K1-F8
gatttggatgctaatttttttgatcagccagaaatgcttggagagcccattgcaagtctgcgtttgctgcactatggaggtcaagtttcggatcccttgaaaggattatatggagctggagctcatactgactatggtttaattacactgttagcaacagatgatgtctcgggtcttcaaatatgcaaagatagggatgctaaacctcagaaatgggaggatgtagcaccaattgaagggagcattcatagtgaatcttggtgacatgctggagcgctggagcaactgcgtttttaagtccacactgcacagagttctaggaaacggtcaaggaagatattctattgcatacttcttggagcccagtcatgattgtctagtggagtgcttgcctacctgcaaatcagacagtaatccgcccagatttcctgccatcttatgccatgactacct

SEQ ID NO: 13375 - DNA, 428 bp, Glycine max
  Clone ID: LIB3094-074-Q1-K1-A2
cccacgcgtccgcgcgtcgctgctccgtaccagtttcactgcataaatttgagagagaactgtgcaaacatgttggtttatcaggacctccttacaggtgatgagcttctctcggactccttccgttacaatgaaattgagaatggaatgctgtgggaagttgaggggaagtgggttgttaagggagcagttgatgttgacattggtgcaaacccttctgctgagggtggagaagatgagggagtcgatgacgcagctgttaaggttgttgacattgttgatacattcagacttcaggagcaacccgcttttgataagaaacagtttgttaccttcatgaagaggtttatcaagaatttgactcccaagctcgatgcagagaaacaagaattggttaagaagcacattgagggagcaacttaatacct

SEQ ID NO: 13376 - DNA, 54 bp, Glycine max
  Clone ID: LIB3094-074-Q1-K1-A6
cggacgcgtgggagaacctattttcactgttttttgaagaaattgtatcccaac

SEQ ID NO: 13377 - DNA, 75 bp, Glycine max
  Clone ID: LIB3094-073-Q1-K1-D10
ttacaacctttttaactagtctacctagactattcgctaacttactaataagacaagcaatattatctcaatcat

SEQ ID NO: 13378 - DNA, 216 bp, Glycine max
  Clone ID: LIB3094-073-Q1-K1-D11
tttgaatacattccttgtagtttatactgaaagatgggtttgaagatggcgttactgatccgaggcgtttccctcatgctccttttggtctcctctgaggtggcatccacgaatacaaaagaagaggcaaatggagtggatgatgccaaatatcccggtggaagctatggaaggggttacccaagtcatggcggtggccgttattctggccatggc

SEQ ID NO: 13379 - DNA, 176 bp, Glycine max
  unsure at all n locations
  Clone ID: LIB3094-073-Q1-K1-D12
tttgggtacattccttgtagttcatactgaatgatgtgtttgaagatggcgttactgatccganggctttccttcatgctcctgttaggtctcctctgaggtggcatccacgaatccaaaagaggaggcaaatggactggatgatgccaaatatctctgtggaagctatggagggg

SEQ ID NO: 13380 - DNA, 341 bp, Glycine max
  Clone ID: LIB3094-073-Q1-K1-D3
acgcgctcgcgttcgtccaaccctccgaccgtggttgaggttgaacacgcgtctaacgactatgtatgaaggagagtggtcctctacaactggcctagctgaaccatcaatgcagtgaggtgcattgaccaacctagcccactaggactctaatgagttgatctaaagtttgcctgcgacgttcaacgatcggattccatcggcccaagctcgtgacgcccattaacaactctaagaaactgactccaaggttaccatacgcttacacactgcttatctgcattatatatcccaaggttcataaactcttgatcaatgaccatcgcaccatgacactgaaa

SEQ ID NO: 13381 - DNA, 411 bp, Glycine max
  Clone ID: LIB3094-073-Q1-K1-D5
actggagtttcgggctagacgtacgcgcggggctgtggcggacgcgccggcggtggttgaggagaagacggagttcgacgtggtgaacgggaaggtgccgagcaacgctcgaagtcgcggtgattaaggcggtgagggcattgacgaacctagcgctgaaggaggcgaaggagttgatcgaaggggtgcctaagaagttcaaggaagggatttcaaaggacgaagctcaggatgcgaagtagcaactctaagaaactggtgccaaggttacgattgcttaaacactgcttagctgcagcatatatgctatggttcttagcctgttggttgatgatgagttcaccagtacactgtaattccatttccatattgtctggatttcaatcttcaattggtaatgaagaaatatga

SEQ ID NO: 13382 - DNA, 319 bp, Glycine max
  Clone ID: LIB3094-073-Q1-K1-D6
gtcacgcgtacgtccacgctttcggccacgcttgcgcccacgcgtccgtatacctgaggcgagagactagctctgtgcattctgctctcgctctctgccttccatcacactcggcatttcctttcccaagatcgtagaagatggcagacactgaggatattcaacctcttgcgtgcgacaatggaacaggaatggttaaggctggacttgctggagatgatgccccacgtgctgggtttcccagcattgcacgtcgtccacgtcacactggtgtgatggttggcatgggccaaaaagatgcatatgttggagatgaggc

SEQ ID NO: 13383 - DNA, 382 bp, Glycine max
  Clone ID: LIB3094-073-Q1-K1-D9
gtttagcgtaactgtaagctatgtgactttgttgctccagcttaccactatatttttgacaagttccatttgtacaaccgcacggtattaagatcctacaatcctttattcctaaacaatgtatcaagcaacttaacataaaattctttaatatcgtaatcaatattcagatttctacatactctactctaatcgccattttttcctaccaataaaaaaccttcttttcttaacactatatctcgcttctctctataacataagccttccactcacatatatcattagagaattatacatcaaataaataggtccttcctttaacttgatccatataacttattccatctcaattaaactttaaattgtggtcaaatatttc

SEQ ID NO: 13384 - DNA, 186 bp, Glycine max
  Clone ID: LIB3094-073-Q1-K1-E11
gccacgcgtccggtgatttcagtgagtgatctttgttcacttgatctcatcataatcgtcgaagtcaattgaagaagatgccgggcagaaacatcgccgtcggaaggcctgaataggcgactcaccccgacactgttgaaggctgctttggctgagttcatctcaaccttcatcttcgtgttcggc

SEQ ID NO: 13385 - DNA, 204 bp, Glycine max
  unsure at all n locations
  Clone ID: LIB3094-073-Q1-K1-E12
atatttttagtggacctgtctcagcttacccttttacncgttggtattcactactcatgggcagggttcatcatggtgtaaggggggccaatgggtttcctaatgcaatctaactttggcccctactggtcttaataattaaaaataaatgaaggtcctggtggcaatggatttttaccattaaaaaaggtgaatggtattacc

SEQ ID NO: 13386 - DNA, 54 bp, Glycine max
  Clone ID: LIB3094-073-Q1-K1-E2
cccacgcgtaccttcactctagcgatccaacttacaccacttcacctcatcata

SEQ ID NO: 13387 - DNA, 367 bp, Glycine max
  Clone ID: LIB3094-073-Q1-K1-E3
aattccgggcacgacctcacgcgtacgcgtacgcgtagcattgcgttcctattgatatttagtccgcattgtgctttagatgaaggtgagggcaaattaagaggggcttgagatcataacctgtgtgtttgcagcaatggctaagttctttgctgcgatgatcttgacactctatgccatgtccatactatacacaatgctgatgtctgctctggaacagagccgccacttcgtttacatcacgagcatatctagtcttggaagtgtcaactagtgcctatgcccatcacagtgctctagccgaagggacctgacctcatgccataagcccagcgtgggatgctgttataagtgcagcacgacatgc

SEQ ID NO: 13388 - DNA, 324 bp, Glycine max
  Clone ID: LIB3094-073-Q1-K1-E4
acgcgttcgtgtaactgtatgctcttagccattggtgatggagtttgcctttacatcgaggagggggcccataatacgtgatcgcgagtctgcattcacatgggtcttgaacgactatgagtgtctagactatcggctaaggaactaagaggagaccgttgtactttctgaatcatacgaaagtctatgatgctatcatgctgaacgccatcgtatgccgttcaatcgaaaacctcaactacctaacccgcgttctcaagacacttgttaccatgcgccttcatacgatatgtagtacttgagatatcataatggaactacata

SEQ ID NO: 13389 - DNA, 276 bp, Glycine max
  Clone ID: LIB3094-073-Q1-K1-E5
gcctcgcgtgcactcaccttttcgattcaattttaacaccgacatcgacatgctgagcattagtgtgcatttcaacgggcatggcccgtataatcatgctgtgagggcatctacaaacctaacgctctttgatgctaatagacttgatccaatgtgtccctttcatacttaattaagcgatcacaattgaccatgctcaagatgcgcctttgcatctcatccaaactaactccaagctttccatagcttaaacactgcatatccgcatcctatatc

SEQ ID NO: 13390 - DNA, 403 bp, Glycine max
  Clone ID: LIB3094-073-Q1-K1-E6
cccacgcgttcgtcaagcattgcattcctcttgatttgtagtccgatttgtgctttagatgaagggtgtgccaaatcaagatgggttttaagatcatagtgtgtgttatgcaacaatggctaagttctttgctgctatgatcttggcactctgtgccatttccatacttcaaacagtgttaatggctgctcatgaacagcgaggccacttgtatgacaacatgagcacatatggaagtggaagagtcaagagttaccaatgcccatacaatgctcgaggagatgtagcctgacccaataccacaagccctgcatgtgtttctgtcacaagtgctgcatgacatgcctgtgtgtgcccatcgggtattatggttataaagctgtgtgcccttgctacaacaact

SEQ ID NO: 13391 - DNA, 324 bp, Glycine max
  unsure at all n locations
  Clone ID: LIB3094-073-Q1-K1-E8
attggtttggaattncggatagagttatgtgtccggcttcctcctcttacgagcctttcctttcagtccattgattcggtgggtgcgggtgcagcggagccgggctagaccctgatcggcgtcggcacaccgccggagaacaagatgattgtctgcgtcgccgtcgtcggtcaccagaacaatccgctgtacatacagagcttcacggaggccgatgatgctctcaagctccaccacatcgtccattgctcgctcgatgtggtcgacgagcgagtgaacaatcctaaaaagtctgggccgatgcttaatgagacgtttttggac

SEQ ID NO: 13392 - DNA, 155 bp, Glycine max
  Clone ID: LIB3094-073-Q1-K1-E9
cccacgcgtccgctctcctctctcttcgtctttctctttctctctctttcagatttctgtcgctctgatctttctctctccggaagggcaaaccctaaagaccgtttgcacccaccaaggatcgtagtgccgttcatatcgtggggttttcgttt

SEQ ID NO: 13393 - DNA, 143 bp, Glycine max
  Clone ID: LIB3094-073-Q1-K1-F1
tccacgcgtccgtctatccttgcattccaatttttcagtagatgctattacactggcaccggtctacttccaaatcggcatgggctcaacgatccttatctcgatgattctataaacgctaatcaacttgcaccacaacactt

SEQ ID NO: 13394 - DNA, 56 bp, Glycine max
  Clone ID: LIB3094-073-Q1-K1-F11
cccacgcatcctgttacttcagctatttctctttttccactacacctcatcataat

SEQ ID NO: 13395 - DNA, 409 bp, Glycine max
  Clone ID: LIB3094-073-Q1-K1-F2
gcggcttgctcctgtgacgagcctttcctttcagtccattgattcggtgggtgcgggtgcagctgagccggtctagaccctgatcggcgtgggcacaccgccggagaacaagatgattgtctgcgtcgccgtcgtcggtcaccagaacaatccgctgtacatacagagcttcacggaggccgatgatgctctcaagctccaccacatcgtccattgctcgctcgatgtggtcgacgagcgagtgaacaatcctaaaaagtctgggccgatgcttaatgagacgtttttgggactgctttatcctattgaaaactaccaaggatatggatatctgactaataccaaggtgaaatttatcttggtgaccacggatctggatgttaaagatgccgatgtaaggaattttttc

SEQ ID NO: 13396 - DNA, 308 bp, Glycine max
  Clone ID: LIB3094-073-Q1-K1-D1
attggactggaattctgacgtacatgtacgcgtgcggctgaggcggacacaccgtctgtggttgaggataagacggacatagacttgatgaatgggaaggcgccgagcaacgctcgaagcgcggtgattaatgcggtgagggcattgacgaacctagcgctgaaggaggctaatgagttgatcgaaggggtgcccaacaagttcaaggaagggatttcaaaggacgaagctcaagatgctactatgcaactctaagaaactggtgccaaggttacgatcgcttaaacactgcatagctgcatcatata

SEQ ID NO: 13397 - DNA, 267 bp, Glycine max
  Clone ID: LIB3094-073-Q1-K1-F3
acggcttactcctcttaccatccttaactcccattccatttttacaccagaatcctgtacagaaagtcccgtctacaaatctatatgcctagactacacagatctactcacaaatcctacatgaatcactctaatctttcaccaggacaatccgcatgccatacatactttcactgctgcacatatatcctatcaacctcaacaacttaccaaattgttcgctcaatgtcttcaactatcgatttaccaatcctaaaaatctttgcc

SEQ ID NO: 13398 - DNA, 294 bp, Glycine max
  Clone ID: LIB3094-073-Q1-K1-F4
gatttggatgctaatttttttgatcagccagaaatgcttggagagcccattgcaagtctgggtttgctgcactatgaaggtcaagtttcggatcccttgaaaggattatatggagctggagctcatactgactatggtttaattacactgttagcaacagatgatgtctcgggtcttcaaatatgcaaagatagggatgctaaacccttaaaaatgggaggatgtagcaccattgaagggagcattcatagtgaatctttgtgacatgcctgaacgctggaacaactgcgtttt

SEQ ID NO: 13399 - DNA, 342 bp, Glycine max
  Clone ID: LIB3094-073-Q1-K1-F5
cgcctacgcgttcgtcctcttaccagccttacctttcattccattttttcaccagatgcctgtacagctgcacgggtctacaccctgatcggcctgggctcaccaactctaatcacgatgattgcatgaatgaccctcatcttgcaccagaacaatccgcattccatacagagcttaaccgatgcatagaatgctctcaagctccaccacattacatactgctctctcgatgtgctctactatcgagtcagctatactaaaaagactgtgccgctgcttaatgagactcaagtgggactggactatcctattgaaaactacacagcatatggatatctgact

SEQ ID NO: 13400 - DNA, 295 bp, Glycine max
  Clone ID: LIB3094-073-Q1-K1-F6
cttgatgatcccaacactttcggtaacaggattcacaggatgctgaagcttggactgaggatggatggagatgctggtgaagcagatgctgacatgcctcctcttgaggacgctgatgcacatgctgagggtagcacgatggaagaagttgattaaatctgacttaattgcctgttacgtttttagaaacaatgattggagaaacagtctttttactatgtttgatgtttattgaattttcgaaattttggaacgttggctagttaggtgccgtatgtagtagtttctctatggt

SEQ ID NO: 13401 - DNA, 266 bp, Glycine max
  Clone ID: LIB3094-073-Q1-K1-A7
gcgcagagtgtgagtggacctgtctcagctaccctttaccttggttattcactactcatggccagggcaagtgtgttgtcaaccggcaccatgggcttccttatgtcattctactttgtgcactacttgttctcatcagtaaagatagattgaggttcttgctgtcattgcatattaactatgaaaaaggctgattgatataacttgatcacattgcatatgagggcaccggatgattaaatcatcggctgattttatattgcgat

SEQ ID NO: 13402 - DNA, 456 bp, Glycine max
  Clone ID: LIB3094-073-Q1-K1-A8
gaacttcagggtcgggccacgcgtacgcgtgcggctgagcgcagatctagcggattctgttgctgtgaataccactggcacagagccaggatgcggagctgctgacacaacggcgagtctaaggaccagacccctgaacttgctcagctacagccgcacgggctggattggcaggctcctatggtacctgtgccgggccaagtgcatgtccttccatcacgggtcgaaccgccttaagaaccgggcctacctcgaaaccgtcataccactgctcaagccgttacacgactgtaacgctgccggatttacgggccgccccaacgttgactggtgcgagtcccacacagtcgagaccatgcgtaccaacgtcattggaacccgaactctagccgacatatgccgtgaccacagactcattctcatgagctacgccaccggttgcattttgagtacgac

SEQ ID NO: 13403 - DNA, 117 bp, Glycine max
  Clone ID: LIB3094-073-Q1-K1-B1
acggaaaaaaaaaaaagccttttactttttttcttttgcatgatttgaatcttgattggaaaagatgcgaatgggggtgttttacccatcaattcaattttaagccgtgccttcttc

SEQ ID NO: 13404 - DNA, 55 bp, Glycine max
  Clone ID: LIB3094-073-Q1-K1-B11
gctgccgaaacccttccggaaccctacagtgtattagcaatcatgcactgacaat

SEQ ID NO: 13405 - DNA, 284 bp, Glycine max
  unsure at all n locations
  Clone ID: LIB3094-073-Q1-K1-B12
attgtcagttttttcactttgttattccagctttgcactgtcttttgggagggttttttttacaanaggacgggatttttatcctacaattcttcattnttattcaaagtatcaatcaactgtccccttntttgttgttcgccatatcaaattttcatagaactacatactctactctcataatcatttttgtaaaaaggttggaggttgcgcttttgttgataagatatctttcttaatgctttaataaaagtggtacactctcatatatccttttaatttta

SEQ ID NO: 13406 - DNA, 215 bp, Glycine max
  Clone ID: LIB3094-073-Q1-K1-B2
atttgtcgctgacgcactctacagctctgtctgatatagcccctgatcgtgtatcgaggtgaagcacttgtactcgatgctgagcgcaactgtacattccctagcttgttgttccttccttactctactagtctatgatggggatcacggtgcaggtctacgactgcttcgaataccatattccatctcttgggtgacattaccgatcttgcgaa

SEQ ID NO: 13407 - DNA, 378 bp, Glycine max
  Clone ID: LIB3094-073-Q1-K1-B3
cctaaacaactctttctcttcttccttcgctcgttgttctccctcgcgtagatcgacggtgggggagacagagacgtgggctttccaggctgagatcaaccagctcctcagtctcatcatcaacaccttctactccaacaaggagattttccttcgtgaactcatcagcaacgcctccgatgctttggacaagattcgatttgagagtttgacagataagagcaagctcgatgctcagccagagttgttcattcatattattccagacaagactaacaatacactgaccattgttgacagtggtattggcatgaccaaagctgatttggtgaacaacttgggtacaattgctagatctggtaccaaggaattcatgga

SEQ ID NO: 13408 - DNA, 141 bp, Glycine max
  Clone ID: LIB3094-073-Q1-K1-B5
ccttttactttttctcgtttggctgatttgaatcttgattggaaaaggaggtgatagtagactgatacccgtgaagtcaattttaaaccgagccttttttaaaaatcataatcaaccccttttactaccacaaggaaatat

SEQ ID NO: 13409 - DNA, 185 bp, Glycine max
  Clone ID: LIB3094-073-Q1-K1-B6
tcttcgacttccatattccatctgtcgactaacatttcttatcttcccaatccttctaactcgtaaccatttatacccatgcctgctcatgcattaattcctaaactaccgaaataccatacttctgcatccttcactaacggtagcacttcctaaatttccagtgcatcttccatgtcatacac

SEQ ID NO: 13410 - DNA, 446 bp, Glycine max
  Clone ID: LIB3094-073-Q1-K1-B7
cctaaacaactctttctcttcttccttcgctcgttgttctccctcgcgtagatcgacggtgacggagacagagacgtttgctttccaggctgagatcaaccagctcctcagtctcatcatcaacaccttctactccaacaaggagattttccttcgtgaactcatcagcaacgcctccgatgctttggacaagattcgatttgagagtttgacagataagagcaagctcgatgctcagccagagttgttcattcatattattccagacaagactaacaatacactgaccattgttgacagtggtattggcatgaccaaagctgatttggtgaacaacttgggtacaattgctagatctggtaccaaggaattcatggaagccttggctgctggtgctgatgttagtatgattggacagtttggtgtggggttctactctgcatatc

SEQ ID NO: 13411 - DNA, 172 bp, Glycine max
  unsure at all n locations
  Clone ID: LIB3094-073-Q1-K1-B9
acgagcacttcttcttttcacactaccctttcaattatgacttcacagaagaaacttttgaaccgtatgctttaaataaaagtgcagcanctcgttctcaatatcntcaccattaaccaccacaaaccccttcatggctgcacatttaagaataaagctcctaaagctatta

SEQ ID NO: 13412 - DNA, 420 bp, Glycine max
  Clone ID: LIB3094-073-Q1-K1-C1
acgggcggggctgaggcggactcgccgtgcggtggttgaggagaagacggagttcgacgtggcgagcgggagggtgccgagcaacgctcgaatcgcggcgattaatgcggtgagggcattgacgaacctagcgctgaaggaggcgaacgagttgatcgaagggttgccctagaagttcacggaagggattccataggacgaagctgaatatgcgaagaagcagctcgaagaagctggcgccactgataccatagcgtacacactgcttagctgcagcatatatgcactgcttcttctcatggtggatgtagttgagttcaccagtacactggaatttcatttccattttgtctggattgcaatcttttatttcgaatgatgaaatatgagttcttatttttatattatgttttttaatgc

SEQ ID NO: 13413 - DNA, 255 bp, Glycine max
  unsure at all n locations
  Clone ID: LIB3094-073-Q1-K1-C10
attcccggtcgggcgcgcgtacggttgaaggccactgtcagctctgtcacattgttattccagctttgcactatctttttgacaagttccttttntacaacagcacgttattttggtcttacaattcttcatggctatccaaggtatcaagcaactgtccgcaaatttgttaatcgccatatcaaattttcagagaactacaaactttactttagtacccatttttccaaacggtttaaaattccactttcctta

SEQ ID NO: 13414 - DNA, 249 bp, Glycine max
  Clone ID: LIB3094-073-Q1-K1-C11
gaaattccagggaaaacaattttctctttgtgatgctgaatactttgtatctcactctccgtgtgacgagcttgtacagaagagttttgctcggttgtttttcaatgacttcttgatgaattccagctctgcggatgaggttgccaaagaaaaactgggaccttttgcaactttatctggtgatgagagctaccaaagtcgggatcttgaaaaggcatcccagctacttgcaaagcctctatatgatca

SEQ ID NO: 13415 - DNA, 340 bp, Glycine max
  Clone ID: LIB3094-073-Q1-K1-C12
acgaacagatcaatgtggagtacaatgtttcgtacgtttatcatgcgatgtttgcctacttggatagggacaatgttgcgctcaagggtcttgccaagtttttcaaggagtcaagcgaggaggaaagggagcatgctgagaaattgatggaatatcagaacaagcgaggtggaaaggtgaagttacaatctatagtgatgcctcttactgagtttgaccatgaggaaaagggagatgcgctatatgcaatggaacttgccctgtcgttggagaagctgacaaatgaaaagctgcttaacttgcacagggttgcctcaaagaacattgatgtgcaattggc

SEQ ID NO: 13416 - DNA, 441 bp, Glycine max
  unsure at all n locations
  Clone ID: LIB3094-073-Q1-K1-C2
atttgttgctgcaggaattcacagcccggcctgatatagcagatgattgttttttggggggacgaacgtgtattcgctactgtcctcaactgtttattccctcgtctgtttttccttcattagtggattgctctatgattgggatcacagtacagcatatggaggcttcgaattccatattgcatttcttggctgacatttttgatcttgcgaattcctctgtgggggagcaatttataccaataagagatagtgtaataattcctcgaggtgccagcatcaccagaattttggttgcttcattaacgggagcacttcctaaatctcgagtggatgtggcatcttatacactcctggcattaactcgatcatatgggatgcaagcgctggaatgggcaaaaaagagtgttttgttaattccatcaacagctgntacagatg

SEQ ID NO: 13417 - DNA, 468 bp, Glycine max
  Clone ID: LIB3094-073-Q1-K1-C3
acgctttagaggagggaaggatagtcagagagtttgaaggtttcagcaaccagaagcagcttggaggagaaggcgcatttaagaatgcatatgaaaatgacagggccggactcacactaccattcatgcttcgctctcacttccaaacaaacgaaaaacgttactattaccacttaggagtttacttcttcatcgctcacatcacaattcactaggaagctgtaagaaaaaggatcttcagtgcttcgagacctctgaagaagacggggaaaaagcgtgtaatgacgccagccaaggacgttgacttatcttccatcaaatacgaacgtgaaattgtgcaagctccgcatttgactggatttgtatttagattattcgtgaggataattgaagctccggttataggccctatcattatgaatattctgaagaaagaacataaaatggatgagatattgcggcacacta

SEQ ID NO: 13418 - DNA, 283 bp, Glycine max
  Clone ID: LIB3094-073-Q1-K1-C4
acggtttatctctcacacacactttctctctctctctatctcacccagatcttatatcagtgacgagcgctatcactccacgctaagagttcatgtacatggcgaacctggcttactcaacctaacgctactagcatatgatgaaattcatttaaaaagtctccgactacttcgagtaccagaatctcaccgacaacgctcgtaacctcctttccctatcctaccaaaactgcatcaacgctaccctcgcctcaccactcatcatctgctcaatctatctaaa

SEQ ID NO: 13419 - DNA, 435 bp, Glycine max
  Clone ID: LIB3094-073-Q1-K1-A5
gcgcagaggttgagtggacctgtctcagctaccctttaccttggttattcactactcatggccatggcaatgatgttgtcaaccgggaccattggcttccttatgtcattctactttgtgcactacttgttctcatcagtaaagatagattgaggttcttgttgtcattgcatattaactatgaaaaaggttgattgatataacttgatcacattgcatagtatggcaacggatgtttaattcattgtctgattttatattgcgatgggatctgcagtttgttctccttctgcctgtttcccaaagtagtgtactcattcaagtattcaactaatggttgagatcatgtttcaagtattttgttcaagtttctttaaaaagttgtaattcaaactctcatctcatttcaatactttagaaaaatgatgttagatt

SEQ ID NO: 13420 - DNA, 99 bp, Glycine max
  Clone ID: LIB3094-073-Q1-K1-C6
cacaagcgttcgtccactccttcgatccaagctgcacttcacactaactacgtctattatgaaggcggtttacacctcccatggcctatctcaacctta

SEQ ID NO: 13421 - DNA, 80 bp, Glycine max
  Clone ID: LIB3094-073-Q1-K1-C7
ggactggaattcccacgtaggcctacgcgttcgatctatctctgacacacactagagtctgtctggtttcagtcaaccag

SEQ ID NO: 13422 - DNA, 304 bp, Glycine max
  Clone ID: LIB3094-073-Q1-K1-C9
cttgaaggccattgtcagttttgtcacaatgttaattccagctttgcactgtctttttgacgatgttccttgtgtacaagagcacgattattttggtcggacaattcttcatggtggtgcaaggtatcaagcaactggccgcgggtttgttgttcggcatatcaaattttcagagaactacaaactctactctggtagtaattttgttaaagggttgaaggttgccctttggttgatagaatatctggctaatggttttaatgaagggggtgcattttaattaatcctttgaagtttaaccagt

SEQ ID NO: 13423 - DNA, 480 bp, Glycine max
  unsure at all n locations
  Clone ID: LIB3094-072-Q1-K1-G1
cccacgcgtccgagaaggcctgggcttagttgataagcataactgggtgaggaagaaagaaaggaggtgaagaagatggcgtcgagcggagcggtaccgttttggagggcggcggggatgacgtacataacatactcaaacatatgcgcgaatctgctcaggaattgcctcaaggaaccctacaaggccgaatccctctctcgtgagaagctccattttgttctctccaaatgggtcgacgccaagcctgaaaaacctactattcgttcagacaccccaaagcagtgatctggaataagtggaagctattaatgcataaatctttgagaacctgaagttcattgtcattttgaacctttctgggaatgttaattcctttggttttttctcttcatgaaatggaacatgcactggattttgatttgcacgggtaatcttggnataattccaggttaaacgaatgatttataacttattggc

SEQ ID NO: 13424 - DNA, 352 bp, Glycine max
  Clone ID: LIB3094-072-Q1-K1-G11
caaagacatccttctcctggatgtggctcccctcactctcggaattgaaactgttgggagatacgtgacaaagttgattgccagaaacactgttatcccaaccaagaaatctcaggtgttcaccacctatcaggaccagcagactacaggcttcattcaggttttcgaaggcgaaaagagtcttacaaaagattggcggcttcttgggaaaattgaaccggcttgaaatgcttcaaccccaaggggtaccccttaaattggagtgaccctctaagattatgcccaccgcgttctaaatgtgaaagcgcaaaacacaggcactctgtaatcacaaaagagcaccctttcacac

SEQ ID NO: 13425 - DNA, 165 bp, Glycine max
  Clone ID: LIB3094-072-Q1-K1-G12
acagacatccttctcacttatacatctccctacactctctgaatagaatctgttcagactgccttcttaaactccatactcagaatcactgcactacttccacaaaattctcatgtatacaccatctatcagacaccacatgacttcattcttcattcaattcat

SEQ ID NO: 13426 - DNA, 340 bp, Glycine max
  Clone ID: LIB3094-072-Q1-K1-G2
cccacgcgtccaatacatcctgaactcatatgattaccatacactcataatcaagaaagagacatgagtatgaaaatctccattagcggagcacacccatctactagcacaaccaacatgacatacattacatactcagacatatacgctaatttcttcatgaactacctcaactaactctacattgccaaatctctatctctttacatactccattttgttctcttctaaactttcgactctcatccacaatatcctactatatgcatatacacttcattacagttatcattaactgctggaagctataaatgcataaatcttttagatcttgaaattc

SEQ ID NO: 13427 - DNA, 370 bp, Glycine max
  unsure at all n locations
  Clone ID: LIB3094-072-Q1-K1-G4
cccacgcgtccggtgatttcagtgagtgatcggtgttcacttgatctcatcataatcgtcaggagtgaattgaagaagatgccgatcagaaacatcgccgtcggaaggcctgaagaggcgactcaccccgacacgttgaangcggctttggctgagttcatctcaaccttcatcttcgtgttcgccggctcaagctccggcatcgcctacaacaagctcaccgacaacggcgctgccacccctgccggcctcatctccgcctccatcgcccatgcattcgccctcttcgtcgccgtctccgtcggcgccaacatctccggcggccacgtcaaccccgccgtcaccttcggcgccttcgtcggcggcaaca

SEQ ID NO: 13428 - DNA, 295 bp, Glycine max
  Clone ID: LIB3094-072-Q1-K1-G8
gtcagtcttcagagctaaaaatgttctcactcttccatctcagtatgtgttgacatggtggacgaggaatgctaaaaccggtacattgttagatgaacatgcatctgaattgccaagtacttctcgtgaatctgtaccagtttgttataacaatttacgacaagaagcaatcaaatatgttgaagaaggtgcaaaatcaatccaaatctatcatgttgccatgagagctcttaaagaagcttcttaaaaaggtttgcaccataaaaaatcagagttctggaacagcagaaggagc

SEQ ID NO: 13429 - DNA, 56 bp, Glycine max
  Clone ID: LIB3094-072-Q1-K1-G9
gccacgcgtactcttatttcagctaatgatcattgtccacttgatctcatcataat

SEQ ID NO: 13430 - DNA, 337 bp, Glycine max
  Clone ID: LIB3094-072-Q1-K1-H1
gcgcccacgcgtccaatgattccaaagtttgatcgtttttcacttgatctcatcataatggtcatctgcaatattttaaaatgcccatcagcaacatcgccgtcagaaggcctgaaaaggcgactcaccccgacacgtttaacgctgctttggctgatttcatctcaaccttcatcttcgtgttcgccggctcatgctccagcatcgcctacaacaagctcacctacaactgccctgccaccccttctctccttatctcctccttcatcgcccattcattccccctcttcgtctccatctccgtcggcgccaacatcttcggctgtcacattaaccc

SEQ ID NO: 13431 - DNA, 293 bp, Glycine max
  unsure at all n locations
  Clone ID: LIB3094-072-Q1-K1-H10
cagaagtcagaacccagatgcactccaacatgttctgatgaaagctgatgagtatctgngcagacagccttcttaaactccctactcagaatttgagcacaagttccaggagattggtttggagagaggatctattgacaacgcagagcgtgttcttgagtcaattcaacttctcttggatcttcttgaggcccctgacccttgcacccttgagactttccttggaagaattcctatggtcttcaatgttggcattctttctccccttggttcctttgcccaagataatgtct

SEQ ID NO: 13432 - DNA, 284 bp, Glycine max
  unsure at all n locations
  Clone ID: LIB3094-072-Q1-K1-H2
tcagtcttcagagctaaaaatgttctcactctttcatctcagtatgtgttgacatgctgnattgggaattctaaaaccggtacattgttagatgaacatgcatctgaattgccaagtacttctcgtgaatctgtaccagtttgttataacaatttacgacaagaagcaatcaaatatgttgaagaaagtgcaaaatcaatccaaatctatcatgttgccatgagaactctgaaagaagctgctaaaaaagtttgcaccataaaaaatcaaaattcttgaacaac

SEQ ID NO: 13433 - DNA, 55 bp, Glycine max
  Clone ID: LIB3094-072-Q1-K1-H4
aaaaatactattacaaattaccaatttacaatataacctacattagtgcactttc

SEQ ID NO: 13434 - DNA, 414 bp, Glycine max
  Clone ID: LIB3094-072-Q1-K1-H5
cccacgcgtccggtgatttcagtgagtgatcggtgttcacttgatctcatcataatcgtcagcgtgaattgaagaagatgccgatcagaaacatcgccgtcggaaggcctgaagaggcgactcaccccgacacgttgaaggcggctttggctgagttcatctcaaccttcatcttcgtgttcgccggctcaggctccggcatcgcctacaacaagctcaccgacaacggcgctgccacccctgccggcctcatctccgccttcatcgcccatgcattcgccctcttcgtcgccgtctccgtcggcgccaacatctccggcggccacgtcaacccccgccgtcaccttcggcgccttcgtcggcggcaacatcaccttcctccgcggcatcgtctacgtcatcgcccagctcctc

SEQ ID NO: 13435 - DNA, 378 bp, Glycine max
  Clone ID: LIB3094-072-Q1-K1-H6
gtccagccacgcgtgcgcccaagcgtgctttgatctctcagatctaaccttacccactccatcatacaactcagcctattgcgaattctttaatatgcccatgtcaaccttcgttttagcctctccataagagactacacatcgctacacattcaaggcttcatttgaagatcacagttcaaatatcttaactggtgtctaaaacaaccaacacacactagcatcggaagcctagacaacaacgtacaattgccatccaattcatctatagcttacatacttgctaatgcgttcgttgctgttcaccaccgtcttcgtggctccaacattggtcgcaagctcacccaacttgggtcactaatctagtcttgcgctccc

SEQ ID NO: 13436 - DNA, 433 bp, Glycine max
  Clone ID: LIB3094-072-Q1-K1-H7
cagagtttgagtggacctgtctcagctaccctttaccttggttattcactactcatgggcattgcaatcatgttgtcaaccggcaccattggcttccttatgtcattctactttgtgcactacttgttctcatcagtaaagatagattgaggttcttgttgtcattgcatattaactatgaaaaaggttgattgatataacttgatcacattgcatagtagggcaacggatgtttaattcattgtctgattttatattgcgatgggatctgcagtttgttctccttctgccttgtttcccaaagtagtgtactcattcaagtattcaactagtgtttgagatcatgtttcaagtattttgttcaagtttctttaaaaagttgtaattcaaactctcatctcatttcaatactttagaaaaatgatgttagatt

SEQ ID NO: 13437 - DNA, 274 bp, Glycine max
  unsure at all n locations
  Clone ID: LIB3094-072-Q1-K1-H8
cctgtctcatctaccctttaccattcttatacactactcctgcccatttganaaattttctcagccctcaccattgacttccttatgtcattctactttatgcactacttgttctcatcagtaaagatagattgaggttcttgatgtcattgcatattaactatgaaaaaggctgattgatataacttgatcacattgcatagtccggcaactgatgtttaattcattgtctgattttatattgctatgggatctgcaatttgttctccttcat

SEQ ID NO: 13438 - DNA, 258 bp, Glycine max
  Clone ID: LIB3094-073-Q1-K1-A10
gttctagatcgcgatctagaactagccaattcactctttttcttctcgccctctgccgtggaaggaagttgtaacaatggttgttctaccaacggcggacctaatggccccaaatgcaccacatgtaccaggtggtaatgtaaggtggtggattcaagggtcaagggttaccgggggggcaaccggtttttcgggccccgtggcaacctgaaaggggttggagaccacctggtggttaaggagcctcttgagaccaaa

SEQ ID NO: 13439 - DNA, 174 bp, Glycine max
  Clone ID: LIB3094-073-Q1-K1-A11
gatctataactagccaatttactctttatcttctcgccctctgccgtgtggggggaggttgtttcataaactgggctagcaacctcagatcttattgactcaaatgcaacacatgtatcaagttgtgatgtgagggtgttgcatccagtgttcaaggcttactgtggtgccacc

SEQ ID NO: 13440 - DNA, 249 bp, Glycine max
  Clone ID: LIB3094-073-Q1-K1-A12
tagcacttcttcttttcacactgccgcttcaactatggcttcagagaataaactttcgagcccgattatttagataaaagtgcagaagctcgttctcaatatctctgttggccaaagtggagatcgtctcaccaaagccgccaaagtgtttgaacaacttagtggccaaaccccagtgttttccaaatcaaggtacactgttcgttcctttgggattagaagaaatgagaagattgcattctatgtcac

SEQ ID NO: 13441 - DNA, 351 bp, Glycine max
  unsure at all n locations
  Clone ID: LIB3094-072-Q1-K1-F8
tttggatgctaattcttttgatcatccagatttgcttggagagcccattcaactgctcntgtgcaactctataaaggtcaagtgcccgatcccttgaaacgattatatggacctacagctcatactgactantatttaattacactgttagcaacagatgatgtctcgggtcttcaaatattcaaatatatctatgctaaacctcataaatcgcacgatgtatcaccattgaaaggagcattcatagtcaatcttcgtgacattcttgatctcttgagcaacttcgtttttaagtccacactgcacagattctaagaaaccgtcaatgaaaatattctatttcatacttct

SEQ ID NO: 13442 - DNA, 432 bp, Glycine max
  Clone ID: LIB3094-073-Q1-K1-A3
cagagtttgagtggacctgtctcagctaccctttaccttggttattcactactcatggccgtggcaagcatgttgtcaaccggcaccattggcttccttatgtcattctactttgtgcactacttgttctcatcagtaaagatagattgaggttcttgttgtcattgcatattaactatgaaaaaggttgattgatataacttgatcacattgcatagtaaggcaacggatgtttaattcattgtctgattttatattgcgatgggatctgcagtttgttctccttctggctggttcccaaagtagtgtactcattcaagtattcaactagtgtttgagatcatgtttcaagtattttggtcaaagttctttagaaggttgtaattcaaactctcatctcatttcaatactttagaaaaatgatgcttagat

SEQ ID NO: 13443 - DNA, 450 bp, Glycine max
  unsure at all n locations
  Clone ID: LIB3094-073-Q1-K1-A4
gcagagcagagatctagcgtattctctcgctctttctttcactgtcacagagccacggccggaggcttcccagccaacggcgcctctgcggcccagcccctaaacttcctcatctacggccgcacgggctggattggcggcctcctcggctccctctgccgggcccagggcatctccttccattacggctcgggccgcctcgagaaccgggcctncctcgaaaccgacatagccctcctcaagccctcccacgtcttcaacgccgccggcgtcacggngccgcccaacgtcgactggtgcgagtcccacaaagtcgagaccatccgaaccaacgtcgtcggaacccttactctcgccgacgtctgccgcgaccacggcctcattctcatcaactacgccaccggttgcattttcgagtacgactccgatcacccnctcggatccggtatc

SEQ ID NO: 13444 - DNA, 329 bp, Glycine max
  Clone ID: LIB3094-072-Q1-K1-D7
tctacctctaaaccctaaacaactctcactctttttcctacgctcgctgctctccctggcttaggtcaacatttacacagacacagacgctctctatccacgctgacatcaaccatctcctcactctcaacatcaacaccttctactccaacaaggagatcatccttcgcgaactcatcatcaaccccttctatgctatgcacaacattcgatatgcgagctcgacacataatagcaagctcaatgctcagccacagctggtcattcatattattccagacaagactaacaatacactgaccattgttgacaatcatattcacattacc

SEQ ID NO: 13445 - DNA, 257 bp, Glycine max
  Clone ID: LIB3094-072-Q1-K1-D9
acgtttgaaggccactgtcagctatgtcacaatgtaattccagcttagcactgtcttttgacagttccttgtgtacaagagcacggtatgacggtctgacaatgctttatggtggagcaaggtatcaagcaactggccacgcgtttgctgaccgccatactaaatattcagagaactacatactctactctagtagtcattatcgttaaggggtgtaggatgcacttgctgtgacagtatatcttgcttatggctat

SEQ ID NO: 13446 - DNA, 237 bp, Glycine max
  Clone ID: LIB3094-072-Q1-K1-E1
ctacccactcatccacccacgcgtccttctatcattccttaccatctctttctcatcttccttcgctctttatatacctgtcctacgtcaacaatatccgttacaaaaacatattctttccaatccaacatcaactaacttcttagcctcaacaataactaccacttatctgcaactttgcatactttactacagtgaactcatcatcatcatctacaatgctttccactagattac

SEQ ID NO: 13447 - DNA, 150 bp, Glycine max
  Clone ID: LIB3094-072-Q1-K1-E10
gcttttctcatgtttaatttatgcgatcagcttccgggtggagacttgatattagaagccgtggcaaatatgccaaactgaagagagtcacatcatgaaaatgatttcaagggtgggagtggaatgtattctatatcagccgtggacatg

SEQ ID NO: 13448 - DNA, 431 bp, Glycine max
  unsure at all n locations
  Clone ID: LIB3094-072-Q1-K1-E12
cagagtttgagtggacctgtctcagctaccctttaccttggttattcactactcatggccattgcaatcatgttgtcaaccggcaccattggcttccttatgtcattctactttgtgcactacttgttctcatcagtaaagatagattgaggttcttgttgtcattgcatattaactatgaaaaaggttgattgatataacttgatcacattgcatagtanggcaacggatgtttaattcattgtctgattttatattgcgatgggaacctcaaattggtctccctctggctggttccccaaataatggactcattcaagtattcaactagtgtttgagatcacgtttcaagagttttggtcaaatttctttagaagggtgtaattcaaactctcatctcatttcaatacttttgaaaaatgatgtttgat

SEQ ID NO: 13449 - DNA, 328 bp, Glycine max
  Clone ID: LIB3094-072-Q1-K1-E2
cccacgcgtccgtgaagcattgcatccctcttgattcgtatttcgttttgtgctttagataaatggtctctgtaaacattataactggtaagagcatagtgtgtgttatgcaacaatggctaacttctttgctgctatgatcttggcactctttgccatttccatacttcaaacagtgataatggctgctaatgaacaaggaggccacttgtatgacatcaagagcaaatatggaagtggaagtgtcaagagttaccaatgcccatcacaatgctcgaagagatgtaaccagacccaataccacaagccctgcatgtttttctgtcac

SEQ ID NO: 13450 - DNA, 442 bp, Glycine max
  unsure at all n locations
  Clone ID: LIB3094-072-Q1-K1-E3
ggtcttcctctaaaccctaaacaactctttctcttcttccttcgctcgttgatctccctagtcgtntgtcgacaattgcngagacagagacgtttgctttccaggctgagatcaaccagctcctcagtctcatcatcaacaccttctactccaacaaggagattttccttcgtgaactcatcagcaacgccttcgatgctttggacaagattcgatttgagagtttgacagataagagcaagctcgatgctcagccagagttgttcattcatattattccagacaagactaacaatacactgaccattgntgacagtggtattggcatgaccaaagctgatttggtgaacaacttgggtacaattgctagatctggtaccaaggaattcatggaagccttggctgctggtgctgatgttagtatgattggacagtttggtgt

SEQ ID NO: 13451 - DNA, 451 bp, Glycine max
  Clone ID: LIB3094-072-Q1-K1-E5
tcttcctgtaaaccctaaacaactctttctcttcttccttcgctcgttgatctccctggcgtagagcgacaatggcggagacagagacgtttgctttccaggctgagatcaaccagctcctcagtctcatcatcaacaccttctactccaacaaggagattttccttcgtgaactcatcagcaacgcctccgatgctttggacaagattcgatttgagagtttgacagataagagcaagctcgatgctcagccagagttgttcattcatattattccagacaagactaacaatacactgaccattgttgacagtggtattggcatgaccaaagctgatttggtgaacaacttgggtacaattgctagatctggtaccaaggaattcatggaagccttggctgctggtgctgatgttagtatgaatggacaaattggtgtggggttctactc

SEQ ID NO: 13452 - DNA, 351 bp, Glycine max
  Clone ID: LIB3094-072-Q1-K1-E6
tcttcgtgtaaaccctaaacaactctttctcttcttccttcgctcgttgatctccctgacgttagtcgacattgacacagacagagacgattgctttccaggctgagatcaaccagctcctcagtctcatcatcaacaccttctactccaacaaggagattttccttcgtgaactcatcagcaacgcctccgatgctttggacaagattccatttgagagtctgacagattagagcaagctcgatgctcagccagagttgttcattcatattattccagacaagactaacaataccctgaccattgttgacagtgctattggcatgaccaaagctgatttggtgaacaact

SEQ ID NO: 13453 - DNA, 478 bp, Glycine max
  Clone ID: LIB3094-072-Q1-K1-E7
caagaaccaacctaccttttgcaatctcaattcaatggcgtcctctctcattgcgaagcgcttcgtctcctcttccctcctctccaggtccctccttcgccccgccgcttccgcttcccaccgctctttcaacaccaacgccatgcgccagtatgacaaccgcgccgacgaccacagcaccgacatcgatcgtcactccgaacgctctttccctagcactgcgcgccgcgacgatatcttctcagatgtgttggatccattttttccgactcggagtttgagccaggttctgaacatgatggaccaggtcatggacaatccgttcctctccgcgtcgcgcgggatcggagctggcgctggagtgcgtcgcggatgggacgcgagggagacagaggatgctctgcatctgcgcgtggacatgcctgggctcggcaaggaagacgtgaagatctccgtggagcaaaacactctcattatc

SEQ ID NO: 13454 - DNA, 196 bp, Glycine max
  Clone ID: LIB3094-072-Q1-K1-E8
caataaccaacctacctaacaccatctcaacttattgccttcctctctcatctccatgcgcttagtctacttttacatacactgcagctccctccttccaccctacgatcacccatcccaccactctcacaacaccaaacccatactccaacatgacaacctttcctactaccacaataaccacctccatcaacac

SEQ ID NO: 13455 - DNA, 53 bp, Glycine max
  Clone ID: LIB3094-072-Q1-K1-E9
gccacgcgtccggtgatttcagtgaatgatccgtgttcacttgaactcatcat

SEQ ID NO: 13456 - DNA, 312 bp, Glycine max
  unsure at all n locations
  Clone ID: LIB3094-072-Q1-K1-F1
cccacgcgtccggtgatttcagtgagtgatcggtgttcacttgatctcatcataatcgtcagcgggaattgaagaagatgccgatcagaaacatcgccgtcggaaggcctgaagaggcgactcaccccgacacgttgaaggcggctttggctgagttcatctcaaccttcatcttcgtgttcgccggctcaggctccggcatcgcctacaacaagctcaccgacaacggcgctgccacccctgccggnctcatctncgncttcatcgcccatgcattcgccctcttcgtcgccgtctccgtcggcgccaaca

SEQ ID NO: 13457 - DNA, 127 bp, Glycine max
  Clone ID: LIB3094-072-Q1-K1-F11
gacacgcgtgctggaacacaagctcatccagatttgcgtaaacactgtcagaaccgtgatgacgacctgctctattaccgtcctttcacctgcgacgtttgacaacatatctttagattggaacaca

SEQ ID NO: 13458 - DNA, 78 bp, Glycine max
  Clone ID: LIB3094-072-Q1-K1-F12
gataggcgtgctggaacactcgctgacccagatgtgcgagaacaccgtctagaccggtgggaggcgctgcactattac

SEQ ID NO: 13459 - DNA, 193 bp, Glycine max
  Clone ID: LIB3094-072-Q1-K1-F2
ctcactcatcccaacacttcactgaacaatctttacacacttcatctgatcatactcatcatcagcaattagacaagttacccatcagcatcactatcctctgtagaccacactaatccacatactcatactcgcagaatgcaactaagtctttaaacatcacaaacttgatctttacgttcttagaatcaat

SEQ ID NO: 13460 - DNA, 508 bp, Glycine max
  Clone ID: LIB3094-072-Q1-K1-F5
ggtccagccgcgcgtccggatttggatgctaatttttttgatcagccagatttgcttggagagcccattgcaactgtgcgttggctgcactatgaaggtcaagggtcggatcccttgaaaggattatatggagctggagctcatactgactatggtttaattacactgttagcaacagatgatgtctcgggtcttcaaatatgcaaagatagggatgctaaacctcagaaatgggaggatgtagcaccattgaagggagcattcatagtgaatcttggtgacatgctggagcgctggagcaactgcgtttttaagtccacactgcacagagttctaggaaacggtcaaggaagatattctattgcatacttcttggagcccagtcatgattgtctagtggagtgcttgcctacctgcaaatcagacagtaatcccgccaaatttcctcccatcttatgccatgactacctaactcagcgctacaacgacactcatgctgacttgaatg

SEQ ID NO: 13461 - DNA, 357 bp, Glycine max
  Clone ID: LIB3094-072-Q1-K1-D6
cccacgcgtccgtccacgctttcgcccacgctttctccaccgtcctctcctctgctcgggctagctctagcatgcttctgtcgctctctgccttccatcacactcggcatttcctttcccaagatagtagaagatggcagacactgaggatattcaacctcttgtttgtgacaatggaacaggaatggctaaggctggatttgctggagatgatgccccacgtgctgtgtttcccagcattgtacgtcgtcctcgtcacactggtgtgatggttggcatgggccaaaaagatgcatatgttggtgatgaggcccaatctaataggggtatcatgactctcaagtaccccattgaaca

SEQ ID NO: 13462 - DNA, 471 bp, Glycine max
  unsure at all n locations
  Clone ID: LIB3094-072-Q1-K1-F6
gtccagccacgcgtgcggatttggatgctaatttttttgatcatccagatttgcttggagagcccattgcaacgctgcgtgtgctgctctatgaaggtcaagtgtcggatcccttgaaaggattatatggagctggagctcatactgactatggtttaattacactgttagcaacagatgatgtctcgggtcttcaaatatgcaaagatagggatgctaaacctcagaaatgggaggatgtagcaccattgaagggagcattcatagtgaatcttggtgacatgctggagcgctggagcaactgcgtttttaagtccacactgcacagagttctaggaaacggtcaaggaagatattctattgcatacttcttggaacccaatcatgaatgnctagtggagtgcttgcctacctgcaaatcagacagtaatccgcccaaatttcctccaatctatgccatgactacctaac

SEQ ID NO: 13463 - DNA, 479 bp, Glycine max
  unsure at all n locations
  Clone ID: LIB3094-072-Q1-K1-F7
atttggatgctaattcttttgatcatccagaatttcttgcagagcccattacaactggtncattgactactttataaaggtcaagggtcccatcccttaaaacgattatattgacctgcatctcatactgactantatttaattacactgttagcaacagatgatgtctaccctcttcaaatatacaaatatatggatgctaaacctcataaatgctacgatgtagcaccattgaatgcatcattcatactcaatcttggtgacattcttgaactcttgatcaactgcatttttaaatccacactgcacagatttctaggaaacggtcaatgaagatattctattgcatacttcttgaaacccattcatgattgtctagttgaatgcttgcctacctacaaatcaaacattaatccgcccaaatttcctcccatcttattccatgactacctaactcatcgctacaactacacttattc

SEQ ID NO: 13464 - DNA, 223 bp, Glycine max
  unsure at all n locations
  Clone ID: LIB3094-072-Q1-K1-B11
gctgccgaaacccttccggaaccctaaggtaagtgagtaatcagtggttgagaatgaggaaaaagggcgaaggtagaaaggaggatgtggttacacgtgagtacaccattaacctncacaagcgcctncatggctgcacatttaagaagaaagctcctaaagctattaaggagataaggaaatttgcccaaaggccatggggaccaatgatgtgagggtggat

SEQ ID NO: 13465 - DNA, 207 bp, Glycine max
  Clone ID: LIB3094-072-Q1-K1-B12
gttgaaggccattgtcaggttcgtcacaatgcaattgcagctttgcactgactttttgagagaaggcttgggtacaagagcacgttattttggtcggacaattcttcatggtggtgcaaggtatcaagcaactggccgcgggtttgatgatcgccatatcaaattttcagagaactacagactctactctcgagtcattttgctaaa

SEQ ID NO: 13466 - DNA, 360 bp, Glycine max
  Clone ID: LIB3094-072-Q1-K1-B3
gttctagatcgcgatctagaactagccaattcactctatttcttctcgccctctgccgtgggagaagtttgtaacatggctgctctaccaacggcggagcttagtgacgcaaatgcaacacatgtagcaagttgtgatgtgagggtgttgcatccagtgttcaaggtttacggtggggccaccgcgttctccggccccgttgtcaccgtgaaggtgtttgaagacaacgtgttggtgagggagcttcttgagacgaaaggccaaggaagagtattggttcgtgatggaggacgaagcttgaggtgtgcattggtgggagggaatttggcactgattgcacataacatgggttgggctggg

SEQ ID NO: 13467 - DNA, 395 bp, Glycine max
  Clone ID: LIB3094-072-Q1-K1-B5
cccacgcgtccgcccacgcgtccggaagaaaggaatataccttacggatggtggaatgaagaaggatttgggattgcatagtgcgggtggtgacgaagatggaagacaaagagagtgagagagagaaaaatcttcgctttatgtcaatggcacgaagcaggggtttttacagaagtgagcaacgacgccagatatgagaaaagtgagtttatttggggtcatatttgtaaaaagtggttttgtaattataccctctaattcaagagtgaaaaaaacaagggtgggatggaaatataaatagtacaatttggtcctagtggtggcttaccctttggcctctttttctaattcagaattttttttaaatatataaaagtggggtgatatgtttactt

SEQ ID NO: 13468 - DNA, 390 bp, Glycine max
  Clone ID: LIB3094-072-Q1-K1-B6
accacgcgtccgcccacgcgttctgaataaaggtatataccttacagatggtggaatggagaaagatttgttattgcatagtgcgggtggtgactaagatggaagacaaagagagtgagagagagaaaaatcttcgctttatgtcaatggcacgaatcaggggtttttacagaagtgagcaacgacgccagatatgagaaaagtgagtttatttgaggtcatatttgtaaaaagtggttttgtaattataccctctaattcaagagtgaagaaacaaggatgggatggaaatataaatagtacaatttggtcctagtggtggcttaccctttggcctctatttctaattcagaattttttttaaatatataaaagtcgggtgatatgttt

SEQ ID NO: 13469 - DNA, 218 bp, Glycine max
  Clone ID: LIB3094-072-Q1-K1-B7
cccacgcgtccgtccacgcttccggaagaaagttttataccttacggatggtgtaatgaagaatgattaattattgcatagcgcgggcggcgaccaagatcgaagactcagacagtgacacatagaaacatcttcgctttatttcaatggcaccaagcaggtgcttttacagactcgagcaactacgccagatatgacaaaagtgaggttattttggg

SEQ ID NO: 13470 - DNA, 299 bp, Glycine max
  Clone ID: LIB3094-072-Q1-K1-B8
atttgaaggttgttttgtgcttatagataaaagttctgccaaatcaagaggggttttgagatcagagtgtgtgtgtgtgtgttaaacaatggctaagttctttgctgctatgatcttggcactcattgccatttccatgcttcaaacagtggttatggctgctaatgagcaaggaggccacttgtatgacaacaagagcaaatatggaagtgggagtgtcaagagataccaatgcccatcacaatgctcgaggagatgtagccagacccaataccacaagccctgcatgtttttctgtc

SEQ ID NO: 13471 - DNA, 153 bp, Glycine max
  Clone ID: LIB3094-072-Q1-K1-C11
gtttggtgtaactgcatgctctttgccattgttgatggagtttgcctttatattttgtggatgcccatatagttatacaatttgattttaaggtcttgatgactattgttcctagactattgtctaaggaactaaaaggagaagtttttaata

SEQ ID NO: 13472 - DNA, 391 bp, Glycine max
  Clone ID: LIB3094-072-Q1-K1-C12
gttaggtgtaactgcatgctctttgccattgttgatggagtttgcctttagatttttgagtagcccatatagttatacaagtgggttttagggtcttgtagactagtgttcctagactattaggtaacgaactaagaaggagaagctctaaatatgtaaaatataggaaaagttaaaagaaaaatcataaaaacgcaattttaatcctttcaattaaaaaccttaagttctttacccgtggtcctcggaaacttggtaacatttggcttaattttataaggatcaatagaatattattattgaaaaaaatatggcctacctttttacgtcatttgaatcattttattaagggccattaaatactttaacttggggggccagtttgtcaaaa

SEQ ID NO: 13473 - DNA, 368 bp, Glycine max
  Clone ID: LIB3094-072-Q1-K1-C3
cccacgcgtccggtgatttcagtgagtgatcggtgttcacttgatctcatcataatcgtcagcgggaattggagaagatgccgatcagaaacatcgccgtcggaaggcctgaagaggcgactcaccccgacacgttgaaggcggctttggctgagttcatctcaaccttcatcttcgtgttcgccggctcaggctccggcatcgcctacaacaagctcaccgacaacggcgctgccacccctgccggcctcatctccgccttcatcgcccatgcattcgccctcttcgtcgccgtctccgtcggcgccaacatcttcggcggccacgtaaaccccgcgtcaccttcggcgccttcgtcggcggcaaca

SEQ ID NO: 13474 - DNA, 339 bp, Glycine max
  Clone ID: LIB3094-072-Q1-K1-C4
atccaagaggaagaagaggaagaagaagaaggggttgtggttcggaggaccagtgttcggaagaggggcttggtgaagaagcttggggatgattttgacagggttgccctggaaaacgatgagtccaatacggtgtcgtcgttgaagacgactcgtggtcggaaattggttaagaatggtgaacttgggaacaaaacggtggttgaagtagctgaaaaatcaaacaccaaaggaaagaagagtgcaagtgaagccgagaagagccctggggttagaacttcttccagattggctaaacgtgtgtccaatcaaacgtcttgtaattagatgtttgataaa

SEQ ID NO: 13475 - DNA, 222 bp, Glycine max
  Clone ID: LIB3094-072-Q1-K1-C5
ctctatgtctcacacacactttctctctctctttctctcacccagatcttgtaacaagcgccatgtctacctctccacgcgaaacggtcccgtacatagccaagctgacgcaacacacccagccctactaaaagatgctttagctcatttaaaatgaatcctcatcctccgaaacccaggatcagaccccggaataacctaacctactctcactcacctaca

SEQ ID NO: 13476 - DNA, 331 bp, Glycine max
  Clone ID: LIB3094-072-Q1-K1-C6
gtccttaattcaccgatccagccacgcgtccgctctatcgctcacacacactatctctctgtctttctctcacccagatcttgtaacaagagctatgtctaccactccacgcgaaaaggtcacgtacatggccaagcataccgatcatgccaatcgctactaggagatgatgaaactcatggagaaggtatccgcctacaacgatagccatgagctcaccacggaggaacataaccttctctccgtaaactacaagaacgtgatcagcgctcgccacgcctactagcgcatcatctccataatcgagcacaaagaggataaacgcgtgaac

SEQ ID NO: 13477 - DNA, 397 bp, Glycine max
  Clone ID: LIB3094-072-Q1-K1-C7
agcaaattcatttcattcaattcaatgtaaaaaaacacagtagccacccaatacataggatttgggtatgctttctacacgcacttcctccttcgtatccgtctcttccccaaccattggaatacattccttaacccaccgcaaatccaaatccaaattcaattcgagctgaacctagggtttgttccttcctattgccttcacggatctcgcattctcctcaaatttccgaaacgggaaaaagaaaatgcacgcgaaatcggcgcagtcgtcgttccgggatcggactcaggaattccacagcatcacagagaggttgaagaagtccggatcagggcccaatgggcccagcagcagcacttcttccaccagatcggaagaacagcgatccgcgatc

SEQ ID NO: 13478 - DNA, 337 bp, Glycine max
  Clone ID: LIB3094-072-Q1-K1-C8
caatttgtaatttcacagaccacacctaatacatagcggctttgtgaactttctacacgctcattgtcacaccgatgcccttcaaaaccatccatccaattccatttcttaactcaacacaactcctaatccaaaatcaattaaaactgaacaacttgataacaaaacgctatttccaacaccgtatataatcaaacaccaaaataaacaaaactgcaaatcaaacctacaagagccctctggtcagaacttcttccagattcgctaaacgtaagtccaatcaaacatattgtaattagataattgacaaacatgacccaatccttctacttttatt

SEQ ID NO: 13479 - DNA, 150 bp, Glycine max
  Clone ID: LIB3094-072-Q1-K1-C9
cttgaaggccattgtcagttttgtcacaatgtaattccagctttgcactgtcttttggacaatgtccttgggtacaagaacacattattttggtcggacaattcttcatggtggtgcaaggtatcaagcaactggccgcgggtttggtgg

SEQ ID NO: 13480 - DNA, 258 bp, Glycine max
  Clone ID: LIB3094-072-Q1-K1-D1
agcaaagtcatttcattcaattcattttaaaatatcacagtagccacccaatacatagaattttgttatactttctacacgcacttgcttcttcgtatccatctcttacccaaccatttgaatacattacttaacccacctcaaatccaaattcaaattcaattctatctcaacctaatgtatgactcttcctattgccttcactaatctacaattctacacaaatttcccaaacgcgaaaaagaatatgcacactaa

SEQ ID NO: 13481 - DNA, 417 bp, Glycine max
  Clone ID: LIB3094-072-Q1-K1-D10
aattcccgactccggccgatcgcgtgcacatatcatcagtgtaaacaattgcgatcacgtttatcatgcaaactttgcctacttggctagtgacaatgttccactcacgggtcatgccaagcttatcaaggagtcaagcgaggaagaaaggtagcatgcttataaatcgatggcatatcatctcacgcgagatttagaggtgaagctacattctatagcgatgcctattactgaatttgaccatgaggaaaatgtagatgcgctatatgcaatgtaactagacctgtcaatggagacgctgacaaatgtaaagctgtttaactgcacaaggttccctcaatgaacattgatgtgcaattgtctcattttattgaaagcgagttttagggtgaccatttggactcaataaaaaaaaga

SEQ ID NO: 13482 - DNA, 243 bp, Glycine max
  Clone ID: LIB3094-072-Q1-K1-B1
tataccttacggatggtggaatgaagaatgttttattattgcatagtgcgggtggtgaccaagatggaagacaaagagagtgagagagagaaaaatcttcgctttatgtcaatggcacgaagcacgggtttttacagaagtgagcaacgactccagatatgagaaaagtgagtttatttggggtcatatttgtaaaaagtggttttgtaattataccctctaattcaagagtgaaaaaacaag

SEQ ID NO: 13483 - DNA, 254 bp, Glycine max
  Clone ID: LIB3094-072-Q1-K1-D11
gatcagcgtaacggcatgctactgacagatgttgatcgaagatggctttacagatcctaggacgtccatataatgctacatttggacttcacggacgtggcatccactaatactagacaagaggctaatggactgaatgaagacaaatatactaggggaagctatggaaggggttacccaaatcattgaagaacccgatattatgcctatgaataaagaagctatgctgctcatggcgggtgctctggacactc

SEQ ID NO: 13484 - DNA, 209 bp, Glycine max
  Clone ID: LIB3094-072-Q1-K1-D12
gtttggtgtaactgcatgctctttgccattgttgatcgagtttacctttagatttctgagtgacccatatacttatacagtgtgattttaggatcttgttaactagtattcctagactattgcttaaggaactaaaaggagaagcttttattatctaaatcatagaaaagtttacaaaaaaatcataaaaaacccatttttatgccttc

SEQ ID NO: 13485 - DNA, 418 bp, Glycine max
  Clone ID: LIB3094-072-Q1-K1-D5
cccacgcgtacgtccacgcgttcgcccacgcgttcgcccacgcgtccgctccctctgttcgtgctagctctatacattcttctctcgctctctgccttccatcacactcggcatttcctttcccaagatagtagaagatggcagacactgaggatattcaacctcttgtttgtgacaatggaacacgaatggttaaggctggatttgctggagatgatgccccacgtgctatgtttcccagcattgtacgtcgaactcgtcacactggtgtgatggttggcatgggccaaaaagatgcatatgttggtgatgaggcacaatctaagaagggtattctgactctcaagtaccccattgaacatggaattgtgagcaattgcgatgatatggaaaagatttggcatcataccttctataa

SEQ ID NO: 13486 - DNA, 445 bp, Glycine max
  Clone ID: LIB3094-071-Q1-K1-G12
atcgaaaccttaagtttcggatcaggtctgagcaatctggttggtagaacctttggtctgagagagtcaagttttatgtctgaattagacgatcaaattcctactgccttcgatccttttgctgatgcaaatgctgatgactcgggtgctgggtcaaaggagtatgtgcatattcgcgtacagcagcgaaatggaaggaaaagcctgacaaccgttcagggattgaaaaaagaattcagctataacaagatacttaaagatgttaagaaagagttctgttgcaatggaacagttgttcaggacccagaactaggacaggttattcaacttcaaggtgatcagaggaagaatgtttctaccttcctggtccaggctggtatcgtgaagaaggagcatatcaagattcatggtttctgagcggttggagtctcaagtgtcaagtctt

SEQ ID NO: 13487 - DNA, 447 bp, Glycine max
  Clone ID: LIB3094-071-Q1-K1-G3
atggtgtatcaattactaacacattagtcactcgcccttttgtgatttcacatttgcttttctattttttcgattacaaaaaagaagaaagaaaatcggtgcttttcatttattattatgtgaagaaaaaaaataaaatctcatatcatgttgtcaaccaagtcttgaatatgcggtgtgtttgttcgttcgttcaccaggggtgtttaccacagagatagatgctgaacaagggaaggtgacggtttcagggaatgtggatcccaacgttctgatcaagaagcttgcaaaatctgggaaacatgcagaactctggggtgcacctaaacccaacaacaacaacaattatcataatcataattaccagaaccaccttgccgaccagcttaagaacatgcaaatttacaaccattccaaaagtggtggtggtggtggaaaccacaacaa

SEQ ID NO: 13488 - DNA, 403 bp, Glycine max
  Clone ID: LIB3094-071-Q1-K1-G4
acgcttcatgctattgcttcctatctctttctcatgaccccttcatggagtccactttgcgcaccaatctgctagtcttcaacaacaccctccaaccagagttaatgaggagtgtgcatgtgtaccgccgaggggatggagagaaaagggaagttgagagagagtttgtgttttcagagagcggctcctatggggaaatgcaggctaccccaattcctggattggtaaaatctcgtgtttctgaagtgtgtgaagggcaccgaaatggagtgtggctttgtgtctttgcgttccatgccgatcacactcctcaattttgccgcattccaccggttttgttggtcacaagaaacccaaagcttaagatgattccaaacttgcttgatgatctccatgtgatata

SEQ ID NO: 13489 - DNA, 447 bp, Glycine max
  Clone ID: LIB3094-071-Q1-K1-G7
atggctcccaaaccgcctagtacgggtctgtttgttggactgaacaagggtcacgtcgtcgccaagaaggaattgcctccacgcccctcagatcgtaaggggaaaacaagcaagagggtgcactttgtgaggaacctcataagagaggtagccggttttgcaccctatgaaaagcgtataactgagttgctgaaggttgggaaggataagagggcactgaaggttgcaaagagaaagctcggaacacacaaacgcgcaaagaagaagcgtgaggaaatgtccagtgttctcaggaagatgagggctggtggtgctggagacaagaagaaataagtcttatttactgttttccagattcactagatggacctgtgtattgatggacgagctttcatatttttgctttggttcaattagtttacttcaagattttgtttgagaaatatg

SEQ ID NO: 13490 - DNA, 429 bp, Glycine max
  unsure at all n locations
  Clone ID: LIB3094-071-Q1-K1-G8
gattccacaaaatcaaatctcccactaccaacaacactgccaccactaagagcactgacaacgctccttcactccaccactcctcactcttctcattcagatctacccaacacacacacaccaaaaaataaaataaaaatgcaactccaacccactctctccactctctacctctcccttttgttaacaataacgttaacatctccaaccttggcagcacaaagcaagccgcaggatctggtccggtcctcgtgcgtgcacgcgcggtacccgcgtctgtgcctgcgcaccctctcgaactacccgggtcccgccaacacgccgttagacgtggccagngcagctttgagggtaagcctggcccacacgcgccgggcctccaaattcctccatgcactttctcatggaggcgctgccgccatgagcaag

SEQ ID NO: 13491 - DNA, 425 bp, Glycine max
  Clone ID: LIB3094-071-Q1-K1-G9
tcgcccacgcgttcgagaaggcctgggcttagttgataagcataactgggtgaggaagaaagggggagagtgaagaagatggcgtcgagcggagcggtaccgttttggagggcggcggggatgacgtacataacatactcaaacatatgcgcgaatctgctcaggaattgcctcaaggaaccctacaaggccgaatccctctctcgtgagaagctccattttgttctctccaaatgggtcgacgccaagcctgaaaaacctactattcgttcagacaccccagagcagtgatctggaatagttggaagctataaatgcataaatctttgagatctggaagttcattgtcattttgaacctttctgtgatgtttaattcctttgtttttttctctccatgaaatggaacatgcactggattttgat

SEQ ID NO: 13492 - DNA, 254 bp, Glycine max
  Clone ID: LIB3094-071-Q1-K1-H11
gaagaatccaatggtgatgaacaagatccaaaagctggtcagtgctggaattgtccaaatggggtaaattggttgcaggtggcagttcgtgtgaaaaagtaatcggcaatgatgtctcagtgtgactattttgacatttaaataggattttgattggggaaaaagttgggaaattttgagttgtttttaccttcgttttgttttagtgaattcatataatttacgagtatcaagtgccagtccatttttatatt

SEQ ID NO: 13493 - DNA, 452 bp, Glycine max
  Clone ID: LIB3094-071-Q1-K1-H4
tttgaatacattccttgtagtttatactgaaagatgggtttgaagatggcgttactgatcgtaggcctttgcctcatgctccttttggtctcctctgaggtggcatccacgaatacaaaagaggaggcaaatggagtggatgatgccaaatatcccggtggaagctatggagggggttacccaggtcatggcggtggcggttatcctggccatggcggtggcggttatcctggccatggcggtggtggtggctatcctggtcatggtggtggccaccctggtcatggtggcggctaccctggccgtggtggtggatactgtaggcatggctgttgcggtggccggacatacaacggaagttgcaaaaggtgctgctataacgctggcgaaggctgtgctgcacaaactcaagataagactcacgattaagacgatgcagttctacttaatta

SEQ ID NO: 13494 - DNA, 380 bp, Glycine max
  Clone ID: LIB3094-072-Q1-K1-A10
tctataactatccaatttactttttttcttcttcccctcttccctaaagcgtatttttttcataacttctctaccaacctccaaacttaattacccaaattcaacacatttatcaaattttaattttaaattttttcatccaattttcaaagtttaccttttttccacccttttttccacccccttttccccctaaaattttttaaaaccacattttttttaaataacctttttaaaccaaaaaccaaataaaaaaattttttttttatttaataataaaccttaaattttcctttttttaaaataaaatttcccctatttcccataacaaatctttttctccaattattttaaaaaccttcttcaaaaaaattaattaa

SEQ ID NO: 13495 - DNA, 236 bp, Glycine max
  Clone ID: LIB3094-072-Q1-K1-A12
gtacgtgtctgagcacttcttcttttcacactgccgctgcaacaatggcttcagagaagaaactttcgagccatatgagggagataaaagtgcagaagctcgttctcaatatctctgttggcgagagtggagatcgtctcaccagagccgccaaggtgttggaaccacttagtggccaaaccccagtgttttccaaagcaaggtccactgttcgttcctttgggattagaagaaat

SEQ ID NO: 13496 - DNA, 262 bp, Glycine max
  unsure at all n locations
  Clone ID: LIB3094-072-Q1-K1-A2
ggagatgctgatttgttctctcagatctgagcttaccgtcgccggaatccaactcaacctgnggcggattcgtgggtatcatcgcatcgccattcgttttagcctctcaataagagattttagttcgcttcaaattcgaggtttgatttgaagttgaaagttggaatagcttaacttgtgtgtaaaacaaccaacacacacgagcatgggaagccaagacaacaacgtagaattggcatccaattcatttctagcttacaaa

SEQ ID NO: 13497 - DNA, 313 bp, Glycine max
  unsure at all n locations
  Clone ID: LIB3094-072-Q1-K1-A3
gaattgacgacgtgtccgcttgatgatcccaacactttcggtaacaggattcacaggatgctgaagcttggactgagcattggggaagatgctggtgaagcagatgctgacatgcctnctcttgaggacgctgatgcagatgctgagggtagcaagatggaagaagttgattaaatctgacttaattgcctgttacgtttttagaaacaatgattggagaaacagtctttttactatgttttatgttttttgaattttcgaaattttggaacgttggctagttaggtgccgtatgtagtagtttctttatggt

SEQ ID NO: 13498 - DNA, 295 bp, Glycine max
  unsure at all n locations
  Clone ID: LIB3094-072-Q1-K1-A4
cttgatgatcccaacactttctgtaacaggattcacaggatgctgaagcttggactgagcattggtgaagatgctggttaagcagatgctgacatgcctnctcttgaggacgctgatgcagatgctgagggtagcaagatggaagaagttgattaaatctgacttaattgcctgttacgtttttagaaacaatgattggagaaacagtctttttactatgttttatgttttttgaattttcgaaattttggaacgttggctaattaagtgccgtatgtagtagtttctttatggt

SEQ ID NO: 13499 - DNA, 367 bp, Glycine max
  unsure at all n locations
  Clone ID: LIB3094-072-Q1-K1-A5
nccacgcgtacgatttattctataattggtgcctatgttataccaatcttagttacggaaattgggttgaaaattactgggaaaacaagtgccaaagccagaagcttgctgagtctttttctatagttctttatactctactctagagccattctaagtttctcttagagtactagcttgcttatatgttcttttcattgctttaattgttgaataatccttgaaaaattgtcttgctaaaactccattggtttagctatgatttcattgtttcttagtctttggttattgattgtctctatgcttacttagttgtgagtatccacatagggaattggaaaggatgattggtgccatcccttgaaga

SEQ ID NO: 13500 - DNA, 490 bp, Glycine max
  Clone ID: LIB3094-072-Q1-K1-A6
cccacgcgtacgatttattctataattggtgcctatgttataccaatcttagttacagacattcgcttgaaaattactgtgaaaacaagtgccaaagccataggcttgctgagtcactgtctataggtctttatactctactctagagccattctaagtctctcttagagtactagcttgcttctatgttcttttcatttctttaatcgatgaataatccttgaaaaattgtctcgttaaaactccattggtttagctactatttcattttttcttagtctttggatattgcttggctctatgattacttggttgtgagcttccacatcaagaattggaaacgctgattctggccatccattgaagaaatctcgtcctgattcatagagccaaccaccttaatagctatttgactaaaaatcacttcaaattgtgtgaatcaccatagagattacaaccacccaaattgtggactttttcgaatattttt

SEQ ID NO: 13501 - DNA, 408 bp, Glycine max
  Clone ID: LIB3094-072-Q1-K1-A7
gaggatttgggattgggaaggcgagggattgcgctgcgtctcttcctcttctctttggattcatgcctcattcataatcttccaatccaacaacctcagcctcacactcacacatacacacatctgaacgcgtatcgtccctcccatggcttcaaagcgcatcctcaaggagctcaaggacttgcagaaagacccaccaacttcttgcagcgctggtccagtagctgaggacatgttccattggcaagcaacgattatgggtcctgctgatagtccttatgctggaggtgtattcctagtcactattcactttcctccggattatcctttcaaacctcccaaggttgcctttaagactaaggtgtttcatccgaacatcaacagcaatggtagcatttgtcttgatat

SEQ ID NO: 13502 - DNA, 175 bp, Glycine max
  unsure at all n locations
  Clone ID: LIB3094-072-Q1-K1-A8
agacgatgtgccaacgtacacgcgcattctagctcttcgcctctttctcttctctccgggaacctgctntaatttataatcgtgtcacagcaccaccacagcctaacccttacacatacacaccttagaacccttatcgcacatcccattgcttccaaacgccttcttaacgaac

SEQ ID NO: 13503 - DNA, 413 bp, Glycine max
  Clone ID: LIB3094-071-Q1-K1-G11
cccacgcgtccgcccacgcgtccgcggacgcgtgggcgcgagtgaacacaggttacagcaggggctttctggggtagaattgggaatttattaagacagacagcaagcaggcaggttagttcagaattgcgatcatccccttcgttttttcaggctatacgcagtatgtcatctgctccaagcacaaagctgtttatcggaggtgtttcatattctactgacgagcaaagtttgagggaagctttttcaaaatatggtgaagttgttgatgctaggataattatggatcgtgaaactggtagatccagaggatttggctttattacatacacttcggttgaggaggcatcaagtgccattcaggccttggatggtcaggacctacatggtcgcccgattagggtgaattatgc

SEQ ID NO: 13504 - DNA, 419 bp, Glycine max
  Clone ID: LIB3094-071-Q1-K1-D4
tgaagtggaacgacatctcaagcattgagatccccaaacactccttgcacgaagctgtgagtttgcctgtgaagttccctcagatctttactgggaaaagactaccctggaaagctttcttgatgtatggacctactggaaccggaaactcatatttagccaacgcagacgcaacggaagccgactccacctttttcagcgtttcttcatcagaccttgcttcaaaccgtataggtgaaagagaaaatcttctttcataccttatcgaaatggctcgagatagtgccccttctatcatatctattgacgcaattgattccctgtgtggtcagcgtggagaacgcaacgagagtgaagctctaaaaccgattaaaacagatcttctggtgcacattcatactgtaagacactatgatcag

SEQ ID NO: 13505 - DNA, 331 bp, Glycine max
  Clone ID: LIB3094-071-Q1-K1-D5
tgaaggcgaacgacatctcttggattgagatcgccaaacacgccttgcaggaggctttgagagtgcctgtaaagatccctcagatctttactgggaaaagactaccctggagagctttcttgatgtatggacctcctggaaccggaaaatcatatttagccaaggcagatgcaactgaagccgagtccacgtttttcagcgtttcttcatcagaccttgtttcaaagagtatgggtgaaagagaaaagctgacttcaaaccttttcgaaatggctcgagaaagtgccccttctatcatatctattgacgaaattgattccctgagtggtca

SEQ ID NO: 13506 - DNA, 445 bp, Glycine max
  Clone ID: LIB3094-071-Q1-K1-D6
gtttggtgtaactgcatgctctttgccattgttgatggagtttgcctttagatttttgaggtgcccatatagttatacaatttcattttagggtcttgttgactagtgttcctagactattggttaaggaactaaaaggagaagtttttaatatgtaaatcataggaaagtataaaaaaaaatcatgaagaacgcaattttatgccttccaataaaaaaccttagttccttaacccgtgtcctcgggacacttgttagcatttgccttcattttatatgtatcattagattattataattgaaaaaaatagggcctactttttgacgtcattttattcattttattaggggtcatcaaatactttcacttggtggcagtgtttgtcaaaattgtacacaatttgtattttgttcctccaacaaattttcttattctttgtaccaa

SEQ ID NO: 13507 - DNA, 295 bp, Glycine max; identical to SEQ ID NO: 11959
  Clone ID: LIB3094-071-Q1-K1-D9

SEQ ID NO: 13508 - DNA, 454 bp, Glycine max
  Clone ID: LIB3094-071-Q1-K1-E1
cccacgcgtccgctttctttctttcttcttttttctgccgaggaaaagaaagaaatagagggggaagaagagaacacagcgtcctagatttcctcttctctgcttcggaagaaagagaaaacaaacaaaacaatggcgttcgcttctttcctcggcagagtcctcttcgcttctgtcttcatactctctgcttaccaacaatttaatgaatatggagttgatgggggacctgctacaaaagcactcagacctaagtttgatgcctttacacatcgggtgcattctcaagtgggctttcaaattccagagattaatctgaaatttttaattgctggggctattgctctgaagggtcttggaggggttcttttcatatttggcagctcttttggagctttgcttctgctcctgcaccagctgattgctactccaatccattatgatttttacaatt

SEQ ID NO: 13509 - DNA, 406 bp, Glycine max
  Clone ID: LIB3094-071-Q1-K1-E10
ctagagaattatcatacccttcaagatgaaaccgtacctacgtccaatattcctattattgcttatccttgtcgaccaatccatttcggcgagtgctgctataaatattaatggtctgagaaacaaaattagagaagttctaaacaagcacccgagcatcaatcttccggcagataaactgaagaaggtgaagagaccactgaaggcactggattatctgcttggcgaatgtaaggacaggccgcctcaagaatttcaagaattttgcccgaaatttaagaacgattatcaacaaaattgcccgaatgccgcgtatgaagcagtttgcccgttactgaagcaagcgattcaaatatgttgccagaaacacgcataactctgcaagccacggtgggcgtttggatgt

SEQ ID NO: 13510 - DNA, 428 bp, Glycine max
  Clone ID: LIB3094-071-Q1-K1-E11
tctcccacgcgtccgcccactctttctcagggatgttgaggaagttgttggtgggtctcaactgtggccttattggaagcaatagacaatatagtgacagggaagtttgtgtccttatctgaacaagaacttgttgactgtgacagagcctacaatgaatgatgcaatggtggccttatggactatgcattcgaattcatcattcaaaattgaggcattgacacatacaaagattacccataccgaggctttgatggcatctgtgatccaactaataaaaattcaaaggttgtgaacatttatgggttcgaagatgttccaccgtatgatgagaatgccttgaaaaaagctttcgctcatcaacccttaagcattgctattgaatcctcttgcagatatttgcaactttatcaatcgggtgtatttac

SEQ ID NO: 13511 - DNA, 166 bp, Glycine max
  Clone ID: LIB3094-071-Q1-K1-E2
acaaacaaaacaatgaccttcacttcttacctcaacaaattcctcttaccttctgacttcatactatatgcttaccaacaatttaatgaatatcaacataatttcagacctgctacaaaatcactcatacctaaaattgatacctatacacatcaactgcatactc

SEQ ID NO: 13512 - DNA, 351 bp, Glycine max
  Clone ID: LIB3094-071-Q1-K1-E5
gttctagatcgcgatctagaactagccaattcactctttttcttctcgccctctgccgtgggaggagtttgtaacatggctgctctaccaacggcggagcttagtgacgcaaatgcaacacatgtagcaagttgtgatgtgagggtgttgcatccagtgttcaaggtttacggtggggccaccgcgttctccggccccgttgtcaccgtgaaggtgtttgaagacaacgtgttggtgagggagcttcttgagacgaaaggcgaaggaagagtattggttgttgatggaggaggaagcttgaggtgtgcattggtgggagggaatttggcactgattgcacataacatgggt

SEQ ID NO: 13513 - DNA, 447 bp, Glycine max
  Clone ID: LIB3094-071-Q1-K1-E8
gcttcctcctcttacgagcctttcctttcagtccattgattcggtgggtgcgggtgcagggaaaccgagctagaccctgatcggcgtcggcacaccgccggagaacaagatgattgtctgcgtcgccgtcgtcggtcaccagaacaatccgctgtacatacagagcttcacggaggccgatgatgctctcaagctccaccacatcgtccattgctcgctcgatgtggtcgacgagcgagtgaacaatcctaaaaagtctgggccgatgcttaatgagacgtttttgggactgctttatcctattgaaaactacaaagtatatggatatctgactaatacgaaggtgaaatttatcttggtgaccacggatctggatgttaaagatgcggatgtaaggaattttttcaggaggttccatgccgcatatgtagatgcagtttcaaaccc

SEQ ID NO: 13514 - DNA, 361 bp, Glycine max
  Clone ID: LIB3094-071-Q1-K1-E9
gttgacgattctaacaatcttggtctcaggattcacaggatgctgaagctcggactcagggttgccgaaggtgctcctgatgcacatgctgacatgcctgcacatgaggacgctgatgcacatgctcatggtagcacgacggaacaagccgatgaacattcacttatttgcctatgacgttgatactctcaatcttcgccgcatcagtcattgctctatggatgaggtctactaactagtgaacaatcctgaacagttgtctacctatgctcaatgatgacgtagttgcgactagcggtatactattgaaaactacggcggacgttgttatcgatccaagactacggtcacatgcatgcta

SEQ ID NO: 13515 - DNA, 221 bp, Glycine max
  Clone ID: LIB3094-071-Q1-K1-F12
ctctatatatccaactttttactcattttttcaacttcaaatttaaagtattttttgagtcattttctaatttaattcccacaaacacttctattccaacccttaaatctcacttttttaacacctattaatacccttacactacattcttcattcatcattttacatattatctaatattcccataccaatcacccttcccaacaatttctcatccttaa

SEQ ID NO: 13516 - DNA, 435 bp, Glycine max
  Clone ID: LIB3094-071-Q1-K1-F2
acgcgttatgctattgcttcctatctctttctcatgaccccttcatggagtccactttgggcaccaatctagtagtcttcaacaacaccctccaaccagagttaatgaggagtgtgcatgtgtaccgccgaggggatggagagaaaagggaagttgagagagagtttgtgttttcagagagcggctcctatggggaaatgcaggctaccccaattcctggattggtaaaatctcgtgtttctgaagtgtgtgaagggcaccgaaatggagtgtggctttgtgtctttgcgttccatgccgatcacactcctcaattttgccgcattccaccggttttgttggtcacaagaaacccaaagcttaagatgattccaaacttgcttgatgatctccatgtgatatacaagttggaccggaaggaggaagacagtgata

SEQ ID NO: 13517 - DNA, 436 bp, Glycine max
  unsure at all n locations
  Clone ID: LIB3094-071-Q1-K1-F5
cccacgcgtccgtcaagcattgcatccctcttgatttgtagtttgttttgtgctttagataaaagttctgccaaatcaagaggggttttaagatcatagtgtgtgttttgcaacaatggctaagttctttgctgctatgatcttggcactctttgccatttccatacttcaaacagtggtaatggctgctaatgaacaaggaggccacttgtatgacaacaagagcaaatatggaagtggaagtgtcaagagttaccaatgcccatcacaatgctcgaggagatgtagccagacccaataccacaagccctgcatgtttttctgtcagaagtgctgcaggacatgcctgtgtgtgcccccggngtattatggtaataaagctgtgtgcccttgctacaacaactggaagaccaaggaaggaggacccaagtgccct

SEQ ID NO: 13518 - DNA, 440 bp, Glycine max
  unsure at all n locations
  Clone ID: LIB3094-071-Q1-K1-F7
atggcgtcccaaaccgcctagtacgggtctgtttgttggactgaacaagggtgacgtcgtcgccaanaatgaattgcctccacgcccctcagatcgtaaggggaaaacaagcaagagggtgcactttgtgaggaacctcataagagaggtagccggttttgcaccctatgaaaagcgtataactgagttgctgaaggttgggaaggataagagggcactgaaggttgcaaagagaaagctcggaacacacaaacgcgcaaagaagaagcgtgaggaaatgtccagtgttctcaggaagatgagggctggtggtgctggagacaagaagaaataagtcttatttactgttttccagattcactagatggacctgtgtattgatggacgagctttcatatttttgctttggttcaattagtttacttcaagattttgtttga

SEQ ID NO: 13519 - DNA, 157 bp, Glycine max
  Clone ID: LIB3094-071-Q1-K1-F9
tttcatacagctctccacatagcccaaagaccctcaccaactgcacctcataacacattcgcagcccgaatggctcatcgaacgcgccatcaatcctaacatgaatcgccccatgcgtaatgagacctcgcagcgactaccgtacactatcgaacac

SEQ ID NO: 13520 - DNA, 402 bp, Glycine max
  Clone ID: LIB3094-071-Q1-K1-G10
cccacgcgtccgcccacgcgtccgctcgctttatcttcccttcccttcatctccgcttcagaataatatccgcctctctatctctgttcgaaacaagtccaacaccagcaacacactgcttcaatctcaatcgggcacattgagaaatggttttgagtaatgggaaaactgaggcaccattgccaagtagtaatgggggaggtgctgagattgataacaatgagaagaagcccttcaagatcttcgtagggtatgaccctcgcgaagatcttgcctatgaggtatgtcgccactccatcttgaaaaggtcttcaatccctgttgagatcataccaattaagcagtcagatctgaggaaaagtggtttgtattggcgtgagaggggccagtttgagagcactg

SEQ ID NO: 13521 - DNA, 119 bp, Glycine max
  Clone ID: LIB3094-071-Q1-K1-D2
gtaatgtaggtgttccaagcttcaaggtaggtaataatgttaggtccaagtagatatgtgagtgagttgtgatacaatgattctaatatcctatctccaccattcatattaatatttgc

SEQ ID NO: 13522 - DNA, 455 bp, Glycine max
  Clone ID: LIB3094-071-Q1-K1-B2
gattgcacaaaatcaaatctcccactaccaacaacactgccaccactaaagcactgacaacgctccttcactggaccactcctcactcttctcattcagatctacccaacacacacacaccaaaaaataaaataaaaatgcaactccaacccactctctccactctctacctctcccttttgttaacaataacgttaacatctccaaccttggcagcacaaagcaagccgcaggatctggtccggtcctcgtgcgtgcacgcgcggtacccgcgtctgtgcctgcgcaccctctcgaactacccgggtcccgccaacacgccgttagacgtggccagggcagctttgagggtaagcctggcccacacgcgccgggccttcaaattcctccatgcactttctcatggaggcgctgccgccatgagcaagcgccagcgctccgcgctgcgcgactgt

SEQ ID NO: 13523 - DNA, 451 bp, Glycine max
  unsure at all n locations
  Clone ID: LIB3094-071-Q1-K1-B3
gattccacaaaatcaaatctcccactaccaacaacactgccaccactaaagcactgacaaggctccttcacgcgcaccactcctcactcttctcattcagatctacccaacacacacacaccaaaaaataaaataaaaatgcaactccaacccactctctccactctctacctctcccttttgttaacaataacgttaacatctccaaccttggcagcacaaagcaagccgcaggatctggtccggtcctcgtgcgtgcacgcgcggtacccgcgtctgtgcctgcgcaccctctcgaactacccgggtcccgccaacacgccgttagacgtggccagngcagctttgagggtaagcctggcccacacgcgccgggcctncaaattcctccatgcactttctcatggaggcgctgccgncatgagcaagcgccagcgctccgcgctgcgcg

SEQ ID NO: 13524 - DNA, 104 bp, Glycine max
  Clone ID: LIB3094-071-Q1-K1-B4
tacccaacacacacacaccaaaaaacaaaataaaaatacaactccaacccactcactacactctctacctctacctattgttaacaataaccctaacacctcca

SEQ ID NO: 13525 - DNA, 444 bp, Glycine max
  Clone ID: LIB3094-071-Q1-K1-B6
cctagacaactctttctcttcttccttcgctcgttgttctccctcgcgtagatcgacaatggcggatacagagacgtttgctttccaggctgagatcaaccagctcctcagtctcatcatcaacaccttctactccaacaaggagattttccttcgtgaactcatcagcaacgcctccgatgctttggacaagattcgatttgagagtttgacagataagagcaagctcgatgctcagccagagttgttcattcatattattccagacaagactaacaatacactgaccattgttgacagtggtattggcatgaccaaagctgatttggtgaacaacttgggtacaattgctagatctggtaccaaggaattcatggaagccttggctgctggtgctgatgttagtatgattggacagtttggtgtggggttctactctgcata

SEQ ID NO: 13526 - DNA, 420 bp, Glycine max
  Clone ID: LIB3094-071-Q1-K1-B7
cgcgtcgctgctccgtaccagtttcactgcataaatttgagagaaaactgggcaaacatgggggtttatcaggacctccttacaggtgatgagcttctctcggactccttccgttacaatgaaattgagaatggaatgctgtgggaagttgaggggaagtgggttgttaagggagcagttgatgttgacattggtgcaaacccttctgctgagggtggagaagatgagggagtcgatgacgcagctgttaaggttgttgacattgttgatacattcagacttcaggagcaacccgcttttgataagaaacagtttgttaccttcatgaagaggtttatcaagaatttgactcccaagctcgatgcagagaaacaagagttgtttaagaagcacattgagggagcaactaaatacctgctc

SEQ ID NO: 13527 - DNA, 455 bp, Glycine max
  Clone ID: LIB3094-071-Q1-K1-C1
cccacgcgtccggcgaaaacccccaactccaacctctgttcatcgtctaccgcgctttcttttcaaccagaactatgattaagctttttaaagtaaaggaaaagcagagagaacttgcagaaaatgcaagtggcggaccacctgttaagaagcaaagtgctggagagttgcgtcttcacaaagatataagtgagctgaatctaccaaaatcatgtaccatgcaattccccaatggcaaagatgatctgatgaactttgaagtttcaattcgacctgatgatggatattacttaggtggcacatttttgttttcctttcaagtgtctcccatctatccacacgaagcaccaaaggttaagtgtaagacaaaggtctatcatccaaatattgacttggaaggaaatgtttgtctcaacatcttacgagaagattggaaacctgtccttaatataaac

SEQ ID NO: 13528 - DNA, 332 bp, Glycine max
  Clone ID: LIB3094-071-Q1-K1-C11
aaaatgcatacggtgaagagaccactgacggcactggattatctgcttgtcaaatgtaacgacaagctgtgtgaagaatttaaagaattttgcccgaaatttaagaacgattatcaacaaaattgccctaatgccgagtatgaagcaatttgtccgttactgaagcatgcgattcaaatatgttgccaaaaacacgcataactctgcaggccacggtaagcgtttggatgtgcttgtagttaccactatctatcttggatttgcttacgtattgctactttagtattattgtctcctgtaccaccttgattttggacttgagctctatatat

SEQ ID NO: 13529 - DNA, 456 bp, Glycine max
  Clone ID: LIB3094-071-Q1-K1-C2
gcacgcatgcggtcaaaactccaaactccaacctaaggtcatcgcctaccgcactttcgagtgaaccatagctctgattaagctatataacgtctacgacattcatatagaacttgccgaaaatgcaagtggcggaccacctgtctagaagctccatgcttacgaactccgtcttgacaaagatataactcagcataatctaccataatcatgtaccatgcaattccccaatggcacagatgatctgatgaactctgaagtttcaattacacctgatgattgatattacttacgtggcacatcagttgtgctactttcaagtgactcccatctatacacaccaagcaaccaaaggtaaatgctagacaaaggtctatacatccaaatgttgactcgcaatgaaatgtttgtctcaacatcttacgagaagattgaacacctgaccttaatataaac

SEQ ID NO: 13530 - DNA, 333 bp, Glycine max
  Clone ID: LIB3094-071-Q1-K1-C3
gcgtccgccaggcctacgacagcttcatcaatggcgtacgtcaaggctcataaatcaaaatcctacggcaagatttatgaagtcatcatcactataagaagacaggtaaaaaccgattaccctgccaagattcggttgattaatcacgacaacaacacatataacactccgaaataccgatttgtggttcgctttaacaacaacgacattgatgcacaaataatatctgctagcattgccagcgatttagttcttgctacatcatattcacatgaactgccacgatattgtcttcaattaagacttacaaattatgcaacaacttattgcact

SEQ ID NO: 13531 - DNA, 422 bp, Glycine max
  Clone ID: LIB3094-071-Q1-K1-C4
tccaggccaacgacatctcaagcactgacattcccaaacactcctatcacaaaactctaaggctacatataggaatccttcacaactattactagataaaagactacacctcttacactccctagattcatgtacctaatcacacctacaactcatattttacccactcaaacccaacctaagctcactccaccttctacaacattaattcataaaacatatcatcaaacattatcgctgaaacagatcatcctacatcataccctcatgaactggctcgataaagtcccccatttataataactaattacgcaacacattaccctactcgtctccttttagaccgcaaagagattaaaacaccacaaacgcataacgcacatcttctaaaacacactcctactgtaaaacactattcacat

SEQ ID NO: 13532 - DNA, 442 bp, Glycine max
  Clone ID: LIB3094-071-Q1-K1-C5
gggactcattgttcttctcccaggttatttagaaaagcaaaatggtgaagatttgctgcatgggtgctggatatgtggggggtcctactatggcagtcattgcacttaagtgcccatccattgaagttgctgttgttgatatctctaaatcccgcattgcagcctggaacagtgaccagcttcctatctatgaacctggccttgatggtgttgtgaagcaatgccgtggcaagaacctcttcttcagcactgatgttgaaaagcatgtctttgaggctgacatagtgtttgtctctgtcaacaccccaaccaaaactcagggtcttggagctggtaaagcagcagatttgacatattgggagagcgcagctcgcatgattgctgatgtttcgaagtctgacaagatcgttgtagagaaatccacagtcccggttaaaacagc

SEQ ID NO: 13533 - DNA, 444 bp, Glycine max
  Clone ID: LIB3094-071-Q1-K1-C6
cctaaacaactctttctcttcttccttcgctcgttgttctccctcgcgtagatcgacaatggcggagacagagacgtttgctttccaggctgagatcaaccagctcctcagtctcatcatcaacaccttctactccaacaaggagattttccttcgtgaactcatcagcaacgcctccgatgctttggacaagattcgatttgagagtttgacagataagagcaagctcgatgctcagccagagttgttcattcatattattccagacaagactaacaatacactgaccattgttgacagtggtattggcatgaccaaagctgatttggtgaacaacttgggtacaattgctagatctggtaccaaggaattcatggaagccttggctgctggtgctgatgttagtatgattggacagtttggtgtggggttctactctgcata

SEQ ID NO: 13534 - DNA, 434 bp, Glycine max
  Clone ID: LIB3094-071-Q1-K1-C7
cccactcgtccgtacacatatgcattctttctctcactccattccatttccgggatttgcgtttgcatacatacacttacctctctggtctctagctatagcacaagatatgggtagcagttattttggagaacctaactttggaaatgaaagagcaagttgttcttcttcgtcaagaaaagggaagaagagccacaactcagacaagccaaagcaaccacagagaggtcttggagttgctcaattggagaaaatcagattacatggctatcacccttctctgcacgctccttacccttctaatttttccaacgaagatccaagagtgcaaatagcatattcatcggtgccatcatcttctttttcttactcatcatcatacgcagcttcctatggattccaacccaacatcatgatgggcctatccgaatatc

SEQ ID NO: 13535 - DNA, 433 bp, Glycine max
  Clone ID: LIB3094-071-Q1-K1-C9
acgcccacgcgtccgcccacgcgtccgctcgctttatcttcccttcccttcatctccgcttcaagataatatcgtcctctctatctctgttcgaaacaagtccaacaccagcaacacactgcttcaatctcaatcgggcacattgagaaatggttttgagtaatgggaaaactgaggcaccattgccaagtagtaatgggggaggtgctgagattgataacaatgagaagaagcccttcaagatcttcgtagggtatgaccctcgcgaagatcttgcctatgaggtatgtcgccactccatcttgaaaaggtcttcaatccctgttgagatcataccaattaagcagtcagatctgaggaaaagtggtttgtattggcgtgagaggggccagtttgagagcactgagttctccttttcaagattcttgacccc

SEQ ID NO: 13536 - DNA, 320 bp, Glycine max
  Clone ID: LIB3094-071-Q1-K1-D10
gcgctcacgcatcctgaaaaatttaatgaaccatttattgataacccaaatctcaagcataacgccgacctttgtgcacttcacaacttaaattacatctcgattgaattgtaacatgataaatatgctacttagatcgacaatgaattaattactgatgatccacattatgctaagcaacctgttgaagaaccatggaccaagcacaacgatgctgacaatgcatcatgagaggaggccgataacaacatggaaaatgaggaatcataggatgacccagttgactctgatgcacatgatgaacaggaagatgctgatga

SEQ ID NO: 13537 - DNA, 323 bp, Glycine max
  Clone ID: LIB3094-071-Q1-K1-D11
ctagagcattctgatacccttcaagatcaatcccttcataatcccaatatcaataataaggcctatccttgtggaccaatccactactactacccctactttaaatactaacatgatcaaaatcgtacttagaccgactatgaaccagctcctgagcatccgtattacgccaaacaaacttgttgaacaagcacagaccactcactgcactgcactatatgcttcatatgtgcaggccaataccactacagaatttgaagaatcttacgccgaccttcttaactattatcctcatcagtgccaccatgctgctgatgaagcac

SEQ ID NO: 13538 - DNA, 421 bp, Glycine max
  Clone ID: LIB3094-071-Q1-K1-B11
gttctagatcgcgatctagaactagccaattcactctatttcttctcgccctctgccgtgggaggagtttgtaacatggctgctctaccaacggcggagcttagtgacgcaaatgcaacacatgtagcaagttgtgatgtgagggtgttgcatccagtgttcaaggtttacggtggggccaccgcgttctccggccccgttgtcaccgtgaaggtgtttgaagacaacgtgttggtgagggagcttcttgagacgaaaggcgaaggaagagtattggttgttgatggaggaggaagcttgaagtgtgcattgtggggagggaatttggcactgattgcacataacatggcttgggctgggatagtggtgaatggctgcatcatagatgtggatgagatcaatgcaagtgatattggcgtca

SEQ ID NO: 13539 - DNA, 369 bp, Glycine max
  unsure at all n locations
  Clone ID: LIB3094-070-Q1-K1-G11
cagagtgtgagtggacctgtctcagctaccctttaccttggttattcactactcatggccaaggcaatcatgttgtcaaccggcaccattggcttccttatgtcattctactttgtgcactacttgttctcatcagtaaagatagattgaggttcttgttgtcattgcatattaactatgaaaaaggttgattgatataacttgatcacattgcatagtagggcaacggatgtttaattcatcgtctgatcttatattgcgatgggatctgcaatttgntctccttctgcctgtttcccaaagtagtgtactcattcaagtattcaacctagtgttgaaatcatgtttcaagaattttgttcaagtttc

SEQ ID NO: 13540 - DNA, 306 bp, Glycine max
  Clone ID: LIB3094-070-Q1-K1-G12
cattccacctatctcatacacaattcaccattcgaatacaccacttactgatcacgacgcctttcaaacacactccggaccatctcctctcatatgtcatccacgaatacacactactaggcaacatcaataaataatgccaaatatcccggtagaaactatatattaactatacccaaatcataactgatacaactatactacacatcacagtaacgcatatcctgaccaatgcaataactgaagctatactgctcatagaacttaccacccttctcattctgcctgctacccaaacccatgtac

SEQ ID NO: 13541 - DNA, 140 bp, Glycine max
  Clone ID: LIB3094-070-Q1-K1-G4
ataatgcctatgctccaaacttcaaactaagtaataatgataggtccaaatagatctgtgaaagagcttttagacaataattctaatatcctatctccaccattcatatcaacatttgcacaaaaaaaaaaaaatggcat

SEQ ID NO: 13542 - DNA, 306 bp, Glycine max
  unsure at all n locations
  Clone ID: LIB3094-070-Q1-K1-G5
ctgaggtgcaagattcacttcaaattatgcgtttcgctgatcggttcctcatcacatcaaacgaggtcncagagcatcgcaattccttgattatttccttttgttgatacgcggaatcgcgccacaccgtgcttgtgttttcaccttgagtaaaaggaaaagattgaattggtaaccgcattaattaccttcttggaactttcaagccttcatgtaatgtcttgatcacgtttaatgattggaaaaaccggaaacaagttctcgttaaaaaaaaaaatggtcaaattggcacaagtcccatttttc

SEQ ID NO: 13543 - DNA, 312 bp, Glycine max
  Clone ID: LIB3094-070-Q1-K1-G6
tcccacgcgtccgtcaagcattttattcctctttatttctaaactgttttatgcggtagatttggatactttcaaatcaacatgggtcttaacatcatagtgtgtgttttccaacaatgtctcattcctttgctactataatctaggcactcttttccatatccatactttaaacagtcctaatggctcctaatgaacaatgaggccacttctattacaactatatccaatatggaagtcgaagtgtctagagttaccaatacccattacaacactcgaggacatgtatccagacccaataccacactccct

SEQ ID NO: 13544 - DNA, 399 bp, Glycine max
  Clone ID: LIB3094-070-Q1-K1-G8
gatcgccaactattgatctctttataggcttttgcactctccaatcttcaaagatgcctttgaaactctaaatcaagcgcaagcttgcgcaaagatcacagagagtgaaatgtgttgatctgcatccaacagatccatggattctggcgagtttatactctggaactgtctgcatctggaactaccaatctcagaccatggccaaatcttttgaggttaccgagttaccagttagatcggccaagtttattgcacgcaaacagtgtgttgttgctggagcatatgatatgtttattcgtgtatataattacaacacaattgataaagtcaaagtattttaagcacatactgattacattatgtgtgtagcaattcatccctacccttcttatgtgcttt

SEQ ID NO: 13545 - DNA, 441 bp, Glycine max
  Clone ID: LIB3094-070-Q1-K1-H2
attcggaatctgatctccaacgattgatctctgtagaggctagtgcactctccaatctgcaaggatgcctctgagactctaaatcaagcgcaagcttgcgcaaagatcagagagagtgaaatgtgtggatctgcatccaacagagccatggattctggcgagtttatactctggaactgtctgcatctggaactaccaatctcagaccatggccaaatcttttgaggttaccgagttaccagttagatcggccaagtttattgcacgcaaacagtgggttgttgctggagcagatgatatgtttattcgtgtatataattacaacacaatggataaagtcaaagtatttgaagcacatactgattacattaggtgtgtggcagttcattctacccttccttatgtgctttcatcatctgatgatatgctcataaagctctg

SEQ ID NO: 13546 - DNA, 228 bp, Glycine max
  Clone ID: LIB3094-070-Q1-K1-H6
aatcgccaaccattgatctctttataagcttttgcactctccaatcttcaaagatgcctttgaaacttttaaaaaagcgcaagctcgcgcaaagatcacagagagtgaaatgtgtggatcttcatccaacagaaccatatattctgtccaatttatactcttgaactctcttcatcttgaactaccaatctcaaaccatatccaaatctttttaggttacccagttac

SEQ ID NO: 13547 - DNA, 321 bp, Glycine max
  Clone ID: LIB3094-070-Q1-K1-H9
ctttacctatctcacctacccttaatcttacttattcactactcatccccatgacaattttaaaatcaaccggcgccattaacttccttatatcattctactttatacactacttattcacatcaataaaaatacaatgatgatcttgttgacatagcatattaactattaaaaacatttattcatataacttcatcacatttcatacttattcaacttattattaactcatcatcttatttaatattactattaaatctacaatctaatcaccttctacctttttcccaaataatctctactcaatcaattatttcaact

SEQ ID NO: 13548 - DNA, 250 bp, Glycine max
  Clone ID: LIB3094-071-Q1-K1-A1
aaaaactaaaaaaaataaaaaaaaaaaaataaaaataaataaaataaaaaaaaataaaaataaataaacaaaaaaataaacaataactaaaaaaaaaaaataaaaaacaaaaaataaaacaaaaacaaaataataaaaaaaaaaaaaaataaaaaaaataaaaaataaaaaaaaatatatataaaaaaaaaaaaaaaataaaaaaaaaaaaaaaaaaaaataaaaaataaaaaaaaaaaaattaatatat

SEQ ID NO: 13549 - DNA, 397 bp, Glycine max
  Clone ID: LIB3094-071-Q1-K1-A12
tcgtccacgcgtccgcccacgcgtccggaagaaaggaatataccttacggatggtggaatcaaggggcatttgggattgcatagtgcgggtggtgacgaagatggaagacaaagagagtgagagagagaaaaatcttcgctttatgtcaatggcacgaagcaggggtttttacagaagtgagcaacgacgccagatatgagaaaagtgagtttatttggggtcatatttgtaaaaagtggttttgtaattataccctctaattcaagagtgaagaaacaagggtgggatggaaatataaatagtacaatttggtcctagtggtggcttaccctttggcctctttttctaattcagaattttttttaaatatataaaagtggggtgatatgtttactt

SEQ ID NO: 13550 - DNA, 445 bp, Glycine max
  unsure at all n locations
  Clone ID: LIB3094-071-Q1-K1-A3
cggacgcgtgggcagacttcccattccaatttccaagtttttcaaagaaggtgagtgatgagcatggagcatttgccaggagaattggtgtccaacgtgctctcaaggttaccatcgaaggtgttgcttctatgcaagtgcgtgtgcaagtcctggttcgatctcataaccgatcctcattttgtttccaattactatgttgtctacaacagtcttcaaagccaagaggagcatctcttggtaattcgaagaccctttttttctggcctcaaaacttacatttctgttctttcttggaacaccaatgaccccaaaaagcatgtttcttctgatgttctaaaccctccctatgaatacaactctgaccacaaatactggaccgaaatcttgggtccttgcaatggcatatactttntagaaggcaatcctaatgtcttgatgaacc

SEQ ID NO: 13551 - DNA, 405 bp, Glycine max
  Clone ID: LIB3094-071-Q1-K1-A4
cccacgcgtccgggaagaaccaccactaccttatccatttccactcctcaccaagccacacgatggcctcaggcaacgccctgtcttcagcttccattctacgctctcccaaccgccagtctctgaccagaagagcgaaccacaacggaagagtaaattaccgtcaaccgaatagccgtttctccgtcaaagccttcgccaaagagattgcctttgaccagcattcccgctctgctatgcaggccggcattgacaagctcgccgacaccgtctggctcactcttgggcccacggggaggaatgttgtgttggatgagattggaagtcctaaagcgtgtaaccatctgtgcaccattgcttgcgccatctagcttacagagcctatggaaaatgcccgtgcacctc

SEQ ID NO: 13552 - DNA, 398 bp, Glycine max
  Clone ID: LIB3094-071-Q1-K1-A7
gcttgctcctcttacgagcctttcctttcagtccattgattcggtgggtgcgggtgcagcgaaaccgagctagaccctgatcggcgtcggcacaccgccggagaacaagatgattgtctgcgtcgccgtcgtcggtcaccagaacaatccgctgtacatacagagcttcacggaggccgatgatgctctcaagctccaccacatcgtccattgctcgctcgatgtggtcgacgagcgagtgaacaatcctaaaaagtctgggccgatgcttaatgagacgtttttgggactgctttatcctattgaaaactacaaagtatatggatatctgactaatacgaaggtgaaatttatcttggtgaccacggatctggatgttaaagatgcggatgtaagga

SEQ ID NO: 13553 - DNA, 444 bp, Glycine max
  Clone ID: LIB3094-071-Q1-K1-A8
cccacgcgtccgccaaaaccgaaaagaagaaaaacgctgaaatccccaaaatcgaaaagaagaaaaccaaaagcgctgaaatccctctaaccgatggcaaaacgaagagggatagagaaatcgccaaagaggagaacaagaagaagactaagaaacccaagctcagcaatggcacttcaaaacagcgagacgagggatccaaaaagggagtagcagaaggaaaaggagaagaggggaaaatgaacgtgtttccgatgaatcgcatcagaacgatgattaagggcgaagatcccgatatgcgtgtttctcaggaagcattgttggccatcaacaacgctgtggagaagttccttgagcaattctcgcaggaagcttatgctttttgtgttcgggaccgcaagaaatgcctcagctacgatcacctagcacatgttgtaagtaagc

SEQ ID NO: 13554 - DNA, 459 bp, Glycine max
  Clone ID: LIB3094-071-Q1-K1-A9
tcgcccacgcgtccgctcgagaatatgacccgtcctaaaatttacgaaacaaagtatttattgtttatgatatataatgagaggaacataaacgaacaatcagatgctgctagtcatttggataataaacaacattaggatttaggcatatcacatgatcgctttacttataatttagggatatcagctcaataccacatgattcaagtaatattaccaaaatcaaagccttatcctacaagatgcggtcagctacatgggtcatgacgtcattcggcaagtttagaaaccaaagtgtagcaaacgggaaaaaagtacacttctccttacagaggtatcccatatgacacaataactctgaaatagtatagtataccatagtcttaatcagcggaatatacaatttcttacatgacaaaaggacagccactgatcccagacaatattggcaagtaaata

SEQ ID NO: 13555 - DNA, 389 bp, Glycine max
  Clone ID: LIB3094-070-Q1-K1-F9
gtcgggcgggcgtccgcttttgtctgaaaaaacatgttgagggttgcttctagaaggctctcttcttctctctcatcagcttgtctgttgcggcccaatggcgccgcttccgcttttctctctcgaaacgacgtcgtcgtcgatgaccgcagatctgctccttcctcccatccccttcttcccttcagaggttatgctactgaatccctgatccacacaaaagaaaacagcattactcctgagattccgccaactgttactgctgttaagaaccctacttctaagattgtctatgatgatcacaaccatgaaagatttcccccaggtgacccaagcaagagggcatttgcctacttcgtacttacaggtgggaggtttgcttatgcctc

SEQ ID NO: 13556 - DNA, 240 bp, Glycine max
  Clone ID: LIB3094-070-Q1-K1-C9
cgtacggactagttctagatcgcgacggccgcccttatttttttttttttccttcgcactactccctgattctgttccatgtcttcctggctcgttcttccttccactcccttcttctcccatggaacaagaaccctccctctcactcgatctaggctttccatgaccgtctcctccagatctcaaccttctctcctcgacactctgttcgccgattacaaggcctccacttcattcctc

SEQ ID NO: 13557 - DNA, 420 bp, Glycine max
  unsure at all n locations
  Clone ID: LIB3094-070-Q1-K1-D1
cccacgcgtccgagaaggcctgggcttagtttataagcataactgggtgaggaagaaagaaagggagtgaataanatggcgtcgagcggagcggtaccgttttggagggcggcggggatgacgtacataacatactcaaacatatgcgcgaatctgctcaggaattgcctcaaggaaccctacaaggccgaatccctctctcgtgagaagctccattttgttctctccaaatgggtcgacgccaagcctgaaaaacctactattcgttcagacaccccagagcagtgatctggaatagttggaagctataaatgcataaatctttgagatctggaagttcattgtcattttgaacctttctgtgatggttaattcctttggttttttctctccatgaaatggaaacatgcactggatttt

SEQ ID NO: 13558 - DNA, 449 bp, Glycine max
  Clone ID: LIB3094-070-Q1-K1-D3
cccacgcgtccgcccagcgtccgaattcctcaaccacacttgccatatcaaagaaaagagcatcaacatcagatcaaagatacaacatggaggcacttcaatcatgggtttcaaagcacaagctcgccagcattggggcactctgggcctctggaattggagcaacacttgtggcttattcatgcaaaaagtctccaatgaagccaagtctcaggcttatccatgctaggatgcatgctcaggctctaactttagcagtgctatccggtgcagctgcttatcattattatgagaaacgtgatgttcagccaaaaccagaggcagattatattattcctgctcccaatgtcacccagatggttgaatatgaacttcaatgtcctttctaaaaattaaaaataaaactgtaggggtcatgttattaagattaggagatattcctatcatcg

SEQ ID NO: 13559 - DNA, 368 bp, Glycine max
  Clone ID: LIB3094-070-Q1-K1-D4
acgcgtccgcccacgcgtccggaagaatttaatatacctcatggatggtggaatcaagaagcatttgttgttgcatattgcgggtggtgacgaacatggaagacaaagagagtgagagagagaaaaatcttcgctttatgtcaatggcacgaagcacgggtttttacagaagtgagcaactacgccagatatgagaaaagtgagtttatttggggtcatatttgtaaaaagtggttttgtaattataccctctaattcaagagtgaagaaacactggtgggatggaaatataaatagtacaatttggtcctaatgatggcttacccttttgcctttttttctaattcaaaatttttttaaatatataa

SEQ ID NO: 13560 - DNA, 440 bp, Glycine max
  unsure at all n locations
  Clone ID: LIB3094-070-Q1-K1-D6
caaccatggccgactcatctcaagaccttgaccaacttctcgatagtgctttgggtgattttcggtccttcaacctcaatcctccccctccaagtggggaagcaactgcgaatagcaagaaggagagtccttctttgccgtcggggggttcaaggattgggcatgggtttaccccgatttgagaacgaagaaaaaggggaaacagaaggcttccaaagacagccacgtgtcggaggcgctcaacaagctcagggagcagaccaaagaggctgtgaaggggctggagtctatatccccacccactgccgatgattaangtaaggatgccttgatggaagaattggtcaaacaatttgagcagctttgctgctctcaagacatggaatctattgtggagaccatgatgcatcaacttctgtccaaggagattcttcatgaac

SEQ ID NO: 13561 - DNA, 439 bp, Glycine max
  unsure at all n locations
  Clone ID: LIB3094-070-Q1-K1-E11
gaaacagccttgtcgaccacaccaaaattaagttcataaaaaagcataaaagcacaaaaagacaganggtttggaaaataaaacagtttgaagtcatatttgcacacttgattaaaggctgtcgtcccttgtgacggatgcgtggggtgctaataccttccctgtgcgtaaaaacaactcccgaactattcacacttaaagttcgtagaccacaccttttcaattttcccgacgctttcctcaaataaaagttggtggcgactccgcgcattttcctttcatggaagacgcacttgtgagtcccgcatcgccctcccgtcaaagggtaggttgcgacagtacttgccctcccgccgaagggtaggttccttaattgaattaactaataacaaaagtgaaactaaggctaaaataaactcacaaatcaagctttgtccat

SEQ ID NO: 13562 - DNA, 153 bp, Glycine max
  Clone ID: LIB3094-070-Q1-K1-E12
ctccctctctccaacatcttcatctacttaccaccatatcttaactcaccattcattctcctcattgtcacacattacatctaaatcttccatctaataacttttggctcttatcatgaaactcaatattgatttactatcaagtaattattg

SEQ ID NO: 13563 - DNA, 461 bp, Glycine max
  Clone ID: LIB3094-070-Q1-K1-E2
cccacgcgtccgcggacgcgtgggttgaaaacgacccgttttctccctcgcacggatccaccgcggatctgagattccttcgaattgttaactctctttcagtttcaagttggaaactttttcgattttcgctttctggaggtgtgaattgttgtttgaaagtcacaagcaatggtgaaggacactgcgtattatgacatattaggtgtcaattatgatgcatctgctgcagagatcaagaaagcttattatgtcaaggctagaattgttcaccccgataaaaatcctgaggatcctaaggccgcagaaaactttcagaaacttggtgaggcttaccaggttttaagtgatcctgggaagcgtgcggcatatgatgagcatggaaaggagggagtaccacaagattccatgatggaccctacaacttgatttggaatgatttttggaagtgaaatttttga

SEQ ID NO: 13564 - DNA, 342 bp, Glycine max
  unsure at all n locations
  Clone ID: LIB3094-070-Q1-K1-E3
cccacgcgtccgcccacgcgtactcggacgctttggcggacgcgtgggctgtcggggancataagancgtttttcaaggacctttggcagacccaactcaaacttgaaagcaaccatgtcatatatattgaaatgggtcaacttgtttgtcaataatcattcacttgctgaaacacccatctaatcaaaaaccaactccaactcaaatgcaataaacaccaccaagttccttaatttatccaaagacccactagcataccgaatgaatcgctaaaatcacgaggaatatacatgaaaatacaaaacttgattaagaggaatattgacaccaagaaacatgat

SEQ ID NO: 13565 - DNA, 440 bp, Glycine max
  unsure at all n locations
  Clone ID: LIB3094-070-Q1-K1-E6
caaccgtggccgactcatctcattaccttgattaactnctcgatagtgctttaggtnattttagaacctttaacatcaatccttcccctccaagtgcagaatcaactactaatagcaagaacgatagtccttctttgccatcggtggttcaaagattcaacatatgtttacccaatctgagaactaataaaaatgagaaacacaatgctttcaaagacagccacgatatcaatacactcaacaagctcatggatcaaaccaaacacgctgttaagaaagcttgagtctatatccccacccactgcctatgatttacttaatgatgcctacatggaagaatgtgacaaacaatttcaacaccttactgactctcatgacatggaatctattctccataccatcatgcatcaacttatgtccaaagagatacttcattaacc

SEQ ID NO: 13566 - DNA, 154 bp, Glycine max
  Clone ID: LIB3094-070-Q1-K1-E8
tctttttatcctttttttctccttactcaaagagcattagaaggttctatagattttggccagtccatttgtataagtcatattcacttgctaaaaggtatcaaatatattacaaataacagactttataacaataacctcttctctaataatt

SEQ ID NO: 13567 - DNA, 249 bp, Glycine max
  Clone ID: LIB3094-070-Q1-K1-F1
catccgtctcacattcagactatagaaagactctatccttcgatcaaatacccggggctatttagaagcaatttaagaacaaaccataccccattttacggttctctcaagatgatcctgattccaacatcatttatttacgatattcatatcaaataataatgatgcagatgaattaactttatgtaatcatatactttagtaagcttaactaatacttttataacgagtccctatacacttcacgta

SEQ ID NO: 13568 - DNA, 453 bp, Glycine max
  Clone ID: LIB3094-070-Q1-K1-F3
tcgcgcaagttcaaaggaggatctctcttgcgttttctctaggttttcgctatggcggggaagcgagttttgaaggagcttaaggatttgcagaaggatcctccaacatcttgcagtgccggtcctgttgttgctgaagatatgttccattggcaagctacaattatgggtcctccagacagtccctatgcaggaggtgttttcctagtgaccattcatttccctccagattatccctttaagccacccaaggttgcattcaggacaaaggttttccacccaaatataaatagcaatggaagcatttgccttgatatattgaaggagcagtggagccctgctctaaccatttccaaggtgttgctctcaatttgttccctattgacggatccaaatcctgatgatcctttggtccctgaaattgcacacatgtacaagacagataggaacaag

SEQ ID NO: 13569 - DNA, 510 bp, Glycine max
  unsure at all n locations
  Clone ID: LIB3094-070-Q1-K1-F5
attcccggtgtcgacgccacgtcgtctcgtcttctcgctgtctgcaatcgtgtgtaattctattttcctttcactcatatatgtctgtcgcaaggctttgtgtcagaggcgcacttcagagaaccaagtcctggcacccagttcccgttcatcctcatactgtctatgatctcactcccaatcaatcggctattgcctattggcnttggcccttggagtctactcattctggggttcaagttcatggattggaatatggttttggtgcgcacgagcacgacacaacggggattttcgaagtccaacccatacactgccctgggttcactttcagaaagtcaattttcatcggaacaacagatctgggtccgaaagatgttcgagcattcatggagaagctggctcaggattactccggcaacacctatcatctcatttccaagaattgcaaccatttctgtaacgatgtttgtctcaaattgaccggaaagtcaatccctcgttgggtca

SEQ ID NO: 13570 - DNA, 349 bp, Glycine max
  Clone ID: LIB3094-070-Q1-K1-F6
tcccactcatcttattacctggttcaacttctcgatagttctttgggggattttaaaacctttaacatgaatcctccccctccaagtgtcgaatcaactgcgaatatcaagaacgagagtccttctttacctttcaatgttcaaagattgatcattggtttaccctaattgagaacaaataaaaaggggaaacataaagcttccaaaaacagccacatatcatacgcgctcaacaagctcatggagcataccaaacatgctgttaaagttcttgagtctatatccccacccactttcaatgatttacgtaaagatacctttatggaacatttggtcaaacaattttaac

SEQ ID NO: 13571 - DNA, 452 bp, Glycine max
  Clone ID: LIB3094-070-Q1-K1-F8
caaccatggccgactcatctcaagaccttgaccaacttctcgatagtgctttgggtgattttgagtccttcaacctcaatcctccccctccaagtggggaagcaactgcgaatagcaagaaggagagtccttctttgccgtcgggggttcaaggattgggcatgggtttacccgatttgagaacgaagaaaaaggggaaacagaaggcttccaaagacagccacgtgtcggaggcgctcaacaagctcagggagcagaccaaagaggctgtgaaggggctggagtctatatccccacccactgccgatgatttaggtaaggatgccttgatggaagattgggtcaaacaatttgagcagcttgctggctctcaggacatggaatctattgtggagaccatgatgcatcaacttctgtccaaagagattcttcatgaaccaatgaaagaaata

SEQ ID NO: 13572 - DNA, 459 bp, Glycine max
  unsure at all n locations
  Clone ID: LIB3094-070-Q1-K1-C8
attgtgtcttgttattttttataaaagggatttcaatgccttatattgtaattatgcntntgagtgttgctccagcaaaatcaccccacaacaaatgtttacattcataaggtggttcatcaaaccaatgtattattccccaggataactgtcatcaacatttaatcagcagcataattgtcttaaaataaaatcttctttgtcttcaaagatacactccaggtttaaactattcatttaaagacaatccaaatggtgacattctcgtctgggtggtgtagttggttatcacgctagtctcacacactagaggtccccggttcgaacccgggctcagacatttcaatattttgtagcccatgtctgtaaattactttgagatatgtttttaggtttttttttaatgctttgtaataaaattttacagattccacaatcaaagaggacatgggttgagta

SEQ ID NO: 13573 - DNA, 353 bp, Glycine max
  unsure at all n locations
  Clone ID: LIB3094-069-Q1-K1-H6
cccaggcttcctcttttccaaatattcacattagataagaacactagttctctccctacaggctcatgatatgctanataagccatccttatgaccaatatatccgtcctcttcaatttattagcagaaggtgtgttgcgtattagaccatagtctttttgtcattgttgtttcccaacaacgcagtttagcctttgagagcatcaccaatcacatggtgatcagaatatcattcagcaattgaagatcagtggcatcaggcataggctagcaagcaatgatatggctgtcttcccaccagatttcatgctacaaacacctcaccaagatgaccataaacctccaccttaatt

SEQ ID NO: 13574 - DNA, 438 bp, Glycine max
  unsure at all n locations
  Clone ID: LIB3094-069-Q1-K1-H8
cccgggccgaccgacgcgggggcccaggcntccggactgcccaagattaatctataatgttacggtgcgggcaaaaggggctgtttttctgatcaacaatggtggatacaccatcgaggttgaaattcatgatgggccgtacaatgtgattaagaactggaattacactgggttgattgatgcaatccacaatggtgaagggaaatgctggactgccaaggtgttctgtgaagaggagctagttgaagcaattgccacagccacaggacccaagaaagactccttatgcttcattgaggtgattgttcataaagatgacaccagtaaagaattgcttgaatggggctcaagggtttctgctgccaatagccgtccttccaatccttagtaatcttcagaatttattctatgactaaattgctgcagttgccctttaac

SEQ ID NO: 13575 - DNA, 383 bp, Glycine max
  Clone ID: LIB3094-069-Q1-K1-H9
cccacgcctccgcggacgcgtggtgttttttttggataagagtgagctataatgggtgccgtgagaccgggtttaattgctttgtttgatgttgacgggactcttacagctcccaggaaggtggtcacaccggaaatgttgacattcatgcaagaactacgaaaggttgtaacggttggagttgttgggggttctgaccttataaagatatcagagcaacttggcagcacagttaccaatgagtatgattacgtattttctgagaatggtcttgtggctcacaaggaaagaaagctcattggaactcaaagcttgaagtcattccttggtgaaaaaaagctcaagggagttattaactttacacttcattatattgctgattt

SEQ ID NO: 13576 - DNA, 458 bp, Glycine max
  unsure at all n locations
  Clone ID: LIB3094-070-Q1-K1-A12
cgggtcgagcgaggcgtccgatcgaggccttaagtttcggatcaggtctgatttatctggttggtagaacctttggtcttagggagtcttgttttatgtctgagttagacgatcaaattcctactgccttcgatccttttgctgatgcaaatgctgatgactcgggtgctgggtcaaaggagtatgtgcatattcgcgtacagcagcgaaatggaaggaaaagcctgacaaccgttcagggattgaaaaaagaattcagctataacaagatacttaaagatgttaagaaagagttctgttgcaatggaacaggtgttcaggacccagaactaggacaggttattcaacttcaaggtgatcagaggaagaatgtttctaccttnctggtccaggctggtatcgtgaagaaggagcatatcangattcatggtttctgagcggttggagtctcaagtgtc

SEQ ID NO: 13577 - DNA, 192 bp, Glycine max
  Clone ID: LIB3094-070-Q1-K1-A4
accatatcaacaaaaaactaaacagcgacttagaaaattcattagactttcagaaactatagcttacattctgattctcttcatccgataagaaatcaatcaatggattgaatgagtttctgacttttaatgcttagaacatgcaaagcaacattaaaattatctattacagcctaacatttctatctataa

SEQ ID NO: 13578 - DNA, 322 bp, Glycine max
  Clone ID: LIB3094-070-Q1-K1-A5
ctcgggtaacttatggaactattggtgggaggtttaagaaaggagaaaacccgtttgttgagggggcgtatcagcgagtggcattggaccaactccttaagatagctggtattacagatgatgacttgttgattatgtcagatgttgacgagattccgagtgctcacactattaacctcttgaagtggtgtgacgacgtgccttcagtccttcatcttcagctgaagaactatctatactcctttgagtttctcatggatgatggcagctggagagcttctgttcacagatatcagagtggtaagactaggtatgcacatta

SEQ ID NO: 13579 - DNA, 211 bp, Glycine max
  Clone ID: LIB3094-070-Q1-K1-A7
actcaggctcttcgcagcggctttctcggtttctttcatcttctcgggttgtcgatatcttcagatcgtttaaaaagactcacaggcataaagatgctgaaccaactgaatttgaagaatcacttgtacaggcattgtctgatctacaaaataccaacaattatctgaaaagtgatctgaaagatttatacataaactcatctgttcaaat

SEQ ID NO: 13580 - DNA, 317 bp, Glycine max
  unsure at all n locations
  Clone ID: LIB3094-070-Q1-K1-A9
ttcggcaacttnatacctcnttctctcactttctactcaacttcaattaatcaaatccctgactttttttaaaatgtcttcagccctcaattctattttggaaaatcataatcaaatacagttaaaaatacataacaaacatctcactcaacatcaacacttcatatctacttttccactctcacaacaactaaaaaggaaagaaaaaccgattctacatctacaacaatgaactaaagaactatcgatttctctaagccccctcaaaatggctcgtgcacccttcacttcttttcccttcgtcctcattatccttc

SEQ ID NO: 13581 - DNA, 364 bp, Glycine max
  Clone ID: LIB3094-070-Q1-K1-B12
cccccccccccagccccctcttaacacacgcacgcccaccccaaccccctcccccccctccaccccccttccccccccccccacccccccacctcctctccctcccctcccccaccacctcctctctccccccccccccccaccacccccaccctcccccctccccccccccccactccacaccccctccccctcctcccccccccctcccctcccccccccctcttccccctcccccccccaactcaccacaccaccccccccccaccacccaccccctcccccctccccccccccccccccctcccctccccccccctccccccccccctccccccctcccccctccctcacccccccctcc

SEQ ID NO: 13582 - DNA, 367 bp, Glycine max
  Clone ID: LIB3094-070-Q1-K1-B5
cgcaccagtttcaccgcacgaatatcttgttgtttggagcgttccgagaaaaactctgtaaacgggttggttgaccaggacctccttacaggtgatgagcttctctctgactccttccgttacaaggaaattgagaatggaatgctgtgggaagttgaggggaagtgggttgttaaaggagcagttgatgtagacattggtgcaaacccttctgctgagggtggaggagaagatgagggagttgatgatgcagctgttaaggttgttgacattgttgacacattcagacttcaggagcaacccgcattcgataagaagcagtttgttaccttcatgaaaaggtttatcaagaatttgactcccaagc

SEQ ID NO: 13583 - DNA, 447 bp, Glycine max
  Clone ID: LIB3094-070-Q1-K1-C1
cgcaccagtttcaccgcacgaatatcttgttgtttggagcgatccgagaaaaacgctgtaaacgtgttggtttaccaggacctccttacaggtgatgagcttctctctgactccttccgttacaaggaaattgagaatggaatgctgtgggaagttgaggggaagtgggttgttaaaggagcagttgatgtagacattggtgcaaacccttctgctgagggtggaggagaagatgagggagttgatgatgcagctgttaaggttgttgacattgttgacacattcagacttcaagagcaacccgcattcgataagaagcagtttgttaccttcatgaagaggtttatcaagaatttgactcccaagctcgatgcagagcaacaggagttgtttaagaagcacatcgagggagcaactaaatacctgctctctaagattaaagatttc

SEQ ID NO: 13584 - DNA, 337 bp, Glycine max
  unsure at all n locations
  Clone ID: LIB3094-070-Q1-K1-C11
gcgtccgcccacgcgtccgggaagatggtgctttcggtttaggaaatgggtcgtctgtaccgaatactaganggtttgatgcaaatgctgcgggacaggggttttctggtgggtgacttcgagatcaacatgtcgaagcatgagttcaagtccaagtacggcgagcacatgaagcgcgaggacctggtcatcaacaagtccaagaaggacaactccggcgaccagatctacgtcttcttccccgacgagcccaaggtcggcgtcaagaccatgaagacctacaccaaccgcatgaactccgaaaacgtctatagagccatcctcgtcacccagacca

SEQ ID NO: 13585 - DNA, 368 bp, Glycine max
  unsure at all n locations
  Clone ID: LIB3094-070-Q1-K1-C12
gttcgagatcgcgatctanaactagccaatttactctttttcttctcgccctctgccgtcgagggagtttgtaacatggctgggctaccaacggcggagcttagtgacgcaaatgcaacacatgtagcaagttgtgatgtgagggtgttgcatccagtgttcaaggtttacggtggggccaccgcgttctccggccccgttgtcaccgtgaaggtgtttgaagacaacgtgttggtgagggagcttcttgagacgaaaggcgaaggaagagtattggttgttgatggaggaggaagcttgaggtgtgcattggtgggagggaattttgcactgattgcacataacatgngttgggctgggattgtggt

SEQ ID NO: 13586 - DNA, 245 bp, Glycine max
  Clone ID: LIB3094-070-Q1-K1-C2
gagttgcatacgttcaaccctacttctctacttacctttacatccgcactgtctcctctcctagagccataagggttcgcattctgacaccaaatggcggactaaaacgcatggaggagatcatcaagaaccattcggacccaactaaagacgcgtctcagatctggctctatcattcagcttgacccaagctacaagttggaaatgccaaaagagcttatcttagaagaaaggatgagctcatt

SEQ ID NO: 13587 - DNA, 105 bp, Glycine max
  Clone ID: LIB3094-070-Q1-K1-C3
gtcgtgcatgataaatttgggcaaaattcctttattgagctatagttttaaattgtatatacagattccaacattgggattttaacaattaaagcattatgtttt

SEQ ID NO: 13588 - DNA, 151 bp, Glycine max
  unsure at all n locations
  Clone ID: LIB3094-070-Q1-K1-C4
acccacgcctacaatcatgcatgataaatttcttcaaaattccattattgagctttagnnntaaattctatatacagattccttcgtaaatattttaacaattaaagcattatgttttaaactttaaaaaaaaaaaaaaaaaaggcttccc

SEQ ID NO: 13589 - DNA, 444 bp, Glycine max
  Clone ID: LIB3094-070-Q1-K1-C5
tcgagcacgcgtccgcgcacgagtttcaccgcacgaatatcttgttgtttggagcgttcctagaaaaactctgtaaacaggttttttggccatgacctccttacaggtgatgagcttctctctgactccttccgttacaaggaaattgagaatggaatgctgtgggaagttgaggggaagtgggttgttaaaggagcagttgatgtagacattggtgcaaacccttctgctgagggtggaggagaagatgagggagttgatgatgcagctgttaaggttgttgacattgttgacacattcagacttcatgagcaacccgcattcgataagaagcagtttggtaccttcatgaagaggtttatcaagaatttgactcccaagctcgatgcatatcaacaggagttgtttaagaagcacatctagggagcaactaaatacctgctc

SEQ ID NO: 13590 - DNA, 452 bp, Glycine max
  Clone ID: LIB3094-070-Q1-K1-C6
cccacgcgtccgatgacctacattctttgatttgtccaacaccacaggggacacgcctccctcgagctcttttaagaaagtccaagaatgctctactctccactttcttgtttcttgatcaatttgtgtggcttggcagaacaggcatctaccagaataaagagcgcacctaactaattggccggatatctctttactgttggttgggatcctcggtgtgtgccaccttggttgagcttggggagcttggaagactctctgcatcaatgaagaagttagagaaagatctcaagaacaagaataaatacgatgatgatcaataccgtgccaaactaaacaagtcaaatgagaggactctatcacttatcaaagcaggaattgatactgtggtaacaatatgactgcttcaattgtcacccaatacaattactcctctcgtaacttgagctttt

SEQ ID NO: 13591 - DNA, 349 bp, Glycine max
  unsure at all n locations
  Clone ID: LIB3094-069-Q1-K1-H4
cggcccaggcgtgcgcccaggcntccncccacncntccgcccacgtttccgttgacgcgtgggcttcaacttggagtaccgccctaactaccctgattctgatcaaattccttactttgaggatggtgattctgtgacatacaataatgagaaggaggggatcattgagtgcttgaaaaggaatgtgggtggtgatttagatagtgaggtttcttctctccctgattggataccaaccaaagtgatggccaccacttggcttgctgatgcacttgagtatgaactgtgggtgggatgtgatggttcctctgcttatagcatctattattctgatcttccctggcctatc

SEQ ID NO: 13592 - DNA, 391 bp, Glycine max
  Clone ID: LIB3094-069-Q1-K1-E5
attcaagaactcatgatagattgactcttttatcctgacagcaaaaaatttggtggaggggctagataattgacaggtgcttgtcatctattaaatcacttccaattactcccacattttgagtttttctgcaagaggccacttcctgtttcaatttcagatgcacactatttatacaatgtagtaggtgacatagaaatcagaaaaggagatgggatgcagttggatcaacttattcaagatacatctttgtccagtggttctaattatcatatacaacctttggacctcgatattctaaaggaggcttttcaactcaaagaaactggtcccattgatttgcctgctgccgaaaaagggattctgactgttgcaagaaaatcaaaaagtg

SEQ ID NO: 13593 - DNA, 276 bp, Glycine max
  Clone ID: LIB3094-069-Q1-K1-E7
aaatcaacaccctttcaacatcatagtgtgtgttttgcaacaatggcttaattctttgctgctatgatcttcacactcttttccattttcatacttcaaacatttgtaatatcttctaataaacaaaaattccacttttattacaacaatatcaaatatttaattataagtttcaatatttaccaattctcattacaattcttcaggagatttaatcatacccaataccacaaaccctgcatgtttttctatcaaaaattcttcaatacattcttt

SEQ ID NO: 13594 - DNA, 200 bp, Glycine max
  Clone ID: LIB3094-069-Q1-K1-F10
caccgcactaatatcatgttgcgtgttgctttcccacaaaaactctgtcaacataggggggggtccattaccttcttacaagcgacaatcttctctttgactccttccgttacaaggacattgacaatggaatgctgtcacaatttgacggtaaaattgttgctacactagcagctgatgtatacattagggcaaaccct

SEQ ID NO: 13595 - DNA, 446 bp, Glycine max
  Clone ID: LIB3094-069-Q1-K1-F11
ccggggcgagcgcacgcggccgcttggacattcacattcagaacacatgctgtatgcagagaggcacgccggtgagagggccgcacaccaacacctccgatctcctcacttggtcggaaactcctccgccggattccgccgccgccgccaccactcgctctggccagccttccgatagaatcagtaaggttctccacggcggccagctcaccgacgaagaagctcagacgctagccaagagcaaaccatgctcagggtataaaatgaaagaaatgactggaagtggtatatttgctgccaatggggaagattctgcatcagaagccaattctgcaaatttgaataacagaacaagcatacgcatgtgtcagcaagcgatgaatggaattagtcagatatcattcagcactgacgaaagcatttcttctaaaaaacctacctcaata

SEQ ID NO: 13596 - DNA, 353 bp, Glycine max
  unsure at all n locations
  Clone ID: LIB3094-069-Q1-K1-F5
tgcttctcctgnatgtngctgcttactttctcggaattgaaactnttnnggcggtcgggtcaattttnattcccacaaacactgttatcccaaccaanaaatctcangtgttcaccacctatcangaccancatactacantctccattcangttttctaangctataggattctcacaaatgattgccgccttcttgggaaatttgatctgtctggaattcctccagccccaaggggtacgcctcaaattgaagtgaccttcgaagttgatgccaacggcattctaaatgtgaaggcagaagacaagggcactggtaaatcaaaaaagatcaccattacaaacgaaaaggga

SEQ ID NO: 13597 - DNA, 284 bp, Glycine max
  unsure at all n locations
  Clone ID: LIB3094-069-Q1-K1-F6
caacactttcggtaacaggtttcatatgatgctgaagcttgnactgagggttggggaagatgctggtgaagcacatgctgacatgcctcctcttgaggacgctgatgcagatgctgagggtagcaagatggaagaagttgattaaatctgacttaattgcctgttacgtttttagaaacaatgattggagaaacagtctttttactatgttttatgttttttgaattttcgaaattttggaacgttggctagttaggtgccgtatgtagtagtttctttatggt

SEQ ID NO: 13598 - DNA, 434 bp, Glycine max
  unsure at all n locations
  Clone ID: LIB3094-069-Q1-K1-F7
cggaanaacccgggcccgaccgcacgcgtggcgagaaggaacctaagcttannaattagtattctaaattatataagaagaaaggaaagaaattgagtgggttgggtaatgcatttggagagaaagaaaagnccnnanaantcccaattaaggaaacccagctaccaaacccattggtgctntctgcccaagnngctggcatggagaaagaacccccaggccactgtctcaagagaaaggcagaaagaatgaccagcacgtgatctcggtgcaaaanggagttggcaaccccaaaagaatagaaggcaaagatgaacccaggcggagcctggacccaagcaggcggcgccgtcaagcataacaacggcggcccaaacaaagtccgccactcaacggcttgggcaccatggggacatgggcccaccacaaaccac

SEQ ID NO: 13599 - DNA, 321 bp, Glycine max
  unsure at all n locations
  Clone ID: LIB3094-069-Q1-K1-F8
ctcgaatacattccttaccanttatattgttatattgggagaaaaaactcttcacgcgtcgtagtttattacacatgctcacattnatcacctttganttggactccaccaataccaataaaaatgcaaatggaatgcattatgacaaatatcccaattgaatctataaaggagcatacccagttcacattggtgccaactatcctgctcatggcggagacgattatcctgtccatgacgcagctggtaactatcctgacaatgttgatacacacactcttcatgatcaaccctacccttatcataaacatttatacacct

SEQ ID NO: 13600 - DNA, 301 bp, Glycine max
  Clone ID: LIB3094-069-Q1-K1-G10
gtctgtatctaatacctcgctctcctcacttttattctcatggataccttcaagggtactgatgacaatggtaagggttagggtttaaaatgatgctctgaaaagcatgtacaacgccgagaaacggggtaagcgccaagtaatgattaagcctgcctctaaggtcataataaaatctctcttggagatcgcagaagcatgggtacattggtgagttcgagtatgttgatgaccactgggctggcaaaatcgcggttgaatagaatggcaggctgaataagtgtggggatataagccctcg

SEQ ID NO: 13601 - DNA, 281 bp, Glycine max
  Clone ID: LIB3094-069-Q1-K1-G12
aacccaactccctacctatgcgcggttataatacatcatgagcggaccaaagtccaagaccgaatctaatagagccgatgccaaacttgctgtgaataagaagggcgccgccaccaagactaggaaaccctccggaaaggggaaggcagcgaaagatcctaacaagccaaagaggcctccaagtgctttcttcgttttcatgtaattataatatattgttatctctacgattcatttgacttccgatgccctcttttatttttccttcgaataattttatc

SEQ ID NO: 13602 - DNA, 253 bp, Glycine max
  Clone ID: LIB3094-069-Q1-K1-G2
tctgcattccaacaatacacatatctactggcaaaaccaacaggaaagactctaatcttgaaggaggaaaggatggatgcttgatttgctagttttgctttatagatgtattaggaactttattactttacatactgtgttcgatctgagctttacttcaggatttgatagacggaatcactctgtatgcatcttgattggttacaagatttaatcgactgctatagcatctattattctgatcttccctggc

SEQ ID NO: 13603 - DNA, 135 bp, Glycine max
  Clone ID: LIB3094-069-Q1-K1-G4
accccacataaaccaatcttaaaaatacttttttaaaaatcatacattctatattttgaattttttatatcaatcttttttttaacaacactaccaaaccttgtttttaatttaaactagatactctttaaattt

SEQ ID NO: 13604 - DNA, 397 bp, Glycine max
  Clone ID: LIB3094-069-Q1-K1-G5
gggggtcattgttcttctcccaggttattttgaaaagcaaaatggtgaagatttgctgcagtggtgctggatatgtggggggtcctactatggcagtcattgcacttaagtgcccatccattgaagttgctgttgttgatatctctaaatcccgcattgcagcctggaacagtgaccagcttcctatctatgaacctggccttgatggtgttgtgaagcaatgccgtggcaagaacctcttcttcagcactgatgttgaaaagcatgtctttgaggctgacatagtgtttgtctctgtcaacaccccaaccaaaactcagggtcttggagctggtaaagcagcagatttgacatattgggagagcgcagctcgcatgattgctgatgtttcgaagtc

SEQ ID NO: 13605 - DNA, 268 bp, Glycine max
  unsure at all n locations
  Clone ID: LIB3094-069-Q1-K1-G6
tctaccgtggtttcaacatttatgtgttggaatcatcgtgtatcgnggggtgggtttggattgtatgattctgttaaaccanttgtcctcacagggtcattgcaggatagcttttttgccagctttgcccttggatggctcatcaccaatggtgcaggtcttgcatcatacccaatagacactgttagaagaagattgatgatgacctctggtgaagctgtcaagtacaagagctccttggatgcattcacacagatcctcaagaatg

SEQ ID NO: 13606 - DNA, 316 bp, Glycine max
  unsure at all n locations
  Clone ID: LIB3094-069-Q1-K1-G7
ctgaaatccctctaaccnatnncaaaacnaaaaaanatananaaatctccaaaaaagaaaacaataataatactaataaacccaanctcatcaatgtcacttcaaaacagcgagacgatttatccaaaaatgtaatagcaaaattaaatatataagaggttaaaattaacgtttttcctatgaatctcatcagaacgatgattaatgtcgaatatccccatattcttgtttctcaagaaacattttttgccatcaacaactctttgtaaaaattcctttaacaattcttccaagaaacttattcttttttttttct

SEQ ID NO: 13607 - DNA, 304 bp, Glycine max
  unsure at all n locations
  Clone ID: LIB3094-069-Q1-K1-H10
gcatnnaactgggtgaggaaggaangggttagagattaaaaagatgcgcgtccaaccccaccggtacccgttttggagggccggcggggatgacgtacataacatactcaaacatatgcgcgaatctgctcaggaattgcctcaaggaaccctacaaggccgaatccctctctcgtgagaagctccattttgttctctccaaatgggtcgacgccaagcctgaaaaacctactattcgttcagacaccccagagcagtgatctggaatagtttgaaactataaatgcataaatctttgagatct

SEQ ID NO: 13608 - DNA, 254 bp, Glycine max
  Clone ID: LIB3094-069-Q1-K1-H11
ggcaaagcttcttttgtaaatcctctttttagttcacaggtggaagccttgtacatcgagggggtcttatgatttatgcatgctcccatacatcacaagattcagttcatactttatagagagtaggctctgactgatgagatcaaaggccaaatctggttgtactaattcctatagctctactatagcactagcggctgtgcgcttacatcaataaccggactgttatactctaggtagatattccctaatac

SEQ ID NO: 13609 - DNA, 458 bp, Glycine max
  unsure at all n locations
  Clone ID: LIB3094-069-Q1-K1-H3
gaataccggnccgaccacgcgtccgggcggccctgnnncnaaccccccgccggtgtttgattaaaaaacggagttcgacntggtggtcggggaggtgccnaacaacgctcgaatcncggtgattaaggcggtgagggcattgacgaacctagcgctgaaggaggcgaaggagttgatcgaagggttgccgaagaagttcaaggaagggatttcaaaggacgaagctgaagatgcgaagaagcaactcgaagaagctggtgccaaagttaccattgcttaaacactgtttagctgcaacatatatgttctgcttcttcttttggtggttgtagttgagttcaccagtacactgtaatttcatttccattttgtctggatttcaatcttttatttgtaatgaagaaatatgaagtcttatttttatattattttttttaatgcctatgaggtgtttgttg

SEQ ID NO: 13610 - DNA, 231 bp, Glycine max
  Clone ID: LIB3094-069-Q1-K1-A8
aactacaattgggaccgttcaatctaccactctttctttttcctctcatcaacacctttctcccctaatatgcagacttgcacccaggatcacagtttatctctcaatatatccagataatgattcttactttatggacagatttttcacatttatatagttatacagtttgatctatggcttgcaagaaatctctgaagcattatcatatgtttttaaacctcactattc

SEQ ID NO: 13611 - DNA, 295 bp, Glycine max
  unsure at all n locations
  Clone ID: LIB3094-069-Q1-K1-B12
gncaaagatggggatgtggcactctttttttgactctcaggtaccggaaagaccagtcttgcgaccgatcacaataggtatctaatcggagatgatgaacactgttggggtgacaatggtgtctccaacattgaaggtggttgctatgccaaatgcattgacctctcacgggagaaagagccagatatttggaatgcaatcaggtttggcacagtgttggaaaacgtggtgtttgatgagcacgaccgagaagttgattactctgacaaatcagttacaagaaaatactcgtgct

SEQ ID NO: 13612 - DNA, 273 bp, Glycine max
  Clone ID: LIB3094-069-Q1-K1-B2
tgcggccaatcacgcccttccctttctctctcgaacgacgtcgtcgtcgatgaccgcagatctgcttcttcctcccatccccttcttcccttcagaggttatgctactgaatccctgatccacacaaaagaaaacagcattactcctgagattccgccaactgttactgctgttaagaaccctacttctaagattgtctatgatgatcacaaccatgaaagatttcccccaggtgacccaagcaagagggcatttgcctacttcgtacttaca

SEQ ID NO: 13613 - DNA, 232 bp, Glycine max
  unsure at all n locations
  Clone ID: LIB3094-069-Q1-K1-B5
cctcttgaaggaccgccttgatgccagaatgcctgaggnnngtagcaagaatggaagaaaagttgaattaaatctgaacttaaaattgcctgttaccgtttttagaaacccaatgattggagaaaacaagtctttttacttatgttttaatgtttttttgaatttttcgaaaatttttggaacactttgccttatttaaggtcccgtaatgtaattaattttcttttaatgg

SEQ ID NO: 13614 - DNA, 310 bp, Glycine max
  Clone ID: LIB3094-069-Q1-K1-B8
gcgaagacccttgtcgaccacaccatattttttatcataaaaaagcataaaagcacagaaggagataaaaaagggaaagtgaaacattttgaagtcatatttgcacacttgattaaaggctgtcgtcccttgtgacggatgcgtggggtgctaataccttccctgtgcgtaaaaacaactcccgaactattcacacttaaagttcgtagaccacaccttttcaattttcccgacgctttcctcaaataaaagttggtggcgactccgcgcattttcctttcatggaagacgcacttgtgagtcccgcatc

SEQ ID NO: 13615 - DNA, 339 bp, Glycine max
  unsure at all n locations
  Clone ID: LIB3094-069-Q1-K1-C11
gttttgccaactggtggggatagtgttagttctggcttggctgctncccccgaaggtgaggttgacatgattcagaagaacgacgcacatngcgaagggaagaagagaaagaagcatgaaagcacagatagccccgttgctgttcctgctaagaaggtgaaagtggatgaagtggaagaggttgaaaagcaagaaaaggtgaaggtgaagaaggtagatgaagagactgtggaggttgaagttgagaagaaggagaagaagaagaaaaagaagaagaataaggagaacagcgaagcagcctcttctgatgaggagaaaactgataacaaaaagaaaaag

SEQ ID NO: 13616 - DNA, 239 bp, Glycine max
  unsure at all n locations
  Clone ID: LIB3094-069-Q1-K1-C2
gcgcccaggcctccgcccacccgtncgcccacgctttcgtccacgcgtccgtgtacctntgtcggttcggtagctatgtgcattctacacaccctcactgtctaacataacactcgccattggctctgccaagacataaacaaatcgcacacactgaagatctccaacctcttgcataagacaatgcaacaggactggataaagctgtacaccgctggatacgacaccccacacgctga

SEQ ID NO: 13617 - DNA, 185 bp, Glycine max
  unsure at all n locations
  Clone ID: LIB3094-069-Q1-K1-C4
gccgggcttgtgnaacacacccctgcgtatttcatttacaatacgcaatacaacttttgagtcgaggacgttcctaacaactctcgaatctctttaatcaacattatcagttcatttacaaacctatcctctaactatacgatctagttaaccgaaggctttaccaaaaatttcaaagaatgtat

SEQ ID NO: 13618 - DNA, 236 bp, Glycine max
  unsure at all n locations
  Clone ID: LIB3094-069-Q1-K1-C5
aaaacaaaacaataatttggttataattgttccataantcnttttggggttgtttatatatcaancnacacntccttttnaancanaaaccnaaccntccacccctttntantttgaancnatcaacacncncaaccacnncnattatnatncaaatcaacatcacctccaccacctcaatcntcacnncttttctcttcnaatcattccccnaattttctacccttanccatttt

SEQ ID NO: 13619 - DNA, 351 bp, Glycine max
  unsure at all n locations
  Clone ID: LIB3094-069-Q1-K1-C8
cgtccncttgccccaaattttcttttctaaactaaaccattaacaaacgggcctggttaataaaccctaattataaattcatctcctcctccnnttctaccancantgcaccaataccttcctacttgtaacaagcccacngcttgtcttccttaaaagacatggataggtgtcataaccgtgccaacaactttgtctcaaggtccattaccatggtttacgccacctcctacaacagaaccattttaatgaacaacaacaacgtttcgttttcttcaccaagatcttggatattctacgacgccagattccaaaatcaacaacacccccacttcctctccgctttgtttc

SEQ ID NO: 13620 - DNA, 297 bp, Glycine max
  unsure at all n locations
  Clone ID: LIB3094-069-Q1-K1-D11
cgaccggggcgaccgaaaaaaggttcatanttgatatctccagcgttacgttgaagtttgaagatttgncaaaaggatgcggtgcaaaaatactgtcctacaccactcgtgcggatgtatgcaggctttctctggtttccaaagcctttcattccgcggctgaagccaacactgtgtgggattgctttctcccctctgatttgtcctctatcatctccccttcttcttccgttcctccctttcgctctattaaggatctctatctctatctctccgatcgtcccaccatcatcgatc

SEQ ID NO: 13621 - DNA, 330 bp, Glycine max
  unsure at all n locations
  Clone ID: LIB3094-069-Q1-K1-D5
tcaaggctcanaaatcaaaagcgctcagttagatatatcaantcaacttcaacacaanaananagggaaaaacccattaccgtgccangattcngttgattaatcangacaagaacaaatataacactccgaaataccgatttgtggttcgctttagcaacaaggacattgttgcacaaataatatctgctagcattgccggcgatttagttcttgctacagcatattcacatgagctgccacgatatggtcttgaagtaagacttacaaattatgcagcagcttattgcactggtctccttttggcccgaaaaatcctcaaaacacttt

SEQ ID NO: 13622 - DNA, 390 bp, Glycine max
  unsure at all n locations
  Clone ID: LIB3094-069-Q1-K1-D6
tccaagtgcactgggattggttcnttgtctggngctncnatnaaccgtgctgtttgatttggaactnntcccaccccttctataanacatcttnncccntccattattcancanattcatcatgctttcaatgaatgcaatggtactgtanaaaccatcaactacananatctctncccacattncaatgtataaaatgttgtgcaggagaaaaaagtccttgaagttattgtggaaaagggaatgcagaacgggcagaagattacattccctggcgaagcttatgaagcgccagacacaattactggggatattggctttgtcctttagcagaaggaacattccaaattcaaaaaaaagggctgaagattttttgtatagcacattttg

SEQ ID NO: 13623 - DNA, 436 bp, Glycine max
  unsure at all n locations
  Clone ID: LIB3094-069-Q1-K1-D7
cccacgcntccgagaaggcctgggcttagttgataagcataactggntgaggaagagagaggtagagtgaanaagatggcgtcnagcggaccggtaccgttttggagggcggcggggatgacgtacataacatactcaaacatatgcgcgaatctgctcaggaattgcctcaaggaaccctacaaggccgaatccctctctcgtgagaagctccattttgttctctccaaatgggtcgacgccaagcctgaaaaacctactattcgttcagacaccccagagcagtgatctggaatagttggaagctataaatgcataaatctttgagatctggaagttcattgtcattttgaacctttctgtgatgtttaattcctttgtttttttctctccatgaaatggaacatgcactggattttgatttgcacgggtaatc

SEQ ID NO: 13624 - DNA, 399 bp, Glycine max
  unsure at all n locations
  Clone ID: LIB3094-069-Q1-K1-D8
ggatgtggcactcttcgtgtgtctctcangtaccnnnaaagaccaggtctgggttcctatcacaataggtatctaatcccacatgatgaacactgttggggtgacaatggtgtctccaacattgaaggtggttgctatgccaaatgcattgacctctcacgggagaaagagccagatatttggaatgcaatcaggtttggcacagtgttggaaaacgtggtgtttgatgagcacgaccgagaagttgattactctgacaaatcagttacagaaaatactcgtgctgcttatcctatagagtacattccaaatgcaaagttacctttcgtttgccctcatccaaagaatgtcatacttttggcatgtgacgcatttggggtactcccacccgttaacaag

SEQ ID NO: 13625 - DNA, 400 bp, Glycine max
  unsure at all n locations
  Clone ID: LIB3094-069-Q1-K1-E1
gngacgtattgttcttctcccaggttatttatagattcaaaatggtgaagatttgctgcagggggggtggatatgtggggggtcctactatggcagtcattgcacttaagtgcccatccattgaagttgctgttgttgatatctctaaatcccgcattgcagcctggaacagtgaccagcttcctatctatgaacctggccttgatggtgttgtgaagcaatgccgtggcaagaacctcttcttcagcactgatgttgaaaagcatgtctttgaggctgacatagtgtttgtctctgtcaacaccccaaccaaaactcagggtcttggagctggtaaagcagcaaatttgacatattgggagagcgcagctcgcatgattgctgatgtttcgaagtctga

SEQ ID NO: 13626 - DNA, 355 bp, Glycine max
  unsure at all n locations
  Clone ID: LIB3094-069-Q1-K1-E10
ccgcccgggccctccnattgaatatccatggtgttttttagttcttttatccattaaaaaactctggattggtatttctaagaagaactatactanttgaaagatatcttttgcaaatatgcatatttaactgaggttgttataacttgttccttccctcaaaaaaaaaaaaaaaagaaagaaaaagaacctattagcctccttcattggatatattacatctataaggagtaaattctaccggttcagagaatagaaaaataatcaaaataaaagtcagcagtctcacatctctaattttggtgacagattcaaggggttaaatttgatccaaaaggtgaatatgtgagacaat

SEQ ID NO: 13627 - DNA, 352 bp, Glycine max
  unsure at all n locations
  Clone ID: LIB3094-069-Q1-K1-A7
gcgcgccgtgctgnncnnggagctacaaactctctatcttatttgatattnactgnacaccaaccgtcatttttaatatgcatctttcaatctccccaactgaaccctatattctttcaggaagaaaggacaaaacactggttttgtggagtattgaagaccatataacatctgctgccacagactccaaatctggtgtgtcaattatcaaacaaaactctaaatctttagaaggcaatgataaaactgctgatggccctactgttggaccacaaagcatttattgtgggcataatgatacagttgaaaatttgactttctgcccatctagtgcacaagatttctgtatttt

SEQ ID NO: 13628 - DNA, 256 bp, Glycine max
  unsure at all n locations
  Clone ID: LIB3094-069-Q1-K1-E11
caaatctcccactaccaatcaacatctttctcaccactaaanncactnacaacgtctccgtttacattcacacaaaatcctcactctctctcaattcaaaaatctnaacccaacanncacacacnnaccaaannaaataaaanntaaaaatgccaactccaacncnncactctctcnncactctctacctcnntcccttttgttaaacaataaccgttaaccatctccannaccttggcagcacaaaagncaagcc

SEQ ID NO: 13629 - DNA, 263 bp, Glycine max
  unsure at all n locations
  Clone ID: LIB3094-068-Q1-K1-D10
gaatgataaggtatatgaacaatccttaacagatacttctacaagatgttctattttgtcggagaaaaaaattcgctcaaaaaaaacgcgaaaatattttaatcgtaacttagaggatttgttacgtagaaaaagaaagatagattcatattcccatacatataaattatataggaacaaaaaaaatcttggattactttttgaaaaaaaagtagaaatccatttttttggagtaaaaatactattccaattatttatatnag

SEQ ID NO: 13630 - DNA, 55 bp, Glycine max
  Clone ID: LIB3094-068-Q1-K1-D3
cggttctagatctctatctataactatccaattcactttttttcttctcgccctc

SEQ ID NO: 13631 - DNA, 357 bp, Glycine max
  Clone ID: LIB3094-068-Q1-K1-D6
ctcaaagcaacacaagaacactctcttgaacattcatggatccagtgagcgtgtggtgtaggacgcgcttggctacggtggatcccgagatccatgacctcatcgagaaggagaagcaccggcaatgccgcgggatagagctcatcgcctccgagaacttcacctacttagcagtcatcgaggccctcggcagcgccctcaccaacaaatactacgaggggcatgcccggcaaccgctctcgggggggaccaaattcatggacaagatcgaaaacttctgccgttaaccccccttcaaggccttcaacctggacgcccaatcctggggggcaaatgtcaacccttaccccggttccc

SEQ ID NO: 13632 - DNA, 177 bp, Glycine max
  Clone ID: LIB3094-068-Q1-K1-D7
cccacgcgtccgtcaagcattgcatccctcttgatttgtagtttgttttgtgctttagatgagagttctgccaaatcaagaggggttttaagatcatagtgtgtgttttgcaacaatggctaagttctttgctgctatgatcttggcactctttgccatttccatacttcaaacagt

SEQ ID NO: 13633 - DNA, 248 bp, Glycine max
  Clone ID: LIB3094-068-Q1-K1-E2
aaacacccttgtcgaccacaccaaaattaaaaacataaaaaagcataaaagcacaaaaagacataggaaagggaaaataaaacattttgaagtcatatttgcacacttgattaaaggctgtcgtcccttgtgacggatgcgtggggtgctaataccttccctgtgcgtaaaaacaactcccgaactattcacacttaaagttcgtagaccacaccttttcaattttcccgacgctttcctcaaataaa

SEQ ID NO: 13634 - DNA, 285 bp, Glycine max
  Clone ID: LIB3094-068-Q1-K1-E5
cctcaccccccccccccccccacccccccccccacttccctcaccccttcctttccttcccccctatattctcctccccccccccccccccccattctcccccctctctcccccacaccccttccctccccccccccccccccccctccacccccccatcccctccccccccccccccctttcccctcccccccccccccccctctcccccttccctcccaccccctcctcctcctcccccccccccctcccccccttcccccccccctcccccccccccccccc

SEQ ID NO: 13635 - DNA, 352 bp, Glycine max
  unsure at all n locations
  Clone ID: LIB3094-068-Q1-K1-E9
tttgaatacattccttgtagtttatactgaaagatgggtttgaagatggcgttactgatccgaggcctttccctcatgctccttttggtctcctctgaggtggcatccacgaatacaaaagaggaggcaaaatggagtggatgatgccaaatatcccggtggaagctatggagggggttacccaggtcatggcggtggcggttatcctggccatggcggtggcggttatcctggccatggcggtggtggtggctatcctggtcatggtggtggccaccctggtcatggtggcggctaccctggccgtggtggtggatactgtangcatggcttgtgcggtggccggacatac

SEQ ID NO: 13636 - DNA, 240 bp, Glycine max
  unsure at all n locations
  Clone ID: LIB3094-068-Q1-K1-F6
cgttcttccactccttctctatcttcatcaatggtgttcgtttatgctcanaaatcaaaancctacttgaaggagattttattcaagttcaagagaacaacaaaannaaaaacccattaccnttccaaaattcnntttattaatcacnacaataacaaatataacacttccaaatacccatttttatttccctttaacaacaaagacattttttcacaaataatatcttcttacatttcc

SEQ ID NO: 13637 - DNA, 196 bp, Glycine max
  Clone ID: LIB3094-068-Q1-K1-F7
tttgaatacattccttgtagtttatactgaaagatgggtttgaagatggcgttctgaccgaggcctttccctgatgctccggttggtctcctctgaggtggcatccacgaatacaaaagaggaggcaaatggagtggatgatgccaaatatcccggtggaagctatggagggggttacccaggtcatggcggtggc

SEQ ID NO: 13638 - DNA, 328 bp, Glycine max
  Clone ID: LIB3094-068-Q1-K1-F8
gttgttttcgttcctctgaagtctggagtggtggagcttggttcgtttgaaatggtgcctgaagagcagggtgttgtggaaatggtcaggacagcatttggggaatccagtcctggacaggcaaaggtgtttccaaagatttttgggcatgagttaagcctgggggatacaaaatctcagtctataactattagtttctccccaaaggtggaagatgatccgggtttcacttcagactcctatgaagttcaagcactaggggtgaaccatgcttatggaaatctttcaatgggactttagggacggtaatgaaggaacaatggtttct

SEQ ID NO: 13639 - DNA, 249 bp, Glycine max
  Clone ID: LIB3094-068-Q1-K1-F9
cccacgcgtccgcttctccgccacttctgaatctattgaatcaacaatcatgtcggacgaagggcaccatttcgagtccaaggccgacgccggagcctccaaaacctaccctcagcaagccggtaccatccgcaagaacggctacatcgtcatcaaaggccgcccctgcaaggttgtggaagtttcgacttccaaaactggaaaagaacggtcaccgctaagtgtcacttttgtggaattgatattttc

SEQ ID NO: 13640 - DNA, 427 bp, Glycine max
  Clone ID: LIB3094-068-Q1-K1-G1
gagaaagtgttgacaatggagtcccaagctgaagctcttggccagttgacaagtgatgatcgggagggaaagtttgctttgcttgagggctcgtccgttgatgacgaccttgcgaatttgaaaaaagaattatctggtgcctcaaagaaaggggaccttcctcctggaagaagtaccaccagcgccaacactgggattccatttcgagatgctgagatcgagttggaacttgatcaattgaggcaaagagcaaaggaattttgaagcatggattcttttttgtttcttcatatcaaatcttcaatttagtttctttatttctgatatcaacgttgtacagctaaaggccaatcacgatattgttcgactactggccaaaaattgattagaaaaatgaactgattagctgcatgctcttgtagctcat

SEQ ID NO: 13641 - DNA, 242 bp, Glycine max
  Clone ID: LIB3094-068-Q1-K1-G2
gagagggaaaacccgtttcccgtgccaggattcggttgtttaatcaggacaagaacaattttaacactccgaaataccgttttgtggttcgctttagcaacaaggacattgttgcacaaataatatctgctagcattgccggcgatttagttcttgctacagcatattcacatgagctgccacgatatggtcttgaagtaggacttacaaattatgcagcagcttattgcactgttctcctg

SEQ ID NO: 13642 - DNA, 96 bp, Glycine max
  unsure at all n locations
  Clone ID: LIB3094-068-Q1-K1-G5
cttcaatcattnttttcaaaacacacactctccatcattttttcactcttttcctctttaattttaacaacacttctttcttattcattcaaaaat

SEQ ID NO: 13643 - DNA, 193 bp, Glycine max
  unsure at all n locations
  Clone ID: LIB3094-068-Q1-K1-G7
cacttttgattttattcaatcaacaatcatntcngaggaaggacaccatttatagtccaagggccacnccctatccttcaaaacctaccctcatcaaaccaaaaccatcctcaagaacggatacatcgtcatcaaatgccgcccctttaatgttgttgaattttttaaccacaaaactttttagcacaaaaat

SEQ ID NO: 13644 - DNA, 348 bp, Glycine max
  Clone ID: LIB3094-068-Q1-K1-H3
tagagaattatcatacccttcaagatgaaaccgttcctacgtccaatattcctattattcggtatgcttctttaccaatccatttcggccagtgctgctataaatattaatggtctgagaaacaaaattagagaagttctaaacaagcacccgagcatcaatcttccggcagataaactgaagaaggtgaagagaccactgaaggcactggattatctgcttggcgaatgtaaggacaggccgcctcaagaatttcaagaattttgcccgaaatttaagaacgataatcaacaaaattgcccgaatgccgcgtatgaagcattttgccccgttactgaagcaagcgat

SEQ ID NO: 13645 - DNA, 298 bp, Glycine max
  unsure at all n locations
  Clone ID: LIB3094-068-Q1-K1-H7
cccacgcgtccgggtggagtcatgacaaagttgattcccagaaacactgttatcccaaccaggaaatctcaggtgttcaccacctatcaggaccagcagactacagtctccattcaggttttcgaaggcgagaggagtctcacaaaggattgccgccttcttgggaaatttgatctgtctggaattcctccagccccaaggggtacgcctcaaattgaagtgaccttcgaagttgatgccaacggcattctaaatgtgaaggcagaagacaagggcactggntaatcagaaaagatca

SEQ ID NO: 13646 - DNA, 350 bp, Glycine max
  unsure at all n locations
  Clone ID: LIB3094-069-Q1-K1-A1
cgccaggctgttctnggagctacaaactcttttcctgatttgatattgactggacaccagcgtagtgcataatttgctcttgcaatgtgcccaactgaaccctatgttctttcaggaggaaaggacaaaacagtggtgttgtggagtattgaagaccatataacatctgctgccacagactccaaatctggtgggtcaattatcaaacaaaactctaaatctggagaaggcaatgataaaactgctgatggccctactgttggaccacgaggcatttattgtgggcatgaggatacagttgaagatgtgactttttgcccatctagtgcacaggagtttttgtatgttgg

SEQ ID NO: 13647 - DNA, 136 bp, Glycine max
  unsure at all n locations
  Clone ID: LIB3094-069-Q1-K1-A11
cccgggccgacccacgcgaccgaaaaaaaaaaaaaaaaaaaaaaaaaataatataataaaaaaaaaaaaaaaaaaaancgcaattgttttaataaaaaaaaaagccaaaccaaaaaanggcccccctttttaaaga

SEQ ID NO: 13648 - DNA, 394 bp, Glycine max
  unsure at all n locations
  Clone ID: LIB3094-068-Q1-K1-D1
cccactcctncgtaagcttttcatccctctgtatttgtaatttgttttgtgctttgggaagatgttcttccaaatcaagaggggctttaaaatcatattgtgtgttttgcaacaattgctaagttcttttctgctattatcttggcactcttttccattttcatactctaaacagtggtaatggcttcttatgaacaaagaggccacttttattacaacaagagcaaatattgaagtggaaatgtcaaaagttaccaattcccatcacaatgctctaagagatttatcccgacccaataccacaaaccctgcatgtttttctttcaaaaatactccaagacattccttttttttgcccccccggtattattgtaattaaacttttttccccttc

SEQ ID NO: 13649 - DNA, 314 bp, Glycine max
  Clone ID: LIB3094-069-Q1-K1-A12
cccacgcgtccgcccacgcgtccggtgattgaagctagttagaacaagatgttgcggctagtctacactgcgattttctccgaaatgcttttgattctcacgctcgtcttcaaaaccccactgagaaaactcgtcatcgtttccctcgatagtgtgaagcgcggtcgcggtcccgtggtggtttccaccgtgggcgccacattgatggtggttctcgcttcgagcctctacagcatggccaagatccagcaacgcaccctcgaggccggcatagtcaaccccaccgaccaagtcctcatgtccaaacacatgct

SEQ ID NO: 13650 - DNA, 382 bp, Glycine max
  unsure at all n locations
  Clone ID: LIB3094-069-Q1-K1-A2
cgccatgcttgtctttgaacttccaactctttttcttgaattgaattgaactggcaacaaggagtatgcaaaatttgctcttgcaatgtccccacttgacccctatggtcttttcaggggaaaaggacaaaacagtggtgttgtggagtattgaagaccatataacatctgctgccacagactccaaatctggtgggtcaattatcaaacaaaactctaaatctggagaaggcaatgataaaactgctgatggccctactgttggaccacgaggcatttattgtgggcatgaagatacagntgaagatgtgactttctgcccatctagtgcacaggagttctgtagtgttggagatgattcttgnctcatcttatgggatgc

SEQ ID NO: 13651 - DNA, 237 bp, Glycine max
  unsure at all n locations
  Clone ID: LIB3094-069-Q1-K1-A4
acatncaatgcatcatattcaggtttggcaaacaagattataataacgtggagctgcatatagtactagtactaccctacataatcccaatcttgaagaaaacttttttaaaaagcatacattctatattttgtgttttgctataccgtatcttttgtctcagcagacactaaccagaccttttgtttcaattttgactagataactttttaaattggagatttaaacgatcacaac

SEQ ID NO: 13652 - DNA, 205 bp, Glycine max
  Clone ID: LIB3094-067-Q1-K1-F4
gtgagtgcacacacccaatcaaacatatgtgtttatttaatcgagtactcatgacatcggacgaggttgccgatcatacataatgcacaattacaccatccctttgaaccgcctaatcacgcacaaccagatgcaatgttcgcataggtccaaacacgaagagggacttgtgccatgcctgaactcaatcattcaaggttttaag

SEQ ID NO: 13653 - DNA, 387 bp, Glycine max
  Clone ID: LIB3094-067-Q1-K1-F9
gtttacaggggagcagttatccatcggaattacttatacggtttagtttcgttgattccattgacttcagcacttagcattttacctttgcctaatgttccgttcttctgggttttatttcgcacttattctcattggagagccttgcagggaagtgagaggctgtttcaactagtctcagataacagcaagacttcaaacacttgtacatatgaaaagaaaactgagcacaaggaatctaaaagtcaaagacatagttcaaatgaaccttgttgggtaagccctttacatattctcttctgttagaagagatattggtgagttcatagtgcttcaacctccttgcaggacttaaattatgtcatgcatgagccaaaaaccattttt

SEQ ID NO: 13654 - DNA, 385 bp, Glycine max
  Clone ID: LIB3094-067-Q1-K1-G10
gattcaagaacctattattgattggccccttggttctctccagcaaaaattttgttggaggcccaggggatttgacaggtgctgtggatctattaattcacttccaattactccaacatttgaggtttttttgcaggaggccacttcctgtttcattttcaaatccacactatttatacaatggtataggtgccatagaattcaaaaaaggagatgggatgcagttggatcaacttattcaagatccatctttgtccagtggttctaataatcatatacaacctttggacctcgttattctaaaggaggcttttcaactcaaggaaactgttcccattgatttgcctgctgccgagaaggggattctgactgttgcaggaaaatc

SEQ ID NO: 13655 - DNA, 283 bp, Glycine max
  unsure at all n locations
  Clone ID: LIB3094-067-Q1-K1-G5
cgcaccagtttcaccgcacgaatatcttgttgtttggagcgatccgagaaaaactctgtaaacatgttggtttaccaggacctccttacaggtgatgagcttctctctgactccttccgttacaaggaaattgagaatggaatgctgtgggaagttgaggggaagtgggttgttaaaggagcagttgatgtagacattggtgcanacccttctgctgagggtggaggagaagatgagggagttgatgatgcagctgttaaggttgttgacatttgtgacacat

SEQ ID NO: 13656 - DNA, 448 bp, Glycine max
  Clone ID: LIB3094-067-Q1-K1-H1
ctctctgctcctagggtttctccttcgagtgagggaaatggctcccaaaccgcctagtacgggtctgtttgttggactgaacaagggtcacgtcgtcaccaagaaggaattgcccccacgcccctcagatcgtaaggggaaaacaagcaagagggtgcactttgtgaggaacctcataagagaggttgctggttttgcaccctatgaaaagcgtataactgagttgctgaaggttgggaaggataagagggcactgaaggttgcaaagagaaagcttggaacccacaaacgtgcaaagaagaagcgtgaggaaatgtccagtgttctcaggaagatgagggctggtggtggctgagacaagaagaaataagtcttatttatttactcttttccagattcactagatggacctgtgtattgatggacgagctttcatatttttgctttg

SEQ ID NO: 13657 - DNA, 440 bp, Glycine max
  Clone ID: LIB3094-067-Q1-K1-H3
ggcggcgctgtggcggacgcgccggcggtggttgaggagaagacggagttcgacgtggtgatcgaggaggtgccgagcaacgctcgaatcgcggtgattaaggcggtgagggcattgacgaacctagcgctgaaggaggcgaaggagttgatcgaagggttgccgaagaagttcaaggaagggatttcaaaggacgaagctgaagatgcgaagaagcaactcgaagaagctggtgccaaggttaccattgcttaaacactgtttagctgcagcatatatgttctgcttcttcttttgttggttgtagttgagttcaccagtacactgtaatttcatttccattttgtctggatttcaatcttttatttgtaatgaggaaatatgaggtcctaattttaaaatattttttttaaatgcggatgaaggggtttgtggaaaaa

SEQ ID NO: 13658 - DNA, 171 bp, Glycine max
  Clone ID: LIB3094-067-Q1-K1-H7
gcttcctcctcttacgagcctttcctttcagttcattgattcggtgggtagccgttgcagcgaggcggttctaaaccctgatcggtgccaacacacacaccgtgaacaatatgattgtctgggtggccgcaacaagggaacaaggcctttgagttttaagacgctgctgct

SEQ ID NO: 13659 - DNA, 239 bp, Glycine max
  Clone ID: LIB3094-068-Q1-K1-A3
ctagagaattatcatacccttcaagatgaaaccgtacctacgtccaatattcctattattcgttaggcttctcgaccaatccatttcggcgagtgctgctataaatattaatggtctgagaaacaaaattagagaagttctaaacaagcacccgagcatcaatcttccggcagataaactgaagaaggtgaagagaccactgaaggcactggattatctgcttggcgaatgtaaggaca

SEQ ID NO: 13660 - DNA, 335 bp, Glycine max
  Clone ID: LIB3094-068-Q1-K1-A6
agcacacacttgaaagcgagaacacccttgtttgttttagctcctaagttggaagcttgtagattgattttcactgccaagcaaaagaaagtgagggaatctaacccttaattgaacacaatgagttcattttacatgtctctgaacccttcaatttctcaatcgtgttacaaacccaagcaatttttcaatttggagagagagagtactttggtgggaagaagtcctgttattcagattagatgccggagggttgtgagtgcgtgtcttaacgtggatgttgatgcacctgatagtgggaagacagcattggagaaaaccaaagatgtgatcga

SEQ ID NO: 13661 - DNA, 163 bp, Glycine max
  Clone ID: LIB3094-068-Q1-K1-B1
cgcaaattcaaaggaggatctctcttgcgttttctctaggttttcgctatggcgtcgaagcgaattttgaaggagcttaaggatttgcagaaagatcctccaacatcttgcagtgccggtcctgttgttgctgaagatatgttccattggcaagctacaatta

SEQ ID NO: 13662 - DNA, 318 bp, Glycine max
  unsure at all n locations
  Clone ID: LIB3094-068-Q1-K1-B12
ccgggccggccgacgcgtccggaagttgcnagagtgaagaaatggcgcaagtcttggcattggatttggaggaacttcgccggcttcacatcatcgccaggggacctcgaaccctctctcttctctcctccgaaattcgtaacctcgaaaagttatcgtcagaggaagcttctgcgcagattccggcgccgatttcgaccggaactaaagtggcgccttcacctgcgctgaagtatgcggcactcgcgtcgttcagttgggaccaggatagtgacaaagttaagatatatgtgttaatggagggaatcgatgagaata

SEQ ID NO: 13663 - DNA, 183 bp, Glycine max
  Clone ID: LIB3094-068-Q1-K1-B2
agaaaaagaaaaatcaaaggacggtggtgagtgctgcttctgcttcatcatcatcagagaagaatggcggctactgtgtcttctgcgtggtcaaagcccggcgcgtgggctctcgattccgaggaacacgaagccgaactccttcaacagaacaacgacaagccactcgccgactttcccttc

SEQ ID NO: 13664 - DNA, 208 bp, Glycine max
  unsure at all n locations
  Clone ID: LIB3094-068-Q1-K1-B4
cacacactttatactataacaccctttttttttttatctcctaaattntaaacttctagatagattttctctttcaaacaaaaaaaaattatttaatctaacccttaatttaacacaattacttcattttacatatctctcaacccttcaatatctcaatctttttacaaacccaaacaatttttcaattttaaaaaaaacaatactt

SEQ ID NO: 13665 - DNA, 338 bp, Glycine max
  Clone ID: LIB3094-068-Q1-K1-B5
gaaaacaagaagtagtgagaagaagggagagaatggaggaaaaggcaaaagctgagcagaagaggagaggtatgaccgagacttggttgaagaagcaccgtcttctttacaatggagccactagacaccctcttattattagcattcgcgatggcaccatcaacactgcttccttcaaaacatggctcgcacaggattacttgttcgttcgggcgtttgtcccatttgtggctagtgtgctgataaaagcgtggaaggaatcagattgcagtggtgacatggaagtcatattggggggcatggcttctctggaggatgagatttcatggttcaagaca

SEQ ID NO: 13666 - DNA, 253 bp, Glycine max
  unsure at all n locations
  Clone ID: LIB3094-068-Q1-K1-B6
tatttcaattaataaacttttgttcattttatctcatcataatcttcagggagattttttataaaatgccggtcggaaacatcntcctcttaattccttaataatctactcacccctacacgtttaattctacttcttcttttttcattctcaaccttcatcttctttttctcctgctcaatctccctcatctcctactacaatgctacctacaacttctcttccaccccatctctaccatattcttctcctt

SEQ ID NO: 13667 - DNA, 189 bp, Glycine max
  unsure at all n locations
  Clone ID: LIB3094-068-Q1-K1-B7
gaaaaaaaaaaataaatcacgttttatttctcttctcttatcatcatcagaaaggatgttttactgttcttcgtctntcaaagcccgccccttggctcttatttctataacacgaacccaacttcttcacataacaacgacaaaccactttcctactttcccttcctctcccgcccccgtttcaatccc

SEQ ID NO: 13668 - DNA, 338 bp, Glycine max
  unsure at all n locations
  Clone ID: LIB3094-068-Q1-K1-B8
ccgggccgaccgacgcgtccganaaaaanaaaaatcaaattacggtggtgagttctgcttctgcttcatcatcatcagagaagaatggcttctactgtgtcttctgccctatcaaagcccggcgcgtgggctctctattcctaagaacacgaatccgaactccttcaacaaaacaacgacaaaccactctccgactttcccttcctttcccccgtcgttttcaatcccaataaaaaaaaagcccaaacctactccctctccgaattcaccgtcaaaccccacaccttcttttcccaccaaaatcccgtcgttcttcccaccggtccccgtcatctcac

SEQ ID NO: 13669 - DNA, 460 bp, Glycine max
  Clone ID: LIB3094-067-Q1-K1-F2
aaacacccttgtcgaccacaccaaaattaaaaacataaaaaagcataaaagcacaaaaagacatggaaaagggaaaataaaacattttgaagtcatatttgcacacttgattaaaggctgtcgtcccttgtgacggatgcgtggggtgctaataccttccctgtgcgtaaaaacaactcccgaactattcacacttaaagttcgtagaccacaccttttcaattttcccgacgctttcctcaaataaaagttggtggcgactccgcgcattttcctttcatggaagacgcacttgtgagtcccgcatcggcctcccgtcaaaaggtaggttgcgacagtacttgccctcccgccgaagggtaaggtccttaattggattaacctataaccaaagggaaacttaagcttaaataaactcacaaatcaagctttgtccattaaaatcacttaaaaaccattt

SEQ ID NO: 13670 - DNA, 163 bp, Glycine max
  Clone ID: LIB3094-068-Q1-K1-C1
cccacgcgtccggtgatttcagtgagtgatcggtgttcacttgatctcatcataatcgtcagcgtggattgaagaagatgccgatcagaaacatctccgtccgaaggcctgaataggcgactcaccccgacacgtttaaaggcgcttttgctgagttcatctc

SEQ ID NO: 13671 - DNA, 253 bp, Glycine max
  unsure at all n locations
  Clone ID: LIB3094-068-Q1-K1-C10
gaaaaatacagagagacactgtagatcagatgccagatcgaaccaccaagacctgcagtttttaattttaattcaaattgccttttcacttttaatccaaaaccctaatttcctttttctaccctccagtgtcgccgtttctcaacaattcttaccctaatcatcagccatccaccaataacgattcaaaaacccaaactttgtgtgaagtagttcactccccatcactcgnntgtttttttaatatttattt

SEQ ID NO: 13672 - DNA, 207 bp, Glycine max
  Clone ID: LIB3094-068-Q1-K1-C12
cttctccttctcaatcttgtaattctatttcctccaccataatgctgcgcaagcttgtgtgagggccacgcaagaacaagcctggcacagttcccgttcacctcaacgtctatgatctcaccccaatcaacggctatgcctattggcttggccttggagtctaccattctggggttcaaggtcatggattggaatatggttttgggg

SEQ ID NO: 13673 - DNA, 155 bp, Glycine max
  unsure at all n locations
  Clone ID: LIB3094-068-Q1-K1-C2
cgaattccggtcgaccgcgcgtccgtacagaattgccagagtgaaaaaatggcnccaggatttgcactgcctttaaaaaaattggacggcttctcagcatgggcgggaggccttaacccctctctattgtctcctacaaaatttcgtcaccggcc

SEQ ID NO: 13674 - DNA, 139 bp, Glycine max
  Clone ID: LIB3094-068-Q1-K1-C8
gaagttgcgagagtgaagaaatggcgcaagacttggcattggatttggaggagcttcgccggctccacagcatcgccaaaagacctcgaaccctctctcttctctcctccgaaattcgtaacctcgaaaagttatcgtc

SEQ ID NO: 13675 - DNA, 409 bp, Glycine max
  Clone ID: LIB3094-067-Q1-K1-B2
cccacgcgtcctcccacgcgtccgcccacgcttccgctcgtgaactcaaagccggacttgacgggctaaagcacaagtttgtcttctggtacactcgtcgaacacctggagttcgaaatcaaacatcatatgaggacaacataaagaaaattgttgaatttagtacggttgaaggattttgggtctgctactgccatcttgctcgtcctgcttctttacctagtccaacagatttgcaccttttcaaggaaggaatccgtcctctatgggaggactctgctaactgcaatggtggtatatggattatacgattcaaaaaggttgtcctctgcccgttttgggaggaccttgttcttgcctttgtgggtgaccaattggattattgggataacatatgtggtgcagtact

SEQ ID NO: 13676 - DNA, 420 bp, Glycine max
  Clone ID: LIB3094-067-Q1-K1-B3
cccacgcgtccgggaaaatggaaggcaccattgattgataacccagatttcaaggatgaccccgacctctatgttttccccaacttgaagtacgtggggattgaattgtggcaggtgaaatctggtactttgtttgacaatgtcttaattactgatgatcctgagtatgctaagcagctggttgaagaaacatggggcaagcacaaggatgctgagaaggcagcatttgaggaggccgagaagaagagggaagaggaggaatcaaaggatgacccagttgactctgatgctgatgaggaagaggaagatgctgatgaagctggcaatgactccgatgctgaatcaaagacggaagctggagaagacaccaaggaagagggtgtacatgatgaactctaggaagtttgcaaaacggataaa

SEQ ID NO: 13677 - DNA, 455 bp, Glycine max
  Clone ID: LIB3094-067-Q1-K1-C10
ctgaaccccatttcattcctttcattcgcccttttccttggttatgaagctaaacctgttttggtgtgcttgtcctttttgcttctacaatttcctcttctcttgccaagggctccttgcaacaaacccttcttccttcagaattcaatgactgtagtaatgcaagccaggcaaggcatttattagaggatgaatctcaggctcagaaaagcagtgttgatttggcacaaggatatatgtccaatgatgaccttgaatgggccatccaagaaattggacaaagatgcagcaacatttccaggatatacagtattggaaagagtgtaaatggttttccactgtgggtgatagaaatttctgacaagccaagagaagaaaagactgaacctgcatttaaggttattgggaaatgtgcacggtgatgaacctgtgggacgtgagctgcttatattttt

SEQ ID NO: 13678 - DNA, 270 bp, Glycine max
  Clone ID: LIB3094-067-Q1-K1-C6
ggaaaactaccaaaacttcaactacaactcgtttcctcaggcttcgtacaaagttgcaggtctgggtgcttctggagggataggtcagccactcgcgcttctcatcaagatgtcgcctctagtttccgacctgcatctctatgatattgcgaatgtcaagggagttgctgctgatatcagtcactgcaacaccccctcacaagtcagggatttcactggagcttctgagttggcgaattggttgaaggatgtgaatgtttgtgtcatacc

SEQ ID NO: 13679 - DNA, 447 bp, Glycine max
  Clone ID: LIB3094-067-Q1-K1-C8
ggtctttaagtttcaactttctttgcttagggcaacctcctttctctgtgactctgagtatcgtatcgttttattattatttctaattctctcttatcaggtccattgaatatgtctccgtcgttggatcttcctcccaagggtggcttcagttttgatctatgccgaagaaacgcaatgcttcaaaacaagggcctcaaagccccaacctttctcaaaactggcaccactattgtcggtttagttttccaggatggtgtcattcttggtgctgatactagggcaactgaaggacctatagtggctgataaaaactgtgagaaaattcattatatggcacccaacatatattgctgtggagcaggcacagctgctgatacagaggctgtaacagacatggttagctcacagctgcaattacatcgctaccatactggtcgagaatca

SEQ ID NO: 13680 - DNA, 320 bp, Glycine max
  Clone ID: LIB3094-067-Q1-K1-D10
cccacgcgtccgttctaatctcattctccttttgttcaaacactctctctcatggcatcagatgagatgattaggatcggcatcaacggatttggaaggattggccgtttggtggccagggttgcccttcaaaggaatgatgttgaacttgttgctgtcaacgatcctttcatcaccactgattacttgacatacatgttcaagtacgacaccgttcatggccagtggaagcattttgatgtgaaggtgaaggactctaagacccttctctttggtgagaagcccctcaccgtttttggaatcaagaaccctgaggaaat

SEQ ID NO: 13681 - DNA, 250 bp, Glycine max
  unsure at all n locations
  Clone ID: LIB3094-067-Q1-K1-D11
ggaaaactaccaaaacttcaactacaactcgtttcctcaggcttcgtacaaagttgcaggggggggtgctgctggagggataggtcanccactcccgcttctcatcaaaatgtcgcctctagttcccgacctgcatctttatgatattgcaaatgccaagggagttgctgctgatttcagtaactgcaacaccccctaacaggccagggatttcactggagcttctgagttggcaaattgtttgaaggat

SEQ ID NO: 13682 - DNA, 417 bp, Glycine max
  Clone ID: LIB3094-067-Q1-K1-D12
gaattatcgcctcgtcgaccgactcgtccgcgcatattcaaaggaggatctctcttgcgttttctctaggttttcgctatggcgtctaagcgaattttgaaggagcttaaggatttgcagaaggatcctccaacatcttgcagtgccggtcctgttgttgctgaagatatgttccattgccaagctacaattatgggtcctccagacagtccctatgcaggaggtgttttcctagtgaccattcatttccctccagattatccctttaagccacccaaggttgcattcaggacaaatgttttccacccaaatataaatagcaatggaagcatttgccttgatatattgaatgagcagtggagccctgctctaaccatttccaaggtgttgctctcaatttgttccctattgacggat

SEQ ID NO: 13683 - DNA, 363 bp, Glycine max
  Clone ID: LIB3094-067-Q1-K1-D2
gaagttgccagaggtaaaaaattgccccaggacttgtctttggatttggaggagcttcgccgggtcgacagcttcgccaaaagacctcgaaccctctctcttctctcctccgaatttcgtaacctcgaaaagttatcgtcagaggaagcttctgcgcagattccggcgccgatttcgaccggaactaaagtggcgccttcacctgcgctgaagtatgcggcactcgcgtcgttcagttgggaccaggatagtgacaaagtttagatatatgtgttaatggagggaatcgatgagaataaggttgaatccgagtttaagtcgatgtcattcgatgttaagttccatgatgttcatgggatgaac

SEQ ID NO: 13684 - DNA, 461 bp, Glycine max
  Clone ID: LIB3094-067-Q1-K1-D6
ttttgattttctggatcccgggtttttgaaatgagtgtttgaattaaccgatggtttttcagaggaggttatcgttgaggcatgctttggtgtttgtgttaatcggggcgttgtggaactggcaaagggcaaagggtttccgatttgtgatagacagagacgagtgtttctcccatgatgtgaagtacgagggtgacactgttcatgtctctttcgttgttattaaggctgattctccctggcattacggcgacgaaggtgtcgatctcgtggtaaagggaccttctggcgagcaaattcaagaatttcgggacaagaccagtgagaagtttgactttgtggctcacatattcggggtccataaattctgcttcaccaacaagtctccttatcatgaaactgtcgattttgatgtacatgttggtcacttctcttactttgagcaacatgcaaaagatgag

SEQ ID NO: 13685 - DNA, 328 bp, Glycine max
  unsure at all n locations
  Clone ID: LIB3094-067-Q1-K1-D7
gaagttgctagagtgaataaatggcgcatgattcgtcattggatttggaggagcttcggcagcntgcacatcatcgccaaaagacctcccctctctcttctttcctccgaattccggacctacctcaaaaagttctcgatagaggaagcttctgcgcatattccggcgccgatttcgaccggaactaaagtggcgccttcacctgcgctgaagtatgcggctctcgcgtcgttcagttgggaccaggatagtgacaaagttaagatatatggtgtaatggagggaatcgatgagaataatggtgaatccgtatttaagtcgatgtcat

SEQ ID NO: 13686 - DNA, 402 bp, Glycine max
  Clone ID: LIB3094-067-Q1-K1-D8
gaagttgcgagagtgaagaaatggcgcaagacttggcattggatttggaggagcttcgccgcggccacagcatcgccaaaagacctcgaaccctctctcttctctcctccgaaattcgtaacctcgaaaagttatcgtcagaggaagcttctgcgcagattccggcgcccgatttcgaccggaactaaagtggcgccttcacctgcgctgaagtatgcggcactcgcgtcgttcagttgggaccaggatagtgacaaagttaagatatatgtgttaatggagggaatcgatgagaataaggttgaatccgagtttaagtcgatgtcattcgatgttaagttccatgatgttcaagggaagaactaccgatgtgcaatatcaaaattgcacaatgagatagta

SEQ ID NO: 13687 - DNA, 450 bp, Glycine max
  unsure at all n locations
  Clone ID: LIB3094-067-Q1-K1-E1
tcgggctggcattggttgaaaattccggtccccgttttggccccggtctgcgtaagcagattaagaggagggaagttagtcaacacagcaggtttttctgtgaattttgtggaaagtatgctgtgaagaggaaacctgtgggaatatggggatgcaaggcctgtggtaaagtgaaagctggcggtgcttacactttgaataccgcaagtgccgtgactgtacggagcaccatcaggaggttgagggagcaaactgagagttaagcttttttgtttatgctatcaattactattagactttgcatgaagtgcctagtttgtattcactgaactgcactggttgtattcaaagtaaactccttaagtttaattntgagatgactcttttaattttaattggttggaactttggcggggtgattttgcttcataagttcattttattggttgc

SEQ ID NO: 13688 - DNA, 174 bp, Glycine max
  unsure at all n locations
  Clone ID: LIB3094-067-Q1-K1-E12
cttaatatgctttngtgtcggtcctcatcacatcaaacgacgtctcatatcatcgcaattccttgattatttccttttgttgatacgcggaatcgcgcacacggtgctggtgtgtgcactgaggtagaaagaagaagattgaattgtaaacagcatggaattacccttcttggg

SEQ ID NO: 13689 - DNA, 247 bp, Glycine max
  Clone ID: LIB3094-067-Q1-K1-E3
aacggaagaatcactcccttatccatttccacaccttaccatggcctaaaccaacgctctttcttgggcgtttattctacgctctcccaaccgccaatctttaaccctaagagcgaaccatattggaagagtaaattaccggaaaccgaataaccttttctccgttaaagcctaccccaaaaagattgccttttaccaacatttccacgctctgctattcatacccagcatttttcatatcttttcc

SEQ ID NO: 13690 - DNA, 336 bp, Glycine max
  Clone ID: LIB3094-067-Q1-K1-E4
attaagggttatatattgagttattcgattggagattgttagctctgcagcaacctcccagatgtgtgggctggggaaccgtaattattgaggggggtcctccacccttggaattattaaaattcgcctgggagacctggggtttcttggagttggagaacaatgggatatccatagagttgatggacaccgtggagagattgacaaaggagccctacaaaaggtgtatggagcaaaggttcaaagaaatggtagcaggcaaaggtttggagtctgctcaatctgaaatcaatgatttggattgggaaagcactttctttttcagccaccttcctg

SEQ ID NO: 13691 - DNA, 371 bp, Glycine max
  Clone ID: LIB3094-067-Q1-K1-F11
cagttatccatcgtatcttcttatacggtttagtttcgttgattccagttacttcagcacttagcattttacctttgcctaatgttccgttcttctgggttttatttcgcacttattctcattggagagccttgcagggaagtgagaggctgtttcaactagtctcagataacagcaagacttcaaacacttgtacatatgaaaagaaaactgagcacaaggaatctaaaagtcaaagacatagttcatatgaaccttgttgggtaagccctttacatattctcttctgatagaagagatattggtgagttcatagtggcttacctcccttgcagacgttaaattatgtcatgcttgggctaaaactattt

SEQ ID NO: 13692 - DNA, 329 bp, Glycine max
  Clone ID: LIB3094-067-Q1-K1-B12
tgaatgtgtgatgatttattaatttctttcttgtgacttggtttgttgtcattctgaatgctgttgctaatacatgcattgttggagttcaattggttgctttgctggctctttttttgcacttagtttttatttttatttccatcaactcgatttgtagttttctctttgagtttaattcccctcaaggtttgaattgtttttgcttttaaagtttaattcaaattcactaactatgataaaaatctggtcataatttttcaattatgataagaggttttgctttttataataattatttaaaaaattcgatctaaaataattttttt

SEQ ID NO: 13693 - DNA, 97 bp, Glycine max
  Clone ID: LIB3094-066-Q1-K1-D10
aaaacccggaccgacccacgcgtccgactaaatacaatccaaacttacgaacattaattatcaacatcataactctttaatagggactgctatattc

SEQ ID NO: 13694 - DNA, 240 bp, Glycine max
  Clone ID: LIB3094-066-Q1-K1-D3
cccacccgtccgcccacgcgttcggaagaaaggaatataccttaccgatggtggaatcaagaagcatttgggattgcatagtgcgggtggtgaccaagatgggagaccaagagagtgagagagagaaaaatcttcgctttatgtcaatggcaccaagcacgggtttttaccgaagtgagccaccacccccgatatgagaaaagtgagtttatttggggtcatatttgtaaaaagggggtt

SEQ ID NO: 13695 - DNA, 93 bp, Glycine max
  Clone ID: LIB3094-066-Q1-K1-D6
agaaaatgtaattttcagcactgtccaggaaatttaatgattggaattctttatgcctcaatggatgtgttcaaaaaaaaaaggcgaacgaac

SEQ ID NO: 13696 - DNA, 112 bp, Glycine max
  Clone ID: LIB3094-066-Q1-K1-D8
aatgaaaaccgaccgaccacgcgtccgggaaaattaattcaaacactgtccaggataattaacgaccgcaactctttatgcctcagtcgattattaaaaaaaaagggggacc

SEQ ID NO: 13697 - DNA, 52 bp, Glycine max
  Clone ID: LIB3094-066-Q1-K1-D9
gcaaaatataattcacaccactgatcatgaatattaaagatcgcaactcttt

SEQ ID NO: 13698 - DNA, 74 bp, Glycine max
  Clone ID: LIB3094-066-Q1-K1-E11
ctccgaataaagaaccacacaccccacccgtcccgctttcgaacaaccatgattacttacttaatcaaacaacc

SEQ ID NO: 13699 - DNA, 123 bp, Glycine max
  Clone ID: LIB3094-066-Q1-K1-E12
gaaattttggttgagatgggaaagaagaacaaagtgaaggaaaatggaggcaaagagcattgctcctcgactctttttgtctccaacttgccctattccttttccaattctcagttggaggag

SEQ ID NO: 13700 - DNA, 101 bp, Glycine max
  Clone ID: LIB3094-066-Q1-K1-E4
gttcatttttacacatccctagctctgtcgtttcgtttttgacgatggcgtttcgggtgcggagggcgtgacttcgctctctctttcgtctctctctcttg

SEQ ID NO: 13701 - DNA, 372 bp, Glycine max
  unsure at all n locations
  Clone ID: LIB3094-066-Q1-K1-E7
gagagttntaacagacactgcagattttttttttctacttttcgccacctctttatcgggaaggacggaaaaaagcatcgaactgacctgattattatcttctaatgatacaacaaatcacacacacacagctgttgtctccactgatttatcaagataacgattgaaaacagaacatcactaataaccttcttggagctgtcaagccatcatgataatctcttgatcccgtttaatgattggaagaaccggaagcaggttccgtttaaaaaagaaaatggtcaaatggtcacaaacccacttttccaaagtcaagaaaacattggcgtgaatattacaatagaaccaatgcaacgcaagaagattgatcac

SEQ ID NO: 13702 - DNA, 125 bp, Glycine max
  unsure at all n locations
  Clone ID: LIB3094-066-Q1-K1-E8
acaaaatntaatatacaacactgaccattaattcaaacgatcgcaattctatatcccccagttttttattaaaaaataaaaatgtcaacaaatcataaaatcaaaatgaggcacacactttatac

SEQ ID NO: 13703 - DNA, 82 bp, Glycine max
  unsure at all n locations
  Clone ID: LIB3094-066-Q1-K1-F2
ccaaggcttccgcccacgcgtncggccacgcgttcgtccacgcgttcgaggcacttcaggagggtgagagaatgtctcaagc

SEQ ID NO: 13704 - DNA, 56 bp, Glycine max
  Clone ID: LIB3094-066-Q1-K1-F5
cttcgggctacttttgattgcttgattaaaaacctattgttttctgacaccagaat

SEQ ID NO: 13705 - DNA, 309 bp, Glycine max
  Clone ID: LIB3094-066-Q1-K1-F6
gtccgttgagttgcaagattcacttcaaattatgcgtttcgctgatcggttcctcatcacatcaaacgacggcgcagatcatcgcaattccttgattatttccttttggtgatacgcggaatcgcgcacaccgtgcttgtgtgtgcactgaggtagaaagaaaaagaatgaattgttaacagcctgaattaccttcttggagctttcaagcctgcatgtaatgtcttgatcacgtttaatgattggaagaaccggaagcaggttccgtttaaaaaaaaaaatggtcaaatggtcacaagcccacttttt

SEQ ID NO: 13706 - DNA, 444 bp, Glycine max
  Clone ID: LIB3094-066-Q1-K1-F7
gaggtttttgtctgatgatgttggtaggtctagcaatcgagggcgagggcaagggcaggctgtgtcgaaattatgggaggaatggagcggatggtgatggcagaatgaggaagaatgggaatgggagaaggtttttgtccaataatgttgatcggtctagcggtggagaacagtcttctcctttgaattatgggggggatggaatgaatggtgatggtagattgaggaggaatgggaatgggaggagggttttgcctgttccggtaagaaacaaaagggtccaatggtcacattcccactattccaaagacaagaaaacattggtgggaagattacaatataaccaatgccggggaagaagaatgatcacaatggtgtaaaagttgagctccttggacagataaagatgtaatttgacagaggaaattttatgactttactttc

SEQ ID NO: 13707 - DNA, 330 bp, Glycine max
  Clone ID: LIB3094-066-Q1-K1-G11
aaccaacattatttcaacaaatatatttatttattttttttttaattattttttttttttaatatactctttatctctttttttttttttttatttataggatatatttttctttttaatatttatatattttttatataaatttatcttattttatttttaattttttttaataatatttttttaatttttttccttatttttattttttatataatattttctttttttttattattcctttcttttatttttttttttttattatatatattttacttttttttatatataattttaattatttatctcttatttttttcttttttt

SEQ ID NO: 13708 - DNA, 351 bp, Glycine max
  Clone ID: LIB3094-066-Q1-K1-G7
cccacgcgtccgcccacgcgtccgccagtcaccaacaaaacaaaatccaatggcgccgtgttgggcaatcaacggcgctttccccagcgccagagtcactcctccttccgtcaccggccgattcgccgccgtctacagcgaggtccaaaacagccgcatagaccacgccctccctctcccctccgttctcaaaaaccctttcatcatcgtcgacggtccccaaagctccgccgccggcaaccctggtctcgctccctcccattcactacttcaattttccgtcgacaattagttctacgtaattttgatattggtatgaatattattatgtgccaatagagctgtgcactc

SEQ ID NO: 13709 - DNA, 376 bp, Glycine max
  unsure at all n locations
  Clone ID: LIB3094-066-Q1-K1-G8
gctccgcccacgcncccccagctccatcataacaaaaccaagcnccggggggggaaaaacaaacttgcccgaccccaaaactcctcttccacaccgccgattcttcttctttacatctatgtccaaaacatccatttaccctcccttccctccccttcgtctaaaaaccctttatcatctttacgtcctcaaacttctccccgcaaccctgtctccttcctccattcactacttaattttcctcaacattagtttacgaatttgatattgtttaatatattattccatagactttccactctaggccataatctttattttctttacaatataaataaattttttaatatttaagacattcttaattttttttttt

SEQ ID NO: 13710 - DNA, 302 bp, Glycine max
  Clone ID: LIB3094-066-Q1-K1-H2
cgcaaattcaaaggaggatctctcttgcgttttctctagggtttcgctatggcgtccaaacgaattttgaaggagcttaaggatttgcagaaggatccttcaacatcttgcagtgccggtcctgttgttgctgaagatatgttccattggcaagctacaattatgggtccttcagacagtccctatgcaggaagtgttttcctagagaccattcatttccctccagattattcctttaagccacccaaggttgcattcaagacaaaggttttccacccaaatataaatagcaatggaagcat

SEQ ID NO: 13711 - DNA, 420 bp, Glycine max
  Clone ID: LIB3094-066-Q1-K1-D1
ctagagaattattataccctttaagatgaaaccgtacctacgtccaatattcctattattccggatggttctcgaccaatccatttcggcgagtgctgctataaatattaatggtctgagaaacaaaattagagaagttctaaacaagcacccgagcatcaatcttccggcagataaactgaagaaggtgaagagaccactgaaggcactggattatctgcttggcgaatgtaaagacaggccgcctcaagaatttcaagaattttgcccgaaatttaagaacgattatcaacaaaattgcccgaatgccgcgtatgaagcagtttgcccgttacttgagcaagcgattcaaatatgttgccagaaacacgcataactctgcaagccacggtgggcgtttggatgtgcttttagttacca

SEQ ID NO: 13712 - DNA, 211 bp, Glycine max
  Clone ID: LIB3094-066-Q1-K1-H7
atgaaattgtgaaggaagtctcttcctacttgaagaaagtaggatacaaccctgacaagattgcttttgttcctatctctggttttgagggagacaacatgattgagaggtccacaaaccttgactggtacaagggtccaactcttcttgatgcacttgaccagattagtgagcccaaaaaggccttttaccagcccctcaagctttccct

SEQ ID NO: 13713 - DNA, 384 bp, Glycine max
  Clone ID: LIB3094-066-Q1-K1-H8
cccacgcgtccgttctaatctcattcttcttctgttcaaacactctctctcatggcatgagagaagaagattaggatcggcatcaacggatttggaaggattggccgtttggtggccagggttgcccttcaaaggaatgatgttgaacttgttgctgtcaacgatcctttcatcaccactgattacatgacatacatgttcaagtacgacaccgttcatggccagtggaagcattttgatgtgaaggtgaaggactctaagacccttctctttggtgagaagcccgtcaccgtttttggaatcaggaaccctgaggaaattccatggggtgaggttggtgctgattatgttgttgagtcaactggtgtattcactgacaaggac

SEQ ID NO: 13714 - DNA, 216 bp, Glycine max
  unsure at all n locations
  Clone ID: LIB3094-067-Q1-K1-A4
aagacggagttngacgtggggatgaaggagtgtgagagcaagggtggaatagcagtgattaaggcggtgagggcattgacgaaactagcgctgaaggaggcgaangagttgatcgaagggttggcgaagaagttcaaggaagggatttcaaaggacgaagctgaagatgggaagaagcaacttgaagaagaaggtgccaaggttaccattgcttaa

SEQ ID NO: 13715 - DNA, 336 bp, Glycine max
  Clone ID: LIB3094-067-Q1-K1-A8
gcgtaagttccgagagtgaagaaatggcgcaagacttgtctttggatttggaggagcttcgccggcgtccgcggcatcgccaaaagacctcgaaccctctcttttttttcctccgaaattcgtaacctcgaaaagttatcggcagaggaagcttctgcgcaaattcctgcgccgatttcgaccggaactaaagtggcgccttcacctgcgctgaagtatgcggcactcgcgtcgttcagttgggaccaggatagtgacaaagttaagatatatgtgttaatggagggaatcgatgagaataaggttgaatccgagtttaagtcgatggcattcgat

SEQ ID NO: 13716 - DNA, 454 bp, Glycine max
  Clone ID: LIB3094-067-Q1-K1-A9
tcgggccgggcctttgccgacccccccgccggtggttgatgataaaacggagttcgacttggtgatggaggaggtgccaaccaaccctcgaatcccgttaattaaggcggggagggcattgactaacctaccgctgaaggaggcgaaggagttgatcgaagggttgccgaagaagttcaaggaagggatttcaaaggacgaagctgaagatgcgaagaagcaactcgaagaagctggtgccaaggttaccattgcttaaacactgtttagctgcagcatatatgttctgcttcttcttttgttggttggagttgagttcaccagtacactgtaatttcatttccattttgtctggatttcaatctcttatttggcatgaggaaatatgaaggcctattttaaattattttttttaatgcgtatgaggtggttgttggaaaaaaaaatccatatt

SEQ ID NO: 13717 - DNA, 408 bp, Glycine max
  Clone ID: LIB3094-067-Q1-K1-B1
caccaacgccaaacaagccctaaatctctcttctctttcttcttcttcctttaaccatgagagagatcttgcacgttcagggaggccaatgcggtaaccaaatcggttccaagttctgggaggtgatctgcgacgagcacggcatcgatcccaccggaaagtacaacgaggaaggcaacagcagcatccaactcgaaaggatcaatgtgtattacaacgaggcctctggcggaaggtacgttccccgtgccgtgcttatggatctcgaacctggaaccatggacagcatcagatctggcccctacggcaagatcttccgccccgacaacttcgtcttctgccagtccggcgccggtaacaattgggccaaaggtcattatactgaatgcgccgagctgatcgacttcg

SEQ ID NO: 13718 - DNA, 406 bp, Glycine max
  Clone ID: LIB3094-065-Q1-K1-F9
ggcaccggtgaaatcagttatagttttcttgtgagacaggaggggcacaaacgggtgatgggtcatgttcttggaatccacatggtcacgaatttgcgacaggttcaagggataagacagtgaaaatctgggccatagagagggagtctgtcaagcagcttatgtctttacctcaatttacgagtagtgtaacagcattatcttgggttggtctccatcatcggaagaataatggacttctagctgttggaatggaaaatggccaaatagagttgtggaatctgtcttataacagagcacatgatgggagcatagcagcaccaggtttggctgcttctcttgctgtacgtatagatccttttatatgtcatgcgtctactcgtaaccgtttatcatgtagaaaaat

SEQ ID NO: 13719 - DNA, 341 bp, Glycine max
  Clone ID: LIB3094-065-Q1-K1-G1
caaaaaacgggctctctctcttttcagaggggctctctggggggtttatattttctgggtggggagatgtgcacacttcggggaagaaatttcacagggatagggttgctgacccacctgattttgaggaatcagttggacaggcattgtttgatctagaaaataccaccattgagctgaaaagtgatctgaaagatttatacataaactcagctgtccaaattgatgtttctggcaaccgaaaggctgtggttatccatgtcccctacagactaaggaaaggatttcggaagattcatgtcaggcttggtgagagaacttgagaaaaagtttagtggaaa

SEQ ID NO: 13720 - DNA, 326 bp, Glycine max
  unsure at all n locations
  Clone ID: LIB3094-065-Q1-K1-G11
cccacgcgtccgattgaatatccatggttctcttagttcttttatccattaaggaactctggattaatatttctaagaagaactatagtagttgaaagatatcttttgcaaatatgcatatttaactgaggttgttataacttgttccttccctcaaaaaaaaaaaaaaaagaaagaaaaagaacctattagcctccttcattggatatattacatctataaggagtaaattctaccggttcagagaatagaaaaataatcaaaataaaagtcagcagtctcacatctctaattttgggggacagattcaagggngtaaatttgat

SEQ ID NO: 13721 - DNA, 369 bp, Glycine max
  Clone ID: LIB3094-065-Q1-K1-G12
cccacgcgtccgattgaatatccatggttctcttagttcttttatccattggaaaactctagattaatatttctaagaagaactatagtagttgaaagatatcttttgcaaatatgcatatttaactgaggttgttataacttgttccttccctcaaaaaaaaaaaaaaaagaaagaaaaagaacctattagcctccttcattggatatattacatctataaggagtaaattctaccggttcagagaatagaaaaataatcaaaataaaagtcagcagtctcacatctctaattttggtgacagattcaaggggttaaatttgatccagaaggtgaatatgtgagacaatggctccctgagttggcaag

SEQ ID NO: 13722 - DNA, 331 bp, Glycine max
  Clone ID: LIB3094-065-Q1-K1-G5
cggacgcgtgggtttcagaggcaccgaatgttcttacagttgcattaaagagatttcagggtgggaaaggtgggaagctcaacaagcctattcaatttcctgaaatacttaacttggcacctttcatgagcgggactagtgataaatcacccatatacagattgtatggggtagttgttcacttagatatcatgaatgctgccttttcgggtcactatgtgtgctatgtgaagaatatccaaaacaagtggttcaaggttgatgacagtggtggtgacagctggtgaaatggaatagaagtcttgacaaaaagggagcaatatatgccttt

SEQ ID NO: 13723 - DNA, 280 bp, Glycine max
  Clone ID: LIB3094-065-Q1-K1-G6
cgatcccttggtttccaaaggcaccgaatgttcttacatttgcattaaagagatttcagtgtgggaagtgtgggaagctcaacatgcctattcaatttcctgaaatacttaacttggcacctttcatgagcggcactagtgataaatcacccatatacagattgtatggggtagttgttcacttagatatcatgaatgctgccttttcaggtcactatgtgtgctatgtgaagaatatccaaaacaagtggttcaaggatgatgacagtgtggtgacagc

SEQ ID NO: 13724 - DNA, 397 bp, Glycine max
  unsure at all n locations
  Clone ID: LIB3094-065-Q1-K1-H1
agaaaacctaagcttagatttggaaccaaagaaaagaagaagggaaggaattgatcgttgagaatgcagggaggaaagaaagcgggagagtccattaaggaaacagctacaaacattggtgcttctgccaaggctggcatggagaagaccaaggccactgtccaagagaaggcagaaagaatgacagcacgtgatccggtgcaaaaggagttggcaacccaaaagaaagaggcaaagatgaaccaggcggagctggacaagcaggcggcgcgtcagcataacacggcggccaaacagtccgccaccacggctgggcacatgggacatggccaccacaccaccggaaccgggactggaaccgcacgtattcaccaccggngatatggcagccatgggg

SEQ ID NO: 13725 - DNA, 261 bp, Glycine max
  Clone ID: LIB3094-065-Q1-K1-H2
ctccttccgttacaatgaaattgagaatggaatgctgtgggaagttgaggggaagtgggttgttaagggagcagttgatgttgacattggtgcaaacccttctgctgagggtggagaagatgagggagtcgatgacgcagctgttaaggttgttgacattgttgatacattcagacttcaagagcaacccgcttttgataagaaacagtttgttaccttcatgaagaggtttatcaagaatttgactcccaagctcgatgc

SEQ ID NO: 13726 - DNA, 440 bp, Glycine max
  unsure at all n locations
  Clone ID: LIB3094-065-Q1-K1-H3
cggacgcgtggggtttcctagtatgcaaggtaaagaatcagcaaatttcaaccccggatcggcgagtaacatgttgacaaaagtctaccgagttgcattttgttcttgtaacctcctcaacccactggaggtcgtgatctgtaaattttgagtgaattatacaacanattcttgaaaaagaaatgattttctcttctgagctgctgcttattgatcgatgaatccagctgcaattattttcgaagatggcaataaaatctcttctgcggtgttatctctttgactgaattccaaattttgtaagtataatagttggctatgaaagagactgtaccaagaagcatagtgtgagagtcagagatcagttgttaagtatgagatgtgagaaccatttgtgaatgtatattgctaaatagaagtggcaaagatgattattgatt

SEQ ID NO: 13727 - DNA, 336 bp, Glycine max
  Clone ID: LIB3094-065-Q1-K1-H5
cggacgcgtgggtttcagaggcaccgaatgttcttacagttgcattaaagagatttcagtgtgggaaaggtgggaagctcaacaagcctattcaatttcctgaaatacttaacttggcacctttcatgagcgggactagtgataaatcacccatatacagattgtatggggtagttgttcacttagatatcatgaatgctgccttttcgggtcactatgtgtgctatgtgaagaatatccaaaacaagtggttcaaggttgatgacagtgtggtgacagctgttgaattggataaaatcttgacaaaaggagcatatatgccttttctaatccagg

SEQ ID NO: 13728 - DNA, 430 bp, Glycine max
  Clone ID: LIB3094-066-Q1-K1-A12
ttcaagaacaatttattgcacaaatattgacatagaagcttactcaagccgatgtcaaacactgctttgaatctatttgtggagaggttcaacggttgaggcttcttggagattaccatcattcaactcgaattgcttttgttgagttcacagtggctgagagtgcaattgcagctctaagctgtagtggggtgattctgggttcactgcccataagggtaagtccatcgaagacaccagttcgatcacgtgctcctcgccctactatgcactgaatcaactttccatgtttctggggttgattgctgctgagatatatttacatatatatatatacatagaaacagctgtgttctaaggaacatgtggcatttagttggtacttttgtcctcatgtcttacagtatgggtactttgctttcccttgggg

SEQ ID NO: 13729 - DNA, 392 bp, Glycine max
  unsure at all n locations
  Clone ID: LIB3094-066-Q1-K1-A2
cttcctccgtcaaacccacgcccatttcattcttctcaattcccaattccaaattaggggtagggttttcacaatctcaatgaccttctcttcttccttcaccttacaatccctattccactaccgctactactactccctttgtcttcgtcngtgtcgttcgtaaggattaatcaattaacctatcngaatcgttcagtatcttcttcttctttttcttccatggacctctctcaccctcagtctaacttgtccctcggattttcttncttccacgctttgccgccttctcgctccgacccgccggtgccgctgcagctcatggaaccgcagacggagaatggcaacttagatgttgaatcggacgacgatgaggacaaagaagtcgagga

SEQ ID NO: 13730 - DNA, 105 bp, Glycine max
  unsure at all n locations
  Clone ID: LIB3094-066-Q1-K1-A7
gtcggtatgataaatttgggcaaaaattccaacattgagctatagntttaaattctatatacgggttccaacattgttattttaacaattaaagcattatgtttt

SEQ ID NO: 13731 - DNA, 324 bp, Glycine max
  unsure at all n locations
  Clone ID: LIB3094-066-Q1-K1-B12
ataatgatgatattgaggttgaggttgtggagggtgttgatctttggttgaagattcaagaggaggcaaggttagatgttgatcaagaaccaattttatccagctactatttcagttccattttgtctcacaaatctttggagagtgccttggccaaccacctctccacaaatttgagcagcttgagccttccaagcagcaccctttttgaccttttcatgggtgttttggttgatgatggagatgatgacatcgtangtgctgtgaaggatgatttgatagctgttaaggagagggaccctgcttgcataagttatgtgcatt

SEQ ID NO: 13732 - DNA, 312 bp, Glycine max
  unsure at all n locations
  Clone ID: LIB3094-066-Q1-K1-B6
cccacgcgtccggtgatttcagtgagtgatcggtgttcacttgatctcatcataatcgtcagcggtcgattgagaagatgccgatcagaaacatcgccgtccgaaggcctgaagaggcgactcaccccgacacgttgaaggcggctttggctgagttcatctcaaccttcatcttcgtgttcgccggctcaggctccggcatcgcctacaacaagctcaccgacaacggcgctgccacccctgccggcctcatctncgcctccatcgcccatgcattcgccctcttcgtcgccgtctccgtcggcgccaaca

SEQ ID NO: 13733 - DNA, 66 bp, Glycine max
  Clone ID: LIB3094-066-Q1-K1-C1
cgcgggcgctagagaattatcatacccttcaagatgaatctttatctacgtccaatattcctatta

SEQ ID NO: 13734 - DNA, 186 bp, Glycine max
  unsure at all n locations
  Clone ID: LIB3094-066-Q1-K1-C2
cccacgcgtccgatnttaactgtgtgtgtgtgacaaacgtgaaaaggacttttttttatgagggtgagttaactttgctatttattatctactatgccgctgaaaagctaaacctggcatacttaagtgcttatctgaattcccttggaacccaataccggcatggggcaaaatttggcactgggg

SEQ ID NO: 13735 - DNA, 244 bp, Glycine max
  Clone ID: LIB3094-066-Q1-K1-C3
tccaccacgccttcggaagaaatgaatataccctaccgacggtggaatcaagaggcggtttctatttctctattgcgggcggtcaccaaaattgaagaccaagagagcgcgagagagaaaaaccttccctttatgtcaatggccccaagcccgggtttttaccaaaattagccaccacccccgatattagaaaagtgaggttatttcccgtcctaattgtaaaaagagggtttgtaattatacc

SEQ ID NO: 13736 - DNA, 169 bp, Glycine max
  unsure at all n locations
  Clone ID: LIB3094-066-Q1-K1-C4
ccaaggcgtccgcngacccctgggccaaacaatcgttagtcgtctggtctgtcccgcgggagcggaggagctgtgtttatcggcaaacaacctcaaaaacattcatcaacggtcactattaatccatccatcattaagtaagaaaataagggtcgagttttttatcttt

SEQ ID NO: 13737 - DNA, 322 bp, Glycine max
  unsure at all n locations
  Clone ID: LIB3094-065-Q1-K1-F7
cccacgtgtccgcccacgcgtccgcccacgtgtccgcccacgcttccggggacgcgtggggttctataggctggcacctctgtgtccttgagttctaaggagacaggaacctacgtctggtggatgaatcatgaccgtgtgatcagagcgtgattaacggcccgggtgagtttctctttggagtagtctcatctttggctgtagaggatcgttcttaggacactttcatgtgcctgggaatggtcatacggttgtctgacagaccaaaaaagaaaaaaagaccaaaaagtnttttaaaaggaagaaaaaaaaannnnnnnna

SEQ ID NO: 13738 - DNA, 106 bp, Glycine max
  unsure at all n locations
  Clone ID: LIB3094-066-Q1-K1-C6
agaaagcgtaattttaagcactgtccaagaaatttaatgactgtcattctttatgcctgaaggggtcgttcagtcatcatcgncaaacaacctcaaaaacatacat

SEQ ID NO: 13739 - DNA, 53 bp, Glycine max
  Clone ID: LIB3094-066-Q1-K1-C7
accaaacgtacttttcagcactggccatgaaatttaaggattgtaattcttta

SEQ ID NO: 13740 - DNA, 115 bp, Glycine max
  Clone ID: LIB3094-066-Q1-K1-C9
gaccacgcgtacggaaaattaatcctaacaatgaccatgaaatttaaggatcgaaactctttaagccgcaggggttattaaaaaaagggaccgaccaaaaacacaaacgagacag

SEQ ID NO: 13741 - DNA, 119 bp, Glycine max; identical to SEQ ID NO: 12932
  Clone ID: LIB3094-065-Q1-K1-A5

SEQ ID NO: 13742 - DNA, 378 bp, Glycine max
  unsure at all n locations
  Clone ID: LIB3094-065-Q1-K1-A6
cccacgcgtccgcacgttccgagttttctgatcgctcatagagagttcgacgcggcggttgcagaagaagattgcaagatgaagttcaacatcgcgagtcccaccactggatgccagaagaagctcgagatcgacgacgatcagaaactacgagcattttgggacaagaggatctcacaggaggtcagcggagatgcacttggtgaggaatttaagggctatgtcttcaaaattactggaggttgtgacaaacaaggattcccgatgaaacagggagtgcttactcctggtcgtgttcgacttttgcttcacaggggaactccttgcttccgtggatatggaaggcgtaatggagaacgtangagaaagtctggtcgt

SEQ ID NO: 13743 - DNA, 229 bp, Glycine max
  Clone ID: LIB3094-065-Q1-K1-A8
cccacgcgtccggcgaaaacccccaactccaacctctgttcatcgtctaccgcgctttctggttaaccagaactatgattaagctttttaaaggaaagggaaagcagagagaacttgcagaaaaagcaaggggcggaccacctggtaagaaacaaagtgctggagaggtgcgtcttcacaaagatataagtgagctgaatctaccaaaatcatgtaccatgccattccc

SEQ ID NO: 13744 - DNA, 470 bp, Glycine max
  Clone ID: LIB3094-065-Q1-K1-B10
gaccacgcgtccgttgaatacattccttgagtttatactgaaagatgggtttgaagatggcgttactgatcgtaggcctggccctcatgctccttttggtctcctctgaggtggcatccacgaatacaaaagaggaggcaaatggagtggatgatgccaaatatcccggtggaagctatggagggggttacccaggtcatggcggtggcggttatcctggccatggcggtggcggttatcctggccatggcggtggtggtggctatcctggtcatggtggtggccaccctggtcatggtggcggctaccctggcccgggtggtggatactgtaggcatggctgttgcggtggccggacatacaacggaagttgcagaaagtgctgctataacgctggcgaagcttgtgcttcacaaactcaatatagactcacgaataagacgatgcagttctacttaattaggaccttt

SEQ ID NO: 13745 - DNA, 281 bp, Glycine max
  Clone ID: LIB3094-065-Q1-K1-B12
gttgccgggctctaccgtggtttcaacatctcatgtgttggaatcatcgtgtatcgtggtgtgtactttggattgtatgattctgttaaaccagttgtcctcacagggtcattgcaggatagcttttttgccagctttgcccttggatggctcatcaccaatggtgcaggtcttgcatcatacccaatagacactgttagaagaagaatgatgatgacctctggtgaagctgtcaagtacaagagctccttggatgcattcacacagatcctcaagaatga

SEQ ID NO: 13746 - DNA, 294 bp, Glycine max
  unsure at all n locations
  Clone ID: LIB3094-065-Q1-K1-B3
cacgcttccgttcaaaaacccgggaaactgaccccaatttgaagtccagaaaacacaggagtgccgcgagttacagcattaataatattaataccaccagcgacaggggtggcagtaacagtaatagtaattgtaacatggaacatcatcatcacagccaccatgtgaatagtgggttcttgccctgaaaatagnagttattggatttatttattatagcttttttcttttcttttttttaactttgtacctttttatctcttcaagttgatcaaggagatcggaaattgggca

SEQ ID NO: 13747 - DNA, 431 bp, Glycine max
  Clone ID: LIB3094-065-Q1-K1-B5
aaaaaataacagaaaaaaaagaaaaagataattctgatttacttgttcctgagaacattttgtccgctagacgtcgtagagaattgagaattctaatttgtttaaatccaaataatataaatagtatgcatagaaacacaatattttataatccaaataaagtccaaaatggttttccacttttgactaaaaaaagaaaatattttgagaaagataaaaaaaaactaatgaatttcaaaatttttctttggccaaaatatcgattagaagatttagcttggataaatcgatattggtttaatacccataatggaagcgcgttcagtatagtaaggatacatatgtatccgcgaatgaaaattcgttatccaaattgcttctattaccatattatatggaaatagagacaaatatatcattctatctttgat

SEQ ID NO: 13748 - DNA, 359 bp, Glycine max
  Clone ID: LIB3094-065-Q1-K1-B8
gctatttctgagcttgacaccttgaatgaggagtcatacaaagatagcaccttaatcatgcaacttctcagggacaacctaactttgtggacttctgacatcccagaagatggagaagatgcccagaaagtgaatggcactgccaagcttggtggaggtgaggatgcagagtgagtccgatggatgatggaatcttccataggattcgatgcatgcgtttgggaatgaaacatgagggccgattacttatctgtgtattagctagagatagggattctattggttcctctttgtttcctgttggattgcccaatacttcccgataggggaaagagatactccatttgtgctatatttat

SEQ ID NO: 13749 - DNA, 336 bp, Glycine max
  unsure at all n locations
  Clone ID: LIB3094-065-Q1-K1-C7
tcctcttaccaaccttttctttcttttcattnanncnnnntntncgggtacatggaaacttatcataaaccctgatccccntcnncacancctcnnataacaagattattgtctgcttcgtcgtcgtcgttcaccataacaatccgctgtacatacaaatcttcactgatgccgatgattctctcaagctccaccacatcttccattgctctctcgatgtggtcgactagcgagttaacaatcctaaaaagtcttggcctattcttaatgagacctttttttgactgctttatcctatttaaaactacaaagtatttggatatcttactaatacta

SEQ ID NO: 13750 - DNA, 323 bp, Glycine max
  Clone ID: LIB3094-065-Q1-K1-D6
gaagttgcgagagtgaagaaatggcgcaagacttggcattggatttggaggagcttcgccggctccacagcgatcgccaaaagacctcgaaccctctctcttctctcctccgaaattcgtaacctcgaaaagttatcgtcagaggaagcttctgcgcagattccggcgccgatttcgaccggaactaaagtggcgccttcacctgcgctgaagtatgcggcactcgcgtcgttcagttgggaccaggatagtgacaaagttaagatatatgtgttaatggagggaatcgatgagaataaggttgaatccgagtttaagtcgat

SEQ ID NO: 13751 - DNA, 291 bp, Glycine max
  Clone ID: LIB3094-065-Q1-K1-D7
gcttcctcctcttacgagcctttcctttcagtccattgattcggtgggtgcgggtgcagcgaaaccgagctagaccctgatcggcgtcggcacaccgccggagaacaagatgattgtctgcgtcgccgtcgtcggtcaccagaacaatccgctgtacatacagagcttcacggaggccgatgatgctctcaagctccaccacatcgtccattgctcgctcgatgtggtcgacgagcgagtgaacaatcctaaaaagtctgggccgatgcttaatgagacgtttttgggact

SEQ ID NO: 13752 - DNA, 570 bp, Glycine max
  unsure at all n locations
  Clone ID: LIB3094-065-Q1-K1-E1
ggcccaaaaaannttaaattaggaaaaaaaaaaaaaaaaattataaaattattaaanaaaaaaaaaataatgagaaattgtaaaaatataaaaaacataaaaaaatcataaaataaaattaaaataataaaaaatataaaaaataaaataataaaaaaaaatattatataataataaataataaaataaaaaataatataaaaataaaataaaataataaaataataaaataaaataaaaaaaatatattaaaaatataaattaataaaaatttatatataaaaaaacaattaaataaataaaaaactaaataaaaaaatattaaaaattattatataaaaaataaaataaaataaaataataatattctaaataataaaatattataataaaaataataaaataataaataataattaaaaataataaacatatataaattaataaacataaattataaaataaaaaattaataaaaaaataaaatatattataattaatacaaaaataaataaattattaaataataaaaaataaaaaattaatatataaataaataaatatattaat

SEQ ID NO: 13753 - DNA, 407 bp, Glycine max
  Clone ID: LIB3094-065-Q1-K1-E7
cttctccttctcaatcttgtaattctatttcctccaccataatgctgcgcaagcttgtgtgagggccacgcaagaacaagcctggcacagttcccgttcacctcaacgtctatgatctcaccccaatcaacggctatgcctattggcttggccttggagtctaccattctggggttcaagttcatggattggaatatggttttggtgcgcacgagcacgacacaacggggattttcgaagtccaacccaaacactgccctgggttcactttcagaaagtcaattttcatcggaacaacagatctgggtccgaaggatgttcgagcattcatggagaagctggctcaggattactccggcaacacctatcatctcatttccaagaattgcaaccatttctgtaacgat

SEQ ID NO: 13754 - DNA, 404 bp, Glycine max
  Clone ID: LIB3094-065-Q1-K1-E9
acgcccacgcgtccgcccacgcgtccgcccacgcgtccgcccacgcgtccgcggacgcgtggggtttcggtgaataagtgtcgtttaaagatgcagagtctgcaacagaaggcttccgaatggagcggtgtttccatagacgacgctttcggcatcgacgacaccaatctcttccagaaactcggcctccaaaccttcattaacctctccaccaatttctacaacagggtttacgatgacgaggaagaatggtttcgttcaatattcgcgaattctgagaaggagaatgccattcaaaaccaatacgagttcttcgtgcagcgaatgggtggtcctcctctcttttctcagagaagaggacatcctgctctaattgctcgacatcgaccattttctgtcacgca

SEQ ID NO: 13755 - DNA, 323 bp, Glycine max
  unsure at all n locations
  Clone ID: LIB3094-065-Q1-K1-F1
ttctgttgcgtttgcttttcctccacccatccacaaacgaacacacactttgattgaaaagggggcgtgtgggcacaaagacagtgaagaagtcctcgcggcaagtgatcgagaggtactactctcgcatgacgctggacttccacacgaacaagaaggttctggaagaggtggccatcattccctccaagaggctccgcaacaagatcgcgggattctccacccacctcatgaagcggatccagaagggtcccgtacgtggaatctccctcaagctgcangaagaggagcgcgagcgccncatggacttcgtccccgatgtc

SEQ ID NO: 13756 - DNA, 296 bp, Glycine max
  Clone ID: LIB3094-065-Q1-K1-F10
ctcttcttctcttgcggctagggctttagcgcagctccttctagatttaaggaagatggggaaggaaaaggttcacatcaatattgtggacattgtccatgtcaactctggaaaatccactaccactgatcacctgatttacaagctcggacgcattcacaagcgtgttattgagaggtcagagaacgaagctgctgacatgaacaagaggtctttcaagtatgcctgggtgctggacaaacttaaggctgagcgtgaaagaggaatcaccattgatattgctttgtggaaatttg

SEQ ID NO: 13757 - DNA, 291 bp, Glycine max
  unsure at all n locations
  Clone ID: LIB3094-065-Q1-K1-F12
cacgctccggaacaccaaaatcaatggctncntctctttcccctgcttcctccaacgttgaccggacccttctcgacgtcgacgactaccttctggaaaatgggtcataaggtttgtcaagggacacacttcattatgtgtactagcttgtgaagaatgggaatgtgtcatttctagagaacagaatgtaagaggcaatcaacttttactcaagagccaataacattaaatcatgtgatcccatcattctcagcaatctaagtgcagcttatattaagattagccaatttt

SEQ ID NO: 13758 - DNA, 384 bp, Glycine max
  Clone ID: LIB3094-065-Q1-K1-F6
ggaaaacgaccaaaacttcaactacaactcgcagcctcaggcttcgtacaaagttgcagtgcttggtgctgctggagggataggtcagccactcgcgcttctcatcaagatgtcgcctctagtttccgacctgcatctctatgatattgcgaatgtcaagggagttgctgctgatatcagtcactgcaacaccccctcacaagtcagggatttcactggagcttctgagttggcgaattgtttgaaggatgtgaatgttgttgtcatacccgccggtgttccaaggaagcctggcatgactcgtgatgaccttttcaacatcaatgccggcatagtcagggacttgggtttctgctgtgcggataaatagccctgatgctttta

SEQ ID NO: 13759 - DNA, 300 bp, Glycine max
  Clone ID: LIB3094-065-Q1-K1-A12
cccacgcgtccggactgcccaagatgtatcgacaatgttacggtgcgggcaaaaaaccatgatctttgggatcaacaatggtggatacaccatcgaggttgaaattcatgatgggccgtacaatgtgattaagaactggaattacactgggttgattgatgcaatccacaatggtgaagggaaatgctggactgccaaggtgttctgtgaagaggagctagttgaagcaattgccacagccacaggacccaagaaagactccttatgcttcattgaggtgattgttcataaggatgacac

SEQ ID NO: 13760 - DNA, 273 bp, Glycine max
  Clone ID: LIB3094-064-Q1-K1-F3
gttgccgggctctaccgaggtttcaacatcttatgtgttggaatcatcatgtatcgtggtctgtgcttgggaatgtatgattctgttaaaccagttgtcctcacagggtcattgcatgatagcttttttgccagctttgcccttggatggctcatcaccaatggtgcatgtctagcatcatacccaatagacactgttagaagaagaatgatgatgacctctggtgaagctttcaagtacaagagctccttttatgcattcacacagatcctc

SEQ ID NO: 13761 - DNA, 295 bp, Glycine max
  Clone ID: LIB3094-064-Q1-K1-F4
cccacgcgtccgtcaagcattgcatccctcttgatttgtagtttgttttgtgctttagatagagagttctgccaaatcaagaggggttttaagatcatagtgtgtgttttgcaacaatggctaagttctttgctgctatgatcttggcactctttgccatttccatacttcaaacagtggtaatggctgctaatgaacaaggaggccacttgtatgacaacaagagcaaatatggaagtggaagtgtcaagagttaccaatgcccatcacaatgctcgaggagatgtagccagac

SEQ ID NO: 13762 - DNA, 291 bp, Glycine max
  Clone ID: LIB3094-064-Q1-K1-F6
tcggccacgcgttcgtcaagcattgcatccctctttattcttattttgttttgtgctttatatcagggatcggccatatcaacaggtgttttaagatcatagatgcgtgttttgcaacaatggctaaagtctttgctagctattatcttgacactctttgccatttccatacttcaaacattggtaatggctgctaatgaacaaggatgccacttgtatgacaacaacagcaaatattgaagtggaagtgtcaagatttaccaatgcccatcacaatgctcgaggagatgt

SEQ ID NO: 13763 - DNA, 199 bp, Glycine max
  Clone ID: LIB3094-064-Q1-K1-F8
ttaagatcatagtgtatgttttgcaacaatggctaaatgctttgctgctattatcttgacactctttgccatttccatacttcaaacagtggtaaaggctgctaattaacaaggatgccacttgtatgacatcaagagcaaatatggaattggaagtgtcaagatttaccaatgcccatcacaatgctcgaggagatgt

SEQ ID NO: 13764 - DNA, 201 bp, Glycine max
  Clone ID: LIB3094-064-Q1-K1-F9
cgtccgtttaagtacattccttgttttttatactcaatgacatctatgaacattgcattactgatccggtacgtttccttcatactccttttgggctcctcttaatttacatccaccaatacaaaacaacactcaaatttaatctattataccaaatatcccttttcaatctattcatctttttacccatatcatctctta

SEQ ID NO: 13765 - DNA, 315 bp, Glycine max
  Clone ID: LIB3094-064-Q1-K1-G1
cccacgcgtccgcccacgcgtccggccctctctttctctctctagaattctcagatttgcggggcgagatgatgcagcagccaggacccggcatggcacctgccaccatgggccagcagccgccgcaacagtaccagcagcctccgccgcagcagcagcaaccctacgtcatgatgccgccgcaggcccaggccccgcaggccatgtgggccccctccggccagcctccgcctcagcagcagcccgccagcgccgacgaggtccgaaccctctggatctgggatctgcagtactggatggacgagaactatctct

SEQ ID NO: 13766 - DNA, 440 bp, Glycine max
  Clone ID: LIB3094-064-Q1-K1-G10
cggacgcgtggggtttcctagtatgcaaggtaaagaatcagcaaatttcaaccccggatccacgagtaacatgttgacaaaagtctaccgagttgcattttgttcttgtaacctcctcaacccactggaggtcgtgatctgtaaattttgagtgaattatacaacaaattcttgaaaaagaaatgattttctcttctgagctgctgcttattgatcgatgaatccagctgcaattattttcgaagatggcaataaaatctcttctgcggtgttatctctttgactgaattccaaattttgtaagtataatagttggctatgaaagagactgtaccaagaagcatagtgtgagagtcagagatcaattgttaagtatgagatgtgagaacattttgtgaatgtatattgctaaatagaagtgcaaaagatgattatagatt

SEQ ID NO: 13767 - DNA, 207 bp, Glycine max
  Clone ID: LIB3094-064-Q1-K1-G11
cccacgcgtccggcgaaaacccccaactccattctctgttcatcgtctaccgcgctttctttgcaaccagaactatgattaagctttttaaagtaaaggaaaagcagagagaacttgcagaaaatgcaagtggcggaccacctgttaagaagcaaagtgctggagagttgcgtcttcacaaagatttaagtgagctgaatctaccaa

SEQ ID NO: 13768 - DNA, 345 bp, Glycine max
  unsure at all n locations
  Clone ID: LIB3094-064-Q1-K1-G12
cccacgcgtccggcgaaaacccccaactccaacctctgttcatcgtctaccgcgctttctttgcaacgagaactatgattaagctttttaaagtaaagganaagcagagagaacttgcagaaaatgcaagtgcggaccacctgttaagaagcaaagtgctggagagttgcgtcttcacaaagatataagtgagctgaatctaccaaaatcatgtaccatgcaattccccaatggcaaagatgatctgatgaacttttgaagttcaattcgacctgatgatggatattacttanggtgcacatttttggtttcctttcaagtgtctccatctatccacacgaagca

SEQ ID NO: 13769 - DNA, 394 bp, Glycine max
  unsure at all n locations
  Clone ID: LIB3094-064-Q1-K1-G2
cccacgcgtccgcccacgcgtccggaagaaaggaatataccttacggatggtggaatcaagaagcatttgggattgcatagtgcgggtggtgacgaagatggaagacatagagagtgagagagagaaaaatcttcgctttatgtcaatggcacgaagcaggggtttttacagaagtgagcaacgacgccagatatgagaaaagtgagtttatttggggtcatatttgtaaaaagtggttttgtaattataccctctaattcaagagtgaagaaacaagggtgggatggaaatataaatagtacaatntggtcctagtggtggcttaccctttggccttttttttcaattcaaaaatttttttggatatattaaaagggggtgatttggttactt

SEQ ID NO: 13770 - DNA, 276 bp, Glycine max
  Clone ID: LIB3094-064-Q1-K1-G3
cccacgcgtccgcccacgcgtccgcccacgcgtccgcggacgcgtggggttctataggctcgtgcctctgtgtccttgagttctaaggagacaggaacctacgtctggtggatgaatcatgaccgtgtgatcagagcgtgattaacggcccgggtgagtttctctttggagtagtctcatctttggctgtagaggatcgttcttaggacacttccatgtgcctgggaatggtcatacggttgtctgacagatcataaaagaaaaaaagacaaacaa

SEQ ID NO: 13771 - DNA, 141 bp, Glycine max
  Clone ID: LIB3094-064-Q1-K1-G4
gccacgcatgcgttccacgcttcaaggttggttataatgtgaggtccaagtacatatgatagggactcggactacaatgattctaatatactatcatcaccattcatatgaatctttgcataaaatcttagctaggtcgat

SEQ ID NO: 13772 - DNA, 119 bp, Glycine max; identical to SEQ ID NO: 12490
  Clone ID: LIB3094-064-Q1-K1-G5

SEQ ID NO: 13773 - DNA, 296 bp, Glycine max
  Clone ID: LIB3094-064-Q1-K1-G8
ctctaattacatttctaatctcattctccttctgttcaaacactctctctcatggcatcagataagaagattaggatcggcatcaacggatttggaaggattggccgtttggtggccagggttgcccttcaaaggaatgatgttgaacttgttgctgtcaacgatcctttcatcaccactgattacatgacatacatgttcaagtacgacaccgttcatggccagtggaagcattttgatgtgaaagtgaaaggactttaaaaccttctttttggtgagaaacccgtcaaccgttt

SEQ ID NO: 13774 - DNA, 192 bp, Glycine max
  Clone ID: LIB3094-064-Q1-K1-H1
cccacgcgtccgtccacgcgttcggccctgtttttctgtccatagacttctcagagttgctacgcgtgatgatgcagcactcatgacccggcatggaacctgccaccatggtccaagagccatcggagcaggaccagcagactcctacgtatcagcgacgaccctacgtcatgatgctcgcagaagcccagg

SEQ ID NO: 13775 - DNA, 438 bp, Glycine max
  Clone ID: LIB3094-064-Q1-K1-H10
ctatcgacccaggcgtccgtccacgcgtccggcgaaaacccccaactccatccttttttcatcgtctaccgcgctttctgggaaggttaactatgattaagctttggaaagtaaatgaaaagcatagagaacttgcagaaaatgcaagtggcggaccacctgttaagaagcaaagtgctggacagttgcgtcttcacaaagatataagtgagctgaatctaccaaaatcatgtaccatgcatttccccaatggcaaagatgatctgatgaactttgaattttcaattctacctgatgatggatattacttaggtggcacatttttgttttcctttcaagtgtctcccatctttccacacgaatcaccaaaggttaaattgtaagacaaaaggtctatcatccaaatattgacttggaaggaaattgtttgcttaacat

SEQ ID NO: 13776 - DNA, 155 bp, Glycine max
  Clone ID: LIB3094-064-Q1-K1-H11
ggcaaagatggggatgtggcactcttctttgtactctcaggtaccggaaagaccactctttggacggatcacattaggtttctaatcggaaatgatgaacactgttggggtgacaatggggtttccaacattgaaggtggttgctatgccaaatg

SEQ ID NO: 13777 - DNA, 387 bp, Glycine max
  Clone ID: LIB3094-064-Q1-K1-H12
ggcaaagatggggatgtggcactcttctttgttctctcaggtaccggaaagaccactctttggaccgatcacaataggtatctaatcggagatgatgaacactgttggggtgacaatggtgtctccaacattgaaagtggttgctatgccaaatgcattgacctctcacgggagaaagagccagatatttggaatgcaatcaagtttggcacaatgttggaaaacgtggtgtttgatgagcacgaccgagaagttgattactctgacaaatcagttacagaaaatactcgtgctgcttatcctatagagtacattccaaatgcaaagttaccttgcgttggcccttatccaaagaatgtcatacttttggcatgtgacgcatttggg

SEQ ID NO: 13778 - DNA, 265 bp, Glycine max
  Clone ID: LIB3094-064-Q1-K1-F2
tgagcgcatgggatagactggaggacaaggtttaagcttagcagaagacgaccggtattaccgggacttggttgaagcagcaccgtaccgtgtacaatggagccactatacactctgttatcataagcatgcccgaaggcaccatctacactggtatcttacaaacatggctcgcacaggattacatgttcgctcgtgcgcttgtgccaattgagtctagaatgctgatgcaaacatggaaggaatcagcttgcagaggtgacat

SEQ ID NO: 13779 - DNA, 309 bp, Glycine max
  Clone ID: LIB3094-064-Q1-K1-H2
tgtaagttacatgatgtgaagttgcaaatgctttggagatcaccaacttcaaaatgcagctactgctacttgtgtggcacttgttcttcgcaatttaggatggagtatttctgataaatctattaggtatggtttagaggatacataccttcttggaaggagtcaatttctaacatctgaagaagctgaggtattaggacttactggatcaacagtactgcttgatggagcccacaccaaagaatctgccaaagctctgatgaataccataaggatggcatttcccaaggctcaattggtttttgttgt

SEQ ID NO: 13780 - DNA, 346 bp, Glycine max
  Clone ID: LIB3094-064-Q1-K1-H3
tgtacgctacatgacgcgcagttgcaaatgctttggagatcaccaacttcaaaatgcagctacggctacttgtgtggcacttgttcttcgcaatttacgatggagtatttctgataaatctattaggtatggtttacaggatacataccttcttggaaggagtcaatttctaacatctgaagaagctgaggtattaggacttactggatcaacagtactgcttgatggagcccacaccaaagaatctgccaaagctctgatgaataccataaggatggcatttcccaaggctcaattggttttggtgttgcaatggccagtgacaaagatcatgtgggattttgct

SEQ ID NO: 13781 - DNA, 119 bp, Glycine max
  unsure at all n locations
  Clone ID: LIB3094-064-Q1-K1-H5
gtaatgtaagagttccaagcttcaatgtaggttataatgntatgtccaagtagatatgagatggagttgtaatacaatgattctaatatcctatctccaccattcatattaatatttgc

SEQ ID NO: 13782 - DNA, 238 bp, Glycine max
  Clone ID: LIB3094-064-Q1-K1-H7
attgctgctgtttgcctattggtgtactttggggtctctaccctgctggatgcctcatctagcgatggccaaaaatcagatgaagagcagaaggaggcagaactagcagtttctgaattttctggaaatggtgctgggatactatctgctgctagcacagttgccagtacttttctcttagtttttgttgctgaatggggcgacaagtcatttttctccacaattgcccttgcagcag

SEQ ID NO: 13783 - DNA, 273 bp, Glycine max
  unsure at all n locations
  Clone ID: LIB3094-064-Q1-K1-H9
cgtccgggcaagagatggggatgtggcactcttctttgtactctcaggtaccggaaagaccactctttggagggatcacaatangtatgtgatcggagatgatgaacactgttggggtgacaatggtgtctccaacattgaaggtggttgctatgccaaatgcattgacctctcacgggagaaagagccatatatttggaatgcaatcaggtttggcacagtggttggaaaacgtggtgtttatgagcacgaccgagaagttgattactctga

SEQ ID NO: 13784 - DNA, 349 bp, Glycine max
  Clone ID: LIB3094-064-Q1-K1-C9
gtcagtaaccatcgtcgtgagcgaagatccataataatacagttacaaattgcaataacacgctcattgtggttatcgaaatttgatcgcagcgtcgagaagaatgggaagtttgggagcgattctgaaacatccagatgacttttaccctctgctgaagctgaaaatggcggcgaggaacgccgagaagcagatcccgccggagccgcactgggcgttctgctacacaatgctccacaaggtttctcgaagtttcgccctcgtcattcagcaactcggcatcgagcttcgcaacgcccgttgcatattttatttggttctgcgagctctcgacaccgttgaggatgat

SEQ ID NO: 13785 - DNA, 233 bp, Glycine max
  Clone ID: LIB3094-064-Q1-K1-D1
cggacgcgtggggtgtcctagaatgcaaggtgtagactcatcaaacttcaactccgggatccaggagtgagatgctgacaaaagtactaccgacttgcatgccgttcttgtaaccttcataacccactggaagtcgcgatcatgaaattgcaacggaatgatacaacacagacttgaacaagatatgatattctcttatgcgctggtgctatattgatcgacgaatccagctg

SEQ ID NO: 13786 - DNA, 116 bp, Glycine max
  Clone ID: LIB3094-064-Q1-K1-D12
ctgacgcgttatctgagaaacccttcactcgtgagttcaaactctcctcttacccaaatgtgctgcatgtcaataaactggtaagcatgcctcgatcctacaccttgaaccattcg

SEQ ID NO: 13787 - DNA, 375 bp, Glycine max
  Clone ID: LIB3094-064-Q1-K1-D2
cccacgcgtccgcccacgcgtccgcccacgcgtccgcccacgcgtccgtctccctctttctcggcactagctctgtgcattcttctctcgctctctgccttccatcacactcggcatttcctttcccaagatagtagaagatggcagacactgaggatattcaacctcttgtttgtgacaatggaacaggaatggttaaggctggatttgctggagatgatgccccacgtgctgtgtttcccagcattgtaagtcgtcctcgtcacactggtgtgatggttggcatggcccaaaagatgcatatggtgggggtgagggccaatcttagaaggggattttgacttttaaggaccccaatggacctgggaatgggag

SEQ ID NO: 13788 - DNA, 287 bp, Glycine max
  Clone ID: LIB3094-064-Q1-K1-D4
cccacgcgtccggcttcctctgccgcttcctcccccgcggcctccccaagcacctctactccggcgtcgtcggcgtcgccctctcctacctctccttcggcttctcctccaacctccacttcctcgtccccatgttccttggctacgcctccatgctcctctatcgtcctcgatgcggcatcctcaccttcttcctcggatttggctacctcattggctgccacgtgtattacatgagcggtgatgcatggaatgaaggtggcatcgatgccactggggctttaaat

SEQ ID NO: 13789 - DNA, 234 bp, Glycine max
  Clone ID: LIB3094-064-Q1-K1-D5
cccacgcgtcctgcttcctctgccgcttccttccccgcggcctccccaagcacctgtactcctgcggcgtcagcgtctccctctcctacctctccttcggcttctcctccaacctccacttcctcgttcccatgttccttggctacgcctccatgctcctctatcgtcctcgatgcgtcatcctcaccttcttccttggatttggctacctcattggctgccacgtagattaca

SEQ ID NO: 13790 - DNA, 230 bp, Glycine max
  Clone ID: LIB3094-064-Q1-K1-D8
cccacgcgtccgcccacgcgtccgcccacgcgtccgcccacgcgtccgtctccctcggtctcggcactagctctgtgcattcttctctcgctctctgccttccatcacactcggcatttcctttcccaagatagtagaagatggcagacactgaggatattcaacctcttgtttgtgacaatggaacaggaatggttaaggctggatttgctggagatgatgccccacgt

SEQ ID NO: 13791 - DNA, 199 bp, Glycine max
  Clone ID: LIB3094-064-Q1-K1-D9
accgctacgcactgtccttgaaattcatgcaaggttgatatttacgaaaagacaaccactaataggataaggagctgttagcagaatagtgtctaccttcaattgtgcattctcaattatcatactttcttgatcttgtatttctatgcattaaaaattagctatgcaagaatatatgaacttcacttactcactcaac

SEQ ID NO: 13792 - DNA, 256 bp, Glycine max
  Clone ID: LIB3094-064-Q1-K1-E1
cggacgcgtggggtttcctagtatgcaaggtaaagaatcagcaaatttcaaccccggatccacgagtaacatgttgacaaaagtctaccgagttgcattttgttcttgtaacctcctcaacccactggaggtcgtgatctgtaaattttgagtgaattatacaacaaattcttgaaaaagaaatgattttctcttctgaactgctgctaattgatcgatgaatccagctgcaatttttttcgaagatggcattaaa

SEQ ID NO: 13793 - DNA, 266 bp, Glycine max
  Clone ID: LIB3094-064-Q1-K1-E10
attagatgctgcaagaattcacagcccggccttatatatcagacgattgttaattggggggcgggacgtgtatccggtactgaggtcaactgtatacaccctcgtccgttcatgcttcattagtggcttgctccatgattgggatcccagggcaccataggaagccttccaattccatattgctatcctcggctgacatttttgatcttgcgcattcctctaaagggcatcaatttattccagtaagagatagtcgaataattcct

SEQ ID NO: 13794 - DNA, 91 bp, Glycine max
  unsure at all n locations
  Clone ID: LIB3094-064-Q1-K1-E12
aagcctacgcggacgcgtgggctgagaaaccctccactcttgagtccaaactctcctnctacccaaaatggatgcaagggcatcatcttct

SEQ ID NO: 13795 - DNA, 383 bp, Glycine max
  Clone ID: LIB3094-064-Q1-K1-E2
tgagaagaagggagagaatggaggaaaaggcaaaagctgagcagaagaagataggtatgaccgagacttggttgaagaagcaccgtcttctttacaatggagccactagacaccctcttattattagcattcgcgatggcaccatcaacactgcttccttcaaaacatggctcgcacaggattacttgttcgttcgggcgtttgtcccatttgtggctagtgtgctgataaaagcgtggaaggaatcagattgcagtggtgacatggaagtcatattggggggcatggcttcttttggaggataaaattcaatggtcaagaccggaacccaccagtgggggatttcactttctggccgtggtccttaaccgggttaccaaaac

SEQ ID NO: 13796 - DNA, 280 bp, Glycine max
  Clone ID: LIB3094-064-Q1-K1-E3
gttgccgggctctaccgtggtttcaacatctcatgtgttggaatcatcgtgtatcgtggtctgtactttggattgtatgattctgttaaaccagttgtcctcacagggtcattgcaggatagcttttttgccagctttgcccttggatggctcatcaccaatggtgcaggtcttgcatcatacccaatagacactgttagaagaagaatgatgatgacctctggtgaagctgtcaagtacaagagctccttggatgcattcacacagatcctcaagaatg

SEQ ID NO: 13797 - DNA, 278 bp, Glycine max
  Clone ID: LIB3094-064-Q1-K1-E4
aacacgcgtccggcataactctgccgataactacaacgcggcctacccaagcacctatactcgtgggtcgtcgagcgtcgacctctactacctgggcttgggcttctactggaacctagcacttgctcgcgcgcatgctacttggctacgcctccatgctgctatatagacctaaatgcgggatcctcaccttacaactcggatacggctaaatcattggctgtcacgtgtataacatgagcggagatgcatggaatgaaggcggcatccatgccact

SEQ ID NO: 13798 - DNA, 225 bp, Glycine max
  Clone ID: LIB3094-064-Q1-K1-E5
cattttctggctaaccaaccctgacactccttcttctccgcttcctcttcgatcatcgcttcagaatgccgccgaagttcgacccctcccagatcgtcgacgtcttcgtacgcgtcaccggcggtgaggtcggcgcggcgagttccctcgccccgaagatcggtcccctcggtctctcccccaagaagatcggagaagatatcgccaaggaaaccggcaaggact

SEQ ID NO: 13799 - DNA, 55 bp, Glycine max
  Clone ID: LIB3094-064-Q1-K1-E6
cccacgcttcctaacaaaccttctcacaccttatcatccacttcctcttttacct

SEQ ID NO: 13800 - DNA, 425 bp, Glycine max
  Clone ID: LIB3094-064-Q1-K1-E7
aaacacccttgtcgaccacaccaaaattaaaaacataaaaaagcataaaagcacaaaaagacataaaaaagggaaaataaaacattttgaagtcatatttgcacacttgattaaaggctgtcgtcccttgtgacggatgcgtggggtgctaataccttccctgtgcgtaaaaacaactcccgaactattcacacttaaagttcgtagaccacaccttttcaattttcccgacgctttccctaaaataaaagtggtggccaactccggccattttctttcaatggaaaacccactgggaagtccggaatggccttccgttaaaaggttaggttgcaacagtactggccttccggccaaagggtaggtccctaattggaattacctattaccaaaatgtaacttaaggttaaattaacttacaaatt

SEQ ID NO: 13801 - DNA, 241 bp, Glycine max
  Clone ID: LIB3094-064-Q1-K1-E8
cccacgcgtccgcccacgcgtccgtccacgcttccgcccacgcgtccgtctccctcgttctcggactagctctgtgcattcttctctcgctctctgccttccatcacactcggcatttcctttcccaagatagtataagatggcagacactgacgatattcaacctcttgtttgcgacaatggaacaggaatggttaaagctggatttgctggaaatgatgccccacgtgctggggttccc

SEQ ID NO: 13802 - DNA, 334 bp, Glycine max
  Clone ID: LIB3094-064-Q1-K1-E9
gggtcgagccgcgcgtccgcccacgcgtgcgcccacgcgtccgcccacgcttccgtccacgcgtgcgtctccctctttctgtcacgttctctgtgcattctgctctcgctctctgccttccatcacactcggcatttcctttcccaagatagtagaagatggcagacactgaggatattcaacctcttgtttgtgacaatggaacaggaatggttaaggctggatttgctggagatgatgccccacgtgctgtgtttcccagcattgtatgtcgtcctcgtcacactggtgtgatggttggcatgggccaaaaagatgcatatgttggtgatga

SEQ ID NO: 13803 - DNA, 319 bp, Glycine max
  Clone ID: LIB3094-064-Q1-K1-F1
cggacgcgtggggtttcctagtatgcaaggtatagaatcagcaaatttcaaccccggatccaggagtaacatgttgacaaaagtctaccgagttgcattttgttcttgtaacctcctcaacccactggaggtcgtgatctgtaaattttgagggaattatacaacaaattcttgaaaaagaaatgattttctcttctgagctgctgcttattgatcgatgaatccagctgcaattattttcgaagatggcaatgaaatctcttctgcggtgttatctctttgactgaatttcaaaatttgtgagtataataagtggcta

SEQ ID NO: 13804 - DNA, 254 bp, Glycine max
  Clone ID: LIB3094-064-Q1-K1-F10
attgaatacattccttgtagttaatactgaaagatgggtttgaagatggcgttactgatcctaggcctttccttcatgctccttttggtctcctctgaggtggcatccacgaatacaaaagaggaggcaaatggagtggatgatgccaaatatcccggtggaagctatggagggggttacccaggtcatggcggtggcggttatcctggccatggcggtggccgttatcctggccatggcggtggtggtggcta

SEQ ID NO: 13805 - DNA, 239 bp, Glycine max
  Clone ID: LIB3094-064-Q1-K1-C7
ctcggttaacttatggaactattggtgggaggtttaagaaaggagaaaacccgtttgttgaggaggcgtatcagcgagtggcattggaccaactccttaagatagctggtattacagatgatgacttgttgattatgtcagatgttgacgagattccgagtgctcacactattaacctcttgaggtggtgtgacgacgtgccttcagtccttcatcttcagctgaagaactatctatac

SEQ ID NO: 13806 - DNA, 244 bp, Glycine max
  Clone ID: LIB3094-064-Q1-K1-F11
tttgagtacattccttgtagtttatactgatatatggttttgaagatggcgttactgatccgaggcgtttccctcatgctcctttaggtctcctctgaggtggcatccacgaatacaaaagatgaggcaaatggagtggatgatgccaaatatcccggtggaagctatggagggggttacccaggtcatggcggaggcggttatcctggccatgtcgcgtggcatgatatcctggccattgccg

SEQ ID NO: 13807 - DNA, 454 bp, Glycine max
  unsure at all n locations
  Clone ID: LIB3094-064-Q1-K1-F12
atccaagaggaagaagaggaagaagaagaaggggttgtggttcggaggaccagtgttcggaagagcggcttggtgaagaagcttggggatgattttgacagggttgccctggaaaacgatgagtccaatacggtgtcgtcgttgaagacgactcgtggtcggaaattggttaagaatggtgaacttgggaacaaaacggtggttgaagtagctgaaaaatcaaacaccaaaggaaagaagagtgcaagtgaagccgagaagagccctgnggttagaacttcttccagattggctaaacgtgtgtccaatcaaacgtcttgtaattagatgtttgataaaattgtggttttccttttccttttattattggccaattagccattctgtgtatgtttcaagatttanggtttgttcaacaattggtattttgcagtaagtcatacatgaatgaatg

SEQ ID NO: 13808 - DNA, 394 bp, Glycine max
  Clone ID: LIB3094-064-Q1-K1-A10
gtgctgtgctctgaggggccatagtttgggatcctttgaaccctaatctccacccaaaccggttttgccgggaaattgccttggaaaagaaagagcgaagaggaaaatgcagaatcacaggctgaagcagcagcagcagcagcaacaacaagctcttatgcagcaagctcttctccaacaacagtctctctaccaccctggcctacttgctcctcctcagattgaaccatatccaagtggaaatttgcctcctggttttgatccaagtacttgccgcagtgtgtatgttgggaacatccgtacacaggtaactgagccgtttttgcaagaagttttctcgggtactggcccagttgaaggttgtaagcttatcagaaaggataagtcatcctat

SEQ ID NO: 13809 - DNA, 362 bp, Glycine max
  Clone ID: LIB3094-064-Q1-K1-A11
cgcgggcggtcaggaaccatcttttttagctaagatccataataatacagctacaaattgcaataaccgggtagtgtggatatcgaaagggatcgcaacgtcgagaagaatgggacgtttgggagcgattctgaaacatccagatgacttttaccctgtgctgaagctgaaaatggcggccaggaacgccgagaagcacatcccgccggagccgcactgggcgatctggtacacaatgctccacaaggtttctcgaaggttcgccctcgtcattcagcaactcggcatcgagcttggcaacgccgtttgcatatttcatttggttctgcgagctatggacaccgttgaggatgatactagca

SEQ ID NO: 13810 - DNA, 269 bp, Glycine max
  unsure at all n locations
  Clone ID: LIB3094-064-Q1-K1-A12
gtgctgtgctctgaggggccatagtttgggactctttgaaccctaatctccacccaaacccagtttcccgggaaattgccttggaaaagaaagagcgaagaggaaaatgcagaatcacaggctgaagcagcagcagcagcagcaacaacaagctcttatgcagcaagctcttctccaacaacagtctctctaccaccctggcctccttgctcctcctcagattgaaccatatccaagtggaaatttgcctnctggttttgatccaagta

SEQ ID NO: 13811 - DNA, 320 bp, Glycine max
  Clone ID: LIB3094-064-Q1-K1-A4
cccacgcgtccgtcaagcattgcatccctcttgatttgtagtttgttttgtgctttagataagagttctgccaaatcaagaggggttttaagatcatagtgtgtgttttgcaacaatggctaagttctttgctgctatgatcttggcactctttgccatttccatacttcaaacagtggtaatggctgctaatgaacaaggaggccacttgtatgacaacaagagcaaatatggaagtggaagtgtcaagagttaccaatgcccatcacaatgctcgaggagatgtagccagaccccataccacaaggcctgcatggttt

SEQ ID NO: 13812 - DNA, 356 bp, Glycine max
  Clone ID: LIB3094-064-Q1-K1-A9
gcgtccggtcaggaaccatcgtcgtgagcgaagatcctttttaatacagttacaaattgcaataacacgctcattgtggttatcgaaatgggatcgcaaacgtcgagaagaatgggaagtttgggagcgattctgaaacatccagatgacttttaccctctgctgaagctgaaaatggcggcgaggaacgccgagaagcagatcccgccggagccgcactgggcgttctgctacacaatgctccacaaggtttctcgaagtttcgccctcgtcattcagcaactcggcatcgagcttcgcaacgccgtttgcatattttatttggttctgcgagctttcgacaccgttgaggatga

SEQ ID NO: 13813 - DNA, 448 bp, Glycine max
  Clone ID: LIB3094-064-Q1-K1-B1
cggacgcgtgggctgtttttgaatctcagttggtgccagctgtcacggagcttgtcgttgcagaattgatgtacttgcagtatatggatcctaaagagccaatctatatttacataaattccactgggactacgcgagatgatggtgaaacggtaggcatggagacagaaggttttgccatttatgatgcaatgatgcagttgaaaaatgagatacacacagtggcggttggatctgctataggtcaagcctgtttgctactttcagcagggtctccgggtaaacgctttatgatgccacatgctaaagccatgattcagcaggctcggattccttcctctgggttgatgcctgcaagtgatggtcttaatcgtgcaaaggaggtgattattaacagggacaatctggttaaactactggccaaacacacgggaaattcagaggaaac

SEQ ID NO: 13814 - DNA, 169 bp, Glycine max
  Clone ID: LIB3094-064-Q1-K1-B10
gtcagtaaccatcgtcgtgagcgaagatccattataatacagttacaaattgcaataacacgcgtcttgggggtatcggaatttggtccgaacggccaaaaaaattggaaagttgggaaccgatcctgaaccatccaaatgactttaacctttggctgaagctgaaaat

SEQ ID NO: 13815 - DNA, 277 bp, Glycine max
  Clone ID: LIB3094-064-Q1-K1-B11
acggtcagtaaccatcgtcgtgagcgaagatccattataatacagctacaaattgcaataacacagtcaggtgtggatatcgaaatatgatcgcatcgtcattaagaatgggatgtcagtgagcgattctgaaacattcagaagactatgaccgattgctgaatctgaaaatggctaccaggaacgccgagtaacacatcccgcacagaccagcatgggcagtctagtccacaacgctccacagggattctagtcatttctagcttaccaatctgct

SEQ ID NO: 13816 - DNA, 291 bp, Glycine max
  Clone ID: LIB3094-064-Q1-K1-B12
gtgctgtgctctgaggggccatagttagggatcctttgaaccctaatctccacccaaacccgttttcccgggaaattgccttggaaaggaaagagcgaagaggaaaatgcagaatcacaggctgaagcagcagcagcagcagcaacaacaagctcttatgcagcaagctcttctccaacaacagtctctctaccaccctggcctccttgctcctcctcagattgaaccatatccaagtggaaatttgccctctggttttgatccaagtacttgccgcagtgtgtatgttgg

SEQ ID NO: 13817 - DNA, 315 bp, Glycine max
  Clone ID: LIB3094-064-Q1-K1-B2
cggacgcgtgggctgtttttgaatctcagttggtgccatctgtcacggagcttgtcgttgcagaattgatgtacttgcagtatatggatcctaaagagccaatctatatttacataaattccactgggactacgcgagatgatggtgaaacggtaggcatggagacagaaggttttgccatttatgatgcaatgatgcagttgaaaaatgagatacacacagtggcggttggatctgctataggtcaagcctgtttgctactttcagcagggtctccgggtagacgctttatgaggccacatgctaaagccatga

SEQ ID NO: 13818 - DNA, 213 bp, Glycine max
  Clone ID: LIB3094-064-Q1-K1-B4
cccacgcgtccgtcaagcattgcatccatctttatatgtatttagtttagtgctttagataaaggttcttccaaatcaagaggggttttaagatcatagtgtgtgttttgcaacaatggctaatttctttgctgctatgatcttagcactctttgccatttccatacttcatacaatggtaatgtctgctaatgaacaagtaggccacttgta

SEQ ID NO: 13819 - DNA, 264 bp, Glycine max
  Clone ID: LIB3094-064-Q1-K1-B6
cccacgcgtccgctctattcttcaagcaaactcttcgtctcagatctctctttctctctctctagggtttccgtttctctctctgctatttatgatcactctctgacgcgcttctgtcaccaaatcaagtgcttccgtctcttccccttcttctctgattggaaggattcgtgtggtcggagatggtggtttcggggccaatcacgccggggcaagtgtctttcttgctgggggttattccaggttttggttcatggatatatt

SEQ ID NO: 13820 - DNA, 241 bp, Glycine max
  Clone ID: LIB3094-064-Q1-K1-B7
cccacgcgtccggtgatttcagtgagtgatcggtgttcacttgatctcatcataatcgtcagcgtcaattgaagaagatgccgatcagaaacatcgccgtcggaaggcctgaagaggcgactcaccccgacacgttgaaggcggctttggctgagttcatctcaaccttcatcttcgtgttcgccggctcaggctccggcatcgcctacaacaagcttaccgacaacggcgctgccacccc

SEQ ID NO: 13821 - DNA, 155 bp, Glycine max
  unsure at all n locations
  Clone ID: LIB3094-064-Q1-K1-B8
gcgcccacgcgtccggtgattgcagngattgatcttggttgactagatcttgtcataatgatgagcgttaattgaagaatgggcctgtcagaaacatcgtgcgcggaaggcctgaagaggcgactgaccccgacacgttggaggcggatttggct

SEQ ID NO: 13822 - DNA, 231 bp, Glycine max
  Clone ID: LIB3094-064-Q1-K1-B9
gtcagtaaccatcgtcgtgagcgaagatccattataatacagttacaaattgcaataacacactcattgtggttatcgaaatttgatcgcagcgtcgagaagaatgggaagtttgggagcgattctgaaacattcagatgacttttaccctctgctgaagctgaaaatggcggccaggaacgccgagaagcagatcccgccggagccgcactgggcgttctgctacacaat

SEQ ID NO: 13823 - DNA, 274 bp, Glycine max
  Clone ID: LIB3094-064-Q1-K1-C1
cggacgcgtgggctgtttttgaatctcagttggtgccagctgtcacggagcttgtcgttgcagaattgaggtacttgcagtatatggatcctaaagagccaatctatatttacataaattccactgggactacgcgagatgatggtgaaacggtaggcatggagacagaaggttttgccatttatgatgcaatgatgcagttgaaaaatgagatacacacagtggcggttggatctgctataggtcaagcctgtttgctactttcagcagggtc

SEQ ID NO: 13824 - DNA, 246 bp, Glycine max
  unsure at all n locations
  Clone ID: LIB3094-064-Q1-K1-C10
gtcagtgaccatcgtcgtgagcgaagatccataatattacagttacaaattgcaataacacggtcatggtggatatcgaaatttgatcgcatcgtccaaaaaaatgcgaagtttgggagcgattctgaaacatccagatgactattaccctctgctgaagctgaaaatggcggcgaggaacgccgagaagcagatcccgccggagccgcactgggcgttctgctacacaatgctncacaagggttc

SEQ ID NO: 13825 - DNA, 355 bp, Glycine max
  Clone ID: LIB3094-064-Q1-K1-C11
cgtccgaactgcccgcttcctctagttaggataatatttgcacaacgaaaacgagtattaatgtaatgaacgggtagttgaatagggtctacgttcaattgtgcatcctcaattatcattctttcttcttcttttcttttatgcttaaaaaataagctttgtttgaaggtacgaacttcacttcctcactcaaccgagtccattcacaggtcctttggcaatggcaactcacagactcgctttgatcattcaaaacccttctaacgacgacgagtttttgctcgtgaagcagtcgcgtccttccaaattccacgatggagaatacgactctttcggcgattctgatctctgggac

SEQ ID NO: 13826 - DNA, 389 bp, Glycine max
  Clone ID: LIB3094-064-Q1-K1-C12
aaaaaaggttcatagttgatatctccagcggttcgatgaagtttgaagatttggcagaaggatgcatggcaaaaatactgtcctacaccactcgtgcggatgtatgcaggctttctctggtttccaaagcctttcattccgcggctgaagccaacactgtgtgggattgctttctcccctctgatttgtcctctatcatctccccttcttcttccgttcctccctttcgctctattaaaggatctctatctctatctctccgatcgtcccaccatcatcgatcaagggataaagaggtttcaattggaaaaaccgaccgggaaccaggggtacatgcctttcggttgaaaactgagccttatatggggtgacacttctcattattggga

SEQ ID NO: 13827 - DNA, 292 bp, Glycine max
  Clone ID: LIB3094-064-Q1-K1-C2
cggacgcgtgggctgtttttgaatctcagttgtgtgccagctgtcacggagcttgtcgttgcaggattgatgtacttgcagtatatggatcctaaagagccaatctatatttacataaattccactgggactacgcgagatgatggtgaaacggtaggcatggagacagaaggttttgccatttatgatgcaatgatgcagttgaaaaatgagatacacacagtggcggttggatctgctataggtcaagcctgtttgctactttcagcagggtctccgggtaaacgcttta

SEQ ID NO: 13828 - DNA, 418 bp, Glycine max
  unsure at all n locations
  Clone ID: LIB3094-063-Q1-K1-H6
ctttcaaaccctccaaccttagtttcaattctaaacttgttcaccctttattctctcctcttccaaacatcaaccatggcttcaataataaccttggtgacatccaccttgctctttctttctttcactttgtcatgtgctattgacacctccaccatcaccaactacaccgacaatgaggtcatgaccatgtacgaggagtggttggtgaagcaccaaaaggtgtacaatgggttgagagagaaggacaagaggttccaagttttcaaagacaacttggggttcatacaagagcacaacaacaaccagaacaacacttacaaacttgggttgaaccagtttgctgacatgacaaatgangaataccgtgtcatgtattttggcaccaagagtgatgccaaacgcatgctcatgaaaa

SEQ ID NO: 13829 - DNA, 316 bp, Glycine max
  Clone ID: LIB3094-064-Q1-K1-C4
cagagtttgagtggacctgtctcagctaccctttaccttggttattcactactcatggccatggcaatcatgttgtcaaccggcaccattggcttccttatgtcattctactttgtgcactacttgttctcatcagtaaagatagattgaggttcttgttgtcattgcatattaactatgaaaaaggttgattgatataacttgatcacattgcatagtatggcaacggatgtttaattcattgtctgattttatattgcgatgggatctgcagtttgttctccttttgctgttttcctaagtagttgactcattc

SEQ ID NO: 13830 - DNA, 376 bp, Glycine max
  Clone ID: LIB3094-063-Q1-K1-F3
caaccctaacgcgtgcagagcagagagagactcagccatggggcgaagactctctaggtgttataggctaattaagaacaaaccataccccaagtcacggttttgccgtggtgttcctgatcccaagatcaggatttacgatgttggtatgaagaagaagggtgttgatgaatttcctttctgtgtccatctggttagtttggagaaggaaaacgtttatagtgaggccctggaagctgctcgtattgcttgcatcaagtacatggccaattttgctggaaaggatgctttcctctagagagtcatggtgcacccatttcatgtgcttaagatcatcatgatgctttcgtgtgccggagcttatatgctccaaact

SEQ ID NO: 13831 - DNA, 237 bp, Glycine max
  Clone ID: LIB3094-063-Q1-K1-F4
ggctacttttgattgcttgatgaaaacctatggattcctgacaccagaattctggaaggagactcgcttctccaaatctccattccaagagtacacagatctactggcaaaaccaacaggaaagactctaatcttggaggaggaaagggtggatgcttgatttgctagttatgctttatggatgttctaggaactgtattactttacatactatgttggttctgtgctttacttttg

SEQ ID NO: 13832 - DNA, 313 bp, Glycine max
  Clone ID: LIB3094-063-Q1-K1-F5
gaaccgactgactggactgatgaactatgtgatcattgcaataacaagtgtcactggctatgaaattgtctaactataagtagcgatctcatttcatatgattaggttagttactcaattggccacgagtgctaaagatatctgatagacagacagttatcaattatctatgtaacatgacagaatcatggcatgcacataaaccaggatttctgctgcaatgtagagcttacattatatattaatagctcatatccgtgaagcggttaccatttaaccactcaccactattcatctctatcttcggtctgga

SEQ ID NO: 13833 - DNA, 457 bp, Glycine max
  Clone ID: LIB3094-063-Q1-K1-F6
agtcgtccgcattctcctctctgaattcctcttattcaggaatttggagagtattgatatatcaaggtaggataaaccagtagccaaggaagatatggagttttctatgattttcattgttagcaacattatgctgcttttcagttcagcatttgccaaaactgctagtcctccctctctgagcccaactccagcaccagccccggcaccagacttcgtgaacctcactgagttactcagtgttgctggtccgtttcacacctttcttggataccttgagtccactaaagtgattgacactttccaaaaccaagccaacaacactgaagaaggaattaccatctttagttctaaggacagtgccttcaatgctataaagaaaactaccctatccaaccttacctcttaccagctaaagcaagtgatcctcttccatgccttgccacatttctattct

SEQ ID NO: 13834 - DNA, 239 bp, Glycine max
  Clone ID: LIB3094-063-Q1-K1-F7
acgggaattggtgctttcacaatgaagactgtcctattcctccttatggtatcagcgttaatccggatcgccgtcgcgcagcccaatgacttctccgacgcaaacctcaacgagttcaactcctccgtagccataatcataatcatattagtagtcgcgtttttcctcatggcctttttctccatctacgtgcgccactgcgctgattccccttccaacaccgtcaggcctttaacaac

SEQ ID NO: 13835 - DNA, 176 bp, Glycine max
  Clone ID: LIB3094-063-Q1-K1-F9
atcgctcctgctatactatcgatgttcatcgtgtactataccctgatgtatacttgtctaggaattgccaagaatcagattaaacgcagaaggattctaatctggcattatatgaattgtctggaaatggccctcggatactatctgctgctatcacatatgcctgctctaccatc

SEQ ID NO: 13836 - DNA, 408 bp, Glycine max
  Clone ID: LIB3094-063-Q1-K1-G1
ggaattgttgttttcacaatgaagacagtcctattcctccttctggtgtcagcgtgaatccgcatcgccgtcgcgcagcccaatgacttctccgacgcaaacctcaacgagttcaactcctccgtagccataatcataatcatattagtagtcgcgtttttcctcatggcctttttctccatctacgtgcgccactgcgctgattccccttccaacaccgtcaggcctctcaccaccgcacgctccaggagggccgcgcgtggccttgaccccgctctgattcaaacattccctatcctcgaatactccgttgttaagatccacaaaatcggaagagaagctttggaatgcgctgtgtgtttgtgcgagttcgaggacaccgaaacgctgcgtttggtccccaagtgc

SEQ ID NO: 13837 - DNA, 230 bp, Glycine max
  Clone ID: LIB3094-063-Q1-K1-G11
gcgctacgcgtccgtcactcgtccggtttctgtttgaggatccaacttcatagcagtgcatgaggcctccaaaaggggatcacttcatggagatgttcttgtgttggtcacaaataaaagtgattgtggaggtgcctagtatgcaagaaatattggtatccaattttactgtaccatttatcaaaggttgaatttaatccaatttaccttttttatactctaaggaaatt

SEQ ID NO: 13838 - DNA, 452 bp, Glycine max
  Clone ID: LIB3094-063-Q1-K1-G12
gaagttgcgagagtgaagaaatggcgcaagacttggcattggatttggaggagcttcgccggctccacagcatcgccaaaagacctcgaaccctctctcttctctcctccgaaattcgtaacctcgaaaagttatcgtcagaggaagcttctgcgcagattccggcgccgatttcgaccggaactaaagtggcgccttcacctgcgctgaagtatgcggcactcgcgtcgttcagttgggaccaggatagtgacaaagttaagatatatgtgttaatggagggaatcgatgagaataaggttgaatccgagtttaagtcgatgtcattcgatgttaagttccatgatgttcaagggaagaactaccgatgtgcaatatcaaaattgcacaatgagatagtaccagagaaatgcaaggttgtggtcaagcctaaaagggcaatcatcacattg

SEQ ID NO: 13839 - DNA, 232 bp, Glycine max
  Clone ID: LIB3094-063-Q1-K1-G4
gctacttttgattgcttgatgaaaacctattgattcctgacaccagaattctgttatgagatctcgctttccaaatctccattccaagagtacacagatttactggcgaaaccaacaggcaagactctaatcttggaggaggaaagggtggatgcttgattcgctagtaatgctttatggatgttgcatgaacttgtttactttacatacttggttggctctgtgctctact

SEQ ID NO: 13840 - DNA, 446 bp, Glycine max
  unsure at all n locations
  Clone ID: LIB3094-063-Q1-K1-G6
ctttcaaaccctccaaccttagtttcaattctaaacttgttcaccctttattctctcctcttccaaacatcaaccatggcttcaataataaccttggtgacatccaccttgctctttctttctttcactttgtcatgtgctattgacacctncaccatcaccaactacaccgacaatgaggtcatgaccatgtacgaggagtggttggtgaagcaccaaaaggtgtacaatgggttgagagagaaagacaagaggttccaagttttcaaagacaacttggggttcatacaagagcacaacaacaaccagaacaacacttacaaacttgggttgaaccagtttgctgacatgacaaatgaggaataccgtgtcatgtattttggcaccaagagtgaatccaaacgcangctcatgaaaaccaagagcaccggtcaccggttcgcgta

SEQ ID NO: 13841 - DNA, 428 bp, Glycine max
  Clone ID: LIB3094-063-Q1-K1-G8
caagaaccaacctaccttttgcaatctcaattcaatggcgtcctctctcattgcgaagcgcttcctctcctcttccctcctctccaggtccctccttcgccccgccgcttccgcttcccaccgctctttcaacaccaacgccatgcgccagtatgacaaccgcgccgacgaccacagcaccgacatcgatcgtcactccgaacgctctttccctagcactgcgcgccgcgacgatatcttctcagatgtgttggatccattttttccgactcggagtttgagccaagttctgaacatgatggaccaggtcatggacaatccgttcctctccgcgtcgcgcgggatcggagctggcgcttgagtgcgtcgcggatgggacgcgagggagacagaagatgctctgcatctgcgcgtggacatgcctgggc

SEQ ID NO: 13842 - DNA, 190 bp, Glycine max
  Clone ID: LIB3094-063-Q1-K1-G9
cacgagccaacctaccttttgcaatctcaatttaatggcgtcctctctcattgcggagcgcgtcctctcctcttccctcctctccaggtccctccttcgccccgccgcttccgcttcccaccgctctttcaacaccaacgctctgcgccagtatgacaaccttgcctacgaccacatcacctacatcgat

SEQ ID NO: 13843 - DNA, 246 bp, Glycine max
  Clone ID: LIB3094-063-Q1-K1-H10
ttttgattttctggatccgcgtttttgagattagtgtatgaatttaccgattggggttcaggtgaagttatcgatgaggcatgctctggtgtttgtgttaatcgtggcgatgtggaacttgcaaagggctgatggtatacgattagtgatagacatagacgagtgtttctcccatgatgtgaagtactaaggagacactgttcatgtctctttcattggtattaacgctgattttacctggcatta

SEQ ID NO: 13844 - DNA, 260 bp, Glycine max
  Clone ID: LIB3094-063-Q1-K1-H11
cctaaacaactctttctcttcttccttcgctcgttgttctccctcgcgtagatcgacaatggcggagacagagacgtttgctttccaggctgagatcaaccagcttctcagtctcatcatcaacaccttctactccaacaaggagattttccttcgtgaactcatcagcaacgccttcgatgctttggacaagattcgatttgagagtttgacagataagagcaagctcgatgctcagccagagttgttcattcatatta

SEQ ID NO: 13845 - DNA, 349 bp, Glycine max
  Clone ID: LIB3094-063-Q1-K1-H12
ttttgattttctggatccgtgtttttgagattagtgtatgaatttaccgattgtgtttcaggtgaggttatcgatgaggcatgctttggtgtttgtgttaatctgggcgttgtggaacttgcaaagggcagagggtatccgatttgtgatagacagagacgagtgtttctcccatgatgtgaagtacgagggtgacactgttcatgtctctctcgttgttattaaggctgagtctccctggcattactgcgaccaatgtgtcgatctcgtggtaaagggaccttttggcgagcatattcaagaatttctggacaagaccagtgagaagtttgactctttggctcacaaa

SEQ ID NO: 13846 - DNA, 239 bp, Glycine max
  Clone ID: LIB3094-063-Q1-K1-H2
cggacgcgtgggcggacgcgtgggctttgctagtacctgatgagtggttctaagattttggaggggtatatgcatagtcagaggattcatgcatgactcagactgtctaaagaaggggtatagttctttggaagctgtactgttatgtgttcctgttgattatcaatgtgtggatctgtctttgtacaaggatagtgaaatcgtcctgttactaaacaaagctactaatacatctgaaa

SEQ ID NO: 13847 - DNA, 340 bp, Glycine max
  Clone ID: LIB3094-063-Q1-K1-F11
cccacgcgtccgccacgcgtccggtttctggtggaggatccaacttcagagcaattcatgaggcctccaaaaggggatcacttcatggagatgttcttgtgttggtcacaaataaaagtgattgtggaggtgcggagtatgcaagaaataatggtatcccagttatactgtaccatatatcaaaggatgaatctaatccaagtgaccttgttgatacactaaggaaatttgaggttgattttattcttttagctggatacctcaaacttataccagtggaattgatcccagcttacaaaagatctatattcaacattcattcattaattttttcaacttt

SEQ ID NO: 13848 - DNA, 462 bp, Glycine max
  unsure at all n locations
  Clone ID: LIB3094-063-Q1-K1-H5
cggacgcgtgggcggacgcgtgggctttccaagtacctgatgagtgtttctcagatattgtaaattgtatatgcatagtcagaggattcatgcatgactcagactgtctaaagaaggggtatagttctttggaagctgtactgttatgtgttcctgttgattatcaatgtgtggatctgtctttgtacaaggatagtcaaatcgtcctgttactaaacaaagctactaatacatctgaaagtgctggagatggttgtatgatgattctgcaagtaagtgatctaccatatgtctctatgtcaagatctgcttgtatagatgtttggaggttaccagaactaaaggattctgtcgcttacctgaatattgnggatgagaaatctcgcaccattcgtcattctgtaattgctcccttggcatgtagtgcatcaagaggcgtggcttgtgtatttgctgcaacaa

SEQ ID NO: 13849 - DNA, 253 bp, Glycine max
  Clone ID: LIB3094-063-Q1-K1-D11
gttctagatcgcgatctagaactagccaattcactctgtttcttctcgccctatggcgcgggaggagtttgtaacatggctgctctaccaacggcagagcttagtgacgcaaatgcaacacatgtatcaagttgtgatgtgagggtgttgcatccagtgttcaaggtttacggtggggccaccgcgttctacggccccgttgtcaccgtgaaggtgtttgaagacaacttgttggtgagggagcttcttgaga

SEQ ID NO: 13850 - DNA, 277 bp, Glycine max
  Clone ID: LIB3094-063-Q1-K1-D12
ggcgcctctcaacattgagtgcttgatggatgagaaggatgtccggggcttcatcaagcgagatgagtttgagcaactaagtcttccaattttggaacgtgtgaagggacctctggagaaggcacttgctgaagcaggtcttaccggtgaaaatgtacacacagttgaagtggttggttcaagttctcgggtaccggccatttacaaaatattgacagagtttttcaaaaaggagcctaagcggacaatgaatgctaatgaatgtggtgctaagggc

SEQ ID NO: 13851 - DNA, 219 bp, Glycine max
  unsure at all n locations
  Clone ID: LIB3094-063-Q1-K1-D3
aaacaccctcgtcgaccacaccaaaattaatttcatataggagcatatgcgaacgaaangacgataaggtaggtagaaagcaacagctctgaattcatgttagcacacttgattaaaggctgtcggacactgtgacagatgcaatgggagcttatacctagcctgggcgtaaaaacaacgtaaaggctattcacatgtaaagattggagaccacacctt

SEQ ID NO: 13852 - DNA, 236 bp, Glycine max
  Clone ID: LIB3094-063-Q1-K1-D4
aaacacccttgtcgaccacaccaaaattaataacatacaaaagcataaaagcacatatagacatagaaaagggaaaatcaaacattgtgaagtcatatttgcacactagattaacggctgccgcacattgtgacagatgcgatgtgagctaataccatccatgtgcgtaaaaacaactcccgaactattcacactgcaggcccgttgacaacgcgaatgtgattgaagacaacctt

SEQ ID NO: 13853 - DNA, 222 bp, Glycine max
  Clone ID: LIB3094-063-Q1-K1-D5
aaacacccttgcataccacgccgagattgattgcatcagcgagcgtaagagcacctagggacggatgttagggtaacaagaacatcttgcaggcatgagagctcacctgtagcaaggctgttgcacggtgaacggaacggaatgctgctgaacgttgacggtgcgtatgaacatcatgcaagcgatggtcactacaagtgcgcaaaccacacctgttcaagt

SEQ ID NO: 13854 - DNA, 327 bp, Glycine max
  Clone ID: LIB3094-063-Q1-K1-D6
gttctagatcgcgatctagaactagccaattcactctttttcttctagccctctgccgtgggaggagtttgtaacatggctgctctaccaacggcggagcttagtgacgcaaatgcaacacatgtagcaagttgtgatgtgagggtgttgcatccagtgttcaaggtttacggtggggccaccgcgttctccggccccgttgtcaccgtgaaggtgtttgaagacaacgtgttggtgagggaacttcttgagacgaaaggcgaaggaagagtattggttgttgatggaggaggaagcttgaggtgtgcattggtggaaggaaatttg

SEQ ID NO: 13855 - DNA, 459 bp, Glycine max
  Clone ID: LIB3094-063-Q1-K1-D7
cgcaccagtttcaccgcacgaatatcttgttgtttggagcgatccgagaaaaactctgtaaacatgttggtttaccaggacctccttacaggtgatgagcttctctctgactccttccgttacaaggaaattgagaatggaatgctgtgggaagttgaggggaagtgggttgttaaaggagcagttgatgtagacattggtgcaaacccttctgctgagggtggaggagaagatgagggagttgatgatgcagctgttaaggttgttgacattgttgacacattcagactttaggagcaacccgcattcgataagaagcagtttggtaccttcatgaagaggtttatcaagaatttgactcccaagctcgatgcagagcaacaggaagttgttaagaagcacattgagggagcaactaaatacctggcttttaagattaaagatttccaattttttggt

SEQ ID NO: 13856 - DNA, 461 bp, Glycine max
  Clone ID: LIB3094-063-Q1-K1-D8
cccacgcgtccgggacagagctctgcatgatgcattgtcaattgtcaagagaactcttgaatcaaatacggtggtagctggtggaggtgctgttgaggcagcattatcagtttatttagagtaccttgctacaactttaggatctcgggagcagttggctatagcagaatttgctgagtctctgttaattattccaaaggtgctttctgttaatgctgctaaggatgccactgagctggtcgcaaaattacgggcctaccaccattcagcacaaactaaagccgataagaaacatttatcaagtatgggtttggacctttctgaaaggaaaatcagaaacaacttggaggctggagtcattgagcctgcaatgagcaaagtaaaaattattcagtttgcaactgaagctgccattactatccttcgaattgatgacatgatcaagcttatcaaggatgaaa

SEQ ID NO: 13857 - DNA, 216 bp, Glycine max
  Clone ID: LIB3094-063-Q1-K1-D9
atcgtatgtgccaggctctctgtgtacggttctaactctaccgctctgaatacgtgagctggctgataacgaactgtcattaaagagcatatggaagctcatgtagcgagcattgaacatcatatacatgatgcttgcatactatgcactgctactgcagataccatcactgacagatatacgctgtgcagattgctggggcgacaaggcattgca

SEQ ID NO: 13858 - DNA, 292 bp, Glycine max
  Clone ID: LIB3094-063-Q1-K1-E10
atcactcgtgctattcaatctataatcggtttctattctataccaatcttagctgcgtattgttaattccaaattactgtaaaaacatcataccaaagccagacgttcgttgagtctatatttataaaatgtttcactctactctatcagccattataacattttctactacttctatcttacttctatgtgcttatcattgctacaagtgattaatattcattgttaaactttcttgataatactccattggtttagctttaatttcatcattttctagtctttgtttatt

SEQ ID NO: 13859 - DNA, 376 bp, Glycine max
  Clone ID: LIB3094-063-Q1-K1-E11
cccacgcgtccgatttattctataattggtgcctatgttataccaatcttagttgcgaaatttcaattgaaaattactgtgaaaacaagtgccaaagccagaggtttgttgagtctttttttatagttttttttactctactctagagccattctaagtttctcttcgagtcctagcttgcttctatgtccttttcattgctttaattgttgaataatccttgaaaaattgtcttgttaaaactccattggtttagctttcatttcatttttttttagtctttggttattgcttgtctctttgtttccttgtttgtgagttgccacatagggaattggaaaggaggattggtgccatcccttggagaatttgagtc

SEQ ID NO: 13860 - DNA, 381 bp, Glycine max
  Clone ID: LIB3094-063-Q1-K1-E3
caaccctaacgcgtgcagagcagagagagactcagtcatggggcgaagacccgtgaggtgtgataggcacattaagatcaaaccataccccaagtcacggctttgccgtggtgttcctgatcccaagatcaggatttacgatgttggtatgaagaataagggtgtcgatgaatttcctttctgtgtccatctagttagttgggagaaggaaaacgtttctagtgaggccctggaagcttgctcgattgcttgcaacatgtacatggccgaatttgctggaaaggatgctttccaattgagagtcaaggtgcacccattgcatggtcttaggatcaacaagatgctttcgtgtgccggagctgataggcttcaaactggaat

SEQ ID NO: 13861 - DNA, 456 bp, Glycine max
  Clone ID: LIB3094-063-Q1-K1-E7
cccacgcgtccgcccacgcgtccggtgattgaagctagttagaacaagatgttgcagctactctacactgcgattttctccgaaatgcttttgattctcacgctcgtcttcaaaaccccactgagaaaactcgtcatcgtttccctcgatagtgtgaagcgcggtcgcggtcccgtggtggtttccaccgtgggcgccacattgatggtggttctcgcttcgagcctctacagcatggccaagatccagcaacgcaccctcgaggccggcatagtcaaccccaccgaccaagtcctcatgtccaagcacatgctcgaagcttctctcatggggtttctgctggtcctctctctgatgattgatagattgcaccattacataagagagcttcggtcactcaggaagaccatggaagctattaagaaacaaagccgaagttttgaagatggtaaaaat

SEQ ID NO: 13862 - DNA, 263 bp, Glycine max
  Clone ID: LIB3094-063-Q1-K1-E8
gaatgataaggtatatgaacaatccttaacagatacttctacaagatgttctattttttcatagaaaaaaattcgctcaaaaaaaacgcgaaaatattttaatcgtaacttagaggatttgttacgtagaaaaagaaagatagattcatattcccatacatataaattatataggaacaaaaaaaatcttggattactttttgaaaaaaaagtagaaatccatttttttggagtaaaaatactattccaattataataataag

SEQ ID NO: 13863 - DNA, 328 bp, Glycine max
  Clone ID: LIB3094-063-Q1-K1-E9
attgctgctgtttgcctattggtgtactttggggtctctaccctgctggatgcctgatctagcgatggccaaaaatcagatgaagagcagaaggaggcagaactagcagtttctgaattttctggaaatggtgctgggatactatctgctgctagcacagttgccagtacttttctcttagtttttgttgctgaatggggcgacaagtcatttttctccacaattgcccttgcagcagcttcttctccccttggagtcatagctggagcactggctggtcatgggtgtgcaactttgctaagctgacttggggggtctttaactggga

SEQ ID NO: 13864 - DNA, 331 bp, Glycine max
  Clone ID: LIB3094-063-Q1-K1-F10
atcactcgtgcgagtcattctatatttggtgttctatgttataccaatcttagctgcgtaaggtcaattgaaaattactgataaaacacgtgccagagccagacgttcgttgagtctatttttatagtatgtttcactctactctatagccattctaagattctcttctagttctatcttgcttctatgtgcttaacattgctataattgttgaataatccttgtaaaatttgcttgataaaactctattggtttagctatcatttcatcactgtttagtcattgggtattgattgtctttgtgtgtccttgtttgtgagttgtcacatat

SEQ ID NO: 13865 - DNA, 383 bp, Glycine max
  Clone ID: LIB3094-063-Q1-K1-D10
gtcatatgctccaagtgcactggttagggttctaagtctggtgcttcgattaagggtgctggttgtcaaggaactggtatgaaggtttctataagacatcttggcccgtccatgattcagcatatgcagcatgcttgcaatgaatgcaagggtactggagaaaccatcaacgacagatatcgctgcccacagtgcaagggagaaaaggttgtgcaggagaaaaaagtccttgaagttattgtggaaaagggaatgcataacgggcagaagattacattccctggcgaatctgattaagctccagacacatttactggggattattgctttgtcctttaacaaaaggaacatcccaaatttaaaaaaaaggcttaaaatctttt

SEQ ID NO: 13866 - DNA, 190 bp, Glycine max
  Clone ID: LIB3094-063-Q1-K1-A9
cgcgtccgcccacgcatccgtcaagcattgcatccctctttatctgtagtttgttttgtgcttgatataggagatctgccaaatcaagatgggttttaagatcatagtgtgcgttttgcatcagtggctaatttctatgctgctatgatcttggcactcattgccatttacatacttcatacagtggtaa

SEQ ID NO: 13867 - DNA, 174 bp, Glycine max
  Clone ID: LIB3094-063-Q1-K1-B1
cccacgcgtccgtcaagcattgcatacctctttatttgaagtgtgttgtgtgttttagatggatgatttgccgaatcatgaggtgatttaagatcatagtgtgtgttttgcaacaatggctaacatctctgctgctatgatcttggcactctttgccatttccatacttcaaac

SEQ ID NO: 13868 - DNA, 341 bp, Glycine max
  Clone ID: LIB3094-063-Q1-K1-B10
attgctgctgtttgcctatcggtgtactttggtgtctctaccctgctggatgcctgatctagcgatggccaaaaatcagatgaagagcataaggaggcagaactagcagtcatctgaattttctggaaatggtgctgggatactatctgctgctagcacagttgccagtacttttctattagtttttgttgctgaatggggcgacaagtcattcttctccacaattgcccttgcagcatcttcttctccccttggagtcatagctggagcactggctggtcatggtgatgcaactttgctagctgtacttgacggttctatacttgtgacgtatttgtcag

SEQ ID NO: 13869 - DNA, 220 bp, Glycine max
  Clone ID: LIB3094-063-Q1-K1-B12
ggcgcatatcaacattgagtgcttgatggattatacggatgtccgtggctttatgaagcgagatgagtttgagcaactaatgctttcaattctggaacgtttgaagggacctatgcagaacgcacttgctgaagcaagtcttaccggtgaaaatgtacacacagttgatgcggttggttcacgttctcgtgtaccgtccattaacacaatattgacagag

SEQ ID NO: 13870 - DNA, 428 bp, Glycine max
  Clone ID: LIB3094-063-Q1-K1-B2
cccacgcgtccggaaaagggaagtaacttatgtgaataatatgaagggcggtcaagaaatctcaaaaacaccgtcctcttctaagagaacactaagtcagggttcagttgatatatatgctgctcagtgcaaaaattgcttgaaatggagagagattgatacacaggaagagtttgaagagattagaagtaaagttgctgaggaaccttttctttgcagcagaaaggctaatagttcctgtgatgaacctggtgatattaaatatgattcctctcggacatgggtgattgacaagcctaacctcccaaagactccacaaggttttaagaggagcttggtgcttagaaaagattactccaaattggacgcttactacatcacacctgcaggcaaaaaactgagaacccgcaatgagattgctgcgtttc

SEQ ID NO: 13871 - DNA, 450 bp, Glycine max
  Clone ID: LIB3094-063-Q1-K1-B3
cccacgcgtccgtcaagcattgcatccctcttgatttgtagtttgttttgtgctttagataaaagttctgccaaatcaagaggggttttaagatcatagtgtgtgttttgcaacaatggctaagttctttgctgctatgatcttggcactctttgccatttccatacttcaaacagtggtaatggctgctaatgaacaaggaggccacttgtatgacaacaagagcaaatatggaagtggaagtgtcaagagttaccaatgcccatcacaatgctcgaggagatgtagccagacccaataccacaagccctgcatgtttttctgtcagaagtgctgcaggacatgcctgtgtgtgcccccggggtattatggtaataaagctgtgtgcccttgctacaacaactggaagaccaaagaaggaggacccaaatgcccttgagcttcaacttg

SEQ ID NO: 13872 - DNA, 416 bp, Glycine max
  Clone ID: LIB3094-063-Q1-K1-B4
aaactcaagatggccctctgtattggattttcactgcggataaacaatggtgcattaggagtgggggtatgataccttggaaacttcacgtcaccgggaggctctttcatagtggattagctcataaagctataaatgcgctagagctagccatggatgctctaaaggaaatccagttgcgattttactcagacttcccacctcatgctcaggaacaggtttatgggtttgcaacccctttaaccctgaagccaacccaatggagtattccaggaggtggaatcaatcaaattgcaggggaatgtacaatttcaagagatgtcagattaactccattctacaatgtaaaggatgttatgaaaaagctgcaagaatacgtggacgatattaatgagagtgcacagaagctagaatct

SEQ ID NO: 13873 - DNA, 175 bp, Glycine max
  unsure at all n locations
  Clone ID: LIB3094-063-Q1-K1-B6
tcgcccacgcgtccggaaaagggacgtaacttatttgttaatatgnaggcgtcataaactgaaggcaccgtcccttctaagagacactagtcagggtcaagtgatatatatgctgctcaaggcaaaaattgcttgaaatggagagaagattgattccaccggaatgagttttgaa

SEQ ID NO: 13874 - DNA, 178 bp, Glycine max
  Clone ID: LIB3094-063-Q1-K1-B9
gtcatatgctccaagtgctctggtttcggttttaactctgatgcttcgattacggtgactggctgtcatcgaactggcattaaggtgtctataagacatcttggcccgtccatgattcatcatatgcatcatgcttgcaatcaatgcattggtactgcagaaaccatcaacgacagat

SEQ ID NO: 13875 - DNA, 171 bp, Glycine max
  Clone ID: LIB3094-063-Q1-K1-C1
cccaggcgtccggaaaagggaagtaactgattttgttgatatgaagggcgtggtggtaaagggtggggcaccgtcctatgctgagaggacactaatgcagggtagaggtgagatatatgctgcgcagtgcataaattgcttgaaatggttagagattgactcacaggaaga

SEQ ID NO: 13876 - DNA, 276 bp, Glycine max
  Clone ID: LIB3094-063-Q1-K1-C10
gtcatatgctccaagtgcactggtaagggttctaagtctggtgcttcgatgaagtgtgctggttgtcaaggaactggtatgaaggtttctataagacatcttggcccgtccatgattcagcagatgcagcatgcttgcaatgaatgcaagggtactggagaaaccatcaacgacagagatcgctgcccacagtgcaagggagaaaaggttgtgcaagaaaaaaaagtccttgaagttatttgggaaaaaggaatgcagaacgggcagaagattaca

SEQ ID NO: 13877 - DNA, 245 bp, Glycine max
  unsure at all n locations
  Clone ID: LIB3094-063-Q1-K1-C11
gttctagatcgcgatctagaactagccaattcactctttttcttctcgccctctgccgtgggaggagtttgtaacatggctgctctaccaacggcggagcttagtgacgcanatgcaacacatgtagcaagttgtgatgtgagggtgttgcatccagtgttcaaggtttacggtggggccaccgcgttctccggccccgttgtcaccgtgaaggtgtttgaagacaacgtgttggtgagggagct

SEQ ID NO: 13878 - DNA, 87 bp, Glycine max
  Clone ID: LIB3094-063-Q1-K1-C12
gcggtcgtatatcaccatctatagctttacggttcacactgttgctcgtcgctctatgacgctggatgagtttgaacaaggactttt

SEQ ID NO: 13879 - DNA, 194 bp, Glycine max
  Clone ID: LIB3094-063-Q1-K1-C3
aaaaagcgttggcgaccacaccaaaactaattgcattgaaaagcatagaagtcgcatagagtggtgggacaggcaaaataaaacattttgaaatcatattggcacacttgagtaacggctgctgaccattgtgacggatgcatgttgtgcttataccttacttgcgacgaagaacaactgccgaactattcaca

SEQ ID NO: 13880 - DNA, 463 bp, Glycine max
  unsure at all n locations
  Clone ID: LIB3094-063-Q1-K1-C4
aaacacccttgtcgaccacaccaaaattaaaaacataaaaaagcataaaagcacaaaaagacataggaaagggaaaataaaacattttgaagtcatatttgcacacttgattaaaggctgtcgtcccttgtgacggatgcgtggggtgctaataccttccctgtgcgtaaaaacaactcccgaactattcacacttaaagttcgtagaccacaccttttcaattttcccgacgctttcctcaaataaaagttggtggcgactccgcgcattttcctttcatggaagacgcacttgtgagtcccgcatcgccctcccgtcaaagggtangttgcgacagtacttggccttccgccgaagggtaggttccttaattgaattaactaataacaaaagtgaaactaaggctaaaataaactcacaaatcaagctttggccataaaaatcacttaaaaaccattttga

SEQ ID NO: 13881 - DNA, 225 bp, Glycine max
  unsure at all n locations
  Clone ID: LIB3094-063-Q1-K1-C5
aaacgcccttgtcgaccacacctaaatttatttcatatataagcattttttcacaatgtggggtgaaatatggataatagttcattttgaagtcatattttctcacttgattaaaggctgncgtcccttgtgacggatgcgttgtgtgctgataccttccctgtgcgtaaaaacatctttctatctattcatacttaaatgtcgtataccacaccgtgtcaattt

SEQ ID NO: 13882 - DNA, 438 bp, Glycine max
  Clone ID: LIB3094-063-Q1-K1-C7
gttggtgcacactcctcatcagccatgtatctgcattcatctcagtatccctgtcagcgccctggaatgccgtttatacatcatgaacatgttcaccaaccctttgcacagtctcatcagcccccaccagatgcaagttttggattggcccggccccggtgaggggcatgggccatgcctgcacccaatcagccagtggtataagataagatcatgggctgctgcagctccaaatttcttttagctgattggagtgcaggcatataggccgagtttggctggaatggattggcttatatttgaaatatcagcccaccagcattgatctatcccttcaatctcggctttgcaaggatgcttcctgcatcttccaccagtccgtgactgtgtccctagtagacatttgaattttttgaggagcttttagagcacatatac

SEQ ID NO: 13883 - DNA, 448 bp, Glycine max
  unsure at all n locations
  Clone ID: LIB3094-063-Q1-K1-C9
attgctgctgtttgcctattggtgtactttggggtctctaccctgctggatgcctcatctagcgatggccaaaaatcagatgaagagcagaaggaggcagaactagcagtttctgaattttctggaaatggtgctgggatactatctgctgctagcacagttgccagtacttttctcttagtttttgttgctgaatggggcgacaagtcatttttctccacaattgcccttgcagcagcttcttctccccttggagtcatagctggagcactggctggtcatggtgttgcaactttgctagctgtacttgggggttctttacttgggacgtatttgtcagagaaggttattgcctacatcggaggtgttctctttctcgtctttgccgcaataaccttatttgaaaatgtgcaatangggttaaaagaaatgcaatataatcttcgtg

SEQ ID NO: 13884 - DNA, 438 bp, Glycine max
  Clone ID: LIB3094-063-Q1-K1-A6
cgggccgaccgacgcgtgcgtaaactcaaggatggccctctgtattggattgacacggcggataaacaaccgtgcgttgggactggtggtatgataccttggaaacttcacgtcaccgggaggctctttcatagtggattagctcataaagctataaatgcgctagagctagccatggatgctctaaaggaaatccagttgcgattttactcagacttcccacctcatcctcaggaacaggtttatgggtttgcaaccccttcaaccctgaagccaacccaatggagttatccaggaggtggaatcaatcaaattccaggggaatgtacaatttcaggagatgtcagattaactccattctacaatgtaaaggatgttatgaaaaagctgcaagaatacgtggacgatattaatgagagtgcacagaagctagaatct

SEQ ID NO: 13885 - DNA, 250 bp, Glycine max
  Clone ID: LIB3094-062-Q1-K1-F9
ttcctaatatttctttgttaagaatcatctaatttcaaccccgtatccactattaacatatttaccaaattctacccaattacattttaatcttataaccttcttaacccactttatttccttatctgtaaatttttaattaattatacaacaaattctttaaaaataaattattttctcttctgaactactacttatttatccattaatccaacttcaattattttcttaatatttcaataatatctct

SEQ ID NO: 13886 - DNA, 169 bp, Glycine max
  Clone ID: LIB3094-062-Q1-K1-G4
tcattatatattgactcattttactatacatcaaaaaatttcctaaatgagcaagatattttacaaaatcttttcatctattaaataacttccaattactcccacattttgagatcttctgcaatataccacttcctgtttcaatttcaaaatcacactatttatacaa

SEQ ID NO: 13887 - DNA, 195 bp, Glycine max
  Clone ID: LIB3094-062-Q1-K1-G5
accagcgcatccgataatcgatggattcatttatactgacagcttgaaatgtgctgggggtgcaagatattccacatgtgctggggatctatgaactcactgccaattactcccacatttctagtttctatgctagaaggaacttgctgctctaatccatgatgctcactatctctacaaatgatgtctgcgaca

SEQ ID NO: 13888 - DNA, 375 bp, Glycine max
  Clone ID: LIB3094-062-Q1-K1-G7
cccagcgcgtccgagaaggcctgggcttagttgataagcataactgggtgaggaagaaagagagagagtgaagaagatggcgtcgagcggagcggtaccgttttggagggcggcggggatgacgtacataacatactcaaacatatgcgcgaatctgctcaggaattgcctcaaggaaccctacaaggccgaatccctctctcgtgagaagctccattttgttctctccaaatgggtcgacgccaagcctgaaaaacctactattcgttcagacaccccaaagcagtgatctggaatagtttgaagctataaatgcataaaatctttgagatctggaagttcattgcattttgaacccttctgtgaaggttaaat

SEQ ID NO: 13889 - DNA, 171 bp, Glycine max
  Clone ID: LIB3094-062-Q1-K1-G8
actcgtccgcccgcgcgtccgataaggcctgcgcttagttgataagcataactgggtgaggaagagaaggtgagattgaagaagatggcgtccagcggagcgttaccgttttggagggcgactgtgattacgtacataacatactctaacatatgcgcgaaatctctcaag

SEQ ID NO: 13890 - DNA, 335 bp, Glycine max
  Clone ID: LIB3094-062-Q1-K1-H1
tccaggcgttcgagaaggcctgggcttaggtgataagcataactgggtgaggaagaaagaggcagagtgaagaagatggcgtggagcggagcggtaccgttttggagggcggcggggatgacgtacataacatactcaaacatatgcgcgaatctgctcaagaattgcctcaaggaaccctacaaggccgaatccctctctcgtgagaagctccattttgttctctccaaatgggtcgacgccaagcctgaaaaacctactattcgttcagacaccccagagcagtgatctggaatagttggaagctataaatgcataaatttttgagatcttgg

SEQ ID NO: 13891 - DNA, 290 bp, Glycine max
  Clone ID: LIB3094-062-Q1-K1-H10
cccacgcgtccggacagaagagagcgtccttgtcgcaaccctaataagaagaaccacagctgcaagcgagtgacatccaccagccatgggtcgtatgcacagccgcggtaagggtatatcctcttctgctttgccctacaaaaggacaccccctagctggctcaagatctcttcgcaagatgtggaagaaaatatctgcaagtttgcgaagaagggtttgaccccgtctcagattggtgtcattcttcgagattctcacggtattgctcaagtcaacagcgtcactggca

SEQ ID NO: 13892 - DNA, 284 bp, Glycine max
  Clone ID: LIB3094-062-Q1-K1-H11
ggctacttttgattgcttgatgaaaacctatggattcctgacaccagaattctggaaggagactcgcttctccaaatctccattccaagagtacacagatctactggcaaaaccaacaggaaagactctaatcttggaggaggaaagggtggatgcttgatttgctagttttgctttatggatgttttaggaactttattactttacatactttgttggttctgtgctttacttttggttttgatagacggtatgtctctgtatgcattttgattgtttccaag

SEQ ID NO: 13893 - DNA, 287 bp, Glycine max
  Clone ID: LIB3094-062-Q1-K1-H12
ggctgaagcacaactacgagaccagcatggcaaccctgtcccactcaccgatcaatacggggatccggttatcttaactgacgagcgcggtaatcccgtccaactcactggtgtcgctaccaccgctaccggcacagcaggttctgggtttgggtcctatggtaccggtgcttacggtggtggtgcaagtgcaaccaccgttgcagatcttttggcaacccaaccaaggagtggcagggaggctagagagcttcgtcgttcctccagttcaagctctagctcgtctg

SEQ ID NO: 13894 - DNA, 237 bp, Glycine max
  Clone ID: LIB3094-062-Q1-K1-H2
gacccacccgaacgctagcacatattcattcacctacctttcctacccttctctctctcgccgcctcttgttcggtctctctcatactccttctctgaaccaaaccaatccattattcatttgaatcttcttatacatcccaaaaaaacccaataaaaaaggtgtctttagaaggttctgtttgatgggtaagataggaatcaagctattccattaataaaggaactgtcttttttc

SEQ ID NO: 13895 - DNA, 335 bp, Glycine max
  unsure at all n locations
  Clone ID: LIB3094-062-Q1-K1-H3
gaacgcgaacacagattcattcacctaccgttcctacccttctctctctcgccgcctcttgttcgggctctcgcatgctccttctctgaaccaaaccaatccattattcatttgaatcttcttatacatcccaaaaaaacccaataaaaaaggggtctttagaaggttctggttgatgggtaggagaggaatcaagctattcgatgaagaaaggaacggtctattttcaatttccaaatttgggtctcaatggggtggtgttagaggtgatggtgttcaagaccctgtgattntggctgtgtatgcaagcattagtcaaatgggaaatggggttt

SEQ ID NO: 13896 - DNA, 143 bp, Glycine max
  Clone ID: LIB3094-062-Q1-K1-H4
cccacacatactcattcacctaccttacatacccttctctctctcgcatgctcttgttagggctctctcatactccttctctcaaccaaaccaatccattattcatttgaatcttcttatacatcccaaaaaaacccattaaa

SEQ ID NO: 13897 - DNA, 165 bp, Glycine max
  Clone ID: LIB3094-062-Q1-K1-H5
cgcgtccgcccgggcatcacacaatcactcaactaacgtacccaccctaatctctataatctagggtaagatatacattacacatgctctgtctctaaaccaaaccaattcaaataacaatcgaatattccgatacaaacaaaccaaacccaatacaataaaatt

SEQ ID NO: 13898 - DNA, 138 bp, Glycine max
  Clone ID: LIB3094-062-Q1-K1-H6
acgcgtccgcccgcgcgtccgacaacacgtccattaatatagactctacgctaccgatgatcgagtcaagaagcatttgagagcggatcatgcacgcagcgaccactatgctatacagaaacagcgatagagataaaa

SEQ ID NO: 13899 - DNA, 287 bp, Glycine max
  Clone ID: LIB3094-062-Q1-K1-H7
cttggctctgaaaaaacatgttgagggttgtatgctagaaggctctcttcttctctctcatgttcttctccgttgcggcccaatcacgccgcttccgcttttctctctcgaaacgacgtcgtcgtcgatgaccgcagatctgctccttcctcccatccccttcttcccttcagaggttatgctactgaatccctgatccacacaaaagaaaacagcattactcctgagattccgccaactgttactgctgttaagaaccctacttctaagattgtctatgatgatca

SEQ ID NO: 13900 - DNA, 262 bp, Glycine max
  Clone ID: LIB3094-062-Q1-K1-H8
cgcgtccgcccacgcgtccgcccacgcgtccggaagattggaatataccttaccggatggtggaatcaagaagcatttgggattgcatagtgcgggtggtgacgaagatggaagacaaagagagtgagagagagaaaaatcttcgctttatgtcaatggcacgaagcaggggtttttacagaagtgagcaacgacgccagatatgaaaaaagtgagtttatttggggtcatatttgtaaaaagtggttttggaattataccc

SEQ ID NO: 13901 - DNA, 282 bp, Glycine max
  Clone ID: LIB3094-062-Q1-K1-H9
gcaggctaccttactgtctatccctaatctttgatattcatctgtgcaccaagttccattgtattagagaaaacgctgactatatactccattgtggctggatataaggcgggtccaaccaatggcaacattacactggaaaacccctcaatggatattgctagtcttaacaatgctaaaaccagctatactgcctgggacaattaccagcaccatatctatgaaccaggccttaatgatatggtaaaacagtatcactgcatgaaccttttttatagcact

SEQ ID NO: 13902 - DNA, 141 bp, Glycine max
  Clone ID: LIB3094-063-Q1-K1-A10
attgctgctgtttgcctattggtgtactttggggtctctaccctgctggatgcctgatctagcgatggccaaaaatcagatgaagagcagaaggaggcagacttagcagtttctgaattttctgaaaatggtgctgggata

SEQ ID NO: 13903 - DNA, 188 bp, Glycine max
  Clone ID: LIB3094-063-Q1-K1-A12
attgcgtgctgtttgcctattggtgtactttgttgtctctaccctgctggatgccgcatctggcgatggccaaaaatcagatgaagagcataaggaggcagaactagcagtttctgaattttctggaaatggtgctgggatactatctgctgctagcacagttgccagtacttttctcttaatttttg

SEQ ID NO: 13904 - DNA, 426 bp, Glycine max
  Clone ID: LIB3094-063-Q1-K1-A3
gtcttctcacttcgtcaaaaccaaccaaacccctccccaattctcaagccaaccatgtcttgcttcaagagcaagtaccaagatgaactcattgccaatgctgcttacattggcaccccagggaagggtatccttgctgctgatgagtcaactggtacaattggcaagcgattggccagcattaatgtcgagaatgttgaagcaaataggcgtgctcttcgtgaactcctattcaccacacctggtgcttttgagtgcctcagtggtgtgatcttgtttgaggaaaccctataccaaaagacagcttcaggaaaacccttcgtagagttgatgaaggaaggaggagttctccctggtatcaaagttgacaagggcacagtagagcttgcaggaactaatggggagactactactcaagggttggat

SEQ ID NO: 13905 - DNA, 383 bp, Glycine max
  Clone ID: LIB3094-063-Q1-K1-A5
cttttctctgaaaaaacatgttgagggttgcagctagaaggctctcttcttctctctcatcttcttctccgttgcggcccaatcacgccgcttccgcttttctctctcgaaacgacgtcgtcgtcgatgaccgcagatctgctccttcctcccatccccttcttcccttcagaggttatgctactgaatccctgatccacacaaaagaaaacagcattactcctgagattccgccaactgttactgctgttaagaaccctacttctaagattgtctatgatgatcacaaccatgaaagatttcccccaggtgacccaagcaagagggcatttgcctacttcgtacttacaggtggtaggtttgcttatgcctctgtggtccgt

SEQ ID NO: 13906 - DNA, 125 bp, Glycine max
  Clone ID: LIB3094-062-Q1-K1-C5
cccacgcatcctatcacacatccattcacacttcccctcataaacaaaaccattgatataagtaacttacataaaccatctactcactattacattccatacatgatcatatcacacaatatcct

SEQ ID NO: 13907 - DNA, 272 bp, Glycine max
  Clone ID: LIB3094-062-Q1-K1-C7
cgcgtccgcccaggcgtccgcccacgcgtccggttggttttgaggggaatgttggctggctcgaggctgttcacaaaggaggttcacagtggatggaactataaggcttcggaccaggcttcattcccctcaaaagtacttccttcatttgtttatacttcaaacttcaaaccacaagatcataggtgtagctacgtacctagctagcttctctctttattttgaaggatctctctacacacacgtcatgtgtgtggttgagaacttgagat

SEQ ID NO: 13908 - DNA, 287 bp, Glycine max
  Clone ID: LIB3094-062-Q1-K1-D10
caattttacccttaggagaaacgaaaatgacatgacatcctctgatctgatctgtgtggcggagtcgcccttgacgacgactcagcgaagctgaactgagagtggagcttcgtccacagggaaacgcataagcatatcggaattccggggaagaaagaaagaaacataatgtgttcttcggagactatcaacatcgctgcgagtacacagaaacttgatgttgataatcgaattgctctccgcttctactacagaatcgccgataatatcctcaaacaggctgatat

SEQ ID NO: 13909 - DNA, 159 bp, Glycine max
  Clone ID: LIB3094-062-Q1-K1-D11
acacttctctcctccgtaccaacttcactgcatatcattttatagaaaactctctctacatcagattctatcatcacctccttacatctcatcaacttctctcttactccttcccttacactcaaattcacaatcatattctcttccaattttataatc

SEQ ID NO: 13910 - DNA, 286 bp, Glycine max
  Clone ID: LIB3094-062-Q1-K1-D12
gcttgctcctcttacgagcctttccttggattccattgattcggtgggtgcggatgcagcggaaccgagctagaccctgatcggcgtcggcacaccgccggagaacaagatgattgtctgcgtcgccgtcgtcggtcaccagaacaatccgctgtacatacagagcttcacggaggccgatgatgctctcaagctccaccacatcgtccattgctcgctcgatgtggtcgactagcgagtgaacaatcctaaaaagtctgggccgatgcttaatgagacgtttttg

SEQ ID NO: 13911 - DNA, 207 bp, Glycine max
  Clone ID: LIB3094-062-Q1-K1-D2
ggcgggcgtgctccgaaccaatcacactgctgaattttcagagacaactatgcacacatgggtaagagtctatacctccttacacgtgataagcttctctcgcactacatccgttacaatgaaattgatattgcaatgctgtgggaagttgagggcaagtgcgttgtctaggtagcagttgatgttgacattggttcaaacccttct

SEQ ID NO: 13912 - DNA, 204 bp, Glycine max
  Clone ID: LIB3094-062-Q1-K1-D4
aaatacaaaacaaatcataaaagcaagatttttctaatcaacaatattgcatacaccatctatgttaaaaattataaaaaaaccatacaatataattaaaaactacaattacactcaatttattaattcacaccacaaatcatcaaaccaaatactacactaacaattttatctcttaatataaactaatttaaacaattacca

SEQ ID NO: 13913 - DNA, 186 bp, Glycine max
  Clone ID: LIB3094-062-Q1-K1-D6
acccacgcgtccgaaaaaaaaaaaaaaaaaaaaaaaaatttattataaaaaaaaaaaaaaaaaaaaataaagaaagaattaattataaaaaaaaaaaaaaaaaaaaaaattttttttttaaaaaaaaaaaaaaaaaaacaaaaaaaaaaaaaaaaaaaaaaaaccctccctttaaaaaaacccaaa

SEQ ID NO: 13914 - DNA, 202 bp, Glycine max
  unsure at all n locations
  Clone ID: LIB3094-062-Q1-K1-D8
cgcgtccgcccaggcgtccggactgcccaagatgtatttacaatgttacggtgcgggcaaaaaagcgcatgatctttctgatcaacaatggtggatacaccatcgaggttgaaattcatgatgggccgtacaatgtgattaagaactggaattacactgngttgattgatgcaatccacaatggtgaaaggaaatgctggac

SEQ ID NO: 13915 - DNA, 282 bp, Glycine max
  Clone ID: LIB3094-062-Q1-K1-D9
cccacgcgtccgcccacgcgtccgcccacgcgtgcgcagacgcgtgggcttcaacttggatggcgacgctaactaccctgattctgatcagattccttactttgaggatggtgattctgtgacatacaatcttgagaaggaggggatcattgagtgcttgaaaaggaatgtgggtggtgatttagatagtgaggcttcttctctgactgaatggatcccaaccaaagtgatggccaccacttggcttgctgatgcacttgagtatgaactggagctgggatg

SEQ ID NO: 13916 - DNA, 290 bp, Glycine max
  Clone ID: LIB3094-062-Q1-K1-E1
cccggcccgaccgacgcgtgcgctcggttaacttatggaactattgttgggatgtttaagaaaggagaaaacccgggggttagctaggcgtatcagcgagtggcattggaccaactccttaagatagctggtcttacagatgatgacttgttgattatgtcagatgttgacgagattccgagtgctcacactattaacctgttgaggtggtgtgacgacgtgccttcagtccttcatcttcagctgaagaactatctatactcctttgagtttctcatggatgatggcag

SEQ ID NO: 13917 - DNA, 266 bp, Glycine max
  Clone ID: LIB3094-062-Q1-K1-E2
gccacgcgtccgcccacgcgtccgacttacagccatgtccatggattctatggccacttcgatcggagtctcggtccccgtgctccgcttcctcctctgcttcgccgccaccgtgcccctcagcttcctctgccgcttcctcccccgcggcctacccaagcacctgtactcctccgtcgtcggcgtcgccctctactacctgtccttcggcttctgctccaacctgcacttcctcgtccccatgtaccttggctacgccttcatgc

SEQ ID NO: 13918 - DNA, 338 bp, Glycine max
  Clone ID: LIB3094-062-Q1-K1-E3
gctgaacgcagtaagcactaaggagtagcgtttattggctgatacttgcaccctcttaacgataagatgagacagagaaagggttgacggaaaggaaaaccaaatcaaacccaacccaccttgtccgatctgccaccaggtgtggttgttgtgatttgaatggaggcaattggacgtggccgtggcggtgctttaccgtctgcaccagtgaagcaatatctgcacgatttctcgaagctgtttcagtactatctggataaatacactccacattccacgtacacatggattgcgactcttgtgatagcaatcatctacgctttacgcgttgtttatgt

SEQ ID NO: 13919 - DNA, 275 bp, Glycine max
  Clone ID: LIB3094-062-Q1-K1-E4
cccgcgcgtccgaccacgcgtccgttcacttcttccggtcataatgaaaggttttgggttagcgggcttgcctttggcatttggtaactattggatgcctggtatgtggagatgccactgaatgctctaatgacaagcacttcatgctgagttggtgtcacgttattttctcttgggcatctatggccactaagattgaggaaaaaagtatgtggtagtagggtgcaccttacagttgtgacctcattggtggggggacttgaacaacggaattg

SEQ ID NO: 13920 - DNA, 359 bp, Glycine max
  unsure at all n locations
  Clone ID: LIB3094-062-Q1-K1-E5
ctcgatcccatcgccgtccgctttcggttaacntnntatggaactannttggtgggatgtgtttaagaaaagganngaaaacccgttgtgttagagggagngtcgtatcanngcgagtggcatttttggaccannactccttaagaaatagcnttggtattacccagatgatgaaacttgttgattatttgtcagaaatgttgacgagaattccgagtgcttcacactttattaacctcttgaggntggtgtgacgaacgtgccttcagtnccttcaatcttcagcttgaagaaaactatctatactcctttgagntttctcatggatgaaatggcagctggagaagcttctgttcaca

SEQ ID NO: 13921 - DNA, 192 bp, Glycine max
  Clone ID: LIB3094-062-Q1-K1-E6
ctcgggcatccgatcacgcgttcgctcacttgtccgatcataatgaaaggttttgggtagggggcttgcctttggcatttggtaactattgaatgcctggtatgtggagatgccactgaatcctttaatgacaagcacttcatgctgagtagttgacacgtcatactctcttgggcatctatggccactaag

SEQ ID NO: 13922 - DNA, 341 bp, Glycine max
  Clone ID: LIB3094-062-Q1-K1-E7
ctaggctaacgcgtgcagagcagagagagacgcagccatggggcgaagacccgcgaggtcgtagtaggcaaattaagaacaaaccataccccaagtcacggttatgccgtggtgttcctgatcccaagatcaggatttacgatgttggtatgaagaagaaaggtgttgatgaatttactttctgtgtccatctgactagttgcgagaaggaaaacgtttctagttaagcccttgaagctgctcgtattgcttgcaacaagtacatggccaaatttgctggaaaggatgcttttcacttgatagtcaaggttcacccattccatggtcttaagatcaacaag

SEQ ID NO: 13923 - DNA, 212 bp, Glycine max
  Clone ID: LIB3094-062-Q1-K1-E8
cccacgcgtccgcccacgcgtccgcccacgcgtccgttcataatgaaaggttttgagttagggggcttgcctttggcatttggtaactattggatgcctggtatgtggagatgccactgaatcctctaatgacaagcacttcatgctgaagttgtgtcacgttattttctcttgggcatctatggccaactagattgaagaaaaaagtatgt

SEQ ID NO: 13924 - DNA, 275 bp, Glycine max
  Clone ID: LIB3094-062-Q1-K1-E9
cacgtcgctgctccgtaccagtttcactgcatacatttgagagaaaactctgctaacatgtgagttagtatgaccttcttacaggtgatgagcttctctcggactccttccgttacactgaaattgacaatggaatgctgtgcgaagtttaggggaagcgtgctgttaaagcagcagttgatgttgacattggtgcaaacccttttgctgacggtgcagaagatgaaggaatctatgactcacctgctaaagttgttgacattgctgatacattc

SEQ ID NO: 13925 - DNA, 275 bp, Glycine max
  Clone ID: LIB3094-062-Q1-K1-F1
gaatacccggcccgaccgacgcgtacgcgtggataactcatgccgaactgttgcagttgtcctgacagctcgaaaactcgtggatcaggataatcttctacagagcctgcgcttccataaatccacttcacaatcgctcccacatttatacgattttcgctatatgccactttctcgttaaatttcagattcccgctgtatatactttctacgtagatgacgtatagatcagataaggaaatcgtatgcagttagatcaacttatctaatataca

SEQ ID NO: 13926 - DNA, 212 bp, Glycine max
  Clone ID: LIB3094-062-Q1-K1-F12
gctatctcctcttaccaacctttactgtctttccatttattcggtccatgcagatatctggaaaccgagctataacactaatctaatatcctaactcaccattaacattaatattgtcagaatcaacaacaaaggtcaccacatctatacgatccacatacacatactcatgcatgccaatgatactctcatctacaccacatctacattaa

SEQ ID NO: 13927 - DNA, 264 bp, Glycine max
  Clone ID: LIB3094-062-Q1-K1-C3
cccacgcgtgctgacagacgagagcactctatacataaccctgataacacgaaccacatgtgcaagcgagtgacattcaccacccatgattagcatgcactaggcctggtaacggtatatcctattctgctttgccctacataaggacacccgctagctagctcaagatctcttcaccagatgtggaagacaatatctgcaactttgctaataagggtttgaccccatctcagattgatgacattattcgagattctcacggca

SEQ ID NO: 13928 - DNA, 207 bp, Glycine max
  Clone ID: LIB3094-062-Q1-K1-F2
ggcctgcgcgtccgctcacgcgtccgttcacttttacgttcataatgaaaggttttagattagagtgcttgcctatggcatccggtaactatagcatgcctggtatgtggagatgccactgaatcctctaatgacaagcacttcatgctgagtttgtgacacgttattttctcttgggcatctatggccactaaaaatgacgaaaaa

SEQ ID NO: 13929 - DNA, 261 bp, Glycine max
  Clone ID: LIB3094-062-Q1-K1-F3
cactaacgagtagcctcaattttccgatacttgcaccctcttaacgataagattaaacacacaaagggcccaccgaaatgaaaaccaaatcaaacccaacccaccttgtacgatctgccaccatgagttcatgtactcatttgacatcaagcaacactatgtatcacatgcagttcttcacactatgctccacataatcaatacctacactatttctctaacctatttaatatctatctgtataaaaacactctcacattc

SEQ ID NO: 13930 - DNA, 131 bp, Glycine max
  Clone ID: LIB3094-062-Q1-K1-F4
gaccaacccattcaacaagctcatgctctaatgactcatttatatcgtacacaaacaactcactgtaaaggcaagatattttacacatactgtccatccattaaaacacttacaacaactctcacacatac

SEQ ID NO: 13931 - DNA, 299 bp, Glycine max
  Clone ID: LIB3094-062-Q1-K1-F5
attcaagaactcatgatagattgacgcatttatcctgacagcaaaaaatttggtggaggggcaagagaattgacaggtgctgtggatctattaaatcacttccaattactcccacattttgagtttttctgcaagaggccacttcctgtttcaatttcagatgcacactatttatacaatgtagtaggtgacatagaaatcagaaaaggagatgggatgcagttggatcaacttattcaagatacatctttgtccagtggttctaattatcatatacaacctttggacctcgatattct

SEQ ID NO: 13932 - DNA, 368 bp, Glycine max
  unsure at all n locations
  Clone ID: LIB3094-061-Q1-K1-H10
nttcttctaccttattttctttccctagtcaaggagattcatctctgcagcagggggttggagaaaagaaaaaatgctgaagatttgctgcattggggctggatatgtggggggtccaacaatggcagtcattgcactgaaatgcccctcaattgaagtggctgttgttgacatctctaaatccaggattgcagcatggaacagtgaccagctccctatctatgagccaggccttgatgatgtggtgaagcaatgtcgtggcaagaaccttttcttcagcactgatgttgagaaacatgtctatgaggccgacatagtgttcgtctccgtcaacaccccgacaaaaactcgtggttttggagcccgga

SEQ ID NO: 13933 - DNA, 404 bp, Glycine max
  Clone ID: LIB3094-061-Q1-K1-H11
acagcacagaatggggcgcaaagagaagcagaacgcgaaggcaatagatgaggaacacgacgtagtaaattttaacggcgcttcaacgccgtccctcgttttcagcagcgacgacgatgaagccaaccaagatctcagcctcaagatcgtcgaaaaggccatgcgaatgcgcgccgccaaacacgccccaaacgacgacgtttcttctccgttttcgcagaaatccgaactcgcagtgcccctaaacgacgtcgtttcggatttgcccagcgcaatcgctgattccgaagtgacggaaaagaagaaaacggccaagttgaagagggaggcggctggggatcaaagtgttgttatagcggaggagcaagagatggaggagacaagcaatgctacagagaatcacg

SEQ ID NO: 13934 - DNA, 427 bp, Glycine max
  Clone ID: LIB3094-061-Q1-K1-H7
cccacgcgtccgattgcattgacctggaaacaaaccttgcatcaataggagataaagatggtcttataaatgccaggaaattatatgaatctgcactcgcaacttatgaccaaaatgtcagcttgtggcaagattactatcgcatggagaccaagatgggaacatcagaaaaggctaatgctatctattggcgtgcaaggaaagtactcaaagatgctagtgaatttgtcactgccacagatatgtgataatatttctaaattacgaccatggctattggagttcaattttgaccacttcatttatttggtttttctacagaaatttcttttcgaccagtctagtctagactcaaatttgtttttccttcccaagaggtgaggaatagagcttcctccttttccccaaaaagctaattaactgtatt

SEQ ID NO: 13935 - DNA, 422 bp, Glycine max
  Clone ID: LIB3094-061-Q1-K1-H8
caccgcacgaatatcttgttgtttggagcgatccgagaaaaactctgtaaacatgttggtttaccaggacctccttacaggtgatgagcttctctctgactccttccgttacaaggaaattgagaatggaatgctgtgggaagttgaggggaagtgggttgttaaaggagcagttgatgtagacattggtgcaaacccttctgctgagggtggaggagaagatgagggagttgatgatgcagctgttaaggttgttgacattgttgacacattcagacttcaggagcaacccgcattcgataagaagcagtttgttaccttcatgaagaggtttatcaagaatttgactcccaagctcgatgcagagcaacaggagttgtttaagaagcacatcgagggagcaactaaatacctgctctcta

SEQ ID NO: 13936 - DNA, 441 bp, Glycine max
  Clone ID: LIB3094-061-Q1-K1-H9
cccacgcgtccgagaaggcctgggcttagttgataagcataactgggtgaggaagaaagaaggagagtgaagaagatggcgtcgagcggagcggtaccgttttggagggcggcggggatgacgtacataacatactcaaacatatgcgcgaatctgctcaggaattgcctcaaggaaccctacaaggccgaatccctctctcgtgagaagctccattttgttctctccaaatgggtcgacgccaagcctgaaaaacctactattcgttcagacaccccagagcagtgatctggaatagttggaagctataaatgcataaatctttgagatctggaagttcattgtcattttgaacctttctgtgatgtttaattcctttgtttttttctctccatgaaatggaacatgcactggattttgatttgcacggttaatcttgta

SEQ ID NO: 13937 - DNA, 320 bp, Glycine max
  Clone ID: LIB3094-062-Q1-K1-A1
cttttctactttgagtcttcttgattcttctttttctccttgaactcaaacatggcagatgagggtgttctgctagatttctggccaagtccatttgggatgagggtcaggattgcacttgctgaaaagggtatcaaatatgagtacaaagaagaggacttgaggaacaagagtcctcttctccttcaaatgaacctcgttcacaggaagattccggttctcatccacaatggcaaacccatttgtgaatccctcattgctgttcaatacattgaagaggtttggaatgacagaaatccctttgtgccctttgaccctta

SEQ ID NO: 13938 - DNA, 235 bp, Glycine max
  Clone ID: LIB3094-062-Q1-K1-A10
ggctagttttgattgcttgatgaaaacctatggattcctgacaccagaattctggaaggaggctcgcttctccaaatctccattccaagagtacacagatctactggcaaaaccaacaggaaagactctaatcttggaggaggaaagggtggatgcttgatttgctagttttgctttatggatgttttacgaactttattactttacatactttgatagttctgtgctttacttt

SEQ ID NO: 13939 - DNA, 285 bp, Glycine max
  unsure at all n locations
  Clone ID: LIB3094-062-Q1-K1-A11
ctttgcttcctcagaaacacatcctaatggttagcgcggagtggcgatcgtggcggcgagcgtggcggtttcggacgtggattcggcgggcgaggacgcggaggtgacaggngccgaggccggcgccgaggcccccgccgcgaggaagaggagaagtgggtcccagtgaccaaactgggccgcctggtgaaggagggaagaatccgaagccttgaacagatctacctccactcgctcccgatcaaggagcaccagatcatcgacacgctcgtgggtcccaccctt

SEQ ID NO: 13940 - DNA, 386 bp, Glycine max
  Clone ID: LIB3094-062-Q1-K1-A5
cttttctactttgagtcttcttgatccttctttttctccttgaactcaaacatggcagatgaggtggttctgctagatttctggccaagtccatttgggatgagggtcaggattgcacttgctgaaaagggtatcaaatatgagtacaaagaagaggacttgaggaacaagagtcctcttctcctccaaatgaacccggttcacaagaagattccggttctcatccacaatggcaaacccatttgtgaatccctcattgctgttcagtacattgaggaggtttggaatgacagaaatcccttgttgccttctgacccttaccagagagctcaggctagaatctgggctggatatgttgataagaagatatatgatctttggaagga

SEQ ID NO: 13941 - DNA, 302 bp, Glycine max
  unsure at all n locations
  Clone ID: LIB3094-062-Q1-K1-A6
cttggctactttgagtcttcttgatttttttgtttctccttgaactcaaacatgggggatgaggtggttctgctagatttctggccaagtccatttgggatgagggtcaggattgcacttgctgaaaagggtatcaaatatgagtacaaagaagaggacttgaggaacaagagtcctcttctnctccaaatgaacccggttcacaagaagattccggttctcatccacaatggcaaacccatttgggaatccctcattgctggtcaatacatttgaggaggttggaatgacagaaattccct

SEQ ID NO: 13942 - DNA, 265 bp, Glycine max
  Clone ID: LIB3094-062-Q1-K1-A7
gacccacgcgtccgctcgggtactctaaatcgtctggattcattttattctccttgcactctgacatggaacgtgaggtagttatgataatagtctgtccaagtccatttctgatgaggatcacgattgcactagctgcataacatatcaaatcttatgcccaagactactacttgatgaacaccagtaatcttatactgcacatgaaccttgttcactagaagattcactattctcatccacaatggcaaaaccatatgcgaat

SEQ ID NO: 13943 - DNA, 74 bp, Glycine max
  Clone ID: LIB3094-062-Q1-K1-A8
ccgggcggaccgcacgcgtccgcccgggcattctgcctcactgtgattatcatatcactcatcaagcacaaacg

SEQ ID NO: 13944 - DNA, 287 bp, Glycine max
  Clone ID: LIB3094-062-Q1-K1-B10
gaggagatatatgtacctaaacgaagagtatttgaaagagaatccaaacatgtgtgcttacgtggcaccttctttggatgctaggcaagacatggtggtggtagaggtaccaaagctagggaaagaggctgcagtaaaggccataaaggagtggggccagccaaagtcaaagattacccacttgatcttctgcaccaccagtggtgttgacatgcctggtgctgattaccaactgaccaaacaattgggccttcgcccctatgtgaagaggtatatgatgtaccaac

SEQ ID NO: 13945 - DNA, 285 bp, Glycine max
  Clone ID: LIB3094-062-Q1-K1-B12
ggctgaagcacaactacgagaccagcatggtaaccctgtcccactcaccgatcaatacggtgatccggttatcttaactgacgagcgcggtaatcccgtccaactcactggtgtcgctaccaccgctaccggcacagcaggttctgggtttgggtcctatggtaccggtgcttacggtggtggtgcaagtgcaaccaccgttgcagatcttttggcaacccaaccaaggagtggcagggaggctagagagcttcgtcgttcctccagttcaagctctagctcgtc

SEQ ID NO: 13946 - DNA, 296 bp, Glycine max
  unsure at all n locations
  Clone ID: LIB3094-062-Q1-K1-B2
ccgggccgaccgacgcgtccgnccgggcgttctgccgcactgtgattagcttatcacccagcatgcacaatcgtctgtacagagaagcaagaccattggaggagggtcttgccgaggccattgacgatggcaagattggaccaggggatgaccccaagattcgctccaagatcttgtcagaagagtttggttgggacaaggatctcgccaagaaaatctggtgctatggccctgagacccttggacccaacatggtggctgatatgtgtaagggagtccagtatttgaatgaaatc

SEQ ID NO: 13947 - DNA, 127 bp, Glycine max
  Clone ID: LIB3094-062-Q1-K1-B5
tcgcccactcctgctatcgttgatccttttttttaccggcgtgcatacgatcccgtcgagacagggtctctatgacgaaactaacttatctgacatgcgtatgacgaattaattgcattcaagcccc

SEQ ID NO: 13948 - DNA, 246 bp, Glycine max
  Clone ID: LIB3094-062-Q1-K1-B6
tccacgcgttcgggcgcactgtgattagcatatcaccctgcatgcacaatcgtctgtacatggaagcaagaccattggaggaggcgtctggccgatgccattgacgatggcaagattggaccacgggatgaccccaagattcgcttcaagatcttgtcagaagagtttggttgcgacaaggatctcgccaagaaaatctagtgctttggccctgagacccttggacccaacatggtgtgtgatatg

SEQ ID NO: 13949 - DNA, 188 bp, Glycine max
  Clone ID: LIB3094-062-Q1-K1-B7
tgccgatgccattagacgatggcaagattgaaccacgggatgaccccaagattcgctccaagatctagtcagaagagtttggttagcacaatgatctcgacaaaaaaatctactgctctggccctgaaacccttgaacccaacatggtgggagatatatttcaaggaatacagtatctgaatcaaatc

SEQ ID NO: 13950 - DNA, 284 bp, Glycine max
  Clone ID: LIB3094-062-Q1-K1-B9
caacaaagaggtagtcattgaacaaaaaaattatggagcaatctaggcgatagcaactgatgggcacaggaagtagtggacgcgtggcacgatagcagcatgtcccgtcgacgggacaagaaaatttggaccgttgaaggctccttggttgcggcgccgttgaccggagccataggttacgtgattcgatgattgcatctaatcatcaatcatcagttaattaatgcaaaattctcgaatcagttgtaaccatgttggtgctggcgctaacttcctttgcaccc

SEQ ID NO: 13951 - DNA, 279 bp, Glycine max
  Clone ID: LIB3094-062-Q1-K1-C11
ctttctgcttcgtcgttcacttcacaatcctataacagtctaaaaaagaataataataaacggcgaagttaccaagattctgttgagaagaagagcaatgccgtccaactattcctattcgccgatgaacatcgtacatggcgacgctggttacatactccaagacgttcctcacttcaccgactacattccaaatcttactacgtatcccaatccgcttcgatccaatcctgcttactcccttgataagcagtatttcgcgcacatggacgacactgt

SEQ ID NO: 13952 - DNA, 171 bp, Glycine max
  Clone ID: LIB3094-062-Q1-K1-C2
cgcgtccctgctccgtaccagtttcactgcatatttttgagagaaaactctgcaaacattgtgggggatcatgacctccttacaagtgattaacttcttttcggacttcttcccgtaccaataaatttaaaattgaaattctttggaaatttaagggaaattggtttttta

SEQ ID NO: 13953 - DNA, 456 bp, Glycine max
  Clone ID: LIB3094-061-Q1-K1-G6
ctctctgctcctagggtttctccttcgagtgagggaaatggctcccaaaccgcctagtacgggtctgtttgttggactgaacaagggtcacgtcgtcaccaagaaggaattgcccccacgcccctcagatcgtaaggggaaaacaagcaagagggtgcactttgtgaggaacctcataagagaggttgctggttttgcaccctatgaaaagcgtataactgagttgctgaaggttgggaaggataagagggcactgaaggttgcaaagagaaagcttggaacccacaaacgtgcaaagaagaagcgtgaggaaatgtccagtgttctcaggaagatgagggctggtggtgctggagacaagaagaaataagtcttatttatttactcttttccagattcactagatggacctgtgtattgatggacgaactttcatatttttgctttggttcaatt

SEQ ID NO: 13954 - DNA, 450 bp, Glycine max
  unsure at all n locations
  Clone ID: LIB3094-061-Q1-K1-D4
gttgccgggctctaccgtggtttcaacatctcatgtgttggaatcatcgtgtatcgtggtctgtactttggattgtatgattctgttaaaccagttgtcctcacagggtcattgcaggatagcttttttgccagctttgcccttggatggctcatcaccaatggtgcaggtcttgcatcatacccaatagacactgttagaagaagaatgatgatgacctctggtgaagctgtcaagtacaagagctccttggatgcattcacacagatcctcaagaatgagggtgccaagtccttgttcaagggtgccggtgccaacatcctccgtgccgttgccggtgctggtgtgcttgctggttatgacaagttgcaggttcttgtgttcggcaagaagtacggctctggtggggcttaagttctaatgctgagtcagtactattattntgtttta

SEQ ID NO: 13955 - DNA, 272 bp, Glycine max
  Clone ID: LIB3094-061-Q1-K1-D5
ttcctttttttatacttttccttttccacttttcaattatctttgtgtgattgttcagtccttcaacctctatcctccccctccaagtggggaatctactgctaatagcaagaatgagtctccttcttttccgtcgggggcatcacctttgttcttggttttaccccattcctatttcactcttttatattattattttgctttccatttcatccaccttttcttatgcgctcaacaagctcatggagcacaccaaagaggcttttaagggg

SEQ ID NO: 13956 - DNA, 449 bp, Glycine max
  Clone ID: LIB3094-061-Q1-K1-E11
cccactcgtccgtacacatatgcattctttctctcactccattccatttccgggatttgcatttgcatacatacacttacctctctggtctctagctatagcacaagatatgggtagcagttattttggagaacctaactttggaaatgaaagagcaagttgttcttcttcgtcaagaaaagggaagaagagccacaactcagacaagccaaagcaaccacagagaggtcttggagttgctcaattggagaaaatcagattacatggctatcacccttctctgcacgctccttacccttctaatttttccaacgaagatccaagagtgcaaatagcatattcatcggtgccatcatcttctttttcttactcatcatcatacgcagcttcctatggattccaacccaacatcatgatgggcctatccgaatatcaaaaaacaaacatca

SEQ ID NO: 13957 - DNA, 455 bp, Glycine max
  unsure at all n locations
  Clone ID: LIB3094-061-Q1-K1-E2
caactttctctctctaaaaaacccatcagagcatgaggagagagaaacttccctgcccttccatttccctctcgattccttcgcctttgctttcgatcctttgctagaagagaaccttattcctctctgtctctcccccttcaaattcccttccttttcttccatattcactctctcttcctaaccgcccgatgcactttggttttgcaaactaattcgttggctaaattactccgattgtgaactgtttaaattccaggttctgttggaatatccaaaatggcaaaaggtagcaggggaagacacaggattgcttctcgtcaattcagagtgactccatacccactggcttcttgcaaaagggacatttgtgaggacatgtgccaaaagaaatgttctaaggctntggaaaagaaagagttggaagatgttacgtgttctgtgtgcatggaata

SEQ ID NO: 13958 - DNA, 404 bp, Glycine max
  Clone ID: LIB3094-061-Q1-K1-E8
cagaacagggactcactctcttcgcagcggcactctcggtggctttcatcttctcgggttgtcaagatgtacacatcgaggaagaaaattcacaaggataaggatgctgagccaactgaatttgaggaatcagttggacaggcattgtttgatctagaaaataccaacaatgagctgaaaagtgatctgaaagatttatacataaactcagctgtccaaattgatgtttctggcaaccgaaaggctgtggttatccatgtcccctacagactaaggaaaggattccggaagattcatgtcaggcttgtgagagaacttgagaaaaagtttagtggaaaagatgtaatcttgattgccaccaggaggatagtaaggccaccaaagaaaggttctgctgttcagcg

SEQ ID NO: 13959 - DNA, 343 bp, Glycine max
  Clone ID: LIB3094-061-Q1-K1-E9
cataacagggactcactctcttcgcagcttttctctcggtggctttcatcttctggggtggtcaagatgtacacatcgaggaacaaaattcacaaggataaggatgctgagccaactgaatttgaggaatcagttggacaggcattgtttgatctagaaaataccaacaatgagctgaaaagtgatctgaaagatttatacataaactcagctgtccaaattgatgtttctggcaaccgaaaggctgtggttatccatgtcccctacagactaatgaaaggattccggaagattcatgtcaggcttgtgagagaacttgagaaaaagtttattggaaaagatg

SEQ ID NO: 13960 - DNA, 414 bp, Glycine max
  Clone ID: LIB3094-061-Q1-K1-F12
acgaacagatcaatgtggagtacaatgtttcgtacgtttatcatgcgatgtttgcctacttcgatagggacaatgttgcgctcaagggtcttgccaagtttttcaaggagtcaagcgaggaggaaagggagcatgctgagaaattgatggaatatcagaacaagcgaggtggaaaggtgaagttacaatctatagtgatgcctcttactgagtttgaccatgaggaaaagggagatgcgctatatgcaatggaacttgccctgtcgttggagaagctgacaaatgaaaagctgcttaacttgcacagtgttgcctcaaagaacaatgatgtgcaattggcagattttattgaaagcgagtttttgggtgaacaggtggaagccataaaaaaaatctctgaatacgttgctcaac

SEQ ID NO: 13961 - DNA, 429 bp, Glycine max
  unsure at all n locations
  Clone ID: LIB3094-061-Q1-K1-F2
gggatttggcaagagatttagattagcatggaatcaagaatggagtgtagtagtcatcaacaacctcagtcactgtaaatttttttggttattatttatctctctcaaatgcatatgcaatcgcaatcaattgcaaagcatttcggatccagagggagagaccctttgtgacagcctgtatcctctccatcgtctgatagattcttcattttttttccatttctcgcggcaagatctcacactctgcacctagggttagggttttggttcttgcggcatggcgacttcttcgagttcttcgagctggcgcgagggcatgtcctccgacaacataaagggactgtgcctcgctctctcttctagcttcttcatcggcgccagcttcattgtcaaaaagaaaggtttgagaaggccngtgctagtggaatc

SEQ ID NO: 13962 - DNA, 453 bp, Glycine max
  Clone ID: LIB3094-061-Q1-K1-F6
ttttgattttctggatccgtgtttttgagatgagtgtatgaatttaccgattgtttttcagatgaggttatcgttgaggcatgctttggtgtttgtgttaatcggggcgttgtggaacttgcaaagggcagagggtatccgatttgtgatagacagagacgagtgtttctcccatgatgtgaagtacgagggtgacactgttcatgtctctttcgttgttattaaggctgattctccctggcattacggcgacgaaggtgtcgatctcgtggtaaagggaccttctggcgagcaaattcaagaatttcgggacaagaccagtgagaagtttgactttgtggctcacaaatccggggtccataaattctgcttcaccaacaagtctccttatcatgaaactgtcgattttgatgtacatgttggtcacttctcttactttgagcaacatgcaaa

SEQ ID NO: 13963 - DNA, 429 bp, Glycine max
  Clone ID: LIB3094-061-Q1-K1-F7
cccacgcgtccgcccacgcgtccgctccagagagaagaagaaacttaatcgatcatcacttcacttcactaatacatcatggcagacgagacccagaacaagtatgagagctctgaggttgaggtccaggatcgtggtgtttttgactttctcggtaagaaaaaggatgaagaagacaagcctcatcctcaggaggaggtcatcgccaccgagtttcaaaaagtcactgtctcagaccaaggagagaacaagcacagcctcttagaaaagcttcaccgatctgacagcagctctagctcttcaagtgaggaggaaggagaagatggagagaaaaggaagaagaagaagaaggaaaagaaagggctgaaagagaagatcgaggagaaaatagagggtgatcatcatcatcacaaggatgaggacacaagt

SEQ ID NO: 13964 - DNA, 447 bp, Glycine max
  Clone ID: LIB3094-061-Q1-K1-G10
cgacccctccgtcacccccttccttcaggagctccaggccaggatcctccgccacgaccagcagactctggccgatgccaaccccaaccctgacgacgccatcaagattctccccttcgagttcgtagcccttgaggcctgtctggaggccgcttgtagcgtcttggaaaacgaggctaagactttggagcaggaggctcatccggccttggacaagctcacctccaagatcagtactctcaatttggaacgcgttcgtcaaattaagagccgattagtcgccatcactggccgtgttcagaaggtcagggacgaattggagcacctgctcgacgacgacgatgatatggctgagatgtatctctctgaaaagctagcccaacaagatgacttggaaaaggcggaggatacctcttctgccgacgatgttgatgatcacattgacag

SEQ ID NO: 13965 - DNA, 441 bp, Glycine max
  Clone ID: LIB3094-061-Q1-K1-G11
gcttcctcctcttacgagcctttcctttcagtccattgattcggtgggtgcgggtgcagcgaaaccgagctagaccctgatcggcgtcggcacaccgccggagaacaagatgattgtctgcgtcgccgtcgtcggtcaccagaacaatccgctgtacatacagagcttcacggaggccgatgatgctctcaagctccaccacatcgtccattgctcgctcgatgtggtcgacgagcgagtgaacaatcctaaaaagtctgggccgatgcttaatgagacgtttttgggactgctttatcctattgaaaactacaaagtatatggatatctgactaatacgaaggtgaaatttatcttggtgaccacggatctggatgttaaagatgcggatgtaaaggaatttttcaggaagttccatgccgcatatgtagatgcagtttc

SEQ ID NO: 13966 - DNA, 377 bp, Glycine max
  Clone ID: LIB3094-061-Q1-K1-G3
cacacacacacaaaacagaacacaacacatacacatacacatgttgttgatgagtggaggcaacaaaaaacacagatccatcacacacatgaacaattgatctttgtcctttgtatataatttgattctaatttttggcactaagagagccactcaaggctctgggatgtactatacgccattcggggttctgattttcggcggagagaaggttcaagagacccagtgggagaaggagcgataagtaattcatattccattatctccatttctagatccttccattaactctcataggatcctccaatttcaattcaatcccttccgatatttcggagagagcatggctggtaaggttttgaaagaaacaaagtcgc

SEQ ID NO: 13967 - DNA, 275 bp, Glycine max
  Clone ID: LIB3094-061-Q1-K1-G4
caagttttctctttgagtcaagcgaggctgatagggagcatgcacataaattgatggatatatcatacattctaagtggaaagtaattttttattctttgtattgccttttactgatcataatctttttgatttagggagatgcgctatatgcaatggaacttgccctgtcgttggagaagctgacaaatgaaaagctgcttaacttgcacagttgtgccttaaagaactatgatgtgcaattggcagattttattgaaagcgagttttttattg

SEQ ID NO: 13968 - DNA, 459 bp, Glycine max
  unsure at all n locations
  Clone ID: LIB3094-061-Q1-K1-D3
aaacacccttgtcgaccacaccaaaattaaaaacataaaaaagcataaaagcacaaaaagacataaaaaagggaaaataaaacattttgaagtcatatttgcacacttgattaaaggctgtcgtcccttgtgacggatgcgtggggtgctaataccttccctgtgcgtaaaaacaactcccgaactattcacacttaaagttcgtagaccacaccttttcaattttcccgacgctttcctcaaataaaagttggtggcgactccgcgcattttcctttcatggaagacgcacttgtgagtcccgcatcgccctcccgtcaaagggtaggttgcgacagtacttgccctcccgccgaagggtaggttccttaattgaattaactaataacaaaagtgaaactaaggctaaaatanactcacanatcaagncttgtccataaaatcacttaaaaaccattt

SEQ ID NO: 13969 - DNA, 420 bp, Glycine max
  Clone ID: LIB3094-060-Q1-K1-H8
ccccgacgcacgcgtccggtaaaagtttggtgtgaggtgtgagtgttctgcacgcaccgaatcaacaataatttcgtgaggcagcgttgtaaaagaaacacattagactaggcagataactatggctgtacattctgattcggcttcatccgagaagaaatcaagcaatggagtgaatgagttgctgacttttaatgctgagaacatgcaaagcaacatgaaaattatctattacagccgaacatttttatctataattggtggagttgttgctggtattttgggatttacaggcttgaaaggatttgtgttttacttacttctcatggcatttacttcacttgggctcgtggccaaagcaaaagttttcacccacacatactttgaactctgtaatcgaatgctacttgatggcttttc

SEQ ID NO: 13970 - DNA, 446 bp, Glycine max
  Clone ID: LIB3094-060-Q1-K1-H9
aaacacccttgtcgaccacaccaaaattaaaaacataaaaaagcataaaagcacaaaaagacataaaaaagggaaaataaaacattttgaagtcatatttgcacacttgattaaaggctgtcgtcccttgtgacggatgcgtggggtgctaataccttccctgtgcgtaaaaacaactcccgaactattcacacttaaagttcgtagaccacaccttttcaattttcccgacgctttcctcaaataaaagttggtggcgactccgcgcattttcctttcatggaagacgcacttgtgagtcccgcatcgccctcccgtcaaagggtaggttgcgacagtacttgccctcccgccgaagggtaggttccttaattgaattaactaataacaaaagtgaaactaaggctaaaataaactcacaaatcaagctttgtccataaaaatca

SEQ ID NO: 13971 - DNA, 146 bp, Glycine max
  Clone ID: LIB3094-061-Q1-K1-A1
gtgaggaccatcttatctagttttgtggttcttctattatcaatttcgttgcccgctttacttccaattgaaaaaactttcaaccattgtctcacacaacactctcaaactccaaaccaattttcctcatcaatctacactttcac

SEQ ID NO: 13972 - DNA, 392 bp, Glycine max
  Clone ID: LIB3094-061-Q1-K1-A7
gaaccatgcagtctgtgaggtccatcttagcaagttttgtggttcttctattatcaatttcattcaccgcttcacttccaattgaagaagctttcaaccattgtctcacacaacactctcaaactccaaaccaattttcctcatcaatctacacttccaccaatggttccttcacttctatccttgagtccacagctcaaaatctaaggtacttgttgccctcagtgccaaaacctgatttcatattcaccccacttgatgactctcaagtccaagcagcagtgatttgtgcaaaaaagcttggaattcacatgagagtgcgcagtggaggacatgactatgaagggctctcttatgtttcccttattgagaagccattcatgatcctaaac

SEQ ID NO: 13973 - DNA, 322 bp, Glycine max
  Clone ID: LIB3094-061-Q1-K1-B3
ttcgacgacgcgtgcgcccacgcttccgtccactcgtccgctcactttatcttctcttcccttcatctcctcttcagagtaaggggcttctctatatctctcgtctaatcatgtccaacaccatctacacactgctacaatctcaatcgtacacattgagaaatgtgtttgagtaatgggaaaactgaagcaccattgccaagttgtaatgggggaggtgctgaaatcgataacaatgatatgaagcccttcaagatcttcgtagggtatgaccctctgcgaagatcttgcctatgaggaatgtttccactccatctttaaa
